United States Patent Application Publication US 2026/0191920 A1 - sequence listing, part 2

SEQ ID NO: 1764 - DNA, 1427 bp, Laceyella sediminis
  source 1..1427: mol_type = unassigned DNA
gatgaacgctggcggcatgcctaatacatgcaagtcgtgcgggggtcttcggaccctagcggcgaacgggtgagtaacacgtgggcaacctgcccgtaagactgggataactccgggaaaccggtgctaataccagataatctctttctccgcatggagaaagagtaaaaggtttcggccacttacggatgggcccgcggcgcattagctagttggtgaggtaacggctcaccaaggcgacgatgcgtagccgacctgagagggtgatcggccacactgggactgagacacggcccagactcctacgggaggcagcagtagggaattttccgcaatgggcgaaagcctgacggagcaatgccgcgtgtgtgatgacggccttcgggttgtaaaactctgttctgaaggaagaagttctgacggtacttcaggagaaagccccggctaactacgtgccagcagccgcggtaatacgtagggggcgagcgttatccggaattattgggcgtaaagcgcgcgcaggcggtcatttaagtcaggtgtgaaaggctgcggctcaaccgcagagcggcacctgaaactggatgacttgagtgcaggagaggagagcggaattcccggtgtagcggtggaatgcgtagagatcgggaggaacaccagtggcgaaggcggctctctggcctgtttctgacgctgaggcgcgaaagcgtggggagcaaacaggattagataccctggtagtccacgccgtaaacgatgagtgctaggtgtcggggggtcctaccctcggtgccgaaggtaacccattaagcactccgcctggggagtacggccgcaaggctgaaactcaaaggaattgacgggggcccgcacaagcggtggagcatgtggtttaattcgaagcaacgcgaagaaccttaccagggcttgacatcccgctgatcgctccagagatggagcttcccttcggggcagcggtgacaggtggtgcatggttgtcgtcagctcgtgtcgtgagatgttgggttcagtcccgcaacgagcgcaacccttatcgctagttgccagcattcagttgggcactctagcgagacagccggtgaaagccggaggaaggtggggatgacgtcaaatcatcatgccccttatgtcctgggctacacacgtgctacaatggccggtacaatgggtcgccaacccgcgagggggagctaatcccacaaaaccggtctcagttcggatcgcaggctgcaactcgcctgcgtgaagccggaatcgctagtaatcgcggatcagcatgccgcggtgaatacgttcccgggccttgtacacaccgcccgtcacaccacgagagtttgcaacacccgaagtcggtgaggtaacctttacggaaccagccgccgaaggtggggcagatgattggggtg

SEQ ID NO: 1765 - DNA, 1453 bp, Lachnospira multipara
  source 1..1453: mol_type = unassigned DNA
gatgaacgctggcggcgtgcttaacacatgcaagtcgaacgaagcaacwtatcacgattccttcgggatgacgatttgttgactgagtggcggacgggtgagtaacgcgtgggtaacctgccttatacagggggatagcagctggaaacggctgataataccgcataagcgcacggcatcgcatgatgcagtgtgaaaaactccggtggtataagatggacccgcgtctgattagctagttggtgaggtaacggcccaccaaggcaacgatcagtagccgacctgagagggtgaccggccacattgggactgagacacggcccagactcctacgggaggcagcagtggggaatattgcacaatggaggaaactctgatgcagcgacgccgcgtgagcgaagaagtatttcggtatgtaaagctctatcagcagggaagataatgacggtacctgactaagaagctccggctaaatacgtgccagcagccgcggtaatacgtatggagcaagcgttatccggatttactgggtgtaaagggagtgtaggtggcaaagcaagtcagtagtgaaaatccggggctcaacctcggaactgctattgaaactgtttagctagagtgcaggagaggtaagtggaattcctagtgtagcggtgaaatgcgtagatattaggaggaacaccagtggcgaaggcggcttactggactgtaactgacactgaggctcgaaagcgtggggagcaaacaggattagataccctggtagtccacgccgtaaacgatgaatactaggtgttgggtctcataagagattcggtgccgcagctaacgcaataagtattccacctggggagtacgttcgcaagaatgaaactcaaaggaattgacggggacccgcacaagcggtggagcatgtggtttaattcgaagcaacgcgaagaaccttacctagtcttgacatcccgatgaccragtatgtaatgtactctttcttcggaacatcggtgacaggtggtgcatggttgtcgtcagctcgtgtcgtgagatgttgggttaagtcccgcaacgagcgcaacccctatttctagtagccagcagttcggctgggcactctagagagactgccagggataacctggaggaaggtggggatgacgtcaaatcatcatgccccttatgactagggctacacacgtgctacaatggcgtaaacaaagtgaagcgagagtgtgagcttaagcaaatcacaaaaataacgtctcagttcggattgtagtctgcaactcgactacatgaagctggaatcgctagtaatcgcagatcagaatgctgcggtgaatacgttcccgggtcttgtacacaccgcccgtcacaccatgggagtcgaaaatgcccgaagtcggtgacctaacgtaagaaggagccgccgaaggcaggtttgataactggggtg

SEQ ID NO: 1766 - DNA, 1460 bp, unidentified
  source 1..1460: mol_type = unassigned DNA; note = Lacimicrobium alkaliphilum
attgaacgctggcggcaggcctaacacatgcaagtcgagcggtaacatttctagcttgctagaagatgacgagcggcggacgggtgagtaatacttggggatctgcctgatggcgggggacaaccactggaaacggtggctaataccgcataatgtcttcggaccaaagtatgggaccttcgggccatacaccatcagaggaacccaagcgagattagctagtaggtgaggtaagagctcacctaggcgacgatctctagctgttctgagaggaagatcagccacactgggactgagacacggcccagactcctacgggaggcagcagtggggaatattggacaatgggggcaaccctgatccagccatgccgcgtgtgtgaagaaggccttcgggttgtaaagcactttcagtggtgaggaaggggagtgcgttaatagcgtacttcattgacgttagccacagaagaagcaccggctaactccgtgccagcagccgcggtaatacggagggtgcgagcgttaatcggaattactgggcgtaaagcgcacgcaggcggcttgttaagccagatgtgaaagccccgggctcaacctgggagggtcatttggaactggcaagctagagtcttggagaggggagtggaattccaggtgtagcggtgaaatgcgtagagatctggaggaacatcagtggcgaaggcggctccctggccaaagactgacgctcatgtgcgaaagtgtgggtagcgaacaggattagataccctggtagtccacaccgtaaacgctgtctactagctgtgtgcgatttaatttgtgcgtagcgaagctaacgcgctaagtagaccgcctggggagtacggccgcaaggttaaaactcaaatgaattgacgggggcccgcacaagcggtggagcatgtggtttaattcgatgcaacgcgaagaaccttacctactcttgacatactgggaatttagcagagatgctttagtgccttcgggaatccagatacaggtgctgcatggctgtcgtcagctcgtgtcgtgagatgttgggttaagtcccgcaacgagcgcaacccttgtccttagttgccagcattaggttgggcactctaaggagactgccggtgacaaaccggaggaaggtggggacgacgtcaagtcatcatggcccttacgagtagggctacacacgtgctacaatggttggtacagagggaagcgagaccgcgaggtggagcggatcccttaaagccaatcgtagtccggatcggagtctgcaactcgactccgtgaagtcggaatcgctagtaatcgcaggtcagcatactgcggtgaatacgttcccgggccttgtacacaccgcccgtcacaccatgggagtgggatgcaaaagaagtggttagcttaaccttcgggagggcgatcaccactttgtgtttcatgactggggtg

SEQ ID NO: 1767 - DNA, 1481 bp, Lactobacillus aquaticus
  source 1..1481: mol_type = unassigned DNA
gacgaacgctggcggcgtgcctaatacatgcaagtcgtacgcaaaactttcaccgagtgcttgcactcaccgaaagttttgagtggcgaacgggtgagtaacacgtgggtaacctgcccagaagaaggggataacacttggaaacaggtgctaataccgtataacaacaaagaccgcatggtctttgtttaaaagatggttctgctatcacttctggatggacccgcggcgtattagctagttggtgaggtaatggctcaccaaggcaatgatacgtagccgaactgagaggttgatcggccacattgggactgagacacggcccaaactcctacgggaggcagcagtagggaatcttccacaatggacgaaagtctgatggagcaacgccgcgtgagtgaagaaggttttcggatcgtaaaactctgttgttagagaagaacgtgtgtgagagtaactgttcatgcagtgacggtatctaaccagaaagccacggctaactacgtgccagcagccgcggtaatacgtaggtggcaagcgttgtccggatttattgggcgtaaagggaacgcaggcggttttttaagtctgatgtgaaagccttcggcttaaccgaagtcatgcattggaaactggaagacttgagtgcagaagaggagagtggaactccatgtgtagcggtgaaatgcgtagatatatggaagaacaccagtggcgaaagcggctctctggtctgtaactgacgctgaggttcgaaagcatgggtagcaaacaggattagataccctggtagtccatgccgtaaacgatgaatgctaagtgttggagggtttccgcccttcagtgctgcagctaacgcattaagcattccgcctggggagtacgaccgcaaggttgaaactcaaaggaattgacgggggcccgcacaagcggtggagcatgtggtttaattcgaagcaacgcgaagaaccttaccaggtcttgacatcttctgccaatctgagagatcagatgttcccttcggggacagaatgacaggtggtgcatggttgtcgtcagctcgtgtcgtgagatgttgggttaagtcccgcaacgagcgcaacccttattactagttgccagcatttagttgggcactctagtgagactgccggtgacaaaccggaggaaggtggggatgacgtcaaatcatcatgccccttatgacctgggctacacacgtgctacaatggacagtacaacgagtcgcaagaccgcgaggtcaagctaatctcttaaagctgttctcagttcggattgtaggctgcaactcgcctacatgaagtcggaatcgctagtaatcgcggatcagcatgccgcggtgaatacgttcccgggccttgtacacaccgcccgtcacaccatgagagtttgtaacacccaaagccggtgaggtaaccttttggagccagccgtctaaggtgggacagatgattggggtg

SEQ ID NO: 1768 - DNA, 1481 bp, Lactobacillus capillatus
  source 1..1481: mol_type = unassigned DNA
gacgaacgctggcggcgtgcctaatacatgcaagtcgtacgcaaatctttcaccgaatgcttgcattcatcgaaagatttgagtggcgaacgggtgagtaacacgtgggtaacctgcccagaagaaggggataacacttggaaacaggtgctaataccgtataacaacaaaaaccgcctggtttttgtttaaaagatggttctgctatcacttctggatggacccgcggcgtattagctagttggtgaggtaatggctcaccaaggcaatgatacgtagccgaactgagaggttgatcggccacattgggactgagacacggcccaaactcctacgggaggcagcagtagggaatcttccacaatggacgaaagtctgatggagcaacgccgcgtgagtgaagaaggttttcggatcgtaaaactctgttgttagagaagaacgtgtgtgagagtaactgttcatgcagtgacggtatctaaccagaaagccacggctaactacgtgccagcagccgcggtaatacgtaggtggcaagcgttgtccggatttattgggcgtaaagggaacgcaggcggttttttaagtctgatgtgaaagccttcggcttaaccgaagtcgtgcattggaaactggaagacttgagtgcagaagaggagagtggaactccatgtgtagcggtgaaatgcgtagatatatggaagaacaccagtggcgaaagcggctctctggtctgtaactgacgctgaggttcgaaagcatgggtagcaaacaggattagataccctggtagtccatgccgtaaacgatgaatgctaagtgttggagggtttccgcccttcagtgctgcagttaacgcattaagcattccgcctggggagtacgatcgcaagattgaaactcaaaggaattgacgggggcccgcacaagcggtggagcatgtggtttaattcgaagcaacgcgaagaaccttaccaggtcttgacatcttctgccaatctaagagattagatgttcccttcggggacagaatgacaggtggtgcatggttgtcgtcagctcgtgtcgtgagatgttgggttaagtcccgcaacgagcgcaacccttattactagttgccagcattaagttgggcactctagtgagactgccggtgacaaaccggaggaaggtggggatgacgtcaaatcatcatgccccttatgacctgggctacacacgtgctacaatggacagtacaacgagtcgcaagaccgcgaggtcaagctaatctcttaaaactgttctcagttcggattgtaggctgcaactcgcctacatgaagtcggaatcgctagtaatcgcggatcagcatgccgcggtgaatacgttcccgggccttgtacacaccgcccgtcacaccatgagagtttgtaacacccaaagccggtgaggtaaccttttggagccagccgtctaaggtgggacagatgattggggtg

SEQ ID NO: 1769 - DNA, 1406 bp, Lactobacillus hordei
  source 1..1406: mol_type = unassigned DNA
gatgcttgcattcacgaaagttttgagtggcgaacgggtgagtaacacgtgggtaacctgcccagaagagggggataacacttggaaacaggtgctaataccgcataataacaaaaaccgcatggtttttgtttgaaagatggttttgctatcacttctggatggacccgcggcgtattagctagttggtaaggtaaaggcttaccaaggcaatgatacgtagccgaactgagaggttgatcggccacattgggactgagacacggcccaaactcctacgggaggcagcagtagggaatcttccacaatggacgaaagtctgatggagcaacgccgcgtgagtgaagaaggttttcggatcgtaaaactctgttgttagagaagaacgtgtgtgagagtaactgctcatgcagtgacggtatctaaccagaaagccacggctaactacgtgccagcagccgcggtaatacgtaggtggcaagcgttgtccggatttattgggcgtaaagggaacgcaggcggttttttaagtctgatgtgaaagccttcggcttaaccgaagtcatgcattggaaactgaaagacttgagtgcagaagaggagagtggaactccatgtgtagcggtgaaatgcgtagatatatggaagaacaccagtggcgaaagcggctctctggtctgtaactgacgctgaggttcgaaagtgtgggtagcaaacaggattagataccctggtagtccacaccgtaaacgatgaatgctaagtgttggagggtttccgcccttcggtgctgcagctaacgcattaagcattccgcctggggagtacgaccgcaaggttgaaactcaaaggaattgacgggggcccgcacaagcggtggagcatgtggtttaattcgaagcaacgcgaagaaccttaccaggtcttgacatcttctgacaacctaagagattaggtgttcccttcggggacagaatgacaggtggtgcatggttgtcgtcagctcgtgtcgtgagatgttgggttaagtcccgcaacgagcgcaacccttattactagttgccagcatttagttgggcactctagtgagactgccggtgacaaaccggaggaaggtggggatgacgtcaaatcatcatgccccttatgacctgggctacacacgtgctacaatggacggtacaacgagtcgcgaaaccgcgaggtttagctaatctcttaaagccgttctcagttcggattgtaggctgcaactcgcctacatgaagtcggaatcgctagtaatcgcggatcagcatgccgcggtgaatacgttcccgggccttgtacacaccgcccgtcacaccatgagagtttgtaacacccaaagccggtgaggtaaccatttatggagccagccgtctaag

SEQ ID NO: 1770 - DNA, 1481 bp, Lactobacillus sucicola
  source 1..1481: mol_type = unassigned DNA
gacgaacgctggcggcgtgcctaatacatgcaagtcgtacgcaaaactttctctgagtgttcgcactcgctgaaagatttgagtggcgaacgggtgagtaacacgtgggtaacctgcccagaagaaggggataacacttggaaacaggtgctaataccgtataacaacaaagaccgcatggtctttgtttaaaagatggttctgctatcacttctggatggacccgcggcgtattagctagttggtgaggtaatggctcaccaaggcaatgatacgtagccgaactgagaggttgatcggccacattgggactgagacacggcccaaactcctacgggaggcagcagtagggaatcttccacaatggacgaaagtctgatggagcaacgccgcgtgagtgaagaaggttttcggatcgtaaaactctgttgttagagaagaacgtgtgtgagagtaactgttcatgcagtgacggtatctaaccagaaagccacggctaactacgtgccagcagccgcggtaatacgtaggtggcaagcgttgtccggatttattgggcgtaaagggaacgcaggcggttttttaagtctgatgtgaaagccttcggcttaaccgaagtcgtgcattggaaactggaagacttgagtgcagaagaggagagtggaactccatgtgtagcggtgaaatgcgtagatatatggaagaacaccagtggcgaaagcggctctctggtctgtaactgacgctgaggttcgaaagcatgggtagcaaacaggattagataccctggtagtccatgccgtaaacgatgaatgctaagtgttggagggtttccgcccttcagtgctgcagctaacgcattaagcattccgcctggggagtacgatcgcaagattgaaactcaaaggaattgacgggggcccgcacaagcggtggagcatgtggtttaattcgaagcaacgcgaagaaccttaccaggtcttgacatcttctgccaatctgagagatcagatgttcccttcggggacagaatgacaggtggtgcatggttgtcgtcagctcgtgtcgtgagatgttgggttaagtcccgcaacgagcgcaacccttattactagttgccagcatttagttgggcactctagtgagactgccggtgacaaaccggaggaaggtggggatgacgtcaaatcatcatgccccttatgacctgggctacacacgtgctacaatggacagtacaacgagtcgcaagaccgcgaggtcaagctaatctcttaaagctgttctcagttcggattgtaggctgcaactcgcctacatgaagtcggaatcgctagtaatcgcggatcagcatgccgcggtgaatacgttcccgggccttgtacacaccgcccgtcacaccatgagagtttgtaacacccaaagccggtgaggtaaccttttggagccagccgtctaaggtgggacagatgattggggtg

SEQ ID NO: 1771 - DNA, 1481 bp, Lactobacillus uvarum
  source 1..1481: mol_type = unassigned DNA
gacgaacgctggcggcgtgcctaatacatgcaagtcgtacgcaaaactttcaccgagtgcttgcactcaccgaaagttttgagtggcgaacgggtgagtaacacgtgggtaacctgcccagaagaaggggataacacttggaaacaggtgctaataccgtataacaacaaagaccgcatggtctttgtttaaaagatggttctgctatcacttctggatggacccgcggcgtattagctagttggtgaggtaatggctcaccaaggcaatgatacgtagccgaactgagaggttgatcggccacattgggactgagacacggcccaaactcctacgggaggcagcagtagggaatcttccacaatggacgaaagtctgatggagcaacgccgcgtgagtgaagaaggttttcggatcgtaaaactctgttgttagagaagaacgtgtgtgagagtaactgttcatgcagtgacggtatctaaccagaaagccacggctaactacgtgccagcagccgcggtaatacgtaggtggcaagcgttgtccggatttattgggcgtaaagggaacgcaggcggttttttaagtctgatgtgaaagccttcggcttaaccgaagtcatgcattggaaactggaagacttgagtgcagaagaggagagtggaactccatgtgtagcggtgaaatgcgtagatatatggaagaacaccagtggcgaaagcggctctctggtctgtaactgacgctgaggttcgaaagcatgggtagcaaacaggattagataccctggtagtccatgccgtaaacgatgaatgctaagtgttggagggtttccgcccttcagtgctgcagctaacgcattaagcattccgcctggggagtacgaccgcaaggttgaaactcaaaggaattgacgggggcccgcacaagcggtggagcatgtggtttaattcgaagcaacgcgaagaaccttaccaggtcttgacatcttttgccaatctgagagatcagatgttcccttcggggacagaatgacaggtggtgcatggttgtcgtcagctcgtgtcgtgagatgttgggttaagtcccgcaacgagcgcaacccttattactagttgccagcatttagttgggcactctagtgagactgccggtgataaaccggaggaaggtggggatgacgtcaaatcatcatgccccttatgacctgggctacacacgtgctacaatggacagtacaacgagtcgcaagaccgcgaggtcaagctaatctcttaaagctgttctcagttcggattgtaggctgcaactcgcctacatgaagtcggaatcgctagtaatcgcggatcagcatgccgcggtgaatacgttcccgggccttgtacacaccgcccgtcacaccatgagagtttgtaacacccaaagccggtgaggtaaccttttggagccagccgtctaaggtgggacagatgattggggtg

SEQ ID NO: 1772 - DNA, 1479 bp, Lactobacillus vini
  source 1..1479: mol_type = unassigned DNA
gacgaacgctggcggcgtgcctaatacatgcaagtcgaacgagactttttatttgatgcttgcatcttttaaaaagttgagtggcgaacgggtgagtaacacgtgggtaacctgccttaaagtgggggataacacttggaaacaggtgctaataccgcataaccatcaaaaccgcctggttttgatgttaaagatggttctgctatcgctttaagatggacccgcggcgtattagctagttggtgaggtaacggcttaccaaggcaatgatacgtagccgaactgagaggttgatcggccacattgggactgagacacggcccaaactcctacgggaggcagcagtagggaatcttccacaatggacgaaagtctgatggagcaacgccgcgtgagtgaagaaggttttcggatcgtaaaactctgttgtcagagaagaacgtgtgtgagagtaactgttcacgcagtgacggtatctgaccagaaagtcacggctaactacgtgccagcagccgcggtaatacgtaggtggcaagcgttgtccggatttattgggcgtaaagggaacgcaggcggtcttttaagtctgatgtgaaagccttcggcttaaccgaagtcgggcattggaaactgggagacttgagtgcagaagaggagagtggaactccatgtgtagcggtgaaatgcgtagatatatggaagaacaccagtggcgaaagcggctctctggtctgtaactgacgctgaggttcgaaagcgtgggtagcaaacaggattagataccctggtagtccacgccgtaaacgatgaatgctaagtgttggagggtttccgcccttcagtgccgcagctaacgcattaagcattccgcctggggagtacgatcgcaagattgaaactcaaaggaattgacgggggcccgcacaagcggtggagcatgtggtttaattcgaagcaacgcgaagaaccttaccaggtcttgacatcttttgctaacctgagagatcaggtgttcccttcggggacaaaatgacaggtggtgcatggttgtcgtcagctcgtgtcgtgagatgttgggttaagtcccgcaacgagcgcaacccttattgttagttgccagcatttagttgggcactctaacgagactgccggtgacaaaccggaggaaggtggggatgacgtcaaatcatcatgccccttatgacctgggctacacacgtgctacaatggacggtacaacgagtcgcaagaccgcgaggtcaagctaatctctgaaaaccgttctcagttcggattgcaggctgcaactcgcctgcatgaagtcggaatcgctagtaatcgcggatcagcatgccgcggtgaatacgttcccgggccttgtacacaccgcccgtcacaccatgagagtttgtaacacccaaagccggtggggtaacctttgggagccagccgtctaaggtgggacagatgattggggtg

SEQ ID NO: 1773 - DNA, 1495 bp, unidentified
  source 1..1495: mol_type = unassigned DNA; note = Lacunisphaera limnophila
gctcagaatgaacgctggcggcgtggttaagacatgcaagtcgaacggtttttcaggtgtagcaatacatttgaaaagcagtggcgaacgggtgcgtaacacgtgaacaatctaccatttagtgtggaatagctcggcgaaagccggattaataccgcatgtggttggctttctcctgaaagccatactaaagccggggaccgcaaggcctggcgctaattgaggagttcgcggcctatcagctagttggcgaggtaacggctcaccaaggctaagacgggtagctgatctgagaggatgatcagccacactggaactgagacacggtccagacacctacgggtggcagcagtttcgaatcattcacaatgggcgaaagcctgatggtgcgacgccgcgtgagggatgaaggtcttcggattgtaaacctctgtcactggggagaaaacgcttcaatttaatagattgaagcctgatttaacccggagaggaagcagtggctaactctgtgccagcagccgcggtaatacagagactgcaagcgttattcggattcactgggcgtaaagggtgcgcaggcggttgggtgtgtcagatgtgaaatcccgaggctcaacctcggaactgcgtctgaaactactcgactagagtactggagagggtaacggaattcacggtgtagcagtgaaatgcgtagatatcgtgaggaacaccagaggcgaaggcggttacctggacagttactgacgctcaggcacgaaagcatggggagcaaaagggattagatacccctgtagtccatgccctaaacggtgcacactaggtcttagcggattcgaccccactagggcccaagctaacgcgttaagtgtgccgcctgaggactacggtcgcaagactaaaactcaaaggaattgacgggggcccgcacaagcggtggagcatgtggctcaattcgatgcaacgcgaagaaccttaccaggccttgacatgcactagaccgacgctgaaaggcgtcttcccttcggggctggtgcacaggtgctgcatggctgtcgtcagctcgtgtcgtgagatgttgcgttaagtcgcgcaacgagcgcaacccctgtccttagttgccatcaggtaaagctgggcactctagggagacaaaccctctctgagggtgggaaggtggggatgacgtcaagtcaggatggcccttacggcctgggctgcacacgtgctacaatgctcggtacagagggacgcaataccgcgaggtggagcaaatcccaaaaaccgagcccagttcagattgcagtctgcaactcgactgcatgaagccggaatcgctagtaatggcgtatcagctacgacgccgtgaatacgttcccgggccttgtacacaccgcccgtcacgtcatgaaagccggttttgcccgaagtgcgtttgccaaccagcaatggaggcggcgccctaaggtgaggctggtgattgggacgaagtcgt

SEQ ID NO: 1774 - DNA, 1453 bp, Lamprocystis purpurea
  source 1..1453: mol_type = unassigned DNA
attgaacgctggcggcatgcctaacacatgcaagtcgaacgcgaaagtcctttggggcgagtagagtggcggacgggtgagtaatgcgtgggaatctgcctggcagtgggggacaacccggggaaactcgggctaataccgcatacgacctacgggtgaaaggggggtttcggcctctcgctgcgagatgagcccacgtccgattagctagttggcagggtaagagcctaccaaggcgacgatcggtagctggtctgagaggatgatcagccacactgggactgagacacggcccagactcctacgggaggcagcagtggggaatattggacaatgggcgcaagcctgatccagcaatgccgcgtgtgtgaagaaggcctgcgggttgtaaagcactttcagtggggaagaagtcgtttgggataataccctgggcgattgacgttacccacaaaagaagcaccggctaactccgtgccagcagccgcggtaatacggagggtgcaagcgttaatcggaatcactgggcgtaaagcgcacgtaggcggcggcgtcagtcagatgtgaaagccccgggctcaacctgggaacggcatttgatactgcgcggctcgagtctgctagaggggggtggaattccaggtgtagcggtgaaatgcgtagatatctggaggaacaccagtggcgaaggcggccccctggagcaagactgacgctgaggtgcgaaagcgtggggagcaaacaggattagataccctggtagtccacgcggtaaacgatgtcaactagccgttgggtccatttaagggcttagtggcgcagctaacgcgataagttgaccgcctggggagtacggccgcaaggttaaaactcaaaggaattgacgggggcccgcacaagcggtggagcatgtggtttaattcgatgcaacgcgaagaaccttaccagcccttgacatccttggaatctggcggagacgctggagtgccttcgggagccaagagacaggtgctgcatggctgtcgtcagctcgtgtcgtgagatgttgggttaagtcccgtaacgagcgcaacccttgtccttagttgccagcacgtcatggtgggaactctaaggagactgccggtgataaaccggaggaaggtggggacgacgtcaagtcatcatggcccttatgggctgggctacacacgtgctacaatggtcggtacagagggacgccaacccgcgagggggagccaatcccagaaaaccggtcgtagtccggattgcagtctgcaactcgactgcatgaagtcggaatcgctagtaatcgcgaatcagcatgtcgcggtgaatacgttcccgggccttgtacacaccgcccgtcacaccatgggagttggttgcaccagaagtaggtagcttaaccttcgggagggcgcttaccacggtgtggtcaatgactggggtg

SEQ ID NO: 1775 - DNA, 1458 bp, Laribacter hongkongensis
  source 1..1458: mol_type = unassigned DNA
attgaacgctggcggcatgctttacacatgcaagtcgaacggtaacagggacttcggtctgctgacgagtggcgaacgggtgagtaatgcatcggaacgtaccgagtaatgggggataacgcatcgaaaggtgtgctaataccgcatacgccctgagggggaaagcgggggatcgaaagacctcgcgttattcgagcggccgatgccggattagctagttggtggggtaaaggctcaccaaggcgacgatccgtagcaggtctgagaggatgatctgccacactgggactgagacacggcccagactcctacgggaggcagcagtggggaattttggacaatgggggcaaccctgatccagccatgccgcgtgtctgaagaaggccttcgggttgtaaaggacttttgtcagggaggaaatccctaaggctaatacccttgggggatgacagtacctgaagaataagcaccggctaactacgtgccagcagccgcggtaatacgtagggtgcaagcgttaatcggaattactgggcgtaaagcgtgcgcaggcggtttgaaaagtcagctgtgaaagccccgggctcaacctgggaactgcggttgaaactctcaagctagagtgcgtcagaggggggtggaattccacgtgtagcagtgaaatgcgtagagatgtggaggaacaccaatggcgaaggcagccccctgggatgacactgacgctcatgcacgaaagcgtggggagcaaacaggattagataccctggtagtccacgccctaaacgatgtcgactagccgttggagatttcggtttctggtggcgcagctaacgcgtgaagtcgaccgcctggggagtacggtcgcaagattaaaactcaaaggaattgacgggggcccgcacaagcggtggatgatgtggattaattcgatgcaacgcgaaaaaccttacctggtcttgacatgtaccgaacctcgaagagatttgagggtgcccgaaagggagcggtaacacaggtgctgcatggctgtcgtcagctcgtgtcgtgagatgttgggttaagtcccgcaacgagcgcaacccttgtcattagttgccagcattaagttgggcactctaatgagactgccggtgacaaaccggaggaaggtggggatgacgtcaagtcctcatggcccttatgaccagggcttcacacgtcatacaatggtcggtacagagggtcgctaagccgcgaggtagtgccaatctcataaaaccgatcgtagtccggatcgcagtctgcaactcgactgcgtgaagtcggaatcgctagtaatcgcggatcagcatgtcgcggtgaatacgttcccgggccttgtacacaccgcccgtcacaccatgggagtggaatccgccagaagtgggtagggtaaccgtaaggagcccgcttaccacggtaggtttcatgactggggtg

SEQ ID NO: 1776 - DNA, 1453 bp, Lautropia mirabilis
  source 1..1453: mol_type = unassigned DNA
attgaacgctggcggcatgctttacacatgcaagtcgaacggcagcgcgggcttcggcctggcggcgagtggcgaacgggtgagtaatacatcggaacgtgcccagtagtgggggatagctcggcgaaagccggattaataccgcatacgacctgagggtgaaagcgggggatcttcggacctcgcgctattggagcggccgatggcagattagctagttggtggggtaaaggcctaccaaggcgacgatctgtagctggtctgagaggacgaccagccacactgggactgagacacggcccagactcctacgggaggcagcagtggggaattttggacaatgggcgaaagcctgatccagcaatgccgcgtgtgtgatgaaggccttcgggttgtaaagcacttttggcgggaacgaaaaggactgtgccaataccacggttcgatgacggtacccgcagaataagcaccggctaactacgtgccagcagccgcggtaatacgtagggtgcaagcgttaatcggaattactgggcgtaaagagtgcgcaggcggttttgcaagaccgatgtgaaatccccgggcttaacctgggaactgcattggtgactgcaaggctagagtgtgtcagagggaggtggaattccgcatgtagcagtgaaatgcgtagatatgcggaggaacaccgatggcgaaggcagcctcctgggataacactgacgctcatgcacgaaagcgtggggagcaaacaggattagataccctggtagtccacgccctaaacgatgtctactagttgtcggggattaatttccttggtaacgcagctaacgcgtgaagtagaccgcctggggagtacggtcgcaagattaaaactcaaaggaattgacggggacccgcacaagcggtggatgatgtggattaattcgatgcaacgcgaaaaaccttacctacgcttgacatgtccggaaccctgaagagatttgggggtgctcgaaagagagccggaacacaggtgctgcatggctgtcgtcagctcgtgtcgtgagatgttgggttaagtcccgcaacgagcgcaacccttatcattagttgctacgcaagggcactctaatgagactgccggtgacaaaccggaggaaggtggggatgacgtcaagtcctcatggcccttatgtgtagggcttcacacgtcatacaatggtcggtacagagggttgcgaagccgcgaggtggagccaatcccaaaaaaccgatcgtagtccggattgcagtctgcaactcgactgcatgaagtcggaatcgctagtaatcgcggatcagcatgccgcggtgaatacgttcccgggtcttgtacacaccgcccgtcacaccatgggagtgggttttaccagaagtaggtagcttaaccgcaaggagggcgcttaccacggtagggctcatgactggggtg

SEQ ID NO: 1777 - DNA, 1474 bp, Lawsonia intracellularis
  source 1..1474: mol_type = unassigned DNA
  misc_difference 518: note = n is a, c, g, or t
  misc_difference 521..522: note = n is a, c, g, or t
attgaacgctggcggcgtgcttaacacatgcaagtcgaacgtgaaagtcttcgggatgagtaaagtggcgcacgggtgagtaacgcgtggataatctaccttcgagacggggataacggctggaaacggtcgctaataccggataaccattatggtaaaaagttgtagtgcaaagggtagcctctgtatgtaacgtatcgcttgaagatgagtccgcgtcccattagctagttggtgaggtaaatgctcaccaaggcgatgatgggtagccgatctaagaggataatcggccacactggaactggaacacggtccagactcctacgggaggcagcagtggggaatattgcgcaatgggcgaaagcctgacgcagcgacgccgcgtgagggatgaaggtctttggatcgtaaacctctgtcaggggggaagaaatggatgggctctaatagggtctatttttgacggtacccccagaggaagcaccggctaactccgtgccagcagccgcggtaatacnganngtgcaagcgttaatcggaattactgggcgtaaagcgcgcgtaggtggttatataagtcaggggtgaaagcccaccgcttaacggtggaacagcctttgatactgtataacttgagtatcggagagggtggcggaattccaggtgtaggggtgaaatccgtagatatctggaggaacaccagtggcgaaggcggccacctggacgataactgacactgaggtgcgaaagcgtggggagcaaacaggattagataccctggtagtccacgctgtaaacgatgggtgctaggtgctggggagttatcttcggtgccgtagctaacgcgttaagcaccccgcctggggagtacggtcgcaaggctgaaactcaaagaaattgacgggggcccgcacaagcggtggagtatgtggtttaattcgatgcaacgcgaagaaccttacccaggcttgacatctgagggactcttaagagattaagaggtgcctttcggggagcctcaagacaggtgctgcatggctgtcgtcagctcgtgccgtgaggtgttgggttaagtcccgcaacgagcgcaacccttatctttagttgccatcaagtaaagttgggcactctagagagactgctccggttaacggggaggaaggtggggacgacgtcaagtcatcatggcccttacgcctggggctacacacgtactacaatggtgcacacaaagggcagcaagaccgcaaggtggagccaatcccaaaaaatgcatctcagtccggattggagtctgcaactcgactccatgaagtcggaatcgctagtaatccgagatcagcatgctcgggtgaatgcgttcccgggccttgtacacaccgcccgtcacaccacgaaagttggttttacccaaagccggcgagctaacgagcaatcgaggcagtcgtctacggtagggctaatgattggggtg

SEQ ID NO: 1778 - DNA, 1429 bp, unidentified
  source 1..1429: mol_type = unassigned DNA; note = Lebetimonas natsushimae
agtgaacgctggcggcatgcttaacacatgcaagtcgaggggcagcagtaggaaacttcggtttcctagctggcgaccggcggacgggtgagtaacacgtagctacttgccccacagtgggggataacagtccgaaaggactgctaataccgcatacacccgagaggggaaagcctttaaggcgctgtgggatagggctgcggcgtatcagctagttggtggggtaacggcctaccaaggcgatgacgcgtagctggtctgagaggatgatcagccacactggaactgagacacggtccagactcctacgggaggcagcagtggggaatattgggcaatgggcgaaagcctgacccagcaatgccgcgtggaggaagacgcccttcggggtgtaaactccttttgtaggggaagaagctgacggtaccctacgaataagctccggctaactccgtgccagcagccgcggtaatacggggggagcgagcgttactcggaatcactgggcgtaaagggtgcgtaggcggcttggtaagttaggagtgaaagcccacagctcaactgtggaactgcttctaaaactgctaagctagagtccgggagaggctgcgggaattcctggtgtaggggtgaaatccgtagagatcaggaggaatgccgaaagcgaaggcgcgcagctggaacggtactgacgctgaggcacgaaagcgtggggagcaaacaggattagataccctggtagtccacgccctaaacgatggccactagtggttggggggacagtcccccagtcacgcagctaacgcgataagtggcccgcctggggagtacggccgcaaggctaaaactcaaaggaatagacggggacccgaacaagcggtggagcatgtggtttaattcgaagatacgcgaagaaccttacctgggcttgacatccggggaatcccccagagatgggggagtgctaacttcggttagaaccccgagacaggtgctgcatggctgtcgtcagctcgtgtcgtgagatgttgggttaagtcccgcaacgagcgcaacccctgcccttagttggaaacagttcggctgtccactctaaggggactgcccgggcaaccgggaggaaggtggggatgacgtcaagtcatcatggcccttatgtccagggcgacacacgtgctacaatggccaggacagagagaggcaataccgcgaggtggagcaaatctctaaacctggtcccagttcggattgcagtctgcaactcgactgcatgaaggcggaatcgctagtaatcgcggatcagccatgccgcggtgaatacgttcccgggtcttgtactcaccgcccgtcacaccatgggagttgtgctcacccgaagtcggtatcccaaagattggggccgccgacggtgggcacagcgactggggtg

SEQ ID NO: 1779 - DNA, 1460 bp, Leeia oryzae
  source 1..1460: mol_type = unassigned DNA
attgaacgctggcggaatgctttacacatgcaagtcgaacggcagcacgggtgcttgcacctggtggcgagtggcgaacgggtgagtaatgcatcggaacgtgccgtatagtgggggataacgcatcgaaaggtgtgctaataccgcatacgccctgagggggaaagtgggggaccgtaaggcctcacgctatacgagcggccgatgtccgattagctagttggtggggtaaaggctcaccaaggcgacgatcggtagctggtctgagaggacgaccagccacactgggactgagacacggcccagactcctacgggaggcagcagtggggaattttggacaatgggggaaaccctgatccagccattccgcgtgagtgaagaaggccttcgggttgtaaagctcttttgtcagggaggaaatccttaacgttaataccgttgggggatgacagtacctgaagaataaggaccggctaactacgtgccagcagccgcggtaatacgtagggtccaagcgttaatcggaattactgggcgtaaagcgtgcgcaggcggctgattaagccagatgtgaaatccccgggctcaacctgggaactgcgtttggaactggtcagctagagtacgtcagaggggggtagaattccacgtgtagcagtgaaatgcgtagagatgtggaggaataccgatggcgaaggcagccccctgggatgatactgacgctcatgcacgaaagcgtggggagcaaacaggattagataccctggtagtccacgccctaaacgatgtctactagttgtcgggggaggaatcctttggtaacgaagctaacgcgagaagtagaccgcctggggagtacggtcgcaagattaaaactcaaaggaattgacgggggcccgcacaagcggtggatgatgtggattaattcgatgcaacgcgaaaaaccttacctacccttgacatgccaggaatcttgcagagatgtgagagtgctcgaaagagaacctgggcacaggtgctgcatggctgtcgtcagctcgtgtcgtgagatgttgggttaagtcccgcaacgagcgcaacccttgccattagttgctaccatttagttgagcactttaatgggactgccggtgacaaaccggaggaaggtggggatgacgtcaagtcctcatggcccttatgggtagggcttcacacgtcatacaatggtcggtacagagggttgccaacccgcgagggggagctaatctcagaaagccgatcgtagtccggatcgcagtctgcaactcggctgcgtgaagtcggaatcgctagtaatcgcggatcagcatgtcgcggtgaatacgttcccgggccttgtacacaccgcccgtcacaccatgggagtggaatccgccagaagtaggtagcctaaccgtaaggagggcgcttaccacggtaggtttcatgactggggtg

SEQ ID NO: 1780 - DNA, 1450 bp, Leeuwenhoekiella palythoae
  source 1..1450: mol_type = unassigned DNA
gatgaacgctagcggcaggcctaacacatgcaagtcgaacggtaacaggaattagcttgctaatttgctgacgagtggcgcacgggtgcgtaacgcgtatgcaatctgccttgtactggagtatagcccagggaaacttggattaatcctccatagtctattgatatggcatcgtattaatagtaaaggttacggtacaagatgagcatgcgtcctattagctagtaggtgtggtaacggcacacctaggcaacgataggtaggggtcctgagagggagatcccccacactggtactgagacacggaccagactcctacgggaggcagcagtgaggaatattggacaatgggcgggagcctgatccagccatgccgcgtgcaggaagactgccctatgggttgtaaactgcttttatacgggaagaataagtgttacgtgtagcacgatgacggtaccgtaagaataagcaccggctaactccgtgccagcagccgcggtaatacggagggtgcaagcgttatccggaatcattgggtttaaagggtccgtaggtggactaataagtcagtggtgaaagtctgcagcttaactgtagaattgccattgatactgttagtcttgaattgttgtgaagtaactagaatatgtagtgtagcggtgaaatgcatagatattacatagaataccgattgcgaaggcaggttactaacaatatattgacactgatggacgaaagcgtggggagcgaacaggattagataccctggtagtccacgccgtaaacgatggttactagctgtccggctcaattgagggctgggtggccaagcgaaagtgataagtaacccacctggggagtacgttcgcaagaatgaaactcaaaggaattgacgggggcccgcacaagcggtggagcatgtggtttaattcgatgatacgcgaggaaccttaccagggcttaaatgtagtctgacagatttggaaacagatttttcttcggacagattacaaggtgctgcatggttgtcgtcagctcgtgccgtgaggtgtcaggttaagtcctataacgagcgcaacccctgttgttagttgccagcgagtaatgtcgggaactctagcaagactgccggtgcaaaccgtgaggaaggtggggatgacgtcaaatcatcacggcccttacgtcctgggccacacacgtgctacaatggtaggtacagagagcagccacgtcgcaaggcggagcgaatctataaaacctatcacagttcggatcggggtctgcaactcgaccccgtgaagctggaatcgctagtaatcgcatatcagccatgatgcggtgaatacgttcccgggccttgtacacaccgcccgtcaagccatggaagctgggggtacctgaagtccgtcaccgcaaggagcggcctagggtaagaccggtaactggggct

SEQ ID NO: 1781 - DNA, 1466 bp, Legionella adelaidensis
  source 1..1466: mol_type = unassigned DNA
attgaacgctggcggcatgcttaacacatgcaagtcgaacggcagcatggtctagcttgctagactgatggcgagtggcgaacgggtgagtaacgcgtaggaatataccttagagagggggataacctggggaaactcaggctaataccgcatacgttctatggaataaagctggggaccattaggcctggcgctttaagaatagcctgcgtccgattagctagttggtggggtaagggcctaccaaggcgacgatcggtagctggtctgagaggatgatcagccacactgggactgagacacggcccagactcctacgggaggcagcagtggggaatattggacaatgggggcaaccctgatccagcaatgccgcgtgtgtgaagaaggcctgagggttgtaaagcactttcagtggggaggaggattgataggttaagagctaattgattggacgttacccacagaagaagcaccggctaactccgtgccagcagccgcggtaatacggagggtgcgagcgttaatcggaattactgggcgtaaagggtgcgtaggtggtttattaagttagctgtgaaatacctgggcttaacctgggcaggtcagctaagactggtagactggagtataggagagggtagtggaatttccggtgtagcggtgaaatgcgtagagatcggaaggaacaccagtggcgaaggcggctacctggcctaatactgacactgaggcacgaaagcgtggggagcaaacaggattagataccctggtagtccacgctgtaaacgatgtcaactagctgttggtcatatgaaaatgattagtggcgcagcaaacgcgataagttgaccgcctggggagtacggtcgcaagattaaaactcaaaggaattgacgggggcccgcacaagcggtggagcatgtggtttaattcgatgcaacgcgaagaaccttacctacccttgacatacagtgaatctggcagagatgctggagtgccttcgggaacactgatacaggtgctgcatggctgtcgtcagctcgtgtcgtgagatgttgggttaagtcccgtaacgagcgcaacccttatccttagttgccagcgcgtagaggcgggaactctaaggagactgccggtgacaaaccggaggaaggcggggacgacgtcaagtcatcatggcccttacgggtagggctacacacgtgctacaatggccggtacagaggggagcgaaggagtgatctggagcgaatcttagaaagccggtcgtagtccggattggagtctgcaactcgactccatgaagtcggaatcgctagtaatcgcgaatcagcatgtcgcggtgaatacgttcccgggccttgtacacaccgcccgtcacaccatgggagtgggctgcaccagaagtagatagtctaaccttcggggggacgtttaccacggtgtggttcatgactggggtg

SEQ ID NO: 1782 - DNA, 1464 bp, Legionella anisa
  source 1..1464: mol_type = unassigned DNA
tgaacgctggcggcatgcttaacacatgcaagtcgaacggcagcataatctagcttgctagattgatggcgagtggcgaacgggtgagtaacgcgtaggaatatgccttgaagtgggggacaacttggggaaactcaagctaataccgcataatgtctaaggacgaaagctggggaccttcgggcctggcgctttaagattagcctgcgtccgattagctagttggtggggtaagggcctaccaaggcgacgatcggtagctggtctgagaggatggccagccacactggaactgagacacggtccagactcctacgggaggcagcagtggggaatattggacaatggggggaaccctgatccagcaatgccgcgtgtgtgaagaaggcctgagggttgtaaagcactttcagtggggaggagggttgattggttaagagctgattaactggacgttacccacagaagaagcaccggctaactccgtgccagcagccgcggtaatacggagggtgcaagcgttaatcggaattactgggcgtaaagcgtgcgtaggtggttgattaagttatctgtgaaatccctgggcttaacctgggcaggtcagatgatactggttgactcgagtatgggagagggtagtggaatttccggtgtagcggtgaaatgcgtagagatcggaaggaacaccagtggcgaaggcggctacctggcctaatactgacactgaggcacgaaagcgtggggagcaaacaggattagataccctggtagtccacgctgtaaacgatgtcaactagctgttggttatatgaaaataattagtggcgcagcaaacgcgataagttgaccgcctggggagtacggtcgcaagattaaaactcaaaggaattgacgggggcccgcacaagcggtggagcatgtggtttaattcgatgcaacgcgaagaaccttacctacccttgacatacagtgaattttgcagagatgcattagtgccttcgggaacactgatacaggtgctgcatggctgtcgtcagctcgtgtcgtgagatgttgggttaagtcccgtaacgagcgcaacccttgtccttagttgccagcacgtaaaggtgggaactctaaggagactgccggtgacaaaccggaggaaggcggggatgacgtcaagtcatcatggcccttacgggtagggctacacacgtgctacaatgggtgatacagagggaagcgaaggggtgacctggagctaatcttagaaagtcgctcgtagtccggattggagtctgcaactcgactccatgaagtcggaatcgctagtaatcgcgaatcagcatgtcgcggtgaatacgttcccgggccttgtacacaccgcccgtcacaccatgggagtgggctgcaccagaagtagatagtctaaccttcggggggacgtttaccacggtgtggttcatgactggggtg

SEQ ID NO: 1783 - DNA, 1449 bp, Legionella beliardensis
  source 1..1449: mol_type = unassigned DNA
attgaacgctggcggcatgcttaacacatgcaagtcgaacggcaacagggtctagcttgctagactgctggcgagtggcgaacgggtgagtaacgcgtaggaatatgccttaaagagtgggacaacttggggaaactcaagctaataccgcataatttctgaggaaaaaagctggggaccttcgggcctggcgctttaagattagcctgcgtccgattagctagttggtggggtaaaggcttaccaaggcgacgatcggtagctggtctgagaggatgaccagccacactgggactgagacacggcccagactcctacgggaggcagcagtggggaatattggacaatggggggaaccctgatccagcaatgccgcgtgtgtgaagaaggcctgagggttgtaaagcactttcagtggggaggagtggagtttaggttaagagctagaacttcggacgttacccacagaagaagcaccggctaactccgtgccagcagccgcggtaatacggagggtgcaagcgttaatcggaattactgggcgtaaagggtgcgtaggtggtctgataagttagctgtgaaattcctgggcttaacctggggtggtcagctaagactgttagactggagtatgggagagggtagtggaatttccggtgtagcggtgaaatgcgtagagatcggaaggaacaccagtggcgaaggcggctacctggcctaatactgacactgaggcacgaaagcgtggggagcaaacaggattagataccctggtagtccacgctgtaaacgatgtcaactagctgttggtcatatgaatgtgattagtggcgcagcaaacgcggtaagttgaccgcctggggagtacggtcgcaagattaaaactcaaaggaattgacgggggcccgcacaagcggtggagcatgtggtttaattcgatgcaacgcgaagaaccttacctacccttgacatacagtgaaaccagcagagatgccggtgtgccgcaaggaacactgatacaggtgctgcatggctgtcgtcagctcgtgtcgtgagatgttgggttaagtcccgtaacgagcgcaacccttgttcttagttaccagcacgtaaaggtggggactctaaggagactgccggtgacaaaccggaggaaggcggggacgacgtcaagtcatcatggcccttacgggtagggctacacacgtgctacaatggccggtacagagggcagcgaaggggcgacctggagcaaatcctttaaagctggtcgtagtccggattggagtctgcaactcgactccatgaagtcggaatcgctagtaatcgcgaatcagcatgtcgcggtgaatacgttcccgggccttgtacacaccgcccgtcacaccatgggagtgggttgcaccagaagtagatagtctaaccttcgggggacgtttaccacggtgt

SEQ ID NO: 1784 - DNA, 1458 bp, Legionella birminghamensis
  source 1..1458: mol_type = unassigned DNA
gatggcggcatgcttaacacatgcaagtcgaacggcagcacgacctagcttgctaggttggtggcgagtggcgaacgggtgagtaacgcgtaggaatataccttagagagggggataacctggggaaactcaggctaataccgcgtacgttcttcggataaagctggggaccgcaaggcctggcgctttaagaatagcctgcgtccgattagctagttggtggggtaagggcctaccaaggcgacgatcggtagctggtctgagaggatgatcagccacactgggactgagacacggcccagactcctacgggaggcagcagtggggaatattggacaatgggggcaaccctgatccagcaatgccgcgtgtgtgaagaaggcctgagggttgtaaagcactttcagtggggaggagggttgataggttaagagctaattaactggacgttacccacagaagaagcaccggctaactccgtgccagcagccgcggtaatacggagggtgcgagcgttaatcggaattactgggcgtaaagggtgcgtaggtggtttaataagttaactgtgaaatccctgggctcaacctgggcaggtcaggtatgactgttagactagagtatgggagagggtagtggaatttccggtgtagcggtgaaatgcgtagagatcggaaggaacaccagtggcgaaggcggctacctggcctaatactgacactgaggcacgaaagcgtggggagcaaacaggattagataccctggtagtccacgctgtaaacgatgtcaactagctgttggtcttatgaatgagattagtggcgcagcaaacgcgataagttgaccgcctggggagtacggtcgcaagattaaaactcaaaggaattgacgggggcccgcacaagcggtggagcatgtggtttaattcgatgcaacgcgaagaaccttacctacccttgacatacagtgaattttgcagagatgcggaagtgccttcgggaacactgatacaggtgctgcatggctgtcgtcagctcgtgtcgtgagatgttgggttaagtcccgtaacgagcgcaacccttattcttagttgccagcgcgtagaggcggggactctaaggagactgccggtgacaaaccggaggaaggcggggatgacgtcaagtcatcatggcccttacgggtagggctacacacgtgctacaatggccggtacagagggcagggaaggggcgacctggagcaaatccttaaaagctggtcgtagtccggattggagtctgcaactcgactccatgaagtcggaatcgctagtaatcgcgaatcagcatgtcgcggtgaatacgttcccgggccttgtacacaccgcccgtcacaccatgggagtgggctgcaccagaagtagatagtctaacctgcggggggacgtttaccacggtgtgattcatgactggggtg

SEQ ID NO: 1785 - DNA, 1467 bp, Legionella brunensis
  source 1..1467: mol_type = unassigned DNA
attgaacgctggcggcatgcttaacacatgcaagtcgaacggcagcattttctagcttgctagaaagatggcgagtggcgaacgggtgagtaacgcgtaggaatatgccttaaagagtgggataacatggggaaactcatgctaataccgcataatttcttaggaaaaaagctggggaccgtaaggcctggcgctttaagattagcctgcgtccgattagctagttggtggggtaagggcctaccaaggcgacgatcggtagctggtctgagaggatggccagccacactgggactgagacacggcccagactcctacgggaggcagcagtggggaatattggacaatggggggaaccctgatccagcaatgccgcgtgtgtgaagaaggcctgagggttgtaaagcactttcagtggggaggagtggttgataggttaagagctaattgattagacgttacccacagaagaagcaccggctaactccgtgccagcagccgcggtaatacggagggtgcaagcgttaatcggaattactgggcgtaaagggtgcgtaggtggtttaataagttaactgtgaaatccctgggcttaacctgggaactgcagttaagactgttagactcgagtatgggagagggtagtggaatttccggtgtagcggtgaaatgcgtagagatcggaaggaacaccagtggcgaaggcggctacctggcctaatactgacactgaggcacgaaagcgtggggagcaaacaggattagataccctggtagtccacgctgtaaacgatgtcaactagctgttggtcttataaatgagattagtggcgcagcaaacgcgataagttgaccgcctggggagtacggtcgcaagattaaaactcaaaggaattgacgggggcccgcacaagcggtggagcatgtggtttaattcgatgcaacgcgaagaaccttacctacccttgacatacagtgaattttgcagagatgcattagtgccttcgggaacactgatacaggtgctgcatggctgtcgtcagctcgtgtcgtgagatgttgggttaagtcccgtaacgagcgcaacccttgtccttagttgccagcatgtaatggtggggactctaaggagactgccggtgacaaaccggaggaaggcggggatgacgtcaagtcatcatggcccttacgggtagggctacacacgtgctacaatggccggtacagagggcagcgaaggggtgacctggagcaaatcttttaaagctggtcgtagtccggattggagtctgcaactcgactccatgaagtcggaatcgctagtaatcgcgaatcagcatgtcgcggtgaatacgttcccgggccttgtacacaccgcccgtcacaccatgggagtgggttgcaccagaagtagatagtctaaccttcggggggacgtttaccacggtgtgattcatgactggggtg

SEQ ID NO: 1786 - DNA, 1466 bp, Legionella busanensis
  source 1..1466: mol_type = unassigned DNA
tgaacgctggcggcatgcttaacacatgcaagtcgaacggcagcatgacctagcttgctaggttgatggcgagtggcgaacgggtgagtaacgcgtaggaatatgccttaaagagtgggacaacttggggaaactcaagctaataccgcataagctctgaggagtaaagctggggaccttcgggcctggcgctttaagattagcctgcgtccgattagctagttggtgaggtaagggcttaccaaggcgacgatcggtagctggtctgagaggatgaccagccacactgggactgagacacggaccagactcctacgggaggcagcagtggggaatattggacaatggggggaaccctgatccagcaatgccgcgtgtgtgaagaaggcctgagggttgtaaagcactttcagtggggaggagtgaacattcggttaagagctagatgtttggacgttacccacagaagaagcaccggctaactccgtgccagcagccgcggtaatacggagggtgcgagcgttaatcggaattactgggcgtaaagggtgcgtaggtggtttaataagttagctgtgaaattcctgggcttaacctagggtggtcagctaagactgttagacttgagtatgggagagggtagtggaatttccggtgtagcggtgaaatgcgtagagatcggaaggaacaccagtggcgaaagcggctacctggcctaatactgacactgaggcacgaaagcgtggggagcaaacaggattagataccctggtagtccacgctgtaaacgatgtcaactagctgttggtcatatgaatgtgattagtggcgcagcaaacgcggtaagttgaccgcctggggagtacggtcgcaagattaaaactcaaaggaattgacgggggcccgcacaagcggtggagcatgtggtttaattcgatgcaacgcgaagaaccttacctacccttgacatacagtgaatcttgcagagatgcgggagtgccgaaaggaacactgatacaggtgctgcatggctgtcgtcagctcgtgtcgtgagatgttgggttaagtcccgtaacgagcgcaacccttattcttagttgccagcgcgtaaaggcggggactctaaggagactgccggtgacaaaccggaggaaggcggggacgacgtcaagtcatcatggcccttacgggtagggctacacacgtgctacaatggccggtacagagggcagcgaaggggcgacctggagcaaatccttgaaagctggtcgtagtccggattggagtctgcaactcgactccatgaagtcggaatcgctagtaatcgcgaatcagcatgtcgcggtgaatacgttcccgggccttgtacacaccgcccgtcacaccatgggagtgggttgcaccagaagtagatagtctaacctttcgagggggacgtttaccacggtgtgattcatgactggggt

SEQ ID NO: 1787 - DNA, 1466 bp, Legionella cherrii
  source 1..1466: mol_type = unassigned DNA
attgaacgctggcggcatgcttaacacatgcaagtcgaacggcagcatggtctagcttgctagactgatggcgagtggcgaacgggtgagtaacgcgtaggaatatgccttgaagtgggggacaacttggggaaactcaagctaataccgcataatatctaaggatgaaagctggggaccttcgggcctggcgctttaagattagcctgcgtccgattagctagttggtggggtaagggcctaccaaggcgacgatcggtagctggtctgagaggatggccagccacactggaactgagacacggtccagactcctacgggaggcagcagtggggaatattggacaatgggggcaaccctgatccagcaatgccgcgtgtgtgaagaaggcctgagggttgtaaagcactttcagtagggaggagggcatttaggttaagagctagaatgttggacgttacctacagaagaagcaccggctaactccgtgccagcagccgcggtaatacggagggtgcaagcgttaatcggaattactgggcgtaaagcgtgcgtaggtggttgattaagttatctgtgaaatccctgggcttaacctgggcaggtcagatgatactggttgactcgagtatgggagagggtagtggaatttccggtgtagcggtgaaatgcgtagagatcggaaggaacaccagtggcgaaggcggctacctggcctaatactgacactgaggcacgaaagcgtggggagcaaacaggattagataccctggtagtccacgccgtaaacgatgtcaactagctgttggttatatgaaaataattagtggcgcagcaaacgcgataagttgaccgcctggggagtacggtcgcaagattaaaactcaaaggaattgacgggggcccgcacaagcggtggagcatgtggtttaattcgatgcaacgcgaagaaccttacctacccttgacatacagtgaattttgcagagatgcattagtgccttcgggaacactgatacaggtgctgcatggctgtcgtcagctcgtgtcgtgagatgttgggttaagtcccgtaacgagcgcaacccttgtccttagttgccagcgcgtaaaggcgggaactctaaggagactgccggtgacaaaccggaggaaggcggggatgacgtcaagtcatcatggcccttacgggtagggctacacacgtgctacaatgggcgatacagagggaagcgaaggggtgacctggagctaatcttagaaagtcgctcgtagtccggattggagtctgcaactcgactccatgaagtcggaatcgctagtaatcgcgaatcagcatgtcgcggtgaatacgttcccgggccttgtacacaccgcccgtcacaccatgggagtgggctgcaccagaagtagatagtctaaccttcgggaggacgtttaccacggtgtggttcatgactggggtg

SEQ ID NO: 1788 - DNA, 1467 bp, Legionella cincinnatiensis
  source 1..1467: mol_type = unassigned DNA
attgaacgctggcggcatgcttaacacatgcaagtcgaacggcagcatgacctagcttgctaggttgatggcgagtggcgaacgggtgagtaacgcgtaggaatatgccttgaagactgggataacttggggaaactcaagctaataccggatgatgtctgcggacgaaagctggggaccattttggcctggcgctttaagattagcctgcgtccgattagctagttggtggggtaagggcctaccaaggcgacgatcggtagctggtctgagaggatgaccagccacactggaactgagacacggtccagactcctacgggaggcagcagtggggaatattggacaatggggggaaccctgatccagcaatgccgcgtgtgtgaagaaggcctgagggttgtaaagcactttcagtggggaggaggattgataggttaagagctaattgattggacgttacccacagaagaagcaccggctaactccgtgccagcagccgcggtaatacggagggtgcgagcgttaatcggaattactgggcgtaaagcgtgcgtaggtggttgattaagttatctgtgaaatccctgggcttaacctgggcaggtcagatgatactggttgactcgagtatgggagagggtagtggaatttccggtgtagcggtgaaatgcgtagagatcggaaggaacaccagtggcgaaggcggctacctggcctaatactgacactgaggcacgaaagcgtggggagcaaacaggattagataccctggtagtccacgccgtaaacgatgtcaactagctgttggatatatgaatatatttagtggcgtagcaaacgcgataagttgaccgcctggggagtacggtcgcaagattaaaactcaaaggaattgacgggggcccgcacaagcggtggagcatgtggtttaattcgatgcaacgcgaagaaccttacctacccttgacatacagtggagcttgcagagatgcgagtgtgccttcgggaacactgctacaggtgctgcatggctgtcgtcagctcgtgtcgtgagatgttgggttaagtcccgtaacgagcgcaacccttgtccttagttaccagcacgtgaaggtgggaactctaaggagactgccggtgacaaaccggaggaaggcggggacgacgtcaagtcatcatggcccttacgggtagggctacacacgtgctacaatggacgatacagagggaagcgaaggggcgacctggagccaatcttagaaagtcgttcgtagtccggattggagtctgcaactcgactccatgaagtcggaatcgctagtaatcgcgaatcagcatgtcgcggtgaatacgttcccgggccttgtacacaccgcccgtcacaccatgggagtgggctgcaccagaagtagatagtctaaccttcggggggacgtttaccacggtgtggttcatgactggggtg

SEQ ID NO: 1789 - DNA, 1467 bp, unidentified
  source 1..1467: mol_type = unassigned DNA; note = Legionella clemsonensis
attgaacgctggcggcatgcttaacacatgcaagtcgaacggcagcatggtctagcttgctagactgatggcgagtggcgaacgggtgagtaacgcgtaggaatatgccttaaagagggggataacctggggaaactcaggctaataccgcataagttctgaggaagaaagctggggaccttatggcctggcgctttaagattagcctgcgtccgattagctagttggtggggtaagggcctaccaaggcgacgatcggtagctggtctgagaggatgatcagccacactgggactgagacacggcccagactcctacgggaggcagcagtggggaatattggacaatggggggaaccctgatccagcaatgccgcgtgtgtgaagaaggcctgagggttgtaaagcactttcagtggggaggagtgattgattggttaagagctgattgattggacgttacccacagaagaagcaccggctaactccgtgccagcagccgcggtaatacggagggtgcgagcgttaatcggaattactgggcgtaaagggtgcgtaggtggtttaataagttagctgtgaaatccctgggcttaacctgggaattgcaactaagactgtttaacttgagtataggagagggtagtggaatttccggtgtagcggtgaaatgcgtagagatcggaaggaacaccagtggcgaaggcggctacctggcctaatactgacactgaggcacgaaagcgtgggtagcaaacaggattagataccctggtagtccacgctgtaaacgatgtcaactagctgttggtcttatgaatgagattagtggcgcagcaaacgcgataagttgaccgcctggggagtacggtcgcaagattaaaactcaaaggaattgacgggggcccgcacaagcggtggagcatgtggtttaattcgatgcaacgcgaagaaccttacctacccttgacatacagtggagcttgcagagatgtgagtgtgccttcgggaacactgatacaggtgctgcatggctgtcgtcagctcgtgtcgtgagatgttgggttaagtcccgtaacgagcgcaacccttgtccttagttaccagcacgttgaggtggggactctaaggagactgccggtgacaaaccggaggaaggcggggatgacgtcaagtcatcatggcccttacgggtagggctacacacgtgctacaatggctagtacagagggaagcgaaggggtgacctggagcaaatcctttaaagctggtcgtagtccggattggagtctgcaactcgactccatgaagtcggaatcgctagtaatcgcgaatcagcatgtcgcggtgaatacgttcccgggccttgtacacaccgcccgtcacaccatgggagtgggttgcaccagaagtagatagtctaaccttcggggggacgtttaccacggtgtgattcatgactggggtg

SEQ ID NO: 1790 - DNA, 1466 bp, Legionella drancourtii
  source 1..1466: mol_type = unassigned DNA
attgaacgctggcggcatgcttaacacatgcaagtcgaacggcagcatagtctagcttgctagatgggtggcgagtggcgaacgggtgagtaacgcgtaggaatatgccttaaagagggggacaacttggggaaactcaagctaataccgcataatgtctgaggacaaaagctggggaccttcgggcctggcgctttaagattagcctgcgtccgattagctagttggtagggtaaaggcctaccaaggcgacgatcggtagctggtctgagaggatgaccagccacactggaactgagacacggtccagactcctacgggaggcagcagtggggaatattggacaatgggggcaaccctgatccagcaatgccgcgtgtgtgaagaaggcctgagggttgtaaagcactttcagtggggaggaggattgtttgtttaagagatgaatgattggacgttacccacagaagaagcaccggctaactccgtgccagcagccgcggtaatacggagggtgcaagcgttaatcggaattactgggcgtaaagagtgcgtaggtggttgagtaagttatctgtgaaatccctgggcttaacctgggcaggtcagataatactgcttgactcgagtatgggagagggtagtggaatttccggtgtagcggtgaaatgcgtagagatcggaaggaacaccagtggcgaaggcggctacctggcctaatactgacactgaggcacgaaagcgtggggagcaaacaggattagataccctggtagtccacgccgtaaacgatgtcaactagctgttggttatataaatataattagtggcgcagcaaacgcgataagttgaccgcctggggagtacggtcgcaagattaaaactcaaaggaattgacgggggcccgcacaagcggtggagcatgtggtttaattcgatgcaacgcgaagaaccttacctacccttgacatacagtggattttgcagagatgcgaaagtgccttcgggaacactgatacaggtgctgcatggctgtcgtcagctcgtgtcgtgagatgttgggttaagtcccgtaacgagcgcaacccttattgttagttgccagcacgtaatggtgggaactctaatgagactgccggtgacaaaccggaggaaggcggggacgacgtcaagtcatcatggcccttacgggtagggctacacacgtgctacaatgggtgatacagagggaagcgaaggagtgatctggagccaatcttagaaagtcgctcgtagtccggattggagtctgcaactcgactccatgaagtcggaatcgctagtaatcgcgaatcagcatgtcgcggtgaatacgttcccgggccttgtacacaccgcccgtcacaccatgggagtgggctgcaccagaagtagatagtctaaccgcaagggggacgtttaccacggtgtggttcatgactggggtg

SEQ ID NO: 1791 - DNA, 1466 bp, Legionella drozanskii
  source 1..1466: mol_type = unassigned DNA
attgaacgctggcggcatgcttaacacatgcaagtcgaacggcagcacggtctagcttgctagatgggtggcgagtggcgaacgggtgagtaacgcgtaggaatatgccttaaagattgggataacatggggaaacacatgctaataccgaatgagctcttaggaggaaagctggggaccgcaaggcctggcgctttaagattagcctgcgtccgattagctagttggtagggtaaaggcctaccaaggcgacgatcggtagctggtctgagaggatggccagccacactgggactgagacacggcccagactcctacgggaggcagcagtggggaatattggacaatgggggcaaccctgatccagcaatgccgcgtgtgtgaagaaggcctgagggttgtaaagcactttcagtggggaggaggattgattggttaagagctgattgattggacgttacctacagaagaagcaccggctaactccgtgccagcagccgcggtaatacggagggtgcgagcgttaatcggaattactgggcgtaaagggtgcgtaggtggttagataagttagctgtgaaatccccgggctcaacctgggcaggtcagctaagactgtttgactcgagtatgggagagggtagtggaatttccggtgtagcggtgaaatgcgtagagatcggaaggaacaccagtggcgaaggcggctacctggcctaatactgacactgaggcacgaaagcgtggggagcaaacaggattagataccctggtagtccacgccgtaaacgatgtcaactagttgttggccttatgaatgaggttagtgacgaagcaaacgcgataagttgaccgcctggggagtacggtcgcaagattaaaactcaaaggaattgacgggggcccgcacaagcggtggagcatgtggtttaattcgatgcaacgcgaagaaccttacctacccttgacatacagtgaattttgcagagatgtgagagtgccttcgggaacactgatacaggtgctgcatggctgtcgtcagctcgtgtcgtgagatgttgggttaagtcccgtaacgagcgcaacccttatccttagttgccagcgcgtaaaggcgggaactctaaggagactgccggtgacaaaccggaggaaggcggggacgacgtcaagtcatcatggcccttacgggtagggctacacacgtgctacaatggccggtacagagggcagcgaaggggcgacctggagcaaatctttgaaagctggtcgtagtccggattggagtctgcaactcgactccatgaagtcggaatcgctagtaatcgcgaatcagcatgtcgcggtgaatacgttcccgggccttgtacacaccgcccgtcacaccatgggagtgggttgcaccagaagtagatagtctaaccttaggggggacgtttaccacggtgtgattcatgactggggtg

SEQ ID NO: 1792 - DNA, 1467 bp, Legionella erythra
  source 1..1467: mol_type = unassigned DNA
attgaacgctggcggcatgcttaacacatgcaagtcgaacggcagcacggtctagtttactagatgggtggcgagtggcgaacgggtgagtaacgcgtaggaatataccttaaagtgggggacaacttggggaaactcaagctaataccgcatagatctctgaggagagaagctggggaccttcgggcctggcgctttaagattagcctgcgtccgattagctagttggtggggtaagggcctaccaaggcgacgatcggtagctggtctgagaggatggccagccacactggaactgagacacggtccagactcctacgggaggcagcagtggggaatattggacaatggggggaaccctgatccagcaatgccgcgtgtgtgaagaaggcctgagggttgtaaagcactttcagtggggaggagggttgacaggttaagagctggttgactggacgttacccacagaagaagcaccggctaactccgtgccagcagccgcggtaatacggagggtgcgagcgttaatcggaattactgggcgtaaagggtgcgtaggtggtttgataagttatctgtgaaagccctgggcttaacctgggaactgcagataagactgttagactcgagtatgggagagggtagtggaatttccggtgtagcggtgaaatgcgtagagatcggaaggaacaccagtggcgaaggcggctacctggcctaatactgacactgaggcacgaaagcgtggggagcaaacaggattagataccctggtagtccacgctgtaaacgatgtcaactagctgttggtcttatgaatgagattagtggcgcagcaaacgcgataagttgaccgcctggggagtacggtcgcaagattaaaactcaaaggaattgacgggggcccgcacaagcggtggagcatgtggtttaattcgatgcaacgcgaagaaccttacctacccttgacatacagtgaacctttcagagatgagagggtgccttcgggagcactgatacaggtgctgcatggctgtcgtcagctcgtgtcgtgagatgttgggttaagtcccgtaacgagcgcaacccttatccttagttgccagcgcgtagaggcgggaactctagggagactgccggtgacaaaccggaggaaggcggggatgacgtcaagtcatcatggcccttacgggtagggctacacacgtgctacaatggccggtacagagggcagcgaaggggcgacctggagccaatctttaaaagccggtcgtagtccggattggagtctgcaactcgactccatgaagtcggaatcgctagtaatcgcgaatcagcatgtcgcggtgaatacgttcccgggccttgtacacaccgcccgtcacaccatgggagtgggttgcaccagaagtagatagtctaaccttaggggggacgtttaccacggtgtgattcatgactggggtg

SEQ ID NO: 1793 - DNA, 1466 bp, Legionella fallonii
  source 1..1466: mol_type = unassigned DNA
attgaacgctggcggcatgcttaacacatgcaagtcgaacggcagcatagtctagcttgctagactgatggcgagtggcgaacgggtgagtaacgcgtaggaatatgccttaaagagggggacaacttggggaaactcaagctaataccgcatacgctcttaggaggaaagctggggaccttcgggcctggcgctttaagattagcctgcgtccgattagctagttggtggggtaagggcctaccaaggcgacgatcggtagctggtctgagaggatgaccagccacactggaactgagacacggtccagactcctacgggaggcagcagtggggaatattggacaatggggggaaccctgatccagcaatgccgcgtgtgtgaagaaggcctgagggttgtaaagcactttcagtggggaggaggtttgacgggttaagagctagttgaatggacgttacccacagaagaagcaccggctaactccgtgccagcagccgcggtaatacggagggtgcaagcgttaatcggaattactgggcgtaaagagtgcgtaggtggttaattaagttatctgtgaaatccctgggctcaacctgggcaggtcagataatactggttaactcgagtatgggagagggtagtggaatttccggtgtagcggtgaaatgcgtagagatcggaaggaacaccagtggcgaaggcggctacctggcctaatactgacactgaggcacgaaagcgtggggagcaaacaggattagataccctggtagtccacgccgtaaacgatgtcaactagctgttggttatatgaatataattagtggcgcagcaaacgcgataagttgaccgcctggggagtacggtcgcaagattaaaactcaaaggaattgacgggggcccgcacaagcggtggagcatgtggtttaattcgatgcaacgcgaagaaccttacctacccttgacatacagtggattttgcagagatgcattagtgccttcgggaacactgatacaggtgctgcatggctgtcgtcagctcgtgtcgtgagatgttgggttaagtcccgtaacgagcgcaacccttatccttagttgccagcgcgtaaaggcgggaactctaaggagactgccggtgacaaaccggaggaaggcggggatgacgtcaagtcatcatggcccttacgggtagggctacacacgtgctacaatggccgatacagagggcagcgaaggggcgacctggagcaaatcttagaaagtcggtcgtagtccggattggagtctgcaactcgactccatgaagtcggaatcgctagtaatcgcgaatcagcatgtcgcggtgaatacgttcccgggccttgtacacaccgcccgtcacaccatgggagtgggttgcaccagaagtagatagtctaaccttcgggaggacgtttaccacggtgtggttcatgactggggtg

SEQ ID NO: 1794 - DNA, 1466 bp, Legionella feeleii
  source 1..1466: mol_type = unassigned DNA
attgaacgctggcggcatgcttaacacatgcaagtcgaacggcagcacggtctagcttgctagatgggtggcgagtggcgaacgggtgagtaacgcgtaggaatatgccttgaagtgggggataacttggggaaactcaagctaataccgcataagctctaaggaggaaagctggggaccgtaaggcctggcgcttcaagattagcctgcgtccgattagctagttggtggggtaagggcctaccaaggcgacgatcggtagctggtctgagaggatggccagccacactgggactgagacacggcccagactcctacgggaggcagcagtggggaatattggacaatgggggcaaccctgatccagcaatgccgcgtgtgtgaagaaggcctgagggttgtaaagcactttcagtggggaggaggattgacaggttaagagctagttaattggacgttacccacagaagaagcaccggctaactccgtgccagcagccgcggtaatacggagggtgcaagcgttaatcggaattactgggcgtaaagggtgcgtaggtggttgtataagttaactgtgaaatccccgggctcaacctgggcaggtcagttaagactgtatgactcgagtatgggagagggtagtggaatttccggtgtagcggtgaaatgcgtagagatcggaaggaacaccagtggcgaaggcggctacctggcccaatactgacactgaggcacgaaagcgtggggagcaaacaggattagataccctggtagtccacgctgtaaacgatgtcaactagctgttggccttatgaatgaggttagtggcgcagcaaacgcgataagttgaccgcctggggagtacggtcgcaagattaaaactcaaaggaattgacgggggcccgcacaagcggtggagcatgtggtttaattcgatgcaacgcgaagaaccttacctacccttgacatacagtgaattttgcagagatgcggaagtgccttcgggaacactgatacaggtgctgcatggctgtcgtcagctcgtgtcgtgagatgttgggttaagtcccgtaacgagcgcaacccttgtccttagttgccagcgcgtaaaggcgggaactctaaggagactgccggtgacaaaccggaggaaggcggggacgacgtcaagtcatcatggcccttacgggtagggctacacacgtgctacaatggccggtacagagggttgcgaagcggtgacgtggagctaatcttttaaagctggtcgtagtccggattggagtctgcaactcgactccatgaagtcggaatcgctagtaatcgcgaatcagcatgtcgcggtgaatacgttcccgggccttgtacacaccgcccgtcacaccatgggagtgggttgcaccagaagtagatagtctaaccttcgggaggacgtttaccacggtgtgattcatgactggggtg

SEQ ID NO: 1795 - DNA, 1465 bp, Legionella geestiana
  source 1..1465: mol_type = unassigned DNA
attgaacgctggcggcatgcctaacacatgcaagtcgaacggcagcacggtccagtttactggatgggtggcgagtggcgaacgggtgagtaacgcgtaggaatataccctgaagagggggataacctggggaaacccaggctaataccgcataatctctgaggagcaaagctggggaccttcgggcctggcgcttcaggaatagcctgcgtccgattagctagttggtggggtaagggcctaccaaggcgacgatcggtagctggtctgagaggatggtcagccacactgggactgagacacggcccagactcctacgggaggcagcagtggggaatattggacaatgggggcaaccctgatccagcaatgccgcgtgtgtgaagaaggcctgagggttgtaaagcactatcagtggggaggaggctttaatggttaagagctgttgaagtggacgttacccacagaagaagcaccggctaactccgtgccagcagccgcggtaatacggagggtgcgagcgttaatcggaattactgggcgtaaagggtgcgcaggtggttttgtaagttatctgtgaaagccccgggcttaacctgggaaagccagataaaactacgagactcgagtacgggagagggcagtggaatttccggtgtagcggtgaaatgcgtagagatcggaaggaacaccagtggcgaaggcggctgcctggcctgatactgacactgaggcacgaaagcgtggggagcaaacaggattagataccctggtagtccacgctgtaaacgatgtcaactggctgttggccttatgaatgaggttagtggcgtagctaacgcgataagttgaccgcctggggagtacggtcgcaagattaaaactcaaaggaattgacgggggcccgcacaagcggtggagcatgtggtttaattcgatgcaacgcgaagaaccttacctacccttgacatacagttaattgagcagagatgtttgagtgccttcgggcagactgatacaggtgctgcatggctgtcgtcagctcgtgtcgtgagatgttgggttaagtcccgtaacgagcgcaacccttgtcccttgttgccagcgattcggtcgggaactcgagggagactgccggtgacaaaccggaggaaggcggggacgacgtcaagtcatcatggcccttacgggtagggctacacacgtgctacaatggcaggtacagagggaagcgaagcggcgacgtggagcgaatcccaaaaagcctgtcgtagtccggattggagtctgcaactcgactccatgaagtcggaatcgctagtaatcgcgaatcagcatgtcgcggtgaatacgttcccgggccttgtacacaccgcccgtcacaccatgggagtgggctgcaccagaagtagatagtctaaccttcggggggacgtttaccacggtgtggttcatgactggggtg

SEQ ID NO: 1796 - DNA, 1397 bp, Legionella gratiana
  source 1..1397: mol_type = unassigned DNA
aaacatgcaagtcgaacggagcacggtctagcttgctagatgggtggcgagtggcgaacgggtgagtaacgcgtaggaatatgccttgaagagggggataacttggggaaactcaagctaataccgcataatgtctaaggacgaaagctggggacctttgggcctggcgctttaagattagcctgcgtccgattagctagttggtggggtaagggcctaccaagccgacgatcggtagctggtctgagaggatgaccagccacactggaactgagacacggtccagactcctacgggaggcagcagtggggaatattggacaatggggggaaccctgatccagcaatgccgcgtgtgtgaagaaggcctgagggttgtaaagcactttcagtggggaggaggattgataggttaagagctaattgattggacgtcacccacagaagaagcaccggctaactccgtgccagcagccgcggtaatacggagggtgcgagcgttaatcggaattactgggcgtaaagcgtgcgtaggtggttgattaagttatctgtgaaatccctgggctcaacctgggcaggtcagatgatactggttgactcgagtatgggagagggtagtggaatttccggtgtagcggtgaaatgcgtagagatcggaaggaacaccagtggcgaaggcggctacctggcctaatactgacactgaggcacgaaagcgtggggagcaaacaggattagataccctggtagtccacgctgtaaacgatgtcaactagctgttggatatatgaagataattagtggcgcaccaaacgcgataagttgaccgcctcgggagtacggtcgcaagattaaaactcaaaggaattgacgggggcccgcacaagcggtggagcatgtggtttaattcgatgcaacgcgaagaaccttacctacccttgacatacagtgtattttgcagagatgcattagtgccttcaggagcactgatacaggtgctgcatggctgtcgtcagctcgtgtcgtgagatgttgggttaagtcccgtaacgagcgcaacccttatccttagttgccagccgtaggtgggaactctaaggagactgccggtgacaaaccggaggaaggcggggatgacgtcaagtcatcatggcccttacgggtagggctacacacgtgctacaatggacgatacagagggaagcgaaggggtgacctggagccaatcttagaaagtcgctcgtagtccggattggagtctgcaactcgactccatgaagtcggaatcgctagtaatcgcgaatcagcatgtcgcggtgaatacgttcccgggccttgtacacaccgcccgtcacaccatgggagtgggctgcaccagaagtagatagtctaacc

SEQ ID NO: 1797 - DNA, 1467 bp, Legionella hackeliae
  source 1..1467: mol_type = unassigned DNA
attgaacgctggcggcatgcttaacacatgcaagtcgaacggcagcattttctagcttgctaggaagatggcgagtggcgaacgggtgagtaacgcgtaggaatatgccttaaagagggggacaacctggggaaactcaggctaataccgcataatttctgaggaaaaaagctggggaccgcaaggcctggcgctttaagattagcctgcgtccgattagctagttggtggggtaagggcctaccaaggcgacgatcggtagctggtctgagaggatgatcagccacactgggactgagacacggcccagactcctacgggaggcagcagtggggaatattggacaatggggggaaccctgatccagcaatgccgcgtgtgtgaagaaggcctgagggttgtaaagcactttcagtggggaggagattaggttaggttaagagctagacttaaggacgttacccacagaagaagcaccggctaactccgtgccagcagccgcggtaatacggagggtgcaagcgttaatcggaattactgggcgtaaagggtgcgtaggtggtttaataagttagttgtgaaatccctgggcttaacctgggaattgcacctaagactgttagactggagtataggagagggtagtggaatttccggtgtagcggtgaaatgcgtagagatcggaaggaacaccagtggcgaaggcggctacctggcctaatactgacactgaggcacgaaagcgtggggagcaaacaggattagataccctggtagtccacgctgtaaacgatgtcaactagctgttggtcttataaatgagattagtggcgcagcaaacgcgataagttgaccgcctggggagtacggtcgcaagattaaaactcaaaggaattgacgggggcccgcacaagcggtggagcatgtggtttaattcgatgcaacgcgaagaaccttacctacccttgacatacagtgaattttgcagagatgcattagtgccttcgggaacactgatacaggtgctgcatggctgtcgtcagctcgtgtcgtgagatgttgggttaagtcccgtaacgagcgcaacccttgtccttagttgccagcatgtaatggtggggactctaaggagactgccggtgacaaaccggaggaaggcggggatgacgtcaagtcatcatggcccttacgggtagggctacacacgtgctacaatggccggtacagagggaagcgaaggggcgacctggagcaaatccttaaaagctggtcgtagtccggattggagtctgcaactcgactccatgaagtcggaatcgctagtaatcgcgaatcagcatgtcgcggtgaatacgttcccgggccttgtacacaccgcccgtcacaccatgggagtgggttgcaccagaagtagatagtctaaccttcggggggacgtttaccacggtgtgattcatgactggggtg

SEQ ID NO: 1798 - DNA, 1466 bp, Legionella israelensis
  source 1..1466: mol_type = unassigned DNA
attgaacgctggcggcatgcctaacacatgcaagtcgaacggcagcatggtccagcttgctggactgatggcgagtggcgaacgggtgagtaatgcgtaggaatatgccttagagagggggataacccggggaaactcgggctaataccgcatatgctctttggagtaaagctggggaccttatggcctggcgctttaagattagcctacgtccgattagctagttggtgaggtaagggcttaccaaggctatgatcggtagctggtctgagaggatggacagccacactgggactgagacacggcccagactcctacgggaggcagcagtggggaatattggacaatggggggaaccctgatccagcaatgccgcgtgtgtgaagaaggcctgagggttgtaaagcactatcggtggggaggaagttcagttggttaagagctgactggattgacgttacccacagaagaagcaccggctaactccgtgccagcagccgcggtaatacggagggtgcgagcgttaatcggaattactgggcgtaaagggtgcgtaggtggtttggtaagttatctgtgaaattcctgggcttaacctaggctggtcagataagactgctggactggagtataggagagggcagtggaatttccggtgtagcggtgaaatgcgtagagatcggaaggaacaccagtggcgaaggcggctgcctggcctaatactgacactgaggcacgaaagcgtgggtagcgaacaggattagataccctggtagtccacgctgtaaacgatgtcaactagctgttggctttatagagaaagttagtggcgcagcaaacgcgataagttgaccgcctggggagtacggtcgcaagattaaaactcaaaggaattgacgggggcccgcacaagcggtggagcatgtggtttaattcgatgcaacgcgaagaaccttacctacccttgacatacagtggagcttgcagagatgcgagtgtgccttcgggaacactggtacaggtgctgcatggctgtcgtcagctcgtgtcgtgagatgttgggttaagtcccgtaacgagcgcaacccttattcttagttaccagcacgttatggtggggactctaaggagactgccggtgacaaaccggaggaaggcggggacgacgtcaagtcatcatggcccttacgggtagggctacacacgtgctacaatggacggtacagagggaagcgaaggggcgacctggagcgaatccttaaaagctgttcgtagtccggattggagtctggaactcgactccatgaagtcggaatcgctagtaatcgcgaatcagcatgtcgcggtgaatacgttcccgggccttgtacacaccgcccgtcacaccatgggagtgggctgcaccagaagtagatagtctaaccttcggggggacgtttaccacggtgtggttcatgactggggtg

SEQ ID NO: 1799 - DNA, 1468 bp, Legionella jordanis
  source 1..1468: mol_type = unassigned DNA
attgaacgctggcggcatgcttaacacatgcaagtcgaacggcagcatgacctagcttgctaggttgatggcgagtggcgaacgggtgagtaacgcgtaggaatatgccttaaagagggggataacctggggaaactcaggctaataccgcgtaatttctttggaaaaaagctggggaccgtaaggcctggcgctttaagattagcctgcgtccgattagctagttggtggggtaagggcctaccaaggcgacgatcggtagctggtctgagaggatgatcagccacactgggactgagacacggcccagactcctacgggaggcagcagtggggaatattggacaatgggggcaaccctgatccagcaatgccgcgtgtgtgaagaaggcctgagggttgtaaagcactttcagtggggaggagtggttagaaggttaagagccatttgactggacgttacccacagaagaagcaccggctaactccgtgccagcagccgcggtaatacggagggtgcgagcgttaatcggaattactgggcgtaaagggtgcgtaggtggtttggtaagttagttgtgaaatccctgggctcaacctgggaatggcgactaagactgccaggcttagagtataggagagggtagtggaatttccggtgtagcggtgaaatgcgtagagatcggaaggaacaccagtggcgaaggcggctacctggcctaatactgacactgaggcacgaaagcgtggggagcaaacaggattagataccctggtagtccacgctgtaaacgatgtcaactagctgttggtcttataaatgagattagtggcgcagcaaacgcgataagttgaccgcctggggagtacggtcgcaagattaaaactcaaaggaattgacgggggcccgcacaagcggtggagcatgtggtttaattcgatgcaacgcgaagaaccttacctacccttgacatacagtgaattttgcagagatgcattagtgccttcgggaacactgatacaggtgctgcatggctgtcgtcagctcgtgtcgtgagatgttgggttaagtcccgtaacgagcgcaacccttgtccttagttgccatcaagtgaagttggggactctaaggagactgccggtgacaaaccggaggaaggcggggatgacgtcaagtcatcatggcccttacgggtagggctacacacgtgctacaatggctggtacagaaggaagcgaaggggcgacctggagcaaatcctagaaagctggtcgtagtccggattggagtctgcaactcgactccatgaagtcggaatcgctagtaatcgcgaatcagcatgtcgcggtgaatacgttcccgggccttgtacacaccgcccgtcacaccatgggagtgggttgcaccagaagtagatagtctaaccttaggggggacgtttaccacggtgtgattcatgactggggtg

SEQ ID NO: 1800 - DNA, 1468 bp, Legionella lansingensis
  source 1..1468: mol_type = unassigned DNA
attgaacgctggcggcatgcttaacacatgcaagtcgaacggcagcatggtctagcttgctagactgatggcgagtggcgaacgggtgagtaatgcgtaggaatataccttaaagagggggataacttggggaaactcaggctaataccgcgtaatctctgaggagagaagctggggaccttcgggcctggcgctttaagaatagcctgcgtccgattagctagttggtggggtaagggcttaccaaggcgacgatcggtagctggtctgagaggatggccagccacactgggactgagacacggcccagactcctacgggaggcagcagtggggaatattggacaatggggggaaccctgatccagcaatgccgcgtgtgtgaagaaggcctgagggttgtaaagcactttcagtggggaggagattttggttggttaagagctgactaggaggacgttacccacagaagaagcaccggctaactccgtgccagcagccgcggtaatacggagggtgcgagcgttaatcggaattactgggcgtaaagggtgcgtaggtggtttaataagttagctgtgaaattcctgggctcaacctggggcggtcagctaagactgttagactttgagtatgggagagggtagtggaatttccggtgtagcggtgaaatgcgtagagatcggaaggaacaccagtggcgaaggcggctacctggcctaatactgacactgaggcacgaaagcgtggggagcaaacaggattagataccctggtagtccacgctgtaaacgatgtcaactagctgttggtcttatgaatgagattagtggcgcagcaaacgcgataagttgaccgcctggggagtacggtcgcaagattaaaactcaaaggaattgacgggggcccgcacaagcggtggagcatgtggtttaattcgatgcaacgcgaagaaccttacctacccttgacatacagtggagcttgcagagatgtgagtgtgcctttgggaacactgatacaggtgctgcatggctgtcgtcagctcgtgtcgtgagatgttgggttaagtcccgtaacgagcgcaacccttgttcttagttgccagcgcgtagaggcggggactctaaggagactgccggtgacaaaccggaggaaggcggggatgacgtcaagtcatcatggcccttacgggtagggctacacacgtgctacaatggctagtacagaggggagcgaaggggtgacctggagcgaatccttaaaagttagtcgtagtccggattggagtctgcaactcgactccatgaagtcggaatcgctagtaatcgcgaatcagcatgtcgcggtgaatacgttcccgggccttgtacacaccgcccgtcacaccatgggagtgggttgcaccagaagtagatagtctaaccttcggggagacgtttaccacggtgtgattcatgactggggtg

SEQ ID NO: 1801 - DNA, 1467 bp, Legionella londiniensis
  source 1..1467: mol_type = unassigned DNA
attgaacgctggcggcatgcttaacacatgcaagtcgaacggcagcatggtccagcttgctggactgatggcgagtggcgaacgggtgagtaacgcgtaggaatatgccttaaagagggggataacctggggaaactcaggctaataccgcataagctctgaggagtgaagctggggaccgtaaggcctggcgctttgagattagcctgcgtctgattagctagttggtggggtaagggcctaccaaggcgacgatcggtagctggtctgagaggatgatcagccacactgggactgagacacggcccagactcctacgggaggcagcagtggggaatattggacaatggggggaaccctgatccagcaatgccgcgtgtgtgaagaaggcctgagggttgtaaagcactttcggtggggaggatggaatggttggttaagagctgactgttctgacgttacccagagaagaagcaccggctaactccgtgccagcagccgcggtaatacggagggtgcgagcgttaatcggaattactgggcgtaaagggtgcgtaggtggtttagtaagttatctgtgaaattcctgggcttaacctgggttggtcagataagactgctgaactggagtataggagagggtagtggaatttccggtgtagcggtgaaatgcgtagagatcggaaggaacaccagtggcgaaggcggctacctggcctaatactgacactgaggcacgaaagcgtggggagcgaacaggattagataccctggtagtccacgctgtaaacgatgtcaactagctgttggccatatagagatggttagtggcgtagcaaacgcgctaagttgaccgcctggggagtacggtcgcaagattaaaactcaaaggaattgacgggggcccgcacaagcggtggagcatgtggtttaattcgatgcaacgcgaagaaccttacctacccttgacatacagtgaacctggcagagatgctggggtgccttcgggagcactgatacaggtgctgcatggctgtcgtcagctcgtgtcgtgagatgttgggttaagtcccgtaacgagcgcaacccttattcttagttgccagcgcgtgaaggcggggactctaaggagactgccggtgacaaaccggaggaaggcggggatgacgtcaagtcatcatggcccttacgggtagggctacacacgtgctacaatggccggtacagagggcggcgaagcggcgacgcggagcaaatcctttaaagctggtcgtagtccggattggagtctgcaactcgactccatgaagtcggaatcgctagtaatcgcgaatcagcatgtcgcggtgaatacgttcccgggccttgtacacaccgcccgtcacaccatgggagtgggctgcaccagaagcagatagtctaaccttttgggggacgtttgccacggtgtggttcatgactggggtg

SEQ ID NO: 1802 - DNA, 1456 bp, Legionella longbeachae
  source 1..1456: mol_type = unassigned DNA
ggcggcatgcttaacacatgcaagtcgaacggcagcatgacctagcttgctaggttgatggcgagtggcgaacgggtgagtaacgcgtaggaatatgccttgaagactgggataacttggggaaactcaagctaataccggatgatgtctgaggacgaaagctggggaccttcgggcctggcgctttaagattagcctgcgtccgattagctagttggtggggtaagggcctaccaaggcgacgatcggtagctggtctgagaggatgaccagccacactggaactgagacacggtccagactcctacgggaggcagcagtggggaatattggacaatgggggcaaccctgatccagcaatgccgcgtgtgtgaagaaggcctgagggttgtaaagcactttcagtggggaggagggttgataggttaagagctaattgattggacgttacccacagaagaagcaccggctaactccgtgccagcagccgcggtaatacggagggtgcaagcgttaatcggaattactgggcgtaaagcgtgcgtaggtggttgattaagttatctgtgaaatccctgggcttaacctgggcaggtcagatgatactggttgactcgagtatgggagagggtagtggaatttccggtgtagcggtgaaatgcgtagagatcggaaggaacaccagtggcgaaggcggctacctggcctaatactgacactgaggcacgaaagcgtggggagcaaacaggattagataccctggtagtccacgccgtaaacgatgtcaactagctgttggatatatgaatatatttagtggcgcagcaaacgcgataagttgaccgcctggggagtacggtcgcaagattaaaactcaaaggaattgacgggggcccgcacaagcggtggagcatgtggtttaattcgatgcaacgcgaagaaccttacctacccttgacatacagtgaattttgcagagatgcattagtgccttcgggaacactgatacaggtgctgcatggctgtcgtcagctcgtgtcgtgagatgttgggttaagtcccgtaacgagcgcaacccttgtccttagttgccagcacgtaaaggtgggaactctaaggagactgccggtgacaaaccggaggaaggcggggatgacgtcaagtcatcatggcccttacgggtagggctacacacgtgctacaatggacgatacagagggaagcgaaggggtgacctggagccaatcttagaaagtcgttcgtagtccggattggagtctgcaactcgactccatgaagtcggaatcgctagtaatcgcgaatcagcatgtcgcggtgaatacgttcccgggccttgtacacaccgcccgtcacaccatgggagtgggctgcaccagaagtagatagtctaaccttcggggggacgtttaccacggtgtggttcatgactggggtg

SEQ ID NO: 1803 - DNA, 1469 bp, unidentified
  source 1..1469: mol_type = unassigned DNA; note = Legionella maceachernii
attgaacgctggcggcatgcttaacacatgcaagtcgaacggcagcacggtctagtttactagatgggtggcgagtggcgaacgggtgagtaacgcgtaggaatatgccttaaagtttgggataacatggggaaactcatgctaataccggatgagctcttaggaggaaagctggggaccatttatggcctggcgctttaagattagcctgcgtccgattagctagttggtggggtaagggcctaccaaggcgacgatcggtagctggtctgagaggatgatcagccacactgggactgagacacggcccagactcctacgggaggcagcagtggggaatattggacaatggggggaaccctgatccagcaatgccgcgtgtgtgaagaaggcctgagggttgtaaagcactttcagtggggaggagggatgataggttaagagctaattatctggacgttacccacagaagaagcaccggctaactccgtgccagcagccgcggtaatacggagggtgcgagcgttaatcggaattactgggcgtaaagggtgcgtaggtggtttagtaagttatctgtgaaattcctgggctcaacctagggtggtcagataagactgctggactaagagtataggagagggtagtggaatttccggtgtagcggtgaaatgcgtagagatcggaaggaacaccagtggcgaaggcggctacctggcctaatactgacactgaggcacgaaagcgtggggagcaaacaggattagataccctggtagtccacgctgtaaacgatgtcaactagttgttggccttatgaatgaggttagtgacgaagcaaacgcgataagttgaccgcctggggagtacggtcgcaagattaaaactcaaaggaattgacgggggcccgcacaagcggtggagcatgtggtttaattcgatgcaacgcgaagaaccttacctacccttgacatacagtgaattctgcagagatgcggaagtgccgcgaggagcactgctacaggtgctgcatggctgtcgtcagctcgtgtcgtgagatgttgggttaagtcccgtaacgagcgcaacccttattcttagttaccatcgcgtagaggcggggactctaaggagactgccggtgacaaaccggaggaaggcggggatgacgtcaagtcatcatggcccttacgggtagggctacacacgtgctacaatggccggtacagagggcggcgaaggggtgacctggagcaaatctttgaaagctggtcgtagtccggattggagtctgcaactcgactccatgaagtcggaatcgctagtaatcgcgaatcagcatgtcgcggtgaatacgttcccgggccttgtacacaccgcccgtcacaccatgggagtgggttgcaccagaagtagatagtctaaccttaggggggacgtttaccacggtgtgattcatgactggggtg

SEQ ID NO: 1804 - DNA, 1466 bp, unidentified
  source 1..1466: mol_type = unassigned DNA; note = Legionella massiliensis
attgaacgctggcggcatgcttaacacatgcaagtcgaacggcagcatgatctagcttgctagattgatggcgagtggcgaacgggtgagtaacgcgtaggaatataccttagagagggggataacatggggaaactcatgctaataccgcatacgttcttcggaataaagctggggaccttcgggcctggcgctttaagaatagcctgcgtccgattagctagttggtagggtaagggcctaccaaggcgacgatcggtagctggtctgagaggatggccagccacactgggactgagacacggcccagactcctacgggaggcagcagtggggaatattggacaatggggggaaccctgatccagcaatgccgcgtgtgtgaagaaggcctgagggttgtaaagcactttcagtggggaggagggttgataggttaagagctaattaactggacgttacccacagaagaagcaccggctaactccgtgccagcagccgcggtaatacggagggtgcaagcgttaatcggaattactgggcgtaaagggtgcgtaggtggttatgtaagttatctgtgaaatccccgggctcaacctgggcaggtcagataagactgcgtaactcgagtatgggagagggtagtggaatttccggtgtagcggtgaaatgcgtagagatcggaaggaacaccagtggcgaaggcggctacctggcccaatactgacactgaggcacgaaagcgtggggagcaaacaggattagataccctggtagtccacgccgtaaacgatgtcaactagctgttggccttatgaatgaggttagtggcgcagcaaacgcgataagttgaccgcctggggagtacggtcgcaagattaaaactcaaaggaattgacgggggcccgcacaagcggtggagcatgtggtttaattcgatgcaacgcgaagaaccttacctacccttgacatacagtgaattttgcagagatgtggaagtgccttcgggaacactgatacaggtgctgcatggctgtcgtcagctcgtgtcgtgagatgttgggttaagtcccgtaacgagcgcaacccttatccttagttaccagcacgttgaggtggggactctaaggagactgccggtgacaaaccggaggaaggcggggatgacgtcaagtcatcatggcccttacgggtagggctacacacgtgctacaatggccggtacagagggcagcgaaggggcgacctggagcaaatcttttaaagctggtcgtagtccggattggagtctgcaactcgactccatgaagtcggaatcgctagtaatcgcgaatcagcatgtcgcggtgaatacgttcccgggccttgtacacaccgcccgtcacaccatgggagtgggttgcaccagaagtagatagtctaaccttcgggaggacgtttaccacggtgtgattcatgactggggtg

SEQ ID NO: 1805 - DNA, 1466 bp, Legionella moravica
  source 1..1466: mol_type = unassigned DNA
attgaacgctggcggcatgcttaacacatgcaagtcgaacggcagcatgacctagcttgctaggttgatggcgagtggcgaacgggtgagtaacgcgtaggaatataccttaaagagggggacaacttggggaaactcaagctaataccgcataatttccttggaaaaaagctggggaccttcgggcctggcgctttaagattagcctgcgtacgattagctagttggtagggtaaaggcctaccaaggcgacgatcgttagctggtctgagaggatgaccagccacactggaactgagacacggtccagactcctacgggaggcagcagtggggaatattggacaatgggggcaaccctgatccagcaatgccgcgtgtgtgaagaaggcctgagggttgtaaagcactttcagtggggaggagggttgacaggttaagagctagttaactggacgttacccacagaagaagcaccggctaactccgtgccagcagccgcggtaatacggagggtgcaagcgttaatcggaattactgggcgtaaagggtgcgtaggtggttaattaagttatctgtgaaatccccgggctcaacctgggcaggtcagataatactggttaactcgagtatgggagagggtagtggaatttccggtgtagcggtgaaatgcgtagagatcggaaggaacaccagtggcgaaggcggctacctggcctaatactgacactgaggcacgaaagcgtggggagcaaacaggattagataccctggtagtccacgctgtaaacgatgtcaactagctgttggatatatgaatatatttagtggcgaagcaaacgcgataagttgaccgcctggggagtacggtcgcaagattaaaactcaaaggaattgacgggggcccgcacaagcggtggagcatgtggtttaattcgatgcaacgcgaagaaccttacctacccttgacatacagtggattttgcagagatgcattagtgccttcgggaacactgatacaggtgctgcatggctgtcgtcagctcgtgtcgtgagatgttgggttaagtcccgtaacgagcgcaacccttatccttagttgccagcacgtaatggtgggaactctaaggagactgccggtgacaaaccggaggaaggcggggatgacgtcaagtcatcatggcccttacgggtagggctacacacgtgctacaatggccgatacagagggcagcgaaggggcgacctggagcaaatcttttaaagtcggtcgtagtccggattggagtctgcaactcgactccatgaagtcggaatcgctagtaatcgcgaatcagcatgtcgcggtgaatacgttcccgggccttgtacacaccgcccgtcacaccatgggagtgggctgcaccagaagtagatagtctaaccgcaagggggacgtttaccacggtgtggttcatgactggggtg

SEQ ID NO: 1806 - DNA, 1466 bp, Legionella nautarum
  source 1..1466: mol_type = unassigned DNA
attgaacgctggcggcatgcttaacacatgcaagtcgaacggcagcacggtctagcttgctagatgggtggcgagtggcgaacgggtgagtaacgcgtaggaatatgccttgaagtttgggataacatggggaaactcatgctaataccggatgagctcgagagaggaaagctggggaccttttggcctggcgctttaagattagcctgcgtccgattagctagttggtggggtaagggcctaccaaggcgacgatcggtagctggtctgagaggatggccagccacactgggactgagacacggcccagactcctacgggaggcagcagtggggaatattggacaatggggggaaccctgatccagcaatgccgcgtgtgtgaagaaggcctgagggttgtaaagcactttcagtggggaggaggattgattggttaagagctgattgattggacgttacccacagaagaagcaccggctaactccgtgccagcagccgcggtaatacggagggtgcgagcgttaatcggaattactgggcgtaaagggtgcgtaggtggttgtataagttagctgtgaaatccctgggctcaacctgggcaggtcagctaagactgtatgactcgagtataggagagggtagtggaatttccggtgtagcggtgaaatgcgtagagatcggaaggaacaccagtggcgaaggcggctacctggcctaatactgacactgaggcacgaaagcgtggggagcaaacaggattagataccctggtagtccacgctgtaaacgatgtcaactagttgttggccttatgaatgaggttagtgacgcagcaaacgcgataagttgaccgcctggggagtacggtcgcaagattaaaactcaaaggaattgacgggggcccgcacaagcggtggagcatgtggtttaattcgatgcaacgcgaagaaccttacctacccttgacatacagtgaacattgcagagatgcattggtgccttcgggagcactgatacaggtgctgcatggctgtcgtcagctcgtgtcgtgagatgttgggttaagtcccgtaacgagcgcaacccttatccttagttgccagcatgtgatggtggggactctaaggagactgccggtgacaaaccggaggaaggcggggatgacgtcaagtcatcatggcccttacgggtagggctacacacgtgctacaatggccggtacagagggcagcgaaggggcgacctggagcaaatcttgtaaagctggtcgtagtccggattggagtctgcaactcgactccatgaagtcggaatcgctagtaatcgcgaatcagcatgtcgcggtgaatacgttcccgggccttgtacacaccgcccgtcacaccatgggagtgggttgcaccagaagtagatagtctaaccttaggggggacgtttaccacggtgtgattcatgactggggtg

SEQ ID NO: 1807 - DNA, 1466 bp, Legionella oakridgensis
  source 1..1466: mol_type = unassigned DNA
attgaacgctggcggcatgcttaacacatgcaagtcgaacggcagcacggactagtttactagttgggtggcgagtggcggacgggtgagtaacgcgtaggaatatgccttaaagagtgggacaacctggggaaactcaggctaataccgcatgaactctgaggaggaaagctggggaccgtaaggcctggcgctttaagagtagcctgcgtccgattagctagttggtggggtaagggcctaccaaggcgacgatcggtagctggtctgagaggatgatcagccacactgggactgagacacggcccagactcctacgggaggcagcagtggggaatattggacaatggggggaaccctgatccagcaatgccgcgtgtgtgaagaaggcctgagggttgtaaagcacttttgttggggaggagtcttgttaggttaagagctagatgagaggacgttacccaaagaaaaagcaccggctaactccgtgccagcagccgcggtaatacggagggtgcgagcgttaatcggaattactgggcgtaaagggtgcgtaggttgctgattaagttatctgtgaaattcctgggctcaacctggggtggtcagataagactggttagctggagtataggagagggtagtggaatttccggtgtagcggtgaaatgcgtagagatcggaaggaacaccagtggcgaaggcggctacctggcctaatactgacactgaggcacgaaagcgtggggagcgaacaggattagataccctggtagtccacgctgtaaacgatgtcaactagctgttggtcatataaatgtgattagtggcgtagcaaacgcgctaagttgaccgcctggggagtacggtcgcaagattaaaactcaaaggaattgacgggggcccgcacaagcggtggagcatgtggtttaattcgatgcaacgcgaagaaccttacctacccttgacatacagtggagcttgcagagatgtgggtgtgccttcgggaacactgctacaggtgctgcatggctgtcgtcagctcgtgtcgtgagatgttgggttaagtcccgtaacgagcgcaacccttattcttagttgccagcgcgtgaaggcgggaactctaaggagactgccggtgacaaaccggaggaaggcggggatgacgtcaagtcatcatggcccttacgggtagggctacacacgtgctacaatggccggtacagagggcggcgaaggggtgacctggagcaaatccttgaaagctggtcgtagtccggattggagtctgcaactcgactccatgaagtcggaatcgctagtaatcgcgaatcagcatgtcgcggtgaatacgttcccgggccttgtacacaccgcccgtcacaccatgggagtgggctgcaccagaagcggatagtctaaccttcggggggacgtttgccacggtgtggttcatgactggggtg

SEQ ID NO: 1808 - DNA, 1466 bp, Legionella parisiensis
  source 1..1466: mol_type = unassigned DNA
attgaacgctggcggcatgcttaacacatgcaagtcgaacggcagcatagtctagcttgctagactgatggcgagtggcgaacgggtgagtaacgcgtaggaatatgccttgaagtgggggacaacttggggaaactcaagctaataccgcataatgtctaaggacgaaagctggggaccttcgggcctggcgctttaagattagcctgcgtccgattagctagttggtggggtaagggcctaccaaggcgacgatcggtagctggtctgagaggatggccagccacactggaactgagacacggtccagactcctacgggaggcagcagtggggaatattggacaatggggggaaccctgatccagcaatgccgcgtgtgtgaagaaggcctgagggttgtaaagcactttcagtggggaggagggttgataggttaagagctaattaactggacgttacccacagaagaagcaccggctaactccgtgccagcagccgcggtaatacggagggtgcaagcgttaatcggaattactgggcgtaaagcgtgcgtaggtggttgattaagttatctgtgaaatccctgggcttaacctgggcaggtcagatgatactggttgactcgagtatgggagagggtagtggaatttccggtgtagcggtgaaatgcgtagagatcggaaggaacaccagtggcgaaggcggctacctggcctaatactgacactgaggcacgaaagcgtggggagcaaacaggattagataccctggtagtccacgccgtaaacgatgtcaactagctgttggttatatgaaaataattagtggcgcagcaaacgcgataagttgaccgcctggggagtacggtcgcaagattaaaactcaaaggaattgacgggggcccgcacaagcggtggagcatgtggtttaattcgatgcaacgcgaagaaccttacctacccttgacatacagtgaattttgcagagatgcattagtgccttcgggaacactgatacaggtgctgcatggctgtcgtcagctcgtgtcgtgagatgttgggttaagtcccgtaacgagcgcaacccttgtccttagttgccagcgcgtaaaggcgggaactctaaggagactgccggtgacaaaccggaggaaggcggggacgacgtcaagtcatcatggcccttacgggtagggctacacacgtgctacaatgggcgatacagagggaagcgaaggggtgacctggagctaatcttagaaagttgctcgtagtccggattggagtctgcaactcgactccatgaagtcggaatcgctagtaatcgcgaatcagcatgtcgcggtgaatacgttcccgggccttgtacacaccgcccgtcacaccatgggagtgggctgcaccagaagtagatagtctaaccttcgggaggacgtttaccacggtgtggttcatgactggggtg

SEQ ID NO: 1809 - DNA, 1466 bp, Legionella pneumophila
  source 1..1466: mol_type = unassigned DNA
attgaacgctggcggcatgcttaacacatgcaagtcgaacggcagcattgtctagcttgctagacagatggcgagtggcgaacgggtgagtaacgcgtaggaatatgccttgaagagggggacaacttggggaaactcaagctaataccgcataatatctttggatgaaagctggggaccttcgggcctggcgctttaagattagcctgcgtccgattagctagttggtggggtaagggcctaccaaggcgacgatcggtagctggtctgagaggatggccagccacactggaactgagacacggtccagactcctacgggaggcagcagtggggaatattggacaatgggggcaaccctgatccagcaatgccgcgtgtgtgaagaaggcctgagggttgtaaagcactttcagtggggaggaggattgataggttaagagctgattgattggacgttacccacagaagaagcaccggctaactccgtgccagcagccgcggtaatacggagggtgcgagcgttaatcggaattactgggcgtaaagggtgcgtaggtggttgattaagttatctgtgaaattcctgggcttaacctgggacggtcagataatactggttgactcgagtatgggagagggtagtggaatttccggtgtagcggtgaaatgcgtagagatcggaaggaacaccagtggcgaaggcggctacctggcctaatactgacactgaggcacgaaagcgtggggagcaaacaggattagataccctggtagtccacgctgtaaacgatgtcaactagctgttggttatatgaaaataattagtggcgcagcaaacgcgataagttgaccgcctggggagtacggtcgcaagattaaaactcaaaggaattgacgggggcccgcacaagcggtggagcatgtggtttaattcgatgcaacgcgaagaaccttacctacccttgacatacagtggattttgcagagatgcattagtgccttcgggaacactgatacaggtgctgcatggctgtcgtcagctcgtgtcgtgagatgttgggttaagtcccgtaacgagcgcaacccttatccttagttgccagcatgtgatggtggggactctaaggagactgccggtgacaaaccggaggaaggcggggatgacgtcaagtcatcatggcccttacgggtagggctacacacgtgctacaatggccgatacagagggcggcgaaggggcgacctggagcaaatccttaaaagtcggtcgtagtccggattggagtctgcaactcgactccatgaagtcggaatcgctagtaatcgcgaatcagcatgtcgcggtgaatacgttcccgggccttgtacacaccgcccgtcacaccatgggagtgggttgcaccagaagtagatagtctaacctttggggggacgtttaccacggtgtggttcatgactggggtg

SEQ ID NO: 1810 - DNA, 1466 bp, Legionella quateirensis
  source 1..1466: mol_type = unassigned DNA
attgaacgctggcggcatgcttaacacatgcaagtcgaacggcagcatgacctagcttgctaggttgatggcgagtggcgaacgggtgagtaacgcgtaggaatataccttaaagagggggacaacttggggaaactcaagctaataccgcataatttccttggaaaaaagctggggaccttcgggcctggcgctttaagattagcctgcgtacgattagctagttggtagggtaaaggcctaccaaggcgacgatcgttagctggtctgagaggatgaccagccacactggaactgagacacggtccagactcctacgggaggcagcagtggggaatattggacaatgggggcaaccctgatccagcaatgccgcgtgtgtgaagaaggcctgagggttgtaaagcactttcagtggggaggagggttgacaggttaagagctagttaactggacgttacccacagaagaagcaccggctaactccgtgccagcagccgcggtaatacggagggtgcaagcgttaatcggaattactgggcgtaaagggtgcgtaggtggttaattaagttatctgtgaaatccccgggctcaacctgggcaggtcagataatactggttaactcgagtatgggagagggtagtggaatttccggtgtagcggtgaaatgcgtagagatcggaaggaacaccagtggcgaaggcggctacctggcccaatactgacactgaggcacgaaagcgtggggagcaaacaggattagataccctggtagtccacgccgtaaacgatgtcaactagctgttggatatatgaatatatttagtggcgaagcaaacgcgataagttgaccgcctggggagtacggtcgcaagattaaaactcaaaggaattgacgggggcccgcacaagcggtggagcatgtggtttaattcgatgcaacgcgaagaaccttacctacccttgacatacagtggattttgcagagatgcattagtgccttcgggaacactgatacaggtgctgcatggctgtcgtcagctcgtgtcgtgagatgttgggttaagtcccgtaacgagcgcaacccttatccttagttgccagcacgtaatggtgggaactctaaggagactgccggtgacaaaccggaggaaggcggggatgacgtcaagtcatcatggcccttacgggtagggctacacacgtgctacaatggccgatacagagggcagcgaaggggcgacctggagcaaatcttttaaagtcggtcgtagtccggattggagtctgcaactcgactccatgaagtcggaatcgctagtaatcgcgaatcagcatgtcgcggtgaatacgttcccgggccttgtacacaccgcccgtcacaccatgggagtgggctgcaccagaagtagatagtctaaccgcaaggaggacgtttaccacggtgtggttcatgactggggtg

SEQ ID NO: 1811 - DNA, 1466 bp, Legionella quinlivanii
  source 1..1466: mol_type = unassigned DNA
attgaacgctggcggcatgcttaacacatgcaagtcgaacggcagcacgacctagcttgctaggtgggtggcgagtggcgaacgggtgagtaacgcgtaggaatataccttagagagggggataacctggggaaactcaggctaataccgcgtacgttcttcggaataaagctggggaccttcgggcctggcgctttaagaatagcctgcgtccgattagctagttggtggggtaagggcctaccaaggcgacgatcggtagctggtctgagaggatgatcagccacactgggactgagacacggcccagactcctacgggaggcagcagtggggaatattggacaatgggggcaaccctgatccagcaatgccgcgtgtgtgaagaaggcctgagggttgtaaagcactttcagtggggaggagggttgacaggttaagagctagttaactggacgttacccacagaagaagcaccggctaactccgtgccagcagccgcggtaatacggagggtgcgagcgttaatcggaattactgggcgtaaagggtgcgtaggtggtttgataagttaactgtgaaagccccgggcttaacctgggagggtcagttaagactgttggactagagtatgggagagggtagtggaatttccggtgtagcggtgaaatgcgtagagatcggaaggaacaccagtggcgaaggcggctacctggcctaatactgacactgaggcacgaaagcgtggggagcaaacaggattagataccctggtagtccacgctgtaaacgatgtcaactagctgttggtcttatgaatgagattagtggcgcagcaaacgcgataagttgaccgcctggggagtacggtcgcaagattaaaactcaaaggaattgacgggggcccgcacaagcggtggagcatgtggtttaattcgatgcaacgcgaagaaccttacctacccttgacatacagtggagcttgcagagatgtgagtgtgccttcgggaacactgctacaggtgctgcatggctgtcgtcagctcgtgtcgtgagatgttgggttaagtcccgtaacgagcgcaacccttattcttagttgccagcgcgtagaggcgggaactctaaggagactgccggtgacaaaccggaggaaggcggggacgacgtcaagtcatcatggcccttacgggtagggctacacacgtgctacaatggccggtacagagggcagcgaaggggcgacctggagcaaatccttaaaagctggtcgtagtccggattggagtctgcaactcgactccatgaagtcggaatcgctagtaatcgcgaatcagcatgtcgcggtgaatacgttcccgggccttgtacacaccgcccgtcacaccatgggagtgggttgcaccagaagtagatagtctaaccttcggggggacgtttaccacggtgtgattcatgactggggtg

SEQ ID NO: 1812 - DNA, 1461 bp, Legionella rubrilucens
  source 1..1461: mol_type = unassigned DNA
attgaacgctggcggcatgcttaacacatgcaagtcgaacggcagcacggtctagcttgctagatgggtggcgagtggcgaacgggtgagtaacgcgtaggaatataccttaaagtgggggacaacttggggaaactcaagctaataccgcatagatctctgaggagagaagctggggaccttcgggcctggcgctttaagattagcctgcgtccgattagctagttggtggggtaagggcctaccaaggcgacgatcggtagctggtctgagaggatgaccagccacactggaactgagacacggtccagactcctacgggaggcagcagtggggaatattggacaatggggggaaccctgatccagcaatgccgcgtgtgtgaagaaggcctgagggttgtaaagcactttcagtggggaggagggttgacaggttaagagctggttgactggacgttacccacagaagaagcaccggctaactccgtgccagcagccgcggtaatacggagggtgcgagcgttaatcggaattactgggcgtaaagggtgcgtaggtggtttgataagttatctgtgaaagccctgggctcaacctgggaactgcagataagactgttgaactcgagtataggagagggtagtggaatttccggtgtagcggtgaaatgcgtagagatcggaaggaacaccagtggcgaaggcggctacctggcctaatactgacactgaggcacgaaagcgtggggagcaaacaggattagataccctggtagtccacgctgtaaacgatgtcaactagctgttggtcttatgaatgagattagtggcgcagcaaacgcgataagttgaccgcctggggagtacggtcgcaagattaaaactcaaaggaattgacgggggcccgcacaagcggtggagcatgtggtttaattcgatgcaacgcgaagaaccttacctacccttgacatacagtgaacctttcagagatgagagggtgccttcgggagcactgatacaggtgctgcatggctgtcgtcagctcgtgtcgtgagatgttgggttaagtcccgtaacgagcgcaacccttatccttagttgccaacgcgtagaggcgggaactctagggagactgccggtgacaaaccggaggaaggcggggatgacgtcaagtcatcatggcccttacgggtagggctacacacgtgctacaatggccggtacagagggaagcgaaggggcgacctggagccaatctttaaaagccggtcgtagtccggattggagtctgcaactcgactccatgaagtcggaatcgctagtaatcgcgaatcagcatgtcgcggtgaatacgttcccgggccttgtacacaccgcccgtcacaccatgggagtgggttgcaccagaagtagatagtctaaccttcggggggacgtttaccacggtgtgattcatgact

SEQ ID NO: 1813 - DNA, 1466 bp, Legionella sainthelensi
  source 1..1466: mol_type = unassigned DNA
attgaacgctggcggcatgcttaacacatgcaagtcgaacggcagcatgacctagcttgctaggttgatggcgagtggcgaacgggtgagtaacgcgtaggaatatgccttgaagactgggataacttggggaaactcaagctaataccggatgatgtcttaggacgaaagctggggaccttcgggcctggcgctttaagattagcctgcgtccgattagctagttggtggggtaagggcctaccaaggcgacgatcggtagctggtctgagaggatggccagccacactggaactgagacacggtccagactcctacgggaggcagcagtggggaatattggacaatgggggcaaccctgatccagcaatgccgcgtgtgtgaagaaggcctgagggttgtaaagcactttcagtggggaggagggttgataggttaagagctaattgattggacgttacccacagaagaagcaccggctaactccgtgccagcagccgcggtaatacggagggtgcaagcgttaatcggaattactgggcgtaaagcgtgcgtaggtggttaattaagttatctgtgaaatccctgggcttaacctgggcaggtcagatgatactggttaactcgagtatgggagagggtagtggaatttccggtgtagcggtgaaatgcgtagagatcggaaggaacaccagtggcgaaggcggctacctggcctaatactgacactgaggcacgaaagcgtggggagcaaacaggattagataccctggtagtccacgccgtaaacgatgtcaactagctgttggatatatgaatatatttagtggcgcagcaaacgcgataagttgaccgcctggggagtacggtcgcaagattaaaactcaaaggaattgacgggggcccgcacaagcggtggagcatgtggtttaattcgatgcaacgcgaagaaccttacctacccttgacatacagtgaattttgcagagatgcattagtgccttcgggaacactgatacaggtgctgcatggctgtcgtcagctcgtgtcgtgagatgttgggttaagtcccgtaacgagcgcaacccttgtccttagttgccagcacgtaaaggtgggaactctaaggagactgccggtgacaaaccggaggaaggcggggacgacgtcaagtcatcatggcccttacgggtagggctacacacgtgctacaatggacgatacagagggaagcgaaggggtgacctggagccaatcttagaaagtcgttcgtagtccggattggagtctgcaactcgactccatgaagtcggaatcgctagtaatcgcgaatcagcatgtcgcggtgaatacgttcccgggccttgtacacaccgcccgtcacaccatgggagtgggctgcaccagaagtagatagtctaaccttcggggggacgtttaccacggtgtggttcatgactggggtg

SEQ ID NO: 1814 - DNA, 1466 bp, Legionella santicrucis
  source 1..1466: mol_type = unassigned DNA
attgaacgctggcggcatgcttaacacatgcaagtcgaacggcagcatgacctagcttgctaggttgatggcgagtggcgaacgggtgagtaacgcgtaggaatatgccttgaagactgggataacttggggaaactcaagctaataccggatgatgtctgaggacgaaagctggggaccttcgggcctggcgctttaagattagcctgcgtccgattagctagttggtggggtaagggcctaccaaggcgacgatcggtagctggtctgagaggatgaccagccacactggaactgagacacggtccagactcctacgggaggcagcagtggggaatattggacaatggggggaaccctgatccagcaatgccgcgtgtgtgaagaaggcctgagggttgtaaagcactttcagtggggaggaggattgataggttaagagctaattgattggacgttacccacagaagaagcaccggctaactccgtgccagcagccgcggtaatacggagggtgcaagcgttaatcggaattactgggcgtaaagcgtgcgtaggtggttgattaagttatctgtgaaatccctgggcttaacctgggcaggtcagatgatactggttgactcgagtatgggagagggtagtggaatttccggtgtagcggtgaaatgcgtagagatcggaaggaacaccagtggcgaaggcggctacctggcctaatactgacactgaggcacgaaagcgtggggagcaaacaggattagataccctggtagtccacgccgtaaacgatgtcaactagctgttggatatatgaatatatttagtggcgtagcaaacgcgataagttgaccgcctggggagtacggtcgcaagattaaaactcaaaggaattgacgggggcccgcacaagcggtggagcatgtggtttaattcgatgcaacgcgaagaaccttacctacccttgacatacagtggaacttgcagagatgtgagtgtgccttcgggaacactgatacaggtgctgcatggctgtcgtcagctcgtgtcgtgagatgttgggttaagtcccgtaacgagcgcaacccttgtccttagttgccagcacgtaaaggtgggaactctaaggagactgccggtgacaaaccggaggaaggcggggacgacgtcaagtcatcatggcccttacgggtagggctacacacgtgctacaatggacgatacagagggaagcgaaggggtgacctggagccaatcttagaaagtcgttcgtagtccggattggagtctgcaactcgactccatgaagtcggaatcgctagtaatcgcgaatcagcatgtcgcggtgaatacgttcccgggccttgtacacaccgcccgtcacaccatgggagtgggctgcaccagaagtagatagtctaaccttcggggggacgtttaccacggtgtggttcatgactggggtg

SEQ ID NO: 1815 - DNA, 1466 bp, Legionella shakespearei
  source 1..1466: mol_type = unassigned DNA
attgaacgctggcggtatgcttaacacatgcaagtcgaacggcagcattatctagcttgctagatagatggcgagtggcgaacgggtgagtaacgcgtaggaatataccttaaagagggggacaacttggggaaactcaagctaataccgcataatttccatggaaaaaagctggggaccttcgggcctggcgctttaagattagcctgcgtacgattagctagttggtagggtaagggcctaccaaggcgacgatcgttagctggtctgagaggatgaccagccacactggaactgagacacggtccagactcctacgggaggcagcagtggggaatattggacaatggggggaaccctgatccagcaataccgcgtgtgtgaagaaggcctgagggttgtaaagcactttcagtggggaggagggtatttatgttaagagctagaatactggacgttacccacagaagaagcaccggctaactccgtgccagcagccgcggtaatacggagggtgcaagcgttaatcggaattactgggcgtaaagggtgcgtaggtggttgtgtaagttatctgtgaaatccccgggctcaacctgggcaggtcagataatactgcatgactcgagtatgggagagggtagtggaatttccggtgtagcggtgaaatgcgtagagatcggaaggaacaccagtggcgaaggcggctacctggcccaatactgacactgaggcacgaaagcgtggggagcaaacaggattagataccctggtagtccacgctgtaaacgatgtcaactagctgttggatatatgaatatatttagtggcgcagcaaacgcgataagttgaccgcctggggagtacggtcgcaagattaaaactcaaaggaattgacgggggcccgcacaagcggtggagcatgtggtttaattcgatgcaacgcgaagaaccttacctacccttgacatacagtggaacttgcagagatgtgagtgtgccttcgggaacactgctacaggtgctgcatggctgtcgtcagctcgtgtcgtgagatgttgggttaagtcccgtaacgagcgcaacccttatccttagttgccagcgcgtaaaggtgggaactctaaggagactgccggtgacaaaccggaggaaggcggggatgacgtcaagtcatcatggcccttacgggtagggctacacacgtgctacaatggttgatacagagggcagcgaaggggcgacctggagcaaatcttttaaagtcaatcgtagtccggattggagtctgcaactcgactccatgaagtcggaatcgctagtaatcgcgaatcagcatgtcgcggtgaatacgttcccgggccttgtacacaccgcccgtcacaccatgggagtgggctgcaccagaagtagatagtctaaccgcaagggggacgtttaccacggtgtggttcatgactggggtg

SEQ ID NO: 1816 - DNA, 1466 bp, Legionella spiritensis
  source 1..1466: mol_type = unassigned DNA
attgaacgctggcggcatgcttaacacatgcaagtcgaacggcagcatggtccagcttgctggactgatggcgagtggcgaacgggtgagtaacgcgtaggaatatgccttaaagagggggacaacttggggaaacccaagctaataccgcataatctctgaggagagaagctggggaccttcgggcctggcgctttaagattagcctgcgtccgattagctagttggtgaggtaagggctcaccaaggcgacgatcggtagctggtctgagaggatgaccagccacactgggactgagacacggcccagactcctacgggaggcagcagtggggaatattggacaatgggggaaaccctgatccagcaatgccgcgtgtgtgaagaaggcctgagggttgtaaagcactttcagtggggaggagagttgagtggttaagagctgtttgactggacgttacccacagaagaagcaccggctaactccgtgccagcagccgcggtaatacggagggtgcaagcgttaatcggaattactgggcgtaaagggtgcgtaggtggtttggtaagttaactgtgaaagccctgggcttaacctgggaattgcagttaagactgtcgaactcgagtatgggagagggtagtggaatttccggtgtagcggtgaaatgcgtagagatcggaaggaacaccagtggcgaaggcggctacctggcctaatactgacactgaggcacgaaagcgtggggagcaaacaggattagataccctggtagtccacgctgtaaacgatgtcaactagctgttggccttataaatgaggttagtggcgcagcaaacgcgataagttgaccgcctggggagtacggtcgcaagattaaaactcaaaggaattgacgggggcccgcacaagcggtggagcatgtggtttaattcgatgcaacgcgaagaaccttacctacccttgacatacagtgaatgatgcagagatgcgtcagtgccttcgggaatactgatacaggtgctgcatggctgtcgtcagctcgtgtcgtgagatgttgggttaagtcccgtaacgagcgcaacccttgtccttagttgccagcacgtaaaggtgggaactctagggagactgccggtgacaaaccggaggaaggcggggacgacgtcaagtcatcatggcccttacgggtagggctacacacgtgctacaatggccggtacagagggcagcgaaggggcgacctgtagcaaatccttaaaagctggtcgtagtccggattggagtctgcaactcgactccatgaagtcggaatcgctagtaatcgcgaatcagcatgtcgcggtgaatacgttcccgggccttgtacacaccgcccgtcacaccatgggagtgggttgcaccagaagtagatagtctaaccttcggggggacgtttaccacggtgtgattcatgactggggtg

SEQ ID NO: 1817 - DNA, 1466 bp, unidentified
  source 1..1466: mol_type = unassigned DNA; note = Legionella steelei
attgaacgctggcggcatgcttaacacatgcaagtcgaacggcagcatgatctagcttgctagattgatggcgagtggcgaacgggtgagtaacgcgtaggaatatgccttgaagtgggggacaacttggggaaactcaagctaataccgcataatgtctaaggacgaaagctggggaccttagggcctggcgctttaagattagcctgcgtccgattagctagttggtggggtaagggcctaccaaggcgacgatcggtagctggtctgagaggatgaccagccacactggaactgagacacggtccagactcctacgggaggcagcagtggggaatattggacaatgggggcaaccctgatccagcaatgccgcgtgtgtgaagaaggcctgagggttgtaaagcactttcagtagggaggaggattgctaggttaagagctaagtgattggacgttacctacagaagaagcaccggctaactccgtgccagcagccgcggtaatacggagggtgcaagcgttaatcggaattactgggcgtaaagcgtgcgtaggtggttaattaagttatctgtgaaatccctgggcttaacctgggcaggtcagatgatactggttgactcgagtatgggagagggtagtggaatttccggtgtagcggtgaaatgcgtagagatcggaaggaacaccagtggcgaaggcggctacctggcctaatactgacactgaggcacgaaagcgtggggagcaaacaggattagataccctggtagtccacgccgtaaacgatgtcaactagctgttggttatatgaaaataattagtggcgcagcaaacgcgataagttgaccgcctggggagtacggtcgcaagattaaaactcaaaggaattgacgggggcccgcacaagcggtggagcatgtggtttaattcgatgcaacgcgaagaaccttacctacccttgacatacagtgaattttgcagagatgcattagtgccttcgggaacactgatacaggtgctgcatggctgtcgtcagctcgtgtcgtgagatgttgggttaagtcccgtaacgagcgcaacccttgtccttagttgccagcacgtaatggtgggaactctaaggagactgccggtgacaaaccggaggaaggcggggacgacgtcaagtcatcatggcccttacgggtagggctacacacgtgctacaatgggtgatacagagggaagcgaaggggtgacctggagctaatcttagaaagtcgctcgtagtccggattggagtctgcaactcgactccatgaagtcggaatcgctagtaatcgcgaatcagcatgtcgcggtgaatacgttcccgggccttgtacacaccgcccgtcacaccatgggagtgggctgcaccagaagtagatagtctaaccttcgggaggacgtttaccacggtgtggttcatgactggggtg

SEQ ID NO: 1818 - DNA, 1466 bp, Legionella steigerwaltii
  source 1..1466: mol_type = unassigned DNA
attgaacgctggcggcatgcttaacacatgcaagtcgaacggcagcatagtctagcttgctagatgggtggcgagtggcgaacgggtgagtaacgcgtaggaatatgccttgaagagggggacaacttggggaaactcaagctaataccgcataatgtctaaggacgaaagctggggaccgcaaggcctggcgctttaagattagcctgcgtccgattagctagttggtggggtaagggcctaccaaggcgacgatcggtagctggtctgagaggatgaccagccacactggaactgagacacggtccagactcctacgggaggcagcagtggggaatattggacaatgggggcaaccctgatccagcaatgccgcgtgtgtgaagaaggcctgagggttgtaaagcactttcagtagggaggagggttgataggttaagagctaattaactggacgttacctacagaagaagcaccggctaactccgtgccagcagccgcggtaatacggagggtgcaagcgttaatcggaattactgggcgtaaagcgtgcgtaggtggttgactaagttatctgtgaaatccccgggcttaacctgggcaggtcagatgatactggttgactcgagtatgggagagggtagtggaatttccggtgtagcggtgaaatgcgtagagatcggaaggaacaccagtggcgaaggcggctacctggcctaatactgacactgaggcacgaaagcgtggggagcaaacaggattagataccctggtagtccacgctgtaaacgatgtcaactagctgttggttatatgaaaataattagtggcgcagcaaacgcgataagttgaccgcctggggagtacggtcgcaagattaaaactcaaaggaattgacgggggcccgcacaagcggtggagcatgtggtttaattcgatgcaacgcgaagaaccttacctacccttgacatacagtgaattttgcagagatgcattagtgccttcgggaacactgatacaggtgctgcatggctgtcgtcagctcgtgtcgtgagatgttgggttaagtcccgtaacgagcgcaacccttgtccttagttgccagcacgtaatggtgggaactctaaggagactgccggtgacaaaccggaggaaggcggggatgacgtcaagtcatcatggcccttacgggtagggctacacacgtgctacaatgggcgatacagagggaagcgaaggggtgacctggagctaatcttagaaagtcgctcgtagtccggattggagtctgcaactcgactccatgaagtcggaatcgctagtaatcgcgaatcagcatgtcgcggtgaatacgttcccgggccttgtacacaccgcccgtcacaccatgggagtgggctgcaccagaagtagatagtctaaccttcggggggacgtttaccacggtgtggttcatgactggggtg

SEQ ID NO: 1819 - DNA, 1340 bp, Legionella taurinensis
  source 1..1340: mol_type = unassigned DNA
  misc_difference 660: note = n is a, c, g, or t
attgaacgctggcggcatgcttaacacatgcaagtcgaacggcagcacgttctagcttgctagatgggtggcgagtggcgaacgggtgagtaacgcgtaggaatatgccttaaagtgggggacaacttggggaaactcaagctaataccgcatagtctctgaggagagaagctggggaccttcgggcctggcgctttaagattggcctgcgtccgattagctagttggtggggtaagggcctaccaaggcgacgatcggtagctggtctgagaggatgaccagccacactggaactgagacacggtccagactcctacgggaggcagcagtggggaatattggacaatggggggaaccctgatccagcaatgccgcgtgtgtgaagaaggcctgagggttgtaaagcactttcagtggggaggagggttgacaggttaagagctggttgactggacgttacccacagaagaagcaccggctaactccgtgccagcagccgcggtaatacggagggtgcgagcgttaatcggaattactgggcgtaaagggtgcgtaggtggtttgataagttatctgtgaaagccctgggctcaacctgggaactgcagataagactgttggactcgagtataggagagggtagtggaatttccggtgtngcggtgaaatgcgtagagatcggaaggaacaccagtggcgaaggcggctacctggcctaatactgacactgaggcacgaaagcgtggggagcaaacaggattagataccctggtagtccacgctgtaaacgatgtcaactagctgttggtcttatgaatgagattagtggcgcagcaaacgcgataagttgaccgcctggggagtacggtcgcaagattaaaactcaaaggaattgacgggggcccgcacaagcggtggagcatgtggtttaattcgatgcaacgcgaagaaccttacctacccttgacatacagtgaacctttcagagatgagagggtgccttcgggagcactgatacaggtgctgcatggctgtcgtcagctygtgtcgtgagatgttgggttaagtcccgtaacgagcgcaacccttatccttagttwccwgcgcgtagaggcggggactctagggagactgccggtgacaaaccggaggawggcggggacgacgtcaagtcatcatggcccttacgggtagggctacacacgtgctacaatggccggtacagagrgaagcgaaggggcgacctggagccaatctttaaaagccggtcgtagtccggattagagtcwgcaactcgactccatgaagtcggaatcgatagtaatcgcgaatcagcatg

SEQ ID NO: 1820 - DNA, 1466 bp, Legionella tucsonensis
  source 1..1466: mol_type = unassigned DNA
attgaacgctggcggcatgcttaacacatgcaagtcgaacggcagcatagtctagcttgctagatgggtggcgagtggcgaacgggtgagtaacgcgtaggaatatgccttgaagagggggacaacttggggaaactcaagctaataccgcataatgtctaaggacgaaagctggggaccgcaaggcctggcgctttaagattagcctgcgtccgattagctagttggtggggtaagggcctaccaaggcgacgatcggtagctggtctgagaggatgaccagccacactggaactgagacacggtccagactcctacgggaggcagcagtggggaatattggacaatggggggaaccctgatccagcaatgccgcgtgtgtgaagaaggcctgagggttgtaaagcactttcagtggggaggagggttgccaggttaagagctaggtgattggacgttacccacagaagaagcaccggctaactccgtgccagcagccgcggtaatacggagggtgcgagcgttaatcggaattactgggcgtaaagagtgcgtaggtggttgaataagttatctgtgaaatccctgggcttaacctgggcaggtcagatgatactgtttgactcgagtatgggagagggtagtggaatttccggtgtagcggtgaaatgcgtagagatcggaaggaacaccagtggcgaaggcggctacctggcctaatactgacactgaggcacgaaagcgtggggagcaaacaggattagataccctggtagtccacgccgtaaacgatgtcaactagctgttggttatatgaaaataattagtggcgcagcaaacgcgataagttgaccgcctggggagtacggtcgcaagattaaaactcaaaggaattgacgggggcccgcacaagcggtggagcatgtggtttaattcgatgcaacgcgaagaaccttacctacccttgacatacagtggattttgcagagatgcattagtgccttcgggaacactgatacaggtgctgcatggctgtcgtcagctcgtgtcgtgagatgttgggttaagtcccgtaacgagcgcaacccttgtccttagttaccagcacgtgatggtggggactctaaggagactgccggtgacaaaccggaggaaggcggggacgacgtcaagtcatcatggcccttacgggtagggctacacacgtgctacaatgggcgatacagagggaagcgaaggggtgacctggagctaatcttagaaagttgctcgtagtccggattggagtctgcaactcgactccatgaagtcggaatcgctagtaatcgcgaatcagcatgtcgcggtgaatacgttcccgggccttgtacacaccgcccgtcacaccatgggagtgggctgcaccagaagtagatagtctaaccttcggggggacgtttaccacggtgtggttcatgactggggtg

SEQ ID NO: 1821 - DNA, 1457 bp, Legionella wadsworthii
  source 1..1457: mol_type = unassigned DNA
gcgctggcggcatgcttaacacatgcaagtcgaacggcagcatggtctagcttgctagactgatggcgagtggcgaacgggtgagtaacgcgtaggaatatgccttgaagtgggggacaacttggggaaactcaagctaataccgcataatatctttggatgaaagctggggaccttcgggcctggcgctttaagattagcctgcgtccgattagctagttggtggggtaagggcctaccaaggcgacgatcggtagctggtctgagaggatggccagccacactggaactgagacacggtccagactcctacgggaggcagcagtggggaatattggacaatggggggaaccctgatccagcaatgccgcgtgtgtgaagaaggcctgagggttgtaaagcactttcagtggggaggagggtttataggttaagagctaataagttggacgtcacccacagaagaagcaccggctaactccgtgccagcagccgcggtaatacggagggtgcaagcgttaatcggaattactgggcgtaaagcgtgcgtaggtggttgattaagttatctgtgaaatccccgggcttaacctgggcaggtcagataatactggttgactcgagtatgggagagggtagtggaatttccggtgtagcggtgaaatgcgtagagatcggaaggaacaccagtggcgaaggcggctacctggcctaatactgacactgaggcacgaaagcgtggggagcaaacaggattagataccctggtagtccacgctgtaaacgatgtcaactagctgttggttatatgaaaataattagtggcgcagcaaacgcgataagttgaccgcctggggagtacggtcgcaagattaaaactcaaaggaattgacgggggcccgcacaagcggtggagcatgtggtttaattcgatgcaacgcgaagaaccttacctacccttgacatacagtgtagcttgcagagatgcattagtgccttcgggaacactgatacaggtgctgcatggctgtcgtcagctcgtgtcgtgagatgttgggttaagtcccgtaacgagcgcaacccttatcttagttgccagcccgtaggtgggaactctagggagactgccggtgacaaaccggaggaaggcggggatgacgtcaagtcatcatggcccttacgggtagggctacacacgtgctacaatggtggtacagagggaagcgaaggggtgacctggagctaatcttagaaagtcgctcgtagtccggattggagtctgcaactcgactccatgaagtcggaatcgctagtaatcgcgaatcagcatgtcgcggtgaatacgttcccgggccttgtacacaccgcccgtcacaccatgggagtgggctgcaccagaagtagatagtctaaccttcgggaggacgtttaccacggtgtggttcatgactggggtg

SEQ ID NO: 1822 - DNA, 1434 bp, Legionella waltersii
  source 1..1434: mol_type = unassigned DNA
attgaacgctggcggcatgcttaacacatgcaagtcgaacggcagcacgttctagcttgctagactggtggcgagtggcgaacgggtgagtaacgcgtaggaatatgccttgaagtgggggacaacttggggaaactcaagctaataccgcataatatctaaggatgaaagctggggaccttcgggcctggcgctttaagattagcctgcgtacgattagctagttggtggggtaagggcctaccaaggcgacgatcgttagctggtctgagaggatgaccagccacactggaactgagacacggtccagactcctacgggaggcagcagtggggaatattggacaatgggggaaaccctgatccagcaatgccgcgtgtgtgaagaaggcctgagggttgtaaagcactttcagtggggaggaggattgataggttaagagctaattaattggacgttacccacagaagaagcaccggctaactccgtgccagcagccgcggtaatacggagggtgcgagcgttaatcggaattactgggcgtaaagggtgcgtaggtggtttggtaagttatctgtgaaattcctgggcttaacctgggacggtcagatgatactgctgaactcgagtatgggagagggtagtggaatttccggtgtagcggtgaaatgcgtagagatcggaaggaacaccagtggcgaaggcggctacctggcccaatactgacactgaggcacgaaagcgtggggagcaaacaggattagataccctggtagtccacgccgtaaacgatgtcaactagctgttggttatatgaatataattagtggcgcagcaaacgcgataagttgaccgcctggggagtacggtcgcaagattaaaactcaaaggaattgacgggggcccgcacaagcggtggagcatgtggtttaattcgatgcaacgcgaagaaccttacctacccttgacatacagtgaattttgcagagatgcattagtgccttcgggaacactgatacaggtgctgcatggctgtcgtcagctcgtgtcgtgagatgttgggttaagtcccgtaacgagcgcaacccttattcctagttgccagcacgtaaaggtgggaactctagggagactgccggtgacaaaccggaggaaggcggggatgacgtcaagtcatcatggcccttacgggtagggctacacacgtgctacaatggccgatacagagggcggcgaaggggtgacctggagcaaatcctagaaagtcggtcgtagtccggattggagtctgcaactcgactccatgaagtcggaatcgctagtaatcgcgaatcagcatgtcgcggtgaatacgttcccgggccttgtacacaccgcccgtcacaccatgggagtgggctgcaccagaagtagatagtctaaccttcgggagga

SEQ ID NO: 1823 - DNA, 1466 bp, Legionella worsleiensis
  source 1..1466: mol_type = unassigned DNA
attgaacgctggcggcatgcttaacacatgcaagtcgaacggcagcatgacctagcttgctaggttgatggcgagtggcgaacgggtgagtaacgcgtaggaatataccttaaagagggggacaacttggggaaactcaagctaataccgcataatttctttggaaaaaagctggggaccttcgggcctggcgctttaagattagcctgcgtacgattagctagttggtagggtaaaggcctaccaaggcgacgatcgttagctggtctgagaggatgaccagccacactggaactgagacacggtccagactcctacgggaggcagcagtggggaatattggacaatgggggcaaccctgatccagcaatgccgcgtgtgtgaagaaggcctgagggttgtaaagcactttcagtggggaggagggttgattggttaagagctgattgattggacgttacccacagaagaagcaccggctaactccgtgccagcagccgcggtaatacggagggtgcaagcgttaatcggaattactgggcgtaaagggtgcgtaggtggttaattaagttatctgtgaaatccctgggctcaacctgggcaggtcagataatactggttaactcgagtatgggagagggtagtggaatttccggtgtagcggtgaaatgcgtagagatcggaaggaacaccagtggcgaaggcggctacctggcctaatactgacactgaggcacgaaagcgtggggagcaaacaggattagataccctggtagtccacgctgtaaacgatgtcaactagctgttggatatatgaatatatttagtggcgcagcaaacgcgataagttgaccgcctggggagtacggtcgcaagattaaaactcaaaggaattgacgggggcccgcacaagcggtggagcatgtggtttaattcgatgcaacgcgaagaaccttacctacccttgacatacagtggattttgcagagatgcattagtgccttcgggaacactgatacaggtgctgcatggctgtcgtcagctcgtgtcgtgagatgttgggttaagtcccgtaacgagcgcaacccttatccttagttgccagcacgtaatggtgggaactctaaggagactgccggtgacaaaccggaggaaggcggggatgacgtcaagtcatcatggcccttacgggtagggctacacacgtgctacaatggccgatacagagggcagcgaaggggcgacctggagcaaatcttagaaagtcggtcgtagtccggattggagtctgcaactcgactccatgaagtcggaatcgctagtaatcgcgaatcagcatgtcgcggtgaatacgttcccgggccttgtacacaccgcccgtcacaccatgggagtgggctgcaccagaagtagatagtctaaccgcaagggggacgtttaccacggtgtggttcatgactggggtg

SEQ ID NO: 1824 - DNA, 1386 bp, unidentified
  source 1..1386: mol_type = unassigned DNA; note = Leisingera aquaemixtae
aacgaacgctggcggcaggcctaacacatgcaagtcgagcgcgcccttcggggtgagcggcggacgggttagtaacgcgtgggaacgtgcccttctctaaggaatagccactggaaacggtgagtaataccttatacgcccttcgggggaaagatttatcggagaaggatcggcccgcgttagattaggtagttggtggggtaatggcctaccaagcctacgatctatagctggttttagaggatgatcagcaacactgggactgagacacggcccagactcctacgggaggcagcagtggggaatcttggacaatgggcgcaagcctgatccagccatgccgcgtgagtgatgaaggccttagggtcgtaaagctctttcgcctgtgatgataatgacagtagcaggtaaagaaaccccggctaactccgtgccagcagccgcggtaatacggagggggttagcgttgttcggaattactgggcgtaaagcgcgcgtaggcggactggaaagttgggggtgaaatcccagggctcaaccctggaactgcctccaaaactcccagtcttgagttcgagagaggtgagtggaattccgagtgtagaggtgaaattcgtagatattcggaggaacaccagtggcgaaggcggctcactggctcgatactgacgctgaggtgcgaaagtgtggggagcaaacaggattagataccctggtagtccacaccgtaaacgatgaatgccagacgtcggctagcatgctagtcggtgtcacacctaacggattaagcattccgcctggggagtacggccgcaaggttaaaactcaaaggaattgacgggggcccgcacaagcggtggagcatgtggtttaattcgaagcaacgcgcagaaccttaccaacccttgacatcctcggaccgccagagagatctggttttcacttcggtgaccgagtgacaggtgctgcatggctgtcgtcagctcgtgtcgtgagatgttcggttaagtccggcaacgagcgcaacccacatccttagttgccagcagttcggctgggcactctaaggaaactgcccgtgataagcgggaggaaggtgtggatgacgtcaagtcctcatggcccttacgggttgggctacacacgtgctacaatggcagtgacaatgggttaatcccaaaaaactgtctcagttcggattgtcgtctgcaactcggcggcatgaagtcggaatcgctagtaatcgcgtaacagcatgacgcggtgaatacgttcccgggccttgtacacaccgcccgtcacaccatgggagttgggtttacccgaaggccgtgcgccaacctttcgaggaggcagcggaccacggtgagctcagcgactggggtg

SEQ ID NO: 1825 - DNA, 1390 bp, Leisingera methylohalidivorans
  source 1..1390: mol_type = unassigned DNA
aacgaacgctggcggcaggcctaacacatgcaagtcgagcgctctccttcgggagggagcggcggacgggttagtaacgcgtgggaacgtgcccttctctaaggaatagccactggaaacggtgagtaataccttatacgcccttcgggggaaagatttatcggagaaggatcggcccgcgttagattagatagttggtggggtaacggcctaccaagtctacgatctatagctggttttagaggatgatcagcaacactgggactgagacacggcccagactcctacgggaggcagcagtggggaatcttggacaatgggcgcaagcctgatccagccatgccgcgtgagtgatgaaggccttagggtcgtaaagctctttcgccagagatgataatgacagtatctggtaaagaaaccccggctaactccgtgccagcagccgcggtaatacggagggggttagcgttgttcggaattactgggcgtaaagcgcgcgtaggcggaccagaaagtaaggggtgaaatcccagggctcaaccctggaactgcctcttaaactcctggtcttgagttcgagagaggtgagtggaattccgagtgtagaggtgaaattcgtagatattcggaggaacaccagtggcgaaggcggctcactggctcgatactgacgctgaggtgcgaaagtgtggggagcaaacaggattagataccctggtagtccacaccgtaaacgatgaatgccagtcgtcgggtagcatgctattcggtgacacacctaacggattaagcattccgcctggggagtacggtcgcaagattaaaactcaaaggaattgacgggggcccgcacaagcggtggagcatgtggtttaattcgaagcaacgcgcagaaccttaccaacccttgacatcctcggaccgccagagagatctggttttcacttcggtgaccgagtgacaggtgctgcatggctgtcgtcagctcgtgtcgtgagatgttcggttaagtccggcaacgagcgcaacccacatccttagttgccagcagttcggctgggcactctagggaaactgcccgtgataagcgggaggaaggtgtggatgacgtcaagtcctcatggcccttacgggttgggctacacacgtgctacaatggcagtgacaatgggttaatcccaaaaaactgtctcagttcggattgtcgtctgcaactcggcggcatgaagtcggaatcgctagtaatcgcgtaacagcatgacgcggtgaatacgttcccgggccttgtacacaccgcccgtcacaccatgggagttgggtttacccgaaggccgtgcgccaaccacttcggtgggggcagcggaccacggtgagctcagcgactggggtg

SEQ ID NO: 1826 - DNA, 1465 bp, unidentified
  source 1..1465: mol_type = unassigned DNA; note = Lelliottia nimipressuralis
attgaacgctggcggcaggcctaacacatgcaagtcgagcggtagcacagagagcttgcttcttcagggtgacgagcggcggacgggtgagtaatgtctgggaaactgcctgatggagggggataactactggaaacggtagctaataccgcataacgtcgcaagaccaaagagggggaccttgcggcctcttgccatcagatgtgcccagatgggattagctagtaggtggggtaacggctcacctaggcgacgatccctagctggtctgagaggatgaccagccacactggaactgagacacggtccagactcctacgggaggcagcagtggggaatattgcacaatgggcgcaagcctgatgcagccatgccgcgtgtatgaagaaggccttcgggttgtaaagtactttcagcgaggaggaaggcattgtggttaataaccacagtgattgacgttactcgcagaagaagcaccggctaactccgtgccagcagccgcggtaatacggagggtgcaagcgttaatcggaattactgggcgtaaagcgcacgcaggcggtctgtcaagtcggatgtgaaatccccgggctcaacctgggaactgcattcgaaactggcaggctagagtcttgtagaggggggtagaattccaggtgtagcggtgaaatgcgtaragatctggaggaataccggtggcgaaggcggccccctggacaaagactgacgctcaggtgcgaaagcgtggggagcaaacaggattagataccctggtagtccacgccgtaaacgatgtcgacttggaggttgttcccttgaggagtggcttccggagctaacgcgttaagtcgaccgcctggggagtacggccgcaaggttaaaactcaaatgaattgacgggggcccgcacaagcggtggagcatgtggtttaattcgatgcaacgcgaagaaccttacctactcttgacatccacagaatttagcagagatgctttagtgccttcgggaacygtgagacaggtgctgcatggctgtcgtcagctcgtgttgtgaaatgttgggttaagtcccgcaacgagcgcaacccttatcctttgttgccagcggtccggccgggaactcaaaggagactgccagtgataaactggaggaaggtggggatgacgtcaagtcatcatggcccttacgagtagggctacacacgtgctacaatggcgtatacaaagagaagcgacctcgcgagagcaagcggacctcataaagtacgtcgtagtccggattggagtctgcaactcgactccatgaagtcggaatcgctagtaatcgtaratcagaatgctacggtgaatacgttcccgggccttgtacacaccgcccgtcacaccatgggagtgggttgcaaaagaagtaggtagcttaaccttcgggagggcgcttaccactttgtgattcatgactggggtg

SEQ ID NO: 1827 - DNA, 1437 bp, Lentisphaera araneosa
  source 1..1437: mol_type = unassigned DNA
aatgaatgctggcggcatggattaggcatgcaagttgaacgagaaattcacttcggtgaatggaaagtggcgaaagggtgagtaacgcgtgaataatctgcccctaagtttggaacaacagttggaaacgactgctaataccggatgtgactatcaagacgcatgttttgatatttaaaggttacgcttagggatgagttcgcgtgccattatgctagttggtaaggtaacggcttaccaaggctatgacggctaggtggtctgagaggacgatcacccacactgggactgagacactgcccagactcctgcgggaggctgcagtcgagaatcttccgcaatgcgcgaaagcgtgacggagcaatgccgcgtgatcgaagacggccttcgggttgtaaagatctgtcaggggggaaaaacgatgatggtacccccagaggaagccacggctaactacgtgccagcagccgcggtaatacgtaggtggcgagcattattcggaattactgggcgtaaagggtccgcaggtggtttactaagtcagatgtgaaatttcagtgcttaacactgaacctgcatttgaaactggtagactagagtatgtgagaggtaagcggaatttgtggtgtagcggtggaatgcgtagatatcacaaggaagaccaaaggcgaaggcagcttactggcacaatactgacactcatggacgaaggctaaggtagcgaaaaggattagatacccttgtagtcttagcagtaaacgttgtacactcgatgttggtctggttagtcggatcagtgtctaagctaacgcgataagtgtaccgcctgggaagtacggtcgcaagactaaaactcaaaggaattgacgggggcccgcacaagcggtggagcatgtggcttaattcgaggcaacgcgaagaaccttacccgggtttgacattgagcgacgttcggtgaaagtcgaattcccttcggggcgcaaaacaggtgctgcatggctgtcgtcagctcgtgctgtgaagtgttcggttaagtccggcaacgagcgcaacccatatccttacttgctaacaggtaatgctgagaaccttaaggagactgcccgtgttaagcgggaggaaggtgtggacgacgtcaagtcagtatggcccttacacccggggctgcacacgtgctacaatggccggtacaaagggcagcgacatagtgatatggagcgaatccccaaaaccggtctcagtacggattggagtctgcaactcgactccatgaagatggaatcgctagtaaatgggcatcagctacggctcattgaatacgttcccgggccttgtacacaccgcccgtcacatcatgggagctgagttcacccgaagtcgttgcgccaacctgcttgcaggaggcagacgccgaaggtgggcttagtgactgggatg

SEQ ID NO: 1828 - DNA, 1392 bp, unidentified
  source 1..1392: mol_type = unassigned DNA; note = Leptolyngbya boryana
  misc_difference 216: note = n is a, c, g, or t
  misc_difference 272: note = n is a, c, g, or t
  misc_difference 277: note = n is a, c, g, or t
  misc_difference 309..310: note = n is a, c, g, or t
  misc_difference 342: note = n is a, c, g, or t
  misc_difference 430: note = n is a, c, g, or t
  misc_difference 466: note = n is a, c, g, or t
  misc_difference 632: note = n is a, c, g, or t
  misc_difference 709: note = n is a, c, g, or t
  misc_difference 1141: note = n is a, c, g, or t
tatgcttaacacatgcaagtcgaacggtctcttcggagatagtggcggacgggtgagtaacgcgtgagaacatgcctttagattggggacaacagttggaaacgactgctaataccgaatgtgccttagggtgaaagatttattgtctagagattggctcgcgtcagattagctagttggagtggtaacgcacaccaaggcgacgatctgtacttngtctgagaggatgaccaggcacactggaactgagacacggtccagactcctacggnaggcngcagtggggaattttaagcaatgggcgaaagnntgacggagcaataccgcgtgagggaggacggnttttgggttgtaaacctcttttatcagggaagaatcgatgacggtacctgatgaatcagcatcggctaactccgtgccagcagccgcngtaatacggaggatgcaagcgttatccggaattatngggcgtaaagcgtccgtaggtggtttatcaagtctgctgtcaaagcgtgcggcttaaccgcataagggcagtggaaactgatgaactagagtgcgataggggtaacaggaattcccagtgtagcggtgaaatgcgtagatattgggaagaacaccagcggcgaaangtgttactgggtctgcactgacactgagggacgaaagctaggggagcgaaagggattagatacccctgtagtcctanccgtaaacgatgacaactaggcgtggttcgtatcgacccgagccgtgccgtagccaacgcgttaagttgtccgcctggggagtacgcacgcaagtgtgaaactcaaaggaattgacgggggcccgcacaagcgtggagtatgtggtttaattcgatgcaacgcgaagaaccttaccaaggcttgacatcctcggaaccctgatgaaagttaggggtgccttcgggagccgagagacaggtggtgcatggctgtcgtcagctcgtgtcgtgagatgttgggttaagtcccgcaacgagcgcaacccacgtttttagttgccagcattcagttgggcactctagagagactgccggtgacaaaccggaggaaggtgtggatgacgtcaagtcagcatgccccatacgccttgggctacacacgtactacaatgngtcggacaaagagcagccagccagcgatggtgagccaatctcataaaccggcgctcagttcagattgcaggctgcaactcgcctgcatgaaggcggaatcgctagtaatcgcaggtcagcatactgcggtgaatacgttcccgggccttgtacacaccgcccgtcacaccatgggagttggtcacgcccgaagtcgttactctaactgcttgcagaggaggacgccgaaggtggggctgatgactggggtg

SEQ ID NO: 1829 - DNA, 1410 bp, unidentified
  source 1..1410: mol_type = unassigned DNA; note = Leptolyngbya foveolarum
gatgaacgctggcggtatgcttaacacatgcaagtcgaacggtctcttcggagatagtggcggacgggtgagtaacgcgtgagaacatgcctttagattggggacaacagttggaaacgactgctaataccgaatgtgccttagggtgaaagatttattgtctaaagattggctcgcgtcagattagctagttggagtggtaacggcacaccaaggcgacgatctgtacttggtctgagaggatgaccaggcacactggaactgagacacggtccagactcctacgggaggcagcagtggggaattttccgcaatgggcgaaagcctgacggagcaataccgcgtgagggaggacggcttttgggttgtaaacctcttttatcagggaagaatcgatgacggtacctgatgaatcagcatcggctaactccgtgccagcagccgcggtaatacggaggatgcaagcgttatccggaattattgggcgtaaagcgtccgtaggtggtttatcaagtctgctgtcaaagcgtgcggcttaaccgcataagggcagtggaaactgatgaactagagtgcgataggggtaacaggaattcccagtgtagcggtgaaatgcgtagatattgggaagaacaccagcggcgaaagcgtgttactgggtctgcactgacactgagggacgaaagctaggggagcgaaagggattagatacccctgtagtcctagccgtaaacgatgacaactaggcgtggttcgtatcgacccgagccgtgccgtagccaacgcgttaagttgtccgcctggggagtacgcacgcaagtgtgaaactcaaaggaattgacgggggcccgcacaagcggtggagtatgtggtttaattcgatgcaacgcgaagaaccttaccaaggcttgacatcctcggaaccctgatgaaagttaggggtgccttcgggagccgagagacaggtggtgcatggctgtcgtcagctcgtgtcgtgagatgttgggttaagtcccgcaacgagcgcaacccacgtttttagttgccagcatttagttgggcactctagagagactgccggtgacaaaccggaggaaggtgtggatgacgtcaagtcagcatgccccatacgccttgggctacacacgtactacaatgcgtcggacaaagagcagccagccagcgatggtgagccaatctcataaaccggcgctcagttcagattgcaggctgcaactcgcctgcatgaaggcggaatcgctagtaatcgcaggtcagcatactgcggtgaatacgttcccgggccttgtacacaccgcccgtcacaccatgggagttggtcacgcccgaagtcgttactctaactgcttgcagaggaggacgccgaaggtggggctgatgactggggtg

SEQ ID NO: 1830 - DNA, 1413 bp, unidentified
  source 1..1413: mol_type = unassigned DNA; note = Leptolyngbya frigida
gatgaacgctggcggtctgcttaacacatgcaagtcgaacgggactcttcggagtttagtggcggacgggtgagtaacgcgtgagaatctgcccttaggttggggacaacagttggaaacgactgctaatacccaatgtgccgagaggtgaaaggttaactgcctggggatgagctcgcgtctgattagctagttggagtggtaacggcacaccaaggcgacgatcagtagctggtctgagaggatgatcagccacactgggactgagacacggcccagactcctacgggaggcagcagtggggaattttccgcaatgggcgaaagcctgacggagcaagaccgcgtgagggaggaaggcctattggttgtaaacctcttttgatagggaagaacacaatgacggtacctatcgaatcagcatcggctaactccgtgccagcagccgcggtaatacggaggatgcaagcgttatccggatttattgggcgtaaagcgtccgtaggtggcaaaccaagtcagttgttaaagcgtagagcttaactctataagggcaattgaaactggttagctagagtgcgataggggcaaggggaattcccagtgtagcggtgaaatgcgtagatattgggaagaacatcggtggcgaaggcgccttgctgggtctgcactgacactgagggacgaaagctaggggagcgaaagggattagatacccctgtagtcctagccgtaaacgatggatactaggcgttgtccgtatcgacccgggcagtgccgtagctaacgcgttaagtatcccgcctggggagtacgctcgcaagagtgaaactcaaaggaattgacgggggcccgcacaagcggtggagtatgtggtttaattcgatgcaacgcgaagaaccttaccaaggcttgacatgtctagaattcccttgaaagggggaagtgccttcgggagctagaacacaggtggtgcatggctgtcgtcagctcgtgtcgtgagatgttgggttaagtcccgcaacgagcgcaaccctcgtttttagttgccatcattcagttgggcactctgaagagactgccggtgacaaaccggaggaaggtggggatgacgtcaagtcagcatgccccttacgtcttgggctacacacgtactacaatgctacggacaaagggcagcaagttagcaatgacaagcaaatcccataaaccgtggctcagttcagattgcaggctgcaactcgcctgcatgaaggaggaatcgctagtaatcgcaggtcagcatactgcggtgaatacgttcccgggccttgtacacaccgcccgtcacaccatggaagttggccacgcccgaagtcgttactccaaccgttcgcggaggaggacgccgaaggcagggctgatgactggggtg

SEQ ID NO: 1831 - DNA, 1428 bp, Leptonema illini
  source 1..1428: mol_type = unassigned DNA
aactaacgctggcggcgcgtcttaaacatgcaagtcgagcggcagcacttcgggtggcgagcggcgaacgggtgagtaacacgtaggtaatttgcccacggatgggggataacctttcgaaaggaaggctaataccgcataacaccatggttaccacggtaattatggtcaaagcagcaatgcgtctgtggagaagcctgcgtccgattaggtagttggtgaggtaacggctcaccaagccggcgatcggtagccggcctgagagggtgaacggccacactggaactgggacacggtccagactcctacgggaggcagcagttaagaatcttgcgcaatggaggcaactctgacgcagcgacgccgcgtgtgcgatgaaggccctcgggttgtaaagcacaacaaacagggaagaagaaagtgacggtacctgtctgaagcaccggctaactacgtgccagcagccgcggtaatacgtatggtgcaagcgttgttcggaatcactgggcgtaaagggtgcgcaggcggactgttaagtcgggagtgaaaactgagggctcaaccctcagcctgctttcgaaactggcagtctggagtcccggagaggcaggcggaattcccggtgtagcggtgaaatgcacagatatcgggaggaacaccaatggcgaaggcagcctgctggacggagactgacgctcatgcacgaaagcgtggggatcaaacaggattagataccctggtagtccacgccctaaacgttgtagaccagacgttggaggcatcaaccccttcagtgtcaaaccaaacggattaagtctaccgcctggggactatgctcgcaagagtgaaactcaaaggaattgacgggggcccgcacaagcggtggagcatgtggtttaattcgatgatacgcgaaaaaccttacccgggcttgacatgcatcagacaggcgtagagatacgccctccgcgaggctggtgcacaggtgctgcatggttgtcgtcagctcgtgtcgtgagatgttgggttaagtcccgcaacgagcgcaacccctaccgtgtgttaccatcattaagttggggactcgcacggaactgccggtgataaaccggaggaaggtggggatgacgtcaaatcctcatggcctttatgtccggggctacacacgtgctacaatggtcggtacagaaggaagcgaagtcgtgagatggagcagatccgagaaagccgatctcagttcggattggagtctgcaactcgactccatgaagtcggaatcgctagtaatcgcggatcagcatgccgcggtgaatacgttcccgggccttgtacacaccgcccgtcacaccacccgagttggtagtgcccgaagtggtccggctaaccgcaaggaggcagattatcaaggcaagatcggtgaggggggtg

SEQ ID NO: 1832 - DNA, 1432 bp, Leptospira alexanderi
  source 1..1432: mol_type = unassigned DNA
aactaacgctggcggcgcgtcttaaacatgcaagtcaagcggagtagcaatacttaagcggcgaacgggtgagtaacacgtgggtaatcttcctccgagtctgggataactttccgaaaggggagctaatactggatagtcccgagaggtcatatgatttttcgggtaaagatttattgctcggagatgagcccgcgcccgattagctagttggtgaggtaaaggctcaccaaggcgacgatcggtagccggcctgagagggtgttcggccacaatggaactgagacacggtccatactcctacgggaggcagcagttaagaatcttgctcaatggggggaaccctgaagcagcgacgccgcgtgaacgatgaaggtcttcggattgtaaagttcaataagcagggaaaaataagcagtaatgtgatgatggtacctgcctaaagcaccggctaactacgtgccagcagccgcggtaatacgtatggtgcaagcgttgttcggaatcattgggcgtaaagggtgcgtaggcggacatgtaagtcaggtgtgaaaactgtgggctcaactcgcagcctgcacttgaaactatgtgtctggagtttgggagaggcaagtggaattccaggtgtagcggtgaaatgcgtagatatctggaggaacaccagtggcgaaggcgacttgctggcctaaaactgacgctgaggcacgaaagcgtgggtagtgaacgggattagataccccggtaatccacgccctaaacgttgtctaccagttgttgggggttttaaccctcagtaacgaacctaacggattaagtagaccgcctggggactatgctcgcaagagtgaaactcaaaggaattgacgggggtccgcacaagcggtggagcatgtggtttaattcgatgatacgcgaaaaacctcacctaggcttgacatggagtggaatcatgtagagatacatgagccttcgggccgcttcacaggtgctgcatggttgtcgtcagctcgtgtcgtgagatgttgggttaagtcccgcaacgagcgcaaccctcaccttatgttgccatcattcagttgggcactcgtaaggaactgccggtgacaaaccggaggaaggcggggatgacgtcaaatcctcatggcctttatgtctagggcaacacacgtgctacaatggccggtacaaagggtagccaactcgcgagggggagctaatctcaaaaagccggtcccagttcggattggagtctgcaactcgactccatgaagtcggaatcgctagtaatcgcggatcagcatgccgcggtgaatacgttcccggaccttgtacacaccgcccgtcacaccacctgagtggggagcacccgaagtggtctttgccaaccgcaaggaagcagactactaaggtgaaactcgtaaagggggtg

SEQ ID NO: 1833 - DNA, 1431 bp, unidentified
  source 1..1431: mol_type = unassigned DNA; note = Leptospira alstoni
aactaacgctggcggcgcgtcttaaacatgcaagtcaagcggagtagcaatactcagcggcgaacgggtgagtaacacgtgggtaatcttcctccgagtctgggataacttttcgaaagggaagctaatactggatagtcccgagagatcacaagatttttcgggtaaagatttattgctcggagatgagcccgcgtccgattagctagttggtgaggtaaaggctcaccaaggcgacgatcggtagccggcctgagagggtgttcggccacaatggaactgagacacggtccatactcctacgggaggcagcagttaagaatcttgctcaatggggggaaccctgaagcagcgacgccgcgtgaacgatgaaggtcttcggattgtaaagttcaataagcagggaaaaataagcagcaatgtgatgatggtacctgcctaaagcaccggctaactacgtgccagcagccgcggtaatacgtatggtgcaagcgttgttcggaatcattgggcgtaaagggtgcgtaggcggacatgtaagtcagatgtgaaaactgggggctcaactcccagcctgcatttgaaactatatgtctggagtttgggagaggcaagtggaattccaggtgtagcggtgaaatgcgtagatatctggaggaacaccagtggcgaaggcgacttgctggcctaaaactgacgctgaggcacgaaagcgtgggtagtgaacgggattagataccccggtaatccacgccctaaacgttgtctaccagttgttgggggttttaaccctcagtaacgaacctaacggattaagtagaccgcctggggactatgctcgcaagagtgaaactcaaaggaattgacgggggtccgcacaagcggtggagcatgtggtttaattcgatgatacgcgaaaaacctcacctaggcttgacatggagtggaattatgtagagatacatgagccttcgggccgcttcacaggtgctgcatggttgtcgtcagctcgtgtcgtgagatgttgggttaagtcccgcaacgagcgcaaccctcaccttatgttgccatcattcagttgggcactcgtaaggaactgccggtgacaaaccggaggaaggcggggatgacgtcaaatcctcatggcctttatgtctagggcaacacacgtgctacaatggccggtacaaagggtagccaactcgcgagggggagctaatctcaaaaagccggtcccagttcggattggagtctgcaactcgactccatgaagtcggaatcgctagtaatcgcggatcagcatgccgcggtgaatacgttcccggaccttgtacacaccgcccgtcacaccacctgagtggggagcacccgaagtggtctttgccaaccgtaaggaagcagactactaaggtgaaactcgtgaagggggtg

SEQ ID NO: 1834 - DNA, 1431 bp, unidentified; identical to SEQ ID NO: 1833
  source 1..1431: mol_type = unassigned DNA; note = Leptospira alstonii

SEQ ID NO: 1835 - DNA, 1422 bp, Leptospira biflexa
  source 1..1422: mol_type = unassigned DNA
aactaacgctggcggcgcgtcttaaacatgcaagtcaaacgggtagtaataccagtggcgaacgggtgagtaatacatggataacctacctagaagttggggataacacagagaaatttgtgctaataccgaatgtgacggttcctggtagcagggattggttaaagcagcaatgcgcttttagatgggtccatggctgattagctagttggtggggtaaaggctcaccaaggcgacgatcagtagccggcctgagagggtgaacggccacaatggaactgagacacggtccatactcctacgggaggcagcagttaagaatcttgctcaatgggcgaaagcctgaagcagcgacgccgcgtgaacgatgaaggtcttcggattgtaaagttcagtaagtagggacgaaaaaaatgacggtacctacctaaagcaccggctaactacgtgccagcagccgcggtaatacgtatggtgcaagcgttgttcggaatcattgggcgtaaagggtgtgtaggcggactaacaagtcaggtgtgaaatcttcgggctcaactcgaaacctgcatttgaaactgttagtctggaatctgggagaggcaagtggaatttctggtgtagcggtgaaatgcgtagatatcagaaggaacaccgatggcgaaggcaacttgctggcctaagattgacgctgaaacacgaaagcgtgggtagtgaacgggattagataccccggtaatccacgccctaaacgttgtctaccagttgttagaggtattaactcctctagtaacgaacctaacggattaagtagaccgcctggggactacgctcgcaagagtgaaactcaaaggaattgacgggggtccgcacaagcggtggagcatgtggtttaattcgatgatacgcgaaaaaccttacctaggcttgacatgcacgtgaactatgtagagatacatgggccttcgggcgcgtgcacaggtgctgcatggctgtcgtcagctcgtgtcgtgagatgttgggttaagtcccgcaacgagcgcaacccttactttctgttgccatcattcagttgggcactcggaaagaactgccggtgacaaaccggaggaaggcggggatgacgtcaagtcctcatggcctttatgtctagggcaacacacgtgctacaatggccggtacagagggtcgccaaactgcaaagtggagctaatctcttaaaaccggtcccagttcagattggagtctgcaactcgactccatgaagtcggaatcgctagtaatcgcggatcagcatgccgcggtgaatacgttcccggaccttgtacacaccgcccgtcacaccatctgagtggggagcacccgaagaggttgtccttaaccgcaaggagaggcacttctaaggtgaaactcgtgaagagggtg

SEQ ID NO: 1836 - DNA, 1425 bp, Leptospira borgpetersenii
  source 1..1425: mol_type = unassigned DNA
starcgctggcggcgcgtcttaaacatccaatccaaagcggagtagcaatactcagcggcgaacgggtgagtaacacgtgggtaatcttcctccgagtctgggataactttccgaaaggggagctaatactggatagtcccgagaggtcataggatttttcgggtaaagatttattgctcggagatgagcccgcgcccgattagctagttggtgaggtaatggctcaccaaggcgacgatcggtagccggcctgagagggtgttcggccacaatggaactgagacacggtccatactcctacgggaggcagcagttaagaatcttgctcaatggggggaaccctgaagcagcgacgccgcgtgaacgatgaaggtcttcggattgtaaagttcaataagcagggaaaaataagcagcgatgtgatgatggtacctgcctaaagcaccggctaactacgtgccagcagccgcggtaatacgtatggtgcaagcgttgttcggaatcattgggcgtaaagggtgcgtaggcggacatgtaagtcaggtgtgaaaactgcgggctcaactcgcagcctgcacttgaaactatgtgtctggagtttgggagaggcaagtggaattccaggtgtagcggtgaaatgcgtagatatctggaggaacaccagtggcgaaggcgacttgctggcctaaaactgacgctgaggcacgaaagcgtgggtagtgaacgggattagataccccggtaatccacgccctaaacgttgtctaccagttgttgggggttttaaccctcagtaacgaacctaacggattaagtagaccgcctggggactatgctcgcaagagtgaaactcaaaggaattgacgggggtccgcacaagcggtggagcatgtggtttaattcgatgatacgcgaaaaacctcacctaggcttgacatggagtggaatcatgtagagatacatgagccttcgggccgcttcacaggtgctgcatggttgtcgtcagctcgtgtcgtgagatgttgggttaagtcccgcaacgagcgcaaccctcaccttatgttgccatcattcagttgggcactcgtaaggaactgccggtgacaaaccggaggaaggcggggatgacgtcaaatcctcatggcctttatgtctagggcaacacacgtgctacaatggccggtacaaagggtagccaactcgcgagggggagctaatctcaaaaagccggtcccagttcggattggagtctgcaactcgactccatgaagtcggaatcgctagtaatcgcggatcagcatgccgcggtgaatacgttcccggaccttgtacacaccgcccgtcacaccacctgagtggggagcacccgaagtggtctttgccaaccgcaaggaagcagactactaaggtgaaactcgtgaagg

SEQ ID NO: 1837 - DNA, 1431 bp, Leptospira broomii
  source 1..1431: mol_type = unassigned DNA
aactaacgctggcggcgcgtcttaaacatgcaagtcgagcggggtagcaatacctagcggcgaacgggtgagtaacacgtgggtaatcttcctccgagtctgggataactttccgaaaggaaagctaataccggatagtcctactggatcacaggatctgataggtaaagatttattgcttggagatgagcccgcggccgattagctagttggtgaggtaatggctcaccaaggcgacgatcggtagccggcctgagagggtgtccggccacaatggaactgagacacggtccatactcctacgggaggcagcagttaagaatcttgctcaatgggggaaaccctgaagcagcgacgccgcgtgaacgaagaaggtcttcggattgtaaagttcattaagcagggaaaaataagcagcaatgtgatgatggtacctgcctaaagcaccggctaactacgtgccagcagccgcggtaatacgtatggtgcaagcgttgttcggaatcattgggcgtaaagggtgcgtaggcggatttgtaagtcaggtgtgaaaactgcgggctcaacccgtggcctgcacttgaaactacaagtctggagtttgggagaggcaagtggaattccaggtgtagcggtgaaatgcgtagatatctggaggaacaccagtggcgaaggcgacttgctggctcaaaactgacgctgaggcacgaaagcgtgggtagtaaacgggattagataccccggtaatccacgccctaaacgttgtctaccagttgttgggggttttaaccctcagtaacgaacctaacggattaagtagaccgcctggggactatgctcgcaagagtgaaactcaaaggaattgacgggggtccgcacaagcggtggagcatgtggtttaattcgatgatacgcgaaaaacctcacctgggcttgacatggatctgaatcatgtagagatatatgagccttcgggcagattcacaggtgctgcatggttgtcgtcagctcgtgtcgtgagatgttgggttaagtcccgcaacgagcgcaacccctatcgtatgttgctaccattaagttgggcactcgtacgaaactgccggtgacaaaccggaggaaggcggggatgacgtcaaatcctcatggcctttatgtccagggccacacacgtgctacaatggccgatacagagggtcgccaactcgcaagagggagctaatctctaaaagtcggtcccagttcggattggggtctgcaactcgaccccatgaagtcggaatcgctagtaatcgcggatcagcatgccgcggtgaatacgttcccggaccttgtacacaccgcccgtcacaccacctgagtggggagcacccgaagtggtctttgttaaccgtaaggagacagactactaaggtgaaactcgtaaagggggtg

SEQ ID NO: 1838 - DNA, 1431 bp, Leptospira fainei
  source 1..1431: mol_type = unassigned DNA
aactaacgctggcggcgcgtcttaaacatgcaagtcgagcggggtagcaatacctagcggcgaacgggtgagtaactcgtgggtaatcttcctccgagtctgggataactttccgaaaggaaagctaataccggatagtcctgttggatcacaagatttgataggtaaagatttattgcttggagatgagcccgcggccgattagctagttggtgaggtaatggctcaccaaggcgacgatcggtagccggcctgagagggtgtccggccacaatggaactgagacacggtccatactcctacgggaggcagcagttaagaatcttgctcaatgggggaaaccctgaagcagcgacgccgcgtgaacgaagaaggtcttcggattgtaaagttcattaagcagggaaaaataagcagcaatgtgatgatggtacctgcctaaagcaccggctaactacgtgccagcagccgcggtaatacgtatggtgcaagcgttgttcggaatcattgggcgtaaagggtgcgtaggcggatttgtaagtcaggtgtgaaaactgcgggctcaacccgtggcctgcacttgaaactacaagtctggagtttgggagaggcaagtggaattccaggtgtagcggtgaaatgcgtagatatctggaggaacaccagtggcgaaggcgacttgctggctcaaaactgacgctgaggcacgaaagcgtgggtagtaaacgggattagataccccggtaatccacgccctaaacgttgtctaccagttgttgggggttttaaccctcagtaacgaacctaacggattaagtagaccgcctggggactatgctcgcaagagtgaaactcaaaggaattgacgggggtccgcacaagcggtggagcatgtggtttaattcgatgatacgcgaaaaacctcacctgggcttgacatggatctgaatcatgtagagatatatgagccttcgggcagattcacaggtgctgcatggttgtcgtcagctcgtgtcgtgagatgttgggttaagtcccgcaacgagcgcaacccctatcgtatgttgctaccattaagttgggcactcgtacgaaactgccggtgacaaaccggaggaaggcggggatgacgtcaaatcctcatggcctttatgtccagggccacacacgtgctacaatggccgatacagagggtcgccaactcgcaagagggagctaatctctaaaagtcggtcccagttcggattggggtctgcaactcgaccccatgaagtcggaatcgctagtaatcgcggatcagcatgccgcggtgaatacgttcccggaccttgtacacaccgcccgtcacaccacctgagtggggagcacccgaagtggtctttgttaaccgtaaggagacagactactaaggtgaaactcgtaaagggggtg

SEQ ID NO: 1839 - DNA, 1421 bp, unidentified
  source 1..1421: mol_type = unassigned DNA; note = Leptospira idonii
aactaacgctggcggcgcgtcttaaacatgcaagtcaaacgggtagcaataccagtggcgaacgggtgagtaatacatggataacctacctttaagttggggataacacagagaaatttgtgctaataccgaatgtgacggttcagcaaaggctggattggttaaagcagcaatgcgcttagagatggtccatggctgattagctagttggtggggtaaaggcccaccaaggcgacgatcagtagccggcctgagagggtgaacggccacaatggaactgagacacggtccatactcctacgggaggcagcagttaagaatcttgctcaatgggcgaaagcctgaagcagcgacgccgcgtgaacgatgaaggtcttcggattgtaaagttcagtaagtagggacgaaaaaaatgacggtacctacctaaagcaccggctaactacgtgccagcagccgcggtaatacgtatggtgcaagcgttgttcggaatcattgggcgtaaagggtgtgtaggcggattaacaagtcaggtgtgaaaccttcgggctcaactcgaagcctgcacttgaaactgttaatctggaatctgggagaggcaagtggaatttctggtgtagcggtgaaatgcgtagatatcagaaggaacaccgatggcgaaggcaacttgctggcctaagattgacgctgaaacacgaaagcgtgggtagtgaacgggattagataccccggtaatccacgccctaaacgttgtctaccagttgttagaggtattaactcctctagtaacgaacctaacggattaagtagaccgcctggggactacgctcgcaagagtgaaactcaaaggaattgacgggggtccgcacaagcggtggagcatgtggtttaattcgatgatacgcgaaaaaccttacctgggcttgacatgcataggaagtatgtagagatacatgcgccttcgggcctatgcacaggtgctgcatggctgtcgtcagctcgtgtcgtgagatgttgggttaagtcccgcaacgagcgcaacccttactttctgttgccatcattcagttgagcactcggaaagaactgccggtgacaaaccggaggaaggcggggatgacgtcaagtcctcatggcctttatgtccagggcaacacacgtgctacaatggccggtacagagggtcgccaatccgtgaggtggagctaatctcttaaaaccggtcccagttcagattggagtctgcaactcgactccatgaagtcggaatcgctagtaatcgcggatcagcatgccgcggtgaatacgttcccggaccttgtacacaccgcccgtcacaccacctgagtggggagcacccgaagaggttgtccttaaccgtaaggagaggcacttctaaggtgaaactcgtgaagggggtg

SEQ ID NO: 1840 - DNA, 1431 bp, Leptospira inadai
  source 1..1431: mol_type = unassigned DNA
aactaacgctggcggcgcgtcttaaacatgcaagtcgagcggggtagcaatacctagcggcgaacgggtgagtaacacgtgggtaatcttcctccgagtctgggataactttccgaaaggaaagctaataccggatagtcctactggatcacaggatctgataggtaaagatttattgcttggagatgagcccgcggccgattagctagttggtgaggtaaaggctcaccaaggcgacgatcggtagccggcctgagagggtgtccggccacaatggaactgagacacggtccatactcctacgggaggcagcagttaagaatcttgctcaatgggggaaaccctgaagcagcgacgccgcgtgaacgaagaaggtcttcggattgtaaagttcattaagcagggaaaaataagcagcaatgtgatgatggtacctgcctaaagcaccggctaactacgtgccagcagccgcggtaatacgtatggtgcaagcgttgttcggaatcattgggcgtaaagggtgcgtaggcggatttgtaagtcaggtgtgaaaactgcgggctcaacccgtggcctgcacttgaaactacaagtctggagtttgggagaggcaagtggaattccaggtgtagcggtgaaatgcgtagatatctggaggaacaccagtggcgaaggcgacttgctggctcaaaactgacgctgaggcacgaaagcgtgggtagtaaacgggattagataccccggtaatccacgccctaaacgttgtctaccagttgttgggggttttaaccctcagtaacgaacctaacggattaagtagaccgcctggggactatgctcgcaagagtgaaactcaaaggaattgacgggggtccgcacaagcggtggagcatgtggtttaattcgatgatacgcgaaaaacctcacctgggcttgacatggatctgaatcatgtagagatatatgagccttcgggcagattcacaggtgctgcatggttgtcgtcagctcgtgtcgtgagatgttgggttaagtcccgcaacgagcgcaacccctatcgtatgttgctaccattcagttgggcactcgtacgaaactgccggtgacaaaccggaggaaggcggggatgacgtcaaatcctcatggcctttatgtccagggcaacacacgtgctacaatggccgatacagagggtcgccaactcgcaagagggagctaatctctaaaagtcggtcccagttcggattggggtctgcaactcgaccccatgaagtcggaatcgctagtaatcgcggatcagcatgccgcggtgaatacgttcccggaccttgtacacaccgcccgtcacaccacctgagtggggagcacccgaagtggtctttgttaaccgtaaggagacagactactaaggtgaaactcgtaaagggggtg

SEQ ID NO: 1841 - DNA, 1431 bp, Leptospira interrogans
  source 1..1431: mol_type = unassigned DNA
aactaacgctggcggcgcgtcttaaacatgcaagtcaagcggagtagcaatactcagcggcgaacgggtgagtaacacgtgggtaatcttcctctgagtctgggataactttccgaaagggaagctaatactggatggtcccgagagatcataagatttttcgggtaaagatttattgctcggagatgagcccgcgtccgattagctagttggtgaggtaaaggctcaccaaggcgacgatcggtagccggcctgagagggtgttcggccacaatggaactgagacacggtccatactcctacgggaggcagcagttaagaatcttgctcaatggggggaaccctgaagcagcgacgccgcgtgaacgatgaaggtcttcggattgtaaagttcagtaagcagggaaaaataagcagcaatgtgatgatggtacctgcctaaagcaccggctaactacgtgccagcagccgcggtaatacgtatggtgcaagcgttgttcggaatcattgggcgtaaagggtgcgtaggcggacatgtaagtcaggtgtgaaaactgcgggctcaactcgcagcctgcacttgaaactatgtgtctggagtttgggagaggcaagtggaattccaggtgtagcggtgaaatgcgtagatatctggaggaacaccagtggcgaaggcgacttgctggcctaaaactgacgctgaggcacgaaagcgtgggtagtgaacgggattagataccccggtaatccacgccctaaacgttgtctaccagttgttgggggttttaaccctcagtaacgaacctaacggattaagtagaccgcctggggactatgctcgcaagagtgaaactcaaaggaattgacgggggtccgcacaagcggtggagcatgtggtttaattcgatgatacgcgaaaaacctcacctaggcttgacatggagtggaatcatgtagagatacatgagccttcgggccgcttcacaggtgctgcatggttgtcgtcagctcgtgtcgtgagatgttgggttaagtcccgcaacgagcgcaaccctcaccttatgttgccatcattcagttgggcactcgtaaggaactgccggtgacaaaccggaggaaggcggggatgacgtcaaatcctcatggcctttatgtctagggcaacacacgtgctacaatggccggtacaaagggtagccaactcgcgagggggagctaatctcaaaaatccggtcccagttcggattggagtctgcaactcgactccatgaagtcggaatcgctagtaatcgcggatcagcatgccgcggtgaatacgttcccggaccttgtacacaccgcccgtcacaccacctgagtggggagcacccgaagtggtctttgccaaccgcaaggaagcagactactaaggtgaaactcgtgaagggggtg

SEQ ID NO: 1842 - DNA, 1431 bp, Leptospira kirschneri
  source 1..1431: mol_type = unassigned DNA
aactaacgctggcggcgcgtcttaaacatgcaagtcaagcggagtagcaatactcagcggcgaacgggtgagtaacacgtgggtaatcttcctccgagtctgggataactttccgaaagggaagctaatactggatggtcccgagagatcataagatttttcgggtaaagatttattgctcggagatgagcccgcgtccgattagctagttggtgaggtaaaggctcaccaaggcgacgatcggtagccggcctgagagggtgttcggccacaatggaactgagacacggtccatactcctacgggaggcagcagttaagaatcttgctcaatggggggaaccctgaagcagcgacgccgcgtgaacgatgaaggtcttcggattgtaaagttcagtaagcagggaaaaataagcagcaatgtgatgatggtacctgcctaaagcaccggctaactacgtgccagcagccgcggtaatacgtatggtgcaagcgttgttcggaatcattgggcgtaaagggtgcgtaggcggacatgtaagtcaggtgtgaaaactgcgggctcaactcgcagcctgcacttgaaactatgtgtctggagtttgggagaggcaagtggaattccaggtgtagcggtgaaatgcgtagatatctggaggaacaccagtggcgaaggcgacttgctggcctaaaactgacgctgaggcacgaaagcgtgggtagtgaacgggattagataccccggtaatccacgccctaaacgttgtctaccagttgttgggggttttaaccctcagtaacgaacctaacggattaagtagaccgcctggggactatgctcgcaagagtgaaactcaaaggaattgacgggggtccgcacaagcggtggagcatgtggtttaattcgatgatacgcgaaaaacctcacctaggcttgacatggagtggaatcatgtagagatacatgagccttcgggccgcttcacaggtgctgcatggttgtcgtcagctcgtgtcgtgagatgttgggttaagtcccgcaacgagcgcaaccctcaccttatgttgccatcattcagttgggcactcgtaaggaactgccggtgacaaaccggaggaaggcggggatgacgtcaaatcctcatggcctttatgtctagggcaacacacgtgctacaatggccggtacaaagggtagccaactcgcgagggggagctaatctcaaaaatccggtcccagttcggattggagtctgcaactcgactccatgaagtcggaatcgctagtaatcgcggatcagcatgccgcggtgaatacgttcccggaccttgtacacaccgcccgtcacaccacctgagtggggagcacccgaagtggtctttgccaaccgcaaggaagcagactactaaggtgaaactcgtgaagggggtg

SEQ ID NO: 1843 - DNA, 1431 bp, Leptospira kmetyi
  source 1..1431: mol_type = unassigned DNA
aactaacgctggcggcgcgtcttaaacatgcaagtcaagcggagtagcaatactcagcggcgaacgggtgagtaacacgtgggtaatcttcctccgagtctgggataacttttcgaaaggaaagctaatactggatagtcccgagagatcacaaggtttttcgggtaaagatttattgctcggagatgagcccgcgtccgattagctagttggtgaggtaatggctcaccaaggcgacgatcggtagccggcctgagagggtgttcggccacaatggaactgagacacggtccatactcctacgggaggcagcagttaagaatcttgctcaatggggggaaccctgaagcagcgacgccgcgtgaacgatgaaggtcttcggattgtaaagttcaataagcagggaaaaataagcagcaatgtgatgatggtacctgcctaaagcaccggctaactacgtgccagcagccgcggtaatacgtatggtgcaagcgttgttcggaatcattgggcgtaaagggtgcgtaggcggacatgtaagtcaggtgtgaaaactgggggctcaactcccagcctgcacttgaaactatatgtctggagtttgggagaggcaagtggaattccaggtgtagcggtgaaatgcgtagatatctggaggaacaccagtggcgaaggcgacttgctggcctaaaactgacgctgaggcacgaaagcgtgggtagtgaacgggattagataccccggtaatccacgccctaaacgttgtctaccagttgttgggggttttaaccctcagtaacgaacctaacggattaagtagaccgcctggggactatgctcgcaagagtgaaactcaaaggaattgacgggggtccgcacaagcggtggagcatgtggtttaattcgatgatacgcgaaaaacctcacctaggcttgacatggagtggaatcatgtagagatacatgagccttcgggccgcttcacaggtgctgcatggttgtcgtcagctcgtgtcgtgagatgttgggttaagtcccgcaacgagcgcaaccctcaccttatgttgccatcatttagttgggcactcgtaaggaactgccggtgacaaaccggaggaaggcggggatgacgtcaaatcctcatggcctttatgtctagggcaacacacgtgctacaatggccggtacaaagggtagccaactcgcgagggggagctaatctcaaaaagccggtcccagttcggattggagtctgcaactcgactccatgaagtcggaatcgctagtaatcgcggatcagcatgccgcggtgaatacgttcccggaccttgtacacaccgcccgtcacaccacctgagtggggagcacccgaagtggtctttgccaaccgtaaggaagcagactactaaggtgaaactcgtgaagggggtg

SEQ ID NO: 1844 - DNA, 1431 bp, Leptospira licerasiae
  source 1..1431: mol_type = unassigned DNA
aactaacgctggcggcgcgtcttaaacatgcaagtcgagcggagtagcaatacttagcggcgaacgggtgagtaacacgtgggtaatcttcctccgaatctgggataactttccgaaaggaaagctaataccggatagttctattggatcacaggatttgatagataaaggtttactgttcggagatgagcccgcggccgattagctagttggtgaggtaatggctcaccaaggcgacgatcggtagccggcctgagagggtgtccggccacaatggaactgagacacggtccatactcctacgggaggcagcagttaagaatcttgctcaatgggcgcaagcctgaagcagcgacgccgcgtgaacgaagaaggtcttcggattgtaaagttcagtaagcagggaaaaataagcagcaatgtgatgatggtacctgcctaaagcaccggctaactacgtgccagcagccgcggtaatacgtatggtgcaagcgttgttcggaatcattgggcgtaaagggtgcgtaggcggacatgtaagtcaggtgtgaaaactgggggctcaaccctcagcctgcacttgaaactatgtgtctggagtttgggagaggcaagtggaattccaggtgtagcggtgaaatgcgtagatatctggaggaacaccagtggcgaaggcgacttgctggctcaaaactgacgctgaggcacgaaagcgtgggtagtaaacgggattagataccccggtaatccacgccctaaacgttgtctaccagttgttgggggttttaaccctcagtaacgaacctaacggattaagtagaccgcctggggactatgctcgcaagagtgaaactcaaaggaattgacgggggtccgcacaagcggtggagcatgtggtttaattcgatgatacgcgaaaaacctcacctgggcttgacatggagtggaatcatatagagatatatgagccttcgggccgcttcacaggtgctgcatggttgtcgtcagctcgtgtcgtgagatgttgggttaagtcccgcaacgagcgcaacccctatcgtatgttgctaccatttagttgggcactcgtacgaaactgccggtgacaaaccggaggaaggcggggatgacgtcaaatcctcatggcctttatgtccagggccacacacgtgctacaatggccgatacagagggttgccaactcgcaagagggagctaatctctaaaagtcggtcccagttcggattggagtctgcaactcgactccatgaagtcggaatcgctagtaatcgcggatcagcatgccgcggtgaatacgttcccggaccttgtacacaccgcccgtcacaccacctgagtggggagcacccgaagtggtctttgttaaccgtaaggagacagactactaaggtgaaactcgtgaagggggtg

SEQ ID NO: 1845 - DNA, 1431 bp, unidentified
  source 1..1431: mol_type = unassigned DNA; note = Leptospira mayottensis
aactaacgctggcggcgcgtcttaaacatgcaagtcaagcggagtagcaatactcagcggcgaacgggtgagtaacacgtgggtaatcttcctccgagtctgggataacttttcgaaagggaagctaatactggatagtcccgagagatcacaagatttttcgggtaaagattcattgctcggagatgagcccgcgcccgattagctagttggtgaggtaatggctcaccaaggcgacgatcggtagccggcctgagagggtgttcggccacaatggaactgagacacggtccatactcctacgggaggcagcagttaagaatcttgctcaatggggggaaccctgaagcagcgacgccgcgtgaacgatgaaggtcttcggattgtaaagttcaataagcagggaaaaataagcagcaatgtgatgatggtacctgcctaaagcaccggctaactacgtgccagcagccgcggtaatacgtatggtgcaagcgttgttcggaatcattgggcgtaaagggtgcgtaggcggacatgtaagtcaggtgtgaaaactgggggctcaactcccagcctgcacttgaaactatgtgtctggagtttgggagaggcaagtggaattccaggtgtagcggtgaaatgcgtagatatctggaggaacaccagtggcgaaggcgacttgctggcctaaaactgacgctgaggcacgaaagcgtgggtagtgaacgggattagataccccggtaatccacgccctaaacgttgtctaccagttgttgggggttttaaccctcagtaacgaacctaacggattaagtagaccgcctggggactatgctcgcaagagtgaaactcaaaggaattgacgggggtccgcacaagcggtggagcatgtggtttaattcgatgatacgcgaaaaacctcacctaggcttgacatggagtggaatcatgtagagatacatgagccttcgggccgcttcacaggtgctgcatggttgtcgtcagctcgtgtcgtgagatgttgggttaagtcccgcaacgagcgcaaccctcaccttatgttgccatcatttagttgggcactcgtaaggaactgccggtgacaaaccggaggaaggcggggatgacgtcaaatcctcatggcctttatgtctagggcaacacacgtgctacaatggccggtacaaagggtagccaactcgcgagggggagctaatctcaaaaagccggtcccagttcggattggagtctgcaactcgactccatgaagtcggaatcgctagtaatcgcggatcagcatgccgcggtgaatacgttcccggaccttgtacacaccgcccgtcacaccacctgagtggggagcacccgaagtggtctttgccaaccgtaaggaagcagactactaaggtgaaactcgtgaagggggtg

SEQ ID NO: 1846 - DNA, 1418 bp, Leptospira meyeri
  source 1..1418: mol_type = unassigned DNA
starcgctggcggcgcgtcttaaacatccaatcaagcggagtagcaatactcagcggcgaacgggtgagtaacacgtgggtaatcttcctccgagtctgggataacttttcgaaagggaagctaatactggatagtcccgagagatcataagatttttcgggtaaagattcattgcttggagatgagcccgcgtccgattagctagttggtgaggtaatggctcaccaaggcgacgatcggtagccggcctgagagggtgttcggccacaatggaactgagacacggtccatactcctacgggaggcagcagttaagaatcttgctcaatggggggaaccctgaagcagcgacgccgcgtgaacgatgaaggtcttcggattgtaaagttcaataagcagggaaaaataagcagcaatgtgatgatggtacctgcctaaagcaccggctaactacgtgccagcagccgcggtaatacgtatggtgcaagcgttgttcggaatcattgggcgtaaagggtgcgtaggcggacatgtaagtcaggtgtgaaaactgggggctcaactcccagcctgcacttgaaactatgtgtctggagtttgggagaggcaagtggaattccaggtgtagcggtgaaatgcgtagatatctggaggaacaccagtggcgaaggcgacttgctggcctaaaactgacgctgaggcacgaaagcgtgggtagtgaacgggattagataccccggtaatccacgccctaaacgttgtctaccagttgttgggggttttaaccctcagtaacgaacctaacggattaagtagaccgcctggggactatgctcgcaagagtgaaactcaaaggaattgacgggggtccgcacaagcggtggagcatgtggtttaattcgatgatacgcgaaaaacctcacctaggcttgacatggagtggaatcatgtagagatacatgagccttcgggccgcttcacaggtgctgcatggttgtaatcagctcgtgtcgtgagatgttgggttaagtcccgcaacgagcgcaaccctcaccttatgttgccatcattcagttgggcactcgtaaggaactgccggtgacaaaccggaggaaggcggggatgacgtcaaatcctcatggcctttatgtctagggcaacacacgtgctacaatggccggtacaaagggtagccaactcgcgagggggagctaatctcaaaaacccggtcccagttcggattggagtctgcaactcgactccatgaagtcggaatcgctagtaatcgcggatcagcatgccgcggtgaatacgttcccggaccttgtacacacccccgtcacaccacctgagtggggagcacccgaagtggtctttgccaaccgcaaggaagcagactactaaggtgaaactcgtg

SEQ ID NO: 1847 - DNA, 1432 bp, Leptospira noguchii
  source 1..1432: mol_type = unassigned DNA
aactaacgctggcggcgcgtcttaaacatgcaagtcaagcggagtagcaatactcagcggcgaacgggtgagtaacacgtgggtaatcttcctccgagtctgggataactttccgaaagggaagctaatactggatagtcccgagagatcataagatttttcgggtaaagattcattgctcggagatgagcccgcgtccgattagctagttggtgaggtaatggctcaccaaggcgacgatcggtagccggcctgagagggtgttcggccacaatggaactgagacacggtccatactcctacgggaggcagcagttaagaatcttgctcaatggggggaaccctgaagcagcgacgccgcgtgaacgatgaaggtcttcggattgtaaagttcagtaagcagggaaaaataagcagcaatgtgatgatggtacctgcctaaagcaccggctaactacgtgccagcagccgcggtaatacgtatggtgcaagcgttgttcggaatcattgggcgtaaagggtgcgtaggcggacatgtaagtcaggtgtgaaaactgcgggctcaactcgcagcctgcacttgaaactatgtgtctggagtttgggagaggcaagtggaattccaggtgtagcggtgaaatgcgtagatatctggaggaacaccagtggcgaaggcgacttgctggcctaaaactgacgctgaggcacgaaagcgtgggtagtgaacgggattagataccccggtaatccacgccctaaacgttgtctaccagttgttgggggttttaaccctcagtaacgaacctaacggattaagtagaccgcctggggactatgctcgcaagagtgaaactcaaaggaattgacgggggtccgcacaagcggtggagcatgtggtttaattcgatgatacgcgaaaaacctcacctaggcttgacatggagtggaattatgtagagatacatgagccttcgggccgcttcacaggtgctgcatggttgtcgtcagctcgtgtcgtgagatgttgggttaagtcccgcaacgagcgcaaccctcaccttatgttgccatcatttagctgggcactcgtaaggaactgccggtgacaaaccgtaggaaggcggggatgacgtcaaatcctcatggcctttatgtctagggcaacacacgtgctacaatggccggtacaaagggtagccaactcgcgagggggagctaatctcaaaaagccggtcccactccaatattggagtctgcaactcgactccatgaagtcggaatcgctagtaatcgcggatcagcatgccgcggtgaatacgttcccggaccttgtacacaccgcccgtcacaccacctgagtggggagcacccgaagtggtctttgccaaccgcaaggaagcagactactaaggtgaaactcgtgaagggggtg

SEQ ID NO: 1848 - DNA, 1431 bp, Leptospira santarosai
  source 1..1431: mol_type = unassigned DNA
aactaacgctggcggcgcgtcttaaacatgcaagtcaagcggagtagcaatactcagcggcgaacgggtgagtaacacgtgggtaatcttccttcgagtctgggataactttccgaaaggggagctaatactggatagtcccgatagatcataggatgtatcgggtaaagattcattgctcggagatgagcccgcgtccgattagctagttggtgaggtaaaggctcaccaaggcgacgatcggtagccggcctgagagggtgttcggccacaatggaactgagacacggtccatactcctacgggaggcagcagttaagaatcttgctcaatggggggaaccctgaagcagcgacgccgcgtgaacgatgaaggtcttcggattgtaaagttcaataagcagggaaaaataagcagcgatgtgatgatggtacctgcctaaagcaccggctaactacgtgccagcagccgcggtaatacgtatggtgcaagcgttgttcggaatcattgggcgtaaagggtgcgtaggcggacatgtaagtcaggtgtgaaacctgcgggctcaactcgcagcctgcacttgaaactatgtgtctggagtttgggagaggcaagtggaattccaggtgtagcggtgaaatgcgtagatatctggaggaacaccagtggcgaaggcgacttgctggcctaaaactgacgctgaggcacgaaagcgtgggtagtgaacgggattagataccccggtaatccacgccctaaacgttgtctaccagttgttgggggttttaaccctcagtaacgaacctaacggattaagtagaccgcctggggactatgctcgcaagagtgaaactcaaaggaattgacgggggtccgcacaagcggtggagcatgtggtttaattcgatgatacgcgaaaaacctcacctaggcttgacatggagtggaatcatgtagagatacatgagccttcgggccgcttcacaggtgctgcatggttgtcgtcagctcgtgtcgtgagatgttgggttaagtcccgcaacgagcgcaaccctcaccttatgttgccatcatttagttgggcactcgtaaggaactgccggtgacaaaccggaggaaggcggggatgacgtcaaatcctcatggcctttatgtctagggcaacacacgtgctacaatggccggtacaaagggtagccaactcgcgagggggagctaatctcaaaaagccggtcccagttcggattggagtctgcaactcgactccatgaagtcggaatcgctagtaatcgcggatcagcatgccgcggtgaatacgttcccggaccttgtacacaccgcccgtcacaccacctgagtggggagcacccgaagtggtctttgccaaccgtaaggaagcagactactaaggtgaaactcgtgaagggggtg

SEQ ID NO: 1849 - DNA, 1422 bp, unidentified
  source 1..1422: mol_type = unassigned DNA; note = Leptospira terpstrae
aactaacgctggcggcgcgtcttaaacatgcaagtcaaacgggtagcaataccagtggcgaacgggtgagtaatacatggataacctacctaaaagttggggataacacagagaaatttgtgctaataccgaatgtgacggttcctggtagcagggattggttaaagcagcaatgcgcttttagatgggtccatggctgattagctagttggtggggtaaaggcccaccaaggcgacgatcagtagccggcctgagagggtgaacggccacaatggaactgagacacggtccatactcctacgggaggcagcagttaagaatcttgctcaatgggcgaaagcctgaagcagcgacgccgcgtgaacgatgaaggtcttcggattgtaaagttcagtaagtagggacgaaaaaaatgacggtacctacctaaagcaccggctaactacgtgccagcagccgcggtaatacgtatggtgcaagcgttgttcggaatcattgggcgtaaagggtgtgtaggcggactaacaagtcaggtgtgaaatcttcgggctcaactcgaaacctgcatttgaaactgttagtctggaatctgggagaggcaagtggaatttctggtgtagcggtgaaatgcgtagatatcagaaggaacaccgatggcgaaggcaacttgctggcctaagattgacgctgaaacacgaaagcgtgggtagtgaacgggattagataccccggtaatccacgccctaaacgttgtctaccagttgttagaggtattaactcctctagtaacgaacctaacggattaagtagaccgcctggggactacgctcgcaagagtgaaactcaaaggaattgacgggggtccgcacaagcggtggagcatgtggtttaattcgatgatacgcgaaaaaccttacctaggcttgacatgcacgtgaactatgtagagatacatgggccttcgggcgcgtgcacaggtgctgcatggctgtcgtcagctcgtgtcgtgagatgttgggttaagtcccgcaacgagcgcaacccttactttctgttgccatcattcagttgggcactcggaaagaactgccggtgacaaaccggaggaaggcggggatgacgtcaagtcctcatggcctttatgtctagggcaacacacgtgctacaatggccggtacagagggtcgccaaactgcaaagtggagctaatctcttaaaaccggtcccagttcagattggagtctgcaactcgactccatgaagtcggaatcgctagtaatcgcggatcagcatgccgcggtgaatacgttcccggaccttgtacacaccgcccgtcacaccatctgagtggggagcacccgaagaggttgtccttaaccgcaaggagaggcacttctaaggtgaaactcgtgaagagggtg

SEQ ID NO: 1850 - DNA, 1424 bp, unidentified
  source 1..1424: mol_type = unassigned DNA; note = Leptospira vanthielii
aactaacgctggcggcgcgtcttaaacatgcaagtcaaacgggtagcaataccagtggcgaacgggtgagtaatacatggataacctacctagaagttggggataacacagagaaatttgtgctaataccgaatgtgacggttcctgatagcagggattggttaaagcagcaatgcgtcttttagatgggtccatggctgattagctagttggtggggtaaaggctcaccaaggcgacgatcagtagccggcctgagagggtgaacggccacaatggaactgagacacggtccatactcctacgggaggcagcagttaagaatcttacgccacgtaccgaaagcctgaagcagcgacgccgcgtgaacgatgaaggtcttcggattgtaaagttcagtaagtagggacgaaaaaaatgacggtacctacctaaagcaccggctaactacgtgccagcagccgcggtaatacgtatggtgcaagcgttgttcggaatcattgggcgtaaagggtgtgtaggcggactaacaagtcaggtgtgaaatcttcgggctcaactcgaaacctgcatttgaaactgttagtctggaatctgggagaggcaagtggaatttctggtgtagcggtgaaatgcgtagatatcagaaggaacaccgatggcgaaggcaacttgctggcctaagattgacgctgaaacacgaaagcgtgggtagtgaacgggattagataccccggtaatccacgccctaaacgttgtctaccagttgttagaggtattaactcctctagtaacgaacctaacggattaagtagaccgcctggggactacgctcgcaagagtgaaactcaaaggaattgacgggggtccgcacaagcggtggagcatgtggtttaattcgatgatacgcgaaaaaccttacctaggcttgacatgcacgtgaactatgtagagatacatgggccttcgggcacgtgcacaggtgctgcatggctgtcgtcagctcgtgtcgtgagatgttgggttaagtcccgcaacgagcgcaacccttactttctgttgccatcattcagttgggcactcggaaagaactgccggtgacaaaccggaggaaggcggggatgacgtcaagtcctcatggcctttatgtctagggcaacacacgtgctacaatggccggtacagagggtcgccaaactgcaaagtggagctaatctcttaaaaccggtcccagttcagattggagtctgcaactcgactccatgaagtcggaatcgctagtaatcgcggatcagcatgccgcggtgaatacgttcccggaccttgtacacaccgcccgtcacaccatctgagtggggagcacccgaagaggttgtccttaaccgcaaggggaggcacttctaaggtgaaactcgtgaagagggtg

SEQ ID NO: 1851 - DNA, 1428 bp, Leptospira weilii
  source 1..1428: mol_type = unassigned DNA
  misc_difference 872..874: note = n is a, c, g, or t
aactaacgctggcggcgcgtcttaaacatgcaagtcaagcggagtagcaatactcagcggcgaacgggtgagtaacacgtgggtaatcttcctccgagtctgggataactttccgaaaggggagctaatactggatggtcccgagaggtcatatgatttttcgggtaaagatttattgctcggagctgagcccgcgcccgattagctagttggtgaggtaatggctcaccaaggcgacgatcggtagccggcctgagagggtgttcggccacaatggaactgagacacggtccatactctacgggaggcagcagttaagaatcttgctcaatggggggaaccctgaagcagcgacgccgcgtgaacgatgaaggtcttcggattgtaaagttcaataagcagggaaaaataagcagcgatgtgatgatggtacctgcctaaagcaccggctaactacgtgccagcagccgcggtaatacgtatggtgcaagcgttgttcggaatcattgggcgtaaagggtgcgtaggcggacatgtaagtcaggtgtgaaaactgcgggctcaactcgcagcctgcacttgaaactatgtgtctggagtttgggagaggcaagtggaattccaggtgtagcggtgaaatgcgtagatatctggaggaacaccagtggcgaaggcgacttgctggcctaaaactgacgctgaggcacgaaagcgtgggtagtgaacgggattagataccccggtaatccacgccctaaacgttgtctaccagttgttgggggttttaaccctcagtaacgaactaacggattaagtagaccgcctggggactatgctcgcaagagtgaaactcaaaggaattgacgggggtnnncacaagcggtggagcatgtggtttaattcgatgatacgcgaaaaacctcacctaggcttgacatggagtggaattatgtagagatacatgagcttcgggccgcttcacaggtgctgcatggttgtcgtcagctcgtgtcgtgagatgttgggttaagtcccgcaacgagcgcaaccctcaccttatgttgccatcatttagttgggcactcgtaaggaactgccggtgacaaaccggaggaaggcggggatgacgtcaaatcctcatggcctttatgtctagggcaacacacgtgctacaatggccggtacaaagggtagccaactcgcgagggggagctaatctcaaaaagccggtcccagttcggattggagtctgcaactcgactccatgaagtcggaatcgctagtaatcgcggatcagcatgccgcggtgaatacgttcccggaccttgtacacaccgcccgtcacaccacctgagtggggagcacccgaagtggtctttgccaaccgtaaggaagcagactactaaggtgaaactcgtgaagggggtg

SEQ ID NO: 1852 - DNA, 1420 bp, Leptospira wolbachii
  source 1..1420: mol_type = unassigned DNA
aactaacgctggcggcgcgtcttaaacatgcaagtcaaacgggtagcaataccagtggcgaacgggtgagtaatacatggataacctacgcgtagactggggataacacagagaaatttgtgctaataccgaatgtgacggttcctggtagcagggacgcgtagactgcaatgcgcttttagatgggtccatggctgattagctagttggtggggtaaaggctcaccaaggcgacgatcagtagccggcctgagagggtgaacggccacaatggaactgagacacggtccatactcctacgggaggcagcagttaagaatcttgctcaatgggcgaaagcctgaagcagcgacgccgcgtgaacgatgaaggtcttcggattgtaaagttcagtaagtagggacgaaaaaaatgacggtacctacctaaagcaccggctaactacgtgccagcagccgcggtaatacgtatggtgcaagcgttgttcggaatcattgggcgtaaagggtgtgtaggcggactaacaagtcaggtgtgaaatcttcgggctcaactcgaaacctgcatttgaaactgttagtctggaatctgggagaggcaagtggaatttctggtgtagcggtgaaatgcgtagatatcagaaggaacaccgatggcgaaggcaacttgctggcctaagattgacgctgaaacacgaaagcgtgggtagtgaacgggattagataccccggtaatccacgccctaaacgttgtctaccagttgttagaggtattaactcctctagtaacgaacctaacggattaagtagaccgcctggggactacgctcgcaagagtgaaactcaaaggaattgacgggggtccgcacaagcggtcgagcatgtggtttaattcgatgatacgcgaaaaaccttacctaggcttgacatgcacgtgaactatgtagagatacatgggccttcgggcgcgtgcacaggtgctgcatggctgtcgtcagctcgtgtcgtgagatgttgggttaagtcccgcaacgagcgcaacccttactttctgttgccatcattcagttgggcactcggaaagaactgccggtgacaaaccggaggaaggcggggatgacgtcaagtcctcatggcctttatgtctagggcaacacacgtgctacaatggccggtacagagggtcgccaaagcgcaagctggagctaatctcttaaaaccggtcccagttcagattggagtctgcaactcgactccatgaagtcggaatcgctagtaatcgcggatcagcatgccgcggtgaatacgttcccggaccttgtacacaccgcccgtcacaccatctgagtggggagcacccgaagaggttgtccttaaccgcaaggggaggcacttctaaggtgaaactcgtgaagagggtg

SEQ ID NO: 1853 - DNA, 1431 bp, Leptospira wolffii
  source 1..1431: mol_type = unassigned DNA
aactaacgctggcggcgcgtcttaaacatgcaagtcgagcggagtagcaatacttagcggcgaacgggtgagtaacacgtgggtaatcttcctccgaatctgggataactttccgaaaggaaagctaataccggatagttctattggatcacaggatttgatagataaaggtttactgttcggagatgagcccgcggccgattagctagttggtgaggtaatggctcaccaaggcgacgatcggtagccggcctgagagggtgtccggccacaatggaactgagacacggtccatactcctacgggaggcagcagttaagaatcttgctcaatgggggcaaccctgaagcagcgacgccgcgtgaacgaagaaggtcttcggattgtaaagttcagtaagcagggaaaaataagcagcaatgtgatgatggtacctgcctaaagcaccggctaactacgtgccagcagccgcggtaatacgtatggtgcaagcgttgttcggaatcattgggcgtaaagggtgcgtaggcggacttgtaagtcaggtgtgaaaactgcgggctcaacccgtggcctgcacttgaaactacaggtctggagtttgggagaggcaagtggaattccaggtgtagcggtgaaatgcgtagatatctggaggaacaccagtggcgaaggcgacttgctggctcaaaactgacgctgaggcacgaaagcgtgggtagtaaacgggattagataccccggtaatccacgccctaaacgttgtctaccagttgttgggggttttaaccctcagtaacgaacctaacggattaagtagaccgcctggggactatgctcgcaagagtgaaactcaaaggaattgacgggggtccgcacaagcggtggagcatgtggtttaattcgatgatacgcgaagaacctcacctgggcttgacatggagtggaatcatatagagatatatgagccttcgggccgcttcacaggtgctgcatggttgtcgtcagctcgtgtcgtgagatgttgggttaagtcccgcaacgagcgcaacccctatcgtatgttgctaccattaagttgggcactcgtacgaaactgccggtgacaaaccggaggaaggcggggatgacgtcaaatcctcatggcctttatgtccagggccacacacgtgctacaatggccgatacaaagggttgccaaagcgcaagctggagctaatctcaaaaagtcggtcccagttcggattggagtctgcaactcgactccatgaagtcggaatcgctagtaatcgcggatcagcatgccgcggtgaatacgttcccggaccttgtacacaccgcccgtcacaccacctgagtggggagcacccgaagtggtctttgttaaccgtaaggagacagactactaaggtgaaactcgtgaagggggtg

SEQ ID NO: 1854 - DNA, 1423 bp, unidentified
  source 1..1423: mol_type = unassigned DNA; note = Leptospira yanagawae
aactaacgctggcggcgcgtcttaaacatgcaagtcaaacgggtagcaataccagtggcgaacgggtgagtaatacatggataacctacctagaagttggggataacacagagaaatttgtgctaataccgaatgtgacggttcctggtagcagggattggttaaagcagcaatgcgcttttagatgggtccatggctgattagctagttggtggggtaaaggcctaccaaggcgacgatcagtagccggcctgagagggtgaacggccacaatggaactgagacacggtccatactcctacgggaggcagcagttaagaatcttgctcaatgggcgaaagcctgaagcagcgacgccgcgtgaacgatgaaggtcttcggattgtaaagttcagtaagtagggacgaaaaaaatgacggtacctacctaaagcaccggctaactacgtgccagcagccgcggtaatacgtatggtgcaagcgttgttcggaatcattgggcgtaaagggtgtgtaggcggactaacaagtcaggtgtgaaatcttcgggctcaactcgaaacctgcatttgaaactgttagtctggaatctgggagaggcaagtggaatttctggtgtagcggtgaaatgcgtagatatcagaaggaacaccgatggcgaaggcaacttgctggcctaagattgacgctgaaacacgaaagcgtgggtagtgaacgggattagataccccggtaatccacgccctaaacgttgtctagtcagttgttagaggtattaactcctctagtaacgaacctaacggattaagtagaccgcctggggactacgctcgcaagagtgaaactcaaaggaattgacgggggtccgcacaagcggtggagcatgtggtttaattcgatgatacgcgaaaaaccttacctaggcttgacatgcacgtgaatcatgtagagatacatgagccttcgggcgcgtgcacaggtgctgcatggctgtcgtcagctcgtgtcgtgagatgttgggttaagtcccgcaacgagcgcaacccttactttctgttgccatcattcagttgggcactcggaaagaactgccggtgacaaaccggaggaaggcggggatgacgtcaagtcctcatggcctttatgtctagggcaacacacgtgctacaatggccggtacagagggtcgccaaactgcaaagtggagctaatctcttaaaaccggtcccagttcagattggagtctgcaactcgactccatgaagtcggaatcgctagtaatcgcggatcagcatgccgcggtgaatacgttcccggaccttgtacacaccgcccgtcacaccatctgagtggggagcacccgaagaggttgtccttaaccgcaaggagaggcacttctaaggtgaaactcgtgaagagggtg

SEQ ID NO: 1855 - DNA, 1482 bp, Leptospirillum ferriphilum
  source 1..1482: mol_type = unassigned DNA
aacgaacgctggcggcgtgcctaacacatgcaagtccgacgtgaaaggggagcaatcccccggtagggtggcaaacgggtgagtaagacatgggtgatctgccctggagatggggatatccctccgaaagggggggcaataccgaatagtatccggttccgtgaagggggccggggaaagggaggcctctggtacaagcttccgctcctggatgagcccatggcccatcagctagttggtagggtaaaggcctaccaaggcgacgacgggtagctggtctgagaggacaaccagccacactggcactgagacacgggccagactcctacgggaggcagcagtgaggaatattgcgcaatgggggcaaccctgacgcagcaacgccgcgtgtgggaagaaggctttcgggttgtaaaccacttttgcccgggacgaaaggggggacctgaataaggttgcccgatgacggtaccgggagaataagccacggctaactctgtgccagcagccgcggtaagacagaggtggcaagcgttgttcggagttactgggcgtaaagagtctgtaggtggtctgtcaagtctttggtgaaaggccgtggcttaaccatgggaatgccaaagagactggcagactggaggctgggagagggaagcggaatttctggtgtagcggtgaaatgcgtagatatcagaaggaaggccggtggcgaaggcggcttcctggaacagacctgacactgagagacgaaagcgtggggagcaaacaggattagataccctggtagtccacgccctaaacgatgggtactaagtgtgggagggttaaacctcccgtgccgcagccaacgcagtaagtaccccgcctggggagtacggccgcaaggttgaaactcaaaggaattgacgggggcccgcacaagcggtggtgcatgtggtttaattcgacgcaacgcgaagaaccttacctgggcttgacatgccgcgagtaggaaaccgaaaggggaccgaccggttcagtccggaagcggaacaggtgctgcatggctgtcgtcagctcgtgccgtgaggtgttgggttcagtcccgcaacgagcgcaaccctcgccctctgttgccaccgggtcatgccgggcactctgaggggactgccagcgacaagttggaggaaggagaggatgacgtcaagtcatcatggcccttatgcccagggccacacacgtgcaacaatggccggtacagacggaagcaagaccgagaggtggagcaaatccgagaaagccggtcccagttcggattgaggtctgcaactcgacctcatgaagtcggaatcgctagtaatcgcgtatcagcacgacgcggtgaatacgttcccgggccttgtacacaccgcccgtcacaccacgaaagtctgttgtacctgaagtcggtgccccaaccggaaacggagggagccgcccaaggtatggccggtaattggggtg

SEQ ID NO: 1856 - DNA, 1484 bp, Leptospirillum ferrooxidans
  source 1..1484: mol_type = unassigned DNA
  misc_difference 74: note = n is a, c, g, or t
  misc_difference 355: note = n is a, c, g, or t
  misc_difference 813: note = n is a, c, g, or t
aacgaacgctggcggcgtgcctaacacatgcaagtccgacgtgaaaggggagcaatcccccggtagggtggcanacgggtgagtaatacatgggtgatctaccttagggatggggatatccttccgaaaggaggggcaataccgaatattgtccggagccgtgaagggttccggggaaagggaggcctctgatacaagctttcgccttaagatgagcccatggcccatcagctagttggtagggtaaaggcctaccaaggctacgacgggtcgctggtctgagaggacgaccagccacactggcactgagatacgggccagactcctacgggaggcagcagtgaggaatattgcncaatgggggaaaccctgacgcagcaacgccgcgtgtgggaagaaggccttcgggtcgtaaaccacttttgcacgggacgaaaaagggatatcgaacaaatatccccgatgacggtaccgtgagaataagccacggctaactctgtgccagcagccgcggtaagacagaggtggcaagcgttgttcggaattactgggcgtaaagagtctgtaggtggtttgtcaagtctttggtgaaaggccgtagcttaactatgggaatgccaaagagactggcaggctggaggctgggagagggaagcggaatttctggtgtagcggtgaaatgcgtagatatcagaaggaaggccggtggcgaaggcggcttcctggaacagtcctgacactgagagacgaaagcgtggggagcacacaggattagataccctggtagtccacgccctaaacgatgggtactangtgtggaggggttaaaccctccgtgccgcagcaaacgcagtaagtaccccgcctggggagtacggccgcaaggttgaaactcaaaggaattgacgggggcccgcacaagcggtggtgcatgtggtttaattcgacgcaacgcgaggaaccttacctaggcttgacatgtggtgagtagcgaaccgaaaggggagcgacccgtcaaatcgggccatcacacaggtgctgcatggctgtcgtcagctcgtgccgtgaggtgttgggttcagtcccgcaacgagcgcaaccctcgccctttgttgccatcgggtaaagccgggcactctaaggggactgccagcgacaagttggaggaaggagaggatgacgtcaagtcatcatggcctttatgcctagggccacacacgtgcaacaatggccggtacagacggaggcaatgccgagaggcggagcaaacccgagaaaaccggtcccagttcggattgaggtctgcaactcgacctcatgaagtcggaatcgctagtaatcgcatatcagaacgatgcggtgaatacgttcccgggccttgtacacaccgcccgtcacaccacgaaagtttgttgtacccgaagtcggtgccttaacctcgcaagaggagagagccgcccaaggtatggccgatgattggcgtg

SEQ ID NO: 1857 - DNA, 1433 bp, unidentified
  source 1..1433: mol_type = unassigned DNA; note = Leucothrix pacifica
ggcatggcggcatgcttacacatgcagtcgaacggaaacgatggtagcttgctaccaggcgtcgagtggcggacgggtgagtaacgcgtaggaatctacccagttgtgggggatagcccggagaaatccggattaataccgcatacgccctacgggggaaaacaggggatcttcggaccttgtgcaattggatgagcctgcgttagattagctagttggtgaggtaagagctcaccaaggcgacgatctatagctggtctgagaggatgatcagccacatcgggactgagacacggcccggactcctacgggaggcagcagtggggaatattggacaatgggcgcaagcctgatccagcaatgccgcgtgtgtgaagaaggcctgagggttgtaaagcactttcaattgtgaagaaggggttagagttaatacctctgacctttgacgttaactttagaagaagcaccggctaactccgtgccagcagccgcggtaatacggagggtgcaagcgttaatcggaattactgggcgtaaagcgcgcgtaggcggttatttaagtcagatgtgaaagccccgggctcaacctgggaattgcctctgatactgggtaactagagtttggaagaggggagtagaatttcaggtgtagcggtgaaatgcatagagatctgaaggaataccagtggcgaaggcggctctctggtccagaactgacgctgaggtgcgaaagcgtgggtagcaaacgggattagataccccggtagtccacgccgtaaacgatgtcaactagccgttgggtgccttgtgcacttagtggcgcagctaacgcattaagttgaccgcctggggagtacggtcgcaagactaaaactcaaaggaattgacgggggcccgcacaagcggtggagcatgtggtttaattcgatgcaacgcgaagaaccttaccatcccttgacatccagtgaatatagcagagacgctttagtgccttcgggagcactgagacaggtgctgcatggctgtcgtcagctcgtgtcgtgagatgttgggttaagtcccgcaacgagcgcaacccctatccttggttgctagcaggtaatgctgagaactccaaggagactgccggtgacaaaccggaggaaggtggggatgacgtcaagtcatcatggcccttacgggatgggctacacacgtgctacaatggccggtacagagggtcgcgaacctgcgagggtgagccaatcccacaaagccggtcgtagtccggattggagtctgcaactcgactccatgaagttggaatcgctagtaatcgtggatcagaatgccacggtgaatacgttcccgggccttgtacacaccgcccgtcacaccatgggagtgggttgctccagaagtagctagtctaaccttagggaggacggtaccac

SEQ ID NO: 1858 - DNA, 1410 bp, unidentified
  source 1..1410: mol_type = unassigned DNA; note = Liberibacter asiaticus
  misc_difference 764: note = n is a, c, g, or t
  misc_difference 787: note = n is a, c, g, or t
  misc_difference 1066: note = n is a, c, g, or t
  misc_difference 1113: note = n is a, c, g, or t
  misc_difference 1287..1288: note = n is a, c, g, or t
  misc_difference 1363: note = n is a, c, g, or t
ctggcggcaggcctaacacatgcaagtcgagcgcgtatgcaatacgagcggcagacgggtgagtaacgcgtaggaatctacctttttctacgggataacgcatggaaacgtgtgctaataccgtatacgccctattgggggaaagattttattggagagagatgagcctgcgttggattagctagttggtagggtaagagcctaccaaggctacgatctatagctggtctgagaggacgatcagccacactgggactgagacacggcccagactcctacgggaggcagcagtggggaatattggacaatgggggcaaccctgatccagccatgccgcgtgagtgaagaaggccttagggttgtaaagctctttcgccggagaagataatgacggtattcggagaagaagccccggctaacttcgtgccagcagccgcggtaatacgaagggggcgagcgttgttcggaataactgggcgtaaagggcgcgtaggcggcgattaagttagaggtgaaatcccaggctcaaccttggaactgcctttaatactggttgtctagagtttaggagaggtgagtggaattccgagtgtagaggtgaaattcgtagatattcggaggaacaccggtggcgaaggcggctcactggcctgatactgacgctgaggcgcgaaagcgtggggagcaaacaggattagataccctggtagtccacgccgtaaacgatgagtgctagctgttgggtggtttaccattcagtggcncacgtaacgcattaagcactccncctggggagtacggtcgcaagattaaaactcaaaggaattgacgggggcccgcacaagcgtggagcatgtggtttaattcgatgcaacgcgcagaaccttaccagcccttgacatgtataggacgatatcagagatggtattttcttttcggagacctttacacaggtgctgcatggctgtcgtcagctcgtgtcgtgagatgttgggttaagtcccgcaacgagcgcaacccctgcctctagttgccatcaagtttaggttttacctagatgttgggnactttatagggactgccggtgataagccggaggaaggtggggatgangtcaagtcctcatgcgccttatgggctgggctacacacgtgctacaatggtggttacaatgggttgcgaagtcgcgaggcggagctaatccccaaaagccatctcagttcggattgcactctgcaactcgagtgcatgaagtcggaatcgctagtaatcgcggatcagcatgcnncggtgaatacgttctcgggccttgtacacaccgcccgtcacaccatgggagttggttttgcctgaagacggtgtntaaccgcaaggaggcagccggccacggtagggtcagcgactggggtg

SEQ ID NO: 1859 - DNA, 1404 bp, unidentified
  source 1..1404: mol_type = unassigned DNA; note = Liberibacter crescens
aacgaacgctggcggcaggcttaacacatgcaagtcgagcgcgtatttatacgagcggcagacgggtgagtaacgcgtgggaatctacctttttctacaggataacgcatggaaacgtgtgctaatactgtatacgcccttttggggaaagatttattggagagagatgagcccgcgttggattagctagttggtggggtaaaggcctaccaaggcgacgatccatagctggtctgagaggatgatcagccacactgggactgagacacggcccagactcctacgggaggcagcagtggggaatattggacaatgggggcaaccctgatccagccatgccgcgtgagtgaagaaggccctagggttgtaaagctctttcaccggagaagataatgacggtatccggagaagaagccccggctaacttcgtgccagcagccgcggtaatacgaagggggcgagcgttgttcggaataactgggcgtaaagggcgcgtaggcggatgattaagtcagtggtgaaatcccaaggctcaaccttggaactgcctctgatactggttatcttgagttcagaagaggtgagtggaattccgagtgtagaggtgaaattcgtagatattcggaggaacaccagtggcgaaggcggctcactggtctgatactgacgctgaggtgcgaaagcgtggggagcaaacaggattagataccctggtagtccacgctgtaaacgatgagtgctagctgttgggcagtttactgcttagtggcgcagctaacgcattaagcactccgcctggggagtacggtcgcaagattaaaactcaaaggaattgacgggggcccgcacaagcggtggagcatgtggtttaattcgaagcaacgcgcagaaccttaccagcccttgacatggcgtgacgaataccagagatggtattttcttcttcggaggcacgcacacaggtgctgcatggctgtcgtcagctcgtgtcgtgagatgttgggttaagtcccgcaacgagcgcaaccctcgcctctagttgccatcattaagttgggcactctatggggactgccggcgataagccggaggaaggtggggatgacgtcaagtcctcatggcccttatgggctgggctacacacgtgctacaatggtggtgacaatgggcagcgaagtcgtgaggcggagctaatctccaaaagccatctcagttcggattgcactctgcaactcgagtgcatgaagttggaatcgctagtaatcgcggatcagcatgccgcggtgaatacgttctcgggccttgtacacaccgcccgtcacaccatgggagttggttttaccttaagacggtgcgctaaccgcaaggaggcagccggccacggtaaggtcagcgactggggtg

SEQ ID NO: 1860 - DNA, 1424 bp, unidentified
  source 1..1424: mol_type = unassigned DNA; note = Liberibacter solanacearum
aacgaacgctggcggcaggcttaacacatgcaagtcgagcgcttatttttaataggagcggcagacgggtgagtaacgcgtgggaatctacctttttctacgggataacgcacggaaacgtgtgctaataccgtatacgccctgagaaggggaaagatttattggagagagatgagcccgcgttagattagctagttggtggggtaaatgcctaccaaggctacgatctatagctggtctgagaggacgatcagccacactgggactgagacacggcccagactcctacgggaggcagcagtggggaatattggacaatgggggcaaccctgatccagccatgccgcgtgagtgaagaaggccttagggttgtaaagctctttcgccggagaagataatgacggtatccggagaagaagtcccggctaacttcgtgccagcagccgcggtaatacgaagggggcgagcgttgttcggaataactgggcgtaaagggcgcgtaggcgggtaattaagttaggggtgaaatcccaaggctcaaccttggaactgcctttaatactggttatctagagtttaggagaggtgagtggaattccgagtgtagaggtgaaattcgcagatattcggaggaacaccagtggcgaaggcggctcactggcctgatactgacgctgaggcgcgaaagcgtggggagcaaacaggattagataccctggtagtccacgctgtaaacgatgagtgctagctgttgggtggtttaccattcagtggcgcagctaacgcattaagcactccgcctggggagtacggtcgcaagattaaaactcaaaggaattgacgggggcccgcacaagcggtggagcatgtggtttaattcgatgcaacgcgcagaaccttaccagcccttgacatatagaggacgatatcagagatggtattttcttttcggagacctttatacaggtgctgcatggctgtcgtcagctcgtgtcgtgagatgttgggttaagtcccgcaacgagcgcaacccctacctctagttgccatcaagtttagattttatctagatgttgggtactttatagggactgccggtgataatccggaggaaggtggggatgacgtcaagtcctcatggcccttatgggctgggctacacacgtgctacaatggtggttacaatgggttgcgaagtcgcgaggcggagctaatcccaaaaggccatctcagttcggattgcactctgcaactcgagtgcatgaagttggaatcgctagtaatcgcggatcagcatgccgcggtgaatacgttctcgggccttgtacacaccgcccgtcacaccatgggagttggttttgcttgaagacggtgcgctaaccgtaaggaggcagccggccacggtagggtcagcgactggggtg

SEQ ID NO: 1861 - DNA, 1440 bp, unidentified
  source 1..1440: mol_type = unassigned DNA; note = Lihuaxuella thermophila
gacgaacgctggcggcgtgcctaatacatgcaagtcgagcggggtttgcttcttcggaagtaaacctagcggcgaacgggtgagtaacacgtgggcaacctgccctcaagaccgggataacaccgggaaaccggtgctaataccggataatcctccctctcgcatgagagggaagtaaaaggcttcggccacttgaggatgggcccgcggcgcattagctagttggtgaggtaacggctcaccaaggcgacgatgcgtagccgacctgagagggtgaccggccacactgggactgagacacggcccagactcctacgggaggcagcagtagggaattttccgcaatgggcgaaagcctgacggagcaacgccgcgtgagtgaagacggccttcgggttgtaaaactctgttcttggggaagaagctctgacggtacccaaggagaaagccccggctaactacgtgccagcagccgcggtaatacgtagggggcgagcgttgtccggaattattgggcgtaaagcgcgcgcaggcggctctttaagtcaggtgtgaaaggctgcggctcaaccgcagagcggcacctgaaactggagagcttgagtgcaggagaggggagcggaattcccggtgtagcggtggaatgcgtagagatcgggaggaacaccagtggcgaaggcggctctctggcctgtaactgacgctgaggcgcgaaagcgtggggagcaaacaggattagataccctggtagtccacgccgtaaacgatgagtgctaggtgttgggggcgttacgccctcagtgccgaaggtaacccaataagcactccgcctggggagtacggccgcaaggctgaaactcaaaggaattgacgggggcccgcacaagcggtggagcatgtggtttaattcgaagcaacgcgaagaaccttaccagggcttgacatcccgctgaccgctccagagatggagcttcccttcggggcagcggtgacaggtggtgcatggttgtcgtcagctcgtgtcgtgagatgttgggttcagtcccgcaacgagcgcaacccttatcgtcagttgccagcacttcgggtgggcactctggcgagacagccggtgaaagccggaggaaggtggggatgacgtcaaatcatcatgccccttatgtcctgggctacacacgtgctacaatggctggtacaaagggcagcaaacccgcgagggggagccaatcccaaaaaaccagtctcagttcggatcgcaggctgcaactcgcctgcgtgaagccggaatcgctagtaatcgcggatcagcatgccgcggtgaatacgttcccgggccttgtacacaccgcccgtcacaccacgagagtttgcaacacccgaagtcggtgaggtaacccgcaagggagccagccgccgaaggtggggcaaatgattggggtg

SEQ ID NO: 1862 - DNA, 1385 bp, unidentified
  source 1..1385: mol_type = unassigned DNA; note = Limimaricola cinnabarinus
aacgaacgctggcggcaggcctaacacatgcaagtcgagcgagaccttcgggtttagcggcggacgggttagtaacgcgtgggaatgtacccttcacttcggaatagtcccgggaaactgggtttaataccgtatacgccctttgggggaaagatttatcggtgaaggatcagcccgcgtctgattagatagttggtggggtaatggcctaccaagtctacgatcagtagctggtttgagaggatgatcagcaacactgggactgagacacggcccagactcctacgggaggcagcagtggggaatcttagacaatgggcgcaagcctgatctagccatgccgcgtgagtgatgaaggccttagggtcgtaaagctctttcgctggggaagataatgacggtacccagtaaagaaaccccggctaactccgtgccagcagccgcggtaatacggagggggttagcgttgttcggaattactgggcgtaaagcgcgcgtaggcggattggaaagttgggggtgaaatcccggggctcaaccccggaactgcctccaaaactatcagtctagaggtcgagagaggtgagtggaattccgagtgtagaggtgaaattcgtagatattcggaggaacaccagtggcgaaggcggctcactggctcgatactgacgctgaggtgcgaaagcgtggggagcaaacaggattagataccctggtagtccacgccgtaaacgatgaatgccagacgtcggggggcttgcccttcggtgtcacacctaacggattaagcattccgcctggggagtacggtcgcaagattaaaactcaaaggaattgacgggggcccgcacaagcggtggagcatgtggtttaattcgaagcaacgcgcagaaccttaccaacccttgacatcctcggaccgctggagagatccagttttctcgtaagagaccgagtgacaggtgctgcatggctgtcgtcagctcgtgtcgtgagatgttcggttaagtccggcaacgagcgcaacccacacccttagttgccagcattcagttgggcactctaggggaactgcccgtgataagcgggaggaaggtgtggatgacgtcaagtcctcatggcccttacgggttgggctacacacgtgctacaatggcatcaacaatgggttaatccctaaaagatgtctcagttcggattggggtctgcaactcgaccccatgaagtcggaatcgctagtaatcgcgtaacagcatgacgcggtgaatacgttcccgggccttgtacacaccgcccgtcacaccatgggagttggttctacccgacgacgctgcgctaacccttcggggaggcaggcggccacggtaggatcagcgactggggtg

SEQ ID NO: 1863 - DNA, 1306 bp, unidentified
  source 1..1306: mol_type = unassigned DNA; note = Limimaricola hongkongensis
tgcaagtcgagcgagaccttcgggtctagcggcggacgggttagtaacgcgtgggaacgtgcccttcactacggaatagtcccgggaaactgggtttaataccgtatacgccccttgggggaaagatttatcggtgaaggatcggcccgcgtctgattagatagttggtggggtaacggcctaccaagtcgacgatcagtagctggtttgagaggatgatcagcaacactgggactgagacacggcccagactcctacgggaggcagcagtggggaatcttagacaatgggcgcaagcctgatctagccatgccgcgtgagtgatgaaggccttagggtcgtaaagctctttcgctggggaagataatgacggtacccagtaaagaaaccccggctaactccgtgccagcagccgcggtaatacggagggggttagcgttgttcggaattactgggcgtaaagcgcgcgtaggcggattggaaagttgggggtgaaatcccggggctcaaccccggaactgcctccaaaactatcagtctagaggtcgagagaggtgagtggaattccgagtgtagaggtgaaattcgtagatattcggaggaacaccagtggcgaaggcggctcactggctcgatactgacgctgaggtgcgaaagcgtggggagcaaacaggattagataccctggtagtccacgccgtaaacgatgaatgccagacgtcggggggcttgcccttcggtgtcacacctaacggattaagcattccgcctggggagtacggtcgcaagattaaaactcaaaggaattgacgggggcccgcacaagcggtggagcatgtggtttaattcgaagcaacgcgcagaaccttaccaacccttgacatcctcggaccgtcgcagagatgcgtctttctcgtaagagaccgagtgacaggtgctgcatggctgtcgtcagctcgtgtcgtgagatgttcggttaagtccggcaacgagcgcaacccacacccttagttgccagcattcagttgggcactctaggggaactgcccgtgataagcgggaggaaggtgtggatgacgtcaagtcctcatggcccttacgggttgggctacacacgtgctacaatggcatcaacaatgggttaatccctaaaagatgtctcagttcggattggggtctgcaactcgaccccatgaagtcggaatcgctagtaatcgcgtaacagcatgacgcggtgaatacgttcccgggccttgtacacaccgcccgtcacaccatgggagttggttctacccgacgacgctgc

SEQ ID NO: 1864 - DNA, 1385 bp, unidentified
  source 1..1385: mol_type = unassigned DNA; note = Limimaricola soesokkakensis
aacgaacgctggcggcaggcctaacacatgcaagtcgaacgaagccttcgggcttagtggcggacgggttagtaacgcgtgggaacgtgcccttctctacggaatagtcccgggaaactgggtttaataccgtatacgcccttcgggggaaagatttatcggggaaggatcggcccgcgtctgattagatagttggtggggtaatggcctaccaagtcgacgatcagtagctggtttgagaggatgatcagcaacactgggactgagacacggcccagactcctacgggaggcagcagtggggaatcttagacaatgggcgcaagcctgatctagccatgccgcgtgagtgatgaaggccttagggtcgtaaagctctttcgctggggaagataatgactgtacccagtaaagaaaccccggctaactccgtgccagcagccgcggtaatacggagggggttagcgttgttcggaattactgggcgtaaagcgcgcgtaggcggattggaaagttgggggtgaaatcccggggctcaaccccggaacggcctccaaaactatcagtctagaggtcgagagaggtgagtggaattccgagtgtagaggtgaaattcgtagatattcggaggaacaccagtggcgaaggcggctcactggctcgatactgacgctgaggtgcgaaagcgtggggagcaaacaggattagataccctggtagtccacgccgtaaacgatgaatgccagacgtcggggggcttgcccttcggtgtcacacctaacggattaagcattccgcctggggagtacggtcgcaagattaaaactcaaaggaattgacgggggcccgcacaagcggtggagcatgtggtttaattcgaagcaacgcgcagaaccttaccaacccttgacatcctcggaccgtcgcagagatgcgtctttctcgtaagagaccgagtgacaggtgctgcatggctgtcgtcagctcgtgtcgtgagatgttcggttaagtccggcaacgagcgcaacccacacccttagttgccagcattcagttgggcactctaggggaactgcccgtgataagcgggaggaaggtgtggatgacgtcaagtcctcatggcccttacgggttgggctacacacgtgctacaatggcatcaacaatgggttaatccctaaaagatgtctcagttcggattggggtctgcaactcgaccccatgaagtcggaatcgctagtaatcgcgtaacagcatgacgcggtgaatacgttcccgggccttgtacacaccgcccgtcacaccatgggagttggttctacccgacgacgctgcgctaacccttcggggaggcaggcggccacggtaggatcagcgactggggtg

SEQ ID NO: 1865 - DNA, 1434 bp, unidentified
  source 1..1434: mol_type = unassigned DNA; note = Limimonas halophila
aacgaacgctggcggcaggcctaacacatgcaagtcgaacggggttcgtcggcttcggctggcggacttacgtggcggacgggtgagtaacgcgtgggaatctgccccggggtgggggataaccgctggaaacggcggctaataccgcataatccggccattggtcgggaaagccttacggcgccctgggaggagcccgcgtccgattagcttgttggtggggtaacggcctaccaaggcgacgatcggtagctggtctgagaggatgatcagccacactgggactgagacacggcccagacgcctacgggcggcagcagtggggaatcttggacaatgggggaaaccctgatccagccatgccgcgtgggtgaagaaggccctagggtcgtaaagccctttcggcggggaagatgatgacggtacccgcagaagaagccccggctaactccgtgccagcagccgcggtaagacggagggggctagcgttgttcggaatcactgggcgtaaagggcgcgtaggcggtccatcaagtcaggggtgaaaggcctgggctcaacctgggaactgcccttgaaactggtggactagagtccgggagagggtagcggaattcccagtgtagaggtgaaattcgtagatattgggaagaacaccagtggcgaaggcggctacctggaccgggactgacgctgaggcgcgaaagcgtggggagcaaacaggattagataccctggtagtccacgccgtaaacgctgtgtgctagccgttgggggacgtagtccgtcagtggcgcagctaacgcgataagcacaccgcctggggagtacggccgcaaggctaaaactcaaaggaattgacgggggcccgcacaagcggtggagcatgtggtttaattcgaagcaacgcgcagaatcttaccgcctcttgacatggtccgtcgcgctgacgtgagagcgtcggcttcagttcggctggacggatcacaggtgctgcatggctgtcgtcagctcgtgtcgtgagatgttgggttaagtcccgcaacgagcgcaacccctacccttagttgccagcggtccggccgggcactctaaggggactgccggtgacaagccggaggaaggcggggacgacgtcaagtcatcatggcccttacggggcgggctacacacgtgctacaatggcggcgacagagggcagctagaccgcgaggtcacgcgaatcccgaaacgccgtctcagttcggattgcactctgcaactcgagtgcatgaagccggaatcgctagtaatcgcggatcaccatgccgcggtgaatacgttcccgggccttgtacacaccgcccgtcacaccatgggagttgaccttacccgaagccggtgcgccaaccctttgggaggcagccgaccacggtaaggtcagcgactggggtg

SEQ ID NO: 1866 - DNA, 1451 bp, Limnohabitans curvus
  source 1..1451: mol_type = unassigned DNA
acgctggcggaatgctttacacatgcaagtcgaacggcagcacggacttcggtctggtggcgagtggcgaacgggtgagtaatatatcggaacgtgcccagtcgtgggggataacgtagtgaaaattacgctaataccgcatacgatctaaggatgaaagcgggggatcgcaagacctcgcgcgattggagcggccgatatcagattaggtagttggtgaggtaaaggctcaccaagccaacgatctgtagctggtctgagaggacgaccagccacactggaactgagacacggtccagactcctacgggaggcagcagtggggaattttggacaatggacgcaagtctgatccagccattccgcgtgcaggacgaaggccttcgggttgtaaactgcttttgtacagaacgaaaaggtttctattaatactaggggctcatgacggtactgtaagaataagcaccggctaactacgtgccagcagccgcggtaatacgtagggtgcaagcgttaatcggaattactgggcgtaaagcgtgcgcaggcggttatataagacagatgtgaaatccccgggctcaacctgggaactgcatttgtgactgtatagctggagtgcggcagagggggatggaattccgcgtgtagcagtgaaatgcgtagatatgcggaggaacaccgatggcgaaggcaatcccctgggcctgcactgacgctcatgcacgaaagcgtggggagcaaacaggattagataccctggtagtccacgccctaaacgatgtcaactggttgttgggtcttcactgactcagtaacgaagctaacgcgtgaagttgaccgcctggggagtacggccgcaaggttgaaactcaaaggaattgacggggacccgcacaagcggtggatgatgtggtttaattcgatgcaacgcgaaaaaccttacccacctttgacatgtacggaagcctttagagatagaggcgtgctcgaaagagagccgtaacacaggtgctgcatggctgtcgtcagctcgtgtcgtgagatgttgggttaagtcccgcaacgagcgcaacccttgtcattagttgctacatttagttgggcactctaatgagactgccggtgacaaaccggaggaaggtggggatgacgtcaagtcctcatggcccttataggtggggctacacacgtcatacaatggctggtacaaagggttgccaacccgcgagggggagctaatcccataaaaccagtcgtagtccggatcgcagtctgcaactcgactgcgtgaagtcggaatcgctagtaatcgtggatcagaatgtcacggtgaatacgttcccgggtcttgtacacaccgcccgtcacaccatgggagcgggttctgccagaagtagttagcctaaccgtaaggagggcgattaccacggcagggttcgtgactggggt

SEQ ID NO: 1867 - DNA, 1271 bp, unidentified
  source 1..1271: mol_type = unassigned DNA; note = Limnoraphis robusta
caatgggcgcaagcctgacggagcaagaccgcgtgggggaggaaggctcttgggttgtaaaccccttttctcagggaagaaccaaatgacggtacctgaggaatcagcctcggctaactccgtgccagcagccgcggtaatacggaggaggcaagcgttatccggaatgattgggcgtaaagcgttcgtaggtggctattcaagtctgctgtcaaagacagaagctcaacttctgaaaggcagtggaaactgagtagctggagtgcggtaggggcagagggaattcccggtgtagcggtgaaatgcgtagagatcgggaagaacaccggtggcgaaagcgctctgctgggccgcaactgacactgagggacgaaagctaggggagcgaatgggattagataccccagtagtcctagctgtaaacgatggaaactaggtgttgcctgtatcgacccaggcagtgccgtagctaacgcgttaagtttcccgcctggggagtacgcacgcaagtgtgaaactcaaaggaattgacgggggcccgcacaagcggtggagtatgtggtttaattcgatgcaacgcgaagaaccttaccagggcttgacatgtccggaaccctggcgaaagctaggggtgccttcgggagccggaacacaggtggtgcatggctgtcgtcagctcgtgtcgtgagatgttgggttaagtcccgcaacgagcgcaaccctcgttcttagttgccatcattaagttgggcactctagggagactgccggtgacaaaccggaggaaggtggggatgacgtcaagtcatcatgccccttacgtcctgggctacacacgtactacaatgggaaggacagagggcagccacttcgcgaggaggagctaatcccgtaaacctttcctcagttcagattgcaggctgcaactcgcctgcatgaaggaggaatcgctagtaatcgcaggtcagcatactgcggtgaatccgttcccgggccttgtacacaccgcccgtcacaccatggaagttagccatgcccgaagtcattactctaacctttcgaggaggagggtgccgaaggcagggctgatgactggggtgaagtcgtaacaaggtagccgtaccggaaggtgtggctggatcacctcctttttagggagaccaaacttcggttgagctaaccccaatttacaagccaactgaggtcatcccaggtcgtgcgaggaattgagtaactactaggctttcaaactttcggttcggatwttatga

SEQ ID NO: 1868 - DNA, 1410 bp, unidentified
  source 1..1410: mol_type = unassigned DNA; note = Limnothrix rosea
gatgaacgctggcggtatgcctaacacatgcaagtcgaacgaagtcttcggacttagtggcggacgggtgagtaacgcgtgagaatctgccttcaggatggggacaacagttggaaacgactgctaatacccaatatgcctacgggtgaaacttatttggcctgaagatgagctcgcgtctgattagctagttggtggtgtaagagactaccaaggcgacgatcagtagctggtctgagaggatgagcagccacactgggactgagacacggcccagactcctacgggaggcagcagtggggaattttccgcaatgggcgaaagcctgacggagcaataccgcgtgagggaggaaggtttttggattgtaaacctcttttctcagggaagaattttgacggtacctgaggaataagcaccggctaactccgtgccagcagccgcggtaatacggagggtgcaagcgttatccggaattattgggcgtaaagagtccgtaggtggtcatgcaagtctgctgtcaaagcccacagcttaactgtggataggcggtggaaactgcatgacttgagtacggtaggggtagagggaattcccagtgtagcggtgaaatgcgtagatattgggaagaacaccggtggcgaaagcgctctactggaccgtaactgacactgagggacgaaagccaaggtagcgaaagggattagatacccctgtagtcttggccgtaaacgatggatactaggcgttgtctgtatcgacccggacagtgccgaagctaacgcgttaagtatcccgcctggggagtacgcacgcaagtgtgaaactcaaaggaattgacgggggcccgcacaagcggtggagtatgtggtttaattcgatgcaacgcgaagaaccttaccaagatttgacatcccgtgaactatccagagatggatgggtgccttcgggaacacggagacaggtggtgcatggctgtcgtcagctcgtgtcgtgagatgttgggttaagtcccgcaacgagcgcaaccctcgtccttagttgccatcattaagttgggcactctagggagactgccggggacaactcggaggaaggtggggatgacgtcaagtcatcatgccccttacattttgggctacacacgtactacaatggtcgggacaaagggcagcaaccccgcgagggcaagcgaatctcatcaaacccggcctcagttcagattgcaggctgcaactcgcctgcatgaaggaggaatcgctagtaatcgcaggtcagcatactgcggtgaatccgttcccgggccttgtacacaccgcccgtcacaccatggaagctggcaacgcccgaagtcgttactctaaccgttcgcggaggagggcgccgaaggcagtgctagtgactggggtg

SEQ ID NO: 1869 - DNA, 1472 bp, unidentified
  source 1..1472: mol_type = unassigned DNA; note = Listeria booriae
gacgaacgctggcggcgtgcctaatacatgcaagtcgaacgaaccgacgaaaagcttgcttttctgacgtgagtggcggacgggtgagtaacacgtgggcaacctgcctatcagttggggataactccgggaaaccggggctaataccgaataataacgggcgtcgcatgacgctggtttgaaagatggtttcggctatcgctgatagatgggcccgcggtgcattagctagttggtggggtaatggctcaccaaggcaacgatgcatagccgacctgagagggtgatcggccacactgggactgagacacggcccagactcctacgggaggcagcagtagggaatcttccgcaatggacgaaagtctgacggagcaacgccgcgtgtgtgaagaaggttttcggatcgtaaagcactgttgttagagaagaacaaggataagagtaactgcttgtcccttgacggtatctaaccagaaagccacggctaactacgtgccagcagccgcggtaatacgtaggtggcaagcgttgtccggatttattgggcgtaaagcgagcgcaggcggtttcttaagtctgatgtgaaagcccccggcttaaccggggagggtcattggaaactgagagacttgaatgcaggagaggtaagtggaattccacgtgtagcggtgaaatgcgtagatatgtggaggaacaccagtggcgaaggcggcttactggcctgtaattgacgctgaggctcgaaagcgtggggagcaaacaggattagataccctggtagtccacgccgtaaacgatgagtgctaagtgttagggggtttccgccccttagtgctgcagctaacgcattaagcactccgcctggggagtacgaccgcaaggttgaaactcaaaggaattgacgggggcccgcacaagtggtggagcatgtggtttaattcgaagcaacgcgaagaaccttaccaggtcttgacatcctttgaccactctggagacagagctttcccttcggggacaaagtgacaggtggtgcatggttgtcgtcagctcgtgtcgtgagatgttgggttaagtcccgcaacgagcgcaacccttgattttagttgccagcatttagttgggcactctaaagtgactgccggtgcaagccggaggaaggtggggatgacgtcaaatcatcatgccccttatgacctgggctacacacgtgctacaatggataatacaaagggttgccaaaccgcgaggtcgagctaatcccataaaattattctcagttcggattgtaggctgcaactcgcctacatgaagccggaatcactagtaatcgtggatcagcatgccacggtgaatacgttcccgggccttgtacacaccgcccgtcacaccacgagagtttgtaacacccgaagtcggtagggtaacctttatggagccagccgccgaaggtgggacagataattggggtg

SEQ ID NO: 1870 - DNA, 1447 bp, unidentified
  source 1..1447: mol_type = unassigned DNA; note = Listeria cornellensis
tgcaagtcgaacgaaccgacgaaagagcttgctctttctgacgttagtggcggacgggtgagtaacacgtgggcaacctgcctgtaagttggggataactccgggaaaccggggctaataccgaataataacaagcgtcgcatgacgcctgtttgaaagatggtttcggctatcacttacagatgggcccgcggtgcattagctagttggtagggtaatggcctaccaaggcaacgatgcatagccgacctgagagggtgatcggccacactgggactgagacacggcccagactcctacgggaggcagcagtagggaatcttccgcaatggacgaaagtctgacggagcaacgccgcgtgtgtgaagaaggttttcggatcgtaaagcactgttgttagagaagaacaaggataagagtaactgcttgtcccttgacggtatctaaccagaaagccacggctaactacgtgccagcagccgcggtaatacgtaggtggcaagcgttgtccggatttattgggcgtaaagcgagcgcaggcggtttcttaagtctgatgtgaaagcccccggcttaaccggggagggtcattggaaactgagagacttgaatgcaggagaggtaagtggaattccacgtgtagcggtgaaatgcgtagatatgtggaggaacaccagtggcgaaggcggcttactggcctgtaattgacgctgaggctcgaaagcgtggggagcaaacaggattagataccctggtagtccacgccgtaaacgatgagtgctaagtgttagggggtttccgccccttagtgctgcagctaacgcattaagcactccgcctggggagtacgaccgcaaggttgaaactcaaaggaattgacgggggcccgcacaagtggtggagcatgtggtttaattcgaagcaacgcgaagaaccttaccaggtcttgacatcctttgaccattctggagacagaactttcccttcggggacaaagtgacaggtggtgcatggttgtcgtcagctcgtgtcgtgagatgttgggttaagtcccgcaacgagcgcaacccttgattttagttgccagcatttagttgggcactctaaagtgactgccggtgcaagccggaggaaggtggggatgacgtcaaatcatcatgccccttatgacctgggctacacacgtgctacaatggataatacaaagggttgccaaaccgcgaggtcgagctaatcccataaaattattctcagttcggattgtaggctgcaactcgcctacatgaagccggaatcactagtaatcgtggatcagcatgccacggtgaatacgttcccgggccttgtacacaccgcccgtcacaccacgagagtttgtaacacccgaagtcggtagggtaaccatttatggagccagccgccgaaggtgggacagataattggggtg

SEQ ID NO: 1871 - DNA, 1474 bp, unidentified
  source 1..1474: mol_type = unassigned DNA; note = Listeria grandensis
gacgaacgctggcggcgtgcctaatacatgcaagtcgaacgaaccgaagaaagagcttgctctttcggacgttagtggcggacgggtgagtaacacgtgggcaacctgcctgtaagttggggataactccgggaaaccggggctaataccgaataataacaagcgtcgcatgacgcctgtttgaaagatggtttcggctatcacttacagatgggcccgcggtgcattagctagttggtagggtaatggcctaccaaggcgacgatgcatagccgacctgagagggtgatcggccacactgggactgagacacggcccagactcctacgggaggcagcagtagggaatcttccgcaatggacgaaagtctgacggagcaacgccgcgtgtgtgaagaaggttttcggatcgtaaagcactgttgttagagaagaacaaggataagagtaactgcttgtcccttgacggtatctaaccagaaagccacggctaactacgtgccagcagccgcggtaatacgtaggtggcaagcgttgtccggatttattgggcgtaaagcgagcgcaggcggtttcttaagtctgatgtgaaagcccccggcttaaccggggagggtcattggaaactgagagacttgaatgcaggagaggtaagtggaattccacgtgtagcggtgaaatgcgtagatatgtggaggaacaccagtggcgaaggcggcttactggcctgtaattgacgctgaggctcgaaagcgtggggagcaaacaggattagataccctggtagtccacgccgtaaacgatgagtgctaagtgttagggggtttccgccccttagtgctgcagctaacgcattaagcactccgcctggggagtacgaccgcaaggttgaaactcaaaggaattgacgggggcccgcacaagtggtggagcatgtggtttaattcgaagcaacgcgaagaaccttaccaggtcttgacatcctttgaccattctggagacagaactttcccttcggggacaaagtgacaggtggtgcatggttgtcgtcagctcgtgtcgtgagatgttgggttaagtcccgcaacgagcgcaacccttgattttagttgccagcatttagttgggcactctaaagtgactgccggtgcaagccggaggaaggtggggatgacgtcaaatcatcatgccccttatgacctgggctacacacgtgctacaatggataatacaaagggttgccaaaccgcgaggtcgagctaatcccataaaattattctcagttcggattgtaggctgcaactcgcctacatgaagccggaatcactagtaatcgtggatcagcatgccacggtgaatacgttcccgggccttgtacacaccgcccgtcacaccacgagagtttgtaacacccgaagtcggtagggtaacctttatggagccagccgccgaaggtgggacagataattggggtg

SEQ ID NO: 1872 - DNA, 1474 bp, Listeria rocourtiae
  source 1..1474: mol_type = unassigned DNA
gacgaacgctggcggcgtgcctaatacatgcaagtcgaacgaaccgacgaaagagcttgctctttctgacgttagtggcggacgggtgagtaacacgtgggcaacctgcctgtaagttggggataactccgggaaaccggggctaataccgaataataacaagcgtcgcatgacgcctgtttgaaagacggtttcggctgtcacttacagatgggcccgcggtgcattagctagttggtagggtaatggcctaccaaggcgacgatgcatagccgacctgagagggtgatcggccacactgggactgagacacggcccagactcctacgggaggcagcagtagggaatcttccgcaatggacgaaagtctgacggagcaacgccgcgtgtgtgaagaaggttttcggatcgtaaagcactgttgttagagaagaacaaggataagagtaactgcttgtcccttgacggtatctaaccagaaagccacggctaactacgtgccagcagccgcggtaatacgtaggtggcaagcgttgtccggatttattgggcgtaaagcgagcgcaggcggtttcttaagtctgatgtgaaagcccccggcttaaccggggagggtcattggaaactgagagacttgaatgcaggagaggtaagtggaattccacgtgtagcggtgaaatgcgtagatatgtggaggaacaccagtggcgaaggcggcttactggcctgtaattgacgctgaggctcgaaagcgtggggagcaaacaggattagataccctggtagtccacgccgtaaacgatgagtgctaagtgttagggggtttccgccccttagtgctgcagctaacgcattaagcactccgcctggggagtacgaccgcaaggttgaaactcaaaggaattgacgggggcccgcacaagtggtggagcatgtggtttaattcgaagcaacgcgaagaaccttaccaggtcttgacatcctttgaaccttctggagacagaactttcccttcggggacaaagtgacaggtggtgcatggttgtcgtcagctcgtgtcgtgagatgttgggttaagtcccgcaacgagcgcaacccttgattttagttgccagcatttagttgggcactctaaagtgactgccggtgcaagccggaggaaggtggggatgacgtcaaatcatcatgccccttatgacctgggctacacacgtgctacaatggataatacaaagggttgccaaaccgcgaggtcgagctaatcccataaaattattctcagttcggattgtaggctgcaactcgcctacatgaagccggaatcactagtaatcgtggatcagcatgccacggtgaatacgttcccgggccttgtacacaccgcccgtcacaccacgagagtttgtaacacccgaagtcggtagggtaacctttatggagccagccgccgaaggtgggacagataattggggtg

SEQ ID NO: 1873 - DNA, 1354 bp, Litorimonas taeanensis
  source 1..1354: mol_type = unassigned DNA
catgcaagtcgaacgagaaattaccttcgggtaatggacagtggcagacgggtgagtaacgcgtggcaacctacccttcactacgggacaacagttggaaacgactgctaataccgtatacgtcctccgggagaaagatttatcggtgatggatggggccgcgttagattagcttgttggtggggtaatggcctaccaaggcgacgatctatagctggtctgagaggatgatcagccacactgggactgagacacggcccagactcctacgggaggcagcagtggggaatattggacaatgggcgcaagcctgatccagcaacgccgcgtgaatgatgaaggccttagggttgtaaaattctttcgctagggaagataatgactgtacctagtaaagaagccccggctaactccgtgccagcagccgcggtaatacggagggggctagcgttgttcggaattactgggcgtaaagcgtgcgtaggcggattaataagttagatgtgaaatcccagggctcaaccctggaactgcatttaaaactgttagtcttgagttctggagaggtaagtggaattcctagtgtagaggtgaaattcgtagatattaggaggaacaccagaggcgaaggcggcttactggacagatactgacgctgaggcacgaaagtgtggggagcaaacaggattagataccctggtagtccacaccgtaaacgatgagagctagttgtctgcaagcatgcttgtaggtgacgcagctaacgcattaagctctccgcctggggagtacggtcgcaagattaaaactcaaagaaattgacgggggcccgcacaagcggtggagcatgtggtttaattcgaagcaacgcgcagaaccttacctacccttgacatgccggtcgcgatttccagagatggatttcttcaattcggttggaccgtgcacaggtgctgcatggctgtcgtcagctcgtgtcgtgagatgttgggttaagtcccgcaacgagcgcaaccctcatctttagttgccagcatttagttgggcactctagagaaactgccggtgctaagccggaggaaggtggggatgacgtcaagtcctcatggcccttacgggtagggctacacacgtgctacaatggcgctgacagagggttaatccctaaaaggcgtctcagttcggattgtcttctgcaactcgaagacatgaagttggaatcgctagtaatcgtggatcagcatgccacggtgaatacgttcccgggccttgtacacaccgcccgtcacaccatgggagttggttctacccgaaggtggtgcgctaacctgcttgcaggaggcagccacccccg

SEQ ID NO: 1874 - DNA, 1383 bp, Loktanella hongkongensis
  source 1..1383: mol_type = unassigned DNA
aacgaacgctggcggcaggcctaacacatgcaagtcgagcgagaccttcgggtctagcggcggacgggttagtaacgcgtgggaacgtgcccttcactacggaatagtcccgggaaactgggtttaataccgtatacgccccttgggggaaagatttatcggtgaaggatcggcccgcgtctgattagatagttggtggggtaacggcctaccaagtcgacgatcagtagctggtttgagaggatgatcagcaacactgggactgagacacggcccagactcctacgggaggcagcagtggggaatcttagacaatgggcgcaagcctgatctagccatgccgcgtgagtgatgaaggccttagggtcgtaaagctctttcgctggggaagataatgacggtacccagtaaagaaaccccggctaactccgtgccagcagccgcggtaatacggagggggttagcgttgttcggaattactgggcgtaaagcgcgcgtaggcggattggaaagttgggggtgaaatcccggggctcaaccccggaactgcctccaaaactatcagtctagaggtcgagagaggtgagtggaattccgagtgtagaggtgaaattcgtagatattcggaggaacaccagtggcgaaggcggctcactggctcgatactgacgctgaggtgcgaaagcgtggggagcaaacaggattagataccctggtagtccacgccgtaaacgatgaatgccagacgtcggggggcttgcccttcggtgtcacacctaacggattaagcattccgcctggggagtacggtcgcaagattaaaactcaaaggaattgacgggggcccgcacaagcggtggagcatgtggtttaattcgaagcaacgcgcagaaccttaccaacccttgacatcctcggaccgtcgcagagatgcgtctttctcgtaagagaccgagtgacaggtgctgcatggctgtcgtcagctcgtgtcgtgagatgttcggttaagtccggcaacgagcgcaacccacacccttagttgccagcattcagttgggcactctaggggaactgcccgtgataagcgggaggaaggtgtggatgacgtcaagtcctcatggcccttacgggttgggctacacacgtgctacaatggcatcaacaatgggttaatccctaaaagatgtctcagttcggattggggtctgcaactcgaccccatgaagtcggaatcgctagtaatcgcgtaacagcatgacgcggtgaatacgttcccgggccttgtacacaccgcccgtcacaccatgggagttggttctacccgacgacgctgcgctaaccttcgggaggcaggcggccacggtaggatcagcgactggggtg

SEQ ID NO: 1875 - DNA, 1445 bp, Lonepinella koalarum
  source 1..1445: mol_type = unassigned DNA
  misc_difference 14: note = n is a, c, g, or t
  misc_difference 19: note = n is a, c, g, or t
  misc_difference 37: note = n is a, c, g, or t
  misc_difference 124: note = n is a, c, g, or t
  misc_difference 798: note = n is a, c, g, or t
  misc_difference 961: note = n is a, c, g, or t
  misc_difference 975: note = n is a, c, g, or t
  misc_difference 1088: note = n is a, c, g, or t
  misc_difference 1217: note = n is a, c, g, or t
  misc_difference 1405: note = n is a, c, g, or t
aggcttaacacatncaagncgagcggtaacggagagnacttgtacttttcttgacgagtggcggacgggtgagtaatgcttgggaatctggcttatggagggggataactacgggaaactgtanctaataccgcgtaatatcttcggattaaagtatgggatcgcaagaccatatgccataagatgagcccaagtgggattaggtagttggtggggtaaaggcctaccaagccgacgatctctagctggtctgagaggatgaccagccacactggaactgagacacggtccagactcctacgggaggcagcagtggggaatattgcgcaatgggggcaaccctgacgcagccatgccgcgtgaatgaagaagtccttcgggttgtaaagttctttcggtgatgaggaagggatttagtttaatagactaagtcattgacgttagtcacagaagaagcaccggctaactccgtgccagcagccgcggtaatacggagggtgcgagcgttaatcggaataactgggcgtaaagggcacgcaggcggttatttaagtaagatgtgaaagccccgagcttaacttgggaattgcattttagactggataactagagtactttagggaggggtagaattccacgtgtagcggtgaaatgcgtagagatgtggaggaataccgaaggcgaaggcacccccttgggaatgtactgacgctcatgtgcgaaagcgtggggagcaaacaggattagataccctggtagtccacgctgtaaacgctgtcgatttgggggttgggcttngagcctggcgcccgtagctaacgtgataaatcgaccgcctggggagtacggccgcaaggttaaaactcaaatgaattgacgggggcccgcacaagcggtggagcatgtggtttaattcgatgcaacgcgaagaaccttacctactcttgacatccatagaagntctcagagatgagngtgtgccttcgggaactatgagacaggtgctgcatggctgtcgtcagctcgtgttgtgaaatgttgggttaagtcccgcaacgagcgcaacccttatcctttgttgccagcanttcggtcgggaactcaaaggagactgccagtgataaactggaggaaggtggggatgacgtcaagtcatcatggcccttacgagtagggctacacacgtgctacaatggtgcatacagagggaagcgatnccgcgaggtggagcgaatctcacaaagtgcatctaagtccggattggagtctgcaactcgactccatgaagtcggaatcgctagtaatcgcaaatcagaatgttgcggtgaatacgttcccgggccttgtacacaccgcccgtcacaccatgggagtgggttgtaccagaagtagatagcttaaccgnaaggggggcgtttaccacggtatgattcatgactggggtg

SEQ ID NO: 1876 - DNA, 1454 bp, unidentified
  source 1..1454: mol_type = unassigned DNA; note = Longibacter salinarum
gacgaacgctggcggcaggcttaacacatgcaagtcgtacgagaaagttccttcgggaacgagtaaagtggcgaacgggtgcgtaacgcgtgaccaacctgcccttgagaggagaataactactggaaacggtagctaatgctccataatgtttagctctcacctgagagctaaatcaaaggcctttggcgctcaaggatggggtcgcgtcggattagctcgttggtgaggtaacggctcaccaaggcaacaatccgtagctggtctgagaggatgatcagccacactggcactgagacacgggccagactcctacgggaggcagcagtggggaatcttaggcaatgggggaaaccctgacctagccatgccgcgtggaggaagacacccctatggggcgtaaactccttttctaccggaagaaaaccctgttttgcagggcgtgacggtacggtaggaataagcaccggctaactccgtgccagcagccgcggtaatacggagggtgcaagcgttgtccggaatcactgggcgtaaagggtgtgtaggtgggatagcaagtcagaggtgaaagcctgcggcttaaccgtagaagtgcctttgaaactgctattcttgagtcctagagaggttgctggaattcgtggtgtagcggtgaaatgcgtagatatcacgaggaacaccagaggcgtaagcgagcaactggataggtactgacactgaggcacgagagcgtggggagcaaacaggattagataccctggtagtccacgccgtaaacgatgaatgctcgccgttactccgcttaaggagtagtggctaagttaacgcgttaagcattccgcctggggagtacgatcgcaagattgaaactcaaaggaattgacgggggcccgcacaagcggtggagcatgtggcttaattcgatgcaacgcgaagaaccttacctaggctcgaacgctaccggaccggtcccgaaaaggaccttcccgtaagggctggtagtgaggtgctgcatggctgtcgtcagctcgtgtcgtgagatgttgggttaagtcccgcaacgagcgcaacccctgttactagttaccatcgggtcatgccggggactctagtgagactgcctgcgcaagcagtgaggaaggtggggacgacgtcaagtcatcatggcccttacgcctagggctgcacacgtgctacaatggctggtacagagggctgccacttcgcgagaaggagcgaatccctaaagccagtcccagttcggattggagtctgcaacccgactccatgaagcaggaatcgctagtaatcgtggatcagcaatgccacggtgaatacgttcccgggccttgtacacaccgcccgtcaagccatggaagctgagagtgcccgaagtccgtgacccaaccttagggagggagcggccgaaggtgagctcagtgactggggct

SEQ ID NO: 1877 - DNA, 1455 bp, unidentified
  source 1..1455: mol_type = unassigned DNA; note = Longimonas halophila
gacgaacgctggcggcaggcctaacacatgcaagtcgcacgagaacacaccttcgggtgttagtaaagtggcggacgggtgagtaacgcgtagataacctgcccttgagagaggaataactactggaaacggtagctaatgccacatgatatcaaccagccgcatggccggttgatcaaagccttcgggcactcaaggatggatctgcgtcggattagcttgttggtgaggtaatagctcaccaaggcaataatccgtagctggtctgagaggatgatcagctacactggcactgagacacgggccagactcctacgggaggcagcagtggggaatcttaggcaatgggggaaaccctgacctagccatgccgcgtggaggaagacacccctatggggcgtaaactccttttctattggaagaaaaccctgttttgcagggcatgacggtacaataggaataagcaccggctaactccgtgccagcagccgcggtaatacggagggtgcaagcgttgtccggaatcactgggtgtaaagggtgtgcaggcgggacagcaagtcagaggtgaaagcccacggctcaaccgtggaagtgcctttgaaactgctgttcttgagtctcggagaagttgctggaattcgtggtgtagcggtgaaatgcgtagatatcacgaggaacaccagaagcgtaagcgagcaactagacgagtactgacgctgaggcacgaaagcgtggggagcaaacaggattagataccctggtagtccacgccgtaaactatgaatgctcgcggttgccccggtaaaggggcagttggctaagctaacgcgttaagcattcccctggggactacgatcgcaaggattgagatcagaggaattgacggggcacggcacaaccggtggagcatgtggcttaattcgatgcaacgcgaagaaccttacctaggctcgaacgctaccggaccgctcccgaaaaggagcttcccttcggggctggtagtgaggtgctgcatggctgtcgtcagctcgtgtcgtgagatgttgggttaagtcccgcaacgagcgcaacccctatcgttagttaccagcggattatgccggggactctaatgagactgcctgcgcaagcagtgaggaaggtggggatgacgtcaagtcatcatggcccttacgcctagggctgcacacgtgctacaatggccggtacaatgggcagccactccgcaaggaggcgcgaatcccaaaaaccggtcccagttcggattgaagtctgcaactcgacttcatgaaggcggaatcgctagtaatcgcgtatcagcaatgtcgcggtgaatacgttcccgggccttgtacacaccgcccgtcaagccatggaagctgagagcgcccgaagtccgtgtcccaaccctatgggagggagcggccgaaggtgagctcagtgactggggct

SEQ ID NO: 1878 - DNA, 1345 bp, unidentified
  source 1..1345: mol_type = unassigned DNA; note = Lonsdalea britannica
ggacgggtgagtaatgtctggggatctgcccgatggagggggataactactggaaacggtagctaataccgcataacgtcgcaagaccaaagtgggggaccttygggcctcacaccatcggatgaacccagatgggattagctagtaggcggggtaaaggcccacctaggcgacgatctctagctggtctgagaggatgaccagccacactggaactgagacacggtccagactcctacgggaggcagcagtggggaatattgcacaatgggggaaaccctgatgcagccatgccgcgtgtatgaagaaggccttcgggttgtaaagtactttcagcggggaggaagggagtaaggttaatagccttattcattgacgttacccgcagaagaagcaccggctaactycgtgccagcagccgcggtaatacggagggtgcaagcgttaatcggaatgactgggcgtaaagcgcacgcaggcggtttgttaagtcagatgtgaaatccccgagcttaacttgggaactgcatttgaaactggcaagctagagtcttgtagaggggggtagaattccaggtgtagcggtgaaatgcgtagagatctggaggaataccggtggcgaaggcggccccctggacaaagactgacgctcaggtgcgaaagcgtggggagcaaacaggattagataccctggtagtccacgctgtaaacgatgtcgacttggaggttgcggtcttgaactgtggcttccggagctaacgcgttaagtcgaccgcctggggagtacggccgcaaggttaaaactcaaatgaattgacgggggcccgcacaagcggtggagcatgtggtttaattcgatgcaacgcgaagaaccttacctactcttgacatccagagaatttagcagagatgctttagtgccttcgggaactctgagacaggtgctgcatggctgtcgtcagctcgtgttgtgaaatgttgggttaagtcccgcaacgagcgcaacccttatcctttgttgccagcacataatggtgggaactcaaaggagactgccggtgataaaccggaggaaggtggggatgacgtcaagtcatcatggcccttacgagtagggctacacacgtgctacaatggcgcatacaaagagaagcgaacttgcgagagtaagcggacctcataaagtgcgtcgtagtccggattggagtctgcaactcgactccatgaagtcggaatcgctagtaatcgtagatcagaatgctacggtgaatacgttcccgggccttgtacacaccgcccgtcacaccatgggagtgggttgcaaaagaagtaggtagcttaacct

SEQ ID NO: 1879 - DNA, 1465 bp, unidentified
  source 1..1465: mol_type = unassigned DNA; note = Lonsdalea iberica
attgaacgctggcggcaggcctaacacatgcaagtcgagcggcagcggaaggaagcttgcttccttgccggcgagcggcggacgggtgagtaatgtctggggatctgcctgatggagggggataactactggaaacggtagctaataccgcataacgtcgcaagaccaaagtgggggaccttcgggcctcacaccatcggatgaacccagatgggattagctagtaggcggggtaaaggcccacctaggcgacgatctctagctggtctgagaggatgaccagccacactggaactgagacacggtccagactcctacgggaggcagcagtggggaatattgcacaatgggggaaaccctgatgcagccatgccgcgtgtatgaagaaggccttcgggttgtaaagtactttcagcggggaggaaggcagtgaacttaatacgttcgctgattgacgttacccgcagaagaagcaccggctaactccgtgccagcagccgcggtaatacggagggtgcaagcgttaatcggaatgactgggcgtaaagcgcacgcaggcggtttgttaagtcagatgtgaaatccccgagcttaacttgggaactgcatttgaaactggcaagctagagtcttgtagaggggggtagaattccaggtgtagcggtgaaatgcgtagagatctggaggaataccggtggcgaaggcggccccctggacaaagactgacgctcaggtgcgaaagcgtggggagcaaacaggattagataccctggtagtccacgctgtaaacgatgtcgacttggaggttgcggtcttgaactgtggcttccggagctaacgcgttaagtcgaccgcctggggagtacggccgcaaggttaaaactcaaatgaattgacgggggcccgcacaagcggtggagcatgtggtttaattcgatgcaacgcgaagaaccttacctactcttgacatccagagaacttggcagagatgccttggtgccttcgggaactctgagacaggtgctgcatggctgtcgtcagctcgtgttgtgaaatgttgggttaagtcccgcaacgagcgcaacccttatcctttgttgccagcacgtaatggtgggaactcaaaggagactgccggtgataaaccggaggaaggtggggatgacgtcaagtcatcatggcccttacgagtagggctacacacgtgctacaatggcgcatacaaagagaagcgaacttgcgagagtaagcggacctcataaagtgcgtcgtagtccggattggagtctgcaactcgactccatgaagtcggaatcgctagtaatcgtagatcagaatgctacggtgaatacgttcccgggccttgtacacaccgcccgtcacaccatgggagtgggttgcaaaagaagtaggtagcttaaccttcgggagggcgcttaccactttgtgattcatgactggggtg

SEQ ID NO: 1880 - DNA, 1465 bp, unidentified
  source 1..1465: mol_type = unassigned DNA; note = Lonsdalea populi
attgaacgctggcggcaggcctaacacatgcaagtcgagcggcagcggaagggagcttgctcccttgccggcgagcggcggacgggtgagtaatgtctggggatctgcccgatggagggggataactactggaaacggtagctaataccgcataacgtcgcaagaccaaagtgggggaccttagggcctcacaccatcggatgaacccagatgggattagctagtaggcggggtaagagcccacctaggcgacgatctctagctggtctgagaggatgaccagccacactggaactgagacacggtccagactcctacgggaggcagcagtggggaatattgcacaatgggggaaaccctgatgcagccatgccgcgtgtatgaagaaggccttcgggttgtaaagtactttcagcggggaggaaggcagtgaacttaatacgttcgctgattgacgttacccgcagaagaagcaccggctaactccgtgccagcagccgcggtaatacggagggtgcaagcgttaatcggaatgactgggcgtaaagcgcacgcaggcggtttgttaagtcagatgtgaaatccccgagcttaacttgggaactgcatttgaaactggcaggctagagtcttgtagaggggggtagaattccaggtgtagcggtgaaatgcgtagagatctggaggaataccggtggcgaaggcggccccctggacaaagactgacgctcaggtgcgaaagcgtggggagcaaacaggattagataccctggtagtccacgctgtaaacgatgtcgacttggaggttgcggtcttgaactgtggcttccggagctaacgcgttaagtcgaccgcctggggagtacggccgcaaggttaaaactcaaatgaattgacgggggcccgcacaagcggtggagcatgtggtttaattcgatgcaacgcgaagaaccttacctactcttgacatccagagaacttggcagagatgccctggtgccttcgggagctctgagacaggtgctgcatggctgtcgtcagctcgtgttgtgaaatgttgggttaagtcccgcaacgagcgcaacccttatcctttgttgccagcacgtcatggtgggaactcaaaggagactgccggtgataaaccggaggaaggtggggatgacgtcaagtcatcatggcccttacgagtagggctacacacgtgctacaatggcgcatacaaagagaagcgaacttgcgagagtaagcggacctcataaagtgcgtcgtagtccggattggagtctgcaactcgactccatgaagtcggaatcgctagtaatcgtagatcagaatgctacggtgaatacgttcccgggccttgtacacaccgcccgtcacaccatgggagtgggttgcaaaagaagtaggtagcttaaccttcgggagggcgcttaccactttgtgattcatgactggggtg

SEQ ID NO: 1881 - DNA, 1464 bp, unidentified
  source 1..1464: mol_type = unassigned DNA; note = Lonsdalea quercina
attgaacgctggcggcaggcctaacacatgcaagtcgagcggcagcggaaggaagcttgcttccttgccggcgagcggcggacgggtgagtaatgtctggggatctgcccgatggagggggataactactggaaacggtagctaataccgcataacgtcgcaagaccaaagtgggggaccttcgggcctcacaccatcggatgaacccagatgggattagctagtaggcggggtaaaggcccacctaggcgacgatctctagctggtctgagaggatgaccagccacactggaactgagacacggtccagactcctacgggaggcagcagtggggaatattgcacaatgggggaaaccctgatgcagccatgccgcgtgtatgaagaaggccttcgggttgtaaagtactttcagcggggaggaaggcagtgaacttaatacgttcgctgattgacgttacccgcagaagaagcaccggctaactccgtgccagcagccgcggtaatacggagggtgcaagcgttaatcggaatgactgggcgtaaagcgcacgcaggcggtttgttaagtcagatgtgaaatccccgagcttaacttgggaactgcatttgaaactggcaggctagagtcttgtagaggggggtagaattccaggtgtagcggtgaaatgcgtagagatctggaggaataccggtggcgaaggcggccccctggacaaagactgacgctcaggtgcgaaagcgtggggagcaaacaggattagataccctggtagtccacgctgtaaacgatgtcgacttggaggttgcggtcttgaactgtggcttccggagctaacgcgttaagtcgaccgcctggggagtacggccgcaaggttaaaactcaaatgaattgacgggggcccgcacaagcggtggagcatgtggtttaattcgatgcaacgcgaagaaccttacctactcttgacatccagagaacttggcagagatgccttggtgccttcgggaactctgagacaggtgctgcatggctgtcgtcagctcgtgttgtgaaatgttgggttaagtcccgcaacgagcgcaacccttatcctttgttgccagcgattcggtcgggaactcaaaggagactgccggtgataaaccggaggaaggtggggatgacgtcaagtcatcatggcccttacgagtagggctacacacgtgctacaatggcgcatacaaagagaagcgaacttgcgagagtgagcggacctcataaagtgcgtcgtagtccggattggagtctgcaactcgactccatgaagtcggaatcgctagtaatcgtagatcagaatgctacggtgaatacgttcccgggccttgtacacaccgcccgtcacaccatgggagtgggttgcaaaagaagtaggtagcttaaccttcgggagggcgcttaccactttgtgattcatgactggggtg

SEQ ID NO: 1882 - DNA, 1456 bp, unidentified
  source 1..1456: mol_type = unassigned DNA; note = Luminiphilus syltensis
attgaacgctggcggcaggcctaacacatgcaagtcgagcgagaaagatcttcggatcgagtacagcggcggacgggtgagtaacgcgtaggaatctacctagtagtgggggacaactcggggaaactcgagctaataccgcatacgccctacgggggaaagcgggggaccttcgggcctcgtgctattagatgagcctgcgttggattagcttgttggtgaggtaaaggctcaccaaggcgacgatccatagctggtctgagaggatgatcagccacaccgggactgagacacggcccggactcctacgggaggcagcagtggggaatattgcgcaatgggcgaaagcctgacgcagccatgccgcgtgtgtgaagaaggccttcgggttgtaaagcactttcaattgggaggaaaggtttgcagttaataactgtaagctgtgacgttacctttagaagaagcaccggctaactccgtgccagcagccgcggtaatacggagggtgcaagcgttaatcggaattactgggcgtaaagcgcgcgtaggcggtttgttaagtcggatgtgaaagccctgggctcaacctgggaactgcacccgatactggctaactagagtgcgagagagggaggtagaattccatgtgtagcggtgaaatgcgtagatatatggaggaataccagtggcgaaggcggcctcctggctcgacactgacgctgaggtgcgaaagcgtggggagcaaacaggattagataccctggtagtccacgccgtaaacgatgtctactagctgttggggtacttgagaccttggtagcgcagctaacgcactaagtagaccgcctggggagtacggccgcaaggttaaaactcaaatgaattgacgggggcccgcacaagcggtggagcatgtggtttaattcgatgcaacgcgaagaaccttaccaggccttgacatcctagaaacttagcagaaatgctttggtgccttcgggaatctagtgacaggtgctgcatggctgtcgtcagctcgtgtcgtgagatgttgggttaagtcccgtaacgagcgcaacccttgtccttagttgccagcacataatggtgggaactctaaggagactgccggtgacaaaccggaggaaggtggggacgacgtcaagtcatcatggcccttacggtctgggctacacacgtgctacaatggcaggtacagacggtcgctaacccgcgagggggagccaatccgagaaaacttgtcgtagtccggattggagtctgcaactcgactccatgaagtcggaatcgctagtaatcgcgaatcagaatgtcgcggtgaatacgttcccgggccttgtacacaccgcccgtcacaccatgggagtgggttgctccagaagtggttagtctaaccttcgggaggacgatcaccacggagtgattcatgactggggtg

SEQ ID NO: 1883 - DNA, 1467 bp, Luteibacter rhizovicinus
  source 1..1467: mol_type = unassigned DNA
attgaacgctggcggcatgcttaacacatgcaagtcgaacggcagcacagcagagcttgctctgtgggtggcgagtggcggacgggtgagtaatgcatcgggacctacccaactgtgggggataacgtagggaaacttacgctaataccgcatacgtcctacgggagaaagcgggggaccttcgggcctcgcgcggttggatggaccgatgtgcgattagcttgttggtgaggtaacggctcaccaaggcgacgatcgctagctggtctgagaggatgatcagccacactgggactgagacacggcccagactcctacgggaggcagcagtggggaatattggacaatgggcgcaagcctgatccagcaatgccgcgtgtgtgaagaaggccttcgggttgtaaagcacttttatcaggagcgaaatctgcagggctaatacccatgcagtctgacggtacctgaggaataagcaccggctaactccgtgccagcagccgcggtaatacggagggtgcaagcgttaatcggaattactgggcgtaaagcgtgcgtaggcggttcgttaagtctgttgtgaaagccccgggctcaacctgggaatggcaatggatactggcgagctagagtgtgtcagaggatggtggaattcccggtgtagcggtgaaatgcgtagagatcgggaggaacatcagtggcgaaggcggccatctgggacaacactgacgctgaggcacgaaagcgtggggagcaaacaggattagataccctggtagtccacgccctaaacgatgcgaactggatgttggtctcaactcggagatcagtgtcgaagctaacgcgttaagttcgccgcctggggagtacggtcgcaagactgaaactcaaaggaattgacgggggcccgcacaagcggtggagtatgtggtttaattcgatgcaacgcgaagaaccttacctggccttgacatgtccggaatccagcagagatgcaggagtgccttcgggaatcggaacacaggtgctgcatggctgtcgtcagctcgtgtcgtgagatgttgggttaagtcccgcaacgagcgcaacccttgtccttagttgccagcgagtaatgtcgggaactctaaggagactgccggtgacaaaccggaggaaggtggggatgacgtcaagtcatcatggcccttacggccagggctacacacgtactacaatggtcggtacagagggttgcgatgccgcgaggtggagctaatcccagaaagccgatcccagtccggattggagtctgcaactcgactccatgaagtcggaatcgctagtaatcgcagatcagctatgctgcggtgaatacgttcccgggccttgtacacaccgcccgtcacaccatgggagtgagctgctccagaagccgttagtctaaccgcaagggggacgacgaccacggagtggttcatgactggggtg

SEQ ID NO: 1884 - DNA, 1467 bp, Luteibacter yeojuensis
  source 1..1467: mol_type = unassigned DNA
attgaacgctggcggcatgcttaacacatgcaagtcgaacggcagcacagcagagcttgctctgtgggtggcgagtggcggacgggtgagtaatgcatcgggacctacccagacgtgggggataacgtagggaaacttacgctaataccgcatacgtcctacgggagaaagcgggggatcgcaagacctcgcgcggttggatggaccgatgtgcgattagctagttggtgaggtaatggctcaccaaggcgacgatcgctagctggtctgagaggatgatcagccacactgggactgagacacggcccagactcctacgggaggcagcagtggggaatattggacaatgggcgcaagcctgatccagcaatgccgcgtgtgtgaagaaggccttcgggttgtaaagcacttttatcaggagcgaaatctgcagggctaatacctttgcagtctgacggtacctgaggaataagcaccggctaactccgtgccagcagccgcggtaatacggagggtgcaagcgttaatcggaattactgggcgtaaagcgtgcgtacgcggttagttaagtctgctgtgaaagccccgggctcaacctgggaatggcagtggatactggctagctagagtgtgatagaggatggtggaattcccggtgtagcggtgaaatgcgtagagatcgggaggaacatcagtggcgaaggcggccatctggatcaacactgacgctgaggcacgaaagcatgtggagcaaacaggattagataccctggtagtccacgccctaaacgatgcgaactggatgttggtctcaactcggagatcagtgtcgaagctaacgcgttaagttcgccgcctggggagtacggtcgcaagactgaaactcaaaggaattgacgggggcccgcacaagcggtggagtatgtggtttaattcgatgcaacgcgaagaaccttacctggccttgacatgtccggaatcctgcagagatgcgggagtgccttcgggaatcggaacacaggtgctgcatggctgtcgtcagctcgtgtcgtgagatgttgggttaagtcccgcaacgagcgcaacccttgtccttagttgccagcacgtaatggtgggaactctaaggagactgccggtgacaaaccggaggaaggtggggatgacgtcaagtcatcatggcccttacggccagggctacacacgtactacaatggtcggtacagagggttgcgagaccgcgaggtggagctaatcccagaaagccgatcccagtccggattggagtctgcaactcgactccatgaagtcggaatcgctagtaatcgcagatcagctatgctgcggtgaatacgttcccgggccttgtacacaccgcccgtcacaccatgggagtgagctgctccagaagccgttagtctaaccgcaagggggacgacgaccacggagtggttcatgactggggtg

SEQ ID NO: 1885 - DNA, 1409 bp, Luteimonas aestuarii
  source 1..1409: mol_type = unassigned DNA
catgcagtcgaacggcagcacaagggagcttgctccctgggtggcgagtggcggacgggtgaggaatacatcggaatctgcctatttgtgggggataacgtagggaaacttacgctaataccgcatacgacctacgggtgaaagcggaggaccttcgggcttcgcgcagatagatgagccgatgtcggattagctagttggcggggtaaaggcccaccaaggcgacgatccgtagctggtctgagaggatgatcagccacactggaactgagacacggtccagactcctacgggaggcagcagtggggaatattggacaatgggcgcaagcctgatccagccatgccgcgtgggtgaagaaggccttcgggttgtaaagcccttttgttgggaaagaaaagcaatcggttaatacccggttgttctgacggtacccaaagaataagcaccggctaacttcgtgccagcagccgcggtaatacgaagggtgcaagcgttactcggaattactgggcgtaaagcgtgcgtaggtggttcgttaagtctgatgtgaaagccctgggctcaacctgggaattgcattggatactggcgggctagagtgcggtagagggcagtggaattcctggtgtagcagtgaaatgcgtagagatcaggaggaacatctgtggcgaaggcgactgcctggaccagcactgacactgaggcacgaaagcgtggggagcaaacaggattagataccctggtagtccacgccctaaacgatgcgaactggatgttgggtgcaatttggcactcagtatcgaagctaacgcgttaagttcgccgcctggggagtacggtcgcaagactgaaactcaaaggaattgacgggggcccgcacaagcggtggagtatgtggtttaattcgatgcaacgcgaagaaccttacctggccttgacatgcacggaactttccagagatggattggtgccttcgggaaccgtgacacaggtgctgcatggctgtcgtcagctcgtgtcgtgagatgttgggttaagtcccgcaacgagcgcaacccttgtccttagttgccagcacgtaatggtgggaactctaaggagaccgccggtgacaaaccggaggaaggtggggatgacgtcaagtcatcatggcccttacggccagggctacacacgtactacaatgggaaggacagagggctgcaaacccgcgagggcaagccaatcccagaaaccttctctcagtccggatcggagtctgcaactcgactccgtgaagtcggaatcgctagtaatcgcagatcagcattgctgcggtgaatacgttcccgggccttgtacacaccgcccgtcacaccatgggagtttgttgcaccagaagcaggtagcctaaccttcgggggggc

SEQ ID NO: 1886 - DNA, 1467 bp, unidentified
  source 1..1467: mol_type = unassigned DNA; note = Luteimonas cucumeris
agtgaacgctggcggtaggcctaacacatgcaagtcgaacggcagcacaggagagcttgctctctgggtggcgagtggcggacgggtgaggaatacatcggaatctaccttttcgtgggggataacgtagggaaacttacgctaataccgcatacgaccttagggtgaaagcggaggaccttcgggcttcgcgcggatagatgagccgatgtcggattagctagttggcggggtaaaggcccaccaaggcgacgatccgtagctggtctgagaggatgatcagccacactggaactgagacacggtccagactcctacgggaggcagcagtggggaatattggacaatgggcgcaagcctgatccagccataccgcgtgggtgaagaaggccttcgggttgtaaagcccttttgttgggaaagaaatcctgtcggttaatacccggcagggatgacggtacccaaagaataagcaccggctaacttcgtgccagcagccgcggtaatacgaagggtgcaagcgttactcggaattactgggcgtaaagcgtgcgtaggtggtttgttaagtctgatgtgaaagccctgggctcaacctgggaatggcattggatactggcaggctagagtgcggtagaggatggcggaattcccggtgtagcagtgaaatgcgtagagatcgggaggaacatctgtggcgaaggcggccatctggaccagcactgacactgaggcacgaaagcgtggggagcaaacaggattagataccctggtagtccacgccctaaacgatgcgaactggatgttgggagcaacttggctctcagtatcgaagctaacgcgttaagttcgccgcctggggagtacggtcgcaagactgaaactcaaaggaattgacgggggcccgcacaagcggtggagtatgtggtttaattcgatgcaacgcgaagaaccttacctggccttgacatgtccggaatcctgcagagatgcgggagtgccttcgggaatcggaacacaggtgctgcatggctgtcgtcagctcgtgtcgtgagatgttgggttaagtcccgcaacgagcgcaacccttgtccttagttgccagcacgtaatggtgggaactctaaggagaccgccggtgacaaaccggaggaaggtggggatgacgtcaagtcatcatggcccttacggccagggctacacacgtactacaatggtagggacagagggctgcaaacccgcgagggtgagccaatcccagaaaccctatctcagtccggatcggagtctgcaactcgactccgtgaagtcggaatcgctagtaatcgcagatcagcattgctgcggtgaatacgttcccgggccttgtacacaccgcccgtcacaccatgggagtttgttgcaccagaagcaggtagcttaaccgcaaggggggcgcttgccacggtgtggccgatgactggggtg

SEQ ID NO: 1887 - DNA, 1423 bp, Luteimonas marina
  source 1..1423: mol_type = unassigned DNA
atgcaagtcgaacggcagcacaggggagcttgctccctgggtggcgagtggcggacgggtgaggaatacatcggaatctgcctatacgtgggggataacgtagggaaacttacgctaataccgcatacgacctacgggtgaaagcgggggatcgcaagacctcgcgcggatagatgagccgatgtccgattagctagttggcggggtaatggcccaccaaggcgacgatcggtagctggtctgagaggatgatcagccacactggaactgagacacggtccagactcctacgggaggcagcagtggggaatattggacaatgggcgcaagcctgatccagccatgccgcgtgggtgaagaaggccttcgggttgtaaagcccttttgttgggaaagaaaactttccgattaatacccggagagaatgacggtacccaaagaataagcaccggctaacttcgtgccagcagccgcggtaatacgaagggtgcaagcgttactcggaattactgggcgtaaagcgtgcgtaggtggttcgttaagtctgatgtgaaagccctgggctcaacctgggaattgcattggatactggcgggctagagtacggtagagggtagtggaattcctggtgtagcagtgaaatgcgtagagatcaggaggaacatccgtggcgaaggcgactacctggaccagtactgacactgaggcacgaaagcgtggggagcaaacaggattagataccctggtagtccacgccctaaacgatgcgaactggatgttgggttcaactaggaactcagtatcgaagctaacgcgttaagttcgccgcctggggagtacggtcgcaagactgaaactcaaaggaattgacgggggcccgcacaagcggtggagtatgtggtttaattcgatgcaacgcgcagaaccttacctggccttgacatccacggaactttccagagatggattggtgccttcgggaaccgtgagacaggtgctgcatggctgtcgtcagctcgtgtcgtgagatgttgggttaagtcccgcaacgagcgcaacccttgtccttagttgccagcacgtaatggtgggaactctaaggagaccgccggtgacaaaccggaggaaggtggggatgacgtcaagtcatcatggcccttacggccagggctacacacgtactacaatgggaaggacagagggctgcaaacccgcgagggcaagccaatcccagaaaccttctctcagtccggatcggagtctgcaactcgactccgtgaagtcggaatcgctagtaatcgcagatcagcattgctgcggtgaatacgttcccgggccttgtacacaccgcccgtcacaccatgggagtttgttgcaccagaagcaggtagcctaaccgcaaggagggcgcttgccacggtgt

SEQ ID NO: 1888 - DNA, 1462 bp, unidentified
  source 1..1462: mol_type = unassigned DNA; note = Luteimonas terrae
  misc_difference 26: note = n is a, c, g, or t
agtgaacgctggcggcaggcagctancatgcagtcgacggcagcacagaggagcttgctccttgggtggcgagtggcggacgggtgaggaatacatcggaatctgcctatttgtgggggataacgtagggaaacttacgctaataccgcatacgacctacgggtgaaagcggaggaccttcgggcttcgcgcagatagatgagccgatgtcggattagctagttggcggggtaaaggcccaccaaggcgacgatccgtagctggtctgagaggatgatcagccacactggaactgagacacggtccagactcctacgggaggcagcagtggggaatattggacaatgggcgcaagcctgatccagccatgccgcgtgggtgaagaaggccttcgggttgtaaagcccttttgttgggaaagaaaagcagccggttaatacccggttgttctgacggtacccaaagaataagcaccggctaacttcgtgccagcagccgcggtaatacgaagggtgcaagcgttactcggaattactgggcgtaaagcgtgcgtaggtggtttgttaagtctgatgtgaaagccctgggctcaacctgggaattgcattggatactggcaggctagagtgcggtagagggtagtggaattcccggtgtagcagtgaaatgcgtagagatcgggaggaacatccgtggcgaaggcgactacctggaccagcactgacactgaggcacgaaagcgtggggagcaaacaggattagataccctggtagtccacgccctaaacgatgcgaactggatgttgggttcaactaggaactcagtatcgaagctaacgcgttaagttcgccgcctggggagtacggtcgcaagactgaaactcaaaggaattgacgggggcccgcacaagcggtggagtatgtggtttaattcgatgcaacgcgaagaaccttacctggccttgacatgcacggaactttccagagatggattggtgccttcgggaaccgtgacacaggtgctgcatggctgtcgtcagctcgtgtcgtgagatgttgggttaagtcccgcaacgagcgcaacccttgtccttagttgccagcacgtaatggtgggaactctaaggagaccgccggtgacaaaccggaggaaggtggggatgacgtcaagtcatcatggcccttacggccagggctacacacgtactacaatgggaaggacagagggctgcaaacccgcgagggcaagccaatcccagaaaccttctctcagtccggattggagtctgcaactcgactccatgaagtcggaatcgctagtaatcgcagatcagcattgctgcggtgaatacgttcccgggccttgtacacaccgcccgtcacaccatgggagtttgttgcaccagaagtaggtagtctaaccgcaaggaggacgctaccacggtgtggccgatgactgggg

SEQ ID NO: 1889 - DNA, 1476 bp, unidentified
  source 1..1476: mol_type = unassigned DNA; note = Luteitalea pratensis
aatcaacgctggcggcgtgcctaacacatgcaagtcgaacgtgaaaggggcttcggccccgagtaaagtggcaaacgggtgagtaacgcgtgggtgatctgcctctgagtgggggataaccttccgaaaggagggctaataccgcatgacatcctgttcttggatgaacggagatcgaagctggggaccgcaaggcctggcgcttggagaggagcccgcgtccgattagctagttggtggggtaatggctcaccaaggcgacgatcggtagccggcctgagagggcggacggccacactgggactgagacacggcccagactcctacgggaggcagcagtggggaattgttcgcaatgggcgcaagcctgacgacgcaacgccgcgtgggggatgaaggtcttcggattgtaaacccctgttgggtgggacgaacaccttcgtggtgaatatccacgagggctgacggtaccacctgaggaagccccggctaactctgtgccagcagccgcggtaatacagagggggcaagcgttgttcggaattactgggcgtaaagggcgcgtaggcggcctgttaagtcggacgtgaaatccctcggctcaaccggggaactgcgtccgatactggcgggcttgaattcgggagagggatgtggaattccaggtgtagcggtgaaatgcgtagatatctggaggaacaccggtggcgaaggcggcatcctggaccgacattgacgctgaggcgcgaaagccaggggagcaaacgggattagataccccggtagtcctggccctaaacgatgagtgcttggtgtggcgggtatcgatccctgccgtgccgaagctaacgcattaagcactccgcctggggagtacggtcgcaaggctgaaactcaaaggaattgacgggggcccgcacaagcggtggagcatgtggtttaattcgacgcaacgcgaagaaccttacccaggctcgaaatgcagacgatcgccggtgaaagccggttcccgcaagggcgtctgtataggtgctgcatggctgtcgtcagctcgtgtcgtgagatgttgggttaagtcccgcaacgagcgcaacccttgtttcctgttgccatcaggtcaagctgggcactctggagaaactgccggtgacaaaccggaggaaggtggggatgacgtcaagtcagcatggcctttatgtctggggctacacacgtgctacaatggccggtacaaaccgttgcaaactcgcgagggtgagctaatcggagaaagccggtctcagttcggattgtaggctgcaactcgcctgcatgaagttggaatcgctagtaatcgcggatcagcatgccgcggtgaatacgttcccgggccttgtacacaccgcccgtcacatcacgaaagctggctgtactagaagtcgccacgctaacccgcaagggaggctagcgccgaaggtatggttagtgattggggtg

SEQ ID NO: 1890 - DNA, 1411 bp, Lyngbya aestuarii
  source 1..1411: mol_type = unassigned DNA
gatgaacgctggcggtctgcttaacacatgcaagtcgaacggactcttcggagttagtggcggacgggtgagtaacgcgtgagaatctgcctctagaacggggacaacagagggaaacttctgctaatcccggatgagccgaaaggtcaaagatttatcgtctagagatgagctcgcgtctgattagctagttggtaaggtaaargcttaccaaggcgacgatcagtagctggtctgagaggatgatcagccacactgggactgagacacggcccagactcctacgggaggcagcagtggggaattttccgcaatgggcgcaagcctgacggagcaagaccgcgtgggggaggaaagcctttgggttgtaaaccccttttctcagggaagaagaaagtgacggtacctgaggaatcagcctcggctaactccgtgccagcagccgcggtaatacggaggaggcaagcgttatccggaatgattgggcgtaaagcgttcgtaggtggcaattcaagtctgctgtcaaagacagtagctcaactactgcaaggcagtggaaactgaatagctagagtgcggtaggggcagagggaattcccggtgtagcggtgaaatgcgtagagatcgggaagaacaccggtggcgaaagcgctctgctgggccgcaactgacactgagggacgaaagctaggggagcgaatgggattagataccccagtagtcctagctgtaaacgatggaaactaggtgttgcctgtatcgacccaggcagtgccgtagctaacgcgttaagtttcccgcctggggagtacgcacgcaagtgtgaaactcaaaggaattgacgggggcccgcacaagcggtggagtatgtggtttaattcgatgcaacgcgaagaaccttaccagggcttgacatgtccggaattctggggaaactcggaagtgccttcgggaaccggaacacaggtggtgcatggctgtcgtcagctcgtgtcgtgagatgttgggttaagtcccgcaacgagcgcaaccctcgtttttagttgccatcattaagttgggcactctagagagactgccggtgacaaaccggaggaaggtggggatgacgtcaagtcatcatgccccttacgtcctgggctacacacgtactacaatggtaaggacaaagggcagccacttcgcgaggaggagctaatcccgtaaaccttgcctcagttcagattgcaggctgcaactcgcctgcatgaaggaggaatcgctagtaatcgcaggtcagcatactgcggtgaatccgttcccgggccttgtacacaccgcccgtcacaccatggaagttaaccatgcccgaagtcattactctaacctttcgaggaggagggtgccgaaggcagggytgatgactggggtg

SEQ ID NO: 1891 - DNA, 1411 bp, Lyngbya majuscula
  source 1..1411: mol_type = unassigned DNA
gatgaacgctggcggtatgcttaacacatgcaagtcgaacgccccttcgggggagtggcggacgggtgagtaacgcgtgagaatctgccttcgggtcggggacaaccaccggaaacagtggctaataccggatatgcctattggtgaaagatttattgccagaagaggagctcgcgtctgattagctagttggtagggtaaaggcctaccaaggcaacgatcagtagctggtctgagaggatgagcagccacactgggactgagacacggcccagactcctacgggaggcagcagtggggaattttccgcaatgggcgaaagcctgacggagcaataccgcgtgagggaggaaggcttttgggttgtaaacctcttttatcagggaagaagaaagtgacggtacctgaggaaaaagcatcggctaactccgtgccagcagccgcggtaatacggaggatgcaagcgttatccggaattattgggcgtaaagggtccgtaggtggtacctcaagtcggctgttaaagaccagggcttaactctgggcaggcagtggaaactgaggaactagagggcagtaggggtagagggaattcccggtgtagcggtgaaatgcgtagatttcgggaagaacatcggtggcgaaggcgctctactggactgcacctgacactgagggacgaaagctaggggagcgaatgggattagataccccagtagtcctagctgtaaacgatggatactaggtgtagcttgtatcgacccaagctgtgccgaagccaacgcgttaagtatcccgcctggggagtacgcacgcaagtgtgaaactcaaaggaattgacgggggcccgcacaagcggtggagtatgtggtttaattcgatgcaacgcgaagaaccttaccagggcttgacatgtcgcgaatcccggtgaaagctgggagtgccttagggagcgcgaacacaggtggtgcatggctgtcgtcagctcgtgtcgtgagatgttgggttaagtcccgcaacgagcgcaaccctcgtttttagttgccagcacttcaggtgggcactctagagagactgccggtgacaaaccggaggaaggtggggatgacgtcaagtcagcatgccccttacgtcctgggctacacacgtactacaatggtgaggacaatgggcagccaacccgcaagggggagctaatctcatcaaacctggcctcagttcagattgccggctgcaactcgccggcatgaaggaggaatcgctagtaatcgccggtcagaatacggcggtgaatccgttcccgggccttgtacacaccgcccgtcacaccatggaagctggccacgcccgaagtcgttaccctaaccctttagggagggggatgccgaaggcagggttggtgactggggtg

SEQ ID NO: 1892 - DNA, 1476 bp, unidentified
  source 1..1476: mol_type = unassigned DNA; note = Lysinibacillus chungkukjangi
gacgaacgctggcggcgtgcctaatacatgcaagtcgagcggactttagaaaagcttgcttttctaaagttagcggcggacgggtgagtaacacgtgggcaacctgccctatagttggggataactccgggaaaccggggctaataccgaataatacattccttctcctgttggaatgttgaaagatggtttacgctatcgctataggatgggcccgcggcgcattagctagttggtgaggtaacggctcaccaaggcgacgatgcgtagccgacctgagagggtgatcggccacactgggactgagacacggcccagactcctacgggaggcagcagtagggaatcttccacaatgggcgaaagcctgatggagcaacgccgcgtgagtgaagaaggttttcggatcgtaaaactctgttgtaagggaagaacaagtacagtagtaactggctgtaccttgacggtaccttattagaaagccacggctaactacgtgccagcagccgcggtaatacgtaggtggcaagcgttgtccggaattattgggcgtaaagcgcgcgcaggtggtcctttaagtctgatgtgaaagcccacggctcaaccgtggagggtcattggaaactgggggacttgagtgcagaagaggaaagtggaattccaagtgtagcggtgaaatgcgtagagatttggaggaacaccagtggcgaaggcgactttctggtctgtaactgacactgaggcgcgaaagcgtggggagcaaacaggattagataccctggtagtccacgccgtaaacgatgagtgctaagtgttagggggtttccgccccttagtgctgcagctaacgcattaagcactccgcctggggagtacggtcgcaagactgaaactcaaaggaattgacgggggcccgcacaagcggtggagcatgtggtttaattcgaagcaacgcgaagaaccttaccaggtcttgacatcccattgaccgctatggagacatagctttcccttcggggacagtggtgacaggtggtgcatggttgtcgtcagctcgtgtcgtgagatgttgggttaagtcccgcaacgagcgcaacccttgttcttagttgccatcatttagttgggcactctaaggagactgccggtgacaaaccggaggaaggtggggatgacgtcaaatcatcatgccccttatgacctgggctacacacgtgctacaatggacggtacaaacggttgccaacccgcgagggggagctaatccgataaaaccgttctcagttcggattgtaggctgcaactcgcctacatgaagccggaatcgctagtaatcgcggatcagcatgccgcggtgaatacgttcccgggccttgtacacaccgcccgtcacaccacgagagtttgtaacacccgaagccggtggggtaacccttttgggagccagccgtcgaaggtgggacagatgattggggtg

SEQ ID NO: 1893 - DNA, 1449 bp, unidentified
  source 1..1449: mol_type = unassigned DNA; note = Lysinibacillus composti
gacgaacgctgcggcgtgcctaatacatgcaagtcgagcgaacttgcgggagcttgctcccaaaagttagcggcggacgggtgagtaacacgtgggcaacctgccctatagtttgggataactccgggaaaccggggctaataccgaataatacatttcatctcctgttggaatgttgaaagatggtttcggctatcgctataggatgggcccgcggcgcattagctagtaggtgaggtaacggctcacctaggcgacgatgcgtagccgacctgagagggtgatcggccacactgggactgagacacggcccagactcctacgggaggcagcagtagggaatcttccacaatgggcgaaagcctgatggagcaacgccgcgtgagtgaagaaggttttcggatcgtaaaactctgttgtaagggaagaacaagtgcagtagtaactggctgcaccttgacggtaccttattagaaagccacggctaactacgtgccagcagccgcggtaatacgtaggtggcaagcgttgtccggaattattgggcgtaaagcgcgcgcaggcggtttcttaagtctgatgtgaaagcccccggcttaaccggggagggtcattggaaactgggagacttgagtgcagaagaggaaagtggaattccaagtgtagcggtgaaatgcgtagagatttggaggaacaccagtggcgaaggcgactttctggtctgtaactgacgctgaggcgcgaaagcgtggggagcaaacaggattagataccctggtagtccacgccgtaaacgatgagtgctaagtgttagggggtttccgccccttagtgctgcagctaacgcattaagcactccgcctggggagtacggtcgcaagactgaaactcaaaggaattgacgggggcccgcacaagcggtggagcatgtggtttaattcgaagcaacgcgaagaaccttaccaggtcttgacatcccactgaccgctatggagacatagttttcccttcggggacagtggtgacaggtggtgcatggttgtcgtcagctcgtgtcgtgagatgttgggttaagtcccgcaacgagcgcaacccttgatcttagttgccatcatttagttgggcactctaaggtgactgccggtgacaaaccggaggaaggtggggatgacgtcaaatcatcatgccccttatgacctgggctacacacgtgctacaatggacggtacaaacggttgccaacccgcgagggggagctaatccgataaaaccgttctcagttcggattgtaggctgcaactcgcctacatgaagccggaatcgctagtaatcgcggatcagcatgccgcggtgaatacgttcccgggccttgtacacaccgcccgtcacaccacgagagtttgtaacacccgaagtcggtgaggtaaccttttggggccagccgccgaa

SEQ ID NO: 1894 - DNA, 1430 bp, unidentified
  source 1..1430: mol_type = unassigned DNA; note = Lysinibacillus halotolerans
tctataatgcagtcgagcgaacagataaggagcttgctcctttgacgttagcggcggacgggtgagtaacacgtgggcaacctgccctatagttggggataactccgggaaaccggggctaataccgaataatacattttatctcctgatgagatgttgaaagatggcatctagctatcgctataggatgggcccgcggcgcattagctagttggtgaggtaacggctcaccaaggcgacgatgcgtagccgacctgagagggtgatcggccacactgggactgagacacggcccagactcctacgggaggcagcagtagggaatcttccacaatgggcgaaagcctgatggagcaacgccgcgtgagtgaagaaggttttcggatcgtaaaactctgttgtaagggaagaacaagtacagtagtaactggctgtaccttgacggtaccttattagaaagccacggctaactacgtgccagcagccgcggtaatacgtaggtggcaagcgttgtccggaattattgggcgtaaagcgcgcgcaggcggtcctttaagtctgatgtgaaagcccacggctcaaccgtggagggtcattggaaactggaggacttgagtgcagaagaggaaagtggaattccaagtgtagcggtgaaatgcgtagagatttggaggaacaccagtggcgaaggcgactttctggtctgtaactgacgctgaggcgcgaaagcgtggggagcaaacaggattagataccctggtagtccacgccgtaaacgatgagtgctaagtgttagggggtttccgccccttagtgctgcagctaacgcattaagcactccgcctggggagtacggtcgcaagactgaaactcaaaggaattgacgggggcccgcacaagcggtggagcatgtggtttaattcgaagcaacgcgaagaaccttaccaggtcttgacatcccattgaccgctatggagacatagttttcccttcggggacagtggtgacaggtggtgcatggttgtcgtcagctcgtgtcgtgagatgttgggttaagtcccgcaacgagcgcaacccttgttcttagttgccatcatttagttgggcactctaaggagactgccggtgacaaaccggaggaaggtggggatgacgtcaaatcatcatgccccttatgacctgggctacacacgtgctacaatggacggtacaaacggttgccaacccgcgagggggagctaatccgataaaaccgttctcagttcggattgtaggctgcaactcgcctacatgaagccggaatcgctagtaatcgcggatcagcatgccgcggtgaatacgttcccgggccttgtacacaccgcccgtcacaccacgagagtttgtaacacccgaagtcggtgaggtaacctttggagccagccgccgaa

SEQ ID NO: 1895 - DNA, 1478 bp, unidentified
  source 1..1478: mol_type = unassigned DNA; note = Lysinibacillus odysseyi
gacgaacgctggcggcgtgcctaatacatgcaagtcgagcggacgttttgttggtgcttgcaccgacttaacgttagcggcggacgggtgagtaacacgtgggcaacctgccctgtagtctgggataactccgggaaaccggggctaataccggatgatactttttgattcatgtcagaaagttgaaagatggtttacgctatcgctacaggatgggcccgcggcgcattagctagttggtgaggtaacggctcaccaaggcaacgatgcgtagccgacctgagagggtgatcggccacactgggactgagacacggcccagactcctacgggaggcagcagtagggaatcttccacaatggacgaaagtctgatggagcaacgccgcgtgagtgaagaaggatttcggttcgtaaaactctgttgtaagggaagaacaagtacagtagtaactggctgtaccttgacggtaccttattagaaagccacggctaactacgtgccagcagccgcggtaatacgtaggtggcaagcgttgtccggaattattgggcgtaaagcgcgcgcaggcggtcctttaagtctgatgtgaaagcccacggctcaaccgtggagggtcattggaaactgggggacttgagtgcagaagaggaaagtggaattccaagtgtagcggtgaaatgcgtagagatttggaggaacaccagtggcgaaggcgactttctggtctgtaactgacgctgaggcgcgaaagcgtggggagcaaacaggattagataccctggtagtccacgccgtaaacgatgagtgctaagtgttagggggtttccgccccttagtgctgcagctaacgcattaagcactccgcctggggagtacggtcgcaagactgaaactcaaaggaattgacgggggcccgcacaagcggtggagcatgtggtttaattcgaagcaacgcgaagaaccttaccaggtcttgacatcccattgaccactgtagagatacagttttcccttcggggacaacggtgacaggtggtgcatggttgtcgtcagctcgcgtcgtgagatgttgggttaagtcccgcaacgagcgcaacccttgttcttagttgccatcatttagttgggcactctaaggagactgccggtgacaaaccggaggaaggtggggatgacgtcaaatcatcatgccccttatgacctgggctacacacgtgctacaatggacggtacaaacggttgccaacccgcgagggggagctaatccgataaaaccgttctcagttcggattgtaggctgcaactcgcctacatgaagccggaatcgctagtaatcgcggatcagcatgccgcggtgaatacgttcccgggccttgtacacaccgcccgtcacaccacgagagtttgtaacacccgaagtcggtggggtaaccttttggagccagccgccgaaggtgggatagatgattggggtg

SEQ ID NO: 1896 - DNA, 1467 bp, unidentified
  source 1..1467: mol_type = unassigned DNA; note = Lysobacter aestuarii
agtgaacgctggcggcaggcctaacacatgcaagtcgaacggcagcacaggagagcttgctctctgggtggcgagtggcggacgggtgaggatagcgtcggaatctgcctttttgtgggggataacgtagggaaacttacgctaataccgcatacgacctacgggtgaaagtgggggaccttcgggcctcacgcagaaagatgagccgacgtcggattagctagttggtggggtaaaggcccaccaaggcgacgatccgtagctggtctgagaggatgatcagccacactgggactgagacacggcccagactcctacgggaggcagcagtggggaatattggacaatgggcgcaagcctgatccagccatgccgcgtgtgtgaagaaggccttcgggttgtaaagcacttttgtacgggaagaaaagcgccggcttaatacgttggcgtcatgacggtaccgtaagaataagcaccggctaacttcgtgccagcagccgcggtaatacgaagggtgcaagcgttactcggaattactgggcgtaaagcgtgcgtaggtggtttgttaagtctgatgtgaaagccctgggctcaacctgggaactgcattggatactggctaactagagtgcggtagagggtagcggaattcccggtgtagcagtgaaatgcgtagatatcgggaggaacatccgtggcgaaggcggctacctggaccagcactgacactgaggcacgaaagcgtggggagcaaacaggattagataccctggtagtccacgccctaaacgatgcgaactggatgttgggtgcacttaggcactcagtatcgaagctaacgcgttaagttcgccgcctgggaagtacggtcgcaagactgaaactcaaaggaattgacgggggcccgcacaagcggtggagtatgtggtttaattcgatgcagcgcgcagaaccttacctggccttgacatccacggaactttccagagatggattggtgccttcgggaaccgtgagacaggtgctgcatggctgtcgtcagctcgtgtcgtgagatgttgggttaagtcccgcaacgagcgcaacccttgtccttagttgccagcacgtaatggtgggaactctaaggagaccgccggcgacaagccggaggaaggtggggatgacgtcaagtcatcatggcccttacggccagggctacacacgtactacaatggtagggacagagggctgcaaaccggcgacggtgagccaatcccagaaaccctatcccagtccggattggagtctgcaactcgactccatgaagtcggaatcgctagtaatcgcagatcagcattgctgcggtgaatacgttcccgggccttgtacacaccgcccgtcacaccatgggagtgggttgctccagaagtagctagtctaaccttcggggggacggttaccacggagtgattcatgactggggtg

SEQ ID NO: 1897 - DNA, 1467 bp, Lysobacter antibioticus
  source 1..1467: mol_type = unassigned DNA
agtgaacgctggcggcaggcctaacacatgcaagtcgaacggcagcacagaggagcttgctccttgggtggcgagtggcggacgggtgaggaatacgtcggaatctgcctatttgtgggggataacgtagggaaacttacgctaataccgcatacgacctacgggtgaaagcggaggaccttcgggcttcgcgcagatagatgagccgacgtcggattagctagttggcggggtaaaggcccaccaaggcgacgatccgtagctggtctgagaggatgatcagccacactggaactgagacacggtccagactcctacgggaggcagcagtggggaatattggacaatgggcgcaagcctgatccagccatgccgcgtgtgtgaagaaggccttcgggttgtaaagcacttttgtccggaaagaaaagcttcgggttaataccccgaggtcatgacggtaccggaagaataagcaccggctaacttcgtgccagcagccgcggtaatacgaagggtgcaagcgttactcggaattactgggcgtaaagcgtgcgtaggtggtttgttaagtctgatgtgaaagccctgggctcaacctgggaatggcattggaaactggcttactagagtgcggtagagggtagtggaattcccggtgtagcagtgaaatgcgtagatatcgggaggaacatctgtggcgaaggcgactacctggaccagcactgacactgaggcacgaaagcgtggggagcaaacaggattagataccctggtagtccacgccctaaacgatgcgaactggatgttgggagcaacttggctctcagtatcgaagctaacgcgttaagttcgccgcctgggaagtacggtcgcaagactgaaactcaaaggaattgacgggggcccgcacaagcggtggagtatgtggtttaattcgatgcaacgcgaagaaccttacctggtcttgacatccacggaactttccagagatggattggtgccttcgggaaccgtgagacaggtgctgcatggctgtcgtcagctcgtgtcgtgagatgttgggttaagtcccgcaacgagcgcaacccttgtccttagttgccagcacgtaatggtgggaactctaaggagaccgccggtgacaaaccggaggaaggtggggatgacgtcaagtcatcatggcccttacgaccagggctacacacgtactacaatggtagggacagagggctgcaaacccgcgagggcaagccaatcccagaaaccctatctcagtccggatcggagtctgcaactcgactccgtgaagtcggaatcgctagtaatcgcagatcagcattgctgcggtgaatacgttcccgggccttgtacacaccgcccgtcacaccatgggagtttgttgcaccagaagcaggtagcttaaccttcgggagggcgcttgccacggtgtggccgatgactggggtg

SEQ ID NO: 1898 - DNA, 1467 bp, unidentified
  source 1..1467: mol_type = unassigned DNA; note = Lysobacter arseniciresistens
agtgaacgctggcggcaggcctaacacatgcaagtcgaacggcagcacgagagagcttgctctcttggtggcgagtggcggacgggtgaggaatgcgtcggaatctgcctctttgtgggggataacgtagggaaacttacgctaataccgcatacgacctacgggtgaaagccggggaccttcgggcctggcgcagagagatgagccgacgccggattagctagttggcggggtaaaggcccaccaaggcgacgatccgtagctggtctgagaggatgatcagccacactggaactgagacacggtccagactcctacgggaggcagcagtggggaatattggacaatgggcgcaagcctgatccagccatgccgcgtgtgtgaagaaggccttcgggttgtaaagcacttttgttggggaagaaaagccacgggttaataccctgtggttctgacggtacccaaagaataagcaccggctaacttcgtgccagcagccgcggtaatacgaagggtgcaagcgttactcggaattactgggcgtaaagcgtgcgtaggtggtttgttaagtctgatgtgaaagccctgggctcaacctgggaatggcattggaaactggctgactggagtgcggtagaggggtgtggaattcccggtgtagcagtgaaatgcgtagatatcgggaggaacatccgtggcgaaggcgacaccctggaccagcactgacactgaggcacgaaagcgtggggagcaaacaggattagataccctggtagtccacgccctaaacgatgcgaactggatgttggggacacttaggtcttcagtatcgaagctaacgcgttaagttcgccgcctgggaagtacggtcgcaagactgaaactcaaaggaattgacgggggcccgcacaagcggtggagtatgtggtttaattcgatgcaacgcgcagaaccttacctggccttgacatccacggaactttccagagatggattggtgccttcgggaaccgtgagacaggtgctgcatggctgtcgtcagctcgtgtcgtgagatgttgggttaagtcccgcaacgagcgcaacccttgtccttagttgccagcacgtaatggtgggaactctaaggagaccgccggtgacaaaccggaggaaggtggggatgacgtcaagtcatcatggcccttacggccagggctacacacgtactacaatggtggggacagagggctgcgaaccggcgacggtgagccaatcccagaaaccccatcccagtccggattggagtctgcaactcgactccatgaagtcggaatcgctagtaatcgcagatcagcattgctgcggtgaatacgttcccgggccttgtacacaccgcccgtcacaccatgggagtgggttgctccagaagtagctagtctaaccgcaagggggacggttaccacggagtgattcatgactggggtg

SEQ ID NO: 1899 - DNA, 1466 bp, Lysobacter capsici
  source 1..1466: mol_type = unassigned DNA
agtgaacgctggcggcaggcctaacacatgcaagtcgaacggcagcacagaggagcttgctccttgggtggcgagtggcggacgggtgaggaatacgtcggaatctgcctatttgtgggggataacgtagggaaacttacgctaataccgcatacgacctacgggtgaaagcggaggaccttcgggcttcgcgcagatagatgagccgacgtcggattagctagttggcggggtaaaggcccaccaaggcgacgatccgtagctggtctgagaggatgatcagccacactggaactgagacacggtccagactcctacgggaggcagcagtggggaatattggacaatgggcgcaagcctgatccagccatgccgcgtgtgtgaagaaggccttcgggttgtaaagcacttttgtccggaaagaaaagccttgggttaataccctgaggtcatgacggtaccggaagaataagcaccggctaacttcgtgccagcagccgcggtaatacgaagggtgcaagcgttactcggaattactgggcgtaaagcgtgcgtaggtggtttgttaagtctgatgtgaaagccctgggctcaacctgggaatggcattggaaactggctgactagagtgcggtagagggtagtggaattcccggtgtagcagtgaaatgcgtagatatcgggaggaacatctgtggcgaaggcgactacctggaccagcactgacactgaggcacgaaagcgtggggagcaaacaggattagataccctggtagtccacgccctaaacgatgcgaactggatgttgggagcaacttggctctcagtatcgaagctaacgcgttaagttcgccgcctgggaagtacggtcgcaagactgaaactcaaaggaattgacgggggcccgcacaagcggtggagtatgtggtttaattcgatgcaacgcgaagaaccttacctggccttgacatccacggaactttctagagatagattggtgccttcgggaaccgtgagacaggtgctgcatggctgtcgtcagctcgtgtcgtgagatgttgggttaagtcccgcaacgagcgcaacccttgtccttagttgccagcacgtaatggtgggaactctaaggagaccgccggtgacaaaccggaggaaggtggggatgacgtcaagtcatcatggcccttacggccagggctacacacgtactacaatggtagggacagagggctgcaaacccgcgagggcaagccaatcccagaaaccctatctcagtccggatcggagtctgcaactcgactccgtgaagtcggaatcgctagtaatcgcagatcagcattgctgcggtgaatacgttcccgggccttgtacacaccgcccgtcacaccatgggagtttgttgcaccagaagcaggtagcttaaccttcgggagggcgcttgccacggtgtggccgatgactggggt

SEQ ID NO: 1900 - DNA, 1467 bp, Lysobacter concretionis
  source 1..1467: mol_type = unassigned DNA
agtgaacgctggcggcaggcctaacacatgcaagtcgaacggcagcacaggagagcttgctctctgggtggcgagtggcggacgggtgaggaatacgtcggaatctgcctttttgtgggggataacgtagggaaacttacgctaataccgcatacgacctacgggtgaaagcggaggaccttcgggcttcgcgcagaaagatgagccgacgtcggattagctagttggaggggtaatggcccaccaaggcgacgatccgtagctggtctgagaggatgatcagccacactgggactgagacacggcccagactcctacgggaggcagcagtggggaatattggacaatgggcggaagcctgatccagccatgccgcgtgtgtgaagaaggccttcgggttgtaaagcacttttgtacgggaagaaaagccattggttaatacccgatggttctgacggtaccgtaagaataagcaccggctaacttcgtgccagcagccgcggtaatacgaagggtgcaagcgttactcggaattactgggcgtaaagcgtgcgtaggtggtttgttaagtctgatgtgaaagccctgggctcaacctgggaatggcattggatactggcagtctagagtgcggtagagggtagcggaattcccggtgtagcagtgaaatgcgtagatatcgggaggaacatccgtggcgaaggcggctacctggaccagcactgacactgaggcacgaaagcgtggggagcaaacaggattagataccctggtagtccacgccctaaacgatgcgaactggatgttggggacacttaggtcttcagtatcgaagctaacgcgttaagttcgccgcctgggaagtacggtcgcaagactgaaactcaaaggaattgacgggggcccgcacaagcggtggagtatgtggtttaattcgatgcaacgcgaagaaccttacctggccttgacatgcacggaactttccagagatggattggtgccttcgggaaccgtgacacaggtgctgcatggctgtcgtcagctcgtgtcgtgagatgttgggttaagtcccgcaacgagcgcaacccttgtccttagttgccagcacgtaatggtgggaactctaaggagaccgccggtgacaaaccggaggaaggtggggatgacgtcaagtcatcatggcccttacggccagggctacacacgtactacaatggtggggacagagggctgcaaacccgcgagggcaagccaatcccagaaaccccatctcagtccggattggagtctgcaactcgactccatgaagtcggaatcgctagtaatcgcagatcagcattgctgcggtgaatacgttcccgggccttgtacacaccgcccgtcacaccatgggagtgggttgctccagaagtagctagtctaaccgcaaggaggacggttaccacggagtgattcatgactggggtg

SEQ ID NO: 1901 - DNA, 1464 bp, Lysobacter daejeonensis
  source 1..1464: mol_type = unassigned DNA
gaacgctggcggcaggcctaacacatgcaagtcgaacggcagcacagaggagcttgctccttgggtggcgagtggcggacgggtgaggaatgcgtcggaatctgcctttttgtgggggataacgtagggaaacttacgctaataccgcatacgacctacgggtgaaagtgggggaccgcaaggcctcacgcagaaagatgagccgacgccggattagctagttggcggggtaaaggcccaccaaggcgacgatccgtagctggtctgagaggatgatcagccacactgggactgagacacggcccagactcctacgggaggcagcagtggggaatattggacaatgggcgcaagcctgatccagccatgccgcgtgtgtgaagaaggccttcgggttgtaaagcacttttgtccggaaagaaaagcttcgggttaataacctggagtcatgacggtaccggaagaataagcaccggctaacttcgtgccagcagccgcggtaatacgaagggtgcaagcgttactcggaattactgggcgtaaagcgtgcgtaggtggtttgttaagtctgatgtgaaagccctgggctcaacctgggaacggcattggatactggcttactagagtgcggtagagggtagcggaattcccggtgtagcagtgaaatgcgtagatatcgggaggaacatccgtggcgaaggcggctacctggaccagcactgacactgaggcacgaaagcgtggggagcaaacaggattagataccctggtagtccacgccctaaacgatgcgaactggatgttgggtgcaacttggcactcagtatcgaagctaacgcgttaagttcgccgcctggggagtacggtcgcaagactgaaactcaaaggaattgacgggggcccgcacaagcggtggagtatgtggtttaattcgatgcaacgcgaagaaccttacctggccttgacatgcacggaactttccagagatggattggtgccttcgggaaccgtgacacaggtgctgcatggctgtcgtcagctcgtgtcgtgagatgttgggttaagtcccgcaacgagcgcaacccttgtccttagttgccagcacgtaatggtgggaactctaaggagaccgccggtgacaaaccggaggaaggtggggatgacgtcaagtcatcatggcccttacggccagggctacacacgtactacaatggtggggacagagggctgcaagccggcgacggtgagccaatcccagaaaccccatctcagtccggattggagtctgcaactcgactccatgaagtcggaatcgctagtaatcgcagatcagcattgctgcggtgaatacgttcccgggccttgtacacaccgcccgtcacaccatgggtagtggttgctccagaagtagctagtctaaccgcaagggggacggttaccacggagtgattcatgactggggtg

SEQ ID NO: 1902 - DNA, 1455 bp, Lysobacter defluvii
  source 1..1455: mol_type = unassigned DNA
cggcaggcctaacacatgcaagtcgaacggcagcacaggggagcttgctccctgggtggcgagtggcggacgggtgaggaatgcgtcggaatctgccttttcgtgggggataacgtagggaaacttacgctaataccgcatacgacctacgggtgaaagccggggaccttcgggcctggcgcggaaagatgagccgacgtcggattagctagttggaggggtaacggcccaccaaggcgacgatccgtagctggtctgagaggatgatcagccacactgggactgagacacggcccagactcctacgggaggcagcagtggggaatattggacaatgggcgaaagcctgatccagccatgccgcgtgtgtgaagaaggccttcgggttgtaaagcacttttgtacgggaagaaaagccctgggttaataccctggggtcatgacggtaccgtaagaataagcaccggctaacttcgtgccagcagccgcggtaatacgaagggtgcaagcgttactcggaattactgggcgtaaagcgtgcgtaggtggtctgtcaagtccgatgtgaaagccctgggctcaacctgggaactgcattggaaactggcagtctggagtgcggtagagggtagcggaattcccggtgtagcagtgaaatgcgtagatatcgggaggaacatccgtggcgaaggcggctacctggaccagcactgacactgaggcacgaaagcgtggggagcaaacaggattagataccctggtagtccacgccctaaacgatgcgaactggatgttgggggcactttggccttcagtatcgaagctaacgcgttaagttcgccgcctggggagtacggtcgcaagactgaaactcaaaggaattgacgggggcccgcacaagcggtggagtatgtggtttaattcgatgcaacgcgcagaaccttacctggccttgacatccacggaaccctccagagacggaggggtgccttcgggaaccgtgagacaggtgctgcatggctgtcgtcagctcgtgtcgtgagatgttgggttaagtcccgcaacgagcgcaacccttgtccctagttgccagcacgtaatggtgggaactctagggagaccgccggtgacaaaccggaggaaggtggggatgacgtcaagtcatcatggcccttacggccagggctacacacgtactacaatggtggggacagagggcagccagccggcgacggtgagccaatcccagaaaccccatcccagtccggattggagtctgcaactcgactccatgaagtcggaatcgctagtaatcgcagatcagcattgctgcggtgaatacgttcccgggccttgtacacaccgcccgtcacaccatgggagtgggttgctccagaagtagctagtctaaccctcgggaggacggttaccacggagtgattcatgactggggtg

SEQ ID NO: 1903 - DNA, 1467 bp, Lysobacter dokdonensis
  source 1..1467: mol_type = unassigned DNA
agtgaacgctggcggcaggcctaacacatgcaagtcgaacggcagcgcagcagtagcaatactgtgggcggcgagtggcggacgggtgaggaatacatgggaatctgccctgtcgtgggggataacgtagggaaacttacgctaataccgcatacgaccggaaggtgaaagcggcggaccgcaaggcgtcgcgcgactggatgagcccatgtcggattagctagttggcggggtaaaggcccaccaaggcgacgatccgtagctggtctgagaggatgatcagccacactggaactgagacacggtccagactcctacgggaggcagcagtggggaatattggacaatgggcgcaagcctgatccagccatgccgcgtgagtgaagaaggccttcgggttgtaaagctcttttgtccggaaagaaaagccttcggttaatacccgggggtgatgacggtaccggaagaataagcaccggctaacttcgtgccagcagccgcggtaatacgaagggtgcaagcgttactcggaattactgggcgtaaagcgtgcgtaggtggttcgttaagtctgatgtgaaagccctgggctcaacctgggaatggcattggaaactggcgacctagagtgcggtagagggtagtggaattcccggtgtagcagtgaaatgcgtagagatcgggaggaacatccgtggcgaaggcgactacctggaccagcactgacactgaggcacgaaagcgtggggagcaaacaggattagataccctggtagtccacgccctaaacgatgcgaactggatgttgggtgcaactaggcactcagtatcgaagctaacgcgttaagttcgccgcctggggagtacggtcgcaagactgaaactcaaaggaattgacgggggcccgcacaagcggtggagtatgtggtttaattcgatgcaacgcgaagaaccttacctggccttgacatccacggaactttccagagatggattggtgccttcgggaaccgtgagacaggtgctgcatggctgtcgtcagctcgtgtcgtgagatgttgggttaagtcccgcaacgagcgcaacccttgtccctagttgccagcacgtaatggtgggaactctagggagaccgccggtgacaaaccggaggaaggtggggatgacgtcaagtcatcatggcccttacggccagggctacacacgtactacaatggtggggacagagggctgcaatcccgcgagggtgagccaatcccagaaaccccatctcagtccggattggagtctgcaactcgactccatgaagtcggaatcgctagtaatcgcagatcagcattgctgcggtgaatacgttcccgggccttgtacacaccgcccgtcacaccatgggagtttgttgcaccagaagcaggtagcttaaccttcgggagggcgcttgccacggtgtggccgatgactggggtg

SEQ ID NO: 1904 - DNA, 1467 bp, Lysobacter enzymogenes
  source 1..1467: mol_type = unassigned DNA
agtgaacgctggcggcaggcctaacacatgcaagtcgaacggcagcacagaggagcttgctccttgggtggcgagtggcggacgggtgaggaatacgtcggaatctgcctatttgtgggggataacgtagggaaacttacgctaataccgcatacgacctacgggtgaaagtgggggaccgcaaggcctcacgcagatagatgagccgacgtcggattagctagttggcggggtaaaggcccaccaaggcgacgatccgtagctggtctgagaggatgatcagccacactggaactgagacacggtccagactcctacgggaggcagcagtggggaatattggacaatgggcgcaagcctgatccagccatgccgcgtgtgtgaagaaggccttcgggttgtaaagcacttttgtccggaaagaaaagcttagggttaataaccctgagtcatgacggtaccggaagaataagcaccggctaacttcgtgccagcagccgcggtaatacgaagggtgcaagcgttactcggaattactgggcgtaaagcgtgcgtaggtggtttgttaagtctgatgtgaaagccctgggctcaacctgggaatggcattggaaactggcttactagagtgcggtagagggtagcggaattcccggtgtagcagtgaaatgcgtagatatcgggaggaacatccgtggcgaaggcggctacctggaccagcactgacactgaggcacgaaagcgtggggagcaaacaggattagataccctggtagtccacgccctaaacgatgcgaactggatgttgggggcaacttggccctcagtatcgaagctaacgcgttaagttcgccgcctgggaagtacggtcgcaagactgaaactcaaaggaattgacgggggcccgcacaagcggtggagtatgtggtttaattcgatgcaacgcgcagaaccttacctggccttgacatgtcgagaactttccagagatggattggtgccttcgggaactcgaacacaggtgctgcatggctgtcgtcagctcgtgtcgtgagatgttgggttaagtcccgcaacgagcgcaacccttgtccttagttgccagcacgtaatggtgggaactctaaggagaccgccggtgacaaaccggaggaaggtggggatgacgtcaagtcatcatggcccttacggccagggctacacacgtactacaatggtagggacagagggctgcaaacccgcgagggcaagccaatcccagaaaccctatctcagtccggattggagtctgcaactcgactccatgaagtcggaatcgctagtaatcgcagatcagcattgctgcggtgaatacgttcccgggccttgtacacaccgcccgtcacaccatgggagtttgttgcaccagaagcaggtagcttaaccttcgggagggcgcttgccacggtgtggccgatgactggggtg

SEQ ID NO: 1905 - DNA, 1467 bp, Lysobacter gummosus
  source 1..1467: mol_type = unassigned DNA
agtgaacgctggcggcaggcctaacacatgcaagtcgaacggcagcacagaggagcttgctccttgggtggcgagtggcggacgggtgaggaatacgtcggaatctgcctatttgtgggggataacgtagggaaacttacgctaataccgcatacgacctacgggtgaaagcggaggaccttcgggcttcgcgcagatagatgagccgacgtcggattagctagttggcggggtaaaggcccaccaaggcgacgatccgtagctggtctgagaggatgatcagccacactggaactgagacacggtccagactcctacgggaggcagcagtggggaatattggacaatgggcgcaagcctgatccagccatgccgcgtgtgtgaagaaggccttcgggttgtaaagcacttttgtccggaaagaaaagcattgggttaataccccgatgtcatgacggtaccggaagaataagcaccggctaacttcgtgccagcagccgcggtaatacgaagggtgcaagcgttactcggaattactgggcgtaaagcgtgcgtaggtggtttgttaagtctgatgtgaaagccctgggctcaacctgggaatggcattggaaactggcttactagagtgcggtagagggtagtggaattcccggtgtagcagtgaaatgcgtagatatcgggaggaacatctgtggcgaaggcgactacctggaccagcactgacactgaggcacgaaagcgtggggagcaaacaggattagataccctggtagtccacgccctaaacgatgcgaactggatgttgggagcaacttggctctcagtatcgaagctaacgcgttaagttcgccgcctgggaagtacggtcgcaagactgaaactcaaaggaattgacgggggcccgcacaagcggtggagtatgtggtttaattcgatgcaacgcgaagaaccttacctggccttgacatccacggaactttccagagatggattggtgccttcgggaaccgtgagacaggtgctgcatggctgtcgtcagctcgtgtcgtgagatgttgggttaagtcccgcaacgagcgcaacccttgtccttagttgccagcacgtaatggtgggaactctaaggagaccgccggtgacaaaccggaggaaggtggggatgacgtcaagtcatcatggcccttacggccagggctacacacgtactacaatggtagggacagagggctgcaaacccgcgagggcaagccaatcccagaaaccctatctcagtccggatcggagtctgcaactcgactccgtgaagtcggaatcgctagtaatcgcagatcagcattgctgcggtgaatacgttcccgggccttgtacacaccgcccgtcacaccatgggagtttgttgcaccagaagcaggtagcttaaccttcgggagggcgcttgccacggtgtggccgatgactggggtg

SEQ ID NO: 1906 - DNA, 1467 bp, unidentified
  source 1..1467: mol_type = unassigned DNA; note = Lysobacter lycopersici
agtgaacgctggcggcaggcctaacacatgcaagtcgaacggcagcacaggggagcttgctccctgggtggcgagtggcggacgggtgaggaatacatcggaatctgccctgtcgtgggggataacgtagggaaacttacgctaataccgcatacgaccttcgggtgaaagagggggatcgcaagacctctcgcgattggatgagccgatgtcggattagctagttggcggggtaaaggcccaccaaggcgacgatccgtagctggtctgagaggatgatcagccacactggaactgagacacggtccagactcctacgggaggcagcagtggggaatattggacaatgggcgcaagcctgatccagccatgccgcgtgagtgaagaaggccttcgggttgtaaagctcttttgtccggaaagaaaagcattcggttaataaccgggtgtcatgacggtaccggaagaataagcaccggctaacttcgtgccagcagccgcggtaatacgaagggtgcaagcgttactcggaattactgggcgtaaagcgtgcgtaggtggttcgttaagtctgatgtgaaagccctgggctcaacctgggaatggcattggatactggcgaactggagtgcggtagaggatggcggaattcccggtgtagcagtgaaatgcgtagagatcgggaggaacatctgtggcgaaggcggccatctggaccagcactgacactgaggcacgaaagcgtggggagcaaacaggattagataccctggtagtccacgccctaaacgatgcgaactggatgttgggagcaactaggctctcagtatcgaagctaacgcgttaagttcgccgcctggggagtacggtcgcaagactgaaactcaaaggaattgacgggggcccgcacaagcggtggagtatgtggtttaattcgatgcaacgcgaagaaccttacctggtcttgacatccacggaactttccagagatggattggtgccttcgggaaccgtgagacaggtgctgcatggctgtcgtcagctcgtgtcgtgagatgttgggttaagtcccgcaacgagcgcaacccttgtccttagttgccagcacgtaatggtgggaactctaaggagaccgccggtgacaaaccggaggaaggtggggatgacgtcaagtcatcatggcccttacgaccagggctacacacgtactacaatggaagggacagagggccgcgatgccgcgaggcggagccaatcccagaaaccctttctcagtccggattggagtctgcaactcgactccatgaagtcggaatcgctagtaatcgcagatcagcattgctgcggtgaatacgttcccgggccttgtacacaccgcccgtcacaccatgggagtttgttgcaccagaagcaggtagcttaaccgcaaggagggcgcttgccacggtgtggccgatgactggggtg

SEQ ID NO: 1907 - DNA, 1400 bp, unidentified
  source 1..1400: mol_type = unassigned DNA; note = Lysobacter maris
tgcaagtcgaacggcagcacgagagagcttgctctcttggtggcgagtggcggacgggtgaggaatgcgtcggaatctgcctatttgtgggggataacgtagggaaacttacgctaataccgcatacgacctacgggtgaaagtgggggatcttcggacctcacgcagatagatgagccgacgtcggattagctagttggcggggtaaaggcccaccaaggcgacgatccgtagctggtctgagaggatgatcagccacactgggactgagacacggcccagactcctacgggaggcagcagtggggaatattggacaatgggcgcaagcctgatccagccatgccgcgtgtgtgaagaaggccttcgggttgtaaagcacttttgtacgggaagaaacgcgatcggttaatacccggtcgaactgacggtaccgtaagaataagcaccggctaacttcgtgccagcagccgcggtaatacgaagggtgcaagcgttactcggaattactgggcgtaaagcgtgcgtaggtggtttgttaagtcagatgtgaaagccctgggctcaacctgggaactgcatttgatactggcaggctagagtgcggtagagggtagcggaattcccggtgtagcagtgaaatgcgtagatatcgggaggaacatccgtggcgaaggcggctacctggaccagcactgacactgaggcacgaaagcgtggggagcaaacaggattagataccctggtagtccacgccctaaacgatgcgaactggatgttggggacacttaggtcttcagtatcgaagctaacgcgttaagttcgccgcctgggaagtacggtcgcaagactgaaactcaaaggaattgacgggggcccgcacaagcggtggagtatgtggtttaattcgatgcaacgcgcagaaccttacctggccttgacatccacggaactttccagagatggattggtgccttcgggaaccgtgagacaggtgctgcatggctgtcgtcagctcgtgtcgtgagatgttgggttaagtcccgcaacgagcgcaacccttgtccttagttgccagcacgtaatggtgggaactctaaggagaccgccggcgacaagccggaggaaggtggggatgacgtcaagtcatcatggcccttacggccagggctacacacgtactacaatggtggggacagagggctgcaagccggcgacggtgagccaatcccagaaaccccatctcagtccggattggagtctgcaactcgactccatgaagtcggaatcgctagtaatcgcagatcagcattgctgcggtgaatacgttcccgggccttgtacacaccgcccgtcacaccatgggagtgggttgctccagaagtagctagtctaaccttc

SEQ ID NO: 1908 - DNA, 1467 bp, Lysobacter ruishenii
  source 1..1467: mol_type = unassigned DNA
agtgaacgctggcggcaggcctaacacatgcaagtcgaacggcagcacagtagagcttgctctatgggtggcgagtggcggacgggtgaggatagcgtcggaatctgcctatttgtgggggataacctcgggaaaccgggactaataccgcatacgacctacgggtgaaagtgggggaccttcgggcctcacgcagatagatgagccgacgtcggattagctagttggcggggtaaaggcccaccaaggcgacgatccgtagctggtctgagaggatgatcagccacactgggactgagacacggcccagactcctacgggaggcagcagtggggaatattggacaatgggcgcaagcctgatccagccatgccgcgtgtgtgaagaaggccttcgggttgtaaagcacttttgtccggaaagaaatccagtcgattaatactcggttgggatgacggtaccggaagaataagcaccggctaacttcgtgccagcagccgcggtaatacgaagggtgcaagcgttactcggaattactgggcgtaaagcgtgcgtaggtggtttgttaagtctgatgtgaaagccctgggctcaacctgggaactgcattggatactggcttactagagtgcggtagagggtagtggaattcccggtgtagcagtgaaatgcgtagatatcgggaggaacatctgtggcgaaggcgactacctggaccagcactgacactgaggcacgaaagcgtggggagcaaacaggattagataccctggtagtccacgccctaaacgatgcgaactggatgttgggtgcaacttggcactcagtatcgaagctaacgcgttaagttcgccgcctggggagtacggtcgcaagactgaaactcaaaggaattgacgggggcccgcacaagcggtggagtatgtggtttaattcgatgcaacgcgaagaaccttacctggccttgacatgcacggaactttccagagatggattggtgccttcgggaaccgtgacacaggtgctgcatggctgtcgtcagctcgtgtcgtgagatgttgggttaagtcccgcaacgagcgcaacccttgtccttagttgccagcacgtaatggtgggaactctaaggagaccgccggtgacaaaccggaggaaggtggggatgacgtcaagtcatcatggcccttacggccagggctacacacgtactacaatggtggggacagagggctgcaagccggcgacggtgagccaatcccagaaaccccatctcagtccggattggagtctgcaactcgactccatgaagtcggaatcgctagtaatcgcagatcagcattgctgcggtgaatacgttcccgggccttgtacacaccgcccgtcacaccatgggagtgggttgctccagaagtagctagtctaaccgcaagggggacggttaccacggagtgattcatgactggggtg

SEQ ID NO: 1909 - DNA, 1467 bp, Lysobacter spongiicola
  source 1..1467: mol_type = unassigned DNA
agtgaacgctggcggcaggcctaacacatgcaagtcgaacggcagcacaggggagcttgctccctgggtggcgagtggcggacgggtgaggaatacgtcggaatctgccttttcgtgggggataacgtagggaaacttacgctaataccgcatacgacctacgggtgaaagccggggaccttcgggcctggcgcggaaagatgagccgacgtcggattagctagttggaggggtaatggcccaccaaggcgacgatccgtagctggtctgagaggatgatcagccacactggaactgagacacggtccagactcctacgggaggcagcagtggggaatattggacaatgggcgcaagcctgatccagccatgccgcgtgtgtgaagaaggccttcgggttgtaaagcacttttgtacgggaagaaaagcttccggttaatacccgggagtcatgacggtaccgtaagaataagcaccggctaacttcgtgccagcagccgcggtaatacgaagggtgcaagcgttactcggaattactgggcgtaaagcgtgcgtaggtggtttgttaagtctgatgtgaaagccctgggctcaacctgggaattgcattggatactggcagtctagagtgcggtagagggtagcggaattcccggtgtagcagtgaaatgcgtagatatcgggaggaacatccgtggcgaaggcggctacctggaccagcactgacactgaggcacgaaagcgtggggagcaaacaggattagataccctggtagtccacgccctaaacgatgcgaactggatgttggggacacttaggtcctcagtatcgaagctaacgcgttaagttcgccgcctgggaagtacggtcgcaagactgaaactcaaaggaattgacgggggcccgcacaagcggtggagtatgtggtttaattcgatgcaacgcgaagaaccttacctggccttgacatgtccggaacccttgagagatcgaggggtgccttcgggaaccggaacacaggtgctgcatggctgtcgtcagctcgtgtcgtgagatgttgggttaagtcccgcaacgagcgcaacccttgtccttagttgccagcacgtaatggtgggaactctaaggagaccgccggtgacaaaccggaggaaggtggggatgacgtcaagtcatcatggcccttacggccagggctacacacgtactacaatggtggggacagagggctgcaaacccgcgagggcaagccaatcccagaaaccccatctcagtccggattggagtctgcaactcgactccatgaagtcggaatcgctagtaatcgcagatcagcattgctgcggtgaatacgttcccgggccttgtacacaccgcccgtcacaccatgggagtgggttgctccagaagtagctagtctaaccttcggggggacggttaccacggagtgattcatgactggggtg

SEQ ID NO: 1910 - DNA, 1419 bp, unidentified
  source 1..1419: mol_type = unassigned DNA; note = Lysobacter tolerans
ccggcagcacaggagagcttgctctcttgggtggcgagtggcggacgggtgaggaaaacgtcggaatctgcctatttgtgggggataacgtagggaaacttacgctaataccgcatacgacctacgggtgaaagcggaggaccttcgggcttcgcgcagatagatgagccgacgtcggattagctagttggcggggtaaaggcccaccaaggcgacgatccgtagctggtctgagaggatgatcagccacactggaactgagacacggtccagactcctacgggaggcagcagtggggaatattggacaatgggcgcaagcctgatccagccatgccgcgtgggtgaagaaggccttcgggttgtaaagcccttttgttgggaaagaaaagcagccggttaatacccggttgtcatgacggtacccaaagaataagcaccggctaacttcgtgccagcagccgcggtaatacgaagggtgcaagcgttactcggaattactgggcgtaaagcgtgcgtaggtggtttgttaagtcagatgtgaaagccctgggctcaacctgggaactgcatttgatactggcaggctagagtgcggtagaggatagcggaattcctggtgtagcagtgaaatgcgtagagatcaggaggaacatccgtggcgaaggcggctatctgggccagcactgacactgaggcacgaaagcgtggggagcaaacaggattagataccctggtagtccacgccctaaacgatgcgaactggatgttgggctcaacttggagctcagtatcgaagctaacgcgttaagttcgccgcctggggagtacggtcgcaagactgaaactcaaaggaattgacgggggcccgcacaagcggtggagtatgtggtttaattcgatgcaacgcgcagaaccttacctggccttgacatgcacggaactttccagagatggattggtgccttcgggaaccgtgacacaggtgctgcatggctgtcgtcagctcgtgtcgtgagatgttgggttaagtcccgcaacgagcgcaacccctgtccttagttgccagcacgtaatggtgggaactctaaggagaccgccggtgacaaaccggaggaaggtggggatgacgtcaagtcatcatggcccttacggccagggctacacacgtactacaatggtagggacagagggctgcaaacccgcgagggcaagccaatcccagaaaccctatctcagtccggattggagtctgcaactcgactccatgaagtcggaatcgctagtaatcgcagatcagcattgctgcggtgaatacgttcccgggccttgtacacaccgcccgtcacaccatgggagtttgttgcaccagaagcaggtagcttaaccttcgggagggcgcttgccacggtgtggccga

SEQ ID NO: 1911 - DNA, 1554 bp, unidentified
  source 1..1554: mol_type = unassigned DNA; note = Macrococcus bohemicus
attatggagagtttgatcctggctcaggatgaacgctggcggcgtgcctaatacatgcaagtcgagcgaattgacagaggtgcttgcacctctcgattttagcggcggacgggtgagtaacacgtgggtaacctacctataagactgggataacttcgggaaaccggagctaataccggataatatttagcttcgcatgaagcaatagtgaaagacggttctgctgtcacttatagatggacctgcggtgtattagctagttggtgaggtaacggctcaccaaggcaacgatacatagccgacctgagagggtgatcggccacactgggactgagacacggcccagactcctacgggaggcagcagtagggaatcttccgcaatggacgaaagtctgacggagcaacgccgcgtgagtgaagaaggttttcggatcgtaaaactctgttgtaagggaagaacaagtacgttagtaactgaacgtaccttgacggtaccttaccagaaagccacggctaactacgtgccagcagccgcggtaatacgtaggtggcaagcgttatccggaattattgggcgtaaagcgcgcgtaggcggtctcttaagtctgatgtgaaagcccccggctcaaccggggagggtcattggaaactgggagacttgagtacagaagaggagagtggaattccatgtgtagcggtgaaatgcgcagagatatggaggaacaccagtggcgaaggcggctctctggtctgtaactgacgctgaggtgcgaaagcgtggggatcaaacaggattagataccctggtagtccacgccgtaaacgatgagtgctaagtgttggggggtttccgcccctcagtgctgcagctaacgcattaagcactccgcctggggagtacggtcgcaagactgaaactcaaaggaattgacggggacccgcacaagcggtggagcatgtggtttaattcgaagcaacgcgaagaaccttaccaaatcttgacatcctttgacaactctagagatagagctttccccttcgggggacaaagtgacaggtggtgcatggttgtcgtcagctcgtgtcgtgagatgttgggttaagtcccgcaacgagcgcaacccttatctttagttgccatcattcagttgggcactctagagagactgccggtgacaaaccggaggaaggtggggatgacgtcaaatcatcatgccccttatgatttgggctacacacgtgctacaatggatggtacaaagggcagcaaaaccgcgaggtcaagcaaatcccataaaaccattctcagttcggattgtagtctgcaactcgactacatgaagctggaatcgctagtaatcgtagatcagcatgctacggtgaatacgttcccgggtcttgtacacaccgcccgtcacaccacgagagtttgtaacacccgaagccggtggagtaaccttttaggagctagccgtcgaaggtgggacagatgattggggtgaagtcgtaacaaggtagccgtatcggaaggtgcggctggatcacctccttt

SEQ ID NO: 1912 - DNA, 1475 bp, Macrococcus bovicus
  source 1..1475: mol_type = unassigned DNA
gatgaacgctggcggcgtgcctaatacatgcaagtcgagcggacagacgaggtgcttgcacctctgaagtcagcggcggacgggtgagtaacacgtgggtaacctacctgtaagactgggataacttcgggaaaccggagctaataccggataatattttccacctcatggtggaatagtgaaagacggttttgctgtcacttacagatggacccgcggcgcattagctagttggtgaggtaacggctcaccaaggcgacgatgcgtagccgacctgagagggtgatcggccacactgggactgagacacggcccagactcctacgggaggcagcagtagggaatcttccgcaatggacgaaagtctgacggagcaacgccgcgtgagtgaagaaggtcttcggatcgtaaaactctgttgtaagggaagaacaagtacgttagtaactgaacgtaccttgacggtaccttaccagaaagccacggctaactacgtgccagcagccgcggtaatacgtaggtggcaagcgttatccggaattattgggcgtaaagcgcgcgtaggcggtttcttaagtctgatgtgaaagcccccggctcaaccggggagggtcattggaaactgggagacttgagtgcagaagaggagagtggaattccatgtgtagcggtgaaatgcgcagagatatggaggaacaccagtggcgaaggcggctctctggtctgtaactgacgctgaggtgcgaaagcgtggggatcaaacaggattagataccctggtagtccacgccgtaaacgatgagtgctaagtgttggggggtttccgcccctcagtgctgcagctaacgcattaagcactccgcctggggagtacggtcgcaagactgaaactcaaaggaattgacggggacccgcacaagcggtggagcatgtggtttaattcgaagcaacgcgaagaaccttaccaaatcttgacatcctctgacaactctggagacagagcgttccccttcgggggacagagtgacaggtggtgcatggttgtcgtcagctcgtgtcgtgagatgttgggttaagtcccgcaacgagcgcaacccttatctttagttgccatcattcagttgggcactctagagagactgccggtgacaaaccggaggaaggtggggatgacgtcaaatcatcatgccccttatgatttgggctacacacgtgctacaatggatggtacaaagggcagcaaaaccgcgaggtcaagcaaatcccataaaaccattctcagttcggattgtagtctgcaactcgactacatgaagctggaatcgctagtaatcgtagatcagcatgctacggtgaatacgttcccgggtcttgtacacaccgcccgtcacaccacgagagtttgtaacacccgaagccggtggagtaacctttacaggagctagccgtcgaaggtgggacagatgattggggtg

SEQ ID NO: 1913 - DNA, 1475 bp, Macrococcus brunensis
  source 1..1475: mol_type = unassigned DNA
gatgaacgctggcggcgtgcctaatacatgcaagtcgagcggacagacgaggtgcttgcacctctgaagtcagcggcggacgggtgagtaacacgtgggtaacctacctgtaagactgggataacttcgggaaaccggagctaataccggataatattttccacctcatggtggaatagtgaaagacggtttcggctgtcacttacagatggacccgcggcgcattagctagttggtgaggtaacggctcaccaaggcgacgatgcgtagccgacctgagagggtgatcggccacactgggactgagacacggcccagactcctacgggaggcagcagtagggaatcttccgcaatggacgaaagtctgacggagcaacgccgcgtgagtgaagaaggttttcggatcgtaaaactctgttgtaagggaagaacaagtacgttagtaactgaacgtaccttgacggtaccttaccagaaagccacggctaactacgtgccagcagccgcggtaatacgtaggtggcaagcgttatccggaattattgggcgtaaagcgcgcgtaggcggtttcttaagtctgatgtgaaagcccccggctcaaccggggagggtcattggaaactgggagacttgagtgcagaagaggagagtggaattccatgtgtagcggtgaaatgcgcagagatatggaggaacaccagtggcgaaggcggctctctggtctgtaactgacgctgaggtgcgaaagcgtggggatcaaacaggattagataccctggtagtccacgccgtaaacgatgagtgctaagtgttggggggtttccgcccctcagtgctgcagctaacgcattaagcactccgcctggggagtacggtcgcaagactgaaactcaaaggaattgacggggacccgcacaagcggtggagcatgtggtttaattcgaagcaacgcgaagaaccttaccaaatcttgacatcctctgacaactctggagacagagcgttccccttcgggggacagagtgacaggtggtgcatggttgtcgtcagctcgtgtcgtgagatgttgggttaagtcccgcaacgagcgcaacccttatctttagttgccatcattcagttgggcactctagagagactgccggtgacaaaccggaggaaggtggggatgacgtcaaatcatcatgccccttatgatttgggctacacacgtgctacaatggatggtacaaagggcagcaaaaccgcgaggtcaagcaaatcccataaaaccattctcagttcggattgtagtctgcaactcgactacatgaagctggaatcgctagtaatcgtagatcagcatgctacggtgaatacgttcccgggtcttgtacacaccgcccgtcacaccacgagagtttgtaacacccgaagccggtggagtaaccttttaggagctagccgtcgaaggtgggacagatgattggggtg

SEQ ID NO: 1914 - DNA, 1476 bp, unidentified
  source 1..1476: mol_type = unassigned DNA; note = Macrococcus canis
gatgaacgctggcggcgtgcctaatacatgcaagtcgagcgaacagacgagagtgcttgcactctctgacgttagcggcggacgggtgagtaacacgtgggtaacctacctataagactgggataacttcgggaaaccggagctaataccggataatatttagcttcgcatgaagcaatagtgaaagacggttctgctgtcacttatagatggacccgcggtgtattagctagttggtgaggtaacggctcaccaaggcaacgatacatagccgacctgagagggtgatcggccacactgggactgagacacggcccagactcctacgggaggcagcagtagggaatcttccgcaatggacgaaagtctgacggagcaacgccgcgtgagtgaagaaggttttcggatcgtaaaactctgttgtaagggaagaacaagtacgttagtaactgaacgtaccttgacggtaccttaccagaaagccacggctaactacgtgccagcagccgcggtaatacgtaggtggcaagcgttatccggaattattgggcgtaaagcgcgcgtaggcggtctcttaagtctgatgtgaaagcccccggctcaaccggggagggtcattggaaactgggagacttgagtgcagaagaggagagtggaattccatgtgtagcggtgaaatgcgcagagatatggaggaacaccagtggcgaaggcggctctctggtctgtaactgacgctgaggtgcgaaagcgtggggatcaaacaggattagataccctggtagtccacgccgtaaacgatgagtgctaagtgttggggggtttccgcccctcagtgctgcagctaacgcattaagcactccgcctggggagtacggtcgcaagactgaaactcaaaggaattgacggggacccgcacaagcggtggagcatgtggtttaattcgaagcaacgcgaagaaccttaccaaatcttgacatcctttgacaactctagagatagagctttccccttcgggggacaaagtgacaggtggtgcatggttgtcgtcagctcgtgtcgtgagatgttgggttaagtcccgcaacgagcgcaacccttatctttagttgccatcattaagttgggcactctagagagactgccggtgataaaccggaggaaggtggggatgacgtcaaatcatcatgccccttatgatttgggctacacacgtgctacaatggatggtacaaagggcagcaaaaccgcgaggtcaagcaaatcccataaaaccattctcagttcggattgtagtctgcaactcgactacatgaagctggaatcgctagtaatcgtagatcagcatgctacggtgaatacgttcccgggtcttgtacacaccgcccgtcacaccacgagagtttgtaacacccgaagccggtggagtaaccttttaggagctagccgtcgaaggtgggacagatgattggggtg

SEQ ID NO: 1915 - DNA, 1476 bp, Macrococcus carouselicus
  source 1..1476: mol_type = unassigned DNA
gatgaacgctggcggcgtgcctaatacatgcaagtcgagcggacagacaggagtgcttgcactccttgaagtcagcggcggacgggtgagtaacacgtgggtaacctacctataagactgggataacttcgggaaaccggagctaataccggataatattttccacctcatggtggaatagtgaaagacggttctgctgtcacttatagatggacccgcggcgcattagctagttggtgaggtaacggctcaccaaggcgacgatgcgtagccgacctgagagggtgatcggccacactgggactgagacacggcccagactcctacgggaggcagcagtagggaatcttccgcaatggacgaaagtctgacggagcaacgccgcgtgagtgaagaaggttttcggatcgtaaaactctgttgtaagggaagaacaagtacgttagtaactgaacgtaccttgacggtaccttaccagaaagccacggctaactacgtgccagcagccgcggtaatacgtaggtggcaagcgttatccggaattattgggcgtaaagcgcgcgtaggcggtttcttaagtctgatgtgaaagcccccggctcaaccggggagggtcattggaaactgggagacttgagtgcagaagaggagagtggaattccatgtgtagcggtgaaatgcgcagagatatggaggaacaccagtggcgaaggcggctctctggtctgtaactgacgctgaggtgcgaaagcgtggggatcaaacaggattagataccctggtagtccacgccgtaaacgatgagtgctaagtgttggggggtttccgcccctcagtgctgcagctaacgcattaagcactccgcctggggagtacggtcgcaagactgaaactcaaaggaattgacggggacccgcacaagcggtggagcatgtggtttaattcgaagcaacgcgaagaaccttaccaaatcttgacatcctctgacaactctggagacagagcgttccccttcgggggacagagtgacaggtggtgcatggttgtcgtcagctcgtgtcgtgagatgttgggttaagtcccgcaacgagcgcaacccttatctttagttgccatcattcagttgggcactctagagagactgccggtgacaaaccggaggaaggtggggatgacgtcaaatcatcatgccccttatgatttgggctacacacgtgctacaatggatggtacaaagggcagcaaaaccgcgaggtcaagcaaatcccataaaaccattctcagttcggattgtagtctgcaactcgactacatgaagctggaatcgctagtaatcgtagatcagcatgctacggtgaatacgttcccgggtcttgtacacaccgcccgtcacaccacgagagtttgtaacacccgaagccggtggagtaaccttttaggagctagccgtcgaaggtgggacagatgattggggtg

SEQ ID NO: 1916 - DNA, 1476 bp, Macrococcus caseolyticus
  source 1..1476: mol_type = unassigned DNA
gatgaacgctggcggcgtgcctaatacatgcaagtcgagcgaacggacgagagtgcttgcactctctgatgttagcggcggacgggtgagtaacacgtgggtaacctacctataagactgggataacttcgggaaaccggagctaataccggataatatttagcttcgcatgaagcaatagtgaaagacggttctgctgtcacttatagatggacccgcggtgtattagctagttggtgaggtaacggctcaccaaggcaacgatacatagccgacctgagagggtgatcggccacactgggactgagacacggcccagactcctacgggaggcagcagtagggaatcttccgcaatggacgaaagtctgacggagcaacgccgcgtgagtgaagaaggttttcggatcgtaaaactctgttgtaagggaagaacaagtacgttagtaactgaacgtaccttgacggtaccttaccagaaagccacggctaactacgtgccagcagccgcggtaatacgtaggtggcaagcgttatccggaattattgggcgtaaagcgcgcgtaggcggtctcttaagtctgatgtgaaagcccccggctcaaccggggagggtcattggaaactgggagacttgagtgcagaagaggagagtggaattccatgtgtagcggtgaaatgcgcagagatatggaggaacaccagtggcgaaggcggctctctggtctgtaactgacgctgaggtgcgaaagcgtggggatcaaacaggattagataccctggtagtccacgccgtaaacgatgagtgctaagtgttggggggtttccgcccctcagtgctgcagctaacgcattaagcactccgcctggggagtacggtcgcaagactgaaactcaaaggaattgacggggacccgcacaagcggtggagcatgtggtttaattcgaagcaacgcgaagaaccttaccaaatcttgacatcctttgacaactctagagatagagctttccccttcgggggacaaagtgacaggtggtgcatggttgtcgtcagctcgtgtcgtgagatgttgggttaagtcccgcaacgagcgcaacccttatctttagttgccatcattaggttgggcactctagagagactgccggtgacaaaccggaggaaggtggggatgacgtcaaatcatcatgccccttatgatttgggctacacacgtgctacaatggatggtacaaagggcagcaaaaccgcgaggtcaagcaaatcccataaaaccattctcagttcggattgtagtctgcaactcgactacatgaagctggaatcgctagtaatcgtagatcagcatgctacggtgaatacgttcccgggtcttgtacacaccgcccgtcacaccacgagagtttgtaacacccgaagccggtggagtaaccttttaggagctagccgtcgaaggtgggacagatgattggggtg

SEQ ID NO: 1917 - DNA, 1554 bp, unidentified
  source 1..1554: mol_type = unassigned DNA; note = Macrococcus epidermidis
attatggagagtttgatcctggctcaggatgaacgctggcggcgtgcctaatacatgcaagtcgagcgaattgacagaggtgcttgcacctctcgattttagcggcggacgggtgagtaacacgtgggtaacctacctataagactgggataacttcgggaaaccggagctaataccggataatatttagcttcgcatgaagcaatagtgaaagacggttctgctgtcacttatagatggacctgcggtgtattagctagttggtgaggtaacggctcaccaaggcaacgatacatagccgacctgagagggtgatcggccacactgggactgagacacggcccagactcctacgggaggcagcagtagggaatcttccgcaatggacgaaagtctgacggagcaacgccgcgtgagtgaagaaggttttcggatcgtaaaactctgttgtaagggaagaacaagtacgttagtaactgaacgtaccttgacggtaccttaccagaaagccacggctaactacgtgccagcagccgcggtaatacgtaggtggcaagcgttatccggaattattgggcgtaaagcgcgcgtaggcggtctcttaagtctgatgtgaaagcccccggctcaaccggggagggtcattggaaactgggagacttgagtacagaagaggagagtggaattccatgtgtagcggtgaaatgcgcagagatatggaggaacaccagtggcgaaggcggctctctggtctgtaactgacgctgaggtgcgaaagcgtggggatcaaacaggattagataccctggtagtccacgccgtaaacgatgagtgctaagtgttggggggtttccgcccctcagtgctgcagctaacgcattaagcactccgcctggggagtacggtcgcaagactgaaactcaaaggaattgacggggacccgcacaagcggtggagcatgtggtttaattcgaagcaacgcgaagaaccttaccaaatcttgacatcctttgacaactctagagatagagctttccccttcgggggacaaagtgacaggtggtgcatggttgtcgtcagctcgtgtcgtgagatgttgggttaagtcccgcaacgagcgcaacccttatctttagttgccatcattaagttgggcactctagagagactgccggtgacaaaccggaggaaggtggggatgacgtcaaatcatcatgccccttatgatttgggctacacacgtgctacaatggatggtacaaagggcagcaaaaccgcgaggtcaagcaaatcccataaaaccattctcagttcggattgtagtctgcaactcgactacatgaagctggaatcgctagtaatcgtagatcagcatgctacggtgaatacgttcccgggtcttgtacacaccgcccgtcacaccacgagagtttgtaacacccgaagccggtggagtaaccttttaggagctagccgtcgaaggtgggacagatgattggggtgaagtcgtaacaaggtagccgtatcggaaggtgcggctggatcacctccttt

SEQ ID NO: 1918 - DNA, 1554 bp, unidentified; identical to SEQ ID NO: 1917
  source 1..1554: mol_type = unassigned DNA; note = Macrococcus goetzii

SEQ ID NO: 1919 - DNA, 1476 bp, Macrococcus hajekii
  source 1..1476: mol_type = unassigned DNA
gatgaacgctggcggcgtgcctaatacatgcaagtcgagcgaacggacaggagtgcttgcactccctgatgttagcggcggacgggtgagtaacacgtgggtaacctacctataagactgggataacttcgggaaaccggagctaataccggataatatgtttcacctcatggtgaaacagtgaaagacggttctgctgtcacttatagatggacccgcggcgcattagctagttggtgaggtaacggctcaccaaggcgacgatgcgtagccgacctgagagggtgatcggccacactgggactgagacacggcccagactcctacgggaggcagcagtagggaatcttccgcaatggacgaaagtctgacggagcaacgccgcgtgagtgaagaaggttttcggatcgtaaaactctgttgtaagggaagaacaagtacgttagtaactgaacgtaccttgacggtaccttaccagaaagccacggctaactacgtgccagcagccgcggtaatacgtaggtggcaagcgttatccggaattattgggcgtaaagcgcgcgtaggcggtttcttaagtctgatgtgaaagcccccggctcaaccggggagggtcattggaaactgggagacttgagtgcagaagaggagagtggaattccatgtgtagcggtgaaatgcgcagagatatggaggaacaccagtggcgaaggcggctctctggtctgtaactgacgctgaggtgcgaaagcgtggggatcaaacaggattagataccctggtagtccacgccgtaaacgatgagtgctaagtgttggggggtttccgcccctcagtgctgcagctaacgcattaagcactccgcctggggagtacggtcgcaagactgaaactcaaaggaattgacggggacccgcacaagcggtggagcatgtggtttaattcgaagcaacgggaagaaccttaccaaatcttgacatcctctgacaactctggagacagagcgttccccttcgggggacagagtgacaggtggtgcatggttgtcgtcagctcgtgtcgtgagatgttgggttaagtcccgcaacgagcgcaacccttatctttagttgccatcattcagttgggcactctagagagactgccggtgacaaaccggaggaaggtggggatgacgtcaaatcatcatgccccttatgatttgggctacacacgtgctacaatggatggtacaaagggcagcaaaaccgcgaggtcaagcaaatcccataaaaccattctcagttcggattgtagtctgcaactcgactacatgaagctggaatcgctagtaatcgtagatcagcatgctacggtgaatacgttcccgggtcttgtacacaccgcccgtcacaccacgagagtttgtaacacccgaagccggtggagtaaccttttaggagctagccgtcgaaggtgggacagatgattggggtg

SEQ ID NO: 1920 - DNA, 1478 bp, Macrococcus lamae
  source 1..1478: mol_type = unassigned DNA
gatgaacgctggcggcgtgcctaatacatgcaagtcgagcggacagacgggagtgcttgcactccttgatgtcagcggcggacgggtgagtaacacgtgggtaacctacctgtaagactgggataacttcgggaaaccggagctaataccggatgatatgttccacctcatggtgggacagtgaaagacggtttcggctgtcacttacagatggacccgcggcgcattagctagttggtgaggtaacggctcaccaaggcgacgatgcgtagccgacctgagagggtgatcggccacactgggactgagacacggcccagactcctacgggaggcagcagtagggaatcttccgcaatggacgaaagtctgacggagcaacgccgcgtgagtgaagaaggttttcggatcgtaaaactctgttgtaagggaagaacaagtacgtgagtaactgcacgtaccttgacggtaccttaccagaaagccacggctaactacgtgccagcagccgcggtaatacgtaggtggcaagcgttatccggaattattgggcgtaaagcgcgcgtaggcggtctcttaagtctgatgtgaaagcccccggctcaaccggggagggtcattggaaactgggagacttgagtgcagaagaggagagtggaattccatgtgtagcggtgaaatgcgcagagatatggaggaacaccagtggcgaaggcggctctctggtctgtaactgacgctgaggtgcgaaagcgtggggatcaaacaggattagataccctggtagtccacgccgtaaacgatgagtgctaagtgttggggggtttccgcccctcagtgctgcagctaacgcattaagcactccgcctggggagtacggtcgcaagactgaaactcaaaggaattgacggggacccgcacaagcggtggagcatgtggtttaattcgaagcaacgcgaagaaccttaccaaatcttgacatcctctgacaactctggagacagagcgttccccttcgggggacagagtgacaggtggtgcatggttgtcgtcagctcgtgtcgtgagatgttgggttaagtcccgcaacgagcgcaacccttatctttagttgccatcattcagttgggcactctagagagactgccggtgacaaaccggaggaaggtggggatgacgtcaaatcatcatgccccttatgatttgggctacacacgtgctacaatggatggtacaaagggcagcgaaaccgcgaggtcaagccaatcccataaaaccattctcagttcggattgtagtctgcaactcgactacatgaagctggaatcgctagtaatcgtagatcagcatgctacggtgaatacgttcccgggtcttgtacacaccgcccgtcacaccacgagagtttgtaacacccgaagccggtggagtaacctttacaggagctagccgtcgaaggtgggacagatgattggggtg

SEQ ID NO: 1921 - DNA, 1426 bp, unidentified
  source 1..1426: mol_type = unassigned DNA; note = Magnetococcus marinus
aacgaacgttggtggcatgcttaacacatgcaagtcgaacggtagcaggcccttcggggtgctgacgagtggcgcacgggtgagtaacgcgtggatgacctacccagatgtgggggacaacagttggaaacgactgctaataccgcataatccctaagggggaaaggcttaggccgcatttggaggggtccgcgttggattaggtagttggtggggtaaaggcctaccaagccgacgatccatagctggtctgagaggatgatcagccacactggaactgagacacggtccagactcctacgggaggcagcagtggggaatattgcgcaatgggggaaaccctgacgcagcaatgccacgtgaatgatgaaggccttcgggttgtaaagttcttttagtagggaagatagtgacggtacctacagaaaaagctccggctaactccgtgccagcagccgcggtaatacggagggggcaaacgttgttcggaatcactgggcgtaaagggcgcgtaggcggttatctaagccagaagtgaaatctcggggctcaacctcgaaactgcttttggaactggaagactagaatccggtagaggatggtggaattccccgtgtagaggtgaaattcgtagatatggggaggaacaccggaggcgaaggcggccatctgggccggtattgacgctgaggcgcgaaagtgtgggtagcgaacaggattagataccctggtagtccacaccgtaaacgatgagtgctagtagttgcgggtatcgacccctgcggctacgaagttaacacgataagcactccgcctggggagtacggccgcaaggttaaaactcaaaggaattgacgggggcccgcacaagcggtggagcatgtggtttaattcgatgcaacgcgaagaaccttacctgcttttgacatccttggaaccttacggagacgtaggggtgcttttcggagaaccaagtgacaggtgctgcatggctgtcgtcagctcgtgtcgtgagatgttgggttaagtcccgcaacgagcgcaacccctgcctttagttgccatcattaagttgggcactctagaggaactgccggtgttaagccggaggaaggtggggatgacgtcaagtcatcatggcccttatgggcagggctacacacgtgctacaatggcggatacagagggcggcgaagcagtgatgtggagcgaatctcttaaagtccgtctcagttcggattggagtctgcaactcgactccatgaagttggaatcgctagtaatcgcggatcagcatgccgcggtgaatacgttcccgggccttgtacacaccgcccgtcacaccatgggagttggttttacccgaagccggtggcctaacctttcgaggggggagctgtctacggtaagatcagcgactggggtg

SEQ ID NO: 1922 - DNA, 1403 bp, unidentified
  source 1..1403: mol_type = unassigned DNA; note = Magnetospirillum caucaseum
aacgaacgctggcggcaggcttaacacatgcaagtcgaacgaagtcttcggacttagtggcgcacgggtgagtaacacgtgggaatatacctcttggtggggaataacatcgggaaactgatgctaataccgcatacgcctcggggaaagatttatcgccgagagattagcccgcgtccgattagctagttggtgaggtaatggctcaccaaggcgacgatcggtagctggtctgagaggatgatcagccacactgggactgagacacggcccagactcctacgggaggcagcagtggggaatattggacaatgggcgaaagcctgatccagccatgccgcgtgagtgatgaaggccttagggttgtaaagctctttcacccacgacgatgatgacggtagtgggagaagaagccccggctaacttcgtgccagcagccgcggtaatacgaagggggctagcgttgttcggaattactgggcgtaaagcgcacgcaggcggtggtcatagtcagaagtgaaagccctgggctcaacccgggaattgcttttgatactggaccgctagaatcacggagagggtagtggaattccgagtgtagaggtgaaattcgtagatattcggaagaacaccagtggcgaaggcgactacctggccgtcgattgacgctcatgtgcgaaagcgtggggagcaaacaggattagataccctggtagtccacgccgtaaacgatgagtgctagttgttggggtgcatgcacctcagtgacgcagctaacgcgttaagcactccgcctggggagtacggccgcaaggttaaaactcaaaggaattgacgggggcccgcacaagcggtggagcatgtggtttaattcgaagcaacgcgcagaaccttaccagcccttgacatgggacgtatgtttgccagagatggtgacttgtcttcggacgcgtccgcacaggtgctgcatggctgtcgtcagctcgtgtcgtgagatgttgggttaagtcccgcaacgagcgcaaccctcatcttcagttgccagcatttagttgggcactctgaagaaactgccggtgacaagccggaggaaggtggggatgacgtcaagtcctcatggcccttacgggctgggctacacacgtgctacaatggtggtgacagtgggtcgctaactcgcgagagtatgctaatccctaaaagccatctcagttcggattgcactctgcaactcgagtgcatgaagtcggaatcgctagtaatcgtggatcagcatgccacggtgaatacgttcccgggccttgtacacaccgcccgtcacaccatgggagttggctttacccgaagccggtgcgctaaccgcaaggaggcagccgaccacggtaaggtcagcgactggggtg

SEQ ID NO: 1923 - DNA, 1406 bp, Magnetospirillum gryphiswaldense
  source 1..1406: mol_type = unassigned DNA
aacgaacgctggcggcaggcctaacacatgcaagtcgaacgaagtcttcggacttagtggcgcacgggtgagtaacacgtgggaatatacctttcgctgggggataacatcgggaaactgatgctaataccgcatacgccctacgggggaaagatttatcggcgagagattagcccgcgtccgattaggtagttggtgaggtaacggctcaccaagcctgcgatcggtagctggtctgagaggatgatcagccacactgggactgagacacggcccagactcctacgggaggcagcagtggggaatattggacaatgggcgcaagcctgatccagccatgccgcgtgagtgatgaaggccttagggttgtaaagctctttcgacggggacgatgatgacggtacccgtagaagaagccccggctaacttcgtgccagcagccgcggtaatacgaagggggctagcgttgttcggaattactgggcgtaaagcgcacgcaggcggttcgatcagtcagaagtgaaagccccgggcttaacctgggaactgcttttgatactgtcgagcttgaatcacggagagggtagtggaattccgagtgtagaggtgaaattcgtagatattcggaagaacaccagtggcgaaggcgactacctggccgtcgattgacgctcatgtgcgaaagcgtggggagcaaacaggattagataccctggtagtccacgccgtaaacgatgagtgctagttgttggggtgcatgcacctcagtgacgcagctaacgcgttaagcactccgcctggggagtacggccgcaaggttaaaactcaaaggaattgacgggggcccgcacaagcggtggagcatgtggtttaattcgaagcaacgcgcagaaccttaccagcctttgacatggaacgtatgatcaccagagatggtgacttgtcttcggacgcgttcacacaggtgctgcatggctgtcgtcagctcgtgtcgtgagatgttgggttaagtcccgcaacgagcgcaaccctcatcttcagttgccatcatttagttgggcactctgaagaaactgccggtgacaagccggaggaaggtggggatgacgtcaagtcctcatggcccttacgggctgggctacacacgtgctacaatggtggtgacaatgggttgctaacccgcgagggccagctaatctccaaaagccatctcagttcggattgtactctgcaactcgagtgcatgaagtcggaatcgctagtaatcgtggatcagcatgccacggtgaatacgttcccgggccttgtacacaccgcccgtcacaccatgggagttggttttacccgaagccggtgagctaaccgcaaggaggcagccgaccacggtaaggtcagcgactggggtg

SEQ ID NO: 1924 - DNA, 1406 bp, Magnetospirillum magnetotacticum
  source 1..1406: mol_type = unassigned DNA
aacgaacgctggcggcaggcttaacacatgcaagtcgaacgaagtcttcggacttagtggcgcacgggtgagtaacacgtgggaatatacctcttggtggggaataacgtcgggaaactgacgctaataccgcatacgcccttcgggggaaagatttatcgccgagagattagcccgcgtccgattagctagttggtgaggtaatggctcaccaaggcgacgatcggtagctggtctgagaggatgatcagccacactgggactgagacacggcccagactcctacgggaggcagcagtggggaatattggacaatgggcgaaagcctgatccagccatgccgcgtgagtgatgaaggccttagggttgtaaagctctttcacccacgacgatgatgacggtagtgggagaagaagccccggctaacttcgtgccagcagccgcggtaatacgaagggggctagcgttgttcggaattactgggcgtaaagcgcacgcaggcggtggtcatagtcagaagtgaaagccctgggctcaacccgggaattgcttttgatactggaccgctagaatcacggagagggtagtggaattccgagtgtagaggtgaaattcgtagatattcggaagaacaccagtggcgaaggcgactacctggccgtcgattgacgctcatgtgcgaaagcgtggggagcaaacaggattagataccctggtagtccacgccgtaaacgatgagtgctagttgttggggtgcatgcacctcagtgacgcagctaacgcgttaagcactccgcctggggagtacggccgcaaggttaaaactcaaaggaattgacgggggcccgcacaagcggtggagcatgtggtttaattcgaagcaacgcgcagaaccttaccagcccttgacatgggacgtatgtttgccagagatggtgacttgtcttcggacgcgtccacacaggtgctgcatggctgtcgtcagctcgtgtcgtgagatgttgggttaagtcccgcaacgagcgcaaccctcatcttcagttgccatcatttagttgggcactctgaagaaactgccggtgacaagccggaggaaggtggggatgacgtcaagtcctcatggcccttacgggctgggctacacacgtgctacaatggtggtgacagtgggtcgctaactcgcgagagtatgctaatccctaaaagccatctcagttcggattgcactctgcaactcgagtgcatgaagtcggaatcgctagtaatcgtggatcagcatgccacggtgaatacgttcccgggccttgtacacaccgcccgtcacaccatgggagttggctttacccgaagccggtgcgctaaccgcaaggaggcagccgaccacggtaaggtcagcgactggggtg

SEQ ID NO: 1925 - DNA, 1406 bp, unidentified
  source 1..1406: mol_type = unassigned DNA; note = Magnetospirillum marisnigri
aacgaacgctggcggcaggcttaacacatgcaagtcgaacgaaggcttcggccttagtggcgcacgggtgagtaacacgtgggaatatacctcttggtgggggataacgtcgggaaactgacgctaataccgcatacgcccttcgggggaaagatttatcgccgagagattagcccgcgtccgattagctagttggtgaggtaacggctcaccaaggcgacgatcggtagctggtctgagaggatgatcagccacactgggactgagacacggcccagactcctacgggaggcagcagtggggaatattggacaatgggggcaaccctgatccagccatgccgcgtgagtgatgaaggccttagggttgtaaagctctttcacccacgacgatgatgacggtagtgggagaagaagccccggctgacttcgtgccagcagccgcggtaatacgaagggggctagcgttgttcggaattactgggcgtaaagcgcacgcaggcggtgaccatagtcagaagtgaaagccctgggctcaacccgggaattgcttttgatactgggttactagaatcacggagagggtagtggaattccgagtgtagaggtgaaattcgtagatattcggaagaacaccagtggcgaaggcgactacctggccgtcgattgacgctcatgtgcgaaagcgtggggagcaaacaggattagataccctggtagtccacgctgtaaacgatgagtgctagttgttggggtgcatgcacctcagtgacgcagctaacgcgttaagcactccgcctggggagtacggccgcaaggttaaaactcaaaggaattgacgggggcccgcacaagcggtggagcatgtggtttaattcgaagcaacgcgcagaaccttaccagcccttgacatgggacgtatgttggtcagagatgacctcttgtcttcggacgcgtccgcacaggtgctgcatggctgtcgtcagctcgtgtcgtgagatgttgggttaagtcccgcaacgagcgcaaccctcatcttcagttgccatcatttagttgggcactctgaagaaactgccggtgacaagccggaggaaggtggggatgacgtcaagtcctcatggcccttacgggctgggctacacacgtgctacaatggtggtgacagtgggctgctaactcgcgagagtaagctaatccctaaaagccatctcagttcggattgcactctgcaactcgagtgcatgaagtcggaatcgctagtaatcgtggatcagcatgccacggtgaatacgttcccgggccttgtacacaccgcccgtcacaccatgggagttggttttacccgaagccggtgagctaaccgcaaggaggcagccgaccacggtaaggtcagcgactggggtg

SEQ ID NO: 1926 - DNA, 1408 bp, unidentified
  source 1..1408: mol_type = unassigned DNA; note = Magnetospirillum moscoviense
aacgaacgctggcggcaggcttaacacatgcaagtcgaacgaagtcttcggacttagtggcgcacgggtgagtaacacgtgggaatatacctttcggtgggggataacgtcgggaaactgacgctaataccgcatacgccccttgggggaaagatttatcgccgagagattagcccgcgtccgattagctagttggtgaggtaacggctcaccaaggcgacgatcggtagctggtctgagaggatgatcagccacactgggactgagacacggcccagactcctacgggaggcagcagtggggaatattggacaatgggcgcaagcctgatccagccatgccgcgtgagtgatgaaggccttagggttgtaaagctctttcgacggggacgatgatgacggtacccgtagaagaagccccggctaacttcgtgccagcagccgcggtaatacgaagggggctagcgttgttcggaattactgggcgtaaagcgcacgcaggcggttcgatcagtcagaagtgaaagccccgggctcaacctgggaactgcttttgatactgtcgagcttgaatcacggagagggtagtggaattccgagtgtagaggtgaaattcgtagatattcggaagaacaccagtggcgaaggcgactacctggccgtcgattgacgctcatgtgcgaaagcgtggggagcaaacaggattagataccctggtagtccacgccgtaaacgatgagtgctagttgttggggtgcatgcacctcagtgacgcagctaacgcgttaagcactccgcctggggagtacggccgcaaggttaaaactcaaaggaattgacgggggcccgcacaagcggtggagcatgtggtttaattcgaagcaacgcgcagaaccttaccagcctttgacatgggaactatgggcagaagagattttgtccttcacttcgggtgggttccacacaggtgctgcatggctgtcgtcagctcgtgtcgtgagatgttgggttaagtcccgcaacgagcgcaaccctcatcttcagttgccatcatttagttgggcactctgaagaaactgccggtgacaagccggaggaaggtggggatgacgtcaagtcctcatggcccttacgggctgggctacacacgtgctacaatggtggtgacagtgggtcgctaactcgcgagagtaagctaatctctaaaagccatctcagttcggattgttctctgcaactcgagagcatgaagtcggaatcgctagtaatcgtggatcagcatgccacggtgaatacgttcccgggccttgtacacaccgcccgtcacaccatgggagttggttttacccgaagccggtgagctaaccgcaaggaggcagccgaccacggtaaggtcagcgactggggtg

SEQ ID NO: 1927 - DNA, 1418 bp, unidentified
  source 1..1418: mol_type = unassigned DNA; note = Magnetovibrio blakemorei
aacgaacgctggcggcatgcctaacacatgcaagttgaacgagaaagcggcttcggccgtgagtagagtggcgcacgggtgagtaacgcgtgggaacctgccaagcagtggggaataacctttggaaacgaaggctaataccgcatacgcccttcgggggaaagatttatcgctgtttgatggtcccgcgtccgattagctagttggtaaggtaatggcttaccaaggcgacgatcggtagctggtctgagaggatgatcagccacactggaactgagacacggtccagactcctacgggaggcagcagtggggaatattggacaatgggcgcaagcctgatccagcaatgccgcgtgagtgaagaaggccctagggttgtaaaactctttcagtagtgatgatgatgacagtaactacagaagaagcaccggctaacttcgtgccagcagccgcggtaatacgaagggtgctagcgttgttcggaattactgggcgtaaagagcatgtaggcggatagattagtcagaggtgaaagccccgagctcaacttgggaattgcctttgatactgtttatcttgagtccgagagagggtagtggaatttccagtgtagaggtgaaattcgtagatattggaaagaacaccagtggcgaaggcggctacctggctcggtactgacgctgagatgcgaaagcgtggggagcaaacaggattagataccctggtagtccacgccgtaaacgatgagtgctagctgttgggatcttaggtctcagtggcgcagctaacgcattaagcactccgcctggggagtacggtcgcaagattaaaactcaaaggaattgacgggggcccgcacaagcggtggagcatgtggtttaattcgaagcaacgcgaagaaccttaccagcccttgacataccgatcgcggttagtggagacactttccttcagttcggctggatcggatacaggtgctgcatggctgtcgtcagctcgtgtcgtgagatgttgggttaagtcccgcaacgagcgcaaccctcgcctttagttgccatcatttagttgggcactctagaggaactgccggtgacaagccggaggaaggtggggatgacgtcaagtcctcatggcccttacgggctgggctacacacgtgctacaatggcggtgacagtgggttgcgacctcgcgagaggtagccaatccctaaaaaccgtctcagttcggattgttctctgcaactcgagagcatgaagttggaatcgctagtaatcgcggatcagcatgccgcggtgaatacgttcccgggccttgtacacaccgcccgtcacaccatgggagttggttttacccgaaggcgatgcgctaaccgcaaggaggcagtcgaccacggtaaggtcagcgactggggtg

SEQ ID NO: 1928 - DNA, 1452 bp, Malikia granosa
  source 1..1452: mol_type = unassigned DNA
attgaacgctggcggcatgctttacacatgcaagtcgaacggtaacaggtcttcggatgctgacgagtggcgaacgggtgagtaatgcatcggaacgtgcccagtcgtgggggataacgcagcgaaagctgtgctaataccgcatacgatctatggatgaaagcgggggaccgtaaggcctcgcgcgattggagcggccgatgtcagattagctagttggtggggtaaaggcccaccaaggcgacgatctgtagctggtctgagaggacgaccagccacactgggactgagacacggcccagactcctacgggaggcagcagtggggaattttggacaatgggcgcaagcctgatccagcaatgccgcgtgcaggaagaaggccttcgggttgtaaactgcttttgtacggaacgaaaaggttcgggttaataccctgggctcatgacggtaccgtaagaataagcaccggctaactacgtgccagcagccgcggtaatacgtagggtgcaagcgttaatcggaattactgggcgtaaagcgtgcgcaggcggttttgtaagacaggcgtgaaatccccgggctcaacctgggaatggcgcttgtgactgcaaagctggagtgcggcagagggggatggaattccgcgtgtagcagtgaaatgcgtagatatgcggaggaacaccaatggcgaaggcaatcccctgggcctgcactgacgctcatgcacgaaagcgtggggagcaaacaggattagataccctggtagtccacgccctaaacgatgtcaactggttgttggtccttagctggatcagtaacgaagctaacgcgtgaagttgaccgcctggggagtacggccgcaaggttgaaactcaaaggaattgacggggacccgcacaagcggtggatgatgtggtttaattcgatgcaacgcgaaaaaccttacccacctttgacatggcaggaatcctttagagatagaggagtgctcgaaagagaacctgcacacaggtgctgcatggctgtcgtcagctcgtgtcgtgagatgttgggttaagtcccgcaacgagcgcaacccttgtcattagttgctacgaaagggcactctaatgagactgccggtgacaaaccggaggaaggtggggatgacgtcaagtcctcatggcccttataggtggggctacacacgtcatacaatggccggtacaaagggtcgcaaacctgcgagggggagccaatccatcaaagccggtcgtagtccggatcgcagtctgcaactcgactgcgtgaagtcggaatcgctagtaatcgtggatcagcatgtcacggtgaatacgttcccgggtcttgtacacaccgcccgtcacaccctgggagcgggtctcgccagaagtagttagcctaacccgcaaggagggcgattaccacggcggggttcgtgactggggtg

SEQ ID NO: 1929 - DNA, 1452 bp, Malikia spinosa
  source 1..1452: mol_type = unassigned DNA
attgaacgctggcggcatgctttacacatgcaagtcgaacggtaacaggtcttcggatgctgacgagtggcgaacgggtgagtaatgcatcggaacgtgcccagtcgtgggggataacgcagcgaaagctgtgctaataccgcatacgatctatggatgaaagcgggggatcgcaagacctcgcgcgattggagcggccgatgtcagattagctagttggtggggtaaaggcccaccaaggcgacgatctgtagctggtctgagaggacgaccagccacactgggactgagacacggcccagactcctacgggaggcagcagtggggaattttggacaatgggcgcaagcctgatccagcaatgccgcgtgcaggaagaaggccttcgggttgtaaactgcttttgtacggaacgaaaaggtctgggttaataccctgggctcatgacggtaccgtaagaataagcaccggctaactacgtgccagcagccgcggtaatacgtagggtgcaagcgttaatcggaattactgggcgtaaagcgtgcgcaggcggttttgtaagacaggcgtgaaatccccgggctcaacctgggaatggcgcttgtgactgcaaagctggagtgcggcagagggggatggaattccgcgtgtagcagtgaaatgcgtagatatgcggaggaacaccaatggcgaaggcaatcccctgggcctgcactgacgctcatgcacgaaagcgtggggagcaaacaggattagataccctggtagtccacgccctaaacgatgtcaactggttgttggtccttagctggatcagtaacgaagctaacgcgtgaagttgaccgcctggggagtacggccgcaaggttgaaactcaaaggaattgacggggacccgcacaagcggtggatgatgtggtttaattcgatgcaacgcgaaaaaccttacccacctttgacatgtacggaagttgccagagatggcttcgtgctcgaaagagaaccgtaacacaggtgctgcatggctgtcgtcagctcgtgtcgtgagatgttgggttaagtcccgcaacgagcgcaacccttgtcattagttgctacgaaagggcactctaatgagactgccggtgacaaaccggaggaaggtggggatgacgtcaagtcctcatggcccttataggtggggctacacacgtcatacaatggccggtacaaagggtcgcaaacccgcgagggggagccaatccatcaaagccggtcgtagtccggatcgcagtctgcaactcgactgcgtgaagtcggaatcgctagtaatcgtggatcagcatgtcacggtgaatacgttcccgggtcttgtacacaccgcccgtcacaccatgggagcgggtctcgccagaagtagttagcctaacccgcaaggagggcgattaccacggcggggttcgtgactggggtg

SEQ ID NO: 1930 - DNA, 1454 bp, Malonomonas rubra
  source 1..1454: mol_type = unassigned DNA
aacgaacgctggcggcgtgcctaacacatgcaagtcgaacgaggaaggaatcttcggattccgagtagagtggcgcacgggtgagtaacacgtggataacctgccctatgatctgggataacatttcgaaagagatgctaataccggataagcctacacaatcttcggagcgagtaggaaaagatttatcgtcataggatgggtccgcggtccattagctagttggtggggtaacggcctaccaaggccacgatggatagctggtctgagaggatgatcagccacactggaactgagacacggtccagactcctacgggaggcagcagtggggaattttgcgcaatgggggaaaccctgacgcagcaacgccgcgtgaaggatgaaggcctttgggtcgtaaacttctgtcagtggggaagaaatgccagtaatggtgatgacggtacccgcaaaggaagcaccggctaactccgtgccagcagccgcggtaatacggagggtgcaagcgttgttcggaattattgggcgtaaagagcatgtaggcggactgttaagtctgatgtgaaagcccggggctcaaccccggaagtgcattggatactggcagtcttgagtatgggagaggaaagtggaattccgagtgtaggagtgaaatccgtagatattcggaggaacaccagtggcgaaggcggctttctggaccaatactgacgctgagatgcgaaagcgtggggagcgaacaggattagataccctggtagtccacgccgtaaacgatgaatactaggtgttgcgggtaaccactcctgcagtgccgcagctaacgcattaagtattccgcctggggagtacggccgcaaggctaaaactcaaaggaattgacgggggcccgcacaagcggtggagcatgtggtttaattcgacgcaacgcgaagaaccttacctgggtttgacatcccgatcgtacattatggaaacatagtggtcagttcggctggatcggtgacaggtgctgcatggctgtcgtcagctcgtgtcgtgagatgttgggttaagtcccgcaacgagcgcaacccttgtccttagttgccatcatttagttgggcactctagggagactgccggtgttaagccggaggaaggtggggatgacgtcaagtcctcatggcccttatatccagggctacacacgtgctacaatggccggtacaaagggcagcgataccgcgaggtggagctaatcccaaaaagccggtctcagttcggattggagtctgcaactcgactccatgaagttggaatcgctagtaatcgcgtatcagcatgacgcggtgaatacgggcccgggccttgtacacaccgcccgtcacaccacgggagtctattgtaccggaaaccggtgggccaaccttcgggaggcagccgtttatggtatgatcggtaactggggtg

SEQ ID NO: 1931 - DNA, 1371 bp, Mameliella alba
  source 1..1371: mol_type = unassigned DNA
aacgaacgctggcggcaggcctaacacatgcaagtcgtgcgcgccttcgggtgagcggcggacgggtgagtaacgcgtgggaatgtgcccttctgttgaggatagccccgggaaactgggagtaatactcgatacgccctacgggggaaggaaggatcagcccgcgtctgattaggtagttggtggggtaatggcctaccaagcctacgatcagtagctggttttagaggatgatcagccacactgggactgagacacggcccagactcctacgggaggcagcagtggggaatcttagacaatgggggcaaccctgatctagccatgccgcgtgagtgatgaaggccctagggtcgtaaagctctttcgccagggatgataatgacagtacctggtaaagaaaccccggctaactccgtgccagcagccgcggtaatacggagggggttagcgttgttcggaattactgggcgtaaagcgcgcgtaggcggatcagaaagttgggggtgaaatcccggggctcaaccccggaactgcctccaaaactcctggtcttgagttcgagagaggtgagtggaattccgagtgtagaggtgaaattcgtagatattcggaggaacaccagtggcgaaggcggctcactggctcgatactgacgctgaggtgcgaaagtgtggggagcaaacaggattagataccctggtagtccacaccgtaaacgatgaatgccagtcgtcgggtagcatgctattcggtgacacacctaacggattaagcattccgcctggggagtacggtcgcaagattaaaactcaaaggaattgacgggggcccgcacaagcggtggagcatgtggtttaattcgaagcaacgcgcagaaccttaccaacccttgacatcctgtgctacatccagagatggatggttcccttcggggacgcagtgacaggtgctgcatggctgtcgtcagctcgtgtcgtgagatgttcggttaagtccggcaacgagcgcaacccacatcttcagttgccagcagttcggctgggcactctggagaaactgcccgtgataagcgggaggaaggtgtggatgacgtcaagtcctcatggcccttacgggttgggctacacacgtgctacaatggcatctacagtgggttaatccccaaaagatgtctcagttcggattgttctctgcaactcgagagcatgaagtcggaatcgctagtaatcgcgtaacagcatgacgcggtgaatacgttcccgggccttgtacacaccgcccgtcacaccatgggagttggttctacctgacggccgtgcgctaaccttcgggaggcagcggaccacggtaggatcagcgactggggtg

SEQ ID NO: 1932 - DNA, 1368 bp, unidentified
  source 1..1368: mol_type = unassigned DNA; note = Mangrovibacter phragmitis
gcttgcttctttgccggcgagcggcggacgggtgagtaatgtctgggaaactgcctgatggagggggataactactggaaacggtggctaataccgcataacgtcgcaagaccaaagagggggaccttcgggcctcttgccatcagatgtgcccagatgggattagcttgttggtgaggtaacggctcaccaaggcgacgatccctagctggtctgagaggatgaccagccacactggaactgagacacggtccagactcctacgggaggcagcagtggggaatattgcacaatgggcgcaagcctgatgcagccatgccgcgtgtatgaagaaggccttcgggttgtaaagtactttcagtcaggaggaaggtggtgagcttaatacgctcatcaattgacgttactgacagaagaagcaccggctaactccgtgccagcagccgcggtaatacggagggtgcaagcgttaatcggaattactgggcgtaaagcgcacgcaggcggtctgtcaagtcggatgtgaaatccccgggctcaacctgggaactgcattcgaaactggcaggctggagtctcgtagagggaggtagaattccaggtgtagcggtgaaatgcgtagagatctggaggaataccggtggcgaaggcggcctcctggacgaagactgacgctcaggtgcgaaagcgtggggagcaaacaggattagataccctggtagtccacgccgtaaacgatgtcgacttgggaggctgtgcccttgaggcgtggcttccggagctaacgcgttaagtcgaccgcctggggagtacggccgcaaggttaaaactcaaatgaattgacgggggcccgcacaagcggtggagcatgtggtttaattcgatgcaacgcgaagaaccttacctggtcttgacatccagagaatcctgcagagatgcgggagtgccttcgggagctctgagacaggtgctgcatggctgtcgtcagctcgtgttgtgaaatgttgggttaagtcccgcaacgagcgcaacccttatcctttgttgccagcggttaggccgggaactcaaaggagactgccagtgataaactggaggaaggtggggatgacgtcaagtcatcatggcccttacgaccagggctacacacgtgctacaatggcgcatacaaagagaagcgaacttgcgagagtaagcggacctcataaagtgcgtcgtagtccggattggagtctgcaactcgactccatgaagtcggaatcgctagtaatcgcggatcagaatgccgcggtgaatacgttcccgggccttgtacacaccgcccgtcacaccatgggagtgggttgcaaaagaagtaggtagcttaac

SEQ ID NO: 1933 - DNA, 1368 bp, Mangrovibacter plantisponsor
  source 1..1368: mol_type = unassigned DNA
agcttgcttctttgccggcgagcggcggacgggtgagtaatgtctgggaaactgcctgatggagggggataactactggaaacggtagctaataccgcataacgtcgcaagaccaaagagggggaccttcgggcctcttgccatcggatgtgcccagatgggattagcttgttggtgaggtaacggctcaccaaggcgacgatccctagctggtctgagaggatgaccagccacactggaactgagacacggtccagactcctacgggaggcagcagtggggaatattgcacaatgggcgcaagcctgatgcagccatgccgcgtgtatgaagaaggccttcgggttgtaaagtactttcagtcaggaggaaggtggtgagcttaatacgctcatcaattgacgttactgacagaagaagcaccggctaactccgtgccagcagccgcggtaatacggagggtgcaagcgttaatcggaattactgggcgtaaagcgcacgcaggcggtctgtcaagtcggatgtgaaatccccgggctcaacctgggaactgcattcgaaactggcaggctagagtctcgtagagggaggtagaattccaggtgtagcggtgaaatgcgtagagatctggaggaataccggtggcgaaggcggcctcctggacgaagactgacgctcaggtgcgaaagcgtggggagcaaacaggattagataccctggtagtccacgccgtaaacgatgtcgacttggaggctgtgcccttgaggcgtggcttccggagctaacgcgttaagtcgaccgcctggggagtacggccgcaaggttaaaactcaaatgaattgacgggggcccgcacaagcggtggagcatgtggtttaattcgatgcaacgcgaagaaccttacctggtcttgacatccagagaatcctgcagagatgcgggagtgccttcgggaactctgagacaggtgctgcatggctgtcgtcagctcgtgttgtgaaatgttgggttaagtcccgcaacgagcgcaacccttatcctttgttgccagcggttaggccgggaactcaaaggagactgccagtgataaactggaggaaggtggggatgacgtcaagtcatcatggcccttacgaccagggctacacacgtgctacaatggcgcatacaaagagaagcgaacttgcgagagtaagcggacctcataaagtgcgtcgtagtccggattggagtctgcaactcgactccatgaagtcggaatcgctagtaatcgcggatcagaatgccgcggtgaatacgttcccgggccttgtacacaccgcccgtcacaccatgggagtgggttgcaaaagaagtaggtagcttaac

SEQ ID NO: 1934 - DNA, 1462 bp, Mannheimia granulomatis
  source 1..1462: mol_type = unassigned DNA
attgaacgctggcggcaggcttaacacatgcaagtcgaacggtaacagattagtacttgtactaatgctgacgagtggcggacgggtgagtaatgcttgggaatctggcttatggagggggataactactggaaacggtagctaataccgcgtaatgtctgtggactaaagggtgggacctattggccacctgccataagatgagcccaagtgggattaggtagttggtgaggtaaaggctcaccaagcccacgatctctagctggtctgagaggatgaccagccacactggaactgagacacggtccagactcctacgggaggcagcagtggggaatattgcacaatggggggaaccctgatgcagccatgccgcgtgaatgaagaaggccttcgggttgtaaagttctttcggtagcgaggaaggtgattgttttaatagaacaatcaattgccgttaactacagaagaagcaccggctaactccgtgccagcagccgcggtaatacggggggtgcgagcgttaatcggaataactgggcgtaaagggcacgcaggcggacttttaagtgaggtgtgaaatccccgggcttaacctgggaattgcatttcagactgggagtctagagtactttagggaggggtagaattccacgtgtagcggtgaaatgcgtagagatgtggaggaataccgaaggcgaaggcagccccttgggaatgtactgacgctcatgtgcgaaagcgtggggagcaaacaggattagataccctggtagtccacgccgtaaacgctgtcgatttggggattgggctttgagcttggtgcccgtagctaacgtgataaatcgaccgcctggggagtacggccgcaaggttaaaactcaaatgaattgacgggggcccgcacaagcggtggagcatgtggtttaattcgatgcaacgcgaagaaccttacctactcttgacatccagagaagcttgcagagatgcgagtgtgccttcgggagctctgagacaggtgctgcatggctgtcgtcagctcgtgttgtgaaatgttgggttaagtcccgcaacgagcgcaacccttatcctttgttgccagcgattcggtcgggaactcaaaggagactgccggtgataaaccggaggaaggtggggatgacgtcaagtcatcatggcccttacgagtagggctacacacgtgctacaatggcgtatacagagggcggcgacccagcgatggtgagcgaatctcagaaagtacgtctaagtccggattggagtctgcaactcgactccatgaagtcggaatcgctagtaatcgcaaatcagaatgttgcggtgaatacgttcccgggccttgtacacaccgcccgtcacaccatgggagtgggttgtaccagaagtagatagcttaaccgaaagaggggcgtttaccacggtatgattcatgactggggtg

SEQ ID NO: 1935 - DNA, 1462 bp, Mannheimia haemolytica
  source 1..1462: mol_type = unassigned DNA
attgaacgctggcggcaggcttaacacatgcaagtcgaacggtagcacataggagtttgctccttgggtgacgagtggcggacgggtgagtaatgcttgggaatctggcttatggagggggataactactggaaacggtagctaataccgcgtaatgtcttaggactaaagggtgggaccatttggccacctgccataagatgagcccaagtgggattaggtagttggtgaggtaaaggctcaccaagcccgcgatctctagctggtctgagaggatgaccagccacactggaactgagacacggtccagactcctacgggaggcagcagtggggaatattgcacaatggggggaaccctgatgcagccatgccgcgtgaatgaagaaggccttcgggttgtaaagttctttcggtgacgaggaaggcgattgttttaatagaacagtcgattgacgttaatcacagaagaagcaccggctaactccgtgccagcagccgcggtaatacggggggtgcgagcgttaatcggaataactgggcgtaaagggcacgcaggcggttgtttaagtgaggtgtgaaagccccgggcttaacctgggaattgcatttcagactgaacaactagagtactttagggaggggtagaattccacgtgtagcggtgaaatgcgtagagatgtggaggaataccgaaggcgaaggcagccccttggaaatgtactgacgctcatgtgcgaaagcgtggggagcaaacaggattagataccctggtagtccacgccgtaaacgctgtcgatttggggattggggtttaactctggtgcccgtagctaacgtgataaatcgaccgcctggggagtacggccgcaaggttaaaactcaaatgaattgacgggggcccgcacaagcggtggagcatgtggtttaattcgatgcaacgcgaagaaccttacctactcttgacatccatggaatcttgtagagatatgagagtgccttcgggaaccatgagacaggtgctgcatggctgtcgtcagctcgtgttgtgaaatgttgggttaagtcccgcaacgagcgcaacccttatcctttgttgccagcgattaggtcgggaactcaaaggagactgccggtgataaaccggaggaaggtggggatgacgtcaagtcatcatggcccttacgagtagggctacacacgtgctacaatggcgtatacagagggcggcgagccagcgatggggagcgaatctcagaaagtacgtctaagtccggattggagtctgcaactcgactccatgaagtcggaatcgctagtaatcgcaaatcagaatgttgcggtgaatacgttcccgggccttgtacacaccgcccgtcacaccatgggagtgggttgtaccagaagtagatagcttaaccgaaaggggggcgtttaccacggtatgattcatgactggggtg

SEQ ID NO: 1936 - DNA, 1462 bp, Mannheimia varigena
  source 1..1462: mol_type = unassigned DNA
attgaacgctggcggcaggcttaacacatgcaagtcgaacggtaacagggagaagcttgcttctttgctgacgagtggcggacgggtgagtaatgcttgggaatctggcttatggagggggataactactggaaacggtagctaataccgcgtaatgtctttggactaaagggtgggactttcgggccacctgccataagatgagcccaagtgggattagctagttggtgaggtaaaggctcaccaaggcgacgatctctagctggtctgagaggatgaccagccacactggaactgagacacggtccagactcctacgggaggcagcagtggggaatattgcacaatggggggaaccctgatgcagccatgccgcgtgaatgaagaaggccttcgggttgtaaagttctttcggtagcgaggaaggcagacttgttaatagcaagtttgattgacgttaactacagaagaagcaccggctaactccgtgccagcagccgcggtaatacggggggtgcaagcgttaatcggaataactgggcgtaaagggcacgcaggcggacttttaagtgagatgtgaaagccccgggcttaacctgggaattgcatttcagactgggagtctagagtactttagggaggggtagaattccacgtgtagcggtgaaatgcgtagagatgtggaggaataccgaaggcgaaggcagccccttgggaatgtactgacgctcatgtgcgaaagcgtggggagcaaacaggattagataccctggtagtccacgccgtaaacgctgtcgatttggggattgggctttaagcttggtgcccgtagctaacgtgataaatcgaccgcctggggagtacggccgcaaggttaaaactcaaatgaattgacgggggcccgcacaagcggtggagcatgtggtttaattcgatgcaacgcgaagaaccttacctactcttgacatccagagaatcttgtagagatacgagagtgccttcgggaactctgagacaggtgctgcatggctgtcgtcagctcgtgttgtgaaatgttgggttaagtcccgcaacgagcgcaacccttatcctttgttgccagcgattaggtcgggaactcaaaggagactgccggtgataaaccggaggaaggtggggatgacgtcaagtcatcatggcccttacgagtagggctacacacgtgctacaatggcgtatacagagggcagcgacccagcgatggtgagcgaatctcacaaagtacgtctaagtccggattggagtctgcaactcgactccatgaagtcggaatcgctagtaatcgcaaatcagaatgttgcggtgaatacgttcccgggccttgtacacaccgcccgtcacaccatgggagtgggttgtaccagaagtagatagcttaaccttcgggggggcgtttaccacggtatgattcatgactggggtg

SEQ ID NO: 1937 - DNA, 1389 bp, Maricaulis maris
  source 1..1389: mol_type = unassigned DNA
aacgaacgctggcggcaggcttaacacatgcaagtcgagcgccctgcttgcagggagcggcagacgggtgagtaacgcgtgggaacgtgcctattggttcggaatagccccgggaaactgggtttaataccgaatgtgcccttcgggggaaagatttatcgccaatagatcggcccgcgttagattagctagttggtgaggtaaaagcttaccaaggctacgatctatagctggtctgagaggatgatcagccacactgggactgagacacggcccagactcctacgggaggcagcagtgaggaatcttggacaatgggggaaaccctgatccagccatgccgcgtgaatgatgaaggccttagggttgtaaaattctttcagcagggaagataatgacggtacctgcagaagaagccccggctaactccgtgccagcagccgcggtaatacggagggggctagcgttgttcggaattactgggcgtaaagcgctcgtaggcggattggtcagtcagaggtgaaagcccagggctcaaccttggaattgcctttgatactgccagtcttgagttcgggagaggtgagcggaattccgagtgtagaggtgaaattcgtagatattcggaggaacaccagaggcgaaggcggctcactggaccgatactgacgctgaggagcgaaagcgtggggagcaaacaggattagataccctggtagtccacgccgtaaacgatgagagctagttgtctggcagcatgctgttaggtgacgcagctaacgcattaagctctccgcctggggagtacggccgcaaggttaaaactcaaagaaattgacgggggcccgcacaagcggtggagcatgtggtttaattcgaagcaacgcgcagaaccttacctacccttgacataccaatcgcgatttccagagatggatttcttcagttaggctggattggatacaggtgctgcatggctgtcgtcagctcgtgtcgtgagatgttgggttaagtcccgcaacgagcgcaaccctcgccgttagttgccagcaggtttggctgggcactctaacgggaccgccggtgtcaagccggaggaaggtggggatgacgtcaagtcctcatggcccttacgggtagggctacacacgtgctacaatggcagtgacagagagctaatctctaaaaactgtctcagttcggattgtcttctgcaactcgaaggcatgaagttggaatcgctagtaatcgcggatcagcatgccgcggtgaatacgttcccgggccttgtacacaccgcccgtcacaccatgggagttggttctacccgaagatggtgcgctaaccttttggaagcagccagccacggtaggatcagcgactggggtg

SEQ ID NO: 1938 - DNA, 1389 bp, Maricaulis salignorans
  source 1..1389: mol_type = unassigned DNA
aacgaacgctggcggcaggcttaacacatgcaagtcgagcgcccacttcggtgggagcggcagacgggtgagtaacgcgtgggaacgtaccttttggttcggaatagccctgggaaactgggtgtaataccgaatgtgcccttcgggggaaagatttatcgccaaaagatcggcccgcgttagattagcttgttggtgaggtaatggctcaccaaggctacgatctatagctggtctgagaggatgatcagccacactgggactgagacacggcccagactcctacgggaggcagcagtgaggaatcttggacaatgggcgaaagcctgatccagccatgccgcgtgaatgatgaaggccttagggttgtaaaattctttcagcagggaagataatgacggtacctgcagaagaagccccggctaactccgtgccagcagccgcggtaatacggagggggctagcgttgttcggaattactgggcgtaaagcgctcgtaggcggattgataagtcagaggtgaaagcccagggctcaaccttggaattgcctttgaaactgtcagtcttgagttcaggagaggtgagcggaattccgagtgtagaggtgaaattcgtagatattcggaggaacaccagaggcgaaggcggctcactggactgatactgacgctgaggagcgaaagcgtggggagcaaacaggattagataccctggtagtccacgccgtaaactatgagagctagttgtcagcaagcatgcttgttggtgacgcagctaacgcattaagctctccgcctggggagtacggtcgcaagattaaaactcaaagaaattgacgggggcccgcacaagcggtggagcatgtggtttaattcgaagcaacgcgaagaaccttacctacccttgacataccgatcgcggatcgcagagatgctttccttcagttaggctggatcggatacaggtgctgcatggctgtcgtcagctcgtgtcgtgagatgttgggttaagtcccgcaacgagcgcaaccctcgccactagttgccagcaggtttggctgggcactctagtgggaccgccggtgtcaagccggaggaaggtggggatgacgtcaagtcctcatggcccttacgggtagggctacacacgtgctacaatggcagtgacagagagctaatctctaaaaactgtctcagttcggattgtcttctgcaactcgaaggcatgaagttggaatcgctagtaatcgcggatcagcatgccgcggtgaatacgttcccgggccttgtacacaccgcccgtcacaccatgggagttggttctacccgaagattgtgcgctaaccgcaaggaagcagcaagccacggtaggatcagcgactggggtg

SEQ ID NO: 1939 - DNA, 1451 bp, Marichromatium gracile
  source 1..1451: mol_type = unassigned DNA
attgaacgctggcggcatgcctaacacatgcaagtcgaacgcgaaaccccttcggggggagtagagtggcggacgggtgagtaatgtgtgggaatctgccctgcagcgggggataacccggggaaactcgggctaataccgcatacgacctacgggtgaaagggggcttcggctctcactgcaggatgagcccacatccgattagcttgttggtgaggtaacggctcaccaaggcgacgatcggtagctggtctgagaggatgatcagccacactgggactgagacacggcccagactcctacgggaggcagcagtggggaatattggacaatgggcgaaagcctgatccagcaatgccgcgtgtgtgaagaaggcctgcgggttgtaaagcactttcagcgaggaagaaaagcctgtggttaatacccatgggtcttgacgttactcgcagaagaagcaccggctaactccgtgccagcagccgcggtaatacggagggtgcaagcgttaatcggaatcactgggcgtaaagcgcacgtaggcggcgaggtcagtcagatgtgaaagccccgggcttaacctgggaactgcatttgatactgcctggctagagtttgatagaggggggtggaattccaggtgtagcggtgaaatgcgtagatatctggaggaacaccagtggcgaaggcggccccctggatcaaaactgacgctgaggtgcgaaagcgtggggagcaaacaggattagataccctggtagtccacgccgtaaacgatgtcgactagccgttgggctcatttaagggtttagtggcgcagctaacgcgataagtcgaccgcctggggagtacggccgcaaggttaaaactcaaaggaattgacgggggcccgcacaagcggtggagcatgtggtttaattcgatgcaacgcgaagaaccttaccagcccttgacatcctcggaacttggcagagatgccttggtgccttcgggagccgagtgacaggtgctgcatggctgtcgtcagctcgtgtcgtgagatgttgggttaagtcccgtaacgagcgcaacccttgtccttagttgccagcacgtcatggtgggaactctaaggagactgccggtgataaaccggaggaaggtggggatgacgtcaagtcatcatggcccttatgggctgggctacacacgtgctacaatggtcggtacagagggttgcaaagcggcgacgtggagctaatctcagaaaaccggtcgtagtccggattgcagtctgcaactcgactgcatgaagtcggaatcgctagtaatcgcgaatcagaatgtcgcggtgaatacgttcccgggccttgtacacaccgcccgtcacaccatgggagttggttgcaccagaagtagatagcttaaccttcgggagggcgtttaccacggtgtgatcaatgactggggtg

SEQ ID NO: 1940 - DNA, 1450 bp, Marichromatium purpuratum
  source 1..1450: mol_type = unassigned DNA
attgaacgctggcggcatgcctaacacatgcaagtcgaacgcgaaaccccttcggggggagtagagtggcggacgggtgagtaatgtgtgggaatctgccctgcagcgggggataacccggggaaacccgggctaataccgcatacgacctacgggtgaaagggggcttcggctctcactgcaggatgagcccacatccgattagcttgttggtgaggtaacggctcaccaaggcgacgatcggtagctggtctgagaggatgatcagccacactgggactgagacacggcccagactcctacgggaggcagcagtggggaatattggacaatgggcgaaagcctgatccagcaatgccgcgtgtgtgaagaaggcctgcgggttgtaaagcactttcagcgaggaagaaaagcctgtggttaatacccatgggtcttgacgttactcgcagaagaagcaccggctaactccgtgccagcagccgcggtaatacggagggtgcaagcgttaatcggaatcactgggcgtaaagcgcacgtaggcggcgaggtcagtcagatgtgaaagccccgggcttaacctgggaactgcatttgatactgcctggctagagtttgatagaggggggtggaattccaggtgtagcggtgaaatgcgtagatatctggaggaacaccagtggcgaaggcggccccctggatcaaaactgacgctgaggtgcgaaagcgtggggagcaaacaggattagataccctggtagtccacgccgtaaacgatgtcgactagccgttgggctcatttaagggtttagtggcgcagctaacgcgataagtcgaccgcctggggagtacggccgcaaggttaaaactcaaaggaattgacgggggcccgcacaagcggtggagcatgtggtttaattcgatgcaacgcgaagaaccttaccagcccttgacatcctcggaacttggcagagatgccttggtgccttcgggagccgagtgacaggtgctgcatggctgtcgtcagctcgtgtcgtgagatgttgggttaagtcccgtaacgagcgcaacccttgtccttagttgccagcatttcggatgggaactctaaggagactgccggtgataaaccggaggaaggtggggatgacgtcaagtcatcatggcccttatgggctgggctacacacgtgctacaatggtcggtacagagggtcgcaaagcggcgacgtggagctaatctcagaaaaccggtcgtagtccggattgcagtctgcaactcgactgcatgaagtcggaatcgctagtaatcgcgaatcagaatgtcgcggtgaatacgttcccgggccttgtacacaccgcccgtcacaccatgggagttggttgcaccagaagtagatagcttaaccttcgggagggcgtttaccacggtgtgatcaatgactggggtg

SEQ ID NO: 1941 - DNA, 1444 bp, unidentified
  source 1..1444: mol_type = unassigned DNA; note = Mariniblastus fucicola
aatgaacgttagcggcgtggattaggcatgcaagtcgagcgagaagcttttaaaagatacttcggttgattttaaaagtggacagcggcgaaagggagagtaacgagtagattacgtacccgagggtccgggatagctgcgggaaactgcaggtaataccggataatgtttccgaaccaaagatttattgccctcggagcggtctgcttactattagcttgttggtggggtaacggcctaccaaggcgaagatggttagcgggtgtgagagcatggcccgtctcactggaactgagacactgtccagacacctacgggtggctgcagtcgagaatcttccgcaatggacgaaagtctgacggagcgacgccgcgtgatggatgaaggccctcgggttgtaaacatctgtcgtaggttaggaaattttgaccgatcctaggaggaagcacaggctaagttcgtgccagcagccgcggtaatacgaactgtgcaaacgttattcggaatcactgggcttaaagggtgcgtaggcggatttgtaggtcagatgtgaaagcccacggctcaaccgtggaattgcgtttgaaaccacaaatcttgaggaagtcagaggtatgcggaactgatggtggagcggtgaaatgtgttgatatcatcaggaacaccggtggcgaaagcggcatactgggacttttctgacgctgaggcacgaaagctaggggagcgaacgggattagataccccggtagtcctagctgtaaacgatctgtactagtccgtggggacccccacatcttctcggacgtagcgaaagtgttaagtacagcgcctggggagtatggtcgcaaggctgaaactcaaaggaattgacgggggctcacacaagcggtggaggatgtggcttaattcgaggctacgcgaagaaccttacctaggcttaacatgtttgggaacgtctgtgaaagcaggaagtgcctttcggggaacccttacgtaggtgctgcatggctgtcgtcagctcgtgtcgtgagatgtcgggttaagtcccttaacgagcgaaacccttatcactagttgccagcgagtaatgtcggggactctagtgagactgccggtgttaaaccggaggaaggtggggatgacgtcaagtcctcatggcctttatgcctagggctgcacacgtcctacaatgcactatacaaagcgttgcgaactcgcgagagtaagctaaccgcataaagtagtgcccagttcggatagcaggctgaaattcgcctgcttgaagccggaatcgctagtaatcgcgggtcagcataccgcggtgaatgtgttcctgagccttgtacacaccgcccgtcaagccacgaaagttgggggggcccgaagtcgcgattctaactgcttgcagaagatagcgccgaaggtcaactcgatgattgggact

SEQ ID NO: 1942 - DNA, 1391 bp, unidentified
  source 1..1391: mol_type = unassigned DNA; note = Marinicauda algicola
aacgaacgctggcggcaggcttaacacatgcaagtcgaacgcacccttcggggtgagtggcagacgggtgagtaacgcgtgggaacgtgccctttggttcggaatagccccgggaaactgggagtaataccgaataagccctacgggggaaagatttatcgccgaaggatcggcccgcgtcagattagctagttggtagggtaatggcctaccaaggcgacgatctgtagctggtttgagaggatgatcagccacactgggactgagacacggcccagactcctacgggaggcagcagtggggaatcttggacaatgggggcaaccctgatccagccatgccgcgtgaatgatgaaggccctagggttgtaaaattctttcagcggggaagataatgacggtacccgcagaagaagccccggctaactccgtgccagcagccgcggtaatacggagggggctagcgttgttcggaattactgggcgtaaagcgcgcgtaggcggaccagccagtcagaggtgaaagcccagggctcaaccctggaattgcctttgatactgttggtctggagtccgggagaggtgtgtggaattccgagtgtagaggtgaaattcgtagatattcggaggaacaccagaggcgaaggcggcacactggaccggtactgacgctgaggcgcgaaagcgtggggagcaaacaggattagataccctggtagtccacgccgtaaacgatggatgctagttgtcaggcagcatgctgtttggtgacgcagctaacgcattaagcatcccgcctggggagtacggccgcaaggttaaaactcaaagaaattgacgggggcccgcacaagcggtggagcatgtggtttaattcgaagcaacgcgaagaaccttaccagcccttgacatcccggtcgcggtttggggagacccattccttcagttcggctggaccggtgacaggtgctgcatggctgtcgtcagctcgtgtcgtgagatgttgggttaagtcccgcaacgagcgcaaccctcgccgttagttgccagcaggtttggctgggcactctaacgggactgccggtgtcaaaccggaggaaggtggggatgacgtcaagtcatcatggcccttacgggctgggctacacacgtgctacaatggcggtgacagagggataatccctaaaaaccgtctcagttcggattgtcttctgcaactcgaaggcatgaagttggaatcgctagtaatcgcggatcagcatgccgcggtgaatacgttcccgggccttgtacacaccgcccgtcacaccatgggagttggttctacccgacgacggtgcgctaacccgcaagggaggcagccggccacggtaggatcagcgactggggtg

SEQ ID NO: 1943 - DNA, 1389 bp, unidentified
  source 1..1389: mol_type = unassigned DNA; note = Marinicauda pacifica
aacgaacgctggcggcaggcttaacacatgcaagtcgaacgcacccttcggggtgagtggcagacgggtgagtaacgcgtgggaacgtaccctttggttcggaatagcccttggaaacgaggagtaataccgaatgagccctacgggggaaagatttatcgccgaaggatcggcccgcgttagattagctagttggtgaggtaatggctcaccaaggcgacgatctatagctggtttgagaggatgatcagccacactgggactgagacacggcccagactcctacgggaggcagcagtggggaatcttggacaatgggggaaaccctgatccagccatgccgcgtgaatgatgaaggccttagggttgtaaaattctttcagtggggaagataatgacggtacccacagaagaagccccggctaactccgtgccagcagccgcggtaatacggagggggctagcgttgttcggaattactgggcgtaaagcgcgcgtaggcggactagccagtcagaggtgaaagcccagggctcaaccctggaactgcctttgatactgttagtctggagtccgggagaggtgtgtggaattccgagtgtagaggtgaaattcgtagatattcggaggaacaccagaggcgaaggcggcacactggaccggtactgacgctgaggcgcgaaagcgtggggagcaaacaggattagataccctggtagtccacgccgtaaacgatggatgctagttgtctggcagcatgctgttaggtgacgcagctaacgcattaagcatcccgcctggggagtacggccgcaaggttaaaactcaaagaaattgacgggggcccgcacaagcggtggagcatgtggtttaattcgaagcaacgcgaagaaccttaccagctcttgacatcctgatcgcggtttggggagacccattccttcagttcggctggatcagtgacaggtgctgcatggctgtcgtcagctcgtgtcgtgagatgttgggttaagtcccgcaacgagcgcaaccctcgccgttagttgccatcaggtttggctgggcactctaacgggactgccggtgtcaaaccggaggaaggtgaggatgacgtcaagtcatcatggcccttacgagctgggctacacacgtgctacaatggcggtgacagagggataatccctaaaaaccgtctcagttcggattgtcttctgcaactcgaaggcatgaagttggaatcgctagtaatcgcggatcagcatgccgcggtgaatacgttcccgggccttgtacacaccgcccgtcacaccatgggagttggttctacccgacgacgctgcgctaaccttcgggaggcaggcggccacggtaggatcagcgactggggtg

SEQ ID NO: 1944 - DNA, 1467 bp, Marinicella litoralis
  source 1..1467: mol_type = unassigned DNA
attgaacgctggcggtatgcctaacacatgcaagtcgaacggtaacagaggaaagcttgctttcttgctgacgagtggcggacgggtgagtaacgcgtgggaatctacccagtagttggggatagcccggagaaatccggattaataccgaataatgtctacggacgaaaaggtgcctcttcttgaaagcacttgctattggatgagcccgcgttagattagtttgttggtggggtaacggcctaccaagactacgatctatagctggtttgagaggatgatcagccacattgggactgagacacggcccagactcctacgggaggcagcagtggggaatattggacaatgggcgcaagcctgatccagcaataccgcgtgtgtgaagaaggccttagggttgtaaagcacttttatgtaggaagaaggtttgtttgttaatagcagatgaatttgacggtactacaagaataagcaccggctaactccgtgccagcagccgcggtaatacggagggtgcgagcgttaatcggaattactgggcgtaaagggtacgtaggcggcttgataagtcagatgtgaaatccccgggcttaacctgggaactgcatttgaaactgtctggctagagtgagtgagaggttagtggaattcaaggcgtagcggtgaaatgcgtagaggtcttgaggaacatcagtggcgaaggcgactaactggcactacactgacgctgaggtacgaaagcgtggggagcgaacaggattagataccctggtagtccacgccctaaacgatgaggactggctgttggcgctatagacgcgtcggtagcgaagctaacgcgttaagttctccgcctggggagtacgaccgcaaggttgaaactcaaaggaattgacgggggcccgcacaagcggtggagcatgtggtttaattcgatgcaacgcgaagaaccttaccatcccttgacatcctcagaacggtctgtaatggacccgtgccttcgggaactgagtgacaggtgctgcacggctgtcgtcagctcgtgtcgtgagatgttgggttaagtcccgcaacgagcgcaacccctatctatagttgccagcacgtaatggtgggaactctatagagactgccggtgataagccggaggaaggtggggacgacgtcaagtcatcatggcccttacgggatgggctacacacgtgctacaatggtgcatacagagggttgccaagccgcgaggtggagctaatcccagaaagtgcatcttagtccggattgcagtctgcaactcgactgcatgaagtcggaatcgctagtaatcgcgaatcagcaatgtcgcggtgaatacgttcccgggccttgtacacaccgcccgtcacaccatgggagtgggttgctccagaagtggctagtctaaccttcgggaagacggtcaccacggagtgattcatgactggggtg

SEQ ID NO: 1945 - DNA, 1446 bp, Marinilabilia salmonicolor
  source 1..1446: mol_type = unassigned DNA
gatgaacgctagcgacaggcctaacacatgcaagtcgaggggtaacattagtagcttgctactagatgacgaccggcgcacgggtgagtaacgcgtatgcaaccttcctttaacaggagaatagcccccggaaacggggattaatgctccattgtactctaagttcgcatggattaagagttaaagttccgacggttaaagatgggcatgcgtgacattagccagttggcggggtaacggcccaccaaagcaacgatgtctaggggttctgagaggaaggtcccccacactggtactgagacacggaccagactcctacgggaggcagcagtgaggaatattggtcaatggacgcaagtctgaaccagccatgtcgcgtgcaggatgactgccctatgggttgtaaactgcttttgtacgggaagaaatatagctacgagtagttatttgccggtaccgtacgaataagcatcggctaactccgtgccagcagccgcggtaatacggaggatgcgagcgttatccggatttattgggtttaaagggtgcgtaggcggaatggtaagtcagtggtgaaatcctgcagctcaactgtagttgtgccattgatactgtcattcttgagtacagatgaggtaggcggaatgagtagtgtagcggtgaaatgcatagatattactcagaacaccaattgcgaaggcagcttactaaactgacactgacgctgaagcacgaaagcgtgggtatcaaacaggattagataccctggtagtccacgccgtaaacgatgattactggttgtttgcgatacacagcaagcgactgagcgaaagcattaagtaatccacctggggagtacgtcggcaacgatgaaactcaaaggaattgacgggggcccgcacaagcggtggaacatgtggtttaattcgatgatacgcgaggaaccttacctgggtttaaatgggaagtgacaggggtagaaatacctttttcttcggacacttttcaaggtgctgcatggttgtcgtcagctcgtgccgtgaggtgtcgggttaagtcccataacgagcgcaacccctgttgttagttaccagcacataatggtggggactctaacaagactgccggtgtaaaccgcgaggaaggtggggatgacgtcaaatcagcacggcccttacatccagggctacacacgtgttacaatggcaggtacaaagggcagctacacagcgatgtgatgctaatctcgaaaacctgtcccagttcggattgaagtctgcaacccgacttcatgaagctggaatcgctagtaatcgcgcatcagccatggcgcggtgaatacgttcccgggccttgtacacaccgcccgtcaagccatggaagccgggagtacctgaagtatgtaaccgcaaggagcgtcctagggtaaaactggtgactggggct

SEQ ID NO: 1946 - DNA, 1453 bp, Marinimicrobium koreense
  source 1..1453: mol_type = unassigned DNA
attgaacgctggcggcaggcctaacacatgcaagtcgagcgagaaagcccttcggggtgagtacagcggcggacgggtgagtaacgcgtgggaatctgcccagtagtgggggacaacagccggaaacggctgctaataccgcatacgccctacgggggaaagcaggggatcttcggaccttgtgctattggatgagcccgcgtcagattagcttgttggtggggtaatggcctaccaaggcgacgatctgtagctggtctgagaggatgatcagccacatcgggactgagacacggcccgaactcctacgggaggcagcagtggggaatattggacaatgggggcaaccctgatccagccatgccgcgtgtgtgaagaaggccttcgggttgtaaagcactttcagcgaggaggaaagcctgatggctaatacccatcgggggtgacgttactcgcagaagaagcaccggctaactccgtgccagcagccgcggtaatacggagggtgcaagcgttaatcggaattactgggcgtaaagcgcacgtaggcggcgagttaagctagctgtgaaagccccgggctcaacctgggaactgcagttagaactggctagctagagtacggtagaggagtgtggaatttcctgtgtagcggtgaaatgcgtagatataggaaggaacatcagtggcgaaggcgacactctggactgatactgacgctgaggcgcgaaagcgtggggagcaacaggattagataccctggtagtccacgccgtaaacgatgtctactagccgttgggagccttgagctcttagtggcgcagctaacgcactaagtagaccgcctggggagtacggccgcaaggttaaaactcaaatgaattgacgggggcccgcacaagcggtggagcatgtggtttaattcgacgcaacgcgaagaaccttaccaggccttgacatccttggaacttagcagagatgctttggtgccttcgggagccaagtgacaggtgctgcatggctgtcgtcagctcgtgtcgtgagatgttgggttaagtcccgtaacgagcgcaacccttgtccttagttgccagcacgtaatggtgggaactctaaggagactgccggtgacaaaccggaggaaggtggggacgacgtcaagtcatcatggcccttacggcctgggctacacacgtgctacaatgggcggtacaaagggttgccaatccgcgaggtggagctaatcccgaaaaaccgttcgtagtccggattggagtctgcaactcgactccatgaagtcggaatcgctagtaatcgtgaatcagaatgtcacggtgaatacgttcccgggccttgtacacaccgcccgtcacaccatgggagtgggttgcaccagaagtggctagtctaacctcggaggacggtcaccacggtgtgattcatgactggggtg

SEQ ID NO: 1947 - DNA, 1471 bp, unidentified
  source 1..1471: mol_type = unassigned DNA; note = Marininema halotolerans
gacgaacgctggcggcgtgcctaatacatgcaagtcgagcgaacggaggagagcttgctctccaaagttagcggcggacgggtgagtaacacgtgggcgacctgcccgtaagactgggataaccccgggaaaccggagctaataccagataggattttgggttgcatgacctgaaatggaaaggcggcttcggctgtcacttacggatgggcccgcggcgcattagctagttggtagggtaacggcctaccaaggcgacgatgcgtagccgacctgagagggtgaccggccacactgggactgagacacggcccagactcctacgggaggcagcagtagggaattttcgtcaatgggcgcaagcctgaacgagcaacgccgcgtgagtgaggacggctttcgggttgtaaagctctgttctctgggaagaacggcagaagggataataccccttttgtatgacggtaccagagaagaaagccccggctaactacgtgccagcagccgcggtaatacgtagggggcaagcgttgtccggaattattgggcgtaaagcgcgcgcaggcggcctgttaagtcggatgtgaaaggctacggctcaaccgtagaggtgcatccgaaactggcgggcttgagtgcaggagaggaaagtggaattcccggtgtagcggtggaatgcgtagatatcgggaggaacaccagtggcgaaggcggctttctggcctgtaactgacgctgaggcgcgaaagcgtggggagcaaacaggattagataccctggtagtccacgccgtaaacgatgagtgctaggtgttgggggtttcacgccctctgtgccgaaggtaacccaataagcactccgcctggggagtacggccgcaaggctgaaactcaaaggaattgacgggggcccgcacaagcggtggagcatgtggtttaattcgaagcaacgcgaagaaccttaccaaggcttgacatcccattgaaatctctagagatagaggccctcttcggagcaatggtgacaggtggtgcatggttgtcgtcagctcgtgtcgtgagatgttgggttcagtcccgcaacgagcgcaacccttatcgttagttgccagcatttagttgggcactctagcgagacagccggtgaaagccggaggaaggtggggatgacgtcaaatcatcatgccccttatgtcttgggctacacacgtgctacaatggttgggtacaacgggtagcgaagccgcgaggtggagccaatcccataaaaccaatctcagttcggatcgtaggctgcaactcgcctacgtgaagctggaatcgctagtaatcgcggatcagcatgccgcggtgaatacgttcccgggccttgtacacaccgcccgtcacaccacgagagtttgcaacacccgaagtcggtgagggaaccctttggggcccagccgccgaaggtggggcagatgattggggtg

SEQ ID NO: 1948 - DNA, 1470 bp, Marininema mesophilum
  source 1..1470: mol_type = unassigned DNA
gacgaacgctggcggcgtgcctaatacatgcaagtcgagcgaacggaggagagcttgctctccgaagttagcggcggacgggtgagtaacacgtgggcaacctgcccgtaagaccgggataacttcgggaaaccgaagctaataccggataggattttaggtcacatgacctaaaatggaaaggcggcttcggctgtcacttacggatgggcccgcggcgcattagctagttggtagggtaacggcttaccaaggcgacgatgcgtagccgacctgagagggtgaccggccacactgggactgagacacggcccagactcctacgggaggcagcagtagggaattttcgtcaatgggcgcaagcctgaacgagcaacgccgcgtgagtgaggacggctttcgggttgtaaagctctgttctctgggaagaacggcaggagggagaataccccttttgagtgacggtaccagagaagaaagccccggctaactacgtgccagcagccgcggtaatacgtagggggcaagcgttgtccggaattattgggcgtaaagcgcgcgcaggcggcctgttaagtcggatgtgaaaggctacggctcaaccgtagaggtgcatccgaaactggcgggcttgagtgcaggagaggaaagtggaattcccggtgtagcggtggaatgcgtagatatcgggaggaacaccagtggcgaaggcggctttctggcctgtaactgacgctgaggcgcgaaagcgtggggagcaaacaggattagataccctggtagtccacgccgtaaacgatgagtgctaggtgttgggggtttcacgccctctgtgccgaaggtaacccaataagcactccgcctggggagtacggccgcaaggctgaaactcaaaggaattgacgggggcccgcacaagcggtggagcatgtggtttaattcgaagcaacgcgaagaaccttaccaaggcttgacatcccattgcaacctctagagatagaggccctcttcggagcaatggtgacaggtggtgcatggttgtcgtcagctcgtgtcgtgagatgttgggttcagtcccgcaacgagcgcaacccttatcgttagttgccagcattgagttgggcactctagcgagacagccggtgaaagccggaggaaggtggggatgacgtcaaatcatcatgccccttatgtcttgggctacacacgtgctacaatggttggtacaacgggtagcgaagccgcgaggtgaagccaatcccaaaaaaccaatctcagttcggatcgtaggctgcaactcgcctgcgtgaagctggaatcgctagtaatcgcggatcagcatgccgcggtgaatacgttcccgggccttgtacacaccgcccgtcacaccacgagagtttgcaacacccgaagtcggtgagggaaccctttgggacccagccgccgaaggtggggcagatgattggggtg

SEQ ID NO: 1949 - DNA, 1435 bp, unidentified
  source 1..1435: mol_type = unassigned DNA; note = Marinisporobacter balticus
gatgaacgctggcggcgtgcctaacacatgcaagtcgagcgaagttgttttaaagcttgctttaaaacaacttagcggcggacgggtgagtaacgcgtgggcaacctgccctatacagagggatagcctcgggaaaccgggattaatacctcataaaactctaacatcgcatgatgtgtgagtcaaagatttatcagtataggatgggcccgcgtctgattagctagttggtaaggtaatggcttaccaaggcgacgatcagtagccgacctgagagggtgatcggccacactggaactgagacacggtccagactcctacgggaggcagcagtggggaatattgcacaatgggcgaaagcctgatgcagcaacgccgcgtgagcgatgaaggccttcgggtcgtaaagctctgtcctaagggaagaataatgacggtaccttaggaggaagccccggctaactacgtgccagcagccgcggtaatacgtagggggcgagcgttatccggaatcattgggcgtaaagggtgcgtaggcggttatgcaagttaggggtgaaaggctacggctcaaccgtagtaagcctttaaaactgcataacttgagtgcaggagaggagagtggaattcctagtgtagcggtgaaatgcgtagatattaggaggaacaccagtggcgaaggcgactctctggactgtaactgacgctgaggcacgaaagcgtggggagcgaacaggattagataccctggtagtccacgccgtaaacgatgagtgctaggtgtcgggggtcgaacctcggtgccgcagctaacgcattaagcactccgcctggggagtacgatcgcaagattgaaactcaaaggaattgacggggacccgcacaagcagcggagcatgtggtttaattcgaagcaacgcgaagaaccttaccaaaacttgacatcctctgcattactcttaatcgaggaaatcccttcggggacagagagacaggtggtgcatggttgtcgtcagctcgtgtcgtgagatgttgggttaagtcccgcaacgagcgcaacccttgtctttagttgccagcacataatggtgggcactctagagagactgccggggataactcggaggaaggtggggatgacgtcaaatcatcatgccccttatgttttgggctacacacgtgctacaatggctggtacaacgggaagcgaaggagtaatccggagcaaatcttaaaagccagtctcagttcggattgtgggctgaaactcgcccacatgaagctggagttgctagtaatcgtgaatcagaatgtcgcggtgaatgcgttcccgggtcttgtacacaccgcccgtcacaccatggaagttgggggcacccgaagtcggctatctaaccgyaaggaggaagctgccgaaggtgaaatcaatgactgg

SEQ ID NO: 1950 - DNA, 1451 bp, Marinithermus hydrothermalis
  source 1..1451: mol_type = unassigned DNA
ggtgaacgctggcggcgtgcctaagacatgcaagtcgagcggggggtctttggctttttgctgggggctcctagcggcggacgggtgagtaacgcgtaggtgacctacccggaagtgggggacaacccggggaaactcgggctaatcccgcatgtggacgcgtcctgtggggcgtgtctaaaggcgcgagccgcttccggatgggcctgcgtcccatcagctggttggtgaggtaagggctcaccaaggcgacgacgggtagccggtctgagaggatggccggccacaggggcactgagacacgggccccactcctacgggaggcagcagttaggaatcttccgcaatgggcgaaagcctgacggagcgacgccgcttgcgggaggaagcccttcggggtgtaaaccgctgaacccgggacgaaagcccctgtttggggggatgacggtaccggggtaatagcaccggccaactccgtgccagcagccgcggtaatacggagggtgcgagcgttacccggatttactgggcgtaaagggcgcgtaggcggcctcttaagtccggtgtgaaagaccacggctcaaccgtgggggcgcgccggatactggggggcttgacggccggagggggcagcggaattcccggagtagcggtgaaatgcgtagataccgggaggaacgccgatagcgaaggcagctgcctggacggtttgtgacgctgaggcgcgaaagcgtggggagcgaacgggattagataccccggtagtccacgccgtaaacgatgcgcgctgggtgtccggcttgggctgggcgccgaagctaacgcgttaagcgcgccgcctggggagtacggccgcaaggctgaaactcaaaggaattgacggggacccgcacaagcggtggagcatgtggtttaattcgaagcaacgcgaagaaccttaccaggccttgacatgcccgggaccctggtgaaagccgggggtgccccgtttggggagccgggacacaggtgctgcatggccgtcgtcagctcgtgtcgtgagatgttgggttaagtcccgcaacgagcgcaacccctgtccccagttgccagcggttgggccgggcactctggggagactgcccgcgaaagcgggaggaaggcggggacgacgtctggtcagcatggcccttacggcctgggcgacacacgtgctacaatggccgggacagcgcgttgcgaccccgcgaggggaagccaatcgctcaaacccggtcccagttcggattggagtctgcaactcgactccatgaaggcggaatcgctagtaatcgcggatcagccatgccgcggtgaatacgttcccgggtcttgtacacaccgcccgtcacgccatgggagtgggctgcacctgaagtcgccgggagcccgttaacgggcaggcgccgagggtggggctcacgactggggcg

SEQ ID NO: 1951 - DNA, 1462 bp, Marinobacter adhaerens
  source 1..1462: mol_type = unassigned DNA
attgaacgctggcggcaggcttaacacatgcaagtcgagcggtaacagggggtgcttgcaccccgctgacgagcggcggacgggtgagtaatgcataggaaactgcccagtagtgggggatagcccggggaaacccggattaataccgcgtacgcccttcgggggaaagcaggggatcttcggaccttgcgctattggatgtgcctatgtcggattagctagttggtggggtaaaggcctaccaaggcgacgatccgtagctggtctgagaggatgatcagccacatcgggactgagacacggcccgaactcctacgggaggcagcagtggggaatattggacaatgggggcaaccctgatccagccatgccgcgtgtgtgaagaaggctttcgggttgtaaagcactttcagtgaggaggaaaactctgcgactaatactcgtagggcttgacgttactcacagaagaagcaccggctaactccgtgccagcagccgcggtaatacggagggtgcaagcgttaatcggaattactgggcgtaaagcgcgcgtaggtggtttgataagcgagatgtgaaagccccgggcttaacctgggaacggcatttcgaactgtcaggctagagtatggtagagggtagtggaatttcctgtgtagcggtgaaatgcgtagatataggaaggaacaccagtggcgaaggcggctacctggaccaatactgacactgaggtgcgaaagcgtggggagcaaacaggattagataccctggtagtccacgccgtaaacgatgtctactagccgttgggactcttgaagtcttagtggcgcagctaacgcactaagtagaccgcctggggagtacggccgcaaggttaaaactcaaatgaattgacgggggcccgcacaagcggtggagcatgtggtttaattcgacgcaacgcgaagaaccttacctggccttgacatgcagagaactttccagagatggattggtgccttcgggaactctgacacaggtgctgcatggccgtcgtcagctcgtgtcgtgagatgttgggttaagtcccgtaacgagcgcaacccctatccctagttgctagcagttcggctgagaactctagggagactgccggtgacaaaccggaggaaggtggggatgacgtcaggtcatcatggcccttacggccagggctacacacgtgctacaatggtgcgcacagagggctgcaaacccgcgagggggagccaatctcacaaaacgcatcgtagtccggatcgcagtctgcaactcgactgcgtgaagtcggaatcgctagtaatcgtgaatcagaatgtcacggtgaatacgttcccgggccttgtacacaccgcccgtcacaccatgggagtggattgcaccagaagtggttagtctaaccttcgggaggacgatcaccacggtgtggttcatgactggggtg

SEQ ID NO: 1952 - DNA, 1462 bp, Marinobacter algicola
  source 1..1462: mol_type = unassigned DNA
attgaacgctggcggcaggcttaacacatgcaagtcgagcggtaacagggggagcttgctccccgctgacgagcggcggacgggtgagtaatgcataggaaactgcccagtagtgggggatagcccggggaaacccggattaataccgcatacgccctttgggggaaagcaggggatcttcggaccttgcgctattggatgtgcctatgtcggattagctagttggtggggtaagagcctaccaaggcgacgatccgtagctggtctgagaggatgatcagccacatcgggactgagacacggcccgaactcctacgggaggcagcagtggggaatattggacaatgggggcaaccctgatccagccatgccgcgtgtgtgaagaaggctttcgggttgtaaagcactttcagtgaggaggaaaaccttacgactaatactcgtgaggcttgacgttactcacagaagaagcaccggctaactccgtgccagcagccgcggtaatacggagggtgcaagcgttaatcggaattactgggcgtaaagcgcgcgtaggtggtttgataagcgagatgtgaaagccccgggctcaacctgggaacggcatttcgaactgtcaggctagagtatggtagaggagtgtggaatttcctgtgtagcggtgaaatgcgtagatataggaaggaacaccagtggcgaaggcggcactctggaccaatactgacactgaggtgcgaaagcgtggggagcaaacaggattagataccctggtagtccacgctgtaaacgatgtctactagccgttgggactcttgaagtcttagtggcgcagctaacgcactaagtagaccgcctggggagtacggccgcaaggttaaaactcaaatgaattgacgggggcccgcacaagcggtggagcatgtggtttaattcgacgcaacgcgaagaaccttacctggccttgacatgcagagaactttccagagatggattggtgccttcgggaactctgacacaggtgctgcatggccgtcgtcagctcgtgtcgtgagatgttgggttaagtcccgtaacgagcgcaacccctatccctagttgctagcagttcggctgagaactctagggagactgccggtgacaaaccggaggaaggtggggatgacgtcaggtcatcatggcccttacggccagggctacacacgtgctacaatggtgcgtacagagggctgcaaacccgcgagggggagctaatctcacaaaacgcatcgtagtccggatcggagtctgcaactcgactccgtgaagtcggaatcgctagtaatcgcgaatcagaatgtcgcggtgaatacgttcccgggccttgtacacaccgcccgtcacaccatgggagtggattgcaccagaagtggttagtctaaccttcgggaggacgatcaccacggtgtggttcatgactggggtg

SEQ ID NO: 1953 - DNA, 1464 bp, unidentified
  source 1..1464: mol_type = unassigned DNA; note = Marinobacter antarcticus
attgaacgctggcggcaggcttaacacatgcaagtcgagcggaaacgatggtagcttgctaccaggcgtcgagcggcggacgggtgagtaatgcttaggaatctgcccagtagtgggggatagcccggggaaactcggattaataccgcatacgcccttttggggaaagcaggggatcttcggaccttgcgctattggatgagcctaagtcggattagcttgttggtgaggtaaaggctcaccaaggcaacgatccgtagctggtctgagaggatgatcagccacatcgggactgagacacggcccgaactcctacgggaggcagcagtggggaatattggacaatgggggcaaccctgatccagccatgccgcgtgtgtgaagaaggctttcgggttgtaaagcactttcagtgaggaggaaggctttcagactaatactctggaggattgacgtcactcacagaagaagcaccggctaactccgtgccagcagccgcggtaatacggagggtgcaagcgttaatcggaattactgggcgtaaagcgcgcgtaggtggttgagtaagcgagatgtgaaagccccgggcttaacctgggaacggcacttcgaactgctcggctagagtgtggtagagggtagtggaatttcctgtgtagcggtgaaatgcgtagatataggaaggaacaccagtggcgaaggcggctacctggaccaacactgacactgaggtgcgaaagcgtggggagcaaacaggattagataccctggtagtccacgccgtaaacgatgtcaactagccgttggggatcttgaatccttagtggcgcagctaacgcactaaagttgaccgcctggggagtacggccgcaaggttaaaactcaaatgaattgacgggggcccgcacaagcggtggagcatgtggtttaattcgacgcaacgcgaagaaccttacctggccttgacatgcagagaactttccagagatggattggtgccttcgggaactctgacacaggtgctgcatggccgtcgtcagctcgtgtcgtgagatgttgggttaagtcccgtaacgagcgcaacccctatccctagttgctagcaggtaatgctgagaactctagggagactgccggtgacaaaccggaggaaggtggggatgacgtcaggtcatcatggcccttacggccagggctacacacgtgctacaatggcgcgcacagagggctgcaaacccgcgagggggagctaatctcacaaaacgcgtcgtagtccggatcggagtctgcaactcgactccgtgaagtcggaatcgctagtaatcgtgaatcagaatgtcacggtgaatacgttcccgggccttgtacacaccgcccgtcacaccatgggagtggattgcaccagaagtagttagtctaaccttcgggaggacgattaccacggtgtggttcatgactggggtg

SEQ ID NO: 1954 - DNA, 1458 bp, unidentified
  source 1..1458: mol_type = unassigned DNA; note = Marinobacter confluentis
attgaacgctggcggcaggcttaacacatgcaagtcgagcggtagcaggtccttcgggatgctgacgagcggcggacgggtgagtaatgcataggaaactgcccagtagtgggggatagcccggggaaacccggattaataccgcgtacgccctaagggggaaagcaggggatcttcggaccttgcgctattggatgtgcctatgtcggattagctagttggtggggtaagagcctaccaaggcgacgatccgtagctggtctgagaggatgatcagccacatcgggactgagacacggcccgaactcctacgggaggcagcagtggggaatattggacaatgggggcaaccctgatccagccatgccgcgtgtgtgaagaaggctttcgggttgtaaagcactttcagtgaggaggaaaaccgtacgattaatactcgtatggcttgacgttactcacagaagaagcaccggctaactccgtgccagcagccgcggtaatacggagggtgcaagcgttaatcggaattactgggcgtaaagcgcgcgtaggtggtttgataagcgagatgtgaaagccccgggcttaacctgggaacggcatttcgaactgtcaggctagagtatggtagaggagtgtggaatttcctgtgtagcggtgaaatgcgtagatataggaaggaacaccagtggcgaaggcggcactctggaccaatactgacactgaggtgcgaaagcgtggggagcaaacaggattagataccctggtagtccacgctgtaaacgatgtctactagccgttgggactcttgaagtcttagtggcgcagctaacgcactaagtagaccgcctggggagtacggccgcaaggttaaaactcaaatgaattgacgggggcccgcacaagcggtggagcatgtggtttaattcgacgcaacgcgaagaaccttacctggccttgacatgctgagaactttccagagatggattggtgccttcgggagctcagacacaggtgctgcatggccgtcgtcagctcgtgtcgtgagatgttgggttaagtcccgtaacgagcgcaacccctatccctagttgctagcagttcggctgagaactctagggagactgccggtgacaaaccggaggaaggtggggatgacgtcaggtcatcatggcccttacggccagggctacacacgtgctacaatggcgcgcacagagggctgcaaacccgcgagggggagccaatctcacaaaacgcgtcgtagtccggatcggagtctgcaactcgactccgtgaagtcggaatcgctagtaatcgtgaatcagaatgtcacggtgaatacgttcccgggccttgtacacaccgcccgtcacaccatgggagtggattgcaccagaagtggttagtctaaccttcgggaggacgatcaccacggtgtggttcatgactggggtg

SEQ ID NO: 1955 - DNA, 1459 bp, Marinobacter daqiaonensis
  source 1..1459: mol_type = unassigned DNA
attgaacgctggcggcaggcctaacacatgcaagtcgagcggtaacaggtccttcgggatgctgacgagcggcggacgggtgagtaatgcataggaatttgcccagtagtgggggatagcccggggaaacccggattaataccgcatacgccctttgggggaaagcaggggatcttcggaccttgcgctattggatgagcctatgtcggattagctagttggtggggtaaaggcctaccaaggcgacgatccgtagctggtctgagaggatgatcagccacatcgggactgagacacggcccgaactcctacgggaggcagcagtggggaatattggacaatgggggcaaccctgatccagccatgccgcgtgtgtgaagaaggctttcgggttgtaaagcactttcagcgaggaggaaggccttcggcttaatacgccggaggattgacgttactcgcagaagaagcaccggctaactccgtgccagcagccgcggtaatacggagggtgcaagcgttaatcggatttactgggcgtaaagcgcgcgtaggtggtttgataagcgagatgtgaaagccccgggcttaacctgggaacggcatttcgaactgtcaggctagagtgtggtagagggtagtggaatttcctgtgtagcggtgaaatgcgtagatataggaaggaacaccagtggcgaaggcggctacctggaccaacactgacactgaggtgcgaaagcgtggggagcaaacaggattagataccctggtagtccacgccgtaaacgatgtctactagccgttggggctcttgaagctttagtggcgcagttaacgcactaagtagaccgcctggggagtacggccgcaaggttaaaactcaaatgaattgacgggggcccgcacaagcggtggagcatgtggtttaattcgacgcaacgcgaagaaccttacctggccttgacatgttgggaatccctcagagatgagggagtgccttcgggagcccaaacacaggtgctgcatggccgtcgtcagctcgtgtcgtgagatgttgggttaagtcccgtaacgagcgcaacccttatccctagttgccagcacatcatggtgggaactctagggagactgccggtgacaaaccggaggaaggtggggatgacgtcaggtcatcatggcccttacggccagggctacacacgtgctacaatggcgcgcacagagggctgcaaacccgcgagggggagccaatctcacaaaacgcgtcgtagtccggatcgcagtctgcaactcgactgcgtgaagtcggaatcgctagtaatcgtgaatcagaatgtcacggtgaatacgttcccgggccttgtacacaccgcccgtcacaccatgggagtggattgcaccagaagtggttagtctaaccttcgggaggacgatcaccacggtgtggttcatgactggggtg

SEQ ID NO: 1956 - DNA, 1463 bp, Marinobacter excellens
  source 1..1463: mol_type = unassigned DNA
attgaacgctggcggcaggcttaacacatgcaagtcgagcggtaacagatctagcttgctagatgctgacgagcggcggacgggtgagtaatgcttaggaatctgcccagtagtgggggacaacaatcggaaacggttgctaataccgcatacgccctacgggggaaagcaggggatcttcggaccttgcgctattggatgagcctaagtcggattagctagttggtagggtaaaggcctaccaaggcgacgatccgtagctggtctgagaggatgatcagccacatcgggactgagacacggcccgaactcctacgggaggcagcagtggggaatattggacaatgggggcaaccctgatccagccatgccgcgtgtgtgaagaaggctttcgggttgtaaagcactttcagcgaggaggaaggctctaaagttaatacctttagggattgacgttactcgcagaagaagcaccggctaactccgtgccagcagccgcggtaatacggagggtgcaagcgttaatcggaattactgggcgtaaagcgcgcgtaggtggttaggtaagcgagatgtgaaagccccgggcttaacctgggaacggcatttcgaactgtctgactagagtgtggtagagggtagtggaatttcctgtgtagcggtgaaatgcgtagatataggaaggaacaccagtggcgaaggcggctacctggaccaacactgacactgaggtgcgaaagcgtggggagcaaacaggattagataccctggtagtccacgccgtaaacgatgtctactagccgttgggactcttgaagtcttagtggcgcagctaacgcactaagtagaccgcctggggagtacggccgcaaggttaaaactcaaatgaattgacgggggcccgcacaagcggtggagcatgtggtttaattcgacgcaacgcgaagaaccttacctggccttgacatccagagaactttccagagatggattggtgccttcgggaactctgagacaggtgctgcatggccgtcgtcagctcgtgtcgtgagatgttgggttaagtcccgtaacgagcgcaacccctatccctggttgctaacaggtaatgctgagaactccagggagactgccggtgacaaaccggaggaaggtggggatgacgtcaggtcatcatggcccttacggccagggctacacacgtgctacaatggcgcgtacagagggctgccaactcgcgagagtgagccaatcccttaaaacgcgtcgtagtccggatcgcagtctgcaactcgactgcgtgaagtcggaatcgctagtaatcgcgaatcagaatgtcgcggtgaatacgttcccgggccttgtacacaccgcccgtcacaccatgggagtggattgcaccagaagtagttagtctaaccttcgggaggacgattaccacggtgtggttcatgactggggtg

SEQ ID NO: 1957 - DNA, 1462 bp, Marinobacter flavimaris
  source 1..1462: mol_type = unassigned DNA
attgaacgctggcggcaggcttaacacatgcaagtcgagcggtaacagatctagcttgctagatgctgacgagcggcggacgggtgagtaatgcataggaaactgcccagtagtgggggatagcccggggaaacccggattaataccgcgtacgcccttcgggggaaagcaggggatcttcggaccttgcgctattggatgtgcctatgtcggattagctagttggtggggtaaaggcctaccaaggcgacgatccgtagctggtctgagaggatgatcagccacatcgggactgagacacggcccgaactcctacgggaggcagcagtggggaatattggacaatgggggcaaccctgatccagccatgccgcgtgtgtgaagaaggctttcgggttgtaaagcactttcagtgaggaggaaaactctgcgactaatactcgtagggcttgacgttactcacagaagaagcaccggctaactccgtgccagcagccgcggtaatacggagggtgcaagcgttaatcggaattactgggcgtaaagcgcgcgtaggtggtttgataagcgagatgtgaaagccccgggcttaacctgggaacggcatttcgaactgtcaggctagagtatggtagagggtagtggaatttcctgtgtagcggtgaaatgcgtagatataggaaggaacaccagtggcgaaggcggctacctggaccaatactgacactgaggtgcgaaagcgtggggagcaaacaggattagataccctggtagtccacgccgtaaacgatgtctactagccgttgggactcttgaagtcttagtggcgcagctaacgcactaagtagaccgcctggggagtacggccgcaaggttaaaactcaaatgaattgacgggggcccgcacaagcggtggagcatgtggtttaattcgacgcaacgcgaagaaccttacctggccttgacatgcagagaactttccagagatggattggtgccttcgggaactctgacacaggtgctgcatggccgtcgtcagctcgtgtcgtgagatgttgggttaagtcccgtaacgagcgcaacccctatccctagttgctagcagttcggctgagaactctagggagactgccggtgacaaaccggaggaaggtggggatgacgtcaggtcatcatggcccttacggccagggctacacacgtgctacaatggtgcgcacagagggctgcaaacccgcgagggggagccaatctcacaaaacgcatcgtagtccggatcgcagtctgcaactcgactgcgtgaagtcggaatcgctagtaatcgtgaatcagaatgtcacggtgaatacgttcccgggccttgtacacaccgcccgtcacaccatgggagtggattgcaccagaagtggttagtctaaccttcgggaggacgatcaccacggtgtggttcatgactggggtg

SEQ ID NO: 1958 - DNA, 1462 bp, Marinobacter gudaonensis
  source 1..1462: mol_type = unassigned DNA
attgaacgctggcggcaggcttaacacatgcaagtcgagcggtaacagggggagcttgctccctgctgacgagcggcggacgggtgagtaatgcataggaatctgcccagtagtgggggatagcccggggaaacccggattaataccgcatacgccctttgggggaaagcaggggatcttcggaccttgcgctattggatgagcctatgtcggattagctagttggtggggtaaaggcccaccaaggcgacgatccgtagctggtctgagaggatgatcagccacatcgggactgagacacggcccgaactcctacgggaggcagcagtggggaatattggacaatgggggcaaccctgatccagccatgccgcgtgtgtgaagaaggctttcgggttgtaaagcactttcagtgaggaggaaaaccttctggttaatacccaggaggcttgacgttactcacagaagaagcaccggctaactccgtgccagcagccgcggtaatacggagggtgcaagcgttaatcggaattactgggcgtaaagcgcgcgtaggtggtttgataagcgagatgtgaaagccccgggcttaacctgggaacggcatttcgaactgtcaggctagagtgtggtagagggtagtggaatttcctgtgtagcggtgaaatgcgtagatataggaaggaacaccagtggcgaaggcggctacctggaccaacactgacactgaggtgcgaaagcgtggggagcaaacaggattagataccctggtagtccacgccgtaaacgatgtcaactagccgttgggactcttgaagtcttagtggcgcagctaacgcactaagttgaccgcctggggagtacggccgcaaggttaaaactcaaatgaattgacgggggcccgcacaagcggtggagcatgtggtttaattcgacgcaacgcgaagaaccttacctggccttgacatgttgggaactttccagagatggattggtgccttcgggaacccaaacacaggtgctgcatggccgtcgtcagctcgtgtcgtgagatgttgggttaagtcccgtaacgagcgcaacccctatccctagttgctagcagttcggctgagaactctagggagactgccggtgacaaaccggaggaaggtggggatgacgtcaggtcatcatggcccttacggccagggctacacacgtgctacaatggcgcgcacagagggctgcaaacccgcgagggggagccaatctcacaaaacgcgtcgtagtccggatcgcagtctgcaactcgactgcgtgaagtcggaatcgctagtaatcgtgaatcagaatgtcacggtgaatacgttcccgggccttgtacacaccgcccgtcacaccatgggagtggattgcaccagaagtggttagtctaaccttcgggaggacgatcaccacggtgtggttcatgactggggtg

SEQ ID NO: 1959 - DNA, 1458 bp, Marinobacter guineae
  source 1..1458: mol_type = unassigned DNA
attgaacgctggcggcaggcttaacacatgcaagtcgagcggtaacaggtccttcgggatgctgacgagcggcggacgggtgagtaatgcttaggaatctgcctggtagtgggggatagcccggggaaacccggattaataccgcgtacgcccttcgggggaaagcaggggatcttcggaccttgcgctatcagatgagcctaagccggattagctagttggtagggtaaaggcctaccaaggcgacgatccgtagctggtctgagaggatgatcagccacatcgggactgagacacggcccgaactcctacgggaggcagcagtggggaatattggacaatgggggcaaccctgatccagccatgccgcgtgtgtgaagaaggctttcgggttgtaaagcactttcagtgaggaggaaggccttaaggttaatacccttgaggattgacgttactcacagaagaagcaccggctaactccgtgccagcagccgcggtaatacggagggtgcaagcgttaatcggaattactgggcgtaaagcgcgcgtaggtggtttgataagcgagatgtgaaagccccgggcttaacctgggaacggcatttcgaactgtcaggctagagtgtggtagagggtagtggaatttcctgtgtagcggtgaaatgcgtagatataggaaggaacaccagtggcgaaggcggctacctggaccaacactgacactgaggtgcgaaagcgtggggagcaaacaggattagataccctggtagtccacgccgtaaacgatgtcaactagccgttgggactcttgaagtcttagtggcgcagctaacgcactaagttgaccgcctggggagtacggccgcaaggttaaaactcaaatgaattgacgggggcccgcacaagcggtggagcatgtggtttaattcgacgcaacgcgaagaaccttacctggccttgacatgcagagaactttccagagatggattggtgccttcgggaactctgacacaggtgctgcatggccgtcgtcagctcgtgtcgtgagatgttgggttaagtcccgtaacgagcgcaacccctatccctagttgctagcagttcggctgagaactctagggagactgccggtgacaaaccggaggaaggtggggatgacgtcaggtcatcatggcccttacggccagggctacacacgtgctacaatggtgcgcacagagggctgcaaacccgcgagggggagccaatctcacaaaacgcatcgtagtccggatcgcagtctgcaactcgactgcgtgaagtcggaatcgctagtaatcgtgaatcagaatgtcacggtgaatacgttcccgggccttgtacacaccgcccgtcacaccatgggagtggattgcaccagaagtggttagtctaaccttcgggaggacgatcaccacggtgtggttcatgactggggtg

SEQ ID NO: 1960 - DNA, 1458 bp, unidentified
  source 1..1458: mol_type = unassigned DNA; note = Marinobacter halophilus
aacgctggcggcaggcttaacacatgcagtcgagcggaaacgatgggagcttgctcccaggcgtcgagcggcggacgggtgagtaatgcttaggaatctgcccagtagtgggggatagcccggggaaacccggattaataccgcatacgccctacgggggaaagcaggggatcttcggaccttgcgctattggatgagcctaagtcggattagctagttggtagggtaaaggcctaccaaggcaacgatccgtagctggtctgagaggatgatcagccacatcgggactgagacacggcccgaactcctacgggaggcagcagtggggaatattggacaatgggggcaaccctgatccagccatgccgcgtgtgtgaagaaggctttcgggttgtaaagcactttcagcgaggaggaaggctttcagactaatactctggaggattgacgttactcgcagaagaagcaccggctaactccgtgccagcagccgcggtaatacggagggtgcaagcgttaatcggaattactgggcgtaaagcgcgcgtaggtggtttgctaagcgagatgtgaaagccccgggcttaacctgggaacggcatttcgaactgtcagactagagtgtggtagagggtagtggaatttcctgtgtagcggtgaaatgcgtagatataggaaggaacaccagtggcgaaggcggctacctggaccaacactgacactgaggtgcgaaagcgtggggagcaaacaggattagataccctggtagtccacgccgtaaacgatgtcaactagccgttgggactcttgaagtcttagtggcgcagctaacgcactaagttgaccgcctggggagtacggccgcaaggttaaaactcaaatgaattgacgggggcccgcacaagcggtggagcatgtggtttaattcgacgcaacgcgaagaaccttacctggccttgacatccagagaactttccagagatggattggtgccttcgggaactctgagacaggtgctgcatggccgtcgtcagctcgtgtcgtgagatgttgggttaagtcccgtaacgagcgcaacccctatccctggttgctaacaggtaatgctgagaactccagggagactgccggtgacaaaccggaggaaggtggggatgacgtcaggtcatcatggcccttacggccagggctacacacgtgctacaatggcgtgtacagagggctgccaactcgcgagagtgagccaatcccttaaaacacgtcgtagtccggatcgcagtctgcaactcgactgcgtgaagtcggaatcgctagtaatcgcgaatcagaatgtcgcggtgaatacgttcccgggccttgtacacaccgcccgtcacaccatgggagtggattgcaccagaagtagttagtctaaccttcgggaggacgattaccacggtgtggttcatgactggggtg

SEQ ID NO: 1961 - DNA, 1463 bp, Marinobacter hydrocarbonoclasticus
  source 1..1463: mol_type = unassigned DNA
attgaacgctggcggcaggcttaacacatgcaagtcgagcggtaacaggggaagcttgcttcccgctgacgagcggcggacgggtgagtaatgcttaggaatctgcccagtagtgggggatagcccggggaaacccggattaataccgcatacgtcctacgggagaaagcaggggatcttcggaccttgcgctattggatgagcctaagtcggattagctagttggtggggtaaaggcctaccaaggcgacgatccgtagctggtctgagaggatgatcagccacatcgggactgagacacggcccgaactcctacgggaggcagcagtggggaatattggacaatgggggcaaccctgatccagccatgccgcgtgtgtgaagaaggctttcgggttgtaaagcactttcagtagggaggaaaaccttatggctaatacccatgaggcttgacgttacctacagaagaagcaccggctaactccgtgccagcagccgcggtaatacggagggtgcaagcgttaatcggaattactgggcgtaaagcgcgcgtaggtggtttggtaagcgagatgtgaaagccccgggcttaacctgggaacggcatttcgaactgtcagactagagtgtggtagagggtagtggaatttcctgtgtagcggtgaaatgcgtagatataggaaggaacaccagtggcgaaggcggctacctggaccaacactgacactgaggtgcgaaagcgtggggagcaaacaggattagataccctggtagtccacgccgtaaacgatgtcaactagccgttgggactcttgaagtcttagtggcgcagctaacgcactaagttgaccgcctggggagtacggccgcaaggttaaaactcaaatgaattgacgggggcccgcacaagcggtggagcatgtggtttaattcgacgcaacgcgaagaaccttacctggccttgacatccagagaactttccagagatggattggtgccttcgggaactctgagacaggtgctgcatggccgtcgtcagctcgtgtcgtgagatgttgggttaagtcccgtaacgagcgcaacccctatccctggttgctagcaggtaatgctgagaactccagggagactgccggtgacaaaccggaggaaggtggggatgacgtcaggtcatcatggcccttacggccagggctacacacgtgctacaatggcgcgtacagagggctgccaactcgcgagagtgagccaatcccttaaaacgcgtcgtagtccggatcggagtctgcaactcgactccgtgaagtcggaatcgctagtaatcgcgaatcagaatgtcgcggtgaatacgttcccgggccttgtacacaccgcccgtcacaccatgggagtggattgcaccagaagtagttagtctaaccttcgggaggacgattaccacggtgtggttcatgactggggtg

SEQ ID NO: 1962 - DNA, 1462 bp, Marinobacter lipolyticus
  source 1..1462: mol_type = unassigned DNA
attgaacgctggcggcaggcttaacacatgcaagtcgagcggtaacagggggagcttgctccccgctgacgagcggcggacgggtgagtaatgcttaggaaactgcccagtagtgggggatagcccggggaaacccggattaataccgcgtacgcccttcgggggaaagcaggggatcttcggaccttgcgctattggatgtgcctaagtcggattagctagttggtggggtaaaggcctaccaaggcgacgatccgtagctggtctgagaggatgatcagccacatcgggactgagacacggcccgaactcctacgggaggcagcagtggggaatattggacaatgggggcaaccctgatccagccatgccgcgtgtgtgaagaaggctttcgggttgtaaagcactttcagtgaggaggaaggctcaaaggttaataccctttgggattgacgttactcacagaagaagcaccggctaactccgtgccagcagccgcggtaatacggagggtgcaagcgttaatcggaattactgggcgtaaagcgcgcgtaggtggtttgataagcgagatgtgaaagccccgggcttaacctgggaacggcatttcgaactgtcaggctagagtgtggtagagggtagtggaatttcctgtgtagcggtgaaatgcgtagatataggaaggaacaccagtggcgaaggcggctacctggaccaacactgacactgaggtgcgaaagcgtggggagcaaacaggattagataccctggtagtccacgccgtaaacgatgtcaactagccgttgggactcttgaagtcttagtggcgcagctaacgcactaagttgaccgcctggggagtacggccgcaaggttaaaactcaaatgaattgacgggggcccgcacaagcggtggagcatgtggtttaattcgacgcaacgcgaagaaccttacctggccttgacatgcagagaactttccagagatggattggtgccttcgggaactctgacacaggtgctgcatggccgtcgtcagctcgtgtcgtgagatgttgggttaagtcccgtaacgagcgcaacccctatccctagttgctagcagttcggctgagaactctagggagactgccggtgacaaaccggaggaaggtggggatgacgtcaggtcatcatggcccttacggccagggctacacacgtgctacaatggtgcgcacagagggctgcaaacccgcgagggggagctaatctcacaaaacgcatcgtagtccggatcggagtctgcaactcgactccgtgaagtcggaatcgctagtaatcgtgaatcagaatgtcacggtgaatacgttcccgggccttgtacacaccgcccgtcacaccatgggagtggattgcaccagaagtggttagtctaaccttcgggaggacgatcaccacggtgtggttcatgactggggtg

SEQ ID NO: 1963 - DNA, 1463 bp, Marinobacter litoralis
  source 1..1463: mol_type = unassigned DNA
attgaacgctggcggcaggcttaacacatgcaagtcgagcggaaacgatgatagcttgctatcaggcgtcgagcggcggacgggtgagtaatgcttaggaatctgcccagtagtgggggacaacagtcggaaacggctgctaataccgcatacgccctacgggggaaagcaggggatcttcggaccttgcgctattggatgagcctaagtcggattagctagttggtgaggtaaaggctcaccaaggccacgatccgtagctggtttgagaggatgatcagccacatcgggactgagacacggcccgaactcctacgggaggcagcagtggggaatattggacaatgggggcaaccctgatccagccatgccgcgtgtgtgaagaaggctttcgggttgtaaagcactttcagcgaggaggaaggctctaaagctaatacctttagggattgacgttactcgcagaagaagcaccggctaactccgtgccagcagccgcggtaatacggagggtgcaagcgttaatcggaattactgggcgtaaagcgcgcgtaggtggttgagtaagcgagatgtgaaagccccgggcttaacctgggaacggcatttcgaactgctcggctagagtgtggtagagggtagtggaatttcctgtgtagcggtgaaatgcgtagatataggaaggaacaccagtggcgaaggcggctacctggaccaacactgacactgaggtgcgaaagcgtggggagcaaacaggattagataccctggtagtccacgccgtaaacgatgtcaactagccgttggggatcttgaatccttagtggcgcagctaacgcactaagttgaccgcctggggagtacggccgcaaggttaaaactcaaatgaattgacgggggcccgcacaagcggtggagcatgtggtttaattcgacgcaacgcgaagaaccttacctggccttgacatgcagagaactttccagagatggattggtgccttcgggaactctgacacaggtgctgcatggccgtcgtcagctcgtgtcgtgagatgttgggttaagtcccgtaacgagcgcaacccctatccttggttgctagcaggtaatgctgagaactccagggagactgccggtgacaaaccggaggaaggtggggatgacgtcaggtcatcatggcccttacggccagggctacacacgtgctacaatggcgtatacagagggctgccaactcgcgagagtgagccaatcccttaaagtgcgtcgtagtccggatcgcagtctgcaactcgactgcgtgaagtcggaatcgctagtaatcgcgaatcagaatgtcgcggtgaatacgttcccgggccttgtacacaccgcccgtcacaccatgggagtggattgcaccagaagtggttagtctaaccttcgggaggacgatcaccacggtgtggttcatgactggggtg

SEQ ID NO: 1964 - DNA, 1462 bp, Marinobacter lutaoensis
  source 1..1462: mol_type = unassigned DNA
attgaacgctggcggcaggcttaacacatgcaagtcgagcggtaacagggggagcttgctccctgctgacgagcggcggacgggtgagtaatgcataggaatctgcccagtagtgggggatagcccggggaaacccggattaataccgcatacgccctacgggggaaagcaggggatcttcggaccttgcgctattggatgagcctatgtcggattagctagttggtggggtaaaggcctaccaaggcgacgatccgtagctggtctgagaggatgatcagccacatcgggactgagacacggcccgaactcctacgggaggcagcagtggggaatattggacaatgggcgcaagcctgatccagccatgccgcgtgtgtgaagaaggccttcgggttgtaaagcactttcagtagggaggaaaacctgatggttaatacccattgggcttgacgttacctacagaagaagcaccggctaactccgtgccagcagccgcggtaatacggagggtgcgagcgttaatcggaattactgggcgtaaagcgcgcgtaggcggtttggtaagcgagatgtgaaatccccgggcttaacctgggaactgcatttcgaactgccaggctagagtatggtagagggtagtggaatttcctgtgtagcggtgaaatgcgtagatataggaaggaacaccagtggcgaaggcggctacctggaccaatactgacgctgaggtgcgaaagcgtggggagcaaacaggattagataccctggtagtccacgccgtaaacgatgtcaactagccgttgggactcttgaagtcttagtggcgcagctaacgcactaagttgaccgcctggggagtacggccgcaaggttaaaactcaaatgaattgacgggggcccgcacaagcggtggagcatgtggtttaattcgacgcaacgcgaagaaccttacctggccttgacatccagcgaactttccagagatggattggtgccttcgggaacgctgagacaggtgctgcatggccgtcgtcagctcgtgtcgtgagatgttgggttaagtcccgtaacgagcgcaacccctatccctagttgccagcgattcggtcgggaactctagggagactgccggtgacaaaccggaggaaggtggggatgacgtcaggtcatcatggcccttacggccagggctacacacgtgctacaatggcgcgcacagagggttgcgaacccgcgagggggagctaatctcagaaaacgcgtcgtagtccggatcgcagtctgcaactcgactgcgtgaagtcggaatcgctagtaatcgcgaatcagaatgtcgcggtgaatacgttcccgggccttgtacacaccgcccgtcacaccatgggagtggattgcaccagaagtagttagtctaaccttcggggggacgattaccacggtgtggttcatgactggggtg

SEQ ID NO: 1965 - DNA, 1429 bp, Marinobacter mobilis
  source 1..1429: mol_type = unassigned DNA
gtcgagcggtaacaggggtagcttgctacccgctgacgagcggcggacgggtgagtaatgcttaggaatctgcctagtagagggggatagcccggggaaacccggattaataccgcatacgccctacgggggaaagcaggggatcttcggaccttgcgctattagatgagcctaagtcggattagctagttggtggggtaaaggcctaccaaggcgacgatccgtagctggtctgagaggatgatcagccacatcgggactgagacacggcccgaactcctacgggaggcagcagtggggaatattggacaatgggggaaaccctgatccagccatgccgcgtgtgtgaagaaggctttcgggttgtaaagcactttcagtgaggaggaaggccttgtcgctaatatcggcaaggattgacgttactcacagaagaagcaccggctaactccgtgccagcagccgcggtaatacggagggtgcaagcgttaatcggaattactgggcgtaaagcgcgcgtaggtggtttgttaagcgagatgtgaaagccccgggcttaacctgggaacggcatttcgaactggcagactagagtgtggtagagggtagtggaatttcctgtgtagcggtgaaatgcgtagatataggaaggaacaccagtggcgaaggcggctacctggaccaacactgacactgaggtgcgaaagcgtggggagcaaacaggattagataccctggtagtccacgccgtaaacgatgtctactagccgttgggactcttgaagtcttagtggcgcagctaacgcactaagtagaccgcctggggagtacggccgcaaggttaaaactcaaatgaattgacgggggcccgcacaagcggtggagcatgtggtttaattcgacgcaacgcgaagaaccttacctggccttgacatcctgcgaactttctagagatagattggtgccttcgggaacgcagtgacaggtgctgcatggccgtcgtcagctcgtgtcgtgagatgttgggttaagtcccgtaacgagcgcaacccctatccctagttgctagcagttcggctgagaactctagggagactgccggtgacaaaccggaggaaggtggggatgacgtcaggtcatcatggcccttacggccagggctacacacgtgctacaatggcgcgcacagagggcagcaaacccgcgagggggagccaatctcacaaaacgcgtcgtagtccggatcgcagtctgcaactcgactgcgtgaagtcggaatcgctagtaatcgcgaatcagaatgtcgcggtgaatacgttcccgggccttgtacacaccgcccgtcacaccatgggagtggattgcaccagaagtagttagtctaaccttcgggaggacgattaccacggtgtggttcatgactggggtg

SEQ ID NO: 1966 - DNA, 1463 bp, unidentified
  source 1..1463: mol_type = unassigned DNA; note = Marinobacter nanhaiticus
attgaacgctggcggcaggcttaacacatgcaagtcgagcggtaacagggggagcttgctccccgctgacgagcggcggacgggtgagtaatgcataggaaactgcccagtagtgggggatagcccggggaaacccggattaataccgcatacgtccttcgggagaaagcaggggctcttcggaccttgcgctattggatgtgcctatgtcggattagctagttggtggggtaagagcctaccaaggcgacgatccgtagctggtctgagaggatgatcagccacatcgggactgagacacggcccgaactcctacgggaggcagcagtggggaatattggacaatgggggcaaccctgatccagccatgccgcgtgtgtgaagaaggctttcgggttgtaaagcactttcagtgaggaggaaaagtgggtccctaatacgggctcgccttgacgttactcacagaagaagcaccggctaactccgtgccagcagccgcggtaatacggagggtgcaagcgttaatcggaattactgggcgtaaagcgcgcgtaggtggtttgataagcgagatgtgaaagccccgggcttaacctgggaacggcatttcgaactgtcaggctagagtatggtagagggtagtggaatttcctgtgtagcggtgaaatgcgtagatataggaaggaacaccagtggcgaaggcggctacctggaccaatactgacactgaggtgcgaaagcgtggggagcaaacaggattagataccctggtagtccacgccgtaaacgatgtcgactagccgttgggactcttgaagtcttagtggcgcagttaacgcactaagtcgaccgcctggggagtacggccgcaaggttaaaactcaaatgaattgacgggggcccgcacaagcggtggagcatgtggtttaattcgacgcaacgcgaagaaccttacctggccttgacatgttgggaaccttccagagatggaagggtgccttcgggaacccaaacacaggtgctgcatggccgtcgtcagctcgtgtcgtgagatgttgggttaagtcccgtaacgagcgcaacccctatccctagttgccagcacatgatggtgggaactctagggagactgccggtgacaaaccggaggaaggtggggatgacgtcaggtcatcatggcccttacggccagggctacacacgtgctacaatggcgcgcacagagggctgcgaacccgcgagggcaagctaatctcttaaaacgcgtcgtagtccggatcgcagtctgcaactcgactgcgtgaagtcggaatcgctagtaatcgcgaatcagaatgtcgcggtgaatacgttcccgggccttgtacacaccgcccgtcacaccatgggagtggattgcaccagaagtggttagtctaaccttcgggaggacgatcaccacggtgtggttcatgactggggtg

SEQ ID NO: 1967 - DNA, 1462 bp, unidentified
  source 1..1462: mol_type = unassigned DNA; note = Marinobacter nitratireducens
attgaacgctggcggcaggcttaacacatgcaagtcgagcggaaacgatgggtgcttgcacccaggcgtcgagcggcggacgggtgagtaatgcttaggaatctgcctagtagtgggggatagcccggggaaacccggattaataccgcatacgtcctacgggagaaagcaggggatcttcggaccttgcgctattagatgagcctaagtcggattagctagttggtgaggtaaaggcttaccaaggcgacgatccgtagctggtctgagaggatgatcagccacatcgggactgagacacggcccgaactcctacgggaggcagcagtggggaatattggacaatgggggcaaccctgatccagccatgccgcgtgtgtgaagaaggctttcgggttgtaaagcactttcagtaaggaggaaaaccttaaggttaatacccttgaggcttgacgttacttacagaagaagcaccggctaactccgtgccagcagccgcggtaatacggagggtgcaagcgttaatcggaattactgggcgtaaagcgcgcgtaggtggtttgttaagcgagatgtgaaagccccgggcttaacctgggaacggcatttcgaactggcaggctagagtgtggtagagggtagtggaatttcctgtgtagcggtgaaatgcgtagatataggaaggaacaccagtggcgaaggcggctacctggaccaacactgacactgaggtgcgaaagcgtggggagcaaacaggattagataccctggtagtccacgccgtaaacgatgtctactagccgttgggactcttgaagtcttagtggcgcagctaacgcactaagtagaccgcctggggagtacggccgcaaggttaaaactcaaatgaattgacgggggcccgcacaagcggtggagcatgtggtttaattcgacgcaacgcgaagaaccttacctggccttgacatcctgcgaactttctagagatagattggtgccttcgggaacgcagtgacaggtgctgcatggccgtcgtcagctcgtgtcgtgagatgttgggttaagtcccgtaacgagcgcaacccctatccctagttgctagcagttcggctgagaactctagggagactgccggtgacaaaccggaggaaggtggggatgacgtcaggtcatcatggcccttacggccagggctacacacgtgctacaatggtacgtacagagggctgcaaacccgcgagggggagctaatctcataaaacgtatcgtagtccggatcgcagtctgcaactcgactgcgtgaagtcggaatcgctagtaatcgcaaatcagaatgttgcggtgaatacgttcccgggccttgtacacaccgcccgtcacaccatgggagtggattgcaccagaagtggttagtctaaccttcgggaggacgatcaccacggtgtggttcatgactggggtg

SEQ ID NO: 1968 - DNA, 1436 bp, Marinobacter pelagius
  source 1..1436: mol_type = unassigned DNA
ggcggcaggcttaacacatgcaagtcgagcggtaacagggggagcttgctccctgctgacgagcggcggacgggtgagtaatgcataggaatctgcccagtagttggggatagcccggggaaacccggattaataccgaatacgccctacgggggaaagcaggggatcttcggaccttgcgctattggatgagcctatgtcggattagctagttggtggggtaatggcctaccaaggcgacgatccgtagctggtctgagaggatgatcagccacatcgggactgagacacggcccgaactcctacgggaggcagcagtggggaatattggacaatgggggcaaccctgatccagccatgccgcgtgtgtgaagaaggctttcgggttgtaaagcactttcagtgaggaggaaaaccttatggctaatatccatgaggcttgacgttactcacagaagaagcaccggctaactccgtgccagcagccgcggtaatacggagggtgcaagcgttaatcggaattactgggcgtaaagcgcgcgtaggtggttcgataagcgagatgtgaaagccccgggcttaacctgggaacggcatttcgaactgtcgggctagagtgtggtagagggtagtggaatttcctgtgtagcggtgaaatgcgtagatataggaaggaacaccagtggcgaaggcggctacctggaccaatactgacactgaggtgcgaaagcgtggggagcaaacaggattagataccctggtagtccacgccgtaaacgatgtcaactagccgttggggatcttgaatccttagtggcgcagctaacgcactaagttgaccgcctggggagtacggccgcaaggttaaaactcaaatgaattgacgggggcccgcacaagcggtggagcatgtggtttaattcgacgcaacgcgaagaaccttacctggccttgacatcctgcgaactttctagagatagattggtgccttcgggaacgcagtgacaggtgctgcatggccgtcgtcagctcgtgtcgtgagatgttgggttaagtcccgtaacgagcgcaacccctatccctagttgctagcagttcggctgagaactctagggagactgccggtgacaaaccggaggaaggtggggatgacgtcaggtcatcatggcccttacggccagggctacacacgtgctacaatggcgcgcacagagggctgcaaactcgcgagggtaagccaatctcttaaaacgcgtcgtagtccggatcgcagtctgcaactcgactgcgtgaagtcggaatcgctagtaatcgcgaatcagaatgtcgcggtgaatacgttcccgggccttgtacacaccgcccgtcacaccatgggagtggattgcaccagaagtggttagtctaaccttcgggaggacgatcaccacggtgtg

SEQ ID NO: 1969 - DNA, 1463 bp, unidentified
  source 1..1463: mol_type = unassigned DNA; note = Marinobacter persicus
attgaacgctggcggcaggcttaacacatgcaagtcgagcggtaacagggggtgcttgcaccccgctgacgagcggcggacgggtgagtaatgcttaggaatctgcccagtagtgggggatagcccggggaaacccggattaataccgcatacgtcctacgggagaaagcaggggatcttcggaccttgcgctattggatgagcctaagtcggattagctagttggtgaggtaaaggctcaccaaggccacgatccgtagctggtttgagaggatgatcagccacatcgggactgagacacggcccgaactcctacgggaggcagcagtggggaatattggacaatgggggcaaccctgatccagccatgccgcgtgtgtgaagaaggctttcgggttgtaaagcactttcagtgaggaggaaaaccttacgactaatactcgtgaggcttgacgttactcacagaagaagcaccggctaactccgtgccagcagccgcggtaatacggagggtgcaagcgttaatcggaattactgggcgtaaagcgcgcgtaggtggttcgataagcgggatgtgaaagccccgggcttaacctgggaacggcattccgaactgtcgggctagagtatggtagagggtagtggaatttcctgtgtagcggtgaaatgcgtagatataggaaggaacaccagtggcgaaggcggctacctggaccaatactgacactgaggtgcgaaagcgtggggagcaaacaggattagataccctggtagtccacgccgtaaacgatgtcaactagccgttgggactcttgaagtcttagtggcgcagctaacgcactaagttgaccgcctggggagtacggccgcaaggttaaaactcaaatgaattgacgggggcccgcacaagcggtggagcatgtggtttaattcgacgcaacgcgaagaaccttacctggccttgacatccagagaactttccagagatggattggtgccttcgggaactctgtgacaggtgctgcatggccgtcgtcagctcgtgtcgtgagatgttgggttaagtcccgtaacgagcgcaacccctatccctggttgctagcaggtaaagctgagaactccagggagactgccggtgacaaaccggaggaaggtggggatgacgtcaggtcatcatggcccttacggccagggctacacacgtgctacaatggtgcgtacagagggctgcaaactcgcgagagtaagccaatcccttaaaacgcatcgtagtccggatcggagtctgcaactcgactccgtgaagtcggaatcgctagtaatcgcgaatcagaatgtcgcggtgaatacgttcccgggccttgtacacaccgcccgtcacaccatgggagtggattgcaccagaagtggttagtctaaccttcgggaggacgatcaccacggtgtggttcatgactggggtg

SEQ ID NO: 1970 - DNA, 1463 bp, Marinobacter psychrophilus
  source 1..1463: mol_type = unassigned DNA
attgaacgctggcggcaggcttaacacatgcaagtcgggcggaaacgatggtagcttgctaccaggcgtcgagcggcggacgggtgagtaatgcttaggaatctgcctagtagtgggggatagcccggggaaactcggattaataccgcatacgccctacgggggaaagcaggggatcttcggaccttgcgctattagatgagcctaagtcggattagcttgttggtggggtaatggcctaccaaggcgacgatccgtagctggtctgagaggatgatcagccacatcgggactgagacacggcccgaactcctacgggaggcagcagtggggaatattggacaatgggcgcaagcctgatccagccatgccgcgtgtgtgaagaaggctttcgggttgtaaagcactttcagcgaggaggaaggccttaagactaatactcttgaggattgacgtcactcgcagaagaagcaccggctaactccgtgccagcagccgcggtaatacggagggtgcaagcgttaatcggaattactgggcgtaaagcgcgcgtaggtggttatgtaagcgagatgtgaaagccccgggctcaacctgggaacggcacttcgaactgcatggctagagtgtggtagagggtagtggaatttcctgtgtagcggtgaaatgcgtagatataggaaggaacaccagtggcgaaggcggctacctggaccaacactgacactgaggtgcgaaagcgtggggagcaaacaggattagataccctggtagtccacgccgtaaacgatgtcaactagccgttggggatcttgaatccttagtggcgcagctaacgcactaagttgaccgcctggggagtacggccgcaaggttaaaactcaaatgaattgacgggggcccgcacaagcggtggagcatgtggtttaattcgacgcaacgcgaagaaccttacctggccttgacatgcagagaactttccagagatggatcggtgccttcgggaactctgacacaggtgctgcatggccgtcgtcagctcgtgtcgtgagatgttgggttaagtcccgtaacgagcgcaacccctatccctagttgctagcaggtaatgctgagaactctagggagactgccggtgacaaaccggaggaaggtggggatgacgtcaggtcatcatggcccttacggccagggctacacacgtgctacaatggcgcgcacagagggctgcaaacccgcgagggggagccaatctcacaaaacgcgtcgtagtccggatcggagtctgcaactcgactccgtgaagtcggaatcgctagtaatcgtgaatcagaatgtcacggtgaatacgttcccgggccttgtacacaccgcccgtcacaccatgggagtggattgcaccagaagtagttagtctaaccttcgggaggacgattaccacggtgtggttcatgactggggtg

SEQ ID NO: 1971 - DNA, 1461 bp, unidentified
  source 1..1461: mol_type = unassigned DNA; note = Marinobacter salarius
attgaacgctggcggcaggcttaacacatgcaagtcgagcggtaacagggggagcttgctccccgctgacgagcggcggacgggtgagtaatgcataggaagctgcccagtagtgggggatagcccggggaaacccggattaataccgcatacgcccttcgggggaaagcaggggatcttcggaccttgcgctattggatgtgcctatgtcggattagctagttggtggggtaagagcctaccaaggcgacgatccgtagctggtctgagaggatgatcagccacatcgggactgagacacggcccgaactcctacgggaggcagcagtggggaatattggacaatgggggcaaccctgatccagccatgccgcgtgtgtgaagaaggctttcgggttgtaaagcactttcagtgaggaggaaaaccttaagtttaatacgcttgaggcttgacgttactcacagaagaagcaccggctaactccgtgccagcagccgcggtaatacggagggtgcaagcgttaatcggaattactgggcgtaaagcgcgcgtaggtggtttgataagcgagatgtgaaagccccgggctcaacctgggaacggcatttcgaactgtcaggctagagtatggtagaggagtgtggaatttcctgtgtagcggtgaaatgcgtagatataggaaggaacaccagtggcgaaggcggcactctggaccaatactgacactgaggtgcgaaagcgtggggagcaaacaggattagataccctggtagtccacgctgtaaacgatgtcaactagccgttgggactcttgaagtcttagtggcgcagctaacgcactaagttgaccgcctggggagtacggccgcaaggttaaaactcaaatgaattgacgggggcccgcacaagcggtggagcatgtggtttaattcgacgcaacgcgaagaaccttacctggccttgacatgcagagaactttccagagatggattggtgccttcgggaactctgacacaggtgctgcatggccgtcgtcagctcgtgtcgtgagatgttgggttaagtcccgtaacgagcgcaacccctatcctagttgctagcagttcggctgagaactctagggagactgccggtgacaaaccggaggaaggtggggatgacgtcaggtcatcatggcccttacggccagggctacacacgtgctacaatggtgcgtacagagggctgcaaacccgcgagggggagctaatctcacaaaacgcatcgtagtccggatcggagtctgcaactcgactccgtgaagtcggaatcgctagtaatcgcgaatcagaatgtcgcggtgaatacgttcccgggccttgtacacaccgcccgtcacaccatgggagtggattgcaccagaagtggttagtctaaccttcgggaggacgatcaccacggtgtggttcatgactggggtg

SEQ ID NO: 1972 - DNA, 1462 bp, unidentified
  source 1..1462: mol_type = unassigned DNA; note = Marinobacter salinus
attgaacgctggcggcaggcttaacacatgcaagtcgagcggtaacagggggtgcttgcaccccgctgacgagcggcggacgggtgagtaatgcttaggaatctgcccagtagtgggggatagcccggggaaacccggattaataccgcatacgccctacgggggaaagcaggggatcttcggaccttgcgctattggatgagcctaagtcggattagctagttggtggggtaagagcctaccaaggcgacgatccgtagctggtctgagaggatgatcagccacatcgggactgagacacggcccgaactcctacgggaggcagcagtggggaatattggacaatgggggcaaccctgatccagccatgccgcgtgtgtgaagaaggctttcgggttgtaaagcactttcagtgaggaggaaaagttagtcgttaatatcggctagccttgacgttactcacagaagaagcaccggctaactccgtgccagcagccgcggtaatacggagggtgcaagcgttaatcggaattactgggcgtaaagcgcgcgtaggtggtttgataagcgagatgtgaaagccccgggcttaacctgggaacggcatttcgaactgtcaggctagagtgtggtagagggtagtggaatttcctgtgtagcggtgaaatgcgtagatataggaaggaacaccagtggcgaaggcggctacctggaccaacactgacactgaggtgcgaaagcgtggggagcaaacaggattagataccctggtagtccacgccgtaaacgatgtcaactagccgttggggatcttgaatccttagtggcgcagctaacgcactaagttgaccgcctggggagtacggccgcaaggttaaaactcaaatgaattgacgggggcccgcacaagcggtggagcatgtggtttaattcgacgcaacgcgaagaaccttacctggccttgacatgcagagaactttccagagatggattggtgccttcgggaactctgacacaggtgctgcatggccgtcgtcagctcgtgtcgtgagatgttgggttaagtcccgtaacgagcgcaacccctatccctagttgctagcagttcggctgagaactctagggagactgccggtgacaaaccggaggaaggtggggatgacgtcaggtcatcatggcccttacggccagggctacacacgtgctacaatggcgcgcacagagggctgcaaacccgcgagggggagctaatctcacaaaacgcgtcgtagtccggatcggagtctgcaactcgactccgtgaagtcggaatcgctagtaatcgtgaatcagaatgtcacggtgaatacgttcccgggccttgtacacaccgcccgtcacaccatgggagtggattgcaccagaagtagttagtctaaccttcgggaggacgattaccacggtgtggttcatgactggggtg

SEQ ID NO: 1973 - DNA, 1462 bp, Marinobacter santoriniensis
  source 1..1462: mol_type = unassigned DNA
attgaacgctggcggcaggcttaacacatgcaagtcgagcggtaacaggtccagcttgctggatgctgacgagcggcggacgggtgagtaatgcataggaaactgcccaatagtgggggatagcccggggaaacccggattaataccgcatacgtcctacgggagaaagcaggggctcttcggaccttgcgctattggatgtgcctatgtcggattagctagttggtggggtaaaggcctaccaaggcgacgatccgtagctggtctgagaggatgatcagccacatcgggactgagacacggcccgaactcctacgggaggcagcagtggggaatattggacaatgggggcaaccctgatccagccatgccgcgtgtgtgaagaaggctttcgggttgtaaagcactttcagtgaggaggaaaaccttatggttaatacccatgaggcttgacgttactcacagaagaagcaccggctaactccgtgccagcagccgcggtaatacggagggtgcaagcgttaatcggaattactgggcgtaaagcgcgcgtaggtggttaggtaagcgagatgtgaaagccccgggcttaacctgggaacggcatttcgaactgtctgactagagtatggtagagggtagtggaatttcctgtgtagcggtgaaatgcgtagatataggaaggaacaccagtggcgaaggcggctacctggaccaatactgacactgaggtgcgaaagcgtggggagcaaacaggattagataccctggtagtccacgccgtaaacgatgtcaactagccgttgggactcttgaagtcttagtggcgcagctaacgcactaagttgaccgcctggggagtacggccgcaaggttaaaactcaaatgaattgacgggggcccgcacaagcggtggagcatgtggtttaattcgacgcaacgcgaagaaccttacctggccttgacatcctgcgaactttctagagatagattggtgccttcgggaacgcagtgacaggtgctgcatggccgtcgtcagctcgtgtcgtgagatgttgggttaagtcccgtaacgagcgcaacccctatccctagttgctagcagttcggctgagaactctagggagactgccggtgacaaaccggaggaaggtggggatgacgtcaggtcatcatggcccttacggccagggctacacacgtgctacaatggcgcgcacagagggctgcaaactcgcgagagtaagccaatctcttaaaacgcgtcgtagtccggatcgcagtctgcaactcgactgcgtgaagtcggaatcgctagtaatcgcgaatcagaatgtcgcggtgaatacgttcccgggccttgtacacaccgcccgtcacaccatgggagtggattgcaccagaagtggttagtctaaccttcgggaggacgatcaccacggtgtggttcatgactggggtg

SEQ ID NO: 1974 - DNA, 1387 bp, Marinobacter segnicrescens
  source 1..1387: mol_type = unassigned DNA
agcggtaacagggggtgcttgcaccccgctgacgagcggcggacgggtgagtaatgcataggaatctgcccagtagtgggggatagcccggggaaacccggattaataccgcatacgccctacgggggaaagcaggggatcttcggaccttgcgctattggatgagcctatgtcggattagcttgttggtggggtaatggctcaccaaggcgacgatccgtagctggtctgagaggatgatcagccacatcgggactgagacacggcccgaactcctacgggaggcagcagtggggaatattggacaatgggggcaaccctgatccagccatgccgcgtgtgtgaagaaggctttcgggttgtaaagcactttcagtgaggaggaaaaccttatggctaatacccatgaggcttgacgttactcacagaagaagcaccggctaactccgtgccagcagccgcggtaatacggagggtgcaagcgttaatcggaattactgggcgtaaagcgcgcgtaggtggtttgataagcgagatgtgaaagccccgggcttaacctgggaacggcatttcgaactgtcaggctagagtgtggtagagggtagtggaatttcctgtgtagcggtgaaatgcgtagatataggaaggaacaccagtggcgaaggcggctacctggaccaacactgacactgaggtgcgaaagcgtggggagcaaacaggattagataccctggtagtccacgccgtaaacgatgtctactagccgttgggactcttgaagtcttagtggcgcagttaacgcactaagtagaccgcctggggagtacggccgcaaggttaaaactcaaatgaattgacgggggcccgcacaagcggtggagcatgtggtttaattcgacgcaacgcgaagaaccttacctggccttgacatgttgggaactttccagagatggattggtgccttcgggaacccaaacacaggtgctgcatggccgtcgtcagctcgtgtcgtgagatgttgggttaagtcccgtaacgagcgcaacccttatccctagttgccagcacatcatggtgggaactctagggagactgccggtgacaaaccggaggaaggtggggatgacgtcaggtcatcatggcccttacggccagggctacacacgtgctacaatggcgcgcacagagggctgcaaacccgcgagggggagccaatctcacaaaacgcgtcgtagtccggatcgcagtctgcaactcgactgcgtgaagtcggaatcgctagtaatcgtgaatcagaatgtcacggtgaatacgttcccgggccttgtacacaccgcccgtcacaccatgggagtggattgcaccagaagtggttagtctaaccttc

SEQ ID NO: 1975 - DNA, 1463 bp, unidentified
  source 1..1463: mol_type = unassigned DNA; note = Marinobacter shengliensis
attgaacgctggcggcaggcttaacacatgcaagtcgagcggtaacagggggtgcttgcaccccgctgacgagcggcggacgggtgagtaatgcttaggaatctgcccagtagtgggggatagcccggggaaacccggattaataccgcatacgtcctacgggagaaagcaggggatcttcggaccttgcgctactggatgagcctaagtcggattagctagttggtggggtaaaggcctaccaaggcgacgatccgtagctggtctgagaggatgatcagccacatcgggactgagacacggcccgaactcctacgggaggcagcagtggggaatattggacaatgggggcaaccctgatccagccatgccgcgtgtgtgaagaaggctttcgggttgtaaagcactttcagcgaggaggaaggctctgaagttaataccttcagggattgacgttactcgcagaagaagcaccggctaactccgtgccagcagccgcggtaatacggagggtgcaagcgttaatcggaattactgggcgtaaagcgcgcgtaggtggttaggtaagcgagatgtgaaagccccgggcgtaacctgggaacggcatttcgaactgtctgactagagtgtggtagagggtagtggaatttcctgtgtagcggtgaaatgcgtagatataggaaggaacaccagtggcgaaggcggctacctggaccaacactgacactgaggtgcgaaagcgtggggagcaaacaggattagataccctggtagtccacgccgtaaacgatgtcaactagccgttgggactcttgaagtcttagtggcgcagctaacgcactaagttgaccgcctggggagtacggccgcaaggttaaaactcaaatgaattgacgggggcccgcacaagcggtggagcatgtggtttaattcgacgcaacgcgaagaaccttacctggccttgacatccagagaactttccagagatggactggtgccttcgggaactctgagacaggtgctgcatggccgtcgtcagctcgtgtcgtgagatgtcgggttaagtcccgtaacgagcgcaacccctatccctggttgctagcaggtaatgctgagaactccagggagactgccggtgacaaaccggaggaaggtggggatgacgtcaggtcatcatggcccttacggccagggctacacacgtgctacaatggcgcgtacagagggctgccaactcgcgagagtgcgccaatcccttaaaacgcgtcgtagtccggatcggagtctgcaactcgactccgtgaagtcggaatcgctagtaatcgcgagtcagaatgtcgcggtgaatacgttcccgggccttgtacacaccgcccgtcacaccatgggagtggattgcaccagaagtagttagtctaaccttcgggaggacgattaccacggtgtggttcatgactggggtg

SEQ ID NO: 1976 - DNA, 1463 bp, Marinobacter vinifirmus
  source 1..1463: mol_type = unassigned DNA
attgaacgctggcggcaggcttaacacatgcaagtcgagcggtaacagggggtgcttgcaccccgctgacgagcggcggacgggtgagtaatgcttaggaatctgcccagtagtgggggacaacagtcggaaacggctgctaataccgcatacgccctacgggggaaagcaggggatcttcggaccttgcgctattggatgagcctaagtcggattagctagttggtggggtaaaggcctaccaaggcgacgatccgtagctggtctgagaggatgatcagccacatcgggactgagacacggcccgaactcctacgggaggcagcagtggggaatattggacaatgggggcaaccctgatccagccatgccgcgtgtgtgaagaaggctttcgggttgtaaagcactttcagcgaggaggaaggccttaaagttaatacctttaaggattgacgttactcgcagaagaagcaccggctaactccgtgccagcagccgcggtaatacggagggtgcaagcgttaatcggaattactgggcgtaaagcgcgcgtaggtggtttggtaagcgagatgtgaaagccccgggcttaacctgggaacggcatttcgaactgtcagactagagtgtggtagagggtagtggaatttcctgtgtagcggtgaaatgcgtagatataggaaggaacaccagtggcgaaggcggctacctggaccaacactgacactgaggtgcgaaagcgtggggagcaaacaggattagataccctggtagtccacgccgtaaacgatgtcaactagccgttgggactcttgaagtcttagtggcgcagctaacgcactaagttgaccgcctggggagtacggccgcaaggttaaaactcaaatgaattgacgggggcccgcacaagcggtggagcatgtggtttaattcgacgcaacgcgaagaaccttacctggccttgacatccagagaactttccagagatggattggcgccttcgggaactctgagacaggtgctgcatggccgtcgtcagctcgtgtcgtgagatgttgggttaagtcccgtaacgagcgcaacccctatccttggttgctagcaggtaaagctgagaactccagggagactgccggtgacaaaccggaggaaggtggggatgacgtcaggtcatcatggcccttacggccagggctacacacgtgctacaatggcgcgtacagagggctgccaactcgcgagagtgagccaatcccttaaaacgcgtcgtagtccggatcggagtctgcaactcgactccgtgaagtcggaatcgctagtaatcgcgaatcagaatgtcgcggtgaatacgttcccgggccttgtacacaccgcccgtcacaccatgggagtggattgcaccagaagtagttagtctaaccttcgggaggacgattaccacggtgtggttcatgactggggtg

SEQ ID NO: 1977 - DNA, 1462 bp, Marinobacter zhejiangensis
  source 1..1462: mol_type = unassigned DNA
attgaacgctggcggcaggcttaacacatgcaagtcgagcggtaacaggggtagcttgctacccgctgacgagcggcggacgggtgagtaatgcttaggaatctgcccagtagtgggggacaacaatcggaaacggttgctaataccgcatacgccctaagggggaaagcaggggatcttcggaccttgcgctattggatgagcctaagtcggattagctagttggtggggtaatggcccaccaaggcgacgatccgtagctggtctgagaggatgatcagccacatcgggactgagacacggcccgaactcctacgggaggcagcagtggggaatattggacaatgggggcaaccctgatccagccatgccgcgtgtgtgaagaaggctttcgggttgtaaagcactttcagtgaggaggaaggccaagtcgctaatatcggcttggattgacgttactcacagaagaagcaccggctaactccgtgccagcagccgcggtaatacggagggtgcaagcgttaatcggaattactgggcgtaaagcgcgcgtaggtggtttgttaagcgagatgtgaaagccccgggcttaacctgggaacggcatttcgaactggcaggctagagtgtggtagagggtagtggaatttcctgtgtagcggtgaaatgcgtagatataggaaggaacaccagtggcgaaggcggctacctggaccaacactgacactgaggtgcgaaagcgtggggagcaaacaggattagataccctggtagtccacgccgtaaacgatgtctactagccgttgggactcttgaagtcttagtggcgcagctaacgcactaagtagaccgcctggggagtacggccgcaaggttaaaactcaaatgaattgacgggggcccgcacaagcggtggagcatgtggtttaattcgacgcaacgcgaagaaccttacctggccttgacatcctgcgaactttctagagatagattggtgccttcgggaacgcagtgacaggtgctgcatggccgtcgtcagctcgtgtcgtgagatgttgggttaagtcccgtaacgagcgcaacccctatccctagttgctagcagttcggctgagaactctagggagactgccggtgacaaaccggaggaaggtggggatgacgtcaggtcatcatggcccttacggccagggctacacacgtgctacaatggcgcgcacagagggctgcaaacccgcgagggggagctaatctcacaaaacgcgtcgtagtccggattggagtctgcaactcgactccatgaagtcggaatcgctagtaatcgcgaatcagaatgtcgcggtgaatacgttcccgggccttgtacacaccgcccgtcacaccatgggagtggattgcaccagaagtagttagtctaaccttcgggaggacgattaccacggtgtggttcatgactggggtg

SEQ ID NO: 1978 - DNA, 1495 bp, Marinococcus halophilus
  source 1..1495: mol_type = unassigned DNA
gacgaacgctggcggcgtgcctaatacatgcaagtcgagcgcgggaagccggcggactccttcgggaggaaaccggtggaacgagcggcggacgggtgagtaacacgtgggcaacctgccggactgatgggaataaccccgggaaaccggggctaatgcccaatacsccctgacctcgcctgaggtcagcggcaaagcagggatcttcggrtccttgcgcagtccgatgggcccgcggcgcattagctagttggagaggtaagggctccccaaggcgacgatgcgtagccgacctgagagggtgatcggccacactgggactgagacacggcccagactcctacgggaggcagcagtagggaatcatccgcaatgggcgaaagcctgacggtgcaacgccgcgtgagtgatgaaggttttcggatcgtaaagctctgttgacagggaagaacccacgccagtcgaacaggctggcgtgctgacggtacctgtccagaaagccccggctaactacgtgccagcagccgcggtaatacgtagggggcaagcgttgtccggaattattgggcgtaaagggcacgcaggcggtttcgtcagtccgatgtgacaggccacggctcaaccgtggaaggccattggaaactgcgaaacttgaggacagaagaggagagtggaattccacgtgtagcggtgaaatgcgtagatatgtggaggaacaccagtggcgaaggcgactctctggtctgtacctgacgctgaggtgcgaaagcatggggagcaaacaggattagataccctggtagtccatgccgtaaacgctgagtgctaggtgttaggggtttcgatacccgtagtgccgaagctaacgcattaagcactccgcctggggagtacgaccgcaaggttgaaactcaaaggaattgacgggggcccgcacaagcggtggagcatgtggtttaattcgacgcaacgcgaagaaccttaccagatcttgacatcttccgctacgcctcgagagaggcggttccccttcgggggacggaatgacaggtggtgcatggttgtcgtcagctcgtgtcgtgagatgttgggttaagtcccgcaacgagcgcaacccctaatcttagttgccagcattcagttgggcactctaaggtgactgccggtgacaaaccggaggaaggtggggatgacgtcaaatcatcatgccccttatgatctgggctacacacgtgctacaatggatggtacaacgggaagcgaacccgcgagggggagccaatccagaaaagccattctcagttcggattgcaggctgcaactcgcctgcatgaagccggaatcgctagtaatcgcggatcagcatgccgcggtgaatacgttcccgggccttgtacacaccgcccgtcacaccacgagagtttgcaacacccgaagtcggtgagggaaccctycygggacccagccgccgaaggtggggcagatgattggggtg

SEQ ID NO: 1979 - DNA, 1495 bp, Marinococcus luteus
  source 1..1495: mol_type = unassigned DNA
gacgaacgctggcggcgtgcctaatacatgcaagtcgagcgcgggaagccggcggactccttcgggaggaaaccggtggaacgagcggcggacgggtgagtaacacgtgggcaacctgccggactgatgggaataaccccgggaaaccggggctaatgcccaatacgccctgacctcgcctgaggtcagcggtaaagcagggatcttcggatccttgcacagtccgatgggcccgcggcgcattagctagttggagaggtaagggctccccaaggcgacgatgcgtagccgacctgagagggtgatcggccacactgggactgagacacggcccagactcctacgggaggcagcagtagggaatcatccgcaatgggcgaaagcctgacggtgcaacgccgcgtgagtgatgaaggttttcggatcgtaaagctctgttgacagggaagaacccacgccagtcgaacaggctggcgtgctgacggtacctgtccagaaagccccggctaactacgtgccagcagccgcggtaatacgtagggggcaagcgttgtccggaattattgggcgtaaagggcacgcaggcggtttcgtcagtccgatgtgacaggccacggctcaaccgtggaaggccattggaaactgcgaaacttgaggacagaagaggagagtggaattccacgtgtagcggtgaaatgcgtagatatgtggaggaacaccagtggcgaaggcgactctctggtctgtacctgacgctgaggtgcgaaagcatggggagcaaacaggattagataccctggtagtccatgccgtaaacgctgagtgctaggtgttaggggtttcgatacccgtagtgccgaagctaacgcattaagcactccgcctggggagtacgaccgcaaggttgaaactcaaaggaattgacgggggcccgcacaagcggtggagcatgtggtttaattcgacgcaacgcgaagaaccttaccagatcttgacatcttccgctacgcctcgagagaggcggttccccttcgggggacggaatgacaggtggtgcatggttgtcgtcagctcgtgtcgtgagatgttgggttaagtcccgcaacgagcgcaacccctaatcttagttgccagcattcagttgggcactctaaggtgactgccggtgacaaaccggaggaaggtggggatgacgtcaaatcatcatgccccttatgatctgggctacacacgtgctacaatggatggtacaacgggacgcgaacccgcgagggggagccaatccagaaaagccattctcagttcggattgcaggctgcaactcgcctgcatgaagccggaatcgctagtaatcgcggatcagcatgccgcggtgaatacgttcccgggccttgtacacaccgcccgtcacaccacgagagtttgcaacacccgaagtcggtgagggaacccttctgggacccagccgccgaaggtggggcagatgattggggtg

SEQ ID NO: 1980 - DNA, 1336 bp, Marinomonas alcarazii
  source 1..1336: mol_type = unassigned DNA
acaggggagcttgctcctgctgacgagcggcggacgggtgagtaacgcgtaggaatctgcctrgtagagggggacaacatgtggaaacgcatgctaataccgcatacgccctgagggggaaaggaggggacttttcggagccttccgctattagatgagcctgcgtgagattagctagttggtagggtaaaggcctaccaaggcgacgatctctaactggtctgagaggatgaccagtcacactgggactgagacacggcccagactcctacgggaggcagcagtggggaatattggacaatgggcggaagcctgatccagccatgccgcgtgtgtgaagaaggccttagggttgtaaagcactttcaggagtgaggaagggcgtttggttaatacccaarcgttttgacgttagctccagaagaagcaccggctaactctgtgccagcagccgcggtaatacagagggtgcaagcgttaatcggaattactgggcgtaaagcgcgcgtaggtggtttgttaagtcggatgtgaaatcccagggctcaaccttggaatggcacccgatactggcaggctagagtacggtagaggggtgtggaatttcctgtgtagcggtgaaatgcgtagatataggaaggaacatcagtggcgaaggcgacaccctggactgatactgacactgaggtgcgaaagcgtggggagcaaacaggattagataccctggtagtccacgccgtaaacgatgtctactagccgttgggttgtaatgacttagtggcgcagctaacgcaataagtagaccgcctggggagtacggccgcaaggttaaaactcaaatgaattgacgggggcccgcacaagcggtggagcatgtggtttaattcgaagcaacgcgaagaaccttacctactcttgacatccagtgaacttagcagagatgctttggtgccttcgggaacactgagacaggtgctgcatggctgtcgtcagctcgtgttgtgaaatgttgggttaagtcccgtaacgagcgcaacccttatccttatttgccagcacttcgggtgggaactttaaggagactgccggtgacaaaccggaggaaggtggggacgacgtcaagtcatcatggcccttacgagtagggctacacacgtgctacaatggcgtatacagagggctgcgaacttgcgagagtaagcgaatcccagaaagtacgtcgtagtccggattggagtctgcaactcgactccatgaagtcggaatcgctagtaatcgtgaatcagaatgtcacggtgaatacgttcccgggccttgtacacaccgcccgtcacac

SEQ ID NO: 1981 - DNA, 1463 bp, Marinomonas aquimarina
  source 1..1463: mol_type = unassigned DNA
attgaacgctggcggcaggcttaacacatgcaagtcgagcggtaacaggaattagcttgctaatttgctgacgagcggcggacgggtgagtaacgcgtaggaatctgcctggtagtgggggacaacatgtggaaacgcatgctaataccgcatacgccctacgggggaaaggaggggatcttcggacctttcgctatcagatgagcctgcgtgagattagctagttggtggggtaaaggctcaccaaggcgacgatctctagctggtctgagaggatgatcagccacactgggactgagacacggcccagactcctacgggaggcagcagtggggaatattggacaatgggcgcaagcctgatccagccatgccgcgtgtgtgaagaaggccttcgggttgtaaagcactttcagaagtgaggaagggtgtgtggctaatatccacatatcttgacgttagcttcagaagaagcaccggctaactctgtgccagcagccgcggtaatacagagggtgcgagcgttaatcggaattactgggcgtaaagcgcgcgtaggcggtttgttaagtcggatgtgaaatcccagggctcaaccttggaattgcacccgatactggcaggctagagtacggtagaggggtgtggaatttcctgtgtagcggtgaaatgcgtagatataggaaggaacatcagtggcgaaggcgacaccctggaccgatactgacgctgaggtgcgaaagcgtggggagcaaacaggattagataccctggtagtccacgccgtaaacgatgtctactagccgttggggatttatttctttagtggcgcagctaacgcgataagtagaccgcctggggagtacggccgcaaggttaaaactcaaatgaattgacgggggcccgcacaagcggtggagcatgtggtttaattcgaagcaacgcgaagaaccttacctactcttgacatccagtgaactttccagagatggattggtgccttcgggaacactgagacaggtgctgcatggctgtcgtcagctcgtgttgtgaaatgttgggttaagtcccgtaacgagcgcaacccttatccttatttgccagcacttcgggtgggaactctaaggagactgccggtgacaaaccggaggaaggtggggacgacgtcaagtcatcatggcccttacgagtagggctacacacgtgctacaatggcgcatacagagggccgcgaacttgcgagagtaagcaaatcccaaaaagtgcgtcgtagtccggattggagtctgcaactcgactccatgaagtcggaatcgctagtaatcgtgaatcagaatgtcacggtgaatacgttcccgggccttgtacacaccgcccgtcacaccatgggagttgattgctccagaagtagctagcttaaccttcgggatggcggttaccacggagtggtcaatgactggggtg

SEQ ID NO: 1982 - DNA, 1393 bp, Marinomonas aquiplantarum
  source 1..1393: mol_type = unassigned DNA
gaaacgatgatagcttgctatcaggcgtcgagcggcggacgggtgagtaacgcgtaggaatctgcctagtagagggggacaacatgtggaaacgcatgctaataccgcatacgcccttttggggaaaggaggggatcttcggaccttccgctattagatgagcctgcgtgagattagctagttggtggggtaaaggcctaccaaggcgacgatctctaactggtctgagaggatgaccagtcacactgggactgagacacggcccagactcctacgggaggcagcagtggggaatattggacaatgggcgcaagcctgatccagccatgccgcgtgtgtgaagaaggccttagggttgtaaagcactttcaggagtgaggaagggtgcgttgctaataccaacgtattttgacgttagctccagaagaagcaccggctaactctgtgccagcagccgcggtaatacagagggtgcaagcgttaatcggaattactgggcgtaaagcgcgcgtaggtggtttgttaagtctgatgtgaaatcccagggctcaaccttggaatggcaccggatactggcaggctagagtacggtagaggggtgtggaatttcctgtgtagcggtgaaatgcgtagatataggaaggaacatcagtggcgaaggcgacaccctggactgatactgacactgaggtgcgaaagcgtggggagcaaacaggattagataccctggtagtccacgccgtaaacgatgtctactagccgttgggttgtaatgacttagtggcgcagctaacgcactaagtagaccgcctggggagtacggccgcaaggttaaaactcaaatgaattgacgggggcccgcacaagcggtggagcatgtggtttaattcgaagcaacgcgaagaaccttacctactcttgacatccagagaacttagcagagatgctttggtgccttcgggaactctgagacaggtgctgcatggctgtcgtcagctcgtgttgtgaaatgttgggttaagtcccgtaacgagcgcaacccttatccttacttgccagcacttcgggtgggaactttaaggagactgccggtgacaaaccggaggaaggtggggacgacgtcaagtcatcatggcccttacgagtagggctacacacgtgctacaatggcgtatacaaagggctgctaacttgcgagagtgtgcaaatcccataaagtacgtcgtagtccggattggagtctgcaactcgactccatgaagtcggaatcgctagtaatcgtggatcagaatgccacggtgaatacgttcccgggccttgtacacaccgcccgtcacaccatgggagttgattgctccagaagtagctagcttaacctttcggggatggcggt

SEQ ID NO: 1983 - DNA, 1349 bp, Marinomonas balearica
  source 1..1349: mol_type = unassigned DNA
acagatctagcttgctagatgctgacgagcggcggacgggtgagtaacgcgtaggaatctgcctggtagtgggggacaacatgtggaaacgcatgctaataccgcatacgcccttwtggggaaaggaggggatcttcggaccttccgctatcagatgagcctgcgtgagattagctagttggtggggtaaaggcctaccaaggcgacgatctctagctggtctgagaggatgatcagccacactgggactgagacacggcccagactcctacgggaggcagcagtggggaatattggacaatgggggcaaccctgatccagccatgccgcgtgtgtgaagaaggccttagggttgtaaagcactttcaggagtgaggaaggatgcttgattaatactcaagtatcttgacgttagctccagaagaagcaccggctaactctgtgccagcagccgcggtaatacagagggtgcaagcgttaatcggaattactgggcgtaaagcgcgcgtaggtggtttgttaagtcagatgtgaaagcccagggctcaaccttggaattgcacctgatactggcaggctagagtacggtagagggatgtggaatttcctgtgtagcggtgaaatgcgtagatataggaaggaacatcagtggcgaaggcgacatcctggactgatactgacactgaggtgcgaaagcgtggggagcaaacaggattagataccctggtagtccacgccgtaaacgatgtctactagccgttggtcgattttagattagtggcgcagctaacgcgataagtagaccgcctggggagtacggccgcaaggttaaaactcaaatgaattgacgggggcccgcacaagcggtggagcatgtggtttaattcgaagcaacgcgaagaaccttacctactcttgacatccagagaacttagcagagatgctttggtgccttcgggaactctgagacaggtgctgcatggctgtcgtcagctcgtgttgtgaaatgttgggttaagtcccgtaacgagcgcaacccttatccttatttgccagcacttcgggtgggaactctaaggagactgccggtgacaaaccggaggaaggtggggacgacgtcaagtcatcatggcccttacgagtagggctacacacgtgctacaatggcgcatacagagggcagcgaactagcgatagtaagcaaatcccaaaaagtgcgtcgtagtccggattggagtctgcaactcgactccatgaagtcggaatcgctagtaatcgtggatcagaatgccacggtgaatacgttcccgggccttgtacacaccgcccgtcacaccatgggagttgat

SEQ ID NO: 1984 - DNA, 1461 bp, Marinomonas communis
  source 1..1461: mol_type = unassigned DNA
attgaacgctggcggcaggcttaacacatgcaagtcgagcggtaacatttctagcttgctagaagatgacgagcggcggacgggtgagtaacgcgtaggaatctgcctagtagtgggggacaacatgtggaaacgcatgctaataccgcatacgccctacgggggaaaggaggggatcttcggacctttcgctattagatgagcctgcgtgagattagctagttggtggggtaaaggcctaccaaggcgacgatctctagctggtctgagaggatgatcagccacactgggactgagacacggcccagactcctacgggaggcagcagtggggaatattggacaatgggcgcaagcctgatccagccatgccgcgtgtgtgaagaaggccttagggttgtaaagcactttcaggagtgaggaagggcgtatagttaatacctgtatgttttgacgttaactccagaagaagcaccggctaactctgtgccagcagccgcggtaatacagagggtgcgagcgttaatcggaattactgggcgtaaagcgcgcgtaggcggtttgttaagtcggatgtgaaatcccagggctcaaccttggaatggcacccgatactggcaggctagagtacggtagaggggtgtggaatttcctgtgtagcggtgaaatgcgtagatataggaaggaacatcagtggcgaaggcgacaccctggaccgatactgacgctgaggtgcgaaagcgtggggagcaaacaggattagataccctggtagtccacgccgtaaacgatgtctactagccgttggggatttatttctttagtggcgcagctaacgcgataagtagaccgcctggggagtacggccgcaaggttaaaactcaaatgaattgacgggggcccgcacaagcggtggagcatgtggtttaattcgaagcaacgcgaagaaccttacctactcttgacatccagagaacttttcagagatgaattggtgccttcgggaactctgagacaggtgctgcatggctgtcgtcagctcgtgttgtgaaatgttgggttaagtcccgtaacgagcgcaacccttatccttatttgccagcacttcgggtgggaactctaaggagactgccggtgacaaaccggaggaaggtggggacgacgtcaagtcatcatggcccttacgagtagggctacacacgtgctacaatggcgtatacagagggcagcgaactcgcgagggtaagcaaatcccaaaaagtacgtcgtagtccggattggagtctgcaactcgactccatgaagtcggaatcgctagtaatcgtgaatcagaatgtcacggtgaatacgttcccgggccttgtacacaccgcccgtcacaccatgggagttgattgctccagaagtagctagcttaaccttcgggatggcggttaccacggagtggtcaatgactggggtg

SEQ ID NO: 1985 - DNA, 1415 bp, Marinomonas foliarum
  source 1..1415: mol_type = unassigned DNA
cgctggcggcaggcttaacacatgcaagtcgagcggtaacaggggagcttgctcctgctgacgagcggcggacgggtgagtaacgcgtaggaatctgcctagtagagggggacaacatgtggaaacgcatgctaataccgcatacgccctaagggggaaaggaggggactcttcggagccttccgctattagatgagcctgcgtaagattagctagttggtagggtaaaggcctaccaaggcgacgatctttaactggtctgagaggatgaccagtcacactgggactgagacacggcccagactcctacgggaggcagcagtggggaatattggacaatgggcgaaagcctgatccagccatgccgcgtgtgtgaagaaggccttagggttgtaaagcactttcaggggtgaggaagggtagctagttaatacctagttattttgacgttagccccagaagaagcaccggctaactctgtgccagcagccgcggtaatacagagggtgcaagcgttaatcggaattactgggcgtaaagcgcgcgtaggtggtttgttaagtcggatgtgaaatcccagggctcaaccttggaatggcacccgatactggcaggctagagtacggtagaggggtgtggaatttcctgtgtagcggtgaaatgcgtagatataggaaggaacatcagtggcgaaggcgacaccctggactgatactgacactgaggtgcgaaagcgtggggagcaaacaggattagataccctggtagtccacgccgtaaacgatgtctactagccgttgggttgtaatgacttagtggcgcagctaacgcaataagtagaccgcctggggagtacggccgcaaggttaaaactcaaatgaattgacgggggcccgcacaagcggtggagcatgtggtttaattcgaagcaacgcgaagaaccttacctactcttgacatccagtgaacttagcagagatgctttggtgccttcgggaacactgagacaggtgctgcatggctgtcgtcagctcgtgttgtgaaatgttgggttaagtcccgtaacgagcgcaacccttatccttatttgccagcacttcgggtgggaactttaaggagactgccggtgacaaaccggaggaaggtggggacgacgtcaagtcatcatggcccttacgagtagggctacacacgtgctacaatggcgtatacagagggctgcgaactagcgatagtaagcgaatcccagaaagtacgtcgtagtccggattggagtctgcaactcgactccatgaagtcggaatcgctagtaatcgtgaatcagaatgtcacggtgaatacgttcccgggccttgtacacaccgcccgtcacaccatgggagttgattgctccagaagtagctagcttaaccctt

SEQ ID NO: 1986 - DNA, 1411 bp, unidentified
  source 1..1411: mol_type = unassigned DNA; note = Marinomonas fungiae
acacatgcaagtcgagcggtaacaggaattagcttgctcatttgctgacgagcggcggacgggtgagtaacgcgtaggaatctgcctggtagtgggggacaacatgtggaaacgcatgctaataccgcatacgccctacgggggaaaggaggggatcttcggacctttcgctatcagatgagcctgcgtgagattagctagttggtggggtaaaggctcaccaaggcgacgatctctagctggtctgagaggatgatcagccacactgggactgagacacggcccagactcctacgggaggcagcagtggggaatattggacaatgggcgcaagcctgatccagccatgccgcgtgtgtgaagaaggccttcgggttgtaaagcactttcagaagtgaggaagggtgtgtagttaatacctacatatcttgacgttagcttcagaagaagcaccggctaactctgtgccagcagccgcggtaatacagagggtgcgagcgttaatcggaattactgggcgtaaagcgcgcgtaggtggtttgttaagtcggatgtgaaagcccagggctcaaccttggaattgcacccgatactggcaggctagagtacggtagaggggtgtggaatttcctgtgtagcggtgaaatgcgtagatataggaaggaacatcagtggcgaaggcgacaccctggaccgatactgacactgaggtgcgaaagcgtggggagcaaacaggattagataccctggtagtccacgccgtaaacgatgtctactagccgttggggattttattcttagtggcgcagctaacgcgataagtagaccgcctggggagtacggccgcaaggttaaaactcaaatgaattgacgggggcccgcacaagcggtggagcatgtggtttaattcgaagcaacgcgaagaaccttacctactcttgacatccagagaatttagcagagatgctttagtgccttcgggaactctgagacaggtgctgcatggctgtcgtcagctcgtgttgtgaaatgttgggttaagtcccgtaacgagcgcaacccttatccttatttgccagcacttcgggtgggaactctaaggagactgccggtgacaaaccggaggaaggtggggacgacgtcaagtcatcatggcccttacgagtagggctacacacgtgctacaatggcgtatacagagggccgcaagaccgcgaggtggagcaaatcccaaaaagtacgtcgtagtccggattggagtctgcaactcgactccatgaagtcggaatcgctagtaatcgtgaatcagaatgtcacggtgaatacgttcccgggccttgtacacaccgcccgtcacaccatgggagttgattgctccagaagtagctagcttaaccttcgggatggcggt

SEQ ID NO: 1987 - DNA, 1464 bp, unidentified
  source 1..1464: mol_type = unassigned DNA; note = Marinomonas gallaica
attgaacgctggcggcaggcttaacacatgcaagtcgagcggtaacaggaattagcttgctaatttgctgacgagcggcggacgggtgagtaacgcgtaggaatctgcctagtagtgggggacaacatgtggaaacgcatgctaataccgcatacgccctacgggggaaaggaggggatcttcggacctttcgctattagatgagcctgcgtaagattagctagttggtggggtaaaggctcaccaaggcgacgatctttagctggtctgagaggatgatcagccacactgggactgagacacggcccagactcctacgggaggcagcagtggggaatattggacaatgggcgcaagcctgatccagccatgccgcgtgtgtgaagaaggccttcgggttgtaaagcactttcagaagtgaggaagggtgattggctaatatccaattatcttgacgttagcttcagaagaagcaccggctaactctgtgccagcagccgcggtaatacagagggtgcgagcgttaatcggaattactgggcgtaaagcgcgcgtaggtggtttgttaagtcggatgtgaaagcccagggctcaaccttggaattgcacccgatactggcaggctagagtacggtagaggggtgtggaatttcctgtgtagcggtgaaatgcgtagatataggaaggaacatcagtggcgaaggcgacaccctggaccgatactgacactgaggtgcgaaagcgtggggagcaaacaggattagataccctggtagtccacgccgtaaacgatgtctactagccgttggggattttatctttagtggcgcagctaacgcgataagtagaccgcctggggagtacggccgcaaggttaaaactcaaatgaattgacgggggcccgcacaagcggtggagcatgtggtttaattcgaagcaacgcgaagaaccttacctactcttgacatccagtgaacttttgagagatcaattggtgccttcgggaacactgagacaggtgctgcatggctgtcgtcagctcgtgttgtgaaatgttgggttaagtcccgtaacgagcgcaacccttatccttatttgccagcacttcgggtgggaactctaaggagactgccggtgacaaaccggaggaaggtggggacgacgtcaagtcatcatggcccttacgagtagggctacacacgtgctacaatggcgcatacagagggccgcgaacttgcgagagtaagcaaatcccacaaagtgcgtcgtagtccggattggagtctgcaactcgactccatgaagtcggaatcgctagtaatcgtgaatcagaatgtcacggtgaatacgttcccgggccttgtacacaccgcccgtcacaccatgggagttgattgctccagaagtagctagcttaacccttcggggatggcggttaccacggagtggtcaatgactggggtg

SEQ ID NO: 1988 - DNA, 1464 bp, unidentified
  source 1..1464: mol_type = unassigned DNA; note = Marinomonas hwangdonensis
attgaacgctggcggcaggcttaacacatgcaagtcgagcggtagcacagagaaacttgtttcttgggtgacgagcggcggacgggtgagtaacgcgtaggaatctacctagtagagggggacaacatgtggaaacgcatgctaataccgcatacgcccttagggggaaaggaggggacttttcggagccttccgctattagatgagcctgcgtgagattagctagttggtagggtaaaggcctaccaaggcgacgatctctaactggtctgagaggatgaccagtcacactgggactgagacacggcccagactcctacgggaggcagcagtggggaatattggacaattggcgcaagcctgatccagccatgccgcgtgtgtgaagaaggccttagggttgtaaagcactttcaggggtgaggaagggcgtttggttaatacctaaacgtcttgacgttagccccagaagaagcaccggctaactctgtgccagcagccgcggtaatacagagggtgcaagcgttaatcggaattactgggcgtaaagcgcgcgtaggtggtttgttaagtcggatgtgaaatcccagggctcaaccttggaatggcacccgatactggcaagctagagtatggtagaggggtgtggaatttcctgtgtagcggtgaaatgcgtagatataggaaggaacatcagtggcgaaggcgacaccctggactaatactgacactgaggtgcgaaagcgtggggagcaaacaggattagataccctggtagtccacgccgtaaacgatgtctactagccgttgggttgtaatgacttagtggcgcagctaacgcaataagtagaccgcctggggagtacggccgcaaggttaaaactcaaatgaattgacgggggcccgcacaagcggtggagcatgtggtttaattcgacgcaacgcgaagaaccttacctactcttgacatccagagaattcgctagagatagcttagtgccttcgggaactctgagacaggtgctgcatggctgtcgtcagctcgtgttgtgaaatgttgggttaagtcccgtaacgagcgcaacccttatccttatttgccagcacttcgggtgggaactttaaggagactgccggtgacaaaccggaggaaggtggggacgacgtcaagtcatcatggcccttacgagtatggctacacacgtgctacaatggcgtatacagagggctgcgagctagcgatagtgagcgaatcccagaaagtacgtcgtagtccggattggagtctgcaactcgactccatgaagtcggaatcgctagtaatcgtgaatcagaatgtcacggtgaatacgttcccgggccttgtacacaccgcccgtcacaccatgggagttgattgctccagaagtagctagcctaaccgcaaggggggcggttaccacggagtggtcaatgactggggtg

SEQ ID NO: 1989 - DNA, 1461 bp, Marinomonas mediterranea
  source 1..1461: mol_type = unassigned DNA
attgaacgctggcggcaggcttaacacatgcaagtcgagcggaaacgatgatagcttgctatcaggcgtcgagcggcggacgggtgagtaacgcgtaggaatctgcctagtagagggggacaacatgtggaaacgcatgctaataccgcatacgcccttttggggaaaggaggggatcttcggaccttccgctattagatgagcctgcgtgagattagctagttggtggggtaaaggcctaccaaggcgacgatctctagctggtctgagaggatgatcagccacactgggactgagacacggcccagactcctacgggaggcagcagtggggaatattggacaatgggggcaaccctgatccagccatgccgcgtgtgtgaagaaggccttagggttgtaaagcactttcagaagtgaggaagggtgcttgattaatactcaagtactttgacgttagcttcagaagaagcaccggctaactctgtgccagcagccgcggtaatacagagggtgcaagcgttaatcggaattactgggcgtaaagcgcgcgtaggtggtttgttaagtcagatgtgaaagcccagggctcaaccttggaattgcacctgatactggcaggctagagtacggtagagggatgtggaatttcctgtgtagcggtgaaatgcgtagatataggaaggaacatcagtggcgaaggcgacatcctggactgatactgacactgaggtgcgaaagcgtggggagcaaacaggattagataccctggtagtccacgccgtaaacgatgtctactagccgttggtcgattttagattagtggcgcagctaacgcgataagtagaccgcctggggagtacggccgcaaggttaaaactcaaatgaattgacgggggcccgcacaagcggtggagcatgtggtttaattcgaagcaacgcgaagaaccttacctactcttgacatccagagaacttagcagagatgctttggtgccttcgggaactctgagacaggtgctgcatggctgtcgtcagctcgtgttgtgaaatgttgggttaagtcccgtaacgagcgcaacccttatccttatttgctagcaggtgatgctgagaactctaaggagactgccggtgacaaaccggaggaaggtggggacgacgtcaagtcatcatggcccttacgagtagggctacacacgtgctacaatggcgcatacagagggcggcgaacttgcgaaagtaagcaaatcccaaaaagtgcgtcgtagtccggattggagtctgcaactcgactccatgaagtcggaatcgctagtaatcgtggatcagaatgccacggtgaatacgttcccgggccttgtacacaccgcccgtcacaccatgggagttgattgctccagaagtagctagcttaaccttcgggatggcggttaccacggagtggtcaatgactggggtg

SEQ ID NO: 1990 - DNA, 1455 bp, Marinomonas polaris
  source 1..1455: mol_type = unassigned DNA
attgaacgctggcggcaggcttaacacatgcaagtcgagcggtaacaggggagcttgctcctgctgacgagcggcggacgggtgagtaacgcgtaggaatctacctagtagagggggacaacatgtggaaacgcatgctaataccgcatacaccctaagggggaaaggaggggactcttcggagccttccgctattagatgagcctgcgtgagattagctagttggtagggtaaaggcctaccaaggcgacgatctctaactggtctgagaggatgaccagtcacactgggactgagacacggcccagactcctacgggaggcagcagtggggaatattggacaatgggcggaagcctgatccagccatgccgcgtgtgtgaagaaggccttagggttgtaaagcactttcaggggtgaggaagggtgactggctaatatccagttatcttgacgttagccccagaagaagcaccggctaactctgtgccagcagccgcggtaatacagagggtgcaagcgttaatcggaattactgggcgtaagcgcgcgtaggtggtttgttaagtcggatgtgaaatcccagggctcaaccttggaatggcacccgatactggctagctagattatggtagaggggtgtggaatttcctgtgtagcggtgaaatgcgtagatataggaaggaacatcagtggcgaaggcgacaccctggactaatactgacactgaggtgcgaaagcgtggggagcaaacaggattagataccctggtagtccacgccgtaaacgatgtctactagccgttgggttgtaatgacttagtggcgcagctaacgcaataagtagaccgcctggggagtacggccgcaaggttaaaactcaaatgaattgacgggggcccgcacaagcggtggagcatgtggtttaattcgacgcaacgcgaagaaccttacctactcttgacatccagtgaatccgagagagattttggagtgccttcgggaacactgagacaggtgctgcatggctgtcgtcagctcgtgttgtgaaatgttgggttaagtcccgtaacgagcgcaacccttatccttatttgccagcacttcgggtgggaactttaaggagactgccggtgacaaaccggaggaaggtggggacgacgtcaagtcatcatggcccttacgagtagggctacacacgtgctacaatggcgtatacagagggctgcaagctagcgatagtgagcgaatcccacaaagtacgtcgtagtccggattggagtctgcaactcgactccatgaagtcggaatcgctagtaatcgtggatcagaatgccacggtgaatacgttcccgggccttgtacacaccgcccgtcacaccatgggagttgattgctccagaagtagctagcttaactcttcggggatggcggttaccacggagtggtcaatgact

SEQ ID NO: 1991 - DNA, 1380 bp, Marinomonas pollencensis
  source 1..1380: mol_type = unassigned DNA
aaacgatgatagcttgctatcaggcgtcgagcggcggacgggtgagtaacgcgtaggaatctgcctagtagtgggggacaacatgtggaaacgcatgctaataccgcatacgccctacgggggaaaggaggggatcttcggacctttcgctattagatgagcctgcgtaagattagctagttggtggggtaaaggcctaccaaggcgacgatctttagctggtctgagaggatgaccagtcacactgggactgagacacggcccagactcctacgggaggcagcagtggggaatattggacaatgggcgcaagcctgatccagccatgccgcgtgtgtgaagaaggccttagggttgtaaagcactttcaggggtgaggaagggtaagtcgttaataccggcttactttgacgttaaccccagaagaagcaccggctaactctgtgccagcagccgcggtaatacagagggtgcaagcgttaatcggaattactgggcgtaaagcgcgcgtaggtggtttgttaagtcggatgtgaaatcccagggctcaaccttggaatggcacccgatactggcaggctagagtacggtagaggggtgtggaatttcctgtgtagcggtgaaatgcgtagatataggaaggaacatcagtggcgaaggcgacaccctggactgatactgacactgaggtgcgaaagcgtggggagcaaacaggattagataccctggtagtccacgccgtaaacgatgtctactagccgttgggttgtaatgacttagtggcgcagctaacgcaataagtagaccgcctggggagtacggccgcaaggttaaaactcaaatgaattgacgggggcccgcacaagcggtggagcatgtggtttaattcgaagcaacgcgaagaaccttacctactcttgacatccagtgaacttagcagagatgctttggtgccttcgggaacactgagacaggtgctgcatggctgtcgtcagctcgtgttgtgaaatgttgggttaagtcccgtaacgagcgcaacccttatccttacttgctagcaggttatgctgagaactttaaggagactgccggtgacaaaccggaggaaggtggggacgacgtcaagtcatcatggcccttacgagtagggctacacacgtgctacaatggcgtatacagagggctgcgaacttgcgagagtaagcgaatcccagaaagtacgtcgtagtccggattggagtctgcaactcgactccatgaagtcggaatcgctagtaatcgtgaatcagaatgtcacggtgaatacgttcccgggccttgtacacaccgcccgtcacaccatgggagttgattgctccagaagtagctagcttaaccttt

SEQ ID NO: 1992 - DNA, 1462 bp, Marinomonas posidonica
  source 1..1462: mol_type = unassigned DNA
attgaacgctggcggcaggcttaacacatgcaagtcgagcggaaacgatgatagcttgctatcaggcgtcgagcggcggacgggtgagtaacgcgtaggaatctgcctagtagagggggacaacatgtggaaacgcatgctaataccgcatacgcccttttggggaaaggaggggatcttcggaccttccgctattagatgagcctgcgtgagattagctagttggtggggtaaaggcctaccaaggcgacgatctctaactggtctgagaggatgaccagtcacactgggactgagacacggcccagactcctacgggaggcagcagtggggaatattggacaatgggcgcaagcctgatccagccatgccgcgtgtgtgaagaaggccttagggttgtaaagcactttcaggagtgaggaagggtagtttgttaataccaaattactttgacgttagctccagaagaagcaccggctaactctgtgccagcagccgcggtaatacagagggtgcaagcgttaatcggaattactgggcgtaaagcgcgcgtaggtggtttgttaagtctgatgtgaaatcccagggctcaaccttggaatggcaccggatactggcaggctagagtacggtagaggggtgtggaatttcctgtgtagcggtgaaatgcgtagatataggaaggaacatcagtggcgaaggcgacaccctggactgatactgacactgaggtgcgaaagcgtggggagcaaacaggattagataccctggtagtccacgccgtaaacgatgtctactagccgttgggttgtaatgacttagtggcgcagctaacgcaataagtagaccgcctggggagtacggccgcaaggttaaaactcaaatgaattgacgggggcccgcacaagcggtggagcatgtggtttaattcgaagcaacgcgaagaaccttacctactcttgacatccagagaacttagcagagatgctttggtgccttcgggaactctgagacaggtgctgcatggctgtcgtcagctcgtgttgtgaaatgttgggttaagtcccgtaacgagcgcaacccttatccttacttgccagcacttcgggtgggaactttaaggagactgccggtgacaaaccggaggaaggtggggacgacgtcaagtcatcatggcccttacgagtagggctacacacgtgctacaatggcgtatacaaagggcagctaacttgcgagagtgtgcaaatcccataaagtacgtcgtagtccggattggagtctgcaactcgactccatgaagtcggaatcgctagtaatcgtggatcagaatgccacggtgaatacgttcccgggccttgtacacaccgcccgtcacaccatgggagttgattgctccagaagtagctagcttaacctttcggggatggcggttaccacggagtggtcaatgactggggtg

SEQ ID NO: 1993 - DNA, 1414 bp, Marinomonas primoryensis
  source 1..1414: mol_type = unassigned DNA
catgcaagtcgagcggtaacagaggagcttgctcctgctgacgagcggcggacgggtgagtaacgcgtaggaatctgcctagtagagggggacaacatgtggaaacgcatgctaataccgcatacgccctaagggggaaaggaggggactcttcggagccttccgctattagatgagcctgcgtgagattagctagttggtagggtaaaggcctaccaaggcgacgatctctaactggtctgagaggatgaccagtcacactgggactgagacacggcccagactcctacgggaggcagcagtggggaatattggacaatgggcgcaagcctgatccagccatgccgcgtgtgtgaagaaggccttagggttgtaaagcactttcaggggtgaggaagggtgatagcttaatacgttatcattttgacgttagccccagaagaagcaccggctaactctgtgccagcagccgcggtaatacagagggtgcaagcgttaatcggaattactgggcgtaaagcgcgcgtaggtggtttgttaagtcggatgtgaaatcccagggctcaaccttggaatggcacccgatactggctagctagagtatggtagaggggtgtggaatttcctgtgtagcggtgaaatgcgtagatataggaaggaacatcagtggcgaaggcgacaccctggactaatactgacactgaggtgcgaaagcgtggggagcaaacaggattagataccctggtagtccacgccgtaaacgatgtctactagccgttgggttgtaatgacttagtggcgcagctaacgcaataagtagaccgcctggggagtacggccgcaaggttaaaactcaaatgaattgacgggggcccgcacaagcggtggagcatgtggtttaattcgaagcaacgcgaagaaccttacctactcttgacatccacagaacatttgagagatcagatggtgccttcgggaactgtgagacaggtgctgcatggctgtcgtcagctcgtgttgtgaaatgttgggttaagtcccgtaacgagcgcaacccttgtccttatttgccagcacgtaatggtgggaactttaaggagactgccggtgacaaaccggaggaaggtggggacgacgtcaagtcatcatggcccttacgagtagggctacacacgtgctacaatggcgtatacagagggctgcaagctagcgatagtgagcgaatcccacaaagtacgtcgtagtccggattggagtctgcaactcgactccatgaagtcggaatcgctagtaatcgtgaatcagaatgtcacggtgaatacgttcccgggccttgtacacaccgcccgtcacaccatgggagttgattgctccagaagtagctagcttaacccttcggggaggcggttaccaa

SEQ ID NO: 1994 - DNA, 1461 bp, unidentified
  source 1..1461: mol_type = unassigned DNA; note = Marinomonas profundimaris
attgaacgctggcggcaggcttaacacatgcaagtcgagcggaaacgatgtagcttgccacaggcgtcgagcggcggacgggtgagtaacgcgtaggaatctgcctagtagagggggacaacatgtggaaacgcatgctaataccgcatacgccctgagggggaaaggaggggatcacttgtgaccttccgctattagatgagcctgcgtgagattagctagttggtagggtaaaggcctaccaaggcgacgatctctaactggtctgagaggatgaccagtcacactgggactgagacacggcccagactcctacgggaggcagcagtggggaatattggacaatgggcgcaagcctgatccagccatgccgcgtgtgtgaagaaggccttagggttgtaaagcacttccaggagtgaggaagggcgtttggttaatacccaaatgttttgacgttagctccagaagaagcaccggctaactctgtgccagcagccgcggtaatacagagggtgcaagcgttaatcggaattactgggcgtaaagcgcgcgtaggtggtttgttaagtcggatgtgaaatcccagggctcaaccttggaatggcacccgatactggcaggctagagtacggtagaggggtgtggaatttcctgtgtagcggtgaaatgcgtagatataggaaggaacatcagtggcgaaggcgacaccctggactgatactgacactgaggtgcgaaagcgtggggagcaaacaggattagataccctggtagtccacgccgtaaacgatgtctactagccgttgggttgtaatgacttagtggcgcagctaacgcaataagtagaccgcctggggagtacggccgcaaggttaaaactcaaatgaattgacgggggcccgcacaagcggtggagcatgtggtttaattcgaagcaacgcgaagaaccttacctactcttgacatccacagaatcagaaagagatttttgagtgccttcgggaactgtgagacaggtgctgcatggctgtcgtcagctcgtgttgtgaaatgttgggttaagtcccgtaacgagcgcaacccttatccttatttgccagcgggtcatgccgggaactttaaggagactgccggtgacaaaccggaggaaggtggggacgacgtcaagtcatcatggcccttacgagtagggctacacacgtgctacaatggcgtatacagagggctgcaagctagcgatagtgagcgaatcccacaaagtacgtcgtagtccggattggagtctgcaactcgactccatgaagtcggaatcgctagtaatcgtgaatcagaatgtcacggtgaatacgttcccgggccttgtacacaccgcccgtcacaccatgggagttgattgctccagaagtagctagcttaaccttcgggatggcggttaccacggagtggtcaatgactggggtg

SEQ ID NO: 1995 - DNA, 1426 bp, Marinomonas rhizomae
  source 1..1426: mol_type = unassigned DNA
ctggcggcaggcttaacacatgcaagtcgagcggtaacaggggagcttgctcctgctgacgagcggcggacgggtgagtaacgcgtaggaatctgcctagtagagggggacaacatgtggaaacgcatgctaataccgcatacgccctacgggggaaaggaggggacttttcggagccttccgctattagatgagcctgcgtaagattagctagttggtagggtaaaggcctaccaaggcgacgatctttaactggtctgagaggatgaccagtcacactgggactgagacacggcccagactcctacgggaggcagcagtggggaatattggacaatgggcgcaagcctgatccagccatgccgcgtgtgtgaagaaggccttagggttgtaaagcactttcaggagtgaggaagggtaattagttaatacctaattattttgacgttagctccagaagaagcaccggctaactctgtgccagcagccgcggtaatacagagggtgcaagcgttaatcggaattactgggcgtaaagcgcgcgtaggtggtttgttaagtcggatgtgaaatcccagggctcaaccttggaatggcacccgatactggcaggctagagtatggtagaggggtgtggaatttcctgtgtagcggtgaaatgcgtagatataggaaggaacatcagtggcgaaggcgacaccctggactaatactgacactgaggtgcgaaagcgtggggagcaaacaggattagataccctggtagtccacgccgtaaacgatgtctactagccgttgggttgtaatgacttagtggcgcagctaacgcaataagtagaccgcctggggagtacggccgcaaggttaaaactcaaatgaattgacgggggcccgcacaagcggtggagcatgtggtttaattcgacgcaacgcgaagaaccttacctactcttgacatccagagaattcgctagagatagcttagtgccttcgggaactctgagacaggtgctgcatggctgtcgtcagctcgtgttgtgaaatgttgggttaagtcccgtaacgagcgcaacccttatccttatttgccagcacttcgggtgggaactttaaggagactgccggtgacaaaccggaggaaggtggggacgacgtcaagtcatcatggcccttacgagtagggctacacacgtgctacaatggcgtatacagagggctgcgaacttgcgagagtaagcgaatcccagaaagtacgtcgtagtccggattggagtctgcaactcgactccatgaagtcggaatcgctagtaatcgtgaatcagaatgtcacggtgaatacgttcccgggccttgtacacaccgcccgtcacaccatgggagttgattgctccagaagtagctagcttaacccttcggggatggcggt

SEQ ID NO: 1996 - DNA, 1418 bp, unidentified
  source 1..1418: mol_type = unassigned DNA; note = Marinomonas spartinae
gcagtcgagcggtaacaggggagcttgctcctgctgacgagcggcggacgggtgagtaacgcgtaggaatctgcctagtagagggggacaacatgtggaaacgcatgctaataccgcatacgcctttagggggaaaggaggggatcacttgtgaccttccgctattagatgagcctgcgtaagattagctagttggtggggtaaaggcctaccaaggcgacgatctttagctggtctgagaggatgaccagccacactgggactgagacacggcccagactcctacgggaggcagcagtggggaatattggacaatggggggaaccctgatccagccatgccgcgtgtgtgaagaaggccttagggttgtaaagcactttcaggagtgaggaagggtgcttggttaatacccaagtattttgacgttagctccagaagaagcaccggctaactctgtgccagcagccgcggtaatacagagggtgcaagcgttaatcggaattactgggcgtaaagcgcgcgtaggtggtttgttaagtctgatgtgaaaccccagggctcaaccttggaatggcaccggatactggcaggctagagtacggtagagggatgtggaatttcctgtgtagcggtgaaatgcgtagatataggaaggaacatcagtggcgaaggcgacatcctggactgatactgacactgaggtgcgaaagcgtggggagcaaacaggattagataccctggtagtccacgccgtaaacgatgtctactagccgttgggttgtaatgacttagtggcgcagttaacgcgataagtagaccgcctggggagtacggccgcaaggttaaaactcaaatgaattgacgggggcccgcacaagcggtggagcatgtggtttaattcgaagcaacgcgaagaaccttacctactcttgacatccacagaagaacgcagagatgtgtttgtgccttcgggaactgtgagacaggtgctgcatggctgtcgtcagctcgtgttgtgaaatgttgggttaagtcccgtaacgagcgcaacccttatccttacttgctagcgggtaatgccgagaactttaaggagactgccggtgacaaaccggaggaaggtggggacgacgtcaagtcatcatggcccttacgagtagggctacacacgtgctacaatggcgtatacagagggcagcgaacttgcgagagtaagcgaatcccaaaaagtacgtcgtagtccggattggagtctgcaactcgactccatgaagtcggaatcgctagtaatcgtgaatcagaatgtcacggtgaatacgttcccgggccttgtacacaccgcccgtcacaccatgggagttgattgctccagaagtagatagtctaaccttaggggggacgtttaccacggagtggtc

SEQ ID NO: 1997 - DNA, 1388 bp, Marinovum algicola
  source 1..1388: mol_type = unassigned DNA
aacgaacgctggcggcaggcctaacacatgcaagtcgagcgagctcttcggagctagcggcggacgggttagtaacgcgtgggaacgtgcccttcactgcggaatagccactggaaacggtgagtaataccgcatacgcccttcgggggaaagatttatcggtgaaggatcggcccgcgttagattagatagttggtggggtaacggcctaccaagtctacgatctatagctggttttagaggatgatcagcaacactgggactgagacacggcccagactcctacgggaggcagcagtggggaatcttggacaatgggcgcaagcctgatccagccatgccgcgtgagtgatgaaggccttagggtcgtaaagctctttcgccagagatgataatgacagtatctggtaaagaaaccccggctaactccgtgccagcagccgcggtaatacggagggggttagcgttgttcggaattactgggcgtaaagcgcacgtaggcggatcagaaagttgggggtgaaatcccggggctcaaccccggaactgcctccaaaactcctggtcttgagttcgagagaggtgagtggaattccgagtgtagaggtgaaattcgtagatattcggaggaacaccagtggcgaaggcggctcactggctcgatactgacgctgaggtgcgaaagtgtggggagcaaacaggattagataccctggtagtccacaccgtaaacgatgaatgccagtcgtcgggtagcatgctattcggtgacacacctaacggattaagcattccgcctggggagtacggtcgcaagattaaaactcaaaggaattgacgggggcccgcacaagcggtggagcatgtggtttaattcgaagcaacgcgcagaaccttaccaacccttgacatcctcagctacatcgagagatcgatggttcccttcggggactgagtgacaggtgctgcatggctgtcgtcagctcgtgtcgtgagatgttcggttaagtccggcaacgagcgcaacccacatccctagttgccagcagttcggctgggcactctatggaaactgcccgtgataagcgggaggaaggtgtggatgacgtcaagtcctcatggcccttacgggttgggctacacacgtgctacaatggcagtgacaatgggttaatcccaaaaaactgtctcagttcggattgtcgtctgcaactcgacggcatgaagtcggaatcgctagtaatcgcgtaacagcatgacgcggtgaatacgttcccgggccttgtacacaccgcccgtcacaccatgggagttgggttcacccgaaggccgtgcgccaacctttcgaggaggcagcggaccacggtgagctcagcgactggggtgaa

SEQ ID NO: 1998 - DNA, 1459 bp, unidentified
  source 1..1459: mol_type = unassigned DNA; note = Mariprofundus aestuarium
aacgaacgctggcggcgtgcctaacacatgcaagtcgaacggactttatttcttcggatttaaagttagtggcgcacgggtgagtaacgcgtggatatctgcctatcagtgggggacaactacgggaaaccgtagctaataccgcatacgatctaaggatgaaagcaggggaccttcgggccttgtgctgatagatgagtccgcgtcagattagctagttggtaaggtaatggcttaccaaggcgatgatctgtaactggtttgagaggatgatcagtcacactggaactgagacacggtccagactcctacgggaggcagcagtggggaatattgcacaatgggggaaaccctgatgcagcgacgccgcgtgcgggaagaaggccttcgggttgtaaaccgctttcaattgggaagaagagatgagagctaatatctctctgatttgacggtacctttagaagaagcaccggctaatttcgtgccagcagccgcggtaatacgaaaggtgcaagcgttgttcggatttactgggcgtaaagagatcgtaggtggtttgttaagtcggatgtgaaatcccggggctcaacctcggaactgcattcgatactggcaggctagagtttgggaggggtaagcggaattccgtgtgtagcagtgaaatgcgtagatatacggaggaacacctgaggcgaaggcggcttactggaccaatactgacactgaggatcgaaagcgtgggtagcaaacaggattagataccctggtagtccacgccctaaacgatgtcaactagccgttgcgggtatcgacccctgcagtggcgaagctaacgcgataagttgaccgcctggggagtacggtcgcaagattaaaactcaaaggaattgacgggggcccgcacaagcggtggagcatgtggtttaattcgacgcaacgcgaagaaccttacctgggtttgacatctacggaattctttagagatagagaagtgccttcgggagccgtaagacaggtgctgcatggctgtcgtcagctcgtgtcgtgagatgttgggttaagtcccgcaacgagcgcaacccctattgttagttgccatcattaagttgggcactctagcgagactgccggtgacaaaccggaggaaggtggggacgacgtcaagtcatcatggcccttatgtccagggctacacacgtgctacaatggtggatacaacaagttgcaatagggcgacctggagctaatctgtaaagtccatctcagttcggattgaagtctgcaactcgacttcatgaagttggaatcgctagtaatcgcggatcagcatgccgcggtgaatacgttcccgggccttgtacacaccgcccgtcacaccatgggaattggttgcaccagaagccgccgggctaacccttcggggaggcaggcgtctacggtgtggtcggtaactggggtg

SEQ ID NO: 1999 - DNA, 1458 bp, Mariprofundus ferrooxydans
  source 1..1458: mol_type = unassigned DNA
aacgaacgctggcggcgtgcctaacacatgcaagtcgaacggactttaagacttcggttttaaagttagtggcgcacgggtgagtaacgcgtggatatctgcctatcagtgggggacaactacaggaaactgtagctaataccgcatacgctgtacgcaggaaagcgggggatcttcggacctcgcgctgatagatgagtccgcgtctgattagctagttggtggggtaaaggcctaccaaggcgatgatcagtaactggtttgagaggatgatcagtcacactggaactgagacacggtccagactcctacgggaggcagcagtggggaatattgcacaatgggggaaaccctgatgcagcgacgccgcgtgcgggaagaaggccttcgggttgtaaaccgctttcaattgggaagaagagatgagtactaatactgctctgatttgacggtacctttagaagaagcaccggctaatttcgtgccagcagccgcggtaatacgaaaggtgcaagcgttgttcggatttactgggcgtaaagagatcgtaggtggtttgttaagtcggatgtgaaatcccagggctcaaccctggaactgcattcgatactggcagactagagtttgggaggggtaagcggaattccgtgtgtagcagtgaaatgcgtagatatacggaggaacacctgaggcgaaggcggcttactggaccaatactgacactgaggatcgaaagcgtgggtagcaaacaggattagataccctggtagtccacgccctaaacgatgtcaactagccgtagcgggtatcgacccctgctgtggcgaagctaacgcgataagttgaccgcctggggagtacggtcgcaagattaaaactcaaaggaattgacgggggcccgcacaagcggtggagcatgtggtttaattcgacgcaacgcgaagaaccttacctgggtttgacatcctaagaatactttagagatagagtagtgccttcgggagcttagagacaggtgctgcatggctgtcgtcagctcgtgtcgtgagatgttgggttaagtcccgcaacgagcgcaacccctatcgttagttgccatcatttagttgggcactctagcgagactgccggtgacaaaccggaggaaggtggggacgacgtcaagtcatcatggcccttatgtccagggctacacacgtgctacaatggcgactacaacaagttgcgaacccgcgagggggagccaatcttataaaagtcgtctcagttcggattggagtctgcaactcgactccatgaagttggaatcgctagtaatcgcggatcagcatgccgcggtgaatacgttcccgggccttgtacacaccgcccgtcacaccatgggaattggttgcaccagaagccgccgggctaaccttcgggaggcaggcgtctacggtgtggtcggtaactggggtg

SEQ ID NO: 2000 - DNA, 1459 bp, unidentified
  source 1..1459: mol_type = unassigned DNA; note = Mariprofundus micogutta
aacgaacgctggcggcgtgcctaacacatgcaagtcgaacggtaacagtgacttcggtcagctgacgagtggcgcacgggtgagtaacgcgtggatatctgcctattagtgggggacaactacgggaaaccgtagctaataccgcataatctctacggaggaaagcaggggaccttcgggccttgcgctgatagatgagtccgcgtctgattagctagttggtagggtaatggcctaccaaggcgatgatcagtaactggtttgagaggatgatcagtcacactggaactgagacacggtccagacttctacggaaggcagcagtggggaatattgcacaatgggcgaaagcctgatgcagcgacgccgcgtgcgggaagaaggccttcgggttgtaaaccgctttcaattgggaagaagagaagagtgctaatatcgctctgatttgacggtacctttagaagaagcaccggctaatttcgtgccagcagccgcggtaatacgaaaggtgcaagcgttgttcggatttactgggcgtaaagagatcgtaggtggtttgttaagtcggatgtgaaatcccggggctcaaccccggaactgcattcgatactggcagactagagtttgggaggggtaagcggaattccgtgtgtagcagtgaaatgcgtagatatacggaggaacacctgaggcgaaggcggcttactggaccaatactgacactgaggatcgaaagcgtgggtagcaaacaggattagataccctggtagtccacgccctaaacgatgtcaactagccgttgcgggtatcgacccctgcagtggcgaagctaacgcgataagttgaccgcctggggagtacggtcgcaagattaaaactcaaaggaattgacgggggcccgcacaagcggtggagcatgtggtttaattcgacgcaacgcgaagaaccttacctgggtttgacatccttagaattctctagagatagagaagtgccttcgggagctaagtgacaggtgctgcatggttgtcgtcagctcgtgtcgtgagatgttgggttaagtcccgcaacgagcgcaacccctattgttagttgccatcattaagttgggcactctagcgagactgccggtgacaaaccggaggaaggtggggacgacgtcaaatcatcatggcccttatgtccagggctacacacgtgctacaatggtggctacagcaggaagcgatggggtgacccggagccaatcgtcaaaagccatctcagttcggattgtagtctgcaactcgactacatgaagttggaatcgctagtaatcgcggatcagcatgccgcggtgaatacgttcccgggccttgtacacaccgcccgtcacaccatgggaattggttgcaccagaagccgccgggctaacccttcggggaggcaggcgtctacggtgtggtcggtaactggggtg

SEQ ID NO: 2001 - DNA, 1406 bp, Maritalea myrionectae
  source 1..1406: mol_type = unassigned DNA
aacgaacgctggcggcaggcttaacacatgcaagtcgagcgctcacttcggtgggagcggcagacgggtgagtaacgcgtgggaacatacctagtagtacggaataacgtttggaaacgaacgctaataccgtatacgcccttagggggaaagatttatcgctattagattggcccgcgttggattagtttgttggtggggtaatggcctaccaagactacgatctatagctggtctgagaggatgatcagccacactgggactgagacacggcccagactcctacgggaggcagcagtggggaatattggacaatgggggcaaccctgatccagccatgccgcgtgagtgatgaaggccttagggttgtaaagctctttcgctagggaagataatgacggtacctagtaaagaagccccggctaacttcgtgccagcagccgcggtaatacgaagggggctagcgttgttcggaattactgggcgtaaagcgcacgtaggcggattagtaagttaggggtgaaatcccgaggctcaacctcggaactgcctttaatactgctagtctcgagttcgggagaggtgtatggaactcctagtgtagaggtggaattcgtagatattaggaagaacaccagtggcgaaggcgatacactggcccgatactgacgctgaggtgcgaaagcgtggggagcaaacaggattagataccctggtagtccacgccgtaaacgatgagagctagccgttggggtgtttacacttcagtggcgcagttaacgcattaagctctccgcctggggagtacggtcgcaagattaaaactcaaaggaattgacgggggcccgcacaagcggtggagcatgtggtttaattcgaagcaacgcgaagaaccttaccagctcttgacatacctatcgcagtctccggagacggagaccttcagttcggctggataggatacaggtgctgcacggctgtcgtcagctcgtgtcgtgagatgttgggttaagtcccgcaacgagcgcaaccctcgcccttagttgccagcatttagttgggcactctagggggactgccggtgataagccggaggaaggtggggacgacgtcaagtcatcatggcccttacgggctgggctacacacgtgctacaatggcggtgacagagggcagccactccgcgaggaggagctaatccctaaaaaccgtctcagttcggattgcactctgcaactcgagtgcatgaagttggaatcgctagtaatcgtgggtcagcataccacggtgaatacgttcccgggccttgtacacaccgcccgtcacaccatgggagttggttctacccgaaggcgctgcgctaacttttgaggcaggcgaccacggtagggtcagcgactggggtg

SEQ ID NO: 2002 - DNA, 1394 bp, unidentified
  source 1..1394: mol_type = unassigned DNA; note = Marivivens niveibacter
ggctcagaacgaacgctggcggcaggcctaacacatgcaagtcgaacgagatcttcggatctagtggcggacgggttagtaacgcgtgggaacgtacccttcactacggaatagtcctgggaaactgggtttaataccgtatacgcccttcgggggaaagaatttcggtgagggatcggcccgcgttagattagttagttggtggggtaacggcctaccaagactacgatctatagctggtttgagaggatgatcagcaacactgggactgagacacggcccagactcctacgggaggcagcagtggggaatcttagacaatgggggcaaccctgatctagccatgccgcgtgagtgacgaaggccttagggtcgtaaagctctttcgcctgtgaagataatgactgtagcaggtaaagaaaccccggctaactccgtgccagcagccgcggtaatacggagggggttagcgttgttcggaattactgggcgtaaagcgcacgtaggcggactggaaagttagaggtgaaatcccggggctcaacctcggaactgcctttaaaactatcagtctagagttcgagagaggtgagtggaattccgagtgtagaggtgaaattcgtagatattcggaggaacaccagtggcgaaggcggctcactggctcgatactgacgctgaggtgcgaaagcgtggggagcaaacaggattagataccctggtagtccacgccgtaaacgatgaatgccagtcgtcaggttgcttgcaacttggtgacacacctaacggattaagcattccgcctggggagtacggtcgcaagattaaaactcaaaggaattgacgggggcccgcacaagcggtggagcatgtggtttaattcgaagcaacgcgcagaaccttaccaacccttgacatcctaggaccgccagagagatttggctttcacttcggtgacctagtgacaggtgctgcatggctgtcgtcagctcgtgtcgtgagatgttcggttaagtccggcaacgagcgcaacccacacccttagttgccaattatggaactctaagggaactgcccgtgataagcgggaggaaggtgtggatgacgtcaagtcctcatggcccttacgggttgggctacacacgtgctacaatggcatctacagtgggttaatccccaaaagatgtctcagttcggattggggtctgcaactcgaccccatgaagtcggaatcgctagtaatcgcgtaacagcatgacgcggtgaatacgttcccgggccttgtacacaccgcccgtcacaccatgggagttgggtctacccgacggccgtgcgctaacccttttgggaggcagcggaccacggtaggctcagcgactggggtgaagtcgtaa

SEQ ID NO: 2003 - DNA, 1443 bp, Massilia albidiflava
  source 1..1443: mol_type = unassigned DNA
ggcggcatgctttacacatgcaagtcgaacggcagcgcgggcttcggcctggcggcgagtggcgaacgggtgagtaatatatcggaacgtgcccaagagtgggggataacgtagcgaaagttacgctaataccgcatacgatccaaggatgaaagcaggggaccgcaaggccttgtgctcctggagcggccgatatctgattagctagttggtgaggtaaaggctcaccaaggcgacgatcagtagctggtctgagaggacgaccagccacactggaactgagacacggtccagactcctacgggaggcagcagtggggaattttggacaatgggggcaaccctgatccagcaatgccgcgtgagtgaagaaggccttcgggttgtaaagctcttttgtcagggaagaaaagggtacggctaatatccgtgcctcatgacggtacctgaagaataagcaccggctaactacgtgccagcagccgcggtaatacgtagggtgcaagcgttaatcggaattactgggcgtaaagcgtgcgcaggcggttttgtaagtctgtcgtgaaatccccgggcttaacctgggaatggcgatggagactgcaaggctagagtttggcagaggggggtagaattccacgtgtagcagtgaaatgcgtagagatgtggaggaacaccgatggcgaaggcagccccctgggtcaagactgacgctcatgcacgaaagcgtggggagcaaacaggattagataccctggtagtccacgccctaaacgatgtctactagttgttgggtcttaattgacttagtaacgcagctaacgcgtgaagtagaccgcctggggagtacggtcgcaagattaaaactcaaaggaattgacggggacccgcacaagcggtggatgatgtggattaattcgatgcaacgcgaaaaaccttacctacccttgacatgtcaggaatcctggagagatccgggagtgcccgaaagggaacctgaacacaggtgctgcatggctgtcgtcagctcgtgtcgtgagatgttgggttaagtcccgcaacgagcgcaacccttgtcattagttgctacgaaagggcactctaatgagactgccggtgacaaaccggaggaaggtggggatgacgtcaagtcctcatggcccttatgggtagggcttcacacgtcatacaatggtacatacagagggccgccaacccgcgagggggagctaatcccagaaagtgtatcgtagtccggattgtagtctgcaactcgactgcatgaagttggaatcgctagtaatcgcggatcagcatgtcgcggtgaatacgttcccgggtcttgtacacaccgcccgtcacaccatgggagcgggttttaccagaagtaggtagcttaaccgcaaggagggcgcttaccacggtaggattcgtgactggggtg

SEQ ID NO: 2004 - DNA, 1443 bp, Massilia aurea
  source 1..1443: mol_type = unassigned DNA
attgaacgctggcggcatgctttacacatgcaagtcgaacggcagcgcggggcaacctggcggcgagtggcgaacgggtgagtaatatatcggaacgtacccaagagtgggggataacgtagcgaaagttacgctaataccgcatacgatctaaggatgaaagcaggggatcttcggaccttgtgctcctggagcggccgatatctgattagctagttggtgaggtaaaggctcaccaaggccacgatcagtagctggtctgagaggacgaccagccacactggaactgagacacggtccagactcctacgggaggcagcagtggggaattttggacaatgggcgaaagcctgatccagcaatgccgcgtgagtgaagaaggccttcgggttgtaaagctcttttgtcagggaagaaacggtgagggctaatatccttcgctaatgacggtacctgaagaataagcaccggctaactacgtgccagcagccgcggtaatacgtagggtgcaagcgttaatcggaattactgggcgtaaagcgtgcgcaggcggttttgtaagtctgacgtgaaatccccgggctcaacctgggaattgcgttggagactgcaaggctagaatctggcagaggggggtagaattccacgtgtagcagtgaaatgcgtagagatgtggaggaacaccgatggcgaaggcagccccctgggtcaagattgacgctcatgcacgaaagcgtggggagcaaacaggattagataccctggtagtccacgccctaaacgatgtctactagttgtcgggttttaattaacttggtaacgcagctaacgcgtgaagtagaccgcctggggagtacggtcgcaagattaaaactcaaaggaattgacggggacccgcacaagcggtggatgatgtggattaattcgatgcaacgcgaaaaaccttacctacccttgacatgtacggaagaccgaagagatttggttgtgctcgaaagagaaccgtaacacaggtgctgcatggctgtcgtcagctcgtgtcgtgagatgttgggttaagtcccgcaacgagcgcaacccttgtcattagttgctacatttagttgagcactctaatgagactgccggtgacaaaccggaggaaggtggggatgacgtcaagtcctcatggcccttatgggtagggcttcacacgtcatacaatggtacatacagagggccgccaacccgcgagggggagctaatcccagaaagtgtatcgtagtccggatcgcagtctgcaactcgactgcgtgaagttggaatcgctagtaatcgcggatcagcatgtcgcggtgaatacgttcccgggtcttgtacacaccgcccgtcacaccatgggagcgggttttaccagaagtaggtagcttaaccgcaaggagggcgcttaccacggtaggattc

SEQ ID NO: 2005 - DNA, 1451 bp, unidentified
  source 1..1451: mol_type = unassigned DNA; note = Massilia eurypsychrophila
attgaacgctggcggcatgccttacacatgcaagtcgaacggcagcgcggggcaacctggcggcgagtggcgaacgggtgagtaatatatcggaacgtgccctggagtgggggataacgcagcgaaagttgcgctaataccgcatacgatctaaggatgaaagcaggggaccgcaaggccttgtgctcctggagcggccgatatctgattagctagttggtggggtaaaggcctaccaaggcatcgatcagtagctggtctgagaggacgaccagccacactggaactgagacacggtccagactcctacgggaggcagcagtggggaattttggacaatgggcgaaagcctgatccagcaatgccgcgtgagtgaagaaggccttcgggttgtaaagctcttttgtcagggaagaaacggtgtgggctaatatcctgcactaatgacggtacctgaagaataagcaccggctaactacgtgccagcagccgcggtaatacgtagggtgcaagcgttaatcggaattactgggcgtaaagcgtgcgcaggcggttttgtaagtttgtcgtgaaatccccgggctcaacctgggaattgcgatgaagactgcaaggctagaatctggcagaggggggtagaattccacgtgtagcagtgaaatgcgtagagatgtggaggaacaccgatggcgaaggcagccccctgggtcaagattgacgctcatgcacgaaagcgtggggagcaaacaggattagataccctggtagtccacgccctaaacgatgtctactagttgtcgggttttaattaacttggtaacgcagctaacgcgtgaagtagaccgcctggggagtacggtcgcaagattaaaactcaaaggaattgacggggacccgcacaagcggtggatgatgtggattaattcgatgcaacgcgaaaaaccttacctacccttgacatgtacggaagccacgagagatcgaggtgtgctcgaaagagagccgtaacacaggtgctgcatggctgtcgtcagctcgtgtcgtgagatgttgggttaagtcccgcaacgagcgcaacccttgtcattagttgctacgaaagagcactctaatgagactgccggtgacaaaccggaggaaggtggggatgacgtcaagtcctcatggcccttatgggtagggcttcacacgtcatacaatggtacatacagagggccgccaacccgcgagggggagctaatcccagaaagtgtatcgtagtccggattgtagtctgcaactcgactacatgaagttggaatcgctagtaatcgcggatcagcatgtcgcggtgaatacgttcccgggtcttgtacacaccgcccgtcacaccatgggagcgggttttaccagaagtaggtagcttaaccgcaaggagggcgcttaccacggtaggattcgtgactggggtg

SEQ ID NO: 2006 - DNA, 1406 bp, Massilia flava
  source 1..1406: mol_type = unassigned DNA
catgcaagtcgaacggcagcgcgggcttcggcctggcggcgagtggcgaacgggtgagtaatatatcggaacgtgcccaagagtgggggataacgtagcgaaagttacgctaataccgcatacgatctacggatgaaagcaggggaccttcgggccttgtgctcctggagcggccgatatctgattagctagttggtgaggtaaaggctcaccaaggcgacgatcagtagctggtctgagaggacgaccagccacactggaactgagacacggtccagactcctacgggaggcagcagtggggaattttggacaatgggggcaaccctgatccagcaatgccgcgtgagtgaagaaggccttcgggttgtaaagctcttttgtcagggaagaaaaggtcgtggctaatatccatggctcatgacggtacctgaagaataagcaccggctaactacgtgccagcagccgcggtaatacgtagggtgcaagcgttaatcggaattactgggcgtaaagcgtgcgcaggcggttttgtaagtctgtcgtgaaatccccgggcttaacctgggaatggcgatggagactgcaaggctagaatctggcagaggggggtagaattccacgtgtagcagtgaaatgcgtagagatgtggaggaacaccgatggcgaaggcagccccctgggctaagattgacgctcatgcacgaaagcgtggggagcaaacaggattagataccctggtagtccacgccctaaacgatgtctactagttgttgggtcttaattgacttagtaacgcagctaacgcgtgaagtagaccgcctggggagtacggtcgcaagattaaaactcaaaggaattgacggggacccgcacaagcggtggatgatgtggattaattcgatgcaacgcgaaaaaccttacctacccttgacatgtcaggaatccttgagagattgaggagtgcccgaaagggagcctgaacacaggtgctgcatggctgtcgtcagctcgtgtcgtgagatgttgggttaagtcccgcaacgagcgcaacccttgtcattagttgctacgcaagagcactctaatgagactgccggtgacaaaccggaggaaggtggggatgacgtcaagtcctcatggcccttatgggtagggcttcacacgtcatacaatggtacatacagagggccgccaacccgcgagggggagctaatcccagaaagtgtatcgtagtccggattgtagtctgcaactcgactacatgaagttggaatcgctagtaatcgcggatcagcatgtcgcggtgaatacgttcccgggtcttgtacacaccgcccgtcacaccatgggagcgggttttaccagaagtaggtagcttaaccgcaaggagggcgcttaccacg

SEQ ID NO: 2007 - DNA, 1463 bp, unidentified
  source 1..1463: mol_type = unassigned DNA; note = Massilia glaciei
attgaacgctggcggcatgccttacacatgcaagtcgaacggcagcgcggaatggggcaacccggcctggcggcgagtggcgaacgggtgagtaatatatcggaacgtgccctggagtgggggataacgcagcgaaagttgcgctaataccgcatacgatctaaggatgaaagtgggggattcgcaagaacctcatgctcctggagcggccgatatctgattagctagttggtggggtaaaggcctaccaaggcatcgatcagtagctggtctgagaggacgaccagccacactggaactgagacacggtccagactcctacgggaggcagcagtggggaattttggacaatgggcgaaagcctgatccagcaatgccgcgtgagtgaagaaggccttcgggttgtaaagctcttttgtcagggaagaaacggtggcctctaatacaggttgctaatgacggtacctgaagaataagcaccggctaactacgtgccagcagccgcggtaatacgtagggtgcaagcgttaatcggaattactgggcgtaaagcgtgcgcaggcggttttgtaagtctgtcgtgaaatccccgggctcaacctgggaattgcgatggagactgcaaggctagaatctggcagaggggggtagaattccacgtgtagcagtgaaatgcgtagagatgtggaggaacaccgatggcgaaggcagccccctgggtcaagattgacgctcatgcacgaaagcgtggggagcaaacaggattagataccctggtagtccacgccgtaaacgatgtctactagttgtcgggttttaatcaacttggtaacgcagctaacgcgtgaagtagaccgcctggggagtacggtcgcaagattaaaactcaaagggattgacggggacccgcacaagcggtggatgatgtggattaattcgatgcaacgcgaaaaaccttacctacccttgacatgtacggaagccacgagagatcgaggtgtgctcgaaagagaaccgtaacacaggtgctgcatggctgtcgtcagctcgtgtcgtgagatgttgggttaagtcccgcaacgagcgcaacccttgtcattagttgctacgaaagagcactctaatgagactgccggtgacaaaccggaggaaggtggggatgacgtcaagtcctcatggcccttatgggtagggcttcacacgtcatacaatggtacatacagagggccgccaacccgcgagggggagctaatcccagaaagtgtatcgtagtccggattgtagtctgcaactcgactacatgaagttggaatcgctagtaatcgcggatcagcatgtcgcggtgaatacgttcccgggtcttgtacacaccgcccgtcacaccatgggagcgggttttaccagaagtaggtagcttaaccgcaaggagggcgcttaccacggtaggattcgtgactggggtg

SEQ ID NO: 2008 - DNA, 1453 bp, unidentified
  source 1..1453: mol_type = unassigned DNA; note = Massilia lurida
attgaacgctggcggcatgctttacacatgcaagtcgaacggtaacagggagcttgctccgctgacgagtggcgaacgggtgagtaatatatcggaacgtacccaagagtgggggataacgtagcgaaagttacgctaataccgcatacgatctaaggatgaaagtgggggatcttcggacctcatgctcctggagcggccgatatctgattagctagttggtagggtaaaggcctaccaaggcatcgatcagtagctggtctgagaggacgaccagccacactggaactgagacacggtccagactcctacgggaggcagcagtggggaattttggacaatgggggcaaccctgatccagcaatgccgcgtgagtgaagaaggccttcgggttgtaaagctcttttgtcagggaagaaacgggtgcggctaatatctgcatctaatgacggtacctgaagaataagcaccggctaactacgtgccagcagccgcggtaatacgtagggtgcaagcgttaatcggaattactgggcgtaaagcgtgcgcaggcggttttgtaagtctgttgtgaaatccccgggctcaacctgggaatggcaatggagactgcaaggctagagtttggcagaggggggtagaattccacgtgtagcagtgaaatgcgtagagatgtggaggaacaccgatggcgaaggcagccccctgggtcaagactgacgctcatgcacgaaagcgtggggagcaaacaggattagataccctggtagtccacgccctaaacgatgtctactagttgttgggtcttaattgacttagtaacgcagctaacgcgtgaagtagaccgcctggggagtacggtcgcaagattaaaactcaaaggaattgacggggacccgcacaagcggtggatgatgtggattaattcgatgcaacgcgaaaaaccttacctacccttgacatggaaggaacctcggagagatctgagggtgctcgaaagagaaccttcacacaggtgctgcatggctgtcgtcagctcgtgtcgtgagatgttgggttaagtcccgcaacgagcgcaacccttgtcattagttgctacgaaagagcactctaatgagactgccggtgacaaaccggaggaaggtggggatgacgtcaagtcctcatggcccttatgggtagggcttcacacgtcatacaatggtacatacagagggccgccaacccgcgagggggagctaatcccagaaagtgtatcgtagtccggatcgtagtctgcaactcgactacgtgaagttggaatcgctagtaatcgcggatcagcatgtcgcggtgaatacgttcccgggtcttgtacacaccgcccgtcacaccatgggagcgggttttaccagaagtaggtagcttaaccgcaaggggggcgcttaccacggtaggattcgtgactggggtg

SEQ ID NO: 2009 - DNA, 1437 bp, Massilia lutea
  source 1..1437: mol_type = unassigned DNA
gctttacacatgcaagtcgaacggcagcagcgggcttcggcctggtcggcgagtggcgaacgggtgagtaatatatcggaacgtgcccaagagtgggggataacgtagcgaaagttacgctaataccgcatacgatctatggatgaaagcgggggaccgcaaggccttgtgctcctggagcggccgatatctgattagctagttggtgaggtaaaggctcaccaaggcgacgatcagtagctggtctgagaggacgaccagccacactggaactgagacacggtccagactcctacgggaggcagcagtggggaattttggacaatgggggcaaccctgatccagcaatgccgcgtgagtgaagaaggccttcgggttgtaaagctcttttgtcagggaagaaaagggtacggctaatatccgtgcctcatgacggtacctgaagaataagcaccggctaactacgtgccagcagccgcggtaatacgtagggtgcaagcgttaatcggaattactgggcgtaaagcgtgcgcaggcggttttgtaagtctgttgtgaaatccccgggcttaacctgggaatggcaatggagactgcaaggctagagtttggcagaggggggtagaattccacgtgtagcagtgaaatgcgtagagatgtggaggaacaccgatggcgaaggcagccccctgggtcaagactgacgctcatgcacgaaagcgtggggagcaaacaggattagataccctggtagtccacgccctaaacgatgtctactagttgttgggtcttaattgacttagtaacgcagctaacgcgtgaagtagaccgcctggggagtacggtcgcaagattaaaactcaaaggaattgacggggacccgcacaagcggtggatgatgtggattaattcgatgcaacgcgaaaaaccttacctacccttgacatgtcaggaatcccggagagatccgggagtgcccgaaagggaacctgaacacaggtgctgcatggctgtcgtcagctcgtgtcgtgagatgttgggttaagtcccgcaacgagcgcaacccttgtcattagttgctacgaaagagcactctaatgagactgccggtgacaaaccggaggaaggtggggatgacgtcaagtcctcatggcccttatgggtagggcttcacacgtcatacaatggtacatacagagggccgccaacccgcgagggggagctaatcccagaaagtgtatcgtagtccggattgtagtctgcaactcgactgcatgaagttggaatcgctagtaatcgcggatcagcatgtcgcggtgaatacgttcccgggtcttgtacacaccgcccgtcacaccatgggagcgggttttaccagaagtaggtagcttaaccgcaaggagggcgcttaccacggtaggattcgtgactggggtg

SEQ ID NO: 2010 - DNA, 1451 bp, unidentified
  source 1..1451: mol_type = unassigned DNA; note = Massilia namucuonensis
attgaacgctggcggcatgctttacacatgcaagtcgaacggcagcgcggggcaacctggcggcgagtggcgaacgggtgagtaatatatcggaacgtacccaagagtgggggataacgtagcgaaagttacgctaataccgcatacgatccaaggatgaaagcaggggaccttcgggccttgtgctcctggagcggccgatatctgattagctagttggtagggtaaaggcctaccaaggcatcgatcagtagctggtctgagaggacgaccagccacactggaactgagacacggtccagactcctacgggaggcagcagtggggaattttggacaatgggcgcaagcctgatccagcaatgccgcgtgagtgaagaaggccttcgggttgtaaagctcttttgtcagggaagaaacgggcgtggctaatatccatgtctaatgacggtacctgaagaataagcaccggctaactacgtgccagcagccgcggtaatacgtagggtgcaagcgttaatcggaattactgggcgtaaagcgtgcgcaggcggttttgtaagtctgtcgtgaaatccccgggctcaacctgggaattgcgatggagactgcaaggctagaatctggcagaggggggtagaattccacgtgtagcagtgaaatgcgtagagatgtggaggaacaccgatggcgaaggcagccccctgggtcaagattgacgctcatgcacgaaagcgtggggagcaaacaggattagataccctggtagtccacgccctaaacgatgtctactagttgtcgggtcttaattgacttggtaacgcagctaacgcgtgaagtagaccgcctggggagtacggtcgcaagattaaaactcaaaggaattgacggggacccgcacaagcggtggatgatgtggattaattcgatgcaacgcgaaaaaccttacctacccttgacatggaaggaacctccgagagattggagggtgcccgaaagggaacctttacacaggtgctgcatggctgtcgtcagctcgtgtcgtgagatgttgggttaagtcccgcaacgagcgcaacccttgtcattagttgctacgaaagggcactctaatgagactgccggtgacaaaccggaggaaggtggggatgacgtcaagtcctcatggcccttatgggtagggcttcacacgtcatacaatggtacatacagagggccgccaacccgcgagggggagctaatcccagaaagtgtatcgtagtccggattgtagtctgcaactcgactgcatgaagttggaatcgctagtaatcgcggatcagcatgtcgcggtgaatacgttcccgggtcttgtacacaccgcccgtcacaccatgggagcgggttttaccagaagtaggtagcttaaccgtaaggagggcgcttaccacggtaggattcgtgactggggtg

SEQ ID NO: 2011 - DNA, 1394 bp, Massilia niastensis
  source 1..1394: mol_type = unassigned DNA
gcaagtcgaacggcagcgcggggcaacctggcggcgagtggcgaacgggtgagtaatatatcggaacgtacccagaagtgggggataacgtagcgaaagttacgctaataccgcatacgatctacggatgaaagtgggggaccttcgggcctcatgcttgtggagcggccgatatctgattagctagttggtgaggtaaaggctcaccaaggcgacgatcagtagctggtctgagaggacgaccagccacactgggactgagacacggcccagactcctacgggaggcagcagtggggaattttggacaatgggcgcaagcctgatccagcaatgccgcgtgagtgaagaaggccttcgggttgtaaagctcttttgtcagggaagaaacggtccaggataataccctgggctaatgacggtacctgaagaataagcaccggctaactacgtgccagcagccgcggtaatacgtagggtgcaagcgttaatcggaattactgggcgtaaagcgtgcgcaggcggttttgtaagtctgacgtgaaatccccgggctcaacctgggaattgcgttggagactgcaaggctagaatctggcagaggggggtagaattccacgtgtagcagtgaaatgcgtagagatgtggaggaacaccgatggcgaaggcagccccctgggtcaagattgacgctcatgcacgaaagcgtggggagcaaacaggattagataccctggtagtccacgccctaaacgatgtctactagttgtcgggtcttaattgacttggtaacgcagctaacgcgtgaagtagaccgcctggggagtacggtcgcaagattaaaactcaaaggaattgacggggacccgcacaagcggtggatgatgtggattaattcgatgcaacgcgaaaaaccttacctacccttgacatgtcaggaatccttgagagatcgaggagtgcccgaaagggarcctgaacacaggtgctgcatggctgtcgtcagctcgtgtcgtgagatgttgggttaagtcccgcaacgagcgcaacccttgtcattagttgctacgcaagagcactctaatgagactgccggtgacaaaccggaggaaggtggggatgacgtcaagtcctcatggcccttatgggtagggcttcacacgtcatacaatggtacatacagagggccgccaacccgcgagggggagctaatcccagaaagtgtatcgtagtccggatcgcagtctgcaactcgactgcgtgaagttggaatcgctagtaatcgcggatcagcatgtcgcggtgaatacgttcccgggtcttgtacacaccgcccgtcacaccatgggagcgggttttaccagaagtaggtagcttaaccgcaaggagggcgct

SEQ ID NO: 2012 - DNA, 1450 bp, Massilia oculi
  source 1..1450: mol_type = unassigned DNA
acgctggcggcatgctttacacatgcaagtcgaacggtaacagggagcttgctccgctgacgagtggcgaacgggtgagtaatatatcggaacgtacccagaagtgggggataacgtagcgaaagttacgctaataccgcatacgatccacggatgaaagtaggggaccttcgggccttatgcttttggagcggccgatatctgattagctagttggtagggtaaaggcctaccaaggcgacgatcagtagctggtctgagaggacgaccagccacactggaactgagacacggtccagactcctacgggaggcagcagtggggaattttggacaatgggcgcaagcctgatccagcaatgccgcgtgagtgaagaaggccttcgggttgtaaagctcttttgtcagggaagaaacggtagaggctaatatcctttgctaatgacggtacctgaagaataagcaccggctaactacgtgccagcagccgcggtaatacgtagggtgcaagcgttaatcggaattactgggcgtaaagcgtgcgcaggcggttttgtaagtctgacgtgaaatccccgggctcaacctgggaattgcgttggagactgcaaggctagaatctggcagaggggggtagaattccacgtgtagcagtgaaatgcgtagagatgtggaggaacaccgatggcgaaggcagccccctgggtcaagattgacgctcatgcacsaaagcgtggggagcaaacaggattagataccctggtagtccacgccctaaacgatgtctactagttgtcgggttttaattaacttggtaacgcagctaacgcgtgaagtagaccgcctggggagtacggtcgcaagattaaaactcaaaggaattgacggggacccgcacaagcggtggatgatgtggattaattcgatgcaacgcgaaaaaccttacctacccttgacatgtacggaatgccgaagagatttggcagtgctcgaaagagaaccgtaacacaggtgctgcatggctgtcgtcagctcgtgtcgtgagatgttgggttaagtcccgcaacgagcgcaacccttgtcattagttgctacattcagttgagcactctaatgagactgccggtgacaaaccggaggaaggtggggatgacgtcaagtcctcatggcccttatgggtagggcttcacacgtcatacaatggtacatacagagggccgccaacccgcgagggggagctaatcccagaaagtgtatcgtagtccggatcgtagtctgcaactcgactacgtgaagttggaatcgctagtaatcgcggatcagcatgccgcggtgaatacgttcccgggtcttgtacacaccgcccgtcacaccatgggagcgggttttaccagaagtaggtagcttaaccgcaaggagggcgcttaccacggtaggattcgtgactgggg

SEQ ID NO: 2013 - DNA, 1430 bp, unidentified
  source 1..1430: mol_type = unassigned DNA; note = Massilia phosphatilytica
gcttggcggctgctttaccatgcagtcgaacggcagcgcggggcaacctggcggcgagtggcgaacgggtgagcaatatatcggaacgtacccaagagtgggggataacgtagcgaaagttacgctaataccgcatacgatctaaggatgaaagtgggggatcttcggacctcatgctcctggagcggccgatatctgattagctagttggtgaggtaaaggctcaccaaggcgacgatcagtagctggtctgagaggacgaccagccacactgggactgagacacggcccagactcctacgggaggcagcagtggggaattttggacaatgggcgcaagcctgatccagcaatgccgcgtgagtgaagaaggccttcgggttgtaaagctcttttgtcagggaagaaacggggttggctaatatctgatgctaatgacggtacctgaagaataagcaccggctaactacgtgccagcagccgcggtaatacgtagggtgcaagcgttaatcggaattactgggcgtaaagcgtgcgcaggcggttttgtaagtctgtcgtgaaagccccgggcttaacctgggaattgcgatggagactgcaaggcttgaatctggcagaggggggtagaattccacgtgtagcagtgaaatgcgtagagatgtggaggaacaccgatggcgaaggcagccccctgggtcaagattgacgctcatgcacgaaagcgtggggagcaaacaggattagataccctggtagtccacgccctaaacgatgtctactagttgtcgggtcttaattgacttggtaacgcagctaacgcgtgaagtagaccgcctggggagtacggtcgcaagattaaaactcaaaggaattgacggggacccgcacaagcggtggatgatgtggattaattcgatgcaacgcgaaaaaccttacctacccttgacatgtcaggaacctccgagagattggagggtgcccgaaagggaacctgaacacaggtgctgcatggctgtcgtcagctcgtgtcgtgagatgttgggttaagtcccgcaacgagcgcaacccttgtcattagttgctacgaaagggcactctaatgagactgccggtgacaaaccggaggaaggtggggatgacgtcaagtcctcatggcccttatgggtagggcttcacacgtcatacaatggtacatacagagggccgccaacccgcgagggggagctaatcccagaaagtgtatcgtagtccggatcgcagtctgcaactcgactgcgtgaagttggaatcgctagtaatcgcggatcagcatgccgcggtgaatacgttcccgggtcttgtacacaccgcccgtcacgccatgggagcgggttttaccagaagtaggtagctaaccgcaaggagggcgctacccacggtaggattcg

SEQ ID NO: 2014 - DNA, 1443 bp, Massilia plicata
  source 1..1443: mol_type = unassigned DNA
tggcggctgctttacacatgcaagtcgaactgtaacagggagcttgctccgctgacgagtggcgaacgggtgagtaatatatcggaacgtacccaagagtgggggataacgtagcgaaagttacgctaataccgcatacgatccaaggatgaaagcaggggaccgcaaggccttgtgctcctggagcggccgatatctgattagctagttggtagggtaaaggcctaccaaggcatcgatcagtagctggtctgagaggacgaccagccacactggaactgagacacggtccagactcctacgggaggcagcagtggggaattttggacaatgggcgcaagcctgatccagcaatgccgcgtgagtgaagaaggccttcgggttgtaaagctcttttgtcagggaagaaacgggtgcggctaatatctgcatctaatgacggtacctgaagaataagcaccggctaactacgtgccagcagccgcggtaatacgtagggtgcaagcgttaatcggaattactgggcgtaaagcgtgcgcaggcggttttgtaagtctgttgtgaaatccccgggcttaacctgggaatggcaatggagactgcaaggctagagtttggcagaggggggtagaattccacgtgtagcagtgaaatgcgtagagatgtggaggaacaccgatggcgaaggcagccccctgggtcaagactgacgctcatgcacgaaagcgtggggagcaaacaggattagataccctggtagtccacgccctaaacgatgtctactagttgtcgggtcttaattgacttggtaacgcagctaacgcgtgaagtagaccgcctggggagtacggtcgcaagattaaaactcaaaggaattgacggggacccgcacaagcggtggatgatgtggattaattcgatgcaacgcgaaaaaccttacctacccttgacatgtacggaagccacgagagatcgaggtgtgctcgaaagagaaccgtaacacaggtgctgcatggctgtcgtcagctcgtgtcgtgagatgttgggttaagtcccgcaacgagcgcaacccttgtcattagttgctacgaaagagcactctaatgagactgccggtgacaaaccggaggaaggtggggatgacgtcaagtcctcatggcccttatgggtagggcttcacacgtcatacaatggtacatacagagggccgccaacccgcgagggggagctaatcccagaaagtgtatcgtagtccggattgtagtctgcaactcgactgcatgaagttggaatcgctagtaatcgcggatcagcatgtcgcggtgaatacgttcccgggtcttgtacacaccgcccgtcacaccatgggagcgggttttaccagaagtaggtagcttaaccgcaaggagggcgcttaccacggtaggattcgtgactggggtg

SEQ ID NO: 2015 - DNA, 1451 bp, unidentified
  source 1..1451: mol_type = unassigned DNA; note = Massilia psychrophila
attgaacgctggcggcatgccttacacatgcaagtcgaacggcagcgcggggcaacctggcggcgagtggcgaacgggtgagtaatatatcggaacgtgccctggagtgggggataacgcagcgaaagttgcgctaataccgcatacgatctaaggatgaaagcaggggaccgcaaggccttgtgctcctggagcggccgatatctgattagctagttggtggggtaaaggcctaccaaggcatcgatcagtagctggtctgagaggacgaccagccacactggaactgagacacggtccagactcctacgggaggcagcagtggggaattttggacaatgggcgcaagcctgatccagcaatgccgcgtgagtgaagaaggccttcgggttgtaaagctcttttgtcagggaagaaacggtgtgggctaatactctgcactaatgacggtacctgaagaataagcaccggctaactacgtgccagcagccgcggtaatacgtagggtgcaagcgttaatcggaattactgggcgtaaagcgtgcgcaggcggttttgtaagtttgtcgtgaaatccccgggctcaacctgggaatggcgatgaagactgcaaggctagaatctggcagaggggggtagaattccacgtgtagcagtgaaatgcgtagagatgtggaggaacaccgatggcgaaggcagccccctgggtcaagattgacgctcatgcacgaaagcgtggggagcaaacaggattagataccctggtagtccacgccctaaacgatgtctactagttgtcgggttttaattaacttggtaacgcagctaacgcgtgaagtagaccgcctggggagtacggtcgcaagattaaaactcaaaggaattgacggggacccgcacaagcggtggatgatgtggattaattcgatgcaacgcgaaaaaccttacctacccttgacatggtcggaagtccggagagatctggatgtgcccgcaagggaaccgatacacaggtgctgcatggctgtcgtcagctcgtgtcgtgagatgttgggttaagtcccgcaacgagcgcaacccttgtcattagttgctacgaaagagcactctaatgagactgccggtgacaaaccggaggaaggtggggatgacgtcaagtcctcatggcccttatgggtagggcttcacacgtcatacaatggtacatacagagggccgccaacccgcgagggggagctaatcccagaaagtgtatcgtagtccggattgcagtctgcaactcgactgcatgaagttggaatcgctagtaatcgcggatcagcatgtcgcggtgaatacgttcccgggtcttgtacacaccgcccgtcacaccatgggagcgggttttaccagaagtaggtagcttaaccgtaaggagggcgcttaccacggtaggattcgtgactggggtg

SEQ ID NO: 2016 - DNA, 1453 bp, Massilia timonae
  source 1..1453: mol_type = unassigned DNA
attgaacgctggcggcatgctttacacatgcaagtcgaacggtaacagggagcttgctccgctgacgagtggcgaacgggtgagtaatatatcggaacgtacccaagagtgggggataacgtagcgaaagttacgctaataccgcatacgatccaaggatgaaagcaggggaccttcgggccttgtgctcctggagcggccgatatctgattagctagttggtgaggtaaaggctcaccaaggcgacgatcagtagctggtctgagaggacgaccagccacactggaactgagacacggtccagactcctacgggaggcagcagtggggaattttggacaatgggcgcaagcctgatccagcaatgccgcgtgagtgaagaaggccttcgggttgtaaagctcttttgtcagggaagaaacggcagaggctaatatccacggctaatgacggtacctgaagaataagcaccggctaactacgtgccagcagccgcggtaatacgtagggtgcaagcgttaatcggaattactgggcgtaaagcgtgcgcaggcggttttgtaagtctgtcgtgaaatccccgggctcaacctgggaattgcgatggagactgcaaggctagaatctggcagaggggggtagaattccacgtgtagcagtgaaatgcgtagagatgtggaggaacaccgatggcgaaggcagccccctgggtcaagattgacgctcatgcacgaaagcgtggggagcaaacaggattagataccctggtagtccacgccctaaacgatgtctactagttgtcgggttttaattaacttggtaacgcagctaacgcgtgaagtagaccgcctggggagtacggtcgcaagattaaaactcaaaggaattgacggggacccgcacaagcggtggatgatgtggattaattcgatgcaacgcgaaaaaccttacctacccttgacatgtcaggaagaccgaagagatctggctgtgcccgaaagggaacctgaacacaggtgctgcatggctgtcgtcagctcgtgtcgtgagatgttgggttaagtcccgcaacgagcgcaacccttgtcattagttgctacgcaagagcactctaatgagactgccggtgacaaaccggaggaaggtggggatgacgtcaagtcctcatggcccttatgggtagggcttcacacgtcatacaatggtacatacagagggccgccaacccgcgagggggagctaatcccagaaagtgtatcgtagtccggatcgtagtctgcaactcgactacgtgaagttggaatcgctagtaatcgcggatcagcatgccgcggtgaatacgttcccgggtcttgtacacaccgcccgtcacaccatgggagcgggttttaccagaagtaggtagcttaaccgtaaggagggcgcttaccacggtaggattcgtgactggggtg

SEQ ID NO: 2017 - DNA, 1405 bp, unidentified
  source 1..1405: mol_type = unassigned DNA; note = Massilia umbonata
gggcttcggcctggtggcgagtggcgaacgggtgagtaatatatcggaacgtgcccaagagtgggggataacgtagcgaaagttacgctaataccgcatacgatctaaggatgaaagtgggggatcgcaagacctcatgctcctggagcggccgatatctgattagctagttggtgaggtaaaggctcaccaaggcgacgatcagtagctggtctgagaggacgaccagccacactggaactgagacacggtccagactcctacgggaggcagcagtggggaattttggacaatgggggcaaccctgatccagcaatgccgcgtgagtgaagaaggccttcgggttgtaaagctcttttgtcagggaagaaaagggtacggctaatatccgtgcctcatgacggtacctgaagaataagcaccggctaactacgtgccagcagccgcggtaatacgtagggtgcaagcgttaatcggaattactgggcgtaaagcgtgcgcaggcggttttgtaagtctgtcgtgaaatccccgggcttaacctgggaatggcgatggagactgcaaggctagagtttggcagaggggggtagaattccacgtgtagcagtgaaatgcgtagagatgtggaggaacaccgatggcgaaggcagccccctgggtcaagactgacgctcatgcacgaaagcgtggggagcaaacaggattagataccctggtagtccacgccctaaacgatgtctactagttgttgggtcttaattgacttagtaacgcagctaacgcgtgaagtagaccgcctggggagtacggtcgcaagattaaaactcaaaggaattgacggggacccgcacaagcggtggatgatgtggattaattcgatgcaacgcgaaaaaccttacctacccttgacatgtcaggaatcctggagagatctaggagtgcccgaaagggaacctgaacacaggtgctgcatggctgtcgtcagctcgtgtcgtgagatgttgggttaagtcccgcaacgagcgcaacccttgtcattagttgctacgaaagagcactctaatgagactgccggtgacaaaccggaggaaggtggggatgacgtcaagtcctcatggcccttatgggtagggcttcacacgtcatacaatggtacatacagagggccgccaacccgcgagggggagctaatcccagaaagtgtatcgtagtccggattgtagtctgcaactcgactgcatgaagttggaatcgctagtaatcgcggatcagcatgtcgcggtgaatacgttcccgggtcttgtacacaccgcccgtcacaccatgggagcgggttttaccagaagtaggtagcttaaccgcaaggagggcgcttaccacggtaggattcgtgactggggtg

SEQ ID NO: 2018 - DNA, 1454 bp, unidentified
  source 1..1454: mol_type = unassigned DNA; note = Massilia yuzhufengensis
attgaacgctggcggcatgctttacacatgcaagtcgaacggcagcgcggggcaacctggcggcgagtggcgaacgggtgagtaatatatcggaacgtacccagaagtgggggataacgtagcgaaagttacgctaataccgcatacgatctacggatgaaagtgggggaccttcgggcctcatgcttttggagcggccgatatctgattagctagttggtagggtaaaggcctaccaaggcgacgatcagtagctggtctgagaggacgaccagccacactggaactgagacacggtccagactcctacgggaggcagcagtggggaattttggacaatgggcgcaagcctgatccagcaatgccgcgtgagtgaagaaggccttcgggttgtaaagctcttttgtcagggaagaaacggtctaggttaataccttgggctaatgacggtacctgaagaataagcaccggctaactacgtggccagcagcgcggtaatacgtagggtgcaagcgttaatcggaattactgggcgtaaagcgtgcgcaggcggttttgtaagtctgtcgtgaaagcccgggctcaacctgggaattgcgatggagactgcaaggcttgaatctggcagaggggggtagaattccacgtgtagcagtgaaatgcgtagagatgtggaggaacaccgatggcgaaggcagccccctgggtcaagattgacgctcatgcacgaaagcgtggggagcaaacaggattagataccctggtagtccacgccctaaacgatgtctactagttgtcgggttttaattaacttggtaacgcagctaacgcgtgaagtagaccgcctggggagtacggtcgcaagattaaaactcaaaggaattgacggggacccgcacaagcggtggatgatgtggattaattcgatgcaacgcgaaaaaccttacctacccttgacatggaaggaagtccggagagatctggatgtgcccgaaaggaaaccttcacacaggtgctgcatggctgtcgtcagctcgtgtcgtgagatgttgggttaagtcccgcaacgagcgcaacccttgtcattagttgctacatttagttgagcactctaatgagactgccggtgacaaaccggaggaaggtggggatgacgtcaagtcctcatggcccttatgggtagggcttcacacgtcatacaatggtacatacagagggccgccaacccgcgagggggagctaatcccagaaagtgtatcgtagtccggattgtagtctgcaactcgactacatgaagttggaatcgctagtaatcgcggatcagcatgttgcggtgaatacgttcccgggtcttgtacacaccgcccgtcacaccatgggagcgggttttaccagaagtaggtagcttaaccgcaaggggggcgcttaccacggtaggattcgtgactggggtg

SEQ ID NO: 2019 - DNA, 1411 bp, Mastigocladus laminosus
  source 1..1411: mol_type = unassigned DNA
gatgaacgctggcggtatgcttaacacatgcaagtcgaacggggcttttcggagcctagtggcggacgggtgagtaacgcgtgagaatctagcttcaggttcgggacaacattgggaaaccgatgctaataccggatgtgccgtgaggtaaaaggcttgctgcctgaagatgagctcgcgtctgattagctagttggtggtgtaagggactaccaaggcgacgatcagtagctggtctgagaggatgatcagccacactggaactgagacacggtccagactcctacgggaggcagcagtggggaattttccgcaatgggcgaaagcctgacggagcaataccgcgtgagggaggaaggctcttgggttgtaaacctcttttctcaaggaagaatcttgacggtacttgaggaatcagcatcggctaactccgtgccagcagccgcggtaatacggaggatgcaagcgttatccggaatgattgggcgtaaagcgtccgcaggtggttgtgtgtgtctattgtcaaagggtcatgcttaacatgataaaggcagtggaaactacacgactagagtgcgttcggggcagagggaattcctggtgtagcggtgaaatgcgtagagatcaggaagaacaccggtggcgaaagcgctctgctaggcctgcactgacactgagggacgaaagctaggggagcgaatgggattagataccccagtagtcctagccgtaaacgatggatactaggcgttgagagtatcgaccctctcagtgccgtagctaacgcgttaagtatcccgcctggggagtacgcacgcaagtgtgaaactcaaaggaattgacgggggcccgcacaagcggtggagtatgtggtttaattcgatgcaacgcgaagaaccttaccagggcttgacatgtctgggacttcggtgaaagctgaaggtgccttcgggagccagaacacaggtggtgcatggctgtcgtcagctcgtgtcgtgagatgttgggttaagtcccgcaacgagcgcaaccctcgttcttagttgccagcacttcgggtgggcactctagggagactgccggtgacaaaccggaggaaggtggggatgacgtcaagtcagcatgccccttacgtcctgggctacacacgtactacaatgctcgagacaaagggcagcaagcaggtaactgcaagcaaatctcataaactcgggctcagttcagatcgcaggctgcaactcgcctgcgtgaaggtggaatcgctagtaattgcaggtcagcatactgcggtgaattcgttcccgggccttgtacacaccgcccgtcacaccatggaagctggtcacgcccgaagtcgttaccctaaccgttcgcgggggggacgccgaaggtaggactggtgactggggtg

SEQ ID NO: 2020 - DNA, 1411 bp, Mastigocoleus testarum
  source 1..1411: mol_type = unassigned DNA
gatgaacgctggcggtatgcttaacacatgcaagtcgaacgaactcttcggagttagtggcggacgggtgagtaacgcgtgagaatctgcctccgggctcgggacaacagttggaaacgactgctaataccggatgtgcctattggtgaaagatttattacctggagatgagctcgcgttggattagctagttggtgtggtaagagcgcaccaaggcgacgatctatagctggtctgagaggacgatcagccacactgggactgagacacggcccagactcctacgggaggcagcagtggggaattttccgcaatgggcgaaagcctgacggagcaataccgcgtgagggaggaaggcttttgggttgtaaacctcttttctcaaggaagaagttctgacggtacttgaggaatcagcatcggctaactccgtgccagcagccgcggtaatacggaggatgcaagcgttatccggaatgattgggcgtaaagcgtccgcaggtggttatgcaagtttactgttaaagagtgaagcttaacttcataagggccgtagaaactgcatgactagagtgcgttcggggcagagggaattcctggtgtagcggtgaaatgcgtagatatcaggaagaacaccggtggcgaaagcgctctgctaggccgcaactgacactgagggacgaaagctaagggagcgaatgggattagataccccagtagtcttagccgtaaacgatggatactaggcgttgcttgtatcgacccgagcagtgccgtagctaacgcgttaagtatcccgcctggggagtacgcacgcaagtgtgaaactcaaaggaattgacgggggcccgcacaagcggtggagtatgtggtttaattcgatgcaacgcgaagaaccttaccaggacttgacatctggcgaatcttgctgaaaggtgagagtgccttcgggaacgccaagacaggtggtgcatggctgtcgtcagctcgtgtcgtgagatgttgggttaagtcccgcaacgagcgcaaccctcgtttttagttgccagcacttagggtgggcactctagagagactgccggtgacaaaccggaggaaggtggggacgacgtcaagtcatcatgccccttacgttctgggctacacacgtactacaatgctatggacaaagagcagccaactggcgacagtgcgctaatctcataaaccatggctcagttcagattgcaggctgcaactcgcctgcatgaaggaggaatcgctagtaattgcaggtcagcatactgcagtgaattcgttcccgggccttgtacacaccgcccgtcacaccatggaagttggtcacgcccgaagtcgttaccctaaccgttcgcggagggggatgccgaaggtaggactggtgactggggtg

SEQ ID NO: 2021 - DNA, 1478 bp, Megamonas hypermegale
  source 1..1478: mol_type = unassigned DNA
gacgaacgctggcggcgtgcttaacacatgcaagtcgaacggggtgtttatttcggtaaacaccaagtggcgaacgggtgagtaacgcgtaagcaatctaccttcaagatggggacaacacttcgaaaggggtgctaataccgaatgaatgagagatgaccgcatggatatttctctaaaggaggcctctgaaaatgcttccgcttgaagatgagcttgcgtctgattagctagttggtgagggtaaaggcccaccaaggcgacgatcagtagccggtctgagaggatgaacggccacattgggactgagacacggcccagactcctacgggaggcagcagtggggaatcttccgcaatgggcgaaagcctgacggagcaacgccgcgtgaacgaagaaggtcttaggatcgtaaagttctgttgttaggggcgaagggtagcattttgaataagggtgctatttgacggtacttaacgaggaagccacggctaactacgtgccagcagccgcggtaatacgtaggcggcaagcgttgtccggaattattgggcgtaaagggagcgcaggcgggaagttaagcggactttaaaagtgcggggctcaaccccgtgagggggtccgaactgactttcttgagtgcaggagagggaagcggaattcctagtgtagcggtgaaatgcgtagatattaggaagaacaccagtggcgaaggcggctttctggactgtaactgacgctgaggctcgaaagctagggtagcgaacgggattagataccccggtagtcctagccgtaaacgatggatactaggtgtgggaggtatcgaccccttccgtgccggagttaacgcaataagtatcccgcctggggagtacggccgcaaggttgaaactcaaaggaattgacgggggcccgcacaagcggtggagtatgtggtttaattcgacgcaacgcgaagaaccttaccaagacttgacatcgactgacgtacttagagataagtatttttacttcggtaaacaggaagacaggtggtgcatggctgtcgtcagctcgtgtcgtgagatgttgggttaagtcccgcaacgagcgcaacccctatactatgttgccagcacgtaaaggtgggaactcatagtagactgccgcggacaacgcggaggaaggcggggatgacgtcaagtcatcatgccccttacgtcttgggctacacacgtactacaatgggatgaacagagggaagcgaagtcgcgaggcagagcggaaccctaaaagcatctctcagttcggattgcaggctgaaactcgcctgcatgaagtcggaatcgctagtaatcgcaggtcagcatactgcggtgaatacgttcccgggccttgtacacaccgcccgtcacaccacgaaagtcattcacacccgaagccggctaagggccgaaaggaaccgaccgtcgaaggtgggggcgatgattggggtg

SEQ ID NO: 2022 - DNA, 1489 bp, Megasphaera cerevisiae
  source 1..1489: mol_type = unassigned DNA
gacgaacgctggcggcgtgcttaacacatgcaagtcgaacgagaggacaagagaagcttgcttcttttggaatcgagtggcaaacgggtgagtaacgcgtaaacaacctgccctccggatggggacaacagctggaaacggctgctaataccgaatacgatctaaaggccgcatgacctttagaagaaaagatggccactgaatatgctatcgccggaagaggggtttgcgtctgattagctagttggaggggtaacggcccaccaaggcaatgatcagtagccggtctgagaggatgaacggccacattggaactgagacacggtccagactcctacgggaggcagcagtggggaatcttccgcaatgggcgaaagcctgacggagcaacgccgcgtgagtgaagacggccttcgggttgtaaagctctgttatatgggacgaacgggtgtatggtcaatacccatacgccgtgacggtaccgtaagagaaagccacggctaactacgtgccagcagccgcggtaatacgtaggtggcaagcgttgtccggaatcattgggcgtaaagggcgcgcaggcggttcggtaagtcggtcttaaaagtgcggggcttaaccccgtgatgggattgaaactgccggactggagtgtcggagaggaaagcagaattcctagtgtagcggtgaaatgcgtagatattaggaggaataccagtggcgaaagcggctttctggacgacaactgacgctgaggcgcgaaagccaggggagcaaacgggattagataccccggtagtcctggccgtaaacgatggatactaggtgtaggaggtatcgaccccttctgtgccggagttaacgcaataagtatcccgcctggggagtacggccgcaaggttgaaactcaaaggaattgacgggggcccgcacaagcggtggagtatgtggtttaattcgacgcaacgcgaagaaccttaccaagccttgacattgagtgccagggatagagatatcctgttcttcttcggaagacgcgaaaacaggtggtgcacggctgtcgtcagctcgtgtcgtgagatgttgggttaagtcccgcaacgagcgcaacccctatcttctgttgccagcacgtaaaggtgggaactcagaagagactgccgcagacaatgcggaggaaggcggggatgacgtcaagtcatcatgccccttatggcttgggctacacacgtactacaatggctcttaatagagggaagcaaaggagcgatccggagcaaaccccaaaaacagagtcccagttcggattgcaggctgcaactcgcctgcatgaagcaggaatcgctagtaatcgcaggtcagcatactgcggtgaatacgttcccgggccttgtacacaccgcccgtcacaccacgaaagtcattcacacccgaagccggtgaggtaaccgcaaggagccagccgtcgaaggtgggggcgatgattggggtg

SEQ ID NO: 2023 - DNA, 1490 bp, unidentified
  source 1..1490: mol_type = unassigned DNA; note = Megasphaera hexanoica
gacgaacgctggcggcgtgcttaacacatgcaagtcgaacgagaggacatggaaagcttgctttttatggaatcgagtggcaaacgggtgagtaacgcgtaagcaacctgccctgcagatggggacaacagctggaaacggctgctaataccgaatacgaagcagctcccgcatgggggcagcttgaaaggatggcctctgaatatgctatcgctgcaggaggggcttgcgtctgattagctggttggaggggtaacggcccaccaaggcgacgatcagtagccggtctgagaggatgaacggccacattgggactgagacacggcccagactcctacgggaggcagcaggtggggaatcttccgcaatggacgaaagtctgacggagcaacgccgcgtgagtgaagacggccttcgggttgtaaagctctgttatacgggacgaacgggcgggatgctaataccatcctgttgtgacggtaccgtaagagaaagccacggctaactacgtgccagcagccgcggtaatacgtaggtggcaagcgttgtccggaattattgggcgtaaagggtgcgcaggcggtctcttaagtctgtcttaaaagtgcggggctcaaccccgtgaggggacggaaactgggagactggagtatcggagaggaaagcagaattcctagtgtagcggtgaaatgcgtagatattaggaggaataccagtggcgaaagcggctttctggacgacaactgacgctgaggcacgaaagccaggggagcgaacgggattagataccccggtagtcctggccgtaaacgatgggtactaggtgtaggaggtatcgaccccttctgtgccggagttaacgcaataagtaccccgcctggggagtacggccgcaaggctgaaactcaaaggaattgacgggggcccgcacaagcggtggagtatgtggtttaattcgacgcaacgcgaagaaccttaccaagccttgacattgatcgcaatggatagagatatccagttcctcttcggaggacgagaaaacaggtggtgcacggctgtcgtcagctcgtgtcgtgagatgttgggttaagtcccgcaacgagcgcaacccctatcttctgttaccagcacgtgatggtggggactcaggagagactgccgcagacaatgcggaggaaggcggggatgacgtcaagtcatcatgccccttatggcttgggctacacacgtactacaatggctcttaatagagggaagcgaaagggcgacctggagcaaaccccaaaaacagagtcccagttcggattgcaggctgcaacccgcctgcatgaaggaggaatcgctagtaatcgcaggtcagcatactgcggtgaatacgttcccgggccttgtacacaccgcccgtcacaccacgaaagtcattcacacccgaagccggtgaggcaaccgcaaggaaccagccgtcgaaggtgggggcgatgattggggtg

SEQ ID NO: 2024 - DNA, 1401 bp, unidentified
  source 1..1401: mol_type = unassigned DNA; note = Melaminivora alkalimesophila
cttaccatgcagtcgaacggtaacgggccttcgggtgccgacgagtggcgaacgggtgagtaatacatcggaacgtgcccgagagtgggggataacgaggcgaaagctttgctaataccgcatacgatctcaggatgaaagcaggggaccttcgggccttgcgctcacggagcggccgatggcagattaggtagttggtgggataagagcttaccaagcctgcgatctgtagctggtctgagaggatgatcagccacactgggactgagacacggcccagactcctacgggaggcagcagtggggaattttggacaatgggggcaaccctgatccagccatgccgcgtgcaggatgaaggccttcgggttgtaaactgcttttgtacggaacgaaaaagcgccttctaatacagggcgtccatgacggtaccgtaagaataagcaccggctaactacgtgccagcagccgcggtaatacgtagggtgcgagcgttaatcggaattactgggcgtaaagcgtgcgcaggcggtcatgcaagacagaggtgaaatccccgggctcaacctgggaactgcctttgtgactgcatggctggagtgcggcagagggggatggaattccgcgtgtagcagtgaaatgcgtagatatgcggaggaacaccgatggcgaaggcaatcccctgggcctgcactgacgctcatgcacgaaagcgtggggagcaaacaggattagataccctggtagtccacgccctaaacgatgtcaactggttgttggggatttatttcttcagtaacgaagctaacgcgtgaagttgaccgcctggggagtacggccgcaaggttgaaactcaaaggaattgacggggacccgcacaagcggtggatgatgtggtttaattcgatgctacgcgaagaaccttacccacctttgacatggtcggaaccctgcagagacgcaggggtgcccgaaagggagccgacacacaggtgctgcatggctgtcgtcagctcgtgtcgtgagatgttgggttaagtcccgcaacgagcgcaacccttgccattagttgctacgaaagggcactctaatgggactgccggtgacaaaccggaggaaggtggggatgacgtcaagtcctcatggcccttataggtggggctacacacgtcatacaatggctggtacagagggttgccaacccgcgagggggagccaatcccacaaagccagtcgtagtccggatcgcagtctgcaactcgactgcgtgaagtcggaatcgctagtaatcgcggatcagaatgtcgcggtgaatacgttcccgggtcttgtacacaccgcccgtcacaccatgggagcgggtctcgccagaagtgggtagcctaaccgcaaggagggcgct

SEQ ID NO: 2025 - DNA, 1468 bp, unidentified
  source 1..1468: mol_type = unassigned DNA; note = Melghirimyces algeriensis
  misc_difference 241: note = n is a, c, g, or t
gacgaacgctggcggcgtgcctaatacatgcaagtcgagcggaggaagctccttcgggagtggaatcagcggcggacgggtgagtaacacgtgggcaacctgcctgcaagatcgggataactccgggaaaccggggctaataccgggtaggatcttccatcgcatgatgggagatggaaaggcggcttcggctgtcacttgcagatgggcccgcggcgcattagctggttggtgaggtaanggctcaccaaggcgacgatgcgtagccgacctgagagggtgatcggccacactgggactgagacacggcccagactcctacgggaggcagcagtagggaattttccgcaatgggcgaaagcctgacggagcaacgccgcgtgagtgaggacggccttcgggttgtaaagctctgttcttcgggaagaacgacgggagggtgaatagcccttttgtgtgacggtaccgaagaagaaagccccggctaactacgtgccagcagccgcggtaatacgtagggggcaagcgttgtccggaattattgggcgtaaagcgcgcgcaggcggcttgttaagtctggtgtgaaagaccacggctcaaccgtgggggtgcatcagaaactgacaggcttgagtgcaggagaggagagtggaattcccggtgtagcggtggaatgcgtagagatcgggaggaacaccagtggcgaaggcggctctctggcctgtaactgacgctgaggcgcgaaagcgtggggagcgaacaggattagataccctggtagtccacgccgtaaacgatgagtgctaggtgttgggggtttccgccctctgtgccgaaggtaacccaataagcactccgcctggggagtacggccgcaaggctgaaactcaaaggaattgacgggggcccgcacaagcggtggagcatgtggtttaattcgaagcaacgcgaagaaccttaccagggcttgacatcccgctgaccggtgtagagatacaccttcccttcggggcagcggtgacaggtggtgcatggttgtcgtcagctcgtgtcgtgagatgttgggttaagtcccgcaacgagcgcaacccttatcgtcagttgccagcacatcatggtgggcactctggcgagacagccggtgaaagccggaggaaggtggggatgacgtcaaatcatcatgccccttatgtcctgggcgacacacgtgctacaatggccggtacaacgagcagcgaacccgcgagggggagccaatcccaaaaaaccggtctcagttcggatcgcaggctgcaactcgcctgcgtgaagctggaatcgctagtaatcgcagatcagcatgctgcggtgaatacgttcccgggccttgtacacaccgcccgtcacaccacgagagtctgcaacacccgaagtcagtgagggaaccttttggacccagctgccgaaggtggggcagatgattggggtg

SEQ ID NO: 2026 - DNA, 1427 bp, unidentified
  source 1..1427: mol_type = unassigned DNA; note = Melghirimyces profundicolus
tgcagtcgagcggaggagccgacggatcccttcggggtgacgttggtggaatcagcggcggacgggtgagtaacacgtgggcaacctgcccgcaagaccgggataactccgggaaaccggggctaataccggataggacattcccttgcatgagggggtgtggaaaggcggccttttggctgtcacttgcggatgggcccgcggcgcattagcttgttggtgaggtaacggctcaccaaggcgacgatgcgtagccgacctgagagggtgaccggccacactgggactgagacacggcccagactcctgcgggaggcagcagtagggaattttccgcaatgggcgaaagcctgacggagcaacgccgcgtgagtgaggacggccttcgggttgtaaagctctgttctgcgggaagaacgacggccgggtgaagaatccggccgggtgacggtaccgcagaagaaagccccggctaactacgtgccagcagccgcggtaatacgtagggggcaagcgttgtccggaattattgggcgtaaagcgcgcgcaggcggcctgttaagtcgggtgtgaaagaccacggctcaaccgtgggggtgcatccgaaactggcaggcttgagtgcaggagaggagagcggaattcccggtgtagcggtggaatgcgtagagatcgggaggaacaccagtggcgaaggcggctctctggcctgtgactgacgctgaggcgcgaaagcgtggggagcgaacaggattagataccctggtagtccacgccgtaaacgatgagtgctaggtgttgggggtatcacgccctctgtgccgaaggtaacccaataagcactccgcctggggagtacggccgcaaggctgaaactcaaaggaattgacgggggcccgcacaagcggtggagcatgtggtttaattcgaagcaacgcgaagaaccttaccagggcttgacatcccgctgaccggcgtagagatacgccttcccttcggggcagcggtgacaggtggtgcatggttgtcgtcagctcgtgtcgtgagatgttgggttcagtcccgcaacgagcgcaacccctatcgtcagttgccagcacttcgggtgggcactctggcgagacagccggtgaaagccggaggaaggtggggatgacgtcaaatcatcatgccccttatgtcctgggctacacacgtgctacaatggccggtacaacgggcagcgaacccgcgagggggagccaatcccaaaaaaccggtctcagttcggatcgcaggctgcaactcgcctgcgtgaagctggaatcgctagtaatcgcggatcagcatgccgcggtgaatacgttcccgggccttgtacacaccgcccgtcacaccacgagagtctgcaacacccgaagtcggtgagggaaccctttggacccagc

SEQ ID NO: 2027 - DNA, 1485 bp, unidentified
  source 1..1485: mol_type = unassigned DNA; note = Melghirimyces thermohalophilus
gacgaacgctggcggcgtgcctaatacatgcaagtcgtgcggaggaagccgacggatcccttcggggtgaagacggtggaatcagcggcggacgggtgagtaacacgtgggcaacctgcctgcaagaccgggataactccgggaaaccggggctaataccggataggacttttcatcgcctgatgggaagtggaaaggcggctttggctgtcacttgcagatgggcccgcggcgcattagctagttggtggggtaatggcctaccaaggcaacgatgcgtagccgacctgagagggtgatcggccacactgggactgagacacggcccagactcctacgggaggcagcagtagggaattttccgcaatgggcgcaagcctgacggagcacgccgcgtgagtgaggacggccttcgggttgtaaaactctgttctgcgggaagaacggcagccgggtgaacagtccggttgagtgacggtaccgcagaagaaagccccggctaactacgtgccagcagccgcggtaatacgtagggggcaagcgttgtccggaattattgggcgtaaagggcgcgcaggcggcctgttaagtctgatgtgaaagaccgcggctcaaccgcggggtggcatcagaaactggcaggcttgagtgcaggagaggagagtggaattcccggtgtagcggtggaatgcgtagagatcgggaggaacaccagtggcgaaggcggctctctggcctgttactgacgctgaggcgcgaaagcgtggggagcgaacaggattagataccctggtagtccacgccgtaaacgatgagtgctaggtgttgggggtatcacgccctctgtgccgaaggtaacccaataagcactccgcctggggagtacggccgcaaggctgaaactcaaaggaattgacgggggcccgcacaagcggtggagcatgtggtttaattcgaagcaacgcgaagaaccttaccagggcttgacatcccgctgatcggtgtagagatacaccttcccttttgggcagcggtgacaggtggtgcatggttgtcgtcagctcgtgtcgtgagatgttgggttcagtcccgcaacgagcgcaacccttatcgtcagttgccagcacttggggtgggcactctggcgagacagccggtgaaagccggaggaaggtggggatgacgtcaaatcatcatgccccttatgtcctgggctacacacgtgctacaatggccggtacaacgggcagcgaacccgcgagggggagccaatcccagaaaaccggtctcagttcggatcgcaggctgcaactcgcctgcgtgaagctggaatcgctagtaatcgcggatcagcatgccgcggtgaatccgttcccgggccttgtacacaccgcccgtcacaccacgagagtctgcaacacccgaagtcggtgagggaacccttatgggacccagccgccgaaggtggggccgatgattggggtg

SEQ ID NO: 2028 - DNA, 1468 bp, unidentified
  source 1..1468: mol_type = unassigned DNA; note = Melioribacter roseus
gacgaacgctggcggcgtgcttaacacatgcaagtctaggggaaattccggcttcggttggaagagtacactggcgcacgggtgagtaatatgtaagtaacctacccataggttcgggataactcgtcgaaagacgggctaataccgaatgatgcagcggacccgcatgggtatgttgttaaagcctatatggtgcctatggatgggcttgcatccgattagctagttggtagggtaacggcctaccaaggcgacgatcggtagctggtctgagaggatgatcagccacactggaactgagacacggtccagactcctacgggaggcagcagtgaggaatattgggcaatgcccgcaagggtgacccagcaacgccgcgtggaggatgacggccgtaaggttgtaaactccttttgagagggacgaaaaattccgatggaatcggaacttgactgtacctctagaaaaagccccggctaactacgtgccagcagccgcggtaatacgtagggggcaagcgttgtccggatttactgggtgtaaagggcgcgtaggcggacctgttagtcagaggtgaaatcctgcggcttaaccgtagaactgcctttgatactgcaggtcttgagttcgaaagagagtagcggaattccaggtgtagtggtgaaatacgtagatatctggaagaacaccagtggcgaaggcggctacttggttcgcaactgacgctgaggcgcgaaagcgtggggagcaaacaggattagataccctggtagtccacgccgtaaacgatgaatactaggtgttggctccgttaggagtcagtgccgcagctaacgcattaagtattccacctggggagtacgatcgcaaggttgaaactcaaaggaattgacgggggcccgcacaagcagtggagcatgtggtttaattcgatgcaacgcgaagaaccttacctaggcttgaaaagcaggcgaccgggtgtgaaagcacccttcccttcggggcgcctgtacaggtgctgcatggctgtcgtcagctcgtgccgtgaggtgttgggttaagtcccgcaacgagcgcaacccctaccattagttgccatcaggttaagctgggcactctaatgggactgcctacgcaagtagtgaggaaggtggggatgacgtcaagtcagcatggcccttacgcctagggctacacacgtgctacaatgggtgctacaacgggtagcgaaaccgcgaggtggagccaatccctaaaaagcatcctcagttcggattggagtctgcaacccgactccatgaagctggaattgctagtaatcgcgcatcagcacggcgcggtgaatacgttcccgggccttgtacacaccgcccgtcaagccatggaagccgggggtacccgaagtcagtgacccaactccgcctcggcggagagggagctgccgaaggtaaaaccggtgactggggct

SEQ ID NO: 2029 - DNA, 1458 bp, Melittangium boletus
  source 1..1458: mol_type = unassigned DNA
aacgaacgctggcggcgtgcctaacacatgcaagtcgagcgcgaatggagcaatcctagtagagcggcgcacgggtgcgtaacacgtgggtaatctgcctgggtgtctgggataaccagtcgaaagattggctaataccggatgagcccccgggagcttcggctcttgagggaaaaggtggcctctgtatacaagctatcacacccagatgagcccgcggcccatcagctagttggcggggtaatggcccaccaaggcgacgacgggtagctggtctgagaggacgatcagccacactggaactgagacacggtccagactcctacgggaggcagcagtggggaattttgcgcaatgggcgaaagcctgacgcagcaacgccgcgtgtgtgatgaaggtctttggattgtaaagcactttcgaccgggacgaaaaccccctggctaatactcaggggcttgacggtaccgggagaagaagcaccggctaactctgtgccagcagccgcggtaatacagagggtgcaagcgttgttcggaattattgggcgtaaagcgcgtgtaggcggctttgcaagtcggatgtgaaagccctcggctcaaccgaggaagtgcgttcgaaactgcagagcttgagtgccggagagggtggcggaattccccaagtagaggtgaaattcgtagatatggggaggaacaccggtggcgaaggcggccacctggacggtgactgacgctgagacgcgaaagcgtgggtagcaaacaggattagataccctggtagtccacgccgtaaacgatgagaactaggtgtcgtgggtgttgacccccgcggtgccgtagctaacgcattaagttctccgcctgggaagtacggtcgcaagactaaaactcaaaggaattgacgggggcccgcacaagcggtggagcatgtggtttaattcgacgcaacgcgcagaaccttacctggtcttgacatcctcggaacctctcagagatgagggggtgcccgcaagggaaccgagagacaggtgctgcatggctgtcgtcagctcgtgtcgtgagatgttgggttaagtcccgcaacgagcgcaaccctcgcctttagttgccacgcaagtggatctctagagggactgccggtgttaaaccggaggaaggtggggatgacgtcaagtcctcatggcctttatgaccagggctacacacgtgctacaatggccggtacaaagcgttgccaactcgcgagagggagctaatcgcataaaaccggtctcagttcagattggagtctgcaactcgactccatgaaggcggaatcgctagtaatcgcagatcagcacgctgcggtgaatacgttcccgggccttgtacacaccgcccgtcacaccatgggagtcgattgctccagaagtcatctcaccaagaggtgcccaaggagtggtcggtaactggggtg

SEQ ID NO: 2030 - DNA, 1411 bp, Merismopedia glauca
  source 1..1411: mol_type = unassigned DNA
gatgaacgctggcggtatgcctaacacatgcaagtcgaacgggctcttcggagctagtggcggacgggtgagtaacacgtaagaacctaccttcaggatggggacaacagttggaaacgactgctaatacccgatgtgccgagaggcgaaagatttatcgcctgaagatgggcttgcggctgattagctagttggtggtgtaatggactaccaaggcaacgatcagtagctggtctgagaggatgagcagccacactgggactgagacacggcccagactcctacgggaggcagcagtggggaattttccgcaatgggcgaaagcctgacggagcaataccgcgtgagggaggaaggttcttggattgtaaacctcttttctcagggaagaagatctgacggtacctgaggaataagcatcggctaactccgtgccagcagccgcggtaatacggaggatgcaagcgttatccggaatcattgggcgtaaagcgtccgtaggtggcgaagcaagtctgctgtcaaagaatggagcttaactccataaaggcggtggaaactgcgtcgctagagtacggtaggggtagcgggaattcccagtgtagcggtgaaatgcgtagatattgggaagaacatcggtggcgaaagcgcgctactgggcctgtactgacactgagggacgaaagctaggggagcaaaagggattagatacccctgtagtcctagccgtaaacgatggatactaggcgttgctcgtatcgacccgagcagtgccgaagctaacgcgttaagtatcccgcctggggagtacgctcgcaagagtgaaactcaaaggaattgacgggggcccgcacaagcggtggagtatgtggtttaattcgatgcaacgcgaagaaccttaccaaggcttgacatccccagaatcctcttgaaagagaggagtgccttcgggaactgggagacaggtggtgcatggctgtcgtcagctcgtgtcgtgagatgttgggttaagtcccgcaacgagcgcaacccacgtttttagttgccagcattaagttgggcactctagaaagactgccggtgacaaaccggaggaaggtgtggacgacgtcaagtcatcatgccccttacgccttgggctacacacgtactacaatggtcaggacaacgggcagcgagcgcgcaagtgtaagcgaatcccaacaaacctggcctcagttcagattgcaggctgcaactcgcctgcatgaaggaggaatcgctagtaatcgcaggtcagcatactgcggtgaattcgttcccgggccttgtacacaccgcccgtcacaccatgggagctggtcacgcccgaagtcgttactccaacctttcgagggggaggacgcctaaggcagggctagtgactggggtg

SEQ ID NO: 2031 - DNA, 1330 bp, unidentified
  source 1..1330: mol_type = unassigned DNA; note = Mesocricetibacter intestinalis
attgaacgctggcggcaggcttaacacatgcaagtcgaacggtagcaggaagagagcttgctttctttgctgacgagtggcggacgggtgagtaatgcttgggaatctggcttatggagggggataactacgggaaactgtagctaataccgcgtataatcgagagatgaaaggccgggaccttagggccggttgccataagatgagcccaagtgggattaggtagttggtggggtaaaggcctaccaagcctgcgatctctagctggtctgagaggatggccagccacactgggactgagacacggcccagactcctacgggaggcagcagtggggaatattgcgcaatggggggaaccctgacgcagccatgccgcgtgaatgaagaaggccttcgggttgtaaagttctttcggtaatgaggaaggagatggggttaacagccttatcaattgacgttaattacagaagaagcaccggctaactccgtgccagcagccgcggtaatacggagggtgcgagcgttaatcggaataactgggcgtaaagggcacgcaggcggatttttaagtgaggtgtgaaagccccgggcttaacctgggaattgcatttcagactgggaatctagagtactttagggaggggtagaattccacgtgtagcggtgaaatgcgtagagatgtggaggaataccgaaggcgaaggcagccccttgggaatgtactgacgctcatgtgcgaaagcgtggggagcaaacaggattagataccctggtagtccacgctgtaaacgctgtcgatttggggattggggtttagccctggtgcccgaagctaacgtgataaatcgaccgcctggggagtacggccgcaaggttaaaactcaaatgaattgacgggggcccgcacaagcggtggagcatgtggtttaattcgatgcaacgcgaagaaccttacctactcttgacatccagagaatcctgtagagatacgggagtgccttcgggaactttgagacaggtgctgcatggctgtcgtcagctcgtgttgtgaaatgttgggttaagtcccgcaacgagcgcaacccttatcctttgttgccagcgcgtaatggcgggaactcaaaggagactgccggtgataaaccggaggaaggtggggatgacgtcaagtcatcatggcccttacgagtagggctacacacgtgctacaatggtgcatacagagggcggcgaagtcgtaaggcggagcgaatctcagaaagtgcatctaagtccggattggcgtctgcaactcgacgccatgaagtcggaatcgctagtaatcgcga

SEQ ID NO: 2032 - DNA, 1486 bp, Mesorhizobium albiziae
  source 1..1486: mol_type = unassigned DNA
aacgaacgctggcggcaggcttaacacatgcaagtcgagcgcccctccttcaagcaagcttgaaggagttctttttccgccgggaggcggggagggaattcaagaaagccccaggctttcttgatggaggggagcggcagacgggtgagtaacgcgtgggaatctacccatctctacggaacaactccgggaaactggagctaataccgtatacgtccttcgggagaaagatttatcggagatggatgagcccgcgttggattagctagttggtggggtaatggcctaccaaggcgacgatccatagctggtctgagaggatgatcagccacactgggactgagacacggcccagactcctacgggaggcagcagtggggaatattggacaatgggcgcaagcctgatccagccatgccgcgtgagtgatgaaggccctagggttgtaaagctctttcaccggtgaagataatgacggtaaccggagaagaagccccggctaacttcgtgccagcagccgcggtaatacgaagggggctagcgttgttcggaattactgggcgtaaagcgcacgtaggcggatacttaagttaggggtgaaatcccagagctcaactctggaactgcctttaatactgggtatctcgagtccgagagaggtgagtggaattccgagtgtagaggtgaaattcgtagatattcggaggaacaccagtggcgaaggcggctcactggctcggtactgacgctgaggtgcgaaagcgtggggagcaaacaggattagataccctggtagtccacgccgtaaacgatggaagctagccgttggcaagtttacttgtcggtggcgcagctaacgcattaagcttcccgcctggggagtacggtcgcaagattaaaactcaaaggaattgacgggggcccgcacaagcggtggagcatgtggtttaattcgaagcaacgcgcagaaccttaccagcccttgacatcccggtcgcggtttccagagatggataccttcagttcggctggaccggtgacaggtgctgcatggctgtcgtcagctcgtgtcgtgagatgttgggttaagtcccgcaacgagcgcaaccctcgcccttagttgccagcattcagttgggcactctaaggggactgccggtgataagccgagaggaaggtggggatgacgtcaagtcctcatggcccttacgggctgggctacacacgtgctacaatggtggtgacagtgggcagcgagaccgcgaggtcgagctaatctccaaaagccatctcagttcggattgcactctgcaactcgagtgcatgaagttggaatcgctagtaatcgcggatcagcatgccgcggtgaatacgttcccgggccttgtacacaccgcccgtcacaccatgggagttggttttacccgaaggtagtgtgctaaccgcaaggaggcagctaaccacggtagggtcagcgactggggtg

SEQ ID NO: 2033 - DNA, 1406 bp, Mesorhizobium amorphae
  source 1..1406: mol_type = unassigned DNA
aacgaacgctggcggcaggcttaacacatgcaagtcgagcgccccgcaaggggagcggcagacgggtgagtaacgcgtgggaatctacccatctctacggaacaactccgggaaactggagctaataccgtatacgtccttcgggagaaagatttatcggagatggatgagcccgcgttggattagctagttggtggggtaatggcctaccaaggcgacgatccatagctggtctgagaggatgatcagccacactgggactgagacacggcccagactcctacgggaggcagcagtggggaatattggacaatgggcgaaagcctgatccagccatgccgcgtgagtgatgaaggccctagggttgtaaagctctttcaacggtgaagataatgacggtaaccgtagaagaagccccggctaacttcgtgccagcagccgcggtaatacgaagggggctagcgttgttcggaattactgggcgtaaagcgcacgtaggcggatacttaagtcaggggtgaaatcccggggctcaaccccggaactgcctttgatactgggtatctcgagtccggaagaggtgagtggaattccgagtgtagaggtgaaattcgtagatattcggaggaacaccagtggcgaaggcggctcactggtccggtactgacgctgaggtgcgaaagcgtggggagcaaacaggattagataccctggtagtccacgccgtaaacgatggaagctagccgttggcaagtttacttgtcggtggcgcagctaacgcattaagcttcccgcctggggagtacggtcgcaagattaaaactcaaaggaattgacgggggcccgcacaagcggtggagcatgtggtttaattcgaagcaacgcgcagaaccttaccagcccttgacatcccggtcgcggtttccagagatggattccttcagttcggctggaccggtgacaggtgctgcatggctgtcgtcagctcgtgtcgtgagatgttgggttaagtcccgcaacgagcgcaaccctcgcccttagttgccagcattaagttgggcactctaaggggactgccggtgataagccgagaggaaggtggggatgacgtcaagtcctcatggcccttacgggctgggctacacacgtgctacaatggtggtgacagtgggcagcgagaccgcgaggtcgagctaatctccaaaagccatctcagttcggattgcactctgcaactcgagtgcatgaagttggaatcgctagtaatcgcggatcagcatgccgcggtgaatacgttcccgggccttgtacacaccgcccgtcacaccatgggagttggttttacccgaaggcgctgtgctaaccgcaaggaggcaggcgaccacggtaggtcagcgactggggtg

SEQ ID NO: 2034 - DNA, 1407 bp, Mesorhizobium australicum
  source 1..1407: mol_type = unassigned DNA
aacgaacgctggcggcaggcttaacacatgcaagtcgagcgccccgcaaggggagcggcagacgggtgagtaacgcgtgggaatctacccatctctacggaacaactccgggaaactggagctaataccgtatacgtccttttggagaaagatttatcggagatggatgagcccgcgttggattagctagttggtggggtaatggcctaccaaggcgacgatccatagctggtctgagaggatgatcagccacactgggactgagacacggcccagactcctacgggaggcagcagtggggaatattggacaatgggcgcaagcctgatccagccatgccgcgtgagtgatgaaggccctagggttgtaaagctctttcaacggtgaagataatgacggtaaccgtagaagaagccccggctaacttcgtgccagcagccgcggtaatacgaagggggctagcgttgttcggaattactgggcgtaaagcgcacgtaggcggattgttaagttaggggtgaaatcccagggctcaaccctggaactgcctttaatactggcaatctcgagtccgagagaggtgagtggaattccgagtgtagaggtgaaattcgtagatattcggaggaacaccagtggcgaaggcggctcactggctcggtactgacgctgaggtgcgaaagcgtggggagcaaacaggattagataccctggtagtccacgccgtaaactatgagagctagccgtcggcaagtttacttgtcggtggcgcagctaacgcattaagctctccgcctggggagtacggtcgcaagattaaaactcaaaggaattgacgggggcccgcacaagcggtggagcatgtggtttaattcgaagcaacgcgcagaaccttaccagcccttgacatcccggtcgcggtttccagagatggataccttcagttcggctggaccggtgacaggtgctgcatggctgtcgtcagctcgtgtcgtgagatgttgggttaagtcccgcaacgagcgcaaccctcgcccttagttgccagcattaagttgggcactctaaggggactgccggtgataagccgagaggaaggtggggatgacgtcaagtcctcatggcccttacgggctgggctacacacgtgctacaatggtggtgacagtgggcagcgagaccgcgaggtcgagctaatctccaaaagccatctcagttcggattgcactctgcaactcgagtgcatgaagttggaatcgctagtaatcgcggatcagcatgccgcggtgaatacgttcccgggccttgtacacaccgcccgtcacaccatgggagttggttttacccgaaggcgctgtgctaaccgcaaggaggcaggcgaccacggtagggtcagcgactggggtg

SEQ ID NO: 2035 - DNA, 1407 bp, Mesorhizobium ciceri
  source 1..1407: mol_type = unassigned DNA
  misc_difference 317: note = n is a, c, g, or t
  misc_difference 531: note = n is a, c, g, or t
aacgaacgctggcggcaggcttaacacatgcaagtcgagcgccccgcaaggggagcggcagacgggtgagtaacgcgtgggaatctacccatctctacggaacaactccgggaaactggagctaataccgtatacgtccttcgggagaaagatttatcggagatggatgagcccgcgttggattagctagttggtggggtaatggcctaccaaggcgacgatccatagctggtctgagaggatgatcagccacattgggactgagacacggcccaaactcctacgggaggcagcagtggggaatattggacaatggncgaaagcctgatccagccatgccgcgtgagtgatgaaggccctagggttgtaaagctctttcaacggtgaagataatgacggtaaccgtagaagaagccccggctaacttcgtgccagcagccgcggtaatacgaagggggctagcgttgttcggaattactgggcgtaaagcgcacgtaggcggattgttaagttaggggtgaaatcccaggnctcaaccctggaactgcctttaatactggcaatctcgagtccgagagaggtgagtggaattccgagtgtagaggtgaaattcgtagatattcggaggaacaccagtggcgaaggcggctcactggctcggtactgacgctgaggtgcgaaagcgtggggagcaaacaggattagataccctggtagtccacgccgtaaactatgagagctagccgtcggcaagtttacttgtcggtggcgcagctaacgcattaagctctccgcctggggagtacggtcgcaagattaaaactcaaaggaattgacgggggcccgcacaagcggtggagcatgtggtttaattcgaagcaacgcgcagaaccttaccagcccttgacatcccggtcgcggtttccagagatggataccttcagttcggctggaccggtgacaggtgctgcatggctgtcgtcagctcgtgtcgtgagatgttgggttaagtcccgcaacgagcgcaaccctcgcccttagttgccagcattaagttgggcactctaaggggactgccggtgataagccgagaggaaggtggggatgacgtcaagtcctcatggcccttacgggctgggctacacacgtgctacaatggtggtgacagtgggcagcgagaccgcgaggtcgagctaatctccaaaaaccatctcagttcggattgcactctgcaactcgagtgcatgaagttggaatcgctagtaatcgcggatcagcatgccgcggtgaatacgttcccgggccttgtacacaccgcccgtcacaccatgggagttggttttacccgaaggcgctgtgctaaccgcaaggaggcaggcgaccacggtagggtcagcgactggggtg

SEQ ID NO: 2036 - DNA, 1462 bp, unidentified
  source 1..1462: mol_type = unassigned DNA; note = Mesorhizobium delmotii
ggctcagaacgaacgctggcggcaggcttaacacatgcaagtcgagcgccccgcaaggggagcggcagacgggtgagtaacgcgtgggaatctacccatctctacggaacaactccgggaaactggagctaataccgtatacgtccttttggagaaagatttatcggagatggatgagcccgcgttggattagctagttggtggggtaatggcctaccaaggcgacgatccatagctggtctgagaggatgatcagccacattgggactgagacacggcccaaactcctacgggaggcagcagtggggaatattggacaatgggcgcaagcctgatccagccatgccgcgtgagtgatgaaggccctagggttgtaaagctctttcaacggtgaagataatgacggtaaccgtagaagaagccccggctaacttcgtgccagcagccgcggtaatacgaagggggctagcgttgttcggaattactgggcgtaaagcgcacgtaggcggatatttaagtcaggggtgaaatcccggggctcaaccccggaactgcctttgatactgggtatctcgagtccgagagaggtgagtggaattccgagtgtagaggtgaaattcgtagatattcggaggaacaccagtggcgaaggcggctcactggctcggtactgacgctgaggtgcgaaagcgtggggagcaaacaggattagataccctggtagtccacgccgtaaacgatggaagctagccgttggcaagtttacttgtcggtggcgcagctaacgcattaagcttcccgcctggggagtacggtcgcaagattaaaactcaaaggaattgacgggggcccgcacaagcggtggagcatgtggtttaattcgaagcaacgcgcagaaccttaccagcccttgacatcccggtcgcggtctccagagatggagaccttcagttcggctggaccggtgacaggtgctgcatggctgtcgtcagctcgtgtcgtgagatgttgggttaagtcccgcaacgagcgcaaccctcgcccttagttgccagcattcagttgggcactctaaggggactgccggtgataagccgagaggaaggtggggatgacgtcaagtcctcatggcccttacgggctgggctacacacgtgctacaatggtggtgacagtgggcagcgagaccgcgaggtcgagctaatctccaaaagccatctcagttcggattgcactctgcaactcgagtgcatgaagttggaatcgctagtaatcgcggatcagcatgccgcggtgaatacgttcccgggccttgtacacaccgcccgtcacaccatgggagttggttttacccgaaggcgctgtgctaaccgcaaggaggcaggcgaccacggtagggtcagcgactggggtgaagtcgtaacaaggtagccgtaggggaacctgcggctggatcacctcc

SEQ ID NO: 2037 - DNA, 1407 bp, unidentified
  source 1..1407: mol_type = unassigned DNA; note = Mesorhizobium erdmanii
aacgaacgctggcggcaggcttaacacatgcaagtcgagcgccccgcaaggggagcggcagacgggtgagtaacgcgtgggaatctacccatctctacggaacaactccgggaaactggagctaataccgtatacgtccttttggagaaagatttatcggagatggatgagcccgcgttggattagctagttggtggggtaatggcctaccaaggcgacgatccatagctggtctgagaggatgatcagccacactgggactgagacacggcccagactcctacgggaggcagcagtggggaatattggacaatgggcgcaagcctgatccagccatgccgcgtgagtgatgaaggccctagggttgtaaagctctttcaacggtgaagataatgacggtaaccgtagaagaagccccggctaacttcgtgccagcagccgcggtaatacgaagggggctagcgttgttcggaattactgggcgtaaagcgcacgtaggcggatacttaagtcaggggtgaaatcccggggctcaaccccggaactgcctttgatactgggtatctcgagtccggaagaggtgagtggaattccgagtgtagaggtgaaattcgtagatattcggaggaacaccagtggcgaaggcggctcactggtccggtactgacgctgaggtgcgaaagcgtggggagcaaacaggattagataccctggtagtccacgccgtaaacgatggaagctagccgttggcaagtttacttgtcggtggcgcagctaacgcattaagcttcccgcctggggagtacggtcgcaagattaaaactcaaaggaattgacgggggcccgcacaagcggtggagcatgtggtttaattcgaagcaacgcgcagaaccttaccagcccttgacatcccggtcgcggtttccagagatggataccttcagttcggctggaccggtgacaggtgctgcatggctgtcgtcagctcgtgtcgtgagatgttgggttaagtcccgcaacgagcgcaaccctcgcccttagttgccagcattcagttgggcactctaaggggactgccggtgataagccgagaggaaggtggggatgacgtcaagtcctcatggcccttacgggctgggctacacacgtgctacaatggtggtgacagtgggcagcgagaccgcgaggtcgagctaatctccaaaagccatctcagttcggattgcactctgcaactcgagtgcatgaagttggaatcgctagtaatcgcggatcagcatgccgcggtgaatacgttcccgggccttgtacacaccgcccgtcacaccatgggagttggttttacccgaaggcgctgtgctaaccgcaaggaggcaggcgaccacggtagggtcagcgactggggtg

SEQ ID NO: 2038 - DNA, 1408 bp, unidentified
  source 1..1408: mol_type = unassigned DNA; note = Mesorhizobium hawassense
aacgaacgctggcggcaggcttaacacatgcaagtcgagcgccccgcaaggggagcggcagacgggtgagtaacgcgtgggaatctacccatctctacggaacaactccgggaaactggagctaataccgtatacgtccttcgggagaaagatttatcggagatggatgagcccgcgttggattagctagttggtggggtaatggcctaccaaggcgacgatccatagctggtctgagaggatgatcagccacactgggactgagacacggcccagactcctacgggaggcagcagtggggaatattggacaatgggcgaaagcctgatccagccatgccgcgtgagtgatgaaggccctagggttgtaaagctctttcaacggtgaagataatgacggtaaccgtagaagaagccccggctaacttcgtgccagcagccgcggtaatacgaagggggctagcgttgttcggaattactgggcgtaaagcgcacgtaggcggatacttaagtcaggggtgaaatcccggggctcaacccccgaactgcctttgatactgggtatctcgagtccggaagaggtgagtggaattccgagtgtagaggtgaaattcgtagatattcggaggaacaccagtggcgaaggcggctcactggtccggtactgacgctgatgtgcgaaagcgtggggagcaaacaggattagataccctggtagtccacgccgtaaacgatggaagctagccgttggcaagtttacttgtcggtggcgcagctaacgcattaagcttcccgcctggggagtacggtcgcaagattaaaactcaaaggaattgacgggggcccgcacaagcggtggagcatgtggtttaattcgaagcaacgcgcagaaccttaccagcccttgacatcccggtcgcggtttccagaaatggtttccttcagttcggctgcaccggtgacaggtgctgcatggctgtcgtcagctcgtgtcgtgagatgttgggttaagtcccgcaacgagcgcaaccctcgcccttagttgccatcattcagttgggcactctaaggggactgccggtgataagccgagaggaaggtggggatgacgtcaagtcctcatggcccttacgggctgggctacacacgtgctacaatggtggtgacagtggggcagcgagaccgcgaggtcgagctaatctccaaaggccatctcagttcggattgcactctgcaactcgagtgcatgaagttggaatcgctagttatcgcggatcagcttgccgcggtgaatacgttcccgggccttgtacaccccgcccgtcacaccatgggagttggttttacccgaaggcgctgtgctaaccgcaaggaggcaggcgaccacggtagggtcagcgactggggtg

SEQ ID NO: 2039 - DNA, 1400 bp, unidentified
  source 1..1400: mol_type = unassigned DNA; note = Mesorhizobium helmanticense
aacgaacgctggcggcaggcttaacacatgcaagtcgagcgcctcgcaagaggagcggcagacgggtgagtaacgcgtgggaatctacccatctctacggaacaactccgggaaactggagctaataccgtatacgtccttcgggagaaagatttatcggagatggatgagcccgcgttggattagctagttggtggggtaatggcctaccaaggcgacgatccatagctggtctgagaggatgatcagccacattgggactgagacacggcccaaactcctacgggaggcagcagtggggaatattggacaatgggcgaaagcctgatccagccatgccgcgtgagtgatgaaggccctagggttgtaaagctctttcaacggtgaagataatgacggtaaccgtagaagaagccccggctaacttcgtgccagcagccgcggtaatacgaagggggctagcgttgttcggaattactgggcgtaaagcgcacgtaggcggatatttaagtcaggggtgaaatcccggggctcaaccccggaactgcctttgatactgggtatctcgagtccgagagaggtgagtggaattccgagtgtagaggtgaaattcgtagatattcggaggaacaccagtggcgaaggcggctcactggctcggtactgacgctgaggtgcgaaagcgtggggagcaaacaggattagataccctggtagtccacgccgtaaacgatggaagctagccgttggcaagtttacttgtcggtggcgcagctaacgcattaagcttcccgcctggggagtacggtcgcaagattaaaactcaaaggaattgacgggggcccgcacaagcggtggagcatgtggtttaattcgaagcaacgcgcagaaccttaccagcccttgacatcccggtcgcggtttccagagatggattccttcagttcggctggaccggtgacaggtgctgcatggctgtcgtcagctcgtgtcgtgagatgttgggttaagtcccgcaacgagcgcaaccctcgcccttagttgccagcattaagttgggcactctaaggggactgccggtgataagccgagaggaaggtggggatgacgtcaagtcctcatggcccttacgggctgggctacacacgtgctacaatggtggtgacagtgggcagcgagaccgcgaggtcgagctaatctccaaaagccatctcagttcggattgcactctgcaactcgagtgcatgaagttggaatcgctagtaatcgcggatcagcatgccgcggtgaatacgttcccgggccttgtacacaccgcccgtcacaccatgggagttggttttacccgaaggcgctgtgctaaccgcaaggaggcaggcgaccacggtagggtcagcgac

SEQ ID NO: 2040 - DNA, 1407 bp, unidentified; identical to SEQ ID NO: 2037
  source 1..1407: mol_type = unassigned DNA; note = Mesorhizobium japonicum

SEQ ID NO: 2041 - DNA, 1347 bp, unidentified
  source 1..1347: mol_type = unassigned DNA; note = Mesorhizobium kowhaii
cacatgcagtcgagcgcctcgcaagaggagcggcagacgggtgagtaacgcgtgggaatctacccatctctacggaacaactccgggaaactggagctaataccgtatacgtccttcgggagaaagatttatcggagatggatgagcccgcgttggattagctagttggtggggtaatggcctaccaaggcgacgatccatagctggtctgagaggatgatcagccacattgggactgagacacggcccaaactcctacgggaggcagcagtggggaatattggacaatgggcgaaagcctgatccagccatgccgcgtgagtgatgaaggccctagggttgtaaagctctttcaacggtgaagataatgacggtaaccgtagaagaagccccggctaacttcgtgccagcagccgcggtaatacgaagggggctagcgttgttcggaattactgggcgtaaagcgcacgtaggcggattgttaagttaggggtgaaatcccggggctcaaccccggaactgcctttaatactggcaatctcgagtccgagagaggtgagtggaattccgagtgtagaggtgaaattcgtagatattcggaggaacaccagtggcgaaggcggctcactggctcggtactgacgctgaggtgcgaaagcgtggggagcaaacaggattagataccctggtagtccacgccgtaaactatgagagctagccgtcggcaagtttacttgtcggtggcgcagctaacgcattaagctctccgcctggggagtacggtcgcaagattaaaactcaaaggaattgacgggggcccgcacaagcggtggagcatgtggtttaattcgaagcaacgcgcagaaccttaccagcccttgacatcccggtcgcggtttccagagatggtaaccttcagttcggctggaccggtgacaggtgctgcatggctgtcgtcagctcgtgtcgtgagatgttgggttaagtcccgcaacgagcgcaaccctcgcccttagttgccagcattaagttgggcactctaaggggactgccggtgataagccgagaggaaggtggggatgacgtcaagtcctcatggcccttacgggctgggctacacacgtgctacaatggtggtgacagtgggcagcgagaccgcgaggtcgagctaatctccaaaagccatctcagttcggattgcactctgcaactcgagtgcatgaagttggaatcgctagtaatcgcggatcagcatgccgcggtgaatacgttcccgggccttgtacacaccgcccgtcacaccatgggagttggttttacccgaaggcgctgtgctaaccgcaagga

SEQ ID NO: 2042 - DNA, 1403 bp, Mesorhizobium loti
  source 1..1403: mol_type = unassigned DNA
aacgaacgctggcggcaggcttaacacatgcaagtcgagcgcctcgcaagagcggcagacgggtgagtaacgcgtgggaatctacccatctctacggaacaactccgggaaactggagctaataccgtatacgtcttcgggagaaagatttatcggagatggatgagcccgcgttggattagctagttggtggggtaatggcctaccaaggcgacgatccatagctggtctgagaggatgatcagccacattgggactgagacacggcccaaactcctacgggaggcagcagtggggaatattggacaatgggcgaaagcctgatccagccatgccgcgtgagtgatgaaggccctagggttgtaaagctctttcaacggtgaagataatgacggtaaccgtagaagaagccccggctaacttcgtgccagcagccgcggtaatacgaagggggctagcgttgttcggaattactgggcgtaaagcgcacgtaggcggattgttaagttaggggtgaaatcccagggctcaaccctggaactgcctttaatactggcaatctcgagtccgagagaggtgagtggaattccgagtgtagaggtgaaattcgtagatattcggaggaacaccagtggcgaaggcggctcactggctcggtactgacgctgaggtgcgaaagcgtggggagcaaacaggattagataccctggtagtccacgccgtaaacgatgagagctagccgtcggcaagtttacttgtcggtggcgcacgtaacgcattaagctctccgcctggggagtacggtcgcaagattaaaactcaaaggaattgacgggggcccgcacaagcggtggagcatgtggtttaattcgaagcaacgcgcagaaccttaccagcccttgacatcccggtcgcggtttccagagatggataccttcagttcggctggaccggtgacaggtgctgcatggctgtcgtcagctcgtgtcgtgagatgttgggttaagtcccgcaacgagcgcaaccctcgcccttagttgccagcattcagttgggcactctaaggggactgccggtgataagccgagaggaaggtggggatgacgtcaagtcctcatggcccttacgggctgggctacacacgtgctacaatggtggtgacagtgggcagcgagaccgcgaggtcgagctaatctccaaaagccatctcagttcggattgcactctgcaactcgagtgcatgaagttggaatcgctagtaatcgcggatcagcatgccgcggtgaatacgttcccgggccttgtacacaccgcccgtcacaccatgggagttggttttacccgaaggcgctgtgctaaccgcaaggaggcaggcgaccacggtagggtcagcgactggggtg

SEQ ID NO: 2043 - DNA, 1407 bp, Mesorhizobium mediterraneum
  source 1..1407: mol_type = unassigned DNA
aacgaacgctggcggcaggcttaacacatgcaagtcgagcgccccgcaaggggagcggcagacgggtgagtaacgcgtgggaatctacccatctctacggaacaactccgggaaactggagctaataccgtatacgtccttcgggagaaagatttatcggagatggatgagcccgcgttggattagctagttggtggggtaatggcctaccaaggcgacgatccatagctggtctgagaggatgatcagccacattgggactgagacacggcccaaactcctacgggaggcagcagtggggaatattggacaatgggcgcaagcctgatccagccatgccgcgtgagtgatgaaggccctagggttgtaaagctctttcaacggtgaagataatgacggtaaccgtagaagaagccccggctaacttcgtgccagcagccgcggtaatacgaagggggctagcgttgttcggaattactgggcgtaaagcgcacgtaggcggatatttaagtcaggggtgaaatcccggggctcaaccccggaactgcctttgatactgggtatctcgagtccgagagaggtgagtggaattccgagtgtagaggtgaaattcgtagatattcggaggaacaccagtggcgaaggcggctcactggctcggtactgacgctgaggtgcgaaagcgtggggagcaaacaggattagataccctggtagtccacgccgtaaacgatggaagctagccgttggcaagtttacttgtcggtggcgcagctaacgcattaagcttcccgcctggggagtacggtcgcaagattaaaactcaaaggaattgacgggggcccgcacaagcggtggagcatgtggtttaattcgaagcaacgcgcagaaccttaccagcccttgacatcccggtcgcggtctccagagatggagaccttcagttcggctggaccggtgacaggtgctgcatggctgtcgtcagctcgtgtcgtgagatgttgggttaagtcccgcaacgagcgcaaccctcgcccttagttgccagcattcagttgggcactctaaggggactgccggtgataagccgagaggaaggtggggatgacgtcaagtcctcatggcccttacgggctgggctacacacgtgctacaatggtggtgacagtgggcagcgagaccgcgaggtcgagctaatctccaaaagccatctcagttcggattgcactctgcaactcgagtgcatgaagttggaatcgctagtaatcgcggatcagcatgccgcggtgaatacgttcccgggccttgtacacaccgcccgtcacaccatgggagttggttttacccgaaggcgctgtgctaaccgcaaggaggcaggcgaccacggtagggtcagcgactggggtg

SEQ ID NO: 2044 - DNA, 1407 bp, Mesorhizobium metallidurans
  source 1..1407: mol_type = unassigned DNA
aacgaacgctggcggcaggcttaacacatgcaagtcgagcgcctcgcaagaggagcggcagacgggtgagtaacgcgtgggaatctacccatctctacggaacaactccgggaaactggagctaataccgtatacgtccttcgggagaaagatttatcggagatggatgagcccgcgttggattagctagttggtggggtaatggcctaccaaggcgacgatccatagctggtctgagaggatgatcagccacattgggactgagacacggcccaaactcctacgggaggcagcagtggggaatattggacaatgggcgaaagcctgatccagccatgccgcgtgagtgatgaaggccctagggttgtaaagctctttcaacggtgaagataatgacggtaaccgtagaagaagccccggctaacttcgtgccagcagccgcggtaatacgaagggggctagcgttgttcggaattactgggcgtaaagcgcacgtaggcggatatttaagtcaggggtgaaatcccggggctcaaccccggaactgcctttgatactgggtatctcgagtccgagagaggtgagtggaattccgagtgtagaggtgaaattcgtagatattcggaggaacaccagtggcgaaggcggctcactggctcggtactgacgctgaggtgcgaaagcgtggggagcaaacaggattagataccctggtagtccacgccgtaaacgatggaagctagccgttggcaagtttacttgtcggtggcgcagctaacgcattaagcttcccgcctggggagtacggtcgcaagattaaaactcaaaggaattgacgggggcccgcacaagcggtggagcatgtggtttaattcgaagcaacgcgcagaaccttaccagcccttgacatcccggtcgcggtttccagagatggattccttcagttcggctggaccggtgacaggtgctgcatggctgtcgtcagctcgtgtcgtgagatgttgggttaagtcccgcaacgagcgcaaccctcgcccttagttgccagcattaagttgggcactctaaggggactgccggtgataagccgagaggaaggtggggatgacgtcaagtcctcatggcccttacgggctgggctacacacgtgctacaatggtggtgacagtgggcagcgagaccgcgaggtcgagctaatctccaaaagccatctcagttcggattgcactctgcaactcgagtgcatgaagttggaatcgctagtaatcgcggatcagcatgccgcggtgaatacgttcccgggccttgtacacaccgcccgtcacaccatgggagttggttttacccgaaggcgctgtgctaaccgcaaggaggcaggcgaccacggtagggtcagcgactggggtg

SEQ ID NO: 2045 - DNA, 1407 bp, unidentified
  source 1..1407: mol_type = unassigned DNA; note = Mesorhizobium muleiense
aacgaacgctggcggcaggcttaacacatgcaagtcgagcgccccgcaaggggagcggcagacgggtgagtaacgcgtgggaatctacccatctctacggaacaactccgggaaactggagctaataccgtatacgtccttatggagaaagatttatcggagatggatgagcccgcgttggattagctagttggtggggtaatggcctaccaaggcgacgatccatagctggtctgagaggatgatcagccacattgggactgagacacggcccaaactcctacgggaggcagcagtggggaatattggacaatgggcgcaagcctgatccagccatgccgcgtgagtgatgaaggccctagggttgtaaagctctttcaacggtgaagataatgacggtaaccgtagaagaagccccggctaacttcgtgccagcagccgcggtaatacgaagggggctagcgttgttcggaattactgggcgtaaagcgcacgtaggcggatatttaagtcaggggtgaaatcccggggctcaaccccggaactgcctttgatactgggtatctcgagtccgagagaggtgagtggaattccgagtgtagaggtgaaattcgtagatattcggaggaacaccagtggcgaaggcggctcactggctcggtactgacgctgaggtgcgaaagcgtggggagcaaacaggattagataccctggtagtccacgccgtaaacgatggaagctagccgttggcaagtttacttgtcggtggcgcagctaacgcattaagcttcccgcctggggagtacggtcgcaagattaaaactcaaaggaattgacgggggcccgcacaagcggtggagcatgtggtttaattcgaagcaacgcgcagaaccttaccagcccttgacatcccggtcgcggtctccagagatggagaccttcagttcggctggaccggtgacaggtgctgcatggctgtcgtcagctcgtgtcgtgagatgttgggttaagtcccgcaacgagcgcaaccctcgcccttagttgccagcattcagttgggcactctaaggggactgccggtgataagccgagaggaaggtggggatgacgtcaagtcctcatggcccttacgggctgggctacacacgtgctacaatggtggtgacagtgggcagcgagaccgcgaggtcgagctaatctccaaaagccatctcagttcggattgcactctgcaactcgagtgcatgaagttggaatcgctagtaatcgcggatcagcatgccgcggtgaatacgttcccgggccttgtacacaccgcccgtcacaccatgggagttggttttacccgaaggcgctgtgctaaccgcaaggaggcaggcgaccacggtagggtcagcgactggggtg

SEQ ID NO: 2046 - DNA, 1407 bp, Mesorhizobium opportunistum
  source 1..1407: mol_type = unassigned DNA
aacgaacgctggcggcaggcttaacacatgcaagtcgagcgccccgcaaggggagcggcagacgggtgagtaacgcgtgggaatctacccatctctacggaacaactccgggaaactggagctaataccgtatacgtccttacggagaaagatttatcggagatggatgagcccgcgttggattagctagttggtggggtaatggcctaccaaggcgacgatccatagctggtctgagaggatgatcagccacactgggactgagacacggcccagactcctacgggaggcagcagtggggaatattggacaatgggcgcaagcctgatccagccatgccgcgtgagtgatgaaggccctagggttgtaaagctctttcaacggtgaagataatgacggtaaccgtagaagaagccccggctaacttcgtgccagcagccgcggtaatacgaagggggctagcgttgttcggaattactgggcgtaaagcgcacgtaggcggatacttaagtcaggggtgaaatcccggggctcaaccccggaactgcctttgatactgggtatctcgagtccggaagaggtgagtggaattccgagtgtagaggtgaaattcgtagatattcggaggaacaccagtggcgaaggcggctcactggtccggtactgacgctgaggtgcgaaagcgtggggagcaaacaggattagataccctggtagtccacgccgtaaacgatggaagctagccgttggcaagtttacttgtcggtggcgcagctaacgcattaagcttcccgcctggggagtacggtcgcaagattaaaactcaaaggaattgacgggggcccgcacaagcggtggagcatgtggtttaattcgaagcaacgcgcagaaccttaccagcccttgacatcccggtcgcggtttccagagatggaaaccttcagttcggctggaccggtgacaggtgctgcatggctgtcgtcagctcgtgtcgtgagatgttgggttaagtcccgcaacgagcgcaaccctcgcccttagttgccagcattcagttgggcactctaaggggactgccggtgataagccgagaggaaggtggggatgacgtcaagtcctcatggcccttacgggctgggctacacacgtgctacaatggtggtgacagtgggcagcgagaccgcgaggtcgagctaatctccaaaagccatctcagttcggattgcactctgcaactcgagtgcatgaagttggaatcgctagtaatcgcggatcagcatgccgcggtgaatacgttcccgggccttgtacacaccgcccgtcacaccatgggagttggttttacccgaaggcgctgtgctaaccgcaaggaggcaggcgaccacggtagggtcagcgactggggtg

SEQ ID NO: 2047 - DNA, 1407 bp, Mesorhizobium plurifarium
  source 1..1407: mol_type = unassigned DNA
aacgaacgctggcggcaggcttaacacatgcaagtcgagcgccccgcaaggggagcggcagacgggtgagtaacgcgtgggaatctacccatctctacggaacaactccgggaaactggagctaataccgtatacgtccttcgggagaaagatttatcggagatggatgagcccgcgttggattagctagttggtggggtaatggcctaccaaggcgacgatccatagctggtctgagaggatgatcagccacactgggactgagacacggcccagactcctacgggaggcagcagtggggaatattggacaatgggcgaaagcctgatccagccatgccgcgtgagtgatgaaggccctagggttgtaaagctctttcaacggtgaagataatgacggtaaccgtagaagaagccccggctaacttcgtgccagcagccgcggtaatacgaagggggctagcgttgttcggaattactgggcgtaaagcgcacgtaggcggatacttaagtcaggggtgaaatcccggggctcaaccccggaactgcctttgatactgggtatctggagtccggaagaggtgagtggaattccgagtgtagaggtgaaattcgtagatattcggaggaacaccagtggcgaaggcggctcactggtccggtactgacgctgaggtgcgaaagcgtggggagcaaacaggattagataccctggtagtccacgccgtaaacgatggaagctagccgttggcaagtttacttgtcggtggcgcagctaacgcattaagcttcccgcctggggagtacggtcgcaagattaaaactcaaaggaattgacgggggcccgcacaagcggtggagcatgtggtttaattcgaagcaacgcgcagaaccttaccagcccttgacatcccggtcgcggttaccagaaatggtttccttcagttcggctggaccggtgacaggtgctgcatggctgtcgtcagctcgtgtcgtgagatgttgggttaagtcccgcaacgagcgcaaccctcgcccttagttgccatcattcagttgggcactctaaggggactgccggtgataagccgagaggaaggtggggatgacgtcaagtcctcatggcccttacgggctgggctacacacgtgctacaatggtggtgacagtgggcagcgagaccgcgaggtcgagctaatctccaaaagccatctcagttcggattgcactctgcaactcgagtgcatgaagttggaatcgctagtaatcgcggatcagcatgccgcggtgaatacgttcccgggccttgtacacaccgcccgtcacaccatgggagttggttttacccgaaggcgctgtgctaaccgcaaggaggcaggcgaccacggtagggtcagcgactggggtg

SEQ ID NO: 2048 - DNA, 1407 bp, unidentified
  source 1..1407: mol_type = unassigned DNA; note = Mesorhizobium prunaredense
aacgaacgctggcggcaggcttaacacatgcaagtcgagcgccccgcaaggggagcggcagacgggtgagtaacgcgtgggaatctacccatctctacggaacaactccgggaaactggagctaataccgtatacgtccttttggagaaagatttatcggagatggatgagcccgcgttggattagctagttggtggggtaatggcctaccaaggcgacgatccatagctggtctgagaggatgatcagccacattgggactgagacacggcccaaactcctacgggaggcagcagtggggaatattggacaatgggcgcaagcctgatccagccatgccgcgtgagtgatgaaggccctagggttgtaaagctctttcaacggtgaagataatgacggtaaccgtagaagaagccccggctaacttcgtgccagcagccgcggtaatacgaagggggctagcgttgttcggaattactgggcgtaaagcgcacgtaggcggatatttaagtcaggggtgaaatcccggggctcaaccccggaactgcctttgatactgggtatctcgagtccgagagaggtgagtggaattccgagtgtagaggtgaaattcgtagatattcggaggaacaccagtggcgaaggcggctcactggctcggtactgacgctgaggtgcgaaagcgtggggagcaaacaggattagataccctggtagtccacgccgtaaacgatggaagctagccgttggcaagtttacttgtcggtggcgcagctaacgcattaagcttcccgcctggggagtacggtcgcaagattaaaactcaaaggaattgacgggggcccgcacaagcggtggagcatgtggtttaattcgaagcaacgcgcagaaccttaccagcccttgacatcccggtcgcggtctccagagatggagaccttcagttcggctggaccggtgacaggtgctgcatggctgtcgtcagctcgtgtcgtgagatgttgggttaagtcccgcaacgagcgcaaccctcgcccttagttgccagcattcagttgggcactctaaggggactgccggtgataagccgagaggaaggtggggatgacgtcaagtcctcatggcccttacgggctgggctacacacgtgctacaatggtggtgacagtgggcagcgagaccgcgaggtcgagctaatctccaaaagccatctcagttcggattgcactctgcaactcgagtgcatgaagttggaatcgctagtaatcgcggatcagcatgccgcggtgaatacgttcccgggccttgtacacaccgcccgtcacaccatgggagttggttttacccgaaggcgctgtgctaaccgcaaggaggcaggcgaccacggtagggtcagcgactggggtg

SEQ ID NO: 2049 - DNA, 1308 bp, unidentified
  source 1..1308: mol_type = unassigned DNA; note = Mesorhizobium qingshengii
ggagcggcagacgggtgagtaacgcgtgggaatctacccatctctacggaacaactccgggaaactggagctaataccgtatacgtccttcgggagaaagatttatcggagatggatgagcccgcgttggattagctagttggtggggtaatggcctaccaaggcgacgatccatagctggtctgagaggatgatcagccacactgggactgagacacggcccagactcctacgggaggcagcagtggggaatattggacaatgggcgaaagcctgatccagccatgccgcgtgagtgatgaaggccctagggttgtaaagctctttcaacggtgaagataatgacggtaaccgtagaagaagccccggctaacttcgtgccagcagccgcggtaatacgaagggggctagcgttgttcggaattactgggcgtaaagcgcacgtaggcggattgttaagttaggggtgaaatcccagggctcaaccctggaactgcctttaatactggcaatctcgagtccgagagaggtgagtggaattccgagtgtagaggtgaaattcgtagatattcggaggaacaccagtggcgaaggcggctcactggctcggtactgacgctgaggtgcgaaagcgtggggagcaaacaggattagataccctggtagtccacgccgtaaactatgagagctagccgtcggcaagtttacttgtcggtggcgcagctaacgcattaagctctccgcctggggagtacggtcgcaagattaaaactcaaaggaattgacgggggcccgcacaagcggtggagcatgtggtttaattcgaagcaacgcgcagaaccttaccagcccttgacatcccggtcgcggtttccagagatggattccttcagttcggctggaccggtgacaggtgctgcatggctgtcgtcagctcgtgtcgtgagatgttgggttaagtcccgcaacgagcgcaaccctcgcccttagttgccagcattaagttgggcactctaaggggactgccggtgataagccgagaggaaggtggggatgacgtcaagtcctcatggcccttacgggctgggctacacacgtgctacaatggtggtgacagtgggcagcgagaccgcgaggtcgagctaatctccaaaagccatctcagttcggattgcactctgcaactcgagtgcatgaagttggaatcgctagtaatcgcggatcagcatgccgcggtgaatacgttcccgggccttgtacacaccgcccgtcacaccatgggagttggttttacccgaaggcgctgtg

SEQ ID NO: 2050 - DNA, 1406 bp, unidentified
  source 1..1406: mol_type = unassigned DNA; note = Mesorhizobium tamadayense
aacgaacgctggcggcaggcttaacacatgcaagtcgagcgccccgcaaggggagcggcagacgggtgagtaacgcgtgggaatctacccatctctacggaacaactccgggaaactggagctaataccgtatacgtccttcgggagaaagatttatcggagatggatgagcccgcgttggattagctagttggtggggtaatggcctaccaaggcgacgatccatagctggtctgagaggatgatcagccacactgggactgagacacggcccagactcctacgggaggcagcagtggggaatattggacaatgggcgaaagcctgatccagccatgccgcgtgagtgatgaaggccctagggttgtaaagctctttcaacggtgaagataatgacggtaaccgtagaagaagccccggctaacttcgtgccagcagccgcggtaatacgaagggggctagcgttgttcggaattactgggcgtaaagcgcacgtaggcggatatttaagtcaggggtgaaatcccggggctcaaccccggaactgcctttgatactgggtatctcgagtccgagagaggtgagtggaattccgagtgtagaggtgaaattcgtagatattcggaggaacaccagtggcgaaggcggctcactggctcggtactgacgctgaggtgcgaaagcgtggggagcaaacaggattagataccctggtagtccacgccgtaaacgatggaagctagccgttggcaagtttacttgtcggtggcgcagctaacgcattaagcttcccgcctggggagtacggtcgcaagattaaaactcaaaggaattgacgggggcccgcacaagcggtggagcatgtggtttaattcgaagcaacgcgcagaaccttaccagcccttgacatcccggtcgcggtttccagagatggaatccttcagttcggctggaccggtgacaggtgctgcatggctgtcgtcagctcgtgtcgtgagatgttgggttaagtcccgcaacgagcgcaaccctcgcccttagttgccatcattaagttgggcactctaaggggactgccggtgataagccgagaggaaggtggggatgacgtcaagtcctcatggcccttacgggctgggctacacacgtgctacaatggtggtgacagtgggcagcgagacgcgaggtcgagctaatctccaaaagccatctcagttcggattgcactctgcaactcgagtgcatgaagttggaatcgctagtaatcgcggatcagcatgccgcggtgaatacgttcccgggccttgtacacaccgcccgtcacaccatgggagttggttttacccgaaggcgctgtgctaaccgcaaggaggcaggcgaccacggtagggtcagcgactggggtg

SEQ ID NO: 2051 - DNA, 1394 bp, Mesorhizobium temperatum
  source 1..1394: mol_type = unassigned DNA
ggcaggcttaacacatgcaagtcgagcgccccgcaaggggagcggcagacgggtgagtaacgcgtgggaatctacccatctctacggaacaactccgggaaactggagctaataccgtatacgtccttcgggagaaagatttatcggagatggatgagcccgcgttggattagctagttggtggggtaatggcctaccaaggcgacgatccatagctggtctgagaggatgatcagccacattgggactgagacacggcccaaactcctacgggaggcagcagtggggaatattggacaatgggcgcaagcctgatccagccatgccgcgtgagtgatgaaggccctagggttgtaaagctctttcaacggtgaagataatgacggtaaccgtagaagaagccccggctaacttcgtgccagcagccgcggtaatacgaagggggctagcgttgttcggaattactgggcgtaaagcgcacgtaggcggatatttaagtcaggggtgaaatcccggggctcaaccccggaactgcctttgatactgggtatctcgagtccgagagaggtgagtggaattccgagtgtagaggtgaaattcgtagatattcggaggaacaccagtggcgaaggcggctcactggctcggtactgacgctgaggtgcgaaagcgtggggagcaaacaggattagataccctggtagtccacgccgtaaacgatggaagctagccgttggcaagtttacttgtcggtggcgcagctaacgcattaagcttcccgcctggggagtacggtcgcaagattaaaactcaaaggaattgacgggggcccgcacaagcggtggagcatgtggtttaattcgaagcaacgcgcagaaccttaccagcccttgacatcccggtcgcggtctccagagatggagaccttcagttcggctggaccggtgacaggtgctgcatggctgtcgtcagctcgtgtcgtgagatgttgggttaagtcccgcaacgagcgcaaccctcgcccttagttgccagcattcagttgggcactctaaggggactgccggtgataagccgagaggaaggtggggatgacgtcaagtcctcatggcccttacgggctgggctacacacgtgctacaatggtggtgacagtgggcagcgagaccgcgaggtcgagctaatctccaaaagccatctcagttcggattgcactctgcaactcgagtgcatgaagttggaatcgctagtaatcgcggatcagcatgccgcggtgaatacgttcccgggccttgtacacaccgcccgtcacaccatgggagttggttttacccgaaggcgctgtgctaaccgcaagagggcaggcgaccacggtagggtcagcgactggggtg

SEQ ID NO: 2052 - DNA, 1407 bp, Mesorhizobium tianshanense
  source 1..1407: mol_type = unassigned DNA
aacgaacgctggcggcaggcttaacacatgcaagtcgagcgccccgcaaggggagcggcagacgggtgagtaacgcgtgggaatctacccatctctacggagcaactccgggaaactggagctaataccgtatacgtccttcgggagaaagatttatcggagatggatgagcccgcgttggattagctagttggtggggtaatggcctaccaaggcgacgatccatagctggtctgagaggatgatcagccacattgggactgagacacggcccaaactcctacgggaggcagcagtggggaatattggacaatgggcgaaagcctgatccagccatgccgcgtgagtgatgaaggccctagggttgtaaagctctttcaacggtgaagataatgacggtaaccgtagaagaagccccggctaacttcgtgccagcagccgcggtaatacgaagggggctagcgttgttcggaattactgggcgtaaagcgcacgtaggcggatatttaagtcaggggtgaaatcccggggctcaaccccggaactgcctttgatactgggtatctcgagtccgagagaggtgagtggaattccgagtgtagaggtgaaattcgtagatattcggaggaacaccagtggcgaaggcggctcactggctcggtactgacgctgaggtgcgaaagcgtggggagcaaacaggattagataccctggtagtccacgccgtaaacgatggaagctagccgttggcaagtttacttgtcggtggcgcagctaacgcattaagcttcccgcctggggagtacggtcgcaagattaaaactcaaaggaattgacgggggcccgcacaagcggtggagcatgtggtttaattcgaagcaacgcgcagaaccttaccagcccttgacatcccggtcgcggtttccagagatggattccttcagttcggctggaccggtgacaggtgctgcatggctgtcgtcagctcgtgtcgtgagatgttgggttaagtcccgcaacgagcgcaaccctcgcccttagttgccagcattaagttgggcactctaaggggactgccggtgataagccgagaggaaggtggggatgacgtcaagtcctcatggcccttacgggctgggctacacacgtgctacaatggtggtgacagtgggcagcgagaccgcgaggtcgagctaatctccaaaagccatctcagttcggattgcactctgcaactcgagtgcatgaagttggaatcgctagtaatcgcggatcagcatgccgcggtgaatacgttcccgggccttgtacacaccgcccgtcacaccatgggagttggttttacccgaaggcgctgtgctaaccgcaaggaggcaggcgaccacggtagggtcagcgactggggtg

SEQ ID NO: 2053 - DNA, 1295 bp, unidentified
  source 1..1295: mol_type = unassigned DNA; note = Mesorhizobium waimense
tctacccatctctacggaacaactccgggaaactggagctaataccgtatacgtccttcgggagaaagatttatcggagatggatgagcccgcgttggattagctagttggtggggtaatggcctaccaaggcgacgatccatagctggtctgagaggatgatcagccacactgggactgagacacggcccagactcctacgggaggcagcagtggggaatattggacaatgggcgcaagcctgatccagccatgccgcgtgagtgatgaaggccctagggttgtaaagctctttcaacggtgaagataatgacggtaaccgtagaagaagccccggctaacttcgtgccagcagccgcggtaatacgaagggggctagcgttgttcggaattactgggcgtaaagcgcacgtaggcggatacttaagtcaggggtgaaatcccggggctcaaccccggaactgcctttgatactgggtatctcgagtccggaagaggtgagtggaattccgagtgtagaggtgaaattcgtagatattcggaggaacaccagtggcgaaggcggctcactggtccggtactgacgctgaggtgcgaaagcgtggggagcaaacaggattagataccctggtagtccacgccgtaaacgatggaagctagccgttggcaagtttacttgtcggtggcgcagctaacgcattaagcttcccgcctggggagtacggtcgcaagattaaaactcaaaggaattgacgggggcccgcacaagcggtggagcatgtggtttaattcgaagcaacgcgcagaaccttaccagcccttgacatcccggtcgcggtttccagagatggattccttcagttcggctggaccggtgacaggtgctgcatggctgtcgtcagctcgtgtcgtgagatgttgggttaagtcccgcaacgagcgcaaccctcgcccttagttgccagcattaagttgggcactctaaggggactgccggtgataagccgagaggaaggtggggatgacgtcaagtcctcatggcccttacgggctgggctacacacgtgctacaatggtggtgacagtgggcagcgagaccgcgaggtcgagctaatctccaaaagccatctcagttcggattgcactctgcaactcgagtgcatgaagttggaatcgctagtaatcgcggatcagcatgccgcggtgaatacgttcccgggccttgtacacaccgcccgtcacaccatgggagttggttttacccgaaggcgctgtgctaaccgcaaggagacagg

SEQ ID NO: 2054 - DNA, 1339 bp, Methylarcula marina
  source 1..1339: mol_type = unassigned DNA
aacgaacgctggcggcaggcttaacacatgcaagtcgagtcgactttcgggatagcggcggacgggtgagtaacgcgtgggaacgtgcccttcactgcggaatagcccagggaaacttggattaataccgcatacgcccttcaggggaaagatttatcggtgaaggatcggcccgcgttagattaggtagttggtggggtaatggcctaccaagccgacgatccatagctggtttgagaggatgatcagccacactgggactgagacacggcccagactcctacgggaggcagcagtggggaatcttagacaatgggggcaaccctgatctagccatgccgcgtgagtgatgaaggccttagggtcgtaaagatctttcaactgggaagataatgacggtaccagcagaagaagccccggctaactccgtgccagcagccgcggtaatacggagggggctagcgttgttcggaattactgggcgtaaagcgcacgtaggcggacaggaaagttaggggtgaaattccggggctcaacctcggaactgccttcaaaactatctgtctggagttcgagagaggtgagtggaattccgagtgtagaggtgaaattcgtagatattcggaggaacaccagtggcgaaggcggcttgctggctcgatactgacgctraggtgcgaaagcgtggggagcaaacaggattagatacccttgtagtccacgccgtaaacgatggatgccagacgtcgggttgctatctgttcggtgacacctaacggattaagcattccgcctggggagtacggtcgcaagattaaaactcaaaggaattgacgggggcccgcacaagcggtggaggctgtggtttaattcgaagcaacgcgcagaaccttaccaacccttgacatcccgggccagcaccagagatggtgtctccacttcggtggctcagagacaggtgctgcatggctgtcgtcagctcgtgtcgtgagatgttcggttaagtccggcaacgagcgcaacccacgtccatagttgccagcaggtttagctgggcactctagggagactgccggtgataagcgggaggaaggtgtggatgacgtcaagtcctcatggcccttacgggttgggctacacacgtgctacaatggtggtgacaatgggttaatccccaaaagccatctcagttcggattgtcctctgcaactcgagtgcatgaagttggaatcgctagtaatcgcggatcagcatgccgcggtgaatacgttcccgggccttgtacacaccgcccgtcacaccatgggagttggttctacccgaaggcagtgcgctaacc

SEQ ID NO: 2055 - DNA, 1453 bp, Methylibium petroleiphilum
  source 1..1453: mol_type = unassigned DNA
attgaacgctggcggcatgccttacacatgcaagtcgaacggcagcacgggagcaatcctggtggcgagtggcgaacgggtgagtaatacatcggaacgtgcccagttgtgggggatagcccggcgaaagccggattaataccgcatacgacctacgggtgaaagcgggggatcgcaagacctcgcgctattggagcggccgatgtcggattagctagttggtggggtaaaagcctaccaaggctacgatccgtagctggtctgagaggacgaccagccacactgggactgagacacggcccagactcctacgggaggcagcagtggggaattttggacaatgggcgcaagcctgatccagccatgccgcgtgcgggaagaaggccttcgggttgtaaaccgcttttgtcagggaagaaacggtttgggctaataccccgaactaatgacggtacctgaagaataagcaccggctaactacgtgccagcagccgcggtaatacgtagggtgcaagcgttaatcggaattactgggcgtaaagcgtgcgcaggcggctttgcaagacagatgtgaaatccccgggctcaacctgggaactgcatttgtgactgcaaggctggagtgcggcagagggggatggaattccgcgtgtagcagtgaaatgcgtagatatgcggaggaacaccgatggcgaaggcaatcccctgggcctgcactgacgctcatgcacgaaagcgtggggagcaaacaggattagataccctggtagtccacgccctaaacgatgtcaactggttgttggacggcttgctgttcagtaacgaagctaacgcgtgaagttgaccgcctggggagtacggccgcaaggttgaaactcaaaggaattgacggggacccgcacaagcggtggatgatgtggtttaattcgatgcaacgcgaaaaaccttacctacccttgacatgtctagaagttaccagagatggtttcgtgctcgaaagagaactagaacacaggtgctgcatggccgtcgtcagctcgtgtcgtgagatgttgggttaagtcccgcaacgagcgcaacccttgtcattagttgctacgtaagggcactctaatgagactgccggtgacaaaccggaggaaggtggggatgacgtcaggtcatcatggcccttatgggtagggctacacacgtcatacaatggccggtacagagggctgccaacccgcgagggggagccaatcccagaaaaccggtcgtagtccggatcgcagtctgcaactcgactgcgtgaagtcggaatcgctagtaatcgcggatcagcttgccgcggtgaatacgttcccgggtcttgtacacaccgcccgtcacaccatgggagcgggttctgccagaagtagttagcctaaccgcaaggagggcgattaccacggcagggttcgtgactggggtg

SEQ ID NO: 2056 - DNA, 1465 bp, Methylobacillus flagellatus
  source 1..1465: mol_type = unassigned DNA
attgaacgctggcggcatgctttacacatgcaagtcgaacggcagcacggggagcttgctccctggtggcgagtggcgaacgggtgagtaatatatcggaacgtgtccaataatgggggataactagtcgaaagattagctaataccgcatacgccctgagggggaaagtgggggatcttcggacctcacgttaatggagcggccgatatctgattagctagttggtggggtaaaagcctaccaaggcgacgatcagtagctggtctgagaggatgatcagccacactgggactgagacacggcccagactcctacgggaggcagcagtggggaattttggacaatgggcgcaagcctgatccagccatgccgcgtgagtgaagaaggccttcgggttgtaaagctctttcgcaaggaaagaaaacttatccactaatactggatgaggatgacggtaccttgataagaagcaccggctaactacgtgccagcagccgcggtaatacgtagggtgcaagcgttaatcggaattactgggcgtaaagcgagcgcaggcggttttgtaagtcagatgtgaaagccccgggctcaacctgggaactgcgtttgaaactacaaggctagagtatgggagagggaggtagaattccacgtgtagcagtgaaatgcgtagagatgtggaggaataccaatggcgaaggcagcctcctggcctaatactgacgctcatgctcgaaagcgtggggagcaaacaggattagataccctggtagtccacgccctaaacgatgtcaactagttgttggtggagtaaaatccattagtaacgcagctaacgcgtgaagttgaccgcctggggagtacggtcgcaagattaaaactcaaaggaattgacgggggcccgcacaagcggtggattatgtggattaattcgatgcaacgcgaaaaaccttacctggccttgacatgccactaacgaagcagagatgcattaggtgcccgaaagggaaagtggacacaggtgctgcatggctgtcgtcagctcgtgtcgtgagatgttgggttaagtcccgcaacgagcgcaacccttgccaataattgccatcattcagttgggcactttattgggactgccggtgacaaaccggaggaaggtggggatgacgtcaagtcctcatggcccttatggccagggcttcacacgtaatacaatggtcggtacagagggttgccaacccgcgagggggagctaatctcagaaagccgatcgtagtccggattgcagtctgcaactcgactgcatgaagtcggaatcgctagtaatcgcggatcagcatgtcgcggtgaatacgttcccgggccttgtacacaccgcccgtcacaccatgggagtgggtttcaccagaagtaggtagcctaaccgcaaggagggcgcttaccacggtgggattcatgactggggtg

SEQ ID NO: 2057 - DNA, 1467 bp, unidentified
  source 1..1467: mol_type = unassigned DNA; note = Methylobacillus rhizosphaerae
attgaacgctggcggcatgctttacacatgcaagtcgaacggtaacagagagaagcttgcttctctgctgacgagtggcgaacgggtgagtaacatatcggaacgtgtccaataatgggggataactagtcgaaagattagctaataccgcatacgccctgagggggaaagctggggatcttcggacctagcgttaatggagcggccgatatctgattagctagttggtggggtaaaagcctaccaaggcgacgatcagtagctggtctgagaggatgatcagccacactgggactgagacacggcccagactcctacgggaggcagcagtggggaattttggacaatgggcgcaagcctgatccagccatgccgcgtgagtgaagaaggccttcgggttgtaaagctctttcgcaaggaaagaaaacttactctctaatatagagtgaggctgacggtaccttgataagaagcaccggctaactacgtgccagcagccgcggtaatacgtagggtgcgagcgttaatcggaattactgggcgtaaagcgagcgcaggcggttttgtaagtcagatgtgaaatccccgggctcaacctgggaactgcgtttgaaactacaaggctagagtatgggagaggggggtagaattccacgtgtagcagtgaaatgcgtagagatgtggaggaataccaatggcgaaggcagccccctggcctaatactgacgctcatgctcgaaagcgtggggagcaaacaggattagataccctggtagtccacgccctaaacgatgtcaactagttgttggtggagtaaaatccattagtaacgcagctaacgcgtgaagttgaccgcctggggagtacggtcgcaagattaaaactcaaaggaattgacgggggcccgcacaagcggtggattatgtggattaattcgatgcaacgcgaaaaaccttacctggccttgacatgccactaacgaagcagagatgcattaggtgctcgaaagagaaagtggacacaggtgctgcatggctgtcgtcagctcgtgtcgtgagatgttgggttaagtcccgcaacgagcgcaacccttgccaataattgccatcattcagttgggcactttattgggactgccggtgacaaaccggaggaaggtggggatgacgtcaagtcctcatggcccttatggccagggcttcacacgtaatacaatggtcggtacagagggttgccaacccgcgagggggagctaatctcagaaagccgatcgtagtccggattgtagtctgcaactcgactacatgaagtcggaatcgctagtaatcgcggatcagcatgtcgcggtgaatacgttcccgggccttgtacacaccgcccgtcacaccatgggagtgggtttcaccagaagtagttagcctaaccgcaaggagggcgattaccacggtgggattcatgactggggtg

SEQ ID NO: 2058 - DNA, 1457 bp, Methylobacter marinus
  source 1..1457: mol_type = unassigned DNA
attgaacgctggcggtatgcttaacacatgcaagtcgaacggtaacaggccttcgggcgctgacgagtggcggacgggtgagtaacgcgtaggaatctgcctcatagtgggggacaacttggggaaactcaagctaataccgcatacgccctacgggggaaagcgggggaccttcgggcctcgcgctatgagatgagcctgcgttagattagctagttggtggggtaaaggcctaccaaggcgacgatctatagctggtctgagaggacgatcagccacactgggactgagacacggcccagactcctacgggaggcagcagtggggaatattggacaatgggcgcaagcctgatccagcaataccgcgtgtgtgaagaaggcctgagggttgtaaagcactttcaattgggaggaaaacctgccggtcaatacccggcagcttgacattacctttagaagaagcaccggctaactccgtgccagcagccgcggtaatacggagggtgcgagcgttaatcggaattactgggcgtaaagcgtgcgtaggcggttatttaagtcagatgtgaaagccccgggcttaacctgggaactgcatttgatactgggtaactagagtttagtagaggagagtggaatttcaggtgtagcggtgaaatgcgtagagatctgaaggaacaccagtggcgaaggcgactctctggactaaaactgacgctgaggtacgaaagcgtgggtagcaaacaggattagataccctggtagtccacgccgtaaacgatgtcaactagccgttgggccttttaacaggcttagtggcgcagctaacgcattaagttgaccgcctggggagtacggccgcaaggttaaaactcaaatgaattgacgggggcccgcacaagcggtggagcatgtggtttaattcgatgcaacgcgaagaaccttacctacccttgacatccagagaatctgttagagatagcggagtgccttcgggaactctgagacaggtgctgcatggctgtcgtcagctcgtgtcgtgagatgttgggttaagtcccgtaacgagcgcaacccttatccttagttgccagcacgtgatggtgggaactctagggagactgccggtgataaaccggaggaaggtggggacgacgtcaagtcatcatggcccttatgggtagggctacacacgtgctacaatggccggtacagagggcagcgaactcgcgagagtcagcaaatcccagaaagccggtcctagtccggattggagtctgcaactcgactccatgaagtcggaatcgctagtaatcgcgaatcagaatgtcgcggtgaatacgttcccgggccttgtacacaccgcccgtcacaccatgggagtgggttgcaaaagaagtgggtagtctaaccttcgggagggcgctcaccactttgtgattcatgactggggtg

SEQ ID NO: 2059 - DNA, 1457 bp, Methylobacter tundripaludum
  source 1..1457: mol_type = unassigned DNA
attgaacgctggcggtatgcttaacacatgcaagtcgaacggtaacaggccttcgggcgctgacgagtggcggacgggtgagtaacgcgtaggaatctgcctcatagtgggggacaacgtggggaaactcacgctaataccgcatacgccctacgggggaaagcgggggatcttcggacctcgcgctatgagatgagcctgcgttagattagctagttggtagggtaaaggcctaccaaggcgacgatctatagctggtctgagaggacgatcagccacactgggactgagacacggcccagactcctacgggaggcagcagtggggaatattggacaatgggcgaaagcctgatccagcaataccgcgtgtgtgaagaaggccttagggttgtaaagcactttcaattgggaggaaaacctaccggtcaatacccggtagcttgacattacctttagaagaagcaccggctaactccgtgccagcagccgcggtaatacggagggtgcgagcgttaatcggaattactgggcgtaaagcgtgcgtaggcggttcgttaagtcagatgtgaaagccctgggctcaacctgggaactgcatttgaaactggcggactagagtttagtagaggggagtggaatttcaggtgtagcggtgaaatgcgtagatatctgaaggaacaccagtggcgaaggcgactccctggactagaactgacgctgaggtacgaaagcgtgggtagcaaacaggattagataccctggtagtccacgccgtaaacgatgtcgactagccgttggtcctatttacaggattagtggcgcagctaacgcattaagtcgaccgcctggggagtacggccgcaaggttaaaactcaaatgaattgacgggggcccgcacaagcggtggagcatgtggtttaattcgatgcaacgcgaagaaccttacctacccttgacatccagagaatctgttagagatagtagagtgccttcgggagctctgagacaggtgctgcatggctgtcgtcagctcgtgtcgtgagatgttgggttaagtcccgtaacgagcgcaacccttatccttagttgccagcgggtaatgccgggaactctagggagactgccggtgataaaccggaggaaggtggggacgacgtcaagtcatcatggcccttatgggtagggctacacacgtgctacaatggccggtacagagggctgcgaacttgcgaaagtaagcaaatcccagaaagccggtcctagtccggattggagtctgcaactcgactccatgaagtcggaatcgctagtaatcgcgaatcagaatgtcgcggtgaatacgttcccgggccttgtacacaccgcccgtcacaccatgggagtgggttgcaaaagaagtgggtagtctaaccttcgggagggcgctcaccactttgtgattcatgactggggtg

SEQ ID NO: 2060 - DNA, 1360 bp, unidentified
  source 1..1360: mol_type = unassigned DNA; note = Methylocaldum marinum
attgaacgctggcggcatgcttaacacatgcaagtcgaacggcagcacagccgggtaaccggtgggtggcgagtggcggacgggtgagtaatgcgtaggaatctgccttgtagtgggggataacccggggaaactcgggctaataccgcatacgttctacggaggaaagcgggggatcttcggacctcgcgctatgagatgagcctacgtccgattagctagttggtagggtaatggcctaccaaggcgacgatcggtagctggtctgagaggacgatcagccacactggaactgagacacggtccagactcctacgggaggcagcagtggggaatattggacaatgggcgcaagcctgatccagcaatgccgcgtgtgtgaagaaggcctgcgggttgtaaagcactttaagcggggaagaaaggtggggtgttaataccatctcacattgacgttacctgcagaataagcaccggctaactccgtgccagcagccgcggtaatacggagggtgcgagcgttaatcggaattactgggcgtaaagcgcgcgtaggcggtttgttaagtcagctgtgaaagccccgggcttaacctgggaatggcagttgatactggcaggctagagtgtggtagaggggtgtggaatttccggtgtagcagtgaaatgcgtagagatcggaaggaacaccagtggcgaaggcggcaccctggaccgacactgacgctgaggtgcgaaagcgtggggagcaaacaggattagataccctggtagtccacgctgtaaacgatgagaactagccgttgggcacaattgagtgtttagtggcgcagctaacgcgataagttctccgcctggggagtacggccgcaaggttaaaactcaaatgaattgacgggggcccgcacaagcggtggagcatgtggtttaattcgatgcaacgcgaagaaccttacctggtcttgacatcttaggaacccttgagagattgaggggtgccttcgggagcctaaagacaggtgctgcatggctgtcgtcagctcgtgtcgtgagatgttgggttaagtcccgtaacgagcgcaacccttgtccctagttgccagcgttaagtcgggaactctagggagactgccggtgataaaccggaggaaggtggggatgacgtcaagtcatcatggcccttatgaccagggctacacacgtgctacaatggtcggtacagagggtagccaagccgcgaggcggagccaatctcacaaagccgatcgtagtccggattgcagtctgcaactcgactgcatgaagtcggaatcgctagtaatcgcggatcagcatgccgcggtgaatacgttcccgggcc

SEQ ID NO: 2061 - DNA, 1408 bp, unidentified
  source 1..1408: mol_type = unassigned DNA; note = Methylocapsa palsarum
aacgaacgctggcggcaggcctaacacatgcaagtcgaacgccgtagcaatacggagtggcagacgggtgagtaacacgtgggaacatacccttcggttcggaataactcagggaaacttgtgctaataccggatacgtccgcaaggagaaagatttatcgccgaaggattggcccgcgtctgattagcttgttggtgaggtaatggctcaccaaggcgacgatcagtagctggtctgagaggatgatcagccacattgggactgagacacggcccagactcctacgggaggcagcagtggggaatattggacaatgggcgaaagcctgatccagccatgccgcgtgagtgatgaaggccttagggttgtaaagctcttttacctgggaagataatgacggtaccaggagaataagccccggctaacttcgtgccagcagccgcggtaatacgaagggggctagcgttgttcggatttactgggcgtaaagcgcacgtaggcggatctttaagtcaggggtgaaatcccgaggctcaacctcggaactgcctttgatactggggatctcgagtccgggagaggtgagtggaactgcgagtgtagaggtgaaattcgtagatattcgcaagaacaccagtggcgaaggcggctcactggcccggtactgacgctgaggtgcgaaagcgtggggagcaaacaggattagataccctggtagtccacgccgtaaacgatggatgctagccgttagacagcttgctgtttagtggcgcagttaacgctttaagcatcccgcctggggagtacggtcgcaagattaaaactcaaaggaattgacgggggcccgcacaagcggtggagcatgtggtttaattcgaagcaacgcgcagaaccttaccagctcttgacatgtctagtatggtcgccagagatggcttccttcccgcaaggggctagaacacaggtgctgcatggctgtcgtcagctcgtgtcgtgagatgttgggttaagtcccgcaacgagcgcaaccctcgcccttagttgccatcattcagttgggcactctagggggactgccggtgataagccgagaggaaggtggggatgacgtcaagtcctcatggcccttacgggctgggctacacacgtgctacaatggcggtgacagtgggatgcggaggggcgaccccgagcaaatctcaaaaagccgtctcagttcggattgtactctgcaactcgagtgcatgaaggtggaatcgctagtaatcgtagatcagaacgctacggtgaatacgttcccgggccttgtacacaccgcccgtcacaccatgggagttggttctacccgaaggcgttttgctaaccgcaagggggcaggcgaccacggtagggtcagcgactggggtg

SEQ ID NO: 2062 - DNA, 1413 bp, unidentified
  source 1..1413: mol_type = unassigned DNA; note = Methyloceanibacter caenitepidi
aacgaacgctggcggcaggcctaacacatgcaagtcgaacgagaagctaccttcgggtagtggaaagtggcagacgggtgagtaacgcgtgggaacgtgcctttcggttcggaataactcagggaaacttgggctaataccggatacgcccttcgggggaaagatttatcgccgaaagatcggcccgcgtcagattagctagttggtggggtaatggctcaccaaggcgacgatctgtagctggtctgagaggatgatcagccacactgggactgagacacggcccagactcctacgggaggcagcagtggggaatattggacaatgggcgaaagcctgatccagccatgccgcgtgggtgaagaaggccctagggttgtaaacccctttcagcggggaagataatgacggtacccgcagaagaagccccggctaactccgtgccagcagccgcggtaatacggagggggctagcgttgttcggaattactgggcgtaaagcgcgcgtaggcggactttcaagtcaggggtgaaatcccgaggctcaacctcggaactgcctttgatactgtaagtcttgagtccgagagaggtgagtggaattcctagtgtagaggtgaaattcgtagatattaggaagaacaccagtggcgaaggcggctcactggctcggtactgacgctgaggcgcgaaagcgtggggagcaaacaggattagataccctggtagtccacgccgtaaactatggatgctagccgtcggggagcatgctcttcggtggcgcagccaacgcattaagcatcccgcctggggagtacggtcgcaagattaaaactcaaaggaattgacgggggcccgcacaagcggtggagcatgtggtttaattcgaggcaacgcgaagaaccttaccagctcttgacttcctggtcggggctccagagacggagctcttcaattggccagtgacaggtgctgcatggctgtcgtcagctcgtgtcgtgagatgttgggttaagtcccgcaacgagcgcaacccctaccattagttgccagcattaagttgggcactctagtgggactgccggtgataagccggaggaaggtggggatgacgtcaagtcatcatggcccttacgggctgggctacacacgtgctacaatggcagtgacaatgggcagctacttcgcgaggagatgctaatcccaaaaaactgtctcagttcggattgttctctgcaactcgagagcatgaagtcggaatcgctagtaatcgcggatcagcatgccgcggtgaatacgttcccgggccttgtacacaccgcccgtcacaccatgggagttggttttacccgaagacggtgcgctaaccagcaatggaggcagccggccacggtagggtcagcgactggggtg

SEQ ID NO: 2063 - DNA, 1414 bp, unidentified
  source 1..1414: mol_type = unassigned DNA; note = Methyloceanibacter marginalis
aacgaacgctggcggcaggcctaacacatgcaagtcgaacgagaagccacctcgggtggtggacagtggcagacgggtgagtaacgcgtgggaacgtgcctttcggttcgggataacccagggaaacttgggctaataccggatacgcccttcgggggaaagattcattgccgaaagatcggcccgcgtcggattagcttgttggtggggtaaaagcctaccaaggcgacgatccgtagctggtctgagaggatgaccagccacactgggactgagacacggcccagactcctacgggaggcagcagtggggaatattggacaatgggcgaaagcctgatccagccatgccgcgtgggtgaagaaggccttagggttgtaaacccctttcagcggggaagataatgacggtacccgcagaagaagccccggctaactccgtgccagcagccgcggtaatacggagggggctagcgttgttcggaattactgggcgtaaagcgcgcgtaggcggatctgcaagtcaggggtgaaatcccgaggctcaacctcggaactgcctttgatactgcggatctcgagtccgagagaggtgagtggaattcctagtgtagaggtgaaattcgtagatattaggaagaacaccagtggcgaaggcggctcactggctcggtactgacgctgaggcgcgaaagcgtggggagcaaacaggattagataccctggtagtccacgccgtaaactatgggtgctagccgtcggagagcatgctcttcggtggcgcagcaaacgcattaagcaccccgcctggggagtacggtcgcaagattaaaactcaaaggaattgacgggggcccgcacaagcggtggagcatgtggtttaattcgaggcaacgcgaagaaccttaccagctcttgacatcctggtcggggctccagagacggagcctatcaattggccagtgacaggtgctgcatggctgtcgtcagctcgtgtcgtgagatgttgggttaagtcccgcaacgagcgcaacccctgccattagttgccagcattaagttgggcactctagtgggactgccggtgataagccggaggaaggtggggatgacgtcaagtcatcatggcccttacgggctgggctacacacgtgctacaatggcagtgacaatgggcagccactccgcgagggggagctaatcccaaaaaactgtctcagttcggattgttctctgcaactcgagagcatgaagtcggaatcgctagtaatcgcggatcagcatgccgcggtgaatacgttcccgggccttgtacacaccgcccgtcacaccatgggagttggttttacccgaagacggtgcgctaacctcgcaagaggaggcagccggccacggtagggtcagcgactggggtg

SEQ ID NO: 2064 - DNA, 1415 bp, unidentified
  source 1..1415: mol_type = unassigned DNA; note = Methyloceanibacter methanicus
aacgaacgctggcggcaggcctaacacatgcaagtcgaacgagaagctttccttcgggaaggtggacagtggcagacgggtgagtaacgcgtgggaacgtgcctttcggttcggaataactcagggaaacttgggctaataccggatacgcccttcgggggaaagatttatcgccgaaagatcggcccgcgtcagattagctagttggtggggtaatggctcaccaaggcgacgatctgtagctggtctgagaggatgatcagccacactgggactgagacacggcccagactcctacgggaggcagcagtggggaatattggacaatgggcgaaagcctgatccagccatgccgcgtgggtgaagaaggccctagggttgtaaacccctttcagcggggaagataatgacggtacccgcagaagaagccccggctaactccgtgccagcagccgcggtaatacggagggggctagcgttgttcggaattactgggcgtaaagcgcgcgtaggcggactttcaagtcaggggtgaaatcccgaggctcaacctcggaactgcctttgatactgtaagtcttgagtccgagagaggtgagtggaattcctagtgtagaggtgaaattcgtagatattaggaagaacaccagtggcgaaggcggctcactggctcggtactgacgctgaggtgcgaaagcgtggggagcaaacaggattagataccctggtagtccacgccgtaaactatggatgctagccgtcggggagcatgctcttcggtggcgcagcaaacgcattaagcatcccgcctggggagtacggtcgcaagattaaaactcaaaggaattgacgggggcccgcacaagcggtggagcatgtggtttaattcgaggcaacgcgaagaaccttaccagctcttgacttcctggtcggggctccagagacggagctcttcaattggccagtgacaggtgctgcatggctgtcgtcagctcgtgtcgtgagatgttgggttaagtcccgcaacgagcgcaacccctgccattagttgccagcattaagttgggcactctagtgggactgccggtgataagccggaggaaggtggggatgacgtcaagtcatcatggcccttacgggctgggctacacacgtgctacaatggcagtgacaatgggcagctactccgcgaggagatgctaatcccaaaaaactgtctcagttcggattgttctctgcaactcgagagcatgaagtcggaatcgctagtaatcgcggatcagcatgccgcggtgaatacgttcccgggccttgtacacaccgcccgtcacaccatgggagttggttttacccgaagacggtgcgctaacccgcaagggaggcagccggccacggtagggtcagcgactggggtg

SEQ ID NO: 2065 - DNA, 1415 bp, unidentified
  source 1..1415: mol_type = unassigned DNA; note = Methyloceanibacter stevinii
aacgaacgctggcggcaggcttaacacatgcaagtcgaacgagaagctttccttcgggaaggtggacagtggcagacgggtgagtaacgcgtgggaacgtgcctttcggttcggaataactcagggaaacttgggctaataccggatacgcccttcgggggaaagatttatcgccgaaagatcggcccgcgtcagattagctagttggtggggtaatggctcaccaaggcgacgatctgtagctggtctgagaggatgatcagccacactgggactgagacacggcccagactcctacgggaggcagcagtggggaatattggacaatgggcgaaagcctgatccagccatgccgcgtgggtgaagaaggccctagggttgtaaacccctttcagcggggaagataatgacggtacccgcagaagaagctccggctaactccgtgccagcagccgcggtaatacggagggagctagcgttgttcggaattactgggcgtaaagcgcgcgtaggcggactttcaagtcaggggtgaaatcccgaggctcaacctcggaactgcctttgatactgtaagtcttgagtccgagagaggtgagtggaattcctagtgtagaggtgaaattcgtagatattaggaagaacaccagtggcgaaggcggctcactggctcggtactgacgctgaggcgcgaaagcgtggggagcaaacaggattagataccctggtagtccacgccgtaaactatggatgctagccgtcggggagcatgctcttcggtggcgcagccaacgcattaagcatcccgcctggggagtacggtcgcaagattaaaactcaaaggaattgacgggggcccgcacaagcggtggagcatgtggtttaattcgaggcaacgcgaagaaccttaccagctcttgacttcctggtcggggctccagagacggagctcttcaattggccagtgacaggtgctgcatggctgtcgtcagctcgtgtcgtgagatgttgggttaagtcccgcaacgagcgcaacccctgccattagttgccagcattaagttgggcactctagtgggactgccggtgataagccggaggaaggtggggatgacgtcaagtcatcatggcccttacgggctgggctacacacgtgctacaatggcagtgacaatgggcagctactccgcgaggagatgctaatcccaaaaaactgtctcagttcggattgttctctgcaactcgagagcatgaagtcggaatcgctagtaatcgcggatcagcatgccgcggtgaatacgttcccgggccttgtacacaccgcccgtcacaccatgggagttggctttacccgaagacggtgcgctaaccagcaatggaggcagccggccacggtagggtcagcgactggggtg

SEQ ID NO: 2066 - DNA, 1414 bp, unidentified
  source 1..1414: mol_type = unassigned DNA; note = Methyloceanibacter superfactus
aacgaacgctggcggcaggcctaacacatgcaagtcgaacgtgaagccaccttcgggtggtggaaagtggcagacgggtgagtaacgcgtgggaacgtgcctttcggttcggaataacccagggaaacttgggctaataccggatacgcccttcgggggaaagattcatcgccgaaagatcggcccgcgtcggattagcttgttggtggggtaaaagcctaccaaggcgacgatccgtagctggtctgagaggatgaccagccacactgggactgagacacggcccagactcctacgggaggcagcagtggggaatattggacaatgggcgaaagcctgatccagccatgccgcgtgggtgaagaaggccctagggttgtaaacccctttcagcggggaagataatgacggtacccgcagaagaagccccggctaactccgtgccagcagccgcggtaatacggagggggctagcgttgttcggaattactgggcgtaaagcgcgcgtaggcggactttcaagtcaggggtgaaatcccgaggctcaacctcggaactgcctttgatactgtaagtcttgagtccgagagaggtgagtggaattcctagtgtagaggtgaaattcgtagatattaggaagaacaccagtggcgaaggcggctcactggctcggtactgacgctgaggcgcgaaagcgtggggagcaaacaggattagataccctggtagtccacgccgtaaactatgggtgctagccgtcggagagcatgctcttcggtggcgcagcaaacgcattaagcaccccgcctggggagtacggtcgcaagattaaaactcaaaggaattgacgggggcccgcacaagcggtggagcatgtggtttaattcgaggcaacgcgaagaaccttaccagctcttgacttcctggtcggggctccagagacggagctcttcaattggccagtgacaggtgctgcatggctgtcgtcagctcgtgtcgtgagatgttgggttaagtcccgcaacgagcgcaacccctgccattagttgccagcattaagttgggcactctagtgggactgccggtgataagccggaggaaggtggggatgacgtcaagtcatcatggcccttacgggctgggctacacacgtgctacaatggcagtgacaatgggcagccactccgcgaggaggagctaatcccaaaaaactgtctcagttcggattgttctctgcaactcgagagcatgaagtcggaatcgctagtaatcgcggatcagcatgccgcggtgaatacgttcccgggcctgtacacaccgcccgtcacaccatgggagttggctttacccgaagacggtgcgctaacctcgcaagaggaggcagccggccacggtagggtcagcgactggggtg

SEQ ID NO: 2067 - DNA, 1409 bp, Methylocella silvestris
  source 1..1409: mol_type = unassigned DNA
aacgaacgctggcggcaggcctaacacatgcaagtcgaacgctgtagcaatacagagtggcagacgggtgagtaacacgtgggaacatacccttcggttcggaacaactcagggaaacttgagctaataccggatacgccctttgggggaaagatttatcgccgaaggattggcccgcgtctgattagctagttggcggggtaatggcccaccaaggcgacgatcagtagctggtctgagaggatgatcagccacattgggactgagacacggcccaaactcctacgggaggcagcagtggggaatattggacaatgggcgcaagcctgatccagccatgccgcgtgagtgatgaaggccttagggttgtaaagctcttttacctgggaagataatgacggtaccaggagaataagccccggctaacttcgtgccagcagccgcggtaatacgaagggggctagcgttgttcggatttactgggcgtaaagcgcacgtaggcggatctttaagtcaggggtgaaatcccggggctcaacctcggaactgcctttgatactggggatctcgagtccgggagaggtgagcggaactgcgagtgtagaggtgaaattcgtagatattcgcaagaacaccagtggcgaaggcggctcactggcccggtactgacgctgaggtgcgaaagcgtggggagcaaacaggattagataccctggtagtccacgccgtaaacgatggatgctagccgttaggcagcttgctgcttagtggcgcagttaacgctttaagcatcccgcctggggagtacggtcgcaagattaaaactcaaaggaattgacgggggcccgcacaagcggtggagcatgtggtttaattcgaagcaacgcgcagaaccttaccagctcttgacatgtccggtttggtttccagagatggattccttcagttaggctggccggaacacaggtgctgcatggctgtcgtcagctcgtgtcgtgagatgttgggttaagtcccgcaacgagcgcaaccctcgcccttagttgccatcatttagttgggcactctagggggactgccggtgataagccgagaggaaggtggggatgacgtcaagtcctcatggcccttacgggctgggctacacacgtgctacaatggcggtgacagtgggatgctaaggggcgacccctcgcaaatctcaaaaagccgtctcagttcggattgcgctctgcaactcgagcgcatgaaggtggaatcgctagtaatcgtagatcagaacgctacggtgaatacgttcccgggccttgtacacaccgcccgtcacaccatgggagttggttctacccgaaggcgttttcttaaccgcaaggagagaggcgaccacggtagggtcagcgactggggtg

SEQ ID NO: 2068 - DNA, 1457 bp, Methylococcus capsulatus
  source 1..1457: mol_type = unassigned DNA
attgaacgctggcggcatgcttaacacatgcaagtcgaacggtaacaggccttcgggcgctgacgagtggcggacgggtgagtaatgcgtaggaatctgccttgttgtgggggataactcggggaaacccgagctaataccgcatacgctccacggaggaaagcgggggatcttcggacctcgcgcaataagatgagcctacgtcggattagctggttggtggggtaaaggcctaccaaggcgacgatccgtagctggtctgagaggacgatcagccacactgggactgagacacggcccagactcctacgggaggcagcagtggggaatattggacaatgggcgcaagcctgatccagcaatgccgcgtgtgtgaagaaggcctgcgggttgtaaagcactttaagcaggaaagaagggtggggtgttaataccatctcacattgacgttacctgcagaataagcaccggctaactccgtgccagcagccgcggtaatacggagggtgcgagcgttaatcggaattactgggcgtaaagcgcgcgtaggcggtttgataagtctgatgtgaaagccctgggcttaacctgggaactgcattggatactgtcaggctcgagtgtggtagagggtagtggaatttccggtgtagcagtgaaatgcgtagagatcggaaggaacaccagtggcgaaggcggctacctggaccaacactgacgctgaggtgcgaaagcgtggggagcaaacaggattagataccctggtagtccacgctgtaaacgatgtcaactagccgttggaggggtttaaccttttagtggcgcagctaacgcgataagttgaccgcctggggagtacggccgcaaggttaaaactcaaatgaattgacgggggcccgcacaagcggtggagcatgtggtttaattcgatgcaacgcgaagaaccttacctggccttgacatgcttggaatcctgcagagatgcgggagtgccttcgggagccaagacacaggtgctgcatggctgtcgtcagctcgtgtcgtgagatgttgggttaagtcccgtaacgagcgcaacccttgtccttagttgccagcggttcggccgggaactctaaggagactgccggtgataaaccggaggaaggtggggatgacgtcaagtcatcatggcccttatggccagggctacacacgtgctacaatggccggtacagagggtagccaagccgcgaggtggagccaatcccagaaagccggtcttagtccggattgcagtctgcaactcgactgcatgaagtcggaatcgctagtaatcgcggatcagcatgccgcggtgaatacgttcccgggccttgtacacaccgcccgtcacaccatgggagtgggttgcaccagaagtaggtagtctaaccgcgaggagggcgcttaccacggtgtgattcatgactggggtg

SEQ ID NO: 2069 - DNA, 1409 bp, unidentified
  source 1..1409: mol_type = unassigned DNA; note = Methylocystis bryophila
aacgaacgctggcggcaggcttaacacatgcaagtcgaacgctgtagcaatacagagtggcagacgggtgagtaacgcgtgggaacgtgcccttcggttcggaataactcagggaaacttgagctaataccggatacgtgcgagagcagaaagatttatcgccgaaggatcggcccgcgtccgattagctagttggtggggtaatggcccaccaaggcgacgatcggtagctggtctgagaggatgatcagccacactgggactgagacacggcccagactcctacgggaggcagcagtggggaatattggacaatgggcgcaagcctgatccagccatgccgcgtgagtgatgaaggccctagggttgtaaagctctttcgccagggacgataatgacggtacctggataagaagccccggctaacttcgtgccagcagccgcggtaatacgaagggggctagcgttgttcggatttactgggcgtaaagcgcacgtaggcggatctttaagtcaggggtgaaatcccggggctcaacctcggaactgcctttgatactggaggtctcgagtccgggagaggtgagtggaactgcgagtgtagaggtgaaattcgtagatattcgcaagaacaccagtggcgaaggcggctcactggcccggaactgacgctgaggtgcgaaagcgtggggagcaaacaggattagataccctggtagtccacgccgtaaacgatggatgctagccgttggggagcttgctcttcagtggcgcagctaacgctttaagcatcccgcctggggagtacggtcgcaagattaaaactcaaaggaattgacgggggcccgcacaagcggtggagcatgtggtttaattcgaagcaacgcgcagaaccttaccagcttttgacatgcccggtatggtcgacagagatgtcttccttcccgcaaggggccggagcacaggtgctgcatggctgtcgtcagctcgtgtcgtgagatgttgggttaagtcccgcaacgagcgcaaccctcgcccttagttgccatcattcagttgggcactctagggggactgccggtgataagccgcgaggaaggtggggatgacgtcaagtcctcatggcccttacaggctgggctacacacgtgctacaatggcggtgacagagggatgcgaaggggcgacctggagcaaatcctttaaaagccgtctcagttcggattgcactctgcaactcgggtgcatgaaggtggaatcgctagtaatcgcagatcagcacgctgcggtgaatacgttcccgggccttgtacacaccgcccgtcacaccatgggagttggttttacccgaaggcgtttcgctaaccgcaaggaggcagacgaccacggtagggtcagcgactggggtg

SEQ ID NO: 2070 - DNA, 1406 bp, Methylocystis heyeri
  source 1..1406: mol_type = unassigned DNA
aacgaacgctggcggcaggcttaacacatgcaagtcgaacgccccgcaaggggagtggcagacgggtgagtaacacgtgggaacgtaccctttggttcggaataactcagggaaacttgagctaataccggataagtgcgagagcagaaagatttatcgccgaaggatcggcccgcgtccgattagctagttggtgaggtaatggctcaccaaggcgacgatcggtagctggtctgagaggatgatcagccacattgggactgagacacggcccaaactcctacgggaggcagcagtggggaatattggacaatgggcgcaagcctgatccagccatgccgcgtgagtgatgaaggccttagggttgtaaagctctttcgccagggacgataatgacggtacctggataagaagccccggctaacttcgtgccagcagccgcggtaatacgaagggggctagcgttgttcggatttactgggcgtaaagcgcacgtaggcggatctttaagtcaggggtgaaatgccggggctcaacctcggaactgcctttgatactggaggtctcgagttcgggagaggtgagtggaactgcgagtgtagaggtgaaattcgtagatattcgcaagaacaccagtggcgaaggcggctcactggcccgatactgacgctgaggtgcgaaagcgtggggagcaaacaggattagataccctggtagtccacgccgtaaacgatggatgctagccgttgggcagcttgctgttcagtggcgcagctaacgctttaagcatcccgcctggggagtacggtcgcaagattaaaactcaaaggaattgacgggggcccgcacaagcggtggagcatgtggtttaattcgaagcaacgcgcagaaccttaccagcttttgacatgcccggtatgatcgccagagatggctttcttcccgcaaggggccggagcacaggtgctgcatggctgtcgtcagctcgtgtcgtgagatgttgggttaagtcccgcaacgagcgcaaccctcgcccttagttgccatcattaagttgggcactctagggggactgccggtgataagccgcgaggaaggtggggatgacgtcaagtcctcatggcccttacaggctgggctacacacgtgctacaatggcggtgacaaagggaagcgaaagggcgacctggagcaaatctcaaaaagccgtctcagttcggattgcactctgcaactcgagtgcatgaaggtggaatcgctagtaatcgcagatcagcacgctgcggtgaatacgttcccgggccttgtacacaccgcccgtcacaccatgggagttggctttacccgaaggcgtttcgctaaccgcaaggaggcaggcgaccacggtagggtcagcgactggggtg

SEQ ID NO: 2071 - DNA, 1408 bp, Methylocystis hirsuta
  source 1..1408: mol_type = unassigned DNA
aacgaacgctggcggcaggcctaacacatgcaagtcgaacgccctagcaatagggagtggcagacgggtgagtaacgcgtgggaacgtacccttcggtctggaataacccagggaaacttggactaataccggatacgtgcgagagcagaaagatttatcgccgaaggatcggcccgcgtccgattagctagttggtgaggtaaaagctcaccaaggcgacgatcggtagctggtctgagaggatgatcagccacactgggactgagacacggcccagactcctacgggaggcagcagtggggaatattggacaatgggcgaaagcctgatccagccatgccgcgtgagtgatgaaggccctagggttgtaaagctctttcgccagggacgataatgacggtacctggataagaagccccggctaagttcgtgccagcagccgcggtaatacgaagggggctagcgttgttcggaatcactgggcgtaaagcgcacgtaggcggatctttaagtcaggggtgaaatcccgaggctcaacctcggaactgcctttgatactggaggtctcgagtccgggagaggtgagtggaactgcgagtgtagaggtgaaattcgtagatattcgcaagaacaccagtggcgaaggcggctcactggcccggtactgacgctgaggtgcgaaagcgtggggagcaaacaggattagataccctggtagtccacgctgtaaactatggatgctagccgttgggcagcttgctgttcagtggcgcagctaacgctttaagcatcccgcctggggagtacggtcgcaagattaaaactcaaaggaattgacgggggcccgcacaagcggtggagcatgtggtttaattcgaagcaacgcgcagaaccttaccagcttttgacatgcccggtatgatcgccagagatggctttcttcccgcaaggggccggtgcacaggtgctgcatggctgtcgtcagctcgtgtcgtgagatgttgggttaagtcccgcaacgagcgcaaccctcgcccttagttgccatcattaagttgggcactctagggggactgccggtgataagccgcgaggaaggtggggatgacgtcaagtcctcatggcccttacaggctgggctacacacgtgctacaatggcggtgacaatgggatgcggaagggcgacctcgagcaaatctcaaaaagccgtctcagttcggattgcactctgcaactcgagtgcatgaaggtggaatcgctagtaatcgcagatcagcacgctgcggtgaatacgttcccgggccttgtacacaccgcccgtcacaccatgggagttggttttacccgaaggcgtttcgccaaccgcaaggaggcaggcgaccacggtagggtcagcgactggggtg

SEQ ID NO: 2072 - DNA, 1408 bp, Methylocystis rosea
  source 1..1408: mol_type = unassigned DNA
aacgaacgctggcggcaggcctaacacatgcaagtcgaacgccctagcaatagggagtggcagacgggtgagtaacgcgtgggaacgtacccttcggtctggaataacccagggaaacttgggctaataccggatacgtgcgagagcagaaagatttatcgccgaaggatcggcccgcgtccgattagctagttggtgaggtaaaagctcaccaaggcgacgatcggtagctggtctgagaggatgatcagccacactgggactgagacacggcccagactcctacgggaggcagcagtggggaatattggacaatgggcgaaagcctgatccagccatgccgcgtgagtgatgaaggccctagggttgtaaagctctttcgccagggacgataatgacggtacctggataagaagccccggctaacttcgtgccagcagccgcggtaatacgaagggggctagcgttgttcggatttactgggcgtaaagcgcacgtaggcggatttttaagtcaggggtgaaatcccaaggctcaaccttggaactgcctttgatactggaagtctcgagtccgggagaggtgagtggaactgcgagtgtagaggtgaaattcgtagatattcgcaagaacaccagtggcgaaggcggctcactggcccggtactgacgctgaggtgcgaaagcgtggggagcaaacaggattagataccctggtagtccacgccgtaaactatggatgctagccgttgggcagcttgctgttcagtggcgcagctaacgctttaagcatcccgcctggggagtacggtcgcaagattaaaactcaaaggaattgacgggggcccgcacaagcggtggagcatgtggtttaattcgaagcaacgcgcagaaccttaccagcttttgacatgcccggtatgatcgccagagatggctttcttcccgcaaggggccggtgcacaggtgctgcatggctgtcgtcagctcgtgtcgtgagatgttgggttaagtcccgcaacgagcgcaaccctcgcccttagttgccatcattaagttgggcactctagggggactgccggtgataagccgcgaggaaggtggggatgacgtcaagtcctcatggcccttacaggctgggctacacacgtgctacaatggcggtgacaatgggatgcggaagggcgacctcgagcaaatctcaaaaagccgtctcagttcggattgcactctgcaactcgagtgcatgaaggtggaatcgctagtaatcgcagatcagcacgctgcggtgaatacgttcccgggccttgtacacaccgcccgtcacaccatgggagttggttttacccgaaggcgtttcgccaaccgcaaggaggcaggcgaccacggtagggtcagcgactggggtg

SEQ ID NO: 2073 - DNA, 1409 bp, Methyloferula stellata
  source 1..1409: mol_type = unassigned DNA
aacgaacgctggcggcaggcctaacacatgcaagtcgaacgctgtagcaatacagagtggcagacgggtgagtaacacgtgggaacatgcccttcggttcggaataactcagggaaacttgagctaataccggatacgtccgcgaggagaaagatttatcgccgaaggattggcccgcgtctgattagcttgttggtgaggtaatggctcaccaaggcgacgatcagtagctggtctgagaggatgatcagccacattgggactgagacacggcccaaactcctacgggaggcagcagtggggaatattggacaatgggcgaaagcctgatccagccatgccgcgtgagtgatgaaggccttagggttgtaaagctcttttgcccgggaagataatgacggtaccgggagaataagccccggctaacttcgtgccagcagccgcggtaatacgaagggggctagcgttgttcggatttactgggcgtaaagcgcacgtaggcggattcttaagtcagaggtgaaatcccagggctcaaccctggaactgcctttgatactggggatcttgagtccgggagaggtgagtggaactgcgagtgtagaggtgaaattcgtagatattcgcaagaacaccagtggcgaaggcggctcactggcccggtactgacgctgaggtgcgaaagcgtggggagcaaacaggattagataccctggtagtccacgccgtaaacgatggatgctagccgttaggcagcttgctgcttagtggcgcagttaacgctttaagcatcccgcctggggagtacggtcgcaagattaaaactcaaaggaattgacgggggcccgcacaagcggtggagcatgtggtttaattcgaagcaacgcgcagaaccttaccagctcttgacatgtcccgtgtggtttccagagatggattccttcagttcggctggcgggaacacaggtgctgcatggctgtcgtcagctcgtgtcgtgagatgttgggttaagtcccgcaacgagcgcaaccctcgcccttagttgccatcatttagttgggcactctagggggactgccggtgataagccgagaggaaggtggggatgacgtcaagtcctcatggcccttacgggctgggctacacacgtgctacaatggcggtgacagtgggatgcaaaagggcgacctctagcaaatctcaaaaagccgtctcagttcggattgcactctgcaactcgagtgcatgaaggtggaatcgctagtaatcgtagatcagaacgctacggtgaatacgttcccgggccttgtacacaccgcccgtcacaccatgggagttggttctacccgaaggcgttttgctaaccgcaagggggcagacgaccacggtagggtcagcgactggggtg

SEQ ID NO: 2074 - DNA, 1452 bp, unidentified
  source 1..1452: mol_type = unassigned DNA; note = Methyloglobulus morosus
attgaacgctggcggtatgcttaacacatgcaagtcgaacggcagtcgcttcggcggcgagagtggcggacgggtgagtaacgcgtaggaacctggcccgtagtgggggacaacttagggaaacttaagctaataccgcatacgccccaagggggaaagcgggggaccgcaaggcctcgcgctatgggatgggcctgcgtcggattagcttgttggtggggtaacggcccaccaaggcgacgatccgtagctggtctgagaggacgaccagccacactgggactgagacacggcccagactcctacgggaggcagcagtggggaatattggacaatgggcgcaagcctgatccagcaataccgcgtgtgtgaagaaggcctgagggttgtaaagcactttcagcggggaggaaaaaggcggggcgaacacccccgcccttgacattacccgcacaagaagcaccggctaactccgtgccagcagccgcggtaatacggagggtgcgagcgttaatcggaattactgggcgtaaagcgtgcgcaggcggcgcaccaagccaggcgtgaaagccccgggctcaacctgggaactgcgcctgggactggtgcgctggagtcgggtagaggcaggcggaattccgggtgtagcggtgaaatgcgtagatatccggaggaacaccagtggcgaaggcggcctgctgggcccagactgacgctgaggcacgaaagcgtgggtagcaaacaggattagataccctggtagtccacgccgtaaacgatgtcgactagccgttggccccttatgggggttagtggcgcagccaacgcattaagtcgaccgcctggggagtacggccgcaaggttaaaactcaaatgaattgacgggggcccgcacaagcggtggagcatgtggtttaattcgatgcaacgcgaagaaccttacctgcccttgacatcctaagaatttggcggagacgccttagtgccttcgggaacttagagacaggtgctgcatggctgtcgtcagctcgtgtcgtgagatgttgggttaagtcccgtaacgagcgcaaccctcgcccccagttgccagcgcgtcatggcggggactctggggggactgccggtgataaaccggaggaaggcggggacgacgtcaagtcatcatggcccttatgggcagggctacacacgtgctacaatggccggtacagagggctgcgaactggcaacagtgagccaatcccagaaagccggtcccagtccggatcggggtctgcaactcgaccccgtgaagtcggaatcgctagtaatcgcggatcagaatgccgcggtgaatacgttcccgggccttgtacacaccgcccgtcacaccatgggagtgggttgctccagaagcaggtggcctaaccgcaaggggggcgcttgccacggagtggtccatgactggggtg

SEQ ID NO: 2075 - DNA, 1402 bp, unidentified
  source 1..1402: mol_type = unassigned DNA; note = Methyloligella halotolerans
aacgaacgctggcggcaggcttaacacatgcaagtcgaacgcaccttcgggtgagtggcagacgggtgagtaacgcgtgggaacgtgcctttcggtctggaataacccagggaaacttgggctaataccggatacgccctccgggggaaagatttatcgccgaaagatcggcccgcgtcggattagcttgttggtggggtaatggcctaccaaggctacgatccgtagctggtctgagaggatgatcagccacactgggactgagacacggcccagactcctacgggaggcagcagtggggaatattggacaatgggcgcaagcctgatccagccatgccgcgtgagtgacgaaggccttagggttgtaaagctctttcagcggggaagataatgacggtacccgcagaagaagccccggctaactccgtgccagcagccgcggtaatacggagggggctagcgttgttcggaattactgggcgtaaagcgcgcgtaggcggactttcaagtcaggggtgaaatcccggggcttaacctcggaactgcctttgatactgttggtcttgagtccgggagaggtgagcggaattcctagtgtagaggtgaaattcgtagatattaggaagaacaccagtggcgaaggcggctcactggcccggtactgacgctgaggcgcgaaagcgtggggagcaaacaggattagataccctggtagtccacgccgtaaacgatggatgctagccgtcggtcagcatgctgatcggtggcgcagctaacgcattaagcatcccgcctggggagtacggtcgcaagattaaaactcaaaggaattgacgggggcccgcacaagcggtggagcatgtggtttaattcgaggcaacgcgaagaaccttaccagcccttgacatcccggtttggggaccagagatggaccccatttaacgccggtgacaggtgctgcatggctgtcgtcagctcgtgtcgtgagatgttgggttaagtcccgcaacgagcgcaacccctaccattagttgccagcattaagttgggcactctagtgggactgccggtgataagccggaggaaggtggggatgaggtcaagtcatcatggcccttacgggctgggctacacacgtgctacaatggcggtgacagagggcagccactccgcgaggaggagctaatccctaaaaaccgtctcagttcggattgttctctgcaactcgagagcatgaagtcggaatcgctagtaatcgcggatcagcatgccgcggtgaatacgttcccgggccttgtacacaccgcccgtcacaccatgggagttggctttacccgaagacggtgcgctaacctcgcaagaggaggcagccggccacggtagggtcagcgactggggtg

SEQ ID NO: 2076 - DNA, 1452 bp, unidentified
  source 1..1452: mol_type = unassigned DNA; note = Methylomagnum ishizawai
attgaacgctggcggcatgcttaacacatgcaagtcgaacggtagggacttcggtcccgagagtggcggacgggtgagtaacacgtaggaatctgcctgatagtgggggataacccggggaaactcgggctaataccgcatacgctccacggaggaaagcgggggatcttcggacctcgcgctatcagatgagcctgcgtccgattagctagttggcggggtaagggcccaccaaggcgacgatcggtagctggtctgagaggacgatcagccacactggaactgagacacggtccagactcctacgggaggcagcagtggggaatattggacaatgggcgcaagcctgatccagcaatgccgcgtgtgtgaagaaggcctgcgggttgtaaagcactttaagcaggaaagaaggctccaaggccaatacccttggagattgacgttacctgcagaataagcaccggctaactccgtgccagcagccgcggtaatacggagggtgcgagcgttaatcggaattactgggcgtaaagcgcgcgtaggcggtccgttaagtcagccgtgaaagccccgggcttaacctgggaactgcggatgatactggcggactagagtgtggcagagggtggcggaatttccggtgtagcagtgaaatgcgtagagatcggaaggaacaccagtggcgaaggcggccatctgggccaacactgacgctgaggtgcgaaagcgtggggagcaaacaggattagataccctggtagtccacgccgtaaacgatgagaactagccgttgggcacgatttggtgcttagtggcgcagctaacgcgataagttctccgcctggggagtacggccgcaaggttaaaactcaaatgaattgacgggggcccgcacaagcggtggagcatgtggtttaattcgatgcaacgcgaagaaccttacctggccttgacatccagagaactttccagagatggattggtgccttcgggaactctgagacaggtgctgcatggctgtcgtcagctcgtgtcgtgagatgttgggttaagtcccgtaacgagcgcaacccttgtccctagttgccagcgtaaagtcgggaactctagggagaccgccggtgataaaccggaggaaggtggggatgacgtcaagtcatcatggcccttatggccagggctacacacgtgctacaatggccggtacagagggtcgcgaagccgcgaggtggagccaatcccacaaagccggtcgtagtccggattggagtctgcaactcgactccatgaagtcggaatcgctagtaatcgcggatcagaatgccgcggtgaatacgttcccgggccttgtacacaccgcccgtcacaccatgggagtgggttgcaccagaagcaggtagtctaaccgcaaggagggcgcttgccacggtgtgattcatgactggggtg

SEQ ID NO: 2077 - DNA, 1457 bp, Methylomicrobium album
  source 1..1457: mol_type = unassigned DNA
attgaacgctggcggtatgcttaacacatgcaagtcgaacggtaacaggccttcgggcgctgacgagtggcggacgggtgcgtaacgcgtaggaatctgcctgttagtgggggacaacgtggggaaactcacgctaataccgcatacgccctgagggggaaagcgggggaccttcgggcctcgcgctaacagatgagcctgcgtgggattagctagttggtagggtaaaggcctaccaaggcgacgatccctagctggtctgagaggacgatcagccacactgggactgagacacggcccagactcctacgggaggcagcagtggggaatattggacaatgggcgcaagcctgatccagcaataccgcgtgtgtgaagaaggcctgagggttgtaaagcacttttaatcgggaggaacatctgatggcgaatacccatcagtctgacattaccgatagaaaaagcaccggctaactccgtgccagcagccgcggtaatacggagggtgcaagcgttaatcggaattactgggcgtaaagcgtgcgtaggcggctgcttaagtcagatgtgaaagccccgggcttaacctgggaacggcatttgatactgggcagctcgagttgagtagaggagaggggaatttccggtgtagcggtgaaatgcgtagagatcggaaggaacaccagtggcgaaggcgcctctctggactcaaactgacgctgaggtacgaaagcgtgggtagcaaacaggattagataccctggtagtccacgccgtaaacgatgtcaactagccgttggtcttattcgtaagattcgtggcgcagctaacgcgataagttgaccgcctggggagtacggccgcaaggttaaaactcaaatgaattgacgggggcccgcacaagcggtggagcatgtggtttaattcgatgcaacgcgaagaaccttacctacccttgacatccagagaatctgtgagagatcgtagagtgccttcgggaactctgagacaggtgctgcatggctgtcgtcagctcgtgtcgtgagatgttgggttaagtcccgtaacgagcgcaacccttatccttagttgccaacgggtgatgccgggaactctagggagactgccggtgataaaccggaggaaggtggggacgacgtcaagtcatcatggcccttatgggtagggctacacacgtgctacaatggccggtacagagggcagcgaactcgcgagagccagccaatcccacaaagccggtcctagtccggattggagtctgcaactcgactccatgaagtcggaatcgctagtaatcgcgaatcagaatgtcgcggtgaatacgttcccgggccttgtacacaccgcccgtcacaccatgggagtgggttgcaaaagaagtaggtagtctaaccttcgggagggcgcttaccactttgtgattcatgactggggtg

SEQ ID NO: 2078 - DNA, 1457 bp, Methylomicrobium alcaliphilum
  source 1..1457: mol_type = unassigned DNA
attgaacgctggcggtatgcttaacacatgcaagtcgaacggtaacggtccttcgggagccgacgagtggcggacgggtgagtaacgcgtaggaatctgcctggtagtgggggacaactcggagaaatccgagctaataccgcatacgccctgagggggaaagcgggggatcttcggacctcgcgctatcagatgagcctgcgttggattagctagttggtggggtaaaggcctaccaaggcgacgatccatagctggtctgagaggacgatcagccacactgggactgagacacggcccagactcctacgggaggcagcagtggggaatattggacaatgggcgcaagcctgatccagcaataccgcgtgtgtgaagaaggcctgagggttgtaaagcactttcaatagggaggaaaaagcgttggttaatagccgatgccttgacattacctatagaagaagcaccggctaactccgtgccagcagccgcggtaatacggagggtgcgagcgttaatcggaattactgggcgtaaagcgtgcgtaggcggttatttaagtcagatgtgaaagccccgggcttaacctgggaacggcatttgatactgggtaacttgagtttaggagaggagagtggaatttccggtgtagcggtgaaatgcgtagagatcggaaggaacaccagtggcgaaggcggctctctggcctaaaactgacgctgaggtacgaaagcgtgggtagcaaacaggattagataccctggtagtccacgccgtaaacgatgtcaactagccgttgggtctttattaagacttagtggtgcagctaacgcattaagttgaccgcctggggagtacggccgcaaggttaaaactcaaatgaattgacgggggcccgcacaagcggtggagcatgtggtttaattcgatgcaacgcgaagaaccttacctacccttgacatccagagaatctgtgagagatcgtagagtgccttcgggaactctgagacaggtgctgcatggctgtcgtcagctcgtgtcgtgagatgttgggttaagtcccgtaacgagcgcaacccttatccttagttgccaacaggtcaagctgggaactctagggagactgccggtgataaaccggaggaaggtggggacgacgtcaagtcatcatggcccttatgggtagggctacacacgtgctacaatggccggtacagagggcagcgaacttgcgaaagtcagcaaatcccagaaagccggtcctagtccggattgcagtctgcaactcgactgcatgaagtcggaatcgctagtaatcgcgaatcagaatgtcgcggtgaatacgttcccgggccttgtacacaccgcccgtcacaccatgggagtgggttgcaaaagaagtaggtagtttaaccttcgggagggcgcttaccactttgtgattcatgactggggtg

SEQ ID NO: 2079 - DNA, 1456 bp, Methylomicrobium buryatense
  source 1..1456: mol_type = unassigned DNA
attgaacgctggcggtatgcttaacacatgcaagtcgaacggtaacggtccttcgggagcccgacgagtggcggcgggttgagtaacgcgtaggaatctgcctggtagtgggggacaacgtggggaaactcacgctaataccgcatacgccctgagggggaaagcgggggatcttcggacctcgcctatcagatgagcctgcgttggattagctagttggtagggtaaaggcctaccaaggcgacgatccatagctggtctgagaggacgatcagccacactgggactgagacacggcccagactcctacgggaggcagcagtggggaatattggacaatgggcgcaagcctgatccagcaataccgcgtgtgtgaagaaggcctgagggttgtaaagcactttcaatagggaggaaaaagcgttggcgaatacccgatgccttgacattacctatagaagaagcaccggctaactccgtgccagcagccgcggtaatacggagggtgcgagcgttaatcggaattactgggcgtaaagcgtgcgtaggcggctgtttaagtcagatgtgaaagccccgggcttaacctgggaacggcatttgatactgggcagctagagtttaggagaggagagtggaatttccggtgtagcggtgaaatgcgtagagatcggaaggaacaccagtggcgaaggcggctctctggcctaaaactgacgctgaggtacgaaagcgtgggttgcaaacaggattagataccctggtagtccacgccgtaaacgatgtcaactagccgttgggtctttattgagacttagtggtgcagctaacgcattaagttgaccgcctggggagtacggcgcaagtttaaaactcaaatgaattgacgggggcccgcacaagcggtggagcatgtggtttaattcgatgcaacgcgaagaaccttacctacccttgacatccagagaatctgttagagatagtggagtgccttcgggaactctgagacaggtgctgcatggctgtcgtcagctcgtgtcgtgagatgttgggttaagtcccgtaacgagcgcaacccttatccttagttgccaacaggtcaagctgggaactctagggagactgccggtgataaaccggaggaaggtggggacgacgtcaagtcatcatggcccttatgggtagggctacacacgtgctacaatggcaggtacagagggcagcgaacttgcgagagtaagcaaatcccagaaagccggtcctagtccggattgcagtctgcaactcgactgcatgaagtcggaatcgctagtaatcgcgaatcagaatgtcgcggtgaatacgttcccgggccttgtacacaccgcccgtcacaccatgggagtgggttgcaaaagaagtaggtagtttaaccttcgggagggcgcttaccactttgtgattcatgactggggtg

SEQ ID NO: 2080 - DNA, 1456 bp, Methylomicrobium kenyense
  source 1..1456: mol_type = unassigned DNA
attgaacgctggcggtatgcttaacacatgcaagtcgaacggtaacggtccttcgggagccgacgagtggcggacgggtgagtaacgcgtaggaatctgcctggtagtgggggacaactcggagaaattcgagctaataccgcatacgccctatgggggaaagcgggggatcttcggacctcgcgctatcggatgagcctgcgttggattagctagttggtggggtaaaggcctaccaaggcgacgatccatagctggtctgagaggacgatcagccacactgggactgagacacggcccagacwcctacgggaggcagcagtggggaatattggacaatgggcgcaagcctgatccagcaataccgcgtgtgtgaagaaggcctgagggttgtaaagcactttcaatagggaggaaaaagcgttggttaatacccgatgccttgacattacctatagaagaagcaccggctaactccgtgccagcagccgcggtaatacggagggtgcgagcgttaatcggaattactgggcgtaaagcgtgcgtaggcggctgtttaagtcagatgtgaaagccccgggcttaacctgggaactgcatttgatactggacagctcgagtttaggagaggagagtggaatttccggtgtagcggtgaaatgcgtagagatcggaaggaacaccagtggcgaaggcggctctctggcctaaaactgacgctgaggtacgaaagcgtgggtagcaaacaggattagataccctggtagtccacgccgtaaacgatgtcaactagccgttgggtttattaatgaacttagtggtgyagctaacgcattaagttgaccgcctggggagtacggccgcaaggttaaaactcaaatgaattgacgggggcccgcacaagcggtggagcatgtggtttaattcgatgcaacgcgaagaaccttacctacccttgacatccagagaatctgtcagagatgattgagtgccttcgggaactctgagacaggtgctgcatggctgtcgtcagctcgtgtcgtgagatgttgggttaagtcccgtaacgagcgcaacccttatccttagttgccaacagttcggctgggaactctagggagactgccggtgataaaccggaggaaggtggggacgacgtcaagtcatcatggcccttatgggtagggctacacacgtgctacaatggccggtacagagggcagcgaacttgcgaaagtcagcaaatcccagaaagccggtcctagtccggattgcagtctgcaactcgactgcatgaagtcggaatcgctagtaatcgcgaatcagaatgtcgcggtgaatacgttcccgggccttgtacacaccgcccgtcacaccatgggagtgggttgcaaaagaagtaggtagtttaaccttcgggagggcgcttaccactttgtgattcatgactggggtg

SEQ ID NO: 2081 - DNA, 1483 bp, unidentified
  source 1..1483: mol_type = unassigned DNA; note = Methylomirabilis oxyfera
aacgaacgctggcggcgtgcctaacacatgcaagtcgagcgagaaagtcccggcaacgggatgagtaaagcggcaaacgggtgagtaacgcgtaggtaatctatccttcggatcgggataacctgctgaaaagtgggataataccggataacgttcttgtgggtatcctatgagaaccaaagggggcgagcgtaagcagctcccaccaaaggaggagcctgcgtccgattagctagttggtggggtaaaggcctaccaaggcgacgatcggtagccggcctgagagggcgaccggccacactggaactgagacacggtccagactcctacgggaggcagcagtggggaatattgcgcaatgggcgaaagcctgacgcagcgacgccgcgtgggtgatgaaggccttcgggttgtaaagccctgtctggtggaacgaatggcttagcggcaaataaccgctaggcgtgacggtaccaccgaaggaagccccggctaactacgtgccagcagccgcggtaagacgtagggggcgagcgttgttcggatttactgggcgtaaagcgcgcgtaggcggctagataagtcgggtgtgaaatccctcggcttaaccgaggacccgcatccgatactgcctggctcgagtctaggagaggaaagcggaattcccagtgtagcggtgaaatgcgtagatattgggaggaacaccggtggcgaaggcggctttccggactagcactgacgctgaggcgcgaaagctaggggagcgaacgggattagataccccggtagtcctagccgtaaacgatgggcactaggtgtgggaggtattgaccccttccgcgccgaagctaacgcattaagtgccccgcctggggagtacggccgcaaggctaaaactcaaaggaattgacgggggcccgcacaagcggtggagcatgtggtttaattcgacgcaacgcgaagaaccttaccagggcttgacatcccacgaacctgcctgaaagggcggggtgcccgcaagggagcgtggagacaggtggtgcatggctgtcgtcagctcgtgtcgtgagatgttgggttaagtcccgcaacgagcgcaaccctcacccctggttgccaccggataaagccgagcactcgaggggaactgccagcgtcaagctggaggaaggcggggatgacgtcaagtcatcatgccccttacgccctgggctacacacgtgctacaatggccggtacaaagggacgcgagaccgcgaggtggagctaatcccaaaaaaccggtctaagttcagattgcagtctgcaactcgactgcatgaaggaggaatcgctagtaatcgcgcatcagcacggcgcggtgaatacgttcccgggccttgtacacaccgcccgtcacaccacgaaagctgtctgtactcgaagtcgctgagctaacccgcaaggggggcaggcgccgaaggtatggtcagtgattggggtg

SEQ ID NO: 2082 - DNA, 1452 bp, unidentified
  source 1..1452: mol_type = unassigned DNA; note = Methylomonas denitrificans
attgaacgctggcggtatgcttaacacatgcaagtcgaacggtagcaggccttcgggcgctgacgagtggcggacgggtgagtaatgcataggaatctgcctattagtgggggacaacgtggggaaactcacgctaataccgcatacgctacgggggaaagctggggaccttcgggcctggcgctaatagatgagcctatgttggattagctagttggtagggtaacggcctaccaaggcgacgatccatagctggtctgagaggatgatcagcacactgggactgagacacggcccagactcctacgggaggcagcagtggggaatattggacaatgggcgaaagcctgatccagcaataccgcgtgtgtgaagaaggcctgagggttgtaaagcactttcaataggaaggaatacctgccggttaatacccggtagactgacattacctatacaagaagcaccggctaactccgtgccagcagccgcggtaatacggagggtgcaagcgttaatcggaattactgggcgtaaagcgtgcgtaggcggttgtttaagtcagatgtgaaagcctgggcttaacctgggaactgcatttgatactgggcaactagagtttagtagaggggagtggaatttcaggtgtagcggtgaaatgcgtagagatctgaaggaacaccagtggcgaaggcggctccctggactaaaactgacgctgaggtacgaaagcgtgggtagcaaacaggattagataccctggtagtccacgccgtaaacgatgtcaactaactgttgggttcttaaagaacttagtagtggagctaacgtattaagttgaccgcctggggagtacggccgcaaggctaaaactcaaatgaattgacgggggcccgcacaagcggtggagcatgtggtttaattcgatgcaacgcgaagaaccttacctacccttgacatccagagaatctgttagagatagcggagtgccttcgggagctctgagacaggtgctgcatggctgtcgtcagctcgtgttgtgaaatgttgggttaagtcccgtaacgagcgcaacccttatccttagttgccagcgggtcatgccgggaactctagggagactgccggtgataaaccggaggaaggtggggacgacgtcaagtcatcatggcccttatgggtagggctacacacgtgctacaatggccggtacagagggctgcgaactcgcgagagtaagctaatcccaaaaagccggtcccagtccggatcgcagtctgcaactcgactgcgtgaagtcggaatcgctagtaatcgcggatcagaatgccgcggtgaatacgttcccgggccttgtacacaccgcccgtcacaccatgggagtgggttgcaaaagaagtaggtagtttaaccttcgggagggcgcttaccactttgtgattcatgactggggtg

SEQ ID NO: 2083 - DNA, 1458 bp, unidentified
  source 1..1458: mol_type = unassigned DNA; note = Methylomonas koyamae
attgaacgctggcggtatgcttaacacatgcaagtcgaacgctgataaggtgcttgcacctttgatgagtggcggacgggtgagtaatgcataggaatctgcctattagtgggggacaacgtggggaaactcacgctaataccgcatacgatctacggatgaaagcaggggaccttcgggccttgcgctaatagatgagcctatgtcggattagctagttggtggggtaaaggcctaccaaggcgacgatccgtagctggtctgagaggatgatcagccacactgggactgagacacggcccagactcctacgggaggcagcagtggggaatattggacaatgggcgaaagcctgatccagcaataccgcgtgtgtgaagaaggcctgagggttgtaaagcactttcaatgggaaggaacacctatcggttaatacccggtagactgacattacccatacaagaagcaccggctaactccgtgccagcagccgcggtaatacggagggtgcaagcgttaatcggaattactgggcgtaaagcgtgcgtaggcggttgtttaagtcagatgtgaaagccccgggcttaacctgggaactgcatttgatactgggcaactagagttgagtagaggggagtggaatttcaggtgtagcggtgaaatgcgtagagatctgaaggaacaccagtggcgaaggcggctccctggactcaaactgacgctgaggtacgaaagcgtgggtagcaaacaggattagataccctggtagtccacgccgtaaacgatgtcaactaactgttgggttctttaagaacttagtagtggagctaacgtattaagttgaccgcctggggagtacggccgcaaggctaaaactcaaatgaattgacgggggcccgcacaagcggtggagcatgtggtttaattcgatgcaacgcgaagaaccttacctacccttgacatcctcggaacttgtcagagatgacttggtgccttcgggaaccgagagacaggtgctgcatggctgtcgtcagctcgtgttgtgaaatgttgggttaagtcccgtaacgagcgcaacccttatccttagttgccagcgagtaatgtcgggaactctagggagactgccggtgataaaccggaggaaggtggggacgacgtcaagtcatcatggcccttatgggtagggctacacacgtgctacaatggccggtacagagggcagcgaaaccgtgaggtcaagcaaatcccacaaagccggtcccagtccggattgcagtctgcaactcgactgcatgaagtcggaatcgctagtaatcgcggatcagaatgccgcggtgaatacgttcccgggccttgtacacaccgcccgtcacaccatgggagtgggttgcaaaagaagtaggtagtttaaccttcgggagggcgcttaccactttgtgattcatgactggggtg

SEQ ID NO: 2084 - DNA, 1456 bp, unidentified
  source 1..1456: mol_type = unassigned DNA; note = Methylomonas lenta
attgaacgctggcggtatgcttaacacatgcaagtcgaacggtagcaggccttcgggcgctgacgagtggcggacgggtgagtaatgcataggaatctgcctattagtgggggrcaacgtggggaaactcacgctaataccgcatacgccctacgggggaaagctggggaccttcgggcctggcgctaatagatgagcctatgttggattagctagttggtagggtaaaggcctaccaaggcgacgatccatagctggtctgagaggatgatcagccacactgggactgagacacggcccagactcctacgggaggcagcagtggggaatattggacaatgggcgaaagcctgatccagcaataccgcgtgtgtgaagaaggcctgagggttgtaaagcactttcaataggaaggaatacctatcggcgaatacccggtagactgacattacctatacaagaagcaccggctaactccgtgccagcagccgcggtaatacggagggtgcaagcgttaatcggaattactgggcgtaaagcgtgcgtaggcggttatttaagtcagatgtgaaagccccgggcttaacctgggaactgcatttgatactggatgactagagttgagtagaggagagtggaatttcaggtgtagcggtgaaatgcgtagagatctgaaggaacaccagtggcgaaggcggctctctggactcaaactgacgctgaggtacgaaagcgtgggtagcaaacaggattagataccctggtagtccacgccgtaaacgatgtcaactaaccgttgggcgctttaagtgcttagtggtggagctaacgtattaagttgaccgcctggggagtacggccgcaaggctaaaactcaaatgaattgacgggggcccgcacaagcggtggagcatgtggtttaattcgatgcaacgcgaagaaccttacctacccttgacatccagagaatctgttagagatagtagagtgccttcgggaactctgagacaggtgctgcatggctgtcgtcagctcgtgtcgtgagatgttgggttaagtcccgtaacgagcgcaacccttatccttagttgccagcgggtaatgccgggaactctagggagactgccggtgataaaccggaggaaggtggggacgacgtcaagtcatcatggcccttatgggtagggctacacacgtgctacaatggccggtacagagggcagcgaacttgcgaaagtaagcaaatcccagaaagccggtcctagtccggattggagtctgcaactcgactccatgaagtcggaatcgctagtaatcgcggatcagaatgccgcggtgaatacgttcccgggccttgtacacaccgcccgtcacaccatgggagtgggttgcaaaagaagtaggtagtctaaccttcgggagggcgcttaccactttgtgattcatgactggggtg

SEQ ID NO: 2085 - DNA, 1456 bp, Methylomonas methanica
  source 1..1456: mol_type = unassigned DNA
  misc_difference 859: note = n is a, c, g, or t
  misc_difference 880..881: note = n is a, c, g, or t
attgaacgctggcggtatgcttaacacatgcaagtcgaacggtaacaggccttcgggcgctgacgagtggcggacgggtgagtaacgcgtaggaatctgcctcatagtgggggacaacttggggaaactcaagctaataccgcatacgccctacgggggaaagcgggggaccttcgggcctcgcgctatgagatgagcctgcgttggattagctagttggtagggtaccggcctaccaaggcgacgatccatagctggtctgagaggatgatcagccacactgggactgagacacggcccagactcctacgggaggcagcagtggggaatattggacaatgggcgaaagcctgatccagcaataccgcgtgtgtgaagaaggcctgagggttgtaaagcactttcaataggaaggaatacctgccggttaatacccggtagactgacattacctatacaagaagcaccggctaactccgtgccagcagccgcggtaatacggagggtgcaagcgttaatcggaattactgggcgtaaagcgtgcgtaggcggttgtttaagtcagatgtgaaagccctgggcttaacctgggaactgcatttgatactgggcaactagagtttagtagaggggagtggaatttcaggtgtagcggtgaaatgcgtagagatctgaaggaacaccagtggcgaaggcggctccctggactaaaactgacgctgaggtacgaaagcgtgggtagcaaacaggattagataccctggtagtccacgccgtaaacgatgtcaactaactgttgggttcttaaagaacttagtagtggagctaacgtattaagttgaccgcctggggagtacgnccgcaaggttaaaactcaaannaattgacgggggcccgcacaagcggtggagcatgtggtttaattcgatgcaacgcgaagacccttacctacccttgacatccagagaatctgttagagatagcggagtgccttcgggagctctgagacaggtgctgcatggctgtcgtcagctcgtgttgtgaaatgttgggttaagtcccgtaacgagcgcaacccttatccttagttgccagcgggtcatgccgggaactctagggagactgccggtgataaaccggaggaaggtggggacgacgtcaagtcatcatggcccttatgggtagggctacacacgtgctacaatggccggtacagagggctgcgaactcgcgagagtaagctaatcccaaaaagccggtcccagtccggatcgcagtctgcaactcgactgcgtgaagtcggaatcgctagtaatcgcggatcagaatgccgcggtgaatacgttcccgggccttgtacacaccgcccgtcacaccatgggagtgggttgcaaaagaagtaggtagtttaaccttcgggagggcgcttaccactttgtgattcatgactggggtg

SEQ ID NO: 2086 - DNA, 1404 bp, unidentified
  source 1..1404: mol_type = unassigned DNA; note = Methylomusa anaerophila
cagtcgaacggggagttagcaataactcctagtggcgaacgggtgagtaacgcgtaggcaatctgccttctagatggggacaacaccgcgaaagtggtgctaataccgaatgagatataagagatgcatatttcttataagaaaggtggcctctgaagatgctaccgctagaagatgagcctgcgtctgattagctagttggtgaggtaacggctcaccaaggcgacgatcagtagccggtctgagaggatgaacggccacactgggactgagacacggcccagactcctacgggaggcagcagtggggaatcttccgcaatggacgaaagtctgacggagcaacgccgcgtgagtgaagaaggttttcggactgtaaaactctgtcttgagggacgaacgtattataggtaaagaatctatgataatgacggtacctgaggaggaagccacggctaactacgtgccagcagccgcggtaatacgtaggtggcaagcgttgtccggaattattgggcgtaaagggcgcgcaggcgggtctttaagtcgaaagtctaagtgcggggctcaaccccgtatgggcgttggaaactggagaccttgagtgcaggagaggaaagtggaattcccagtgtagcggtgaaatgcgtagagattgggaggaacaccagtggcgaaggcgactttctggactgtgtctgacgctgaggcgcgaaagccaggggagcgaacgggattagataccccggtagtcctggccgtaaacgatgggtactaggtgtagaaggtatcgaccccttctgtgccggagttaacgcaataagtaccccgcctggggagtacggccgcaaggttgaaactcaaaggaattgacgggggcccgcacaagcggtggagtatgtggtttaattcgacgcaacgcgaagaaccttaccagggcttgacatcgattggaacattcagagatggatgcctctcttcggagacaagaagacaggtggtgcatggctgtcgtcagctcgtgtcgtgagatgttgggttaagtcccgcaacgagcgcaacccttatcctttgttgccagcgcgtaaaggtgggaactcaaaggagactgccgcagagaatgcggaggaaggcggggatgacgtcaagtcatcatgccccttatgtcctgggctacacacgtactacaatgggcttcaacagagagaagcgaagccgcgaggtggagccaagctcacaaacaagctctcagttcggatcggaggctgcaactcgcctccgtgaagtcggaatcgctagtaatcgcaggtcagcatactgcggtgaatacgttcccgggccttgtacacaccgcccgtcacaccacgagagttggaaacacccgaagccggtgaggtaactgaaa

SEQ ID NO: 2087 - DNA, 1452 bp, Methylophaga aminisulfidivorans
  source 1..1452: mol_type = unassigned DNA
attgaacgctggcggcatgcctaacacatgcaagtcgaacgatgacgaaacagcttgctgtttctgattagtggcggacgggtgagtaatgtatagggatctgcctagtagtgggggacaacagccggaaacggctgctaataccgcatacgctctacggaggaaagcgggggctcgtaagacctcgtgctattagatgaacctatatcagattagctagttggtggggtaagggcctaccaaggcgacgatctgtagctggtctgagaggatgatcagccacactgggactgagacacggcccagactcctacgggaggcagcagtggggaatattggacaatgggcgcaagcctgatccagcaatgccgcgtgtgtgaagaaggccttcgggttgtaaagcactttcaatagggaggaaaggttatgcgttaataccgtatagctgtgacgttacctatagaagaagcaccggctaactccgtgccagcagccgcggtaatacggagggtgcaagcgttaatcggatttactgggcgtaaagcgcgcgtaggcggtatttaagtcagatgtgaaagccccgggctcaacctgggaattgcatttgatactggatggctagagtgtggtagagtgagtggatttcagtgtagcgtgaaatgcgtagagatctgaaggaacatcagtgcgaagcgactcactgggccattactgacgctgaggtgcgaaagcgtgggtagcaaacaggattagatacctggtagtccacgccctaaacgatgtcaactaggtgtatggagaatttattctttgtgtatcgaagctaacgcgataagttgaccgcctggggagtacggtcgcaagactaaaactcaaatgaattgacgggggcccgcacaagcggtggagcatgtggtttaattcgatgcaacgcgaagaaccttacctggccttgacatgtacggaagattgaagagattcgattgtgccttcgggaaccgtaacacaggtgctgcatggctgtcgtcagctcgtgtcgtgagatgttgggttaagtcccgcaacgagcgcaacccctgtccttagttgccatcattaagttgggcactctaaggagactgccggtgacaaaccggaggaaggtggggatgacgtcaagtcatcatggcccttatggccagggctacacacgtgctacaatgggcagtacaaagggttgctaactcgcgagggtatgctaatcccataaagctgttcgtagtccggatcgcagtctgcaactcgactgcgtgaagtcggaatcgctagtaatcgcggatcagaatgccgcggtgaatacgttcccgggccttgtacacaccgcccgtcacaccatgggagttggctgcaaaagaagtaggtagactaaccttcgggaggtcgcttaccactttgtggtcaatgactggggtg

SEQ ID NO: 2088 - DNA, 1458 bp, unidentified
  source 1..1458: mol_type = unassigned DNA; note = Methylophaga frappieri
attgaacgctggcggcatgcctaacacatgcaagtcgaacgatgaagtctagcttgctaggcggattagtggcggacgggtgagtaatgtatagggatctgcctgttagtgggggacaacagccggaaacggctgctaataccgcatacgctctacggaggaaagtgggggaccttcgggcctcacgctgacagatgaacctatatcagattagctagttggtggggtaaaggcctaccaaggcgacgatctgtagctggtttgagagaatgatcagccacactgggactgagacacggcccagactcctacgggaggcagcagtggggaatattggacaatgggggcaaccctgatccagcaatgccgcgtgtgtgaagaaggccttcgggttgtaaagcactttaagttgggaggaaaagctgggagttaatagctcctagtattgacgttaccaacagaataagcaccggctaactccgtgccagcagccgcggtaatacggagggtgcaagcgttaatcggaattactgggcgtaaagcgcgcgtaggcggtttgttaagtcagatgtgaaatccccgggctcaacctgggaatggcatttgagactggcaggctagagtgtggtagaggtgagtggaatttcaggtgtagcggtgaaatgcgtagagatctgaaggaacatcagtggcgaaggcgactcactgggccataactgacgctgaggtgcgaaagcgtgggtagcaaacaggattagataccctggtagtccacgccctaaacgatgtcaactaggtgtatggagaatttattctttgtgtatcgaagctaacgcgataagttgaccgcctggggagtacggtcgcaagactaaaactcaaatgaattgacgggggcccgcacaagcggtggagcatgtggtttaattcgatgcaacgcgaagaaccttacctggccttgacatgcacggaagacagaagagattttgttgtgccttcgggaaccgtgacacaggtgctgcatggctgtcgtcagctcgtgtcgtgagatgttgggttaagtcccgcaacgagcgcaacccctgtccttagttgccatcatttagttgggcactctaaggagactgccggtgacaaaccggaggaaggtggggatgacgtcaagtcatcatggcccttatggccagggctacacacgtgctacaatgggcagtacaaagggttgccaactcgcgagagtgcgctaatcccataaagctgctcgtagtccggattggagtctgcaactcgactccatgaagtcggaatcgctagtaatcgcggatcagaatgccgcggtgaatacgttcccgggccttgtacacaccgcccgtcacaccatgggagttggctgcaaaagaagtaggtagactaaccttcgggaggtcgcttaccactttgtggtcaatgactggggtg

SEQ ID NO: 2089 - DNA, 1458 bp, unidentified
  source 1..1458: mol_type = unassigned DNA; note = Methylophaga lonarensis
attgaacgctggcggcatgcctaacacatgcaagtcgaacgatgattatgagcttgctcatatgattagtggcggacgggtgagtaatgtatagggatctgcctggtagtgggggacaacagccggaaacggctgctaataccgcatacgctctacggaggaaaggaggggaccttcgggcctttcgctatcagatgaacctatattggattagctagttggtggggtaagggcctaccaaggcgacgatccatagctggtctgagaggatgatcagccacactgggactgagacacggcccagactcctacgggaggcagcagtggggaatattggacaatgggggcaaccctgatccagcaatgccgcgtgtgtgaagaaggccttcgggttgtaaagcactttcagatgtgaggaaaggtagttggttaatacccaattgctgtgacgttaacatcagaagaagcaccggctaactccgtgccagcagccgcggtaatacggagggtgcaagcgttaatcggaattactgggcgtaaagcgcgcgtaggcggttatttaagtcagatgtgaaagccccgggcttaacctgggaatggcatttgatactggatggctagagtgtggtagaggtgagtggaatttcaggtgtagcggtgaaatgcgtagagatctgaaggaacatcagtggcgaaggcgactcactgggccattactgacgctgaggtgcgaaagcgtgggtagcaaacaggattagataccctggtagtccacgccctaaacgatgtcaactaggtgtatggagaatttattctttgtgtatcgaagctaacgcgataagttgaccgcctggggagtacggtcgcaagactaaaactcaaatgaattgacgggggcccgcacaagcggtggagcatgtggtttaattcgatgcaacgcgaagaaccttacctggccttgacatgcacggaacctttcagagatggaagggtgccttcgggaaccgtgacacaggtgctgcatggctgtcgtcagctcgtgtcgtgagatgttgggttaagtcccgcaacgagcgcaacccctgtccttagttgccatcattcagttgggcactctaaggagactgccggtgacaaaccggaggaaggtggggatgacgtcaagtcatcatggcccttatggccagggctacacacgtgctacaatgggcagtacaaagggttgccaactcgcgagagtgcgctaatcccataaagctgttcgtagtccggattggagtctgcaactcgactccatgaagtcggaatcgctagtaatcgcagatcagaatgctgcggtgaatacgttcccgggccttgtacacaccgcccgtcacaccatgggagttggctgcaaaagaagtaggtagactaaccttttggaggtcgcttaccactttgtggtcaatgactggggtg

SEQ ID NO: 2090 - DNA, 1415 bp, Methylophaga muralis
  source 1..1415: mol_type = unassigned DNA
  misc_difference 484: note = n is a, c, g, or t
ctaacacatgcaagtcgaacgatgattttcagcttgctgaaatgattagtggcggacgggtgagtaatgtatagggatctgcctgttagtgggggacaacagccggaaacggctgctaataccgcatacgctctacggaggaaagtgggggaccctcgggcctcacgctaacagatgaacctatattggattagctagttggtagggtaaaggcctaccaaggcgacgatccatagctggtttgagagaatgatcagccacactgggactgagacacggcccagactcctacgggaggcagcagtggggaatattggacaatgggcgcaagcctgatccagcaatgccgcgtgtgtgaagaaggccttcgggttgtaaagcactttaagttgggaggaaaagctgggagttaatagcttctagtgttgacgttaccaacagaataagcaccggctaactccgtgccagcagccgcggtaatacngagggtgcaagcgttgaatcggaatgactgggcgtaaagcgcgcgtaggcggttatgtaagtcagatgtgaaagccccgggcttaacctgggaatggcatttgagactggatggctagagtatggtagaggtgagtggaatttcaggtgtagcggtgaaatgcgtagagatctgaaggaacatcagtggcgaaggcgactcactgggccattactgacgctgaggtgcgaaagcgtgggtagcaacaggattagataccctggtagtccacgccctaaacgatgtcaactaggtgtatggagaatttattctttgtgtatcgaagctaacgcgataagttgaccgcctggggagtacggtcgcagactaaactcaaatgaattgacgggggcccgcacaagcggtggagcatgtggtttattcgatgcaacgcgaagaaccttacctggccttgacatgtacggaagatagaagagattttattgtgccttcgggaaaccgtaacacaggtgctgcatggctgtcgtcagctcgtgtcgtgagatgttgggttaagtcccgcaacgagcgcaacccctgtccttagttgccatcattaagttgggcactctaaggagactgccggtgacaaaccggaggaaggtggggatgacgtcaagtcatcatggcccttatggccagggctacacacgtgctacaatggctagtacaaagggttgccaactcgcgagagtgcgctaatcccataaagctagtcgtagtccggattggagtctgcaactcgactccatgaagtcggaatcgctagtaatcgcagatcagaatgctgcggtgaatacgttcccgggcttgtacacaccgcccgtcacaccatgggagttggctgcaaaagaagtaggtagactaacttcgggaggtcgcttaccacttt

SEQ ID NO: 2091 - DNA, 1458 bp, unidentified
  source 1..1458: mol_type = unassigned DNA; note = Methylophaga nitratireducenticrescens
attgaacgctggcggcatgcctaacacatgcaagtcgaacgatgatttccagcttgctggaatgattagtggcggacgggtgagtaatatatagggatctgcctgttagtgggggacaacagccggaaacggctgctaataccgcatacgctctacggaggaaagtgggggaccctcgggcctcacgctaacagatgaacctatatcagattagctagatggtggggtaaaggcctaccatggcgacgatctgtagctggtttgagagaatgatcagccacactgggactgagacacggcccagactcctacgggaggcagcagtggggaatattggacaatgggcgcaagcctgatccagcaatgccgcgtgtgtgaagaaggccttcgggttgtaaagcactttaagttgggaggaaaagcttggggttaatagccttaagtgttgacgttaccaacagaataagcaccggctaactccgtgccagcagccgcggtaatacggagggtgcaagcgttaatcggaattactgggcgtaaagcgcgcgtaggcggtttgttaagtcagatgtgaaatccccgggctcaacctgggaatggcatttgagactggcaggctagagtatggtagaggtgagtggaatttcaggtgtagcggtgaaatgcgtagagatctgaaggaacatcagtggcgaaggcgactcactgggccattactgacgctgaggtgcgaaagcgtgggtagcaaacaggattagataccctggtagtccacgccctaaacgatgtcaactaggtgtatggagaaaatattctttgtgtatcgaagctaacgcgataagttgaccgcctggggagtacggtcgcaagactaaaactcaaatgaattgacgggggcccgcacaagcggtggagcatgtggtttaattcgatgcaacgcgaagaaccttacctggccttgacatgtacggaagactgcagagatgcggttgtgccttcgggaaccgtaacacaggtgctgcatggctgtcgtcagctcgtgtcgtgagatgttgggttaagtcccgcaacgagcgcaacccctgtccttagttgccatcattcagttgggcactctaaggagactgccggtgacaaaccggaggaaggtggggatgacgtcaagtcatcatggcccttatggccagggctacacacgtgctacaatggctagtacaaagggttgccaactcgcgagagtgcgctaatcccataaagctagtcgtagtccggatcggagtctgcaactcgactccgtgaagtcggaatcgctagtaatcgcagatcagaatgctgcggtgaatacgttcccgggccttgtacacaccgcccgtcacaccatgggagttggctgcaaaagaagtaggtagactaaccttcgggaggtcgcttaccactttgtggtcaatgactggggtg

SEQ ID NO: 2092 - DNA, 1458 bp, Methylophaga sulfidovorans
  source 1..1458: mol_type = unassigned DNA
attgaacgctggcggcatgcctaacacatgcaagtcgaacgatgaagtctagcttgctagacggattagtggcggacgggtgagtaatgtatagggatctgcctagtagtgggggacaacagccggaaacggctgctaataccgcatacgctctacggaggaaagcgggggctcttcggacctcgtgctattagatgaacctatatcagattagctagttggtggggtaaaggcctaccaaggcgacgatctgtagctggtctgagaggatgatcagccacactgggactgagacacggcccagactcctacgggaggcagcagtggggaatattggacaatgggcgcaagcctgatccagcaatgccgcgtgtgtgaagaaggccttcgggttgtaaagcactttcaatagggaggaaaggttatgcgttaataccgtatagctgtgacgttacctatagaagaagcaccggctaactccgtgccagcagccgcggtaatacggagggtgcaagcgttaatcggaattactgggcgtaaagcgcgcgtaggcggttatttaagtcagatgtgaaagccccgggctcaacctgggaattgcatttgatactggatggctagagtgtggtagaggtgagtggaatttcaggtgtagcggtgaaatgcgtagagatctgaaggaacatcagtggcgaaggcgactcactgggccattactgacgctgaggtgcgaaagcgtgggtagcaaacaggattagataccctggtagtccacgccctaaacgatgtcaactaggtgtatggagaatttattctttgtgtatcgaagctaacgcgataagttgaccgcctggggagtacggtcgcaagactaaaactcaaatgaattgacgggggcccgcacaagcggtggagcatgtggtttaattcgatgcaacgcgaagaaccttacctggccttgacatgtacggaagatagaagagattttattgtgccttcgggaaccgtaacacaggtgctgcatggctgtcgtcagctcgtgtcgtgagatgttgggttaagtcccgcaacgagcgcaacccctgtccttagttgccatcattaagttgggcactctaaggagactgccggtgacaaaccggaggaaggtggggatgacgtcaagtcatcatggcccttatggccagggctacacacgtgctacaatggctagtacaaagggttgctaactcgcgagagtatgctaatcccataaagctagtcgtagtccggatcgcagtctgcaactcgactgcgtgaagtcggaatcgctagtaatcgcggatcagaatgccgcggtgaatacgttcccgggccttgtacacaccgcccgtcacaccatgggagttggctgcaaaagaagtaggtagactaaccttcgggaggtcgcttaccactttgtggtcaatgactggggtg

SEQ ID NO: 2093 - DNA, 1462 bp, Methylophaga thiooxydans
  source 1..1462: mol_type = unassigned DNA
attgaacgctggcggcatgcctaacacatgcaagtcgaacgatgacgaaacagcttgctgtttctgattagtggcggacgggtgagtaatgtatagggatctgcctgacagtgggggacaacagccggaaacggctgctaataccgcatacgctctacggaggaaagtgggggacctttcggggcctcacgctgacagatgaacctatatcagattagctagttggtggggtaatggcttaccaaggcgacgatctgtagctggtctgagaggatgatcagccacactgggactgagacacggcccagactcctacgggaggcagcagtggggaatattggacaatgggggcaaccctgatccagcaatgccgcgtgtgtgaagaaggccttcgggttgtaaagcactttcaatagggaggaaaagttatgcgttaatagcgtatagccgtgacgttacctatagaagaagcaccggctaactccgtgccagcagccgcggtaatacggagggtgcaagcgttaatcggaattactgggcgtaaagcgcgcgtaggcggtttattaagtcagatgtgaaagccccgggctcaacctgggaattgcatttgagactggtaggctagagtgtggtagaggtgagtggaatttcaggtgtagcggtgaaatgcgtagagatctgaaggaacatcagtggcgaaggcgactcactgggccattactgacgctgaggtgcgaaagcgtgggtagcaaacaggattagataccctggtagtccacgccctaaacgatgtcaactaggtgtatggagaatttattctttgtgtatcgaagctaacgcgataagttgaccgcctggggagtacggtcgcaagactaaaactcaaatgaattgacgggggcccgcacaagcggtggagcatgtggtttaattcgatgcaacgcgaagaaccttacctggccttgacatgtacggaagatagaagagattttattgtgccttcgggaaccgtaacacaggtgctgcatggctgtcgtcagctcgtgtcgtgagatgttgggttaagtcccgcaacgagcgcaacccctgtccttagttgccatcattaagttgggcactctaaggagactgccggtgacaaaccggaggaaggtggggatgacgtcaagtcatcatggcccttatggccagggctacacacgtgctacaatggcaagtacaaagggttgctaactcgcgagagtgtgctaatcccataaagcttgtcgtagtccggatcgcagtctgcaactcgactgcgtgaagtcggaatcgctagtaatcgcggatcagaatgccgcggtgaatacgttcccgggccttgtacacaccgcccgtcacaccatgggagttggctgcaaaagaagtaggtagactaaccttcgggaggtcgcttaccactttgtggtcaatgactggggtg

SEQ ID NO: 2094 - DNA, 1453 bp, Methylophilus methylotrophus
  source 1..1453: mol_type = unassigned DNA
cgctggcggaatgctttacacatgcaagtcgaacgatgaaccttagcttgctaaggggattagtggcgaacgggtgagtaatatatcggaacgtgccttgtaatgggggataactagtcgaaagattagctaataccgcatacgccctgagggggaaagtaggggatcttcggaccttacgttataagagcggccgatatctgattagctagttggtggggtaatggcctaccaaggcttcgatcagtagctggtctgagaggacgaccagccacactggaactgagacacggtccagactcctacgggaggcagcagtggggaattttggacaatgggcgcaagcctgatccagccattccgcgtgagtgaagaaggccttcgggttgtaaagctctttcgcaagggaagaaaacttacattctaataaagtgtgaggctgacggtaccttgataagaagcaccggctaactacgtgccagcagccgcggtaatacgtagggtgcgagcgttaatcggaattactgggcgtaaagcgtgcgcaggcggttttgtaagtcagatgtgaaatccccgagctcaacttgggaactgcgtttgaaactacaagactagaatatgtcagaggggggtagaattccacgtgtagcagtgaaatgcgtagagatgtggaggaataccaatggcgaaggcagccccctgggataatattgacgctcatgcacgaaagcgtggggagcaaacaggattagataccctggtagtccacgccctaaacgatgtctactagttgttggtggagtaaaatccatgagtaacgcagctaacgcgtgaagtagaccgcctggggagtacggtcgcaagattaaactcaaaggaattgacgggggcccgcacaagcggtggattatgtggattaattcgatgcaacgcgaaaaccttacctggccttgacatgccactaacgaagcagagatgcattaggtgcccgtaagggaaagtggacacaggtgctgcatggctgtcgtcagctcgtgtcgtgagatgttgggttaagtcccgcaacgagcgcaacccttgccattaattgccatcatttagttgggcactttaatgggactgccggtgacaaaccggaggaaggtggggatgacgtcaagtcctcatggcccttatggccagggcttcacacgtaatacaatggtcggtacagagagttgccaacccgcgagggggagctaatctcagaaagccgatcgtagtccggattgttctctgcaactcgagagcatgaagtcggaatcgctagtaatcgcggatcagcatgtcgcggtgaatacgttcccgggccttgtacacaccgcccgtcacaccatgggagtgggttttaccagaagtagttagtctaaccgtaagggggacgattaccacggtagtattcatgactggggtg

SEQ ID NO: 2095 - DNA, 1461 bp, Methylophilus rhizosphaerae
  source 1..1461: mol_type = unassigned DNA
attgaacgctggcggaatgctttacacatgcaagtcgaacgatgaaccttagcttgctaaggggattagtggcgaacgggtgagtaatatatcggaacgtgccttgtaatgggggataactagtcgaaagattagctaataccgcatacgccctgagggggaaagtaggggatcttcggaccttacgttataagagcggccgatatctgattagctagttggtggggtaatggcctaccaaggcatcgatcagtagctggtctgagaggacgaccagccacactggaactgagacacggtccagactcctacgggaggcagcagtggggaattttggacaatgggcgcaagcctgatccagccattccgcgtgagtgaagaaggccttcgggttgtaaagctctttcgcaagggaagaaaacttactcaataacactgagtgaggctgacggtaccttgataagaagcaccggctaactacgtgccagcagccgcggtaatacgtagggtgcgagcgttaatcggaattactgggcgtaaagcgtgcgcaggcggtttggcaagtcagatgtgaaatccccgagctcaacttgggaactgcgtttgaaactgccagactagaatatgtcagaggggggtagaattccacgtgtagcagtgaaatgcgtagagatgtggaggaataccaatggcgaaggcagccccctgggataatattgacgctcatgcacgaaagcgtggggagcaaacaggattagataccctggtagtccacgccctaaacgatgtctactagttgttggtggagtaaaatccatgagtaacgcagctaacgcgtgaagtagaccgcctggggagtacggtcgcaagattaaaactcaaaggaattgacgggggcccgcacaagcggtggattatgtggattaattcgatgcaacgcgaaaaaccttacctggccttgacatgccactaacgaagcagagatgcattaggtgcccgtaagggaaagtggacacaggtgctgcatggctgtcgtcagctcgtgtcgtgagatgttgggttaagtcccgcaacgagcgcaacccttgccattaattgccatcatttagttgggcactttaatgggactgccggtgacaaaccggaggaaggtggggatgacgtcaagtcctcatggcccttatggccagggcttcacacgtaatacaatggtcggtacagagagttgccaacccgcgagggggagctaatctcagaaagccgatcgtagtccggattgttctctgcaactcgagagcatgaagtcggaatcgctagtaatcgcggatcagcatgtcgcggtgaatacgttcccgggccttgtacacaccgcccgtcacaccatgggagtgggttttaccagaagtagttagtctaaccgcaagggggacgattaccacggtagtattcatgactggggtg

SEQ ID NO: 2096 - DNA, 1414 bp, unidentified
  source 1..1414: mol_type = unassigned DNA; note = Methyloprofundus sedimenti
ccatgcaagtcgaacggtaacaggctagcttgctagcgctgacgagtggcggacgggtgcgtaacgcgtaggaatctgcctattagtgggggacaacctggtgaaaaccaggctaataccgcatacgccctacgggggaaagcaggggatcttcggaccttgcgctaatagatgagcctgcgttagattagcttgttggtgaggtaatggctcaccaaggcgacgatctatagctggtctgagaggacgatcagccacactgggactgagacacggcccagactcctacgggaggcagcagtggggaatattggacaatgggcgaaagcctgatccagcaataccgcgtgtgtgaagaaggcctgagggttgtaaagcactttcaattgggaggaaaacaggcaggttaatatcctgtctcttgacattacctttagaagaagcaccggctaactccgtgccagcagccgcggtaatacggagggtgcaagcgttaatcggaattactgggcgtaaagcgttcgtaggcggttggttaagttagatgtgaaagccccgggcttaacctgggaactgcatttaatactggctaactagagtttaggagagggaagtggaatttcaggtgtagcagtgaaatgcgtagagatctgaaggaacaccagtggcgaaggcgacttcctggactaaaactgacgctgaggaacgaaagcgtgggtagcaaacgggattagataccccggtagtccacgccgtaaacgatgtcaactagccgttgggcctatatacaggcttagtggcggagctaacgtattaagttgaccgcctggggagtacggccgcaaggttaaaactcaaatgaattgacgggggcccgcacaagcggtggagcatgtggtttaattcgatgcaacgcgaagaaccttacctacccttgacatccagagaatctgttagagatagtagagtgccttcgggaactctgagacaggtgctgcatggctgtcgtcagctcgtgtcgtgagatgttgggttaagtcccgtaacgagcgcaacccctatccttagttgctagcaggtcatgctgagaactctaaggagactgccggtgataaaccggaggaaggtggggacgacgtcaagtcatcatggcccttatgggtagggctacacacgtgctacaatggtcggtacagagggccgcaaactcgcgagagtaagctaatcccagaaagccgatcttagtccggattgcagtctgcaactcgactgcatgaagttggaatcgctagtaatcgcgaatcagaatgtcgcggtgaatacgttcccgggccttgtacacaccgcccgtcacaccatgggagtgggttgcaaaagaagtgggtagtctaaccttcgggagggcgctcaccac

SEQ ID NO: 2097 - DNA, 1435 bp, unidentified
  source 1..1435: mol_type = unassigned DNA; note = Methylorubrum extorquens
cgaacgctggcggcaggcttaacacatgcaagtcgaacgggcaccttcgggtgtcagtggcagacgggtgagtaacacgtgggaacgtacccttcggttcggaataactcagggaaacttgagctaataccggatacgcccttttggggaaaggtttactgccgaaggatcggcccgcgtctgattagcttgttggtggggtaacggcctaccaaggcgacgatcagtagctggtctgagaggatgatcagccacactgggactgagacacggcccagactcctacgggaggcagcagtggggaatattggacaatgggcgcaagcctgatccagccatgccgcgtgagtgatgaaggccttagggttgtaaagctcttttgtccgggacgataatgacggtaccggaagaataagccccggctaacttcgtgccagcagccgcggtaatacgaagggggctagcgttgctcggaatcactgggcgtaaagggcgcgtaggcggccgattaagtcgggggtgaaagcctgtggctcaaccacagaattgccttcgatactggttggcttgagaccggaagaggacagcggaactgcgagtgtagaggtgaaattcgtagatattcgcaagaacaccagtggcgaaggcggctgtctggtccggttctgacgctgaggcgcgaaagcgtggggagcaaacaggattagataccctggtagtccacgccgtaaacgatgaatgccagccgttggcctgcttgcaggtcagtggcgccgctaacgcattaagcattccgcctggggagtacggtcgcaagattaaaactcaaaggaattgacgggggcccgcacaagcggtggagcatgtggtttaattcgaagcaacgcgcagaaccttaccatcccttgacatggcatgttacctcgagagatcggggatcctcttcggaggcgtgcacacaggtgctgcatggctgtcgtcagctcgtgtcgtgagatgttgggttaagtcccgcaacgagcgcaacccacgtccttagttgccatcattcagttgggcactctagggagactgccggtgataagccgcgaggaaggtgtggatgacgtcaagtcctcatggcccttacgggatgggctacacacgtgctacaatggcggtgacagtgggacgcgaagccgcgaggtggagcaaatccccaaaaaccgtctcagttcggattgcactctgcaactcgggtgcatgaaggcggaatcgctagtaatcgtggatcagcacgccacggtgaatacgttcccgggccttgtacacaccgcccgtcacaccatgggagttggtcttacccgacggcgctgcgccaaccgcaaggaggcaggcgaccacggtagggtcagcgactggggtgaagtcgtaacaaggtagccgtaggggaacc

SEQ ID NO: 2098 - DNA, 1449 bp, unidentified
  source 1..1449: mol_type = unassigned DNA; note = Methylorubrum populi
  misc_difference 8: note = n is a, c, g, or t
  misc_difference 63..64: note = n is a, c, g, or t
  misc_difference 99: note = n is a, c, g, or t
  misc_difference 101: note = n is a, c, g, or t
  misc_difference 105: note = n is a, c, g, or t
  misc_difference 110: note = n is a, c, g, or t
  misc_difference 115: note = n is a, c, g, or t
  misc_difference 575: note = n is a, c, g, or t
  misc_difference 607: note = n is a, c, g, or t
  misc_difference 728: note = n is a, c, g, or t
  misc_difference 1316: note = n is a, c, g, or t
  misc_difference 1344: note = n is a, c, g, or t
  misc_difference 1348: note = n is a, c, g, or t
  misc_difference 1363: note = n is a, c, g, or t
  misc_difference 1370: note = n is a, c, g, or t
  misc_difference 1376: note = n is a, c, g, or t
tcgaacgntggcgtgcaggcttaacacatgcaagtcgaacgggcttcttcgcgaagtcagtgnnagacgggtgagtaacacgtgggaacgtgcccttcngntcgnaatanctcanggaaacttgagctaataccggatacgcccttacggggaaaggtttactgccgaaggatcggcccgcgtctgattagcttgttggtggggtaacggcctaccaaggcgacgatcagtagctggtctgagaggatgatcagccacactgggactgagacacggcccagactcctacgggaggcagcagtggggaatattggacaatgggcgcaagcctgatccagccatgccgcgtgagtgatgaaggccttagggttgtaaagctcttttgtccgggacgataatgacggtaccggaagaataagccccggctaacttcgtgccagcagccgcggtaatacgaagggggctagcgttgctcggaatcactgggcgtaaagggcgcgtaggcggccgattaagtcgggggtgaaagcctgtggctcaaccacagaattgccttcgatactggttggcttganaccggaagaagacagcggaactgcgagtgtanaggtgaaattcgtaaatattcgcaaaaacccccagtggcaaaggcggctgtctggtcccgttcttacccttaggcccggaaaccgtggggagcaaacaggattagataccctggtagtccnccccgtaaaccaatgaaatcccagccgttggcctgcttgcaggtcagtggcgccgctaaacgcattaagcattcccgcctggggaagtacggtcgcaaaaattaaaactcaaaggaattgacgggggcccgcacaagcggtggagcatgtggtttaattcgaagcaacgcgcagaaccttacccatcccttgacatggcatgttacctcgagagatcggggatcctcttcggaggcgtgcacacaggtgctgcatggctgtcgtcagctcgtgtcgtgagatgttgggttaagtcccgcaacgagcgcaacccacgtccttagttgccatcattcagttgggcactctagggagactgccggtgataagccgcgaggaaggtgtggatgacgtcaagtcctcatggcccttacgggatgggctacacacgtgctacaatggcggtgacagtgggacgcgaaaccgcgaggttgagcaaatccccaaaagccgtctcagttcggattgcactctgcaactcgggtgcatgaaggcggaatcgctagtaatcgtggatcagcacgccacggtgaatacgttgcccgggcnttgtacacaccgcctgtcacaccatggnagtnggtcttacccgaggncgctgcnccaacngcaagggggcaggcgaccacggtagggtcagcgtactggggtgaagtcgtaacaaggtagccgtaggggaacc

SEQ ID NO: 2099 - DNA, 1480 bp, unidentified
  source 1..1480: mol_type = unassigned DNA; note = Methylorubrum salsuginis
agagtttgatcctggctcagagcgaacgctggcggcaggcttaacacatgcaagtcgagcgggcccttcggggtcagcggcagacgggtgagtaacacgtgggaacgtgcccttcggttcggaataactcagggaaacttgagctaataccggatacgcccttttggggaaaggtttactgccgaaggatcggcccgcgtctgattagctagttggtggggtaacggcctaccaaggcgacgatcagtagctggtctgagaggatgatcagccacactgggactgagacacggcccagactcctacgggaggcagcagtggggaatattggacaatgggcgcaagcctgatccagccatgccgcgtgagtgatgaaggccttagggttgtaaagctcttttgtccgggacgataatgacggtaccggaagaataagccccggctaacttcgtgccagcagccgcggtaatacgaagggggctaagcgttgctcggaaatcactggggcgtaaaggggcgcgtaggcggctttttaagtcggggktgaaagcctgtggctcaaccaccagaattgccttcgatactggaaagcttgagaccgraagaggacagcggaactgcgagtgtagaggtgaaattcgtagatattcgcaagaacaccagtggcgaaggcggctgtctggtccggktctgacgctgaggcgcgaaagcgtggggagcaaacaggattagataccctggtagtccacgccgtaaacgatgaatgccagccgttggtctgcttgcaggtcagtggcgccgctaacgcattaagcattccgcctggggagtacggtcgcaagattaaaactcaaaggaattgacgggggcccgcacaagcggtggagcatgtggtttaattcgaagcaacgcgcagaaccttaccatcccttgacatggcaggattgtccgagagatcggtcgttcccttcggggacctgcacacaggtgctgcatggctgtcgtcagctcgtgtcgtgagatgttgggttaagtcccgcaacgagcgcaacccacgtccttagttgccatcattcagttgggcactctagggagactgccggtgataagccgcgaggaaggtgtggatgacgtcaagtcctcatggcccttacgggatgggctacacacgtgctacaatggcggtgacagtgggacgcgaaaccgcgaggttgagcaaatccccaaaagccgtctcagttcggattgcactctgcaactcgggtgcatgaaggcggaatcgctagtaatcgtggatcagcatgccacggtgaatacgttcccgggccttgtacacaccgcccgtcacaccatgggagttggtcttacccgacggcgctgcgccaaccgcaaggaggcaggcgaccacggtagggtcagcgactggggtgaagtcgtaacaaggtagccgtaggggaacctgcggctggatcacctcctt

SEQ ID NO: 2100 - DNA, 1435 bp, unidentified
  source 1..1435: mol_type = unassigned DNA; note = Methylorubrum zatmanii
cgaacgctggcggcaggcttaacacatgcaagtcgaacgggcaccttcgggtgtcagtggcagacgggtgagtaacacgtgggaacgtgcccttcggttcggaataactcagggaaacttgagctaataccggatacgcccttctggggaaaggtttactgccgaaggatcggcccgcgtctgattagcttgttggtggggtaacggcctaccaaggcgacgatcagtagctggtctgagaggatgatcagccacactgggactgagacacggcccagactcctacgggaggcagcagtggggaatattggacaatgggcgcaagcctgatccagccatgccgcgtgagtgatgaaggccttagggttgtaaagctcttttgtccgggacgataatgacggtaccggaagaataagccccggctaacttcgtgccagcagccgcggtaatacgaagggggctagcgttgctcggaatcactgggcgtaaagggcgcgtaggcggccgattaagtcgggggtgaaagcctgtggctcaaccacagaattgccttcgatactggttggcttgagaccggaagaggacagcggaactgcgagtgtagaggtgaaattcgtagatattcgcaagaacaccagtggcgaaggcggctgtctggtccggttctgacgctgaggcgcgaaagcgtggggagcaaacaggattagataccctggtagtccacgccgtaaacgatgaatgccagccgttggcctgcttgcaggtcagtggcgccgctaacgcattaagcattccgcctggggagtacggtcgcaagattaaaactcaaaggaattgacgggggcccgcacaagcggtggagcatgtggtttaattcgaagcaacgcgcagaaccttaccatcccttgacatggcatgttacctcgggagaccggggatcctcttcggaggcgtgcacacaggtgctgcatggctgtcgtcagctcgtgtcgtgagatgttgggttaagtcccgcaacgagcgcaacccacgtccttagttgccatcattcagttgggcactctagggagactgccggtgataagccgcgaggaaggtgtggatgacgtcaagtcctcatggcccttacgggatgggctacacacgtgctacaatggcggtgacagtgggacgcgaaaccgcgaggtcgagcaaatccccaaaaaccgtctcagttcggattgcactctgcaactcgggtgcatgaaggcggaatcgctagtaatcgtggatcagcacgccacggtgaatacgttcccgggccttgtacacaccgcccgtcacaccatgggagttggtcttacccgacggcgctgcgccaaccgcaaggaggcaggcgaccacggtagggtcagcgactggggtgaagtcgtaacaaggtagccgtaggggaacc

SEQ ID NO: 2101 - DNA, 1456 bp, Methylosarcina fibrata
  source 1..1456: mol_type = unassigned DNA
attgaacgctggcggtatgcttaacacatgcaagtcgaacggtaacaggccttcgggcgctgacgagtggcggacgggtgcgtaacgcgtaggaatctgcctggtagtgggggacaacttggggaaactcaagctaataccgcatacgccctacgggggaaagcgggggaccttcgggcctcgcgctatcagatgagcctgcgttggattagctagttggtagggtaaaggcctaccaaggcgacgatccatagctggtctgagaggacgatcagccacactgggactgagacacggcccagactcctacgggaggcagcagtggggaatattggacaatgggcgcaagcctgatccagcaataccgcgtgtgtgaagaaggcctgagggttgtaaagcacttttaatcgggaggaaaacctgtcggccaatacccggcagcttgacattaccgatagaaaaagcaccggctaactccgtgccagcagccgcggtaatacggagggtgcaagcgttaatcggaattactgggcgtaaagcgtgcgtaggcggccgtttaagtcagatgtgaaagccccgggcttaacctgggaactgcatttgatactggagggctagagtttaatagaggggagtggaatttccggtgtagcggtgaaatgcgtagagatcggaaggaacaccagtggcgaaggcgactccctggattaaaactgacgctgaggtacgaaagcgtgggtagcaaacaggattagataccctggtagtccacgccgtaaacgatgtcaactagccgttggtcttattgataagattagtggcgcagctaacgcattaagttgaccgcctggggagtacggccgcaaggttaaaactcaaatgaattgacgggggcccgcacaagcggtggagcatgtggtttaattcgatgcaacgcgaagaaccttaccaccccttgacatccagagaatctgtgagagatcgtagagtgccttcgggagctctgagacaggtgctgcatggctgtcgtcagctcgtgtcgtgagatgttgggttaagtcccgtaacgagcgcaacccttatccttagttgccaacagttcggctgggaactctagggagactgccggtgataaaccggaggaaggtggggacgacgtcaagtcatcatggcccttatggggtgggctacacacgtgctacaatggccggtacagagggcagccagctcgcgagagtcagcaaatcccacaaagccggtcctagtccggattgcagtctgcaactcgactgcatgaagtcggaatcgctagtaatcgcgaatcagaatgtcgcggtgaatacgttcccgggccttgtacacaccgcccgtcacaccatgggagtgggttgcaaaagaagtaggtagtctaaccttcgggagggcgcttaccactttgtgattcatgactggggtg

SEQ ID NO: 2102 - DNA, 1408 bp, Methylosinus sporium
  source 1..1408: mol_type = unassigned DNA
aacgaacgctggcggcaggcttaacacatgcaagtcgaacgctgtagcaatacagagtggcagacgggtgagtaacgcgtgggaacgtgcctttcggttcggaataactcagggaaacttgagctaataccggatacgcccttcgggggaaagatttattgccgaaagatcggcccgcgtccgattagctagttggtgaggtaatggctcaccaaggcgacgatcggtagctggtctgagaggatgatcagccacactgggactgagacacggcccagactcctacgggaggcagcagtggggaatattggacaatgggcgcaagcctgatccagccatgccgcgtgagtgatgaaggccctagggttgtaaagctctttcgccagggacgataatgacggtacctggataagaagccccggctaacttcgtgccagcagccgcggtaatacgaagggggctagcgttgttcggaatcactgggcgtaaagcgcacgtaggcggatctttaagtcaggggtgaaatcccgaggctcaacctcggaactgcctttgatactggaggtctagagtccgggagaggtgagtggaactgcgagtgtagaggtgaaattcgtagatattcgcaagaacaccagtggcgaaggcggctcactggcccggaactgacgctgaggtgcgaaagcgtggggagcaaacaggattagataccctggtagtccacgccgtaaacgatggatgctagccgttgggcagcttgctgttcagtggcgcagctaacgctttaagcatcccgcctggggagtacggtcgcaagattaaaactcaaaggaattgacgggggcccgcacaagcggtggagcatgtggtttaattcgaagcaacgcgcagaaccttaccagcttttgacatgtctagtatggtcgacagagatgtcttccttcccgcaaggggctagaacacaggtgctgcatggctgtcgtcagctcgtgtcgtgagatgttgggttaagtcccgcaacgagcgcaaccctcgcccttagttgccatcattcagttgggcactctagggggactgccggtgataagccgcgaggaaggtggggatgacgtcaagtcctcatggcccttacaggctgggctacacacgtgctacaatggcggtgacaatgggacgcgaaggggcgacccttagcaaatctcaaaaaaccgtctcagttcggattgcactctgcaactcgagtgcatgaaggtggaatcgctagtaatcgcagatcagcacgctgcggtgaatacgttcccgggccttgtacacaccgcccgtcacaccatgggagttggctttacccgaaggcgtttcgctaaccgcaaggaggcagacgaccacggtagggtcagcgactggggtg

SEQ ID NO: 2103 - DNA, 1410 bp, Methylosinus trichosporium
  source 1..1410: mol_type = unassigned DNA
aacgaacgctggcggcaggcttaacacatgcaagtcgaacgggcgcagcgatgcgtcagtggcagacgggtgagtaacgcgtgggaacgtacctttcggttcggaataactcagggaaacttgagctaataccggatacgcccttagggggaaagatttattgccgaaagatcggcccgcgtccgattagctagttggtgaggtaaaggctcaccaaggcgacgatcggtagctggtctgagaggatgatcagccacactgggactgagacacggcccagactcctacgggaggcagcagtggggaatattggacaatgggcgcaagcctgatccagccatgccgcgtgagtgatgaaggccctagggttgtaaagctctttcgccagggacgataatgacggtacctggataagaagccccggctaacttcgtgccagcagccgcggtaatacgaagggggctagcgttgttcggaatcactgggcgtaaagcgcacgtaggcggattgttaagtcaggggtgaaatcccgaggctcaacctcggaactgcctttgatactggcgatctagagtccgggagaggtgagtggaactgcgagtgtagaggtgaaattcgtagatattcgcaagaacaccagtggcgaaggcggctcactggcccggaactgacgctgaggtgcgaaagcgtggggagcaaacaggattagataccctggtagtccacgccgtaaacgatggatgctagccgttggggagcttgctcttcagtggcgcagctaacgctttaagcatcccgcctggggagtacggtcgcaagattaaaactcaaaggaattgacgggggcccgcacaagcggtggagcatgtggtttaattcgaagcaacgcgcagaaccttaccagcttttgacatgtccggtatggtcgtcagagatgacttccttcccgcaaggggccggaacacaggtgctgcatggctgtcgtcagctcgtgtcgtgagatgttgggttaagtcccgcaacgagcgcaaccctcgcccttagttgccatcattcagttgggcactctagggggactgccggtgataagccgcgaggaaggtggggatgacgtcaagtcctcatggcccttacaggctgggctacacacgtgctacaatggcggtgacaatgggaagcgaaggggtgacccggagcaaatctccaaaagccgtctcagttcggattgcactctgcaactcgagtgcatgaaggtggaatcgctagtaatcgcagatcagcacgctgcggtgaatacgttcccgggccttgtacacaccgcccgtcacaccatgggagttggctttacccgaaggcgtttcgctaaccgcaaggaggcagacgaccacggtagggtcagcgactggggtg

SEQ ID NO: 2104 - DNA, 1460 bp, Methylotenera mobilis
  source 1..1460: mol_type = unassigned DNA
attgaacgctggcggaatgctttacacatgcaagtcgaacgatgaaacctagcttgctaggttgattagtggcgaacgggtgagtaatgtatcggaacgtatccaataatgggggataactaaccgaaaggttagctaataccgcatacgccctacgggggaaagcaggggatcttcggaccttgcgttaatggagcggccgatatctgattagctagttggtgaggtaaaagctcaccaaggcgacgatcagtagctggtctgagaggacgaccagccacactggaactgagacacggtccagactcctacgggaggcagcagtggggaattttggacaatgggcgaaagcctgatccagccattccgcgtgagtgaagaaggccttcgggttgtaaagctctttcgcaagggaagaaaacttatcctctaataaagggtgaggttgacggtaccttgataagaagcaccggctaactacgtgccagcagccgcggtaatacgtagggtgcgagcgttaatcggaattactgggcgtaaagcgtgcgcaggcggtttggtaagtcagatgtgaaatccccgagctcaacttgggaactgcgtttgaaactaccagactagaatatgtcagaggggggtagaattccacgtgtagcagtgaaatgcgtagagatgtggaggaataccaatggcgaaggcagccccctgggataatattgacgctcatgcacgaaagcgtggggagcaaacaggattagataccctggtagtccacgccctaaacgatgtctactagttgttggtggagtaaaatccatgagtaacgcagctaacgcgtgaagtagaccgcctggggagtacggtcgcaagattaaaactcaaaggaattgacgggggcccgcacaagcggtggattatgtggattaattcgatgcaacgcgaaaaaccttacctggccttgacatgtaacgaactttccagagatggattggtgctcgaaagagaacgttaacacaggtgctgcatggctgtcgtcagctcgtgtcgtgagatgttgggttaagtcccgcaacgagcgcaacccttgccattaattgccatcatttagttgggcactttaatgggactgccggtgacaaaccggaggaaggtggggatgacgtcaagtcctcatggcccttatggccagggcttcacacgtaatacaatggtcggtacagagggttgccaagccgcgaggtggagccaatcccagaaagccgatcgtagtccggattgtagtctgcaactcgactacatgaagtcggaatcgctagtaatcgcggatcagcatgtcgcggtgaatacgttcccgggccttgtacacaccgcccgtcacaccatgggagtgggttttaccagaagtaggtagtctaaccgcaagggggacgcttaccacggtagtattcatgactggggtg

SEQ ID NO: 2105 - DNA, 1460 bp, Methylotenera versatilis
  source 1..1460: mol_type = unassigned DNA
attgaacgctggcggaatgctttacacatgcaagtcgaacggcagcacggacttcggtctggtggcgagtggcgaacgggtgagtaatatatcggaacgtatccaataatgggggataactaatcgaaaggttggctaataccgcatacgccctacgggggaaagctagggaccttcgggcctggcgttaatggagcggctgatatctgattagctagtaggtgaggtaaaagctcacctaggcgacgatcagtagctggtctgagaggacgaccagccacactggaactgagacacggtccagactcctacgggaggcagcagtggggaattttggacaatgggcgaaagcctgatccagccattccgcgtgagtgaagaaggccttcgggttgtaaagctctttcgcaagggaagaaaacttagatactaatattatctgaggttgacggtaccttgataagaagcaccggctaactacgtgccagcagccgcggtaatacgtagggtgcgagcgttaatcggaattactgggcgtaaagcgtgcgcaggcggttttgtaagtcagatgtgaaatccccgagctcaacttgggaactgcgtttgaaactacaagactagaatatgtcagaggggggtagaattccacgtgtagcagtgaaatgcgtagagatgtggaggaataccaatggcgaaggcagccccctgggataatattgacgctcatgcacgaaagcgtggggagcaaacaggattagataccctggtagtccacgccctaaacgatgtctactagttgttggtggagtaaaatccatgagtaacgcagctaacgcgtgaagtagaccgcctggggagtacggtcgcaagattaaaactcaaatgaattgacgggggcccgcacaagcggtggattatgtggattaattcgatgcaacgcgaaaaaccttacctggccttgacatgtaacgaactttccagagatggattggtgctcgaaagagaacgttaacacaggtgctgcatggctgtcgtcagctcgtgtcgtgagatgttgggttaagtcccgcaacgagcgcaacccttgccattaattgccatcatttagttgggcactttaatgggactgccggtgacaaaccggaggaaggtggggatgacgtcaagtcctcatggcccttatggccagggcttcacacgtaatacaatggtcggtacagagggtcgccaacccgcaagggggagccaatcccagaaagccgatcgtagtccggattgaggtctgcaactcgacctcatgaagtcggaatcgctagtaatcgcggatcagcatgtcgcggtgaatacgttcccgggccttgtacacaccgcccgtcacaccatgggagtgggttttaccagaagtaggtagtctaaccttcgggaggacgcttaccacggtagtattcatgactggggtg

SEQ ID NO: 2106 - DNA, 1455 bp, Methyloversatilis universalis
  source 1..1455: mol_type = unassigned DNA
attgaacgctggcggaatgctttacacatgcaagtcgagcggcagcacgggggtaaccctggtggcgagcggcgaacgggtgagtaatacatcggaacatgcccagtcgtgggggataacacttcgaaagaagtgctaataccgcatacgtcctgagggagaaagcgggggatcgcaagacctcgcgcgattggagtggccgatgtcagattagctagttggtggggtaaaggcctaccaaggcaacgatctgtagctggtctgagaggatgatcagccacactgggactgagacacggcccagactcctacgggaggcagcagtggggaattttggacaatgggggcaaccctgatccagccattccgcgtgagtgaagaaggccttcgggttgtaaagctctttcggcaggaacgaaacggtgagctctaacatagcttgctaatgacggtacctgaagaagaagcaccggctaactacgtgccagcagccgcggtaatacgtagggtgcgagcgttaatcggaattactgggcgtaaagcgtgcgcaggcggttgtgtaagacaggtgtgaaatccccgggcttaacctgggaactgcgcttgtgactgcacagctagagtatggcagaggggggtggaattccacgtgtagcagtgaaatgcgtagagatgtggaggaacaccgatggcgaaggcagccccctgggccaatactgacgctcatgcacgaaagcgtggggagcaaacaggattagataccctggtagtccacgccctaaacgatgtcgactaggtgttcggtgaggagactcattgagtaccgcagctaacgcgtgaagtcgaccgcctggggagtacggtcgcaagattaaaactcaaaggaattgacggggacccgcacaagcggtggatgatgtggattaattcgatgcaacgcgaaaaaccttacctacccttgacatgtacggaaccctgctgagaggtgggggtgctcgaaagagagccgtaacacaggtgctgcatggctgtcgtcagctcgtgtcgtgagatgttgggttaagtcccgcaacgagcgcaacccttgtcattagttgctacgcaagagcactctaatgagactgccggtgacaaaccggaggaaggtggggatgacgtcaagtcctcatggcccttatgggtagggcttcacacgtcatacaatggtcggtacagagggttgccaagccgcgaggtggagccaatcccagaaagccgatcgtagtccggatcgcagtctgcaactcgactgcgtgaagtcggaatcgctagtaatcgcggatcagcatgccgcggtgaatacgttcccgggtcttgtacacaccgcccgtcacaccatgggagtgggtttcaccagaagaggctagcctaaccgtaaggggggcggtcgccacggtgagattcatgactggggtg

SEQ ID NO: 2107 - DNA, 1383 bp, Methylovirgula ligni
  source 1..1383: mol_type = unassigned DNA
aacgaacgctggcggcaggcttaacacatgcaagtcgaacgctgtagcaatacagagtggcagacgggtgagtaacacgtgggaacatacccttcggttcggaataactcagggaaacttgagctaataccggatacgtccgcgaggagaaagattcatcgccgaaggattggcccgcgtctgattagctagttggtgaggtaacggctcaccaaggcgacgatcagtagctggtctgagaggatgatcagccacactgggactgagacacggcccagactcctacgggaggcagcagtggggaatattggacaatgggcgaaagcctgatccagccatgccgcgtgagtgatgaaggccttagggttgtaaagctcttttacccgggaagataatgacggtaccgggagaataagccccggctaacttcgtgccagcagccgcggtaatacgaagggggctagcgttgttcggatttactgggcgtaaagcgcacgtaggcggattcttaagtcaggggtgaaatcccgaggctcaacctcggaactgcctttgatactggggatcttgagttcgggagaggtgagtggaactgcgagtgtagaggtgaaattcgtagatattcgcaagaacaccagtggcgaaggcggctcactggcccgatactgacgctgaggtgcgaaagcgtggggagcaaacaggattagataccctggtagtccacgccgtaaactatggatgctagccgttaggcagcttgctgcttagtggcgcagctaacgctttaagcatcccgcctggggagtacggtcgcaagattaaaactcaaaggaattgacgggggcccgcacaagcggtggagcatgtggtttaattcgaagcaacgcgcagaaccttaccagcctttgacatgcctcggacggttaccagagatggtttcttctcttcggagccggggacacaggtgctgcatggctgtcgtcagctcgtgtcgtgagatgttgggttaagtcccgcaacgagcgcaaccctcgcccttagttgccatcatttagttgggcactctagggggactgccggtgataagccgcgaggaaggtggggatgacgtcaagtcctcatggcccttacaggctgggctacacacgtgctacaatggcggtgacaatgggacgcaaaggggtgacccctagcaaatctcaaaaagccgtctcagttcagattgtactctgcaactcgagtacatgaaggtggaatcgctagtaatcgtagatcagaacgctacggtgaatacgttcccgggccttgtacacaccgcccgtcacaccatgggagttggttctacccgaaggcgttttcttaaccgcaaggagagagacgacc

SEQ ID NO: 2108 - DNA, 1450 bp, Methylovulum miyakonense
  source 1..1450: mol_type = unassigned DNA
attgaacgctggcggtatgcttaacacatgcaagtcgggcgagtagccttcgggcgagagcggcggacgggtgagtaacgcataggaacctgccccgtagtgggggacaacgtggggaaacccacgctaataccgcatacgccccaagggggaaagcgggggaccttcgggcctcgcgctatgggatgggcctatgttggattagctagttggtggggtaaaggcctaccaaggcgacgatccatagctggtctgagaggatgatcagccacactgggactgagacacggcccagactcctacgggaggcagcagtggggaatattggacaatgggcgcaagcctgatccagcaataccgcgtgtgtgaagaaggcctgagggttgtaaagcacttttaatggggaggaacccctgccggcgaacacccggcagactgacattacccatagaaaaagcaccggctaactccgtgccagcagccgcggtaatacggagggtgcaagcgttaatcggaattactgggcgtaaagcgtgcgtaggcggcccgtcaagtcagatgtgaaagccccgggctcaacctgggaacggcatttgaaactggcgggctagagtttgggagaggtaagtggaatttcaggtgtagcggtgaaatgcgtagagatctgaaggaacaccagtggcgaaggcgacttactggcccaaaactgacgctgaggtacgaaagcgtgggtagcaaacaggattagataccctggtagtccacgccgtaaacgatgccgactagccgttggccccaattatggggtaagtggcgcagctaacgcgataagtcggccgcctggggagtacggccgcaaggttaaaactcaaatgaattgacgggggcccgcacaagcggtggagcatgtggtttaattcgatgcaacgcgaagaaccttacctacccttgacatccagtggattcggcagagatgccttagtgccttcgggaacactgagacaggtgctgcatggctgtcgtcagctcgtgtcgtgagatgttgggttaagtcccgtaacgagcgcaacccttatccttagttgccagcgggtcatgccgggaactctagggagactgccggtgataaaccggaggaaggtggggacgacgtcaagtcatcatggcccttatgggtagggctacacacgtgctacaatggccggtacagagggctgcgaacccgcaagggtaagccaatcccacaaagccggtcctagtccggatcggggtctgcaactcgaccccgtgaagtcggaatcgctagtaatcgcggatcagaatgccgcggtgaatacgttcccgggccttgtacacaccgcccgtcacaccatgggagcgggctgcaaaagaagcaggtagtctaaccttcgggggggcgcttgccactttgtggttcgtgactggggtg

SEQ ID NO: 2109 - DNA, 1454 bp, unidentified
  source 1..1454: mol_type = unassigned DNA; note = Methylovulum psychrotolerans
attgaacgctggcggtatgcttaacacatgcaagtcggacgagtagttgcttcggcaatgagagtggcggacgggtgagtaacgcataggaatctgccctgtagtgggggataacgtggggaaacccacgctaataccgcatacgccccaagggggaaagcgggggactttcgggcctcgcgctataggatgagcctatgttggattagctagttggtggggtagaggcctaccaaggcgacgatccatagctggtctgagaggatgatcagccacactgggactgagacacggctcagactcctacgggaggcagcagtggggaatattggacaatgggcgcaagcctgatccagcaataccgcgtgtgtgaagaaggcctgagggttgtaaagcacttttaatggggaggaactcctgccggcgaatacccggcagactgacattacccatagaaaaagcaccggctaactccgtgccagcagccgcggtaatacggagggtgcaagcgttaatcggaattactgggcgtaaagcgtgcgtaggcggcccgttaagtcagatgtgaaagccccgggctcaacctgggaacggcatttgaaactggcgggctagagttaggtagaggggagtggaatttcaggtgtagcggtgaaatgcgtagagatctgaaggaacaccagtggcgaaggcgactccctggacccaaactgacgctgaggtacgaaagcgtgggtagcaaacaggattagataccctggtagtccacgccgtaaacgatgtcaactagccgttggccccaattatggggtaagtggcgaagctaacgcgataagttgaccgcctggggagtacggccgcaaggttaaaactcaaatgaattgacgggggcccgcacaagcggtggagcatgtggtttaattcgatgcaacgcgaagaaccttacctacccttgacatcctaagaaccctgcggagacgcgggggtgccttcgggaacttagagacaggtgctgcatggctgtcgtcagctcgtgttgtgaaatgttgggttaagtcccgtaacgagcgcaacccttatccttagttgccagcgggtcatgccgggaactctagggagactgccggtgataaaccggaggaaggtggggacgacgtcaagtcatcatggcccttatgggtagggctacacacgtgctacaatggccggtacagagggctgcgaacttgcgaaagtgagccaatcccagaaagccggtcttagtccggattgcagtctgcaactcgactgcatgaagtcggaatcgctagtaatcgcggatcagaatgtcgcggtgaatacgttcccgggccttgtacacaccgcccgtcacaccatgggagtgggttgcaaaagaagtcggtagtctaaccttcgggggggcgctgaccactttgtgattcatgactggggtg

SEQ ID NO: 2110 - DNA, 1456 bp, Microbulbifer agarilyticus
  source 1..1456: mol_type = unassigned DNA
attgaacgctggcggcaggcctaacacatgcaagtcgagcgcgaaagttcttcggaacaagtagagcggcggacgggtgagtaatgcataggaatctgcccagtagtgggggatagcccggggaaacccggattaataccgcatacgtcctacgggagaaagcaggggatcttcggaccttgtgctactggatgagcctatgtcggattagcttgttggtggggtaacggcccaccaaggcgacgatccgtagctggtctgagaggatgatcagccacactggaactgagacacggtccagactcctacgggaggcagcagtggggaatattgcacaatgggggaaaccctgatgcagccatgccgcgtgtgtgaagaaggccttcgggttgtaaagcactttcagtagggaggaaggccctaaagttaatacctttagggattgacgttacctacagaagaagcaccggctaactccgtgccagcagccgcggtaatacggagggtgcgagcgttaatcggaattactgggcgtaaagcgcgcgtaggcggttagttaagctggatgtgaaagccctgggctcaacctgggaactgcattcagaactggctggctagagtacgagagagggtagtggaatttcctgtgtagcggtgaaatgcgtagatataggaaggaacatcagtggcgaaggcgactgcctggctcgatactgacgctgaggtgcgaaagcgtggggagcaaacaggattagataccctggtagtccacgccgtaaacgatgtctactagtcgtagggttccttgaggactttgtgacgcagctaacgcaataagtagaccgcctggggagtacggccgcaaggttaaaactcaaatgaattgacgggggcccgcacaagcggtggagcatgtggtttaattcgaagcaacgcgaagaaccttaccagggcttgacatccagagaactttctagagatagattggtgccttcgggaactctgtgacaggtgctgcatggctgtcgtcagctcgtgtcgtgagatgttgggttaagtcccgtaacgagcgcaacccttgtcctttgttgccaacacgtaatggtgggaactcaaaggagactgccggtgacaaaccggaggaaggtggggacgacgtcaagtcatcatggcccttacgtcctgggctacacacgtgctacaatggcaggtacagacggtcgctaagccgcgaggtggagctaatccgagaaaacctgtcgtagtccggattggagtctgcaactcgactccatgaagtcggaatcgctagtaatcgtgaatcagaatgtcacggtgaatacgttcccgggccttgtacacaccgcccgtcacaccatgggagtgggttgctccagaagtggctagtctaaccttcggggggacggtcaccacggagtgattcatgactggggtg

SEQ ID NO: 2111 - DNA, 1458 bp, unidentified
  source 1..1458: mol_type = unassigned DNA; note = Microbulbifer aggregans
attgaacgctggcggcaggcctaacacatgcaagtcgagcgcgaaagttccttcgggaacgagtagagcggcggacgggtgagtaacgcgtgggaaattgcccagtagtgggggacaacaaccggaaacggttgctaataccgcatacgccctacgggggaaagcgggggatcttcggacctcgtgctattggagatgcccgcgtcggattagcttgttggtgaggtaacggctcaccaaggcaacgatccgtagctggtctgagaggatgatcagccacactgggactgagacacggcccagactcctacgggaggcagcagtggggaatattggacaatgggggcaaccctgatccagccatgccgcgtgtgtgaagaaggccttcgggttgtaaagcactttcagtagggaggaaggccctaaagttaatacctttagggattgacgttacctacagaagaagcaccggctaactccgtgccagcagccgcggtaatacggagggtgcaagcgttaatcggaattactgggcgtaaagcgcgcgtaggcggttagttaagctggatgtgaaagccccgggctcaacctgggaactgcattcagaactggctagctagagtacgagagagggtagtggaatttcctgtgtagcggtgaaatgcgtagatataggaaggaacatcagtggcgaaggcgactgcctggctcgatactgacgctgaggtgcgaaagcgtggggagcaaacaggattagataccctggtagtccacgccgtaaacgatgtctactagccgtagggttccttgaggactttgtggcgcagctaacgcaataagtagaccgcctggggagtacggccgcaaggttaaaactcaaatgaattgacgggggcccgcacaagcggtggagcatgtggtttaattcgaagcaacgcgaagaaccttaccagggcttgacatccagagaactttctagagatagattggtgccttcgggaactctgtgacaggtgctgcatggctgtcgtcagctcgtgtcgtgagatgttgggttaagtcccgtaacgagcgcaacccttgtcctttgttgccagcacgtaatggtgggaactcaaaggagactgccggtgacaaaccggaggaaggtggggacgacgtcaagtcatcatggcccttacgtcctgggctacacacgtgctacaatggcaggtacagacggttgcgagaccgcgaggtggagctaatccgataaaacctgtcgtagtccggatcggagtctgcaactcgactccgtgaagtcggaatcgctagtaatcgtgaatcagaatgtcacggtgaatacgttcccgggccttgtacacaccgcccgtcacaccatgggagtgggttgctccagaagtggctagtctaacctttgggaggacggtcaccacggagtgattcatgactggggtg

SEQ ID NO: 2112 - DNA, 1416 bp, Microbulbifer donghaiensis
  source 1..1416: mol_type = unassigned DNA
acacatgcaagtcgagcgcgaaagttccttcgggaatgagtagagcggcggacgggtgagtaacgcgtgggaaattgcccagtagtgggggacaacattcggaaacggatgctaataccgcatacgccctacgggggaaagcgggggatcttcggacctcgtgctattggatatgcccgcgtcggattagctagttggtgaggtaatggctcaccaaggcgacgatccgtagctggtctgagaggatgatcagccacactgggactgagacacggcccagactcctacgggaggcagcagtggggaatattggacaatgggggcaaccctgatccagccatgccgcgtgtgtgaagaaggccttcgggttgtaaagcactttcagcagggaggaaggcttgtagattaatactctgcaagattgacgttacctgcagaagaagcaccggctaactccgtgccagcagccgcggtaatacggagggtgcaagcgttaatcggaattactgggcgtaaagcgcgcgtaggcggttatttaagctggatgtgaaagccccgggcttaacctgggaactgcattcagaactggatggctagagtacgagagagggtagtggaatttcctgtgtagcggtgaaatgcgtagatataggaaggaacatcagtggcgaaggcgactgcctggctcgatactgacgctgaggtgcgaaagcgtggggagcaaacaggattagataccctggtagtccacgccgtaaacgatgtctactagtcgtagggttccttgaggactttgtgacgcagctaacgcaataagtagaccgcctggggagtacggccgcaaggttaaaactcaaatgaattgacgggggcccgcacaagcggtggagcatgtggtttaattcgaagcaacgcgaagaaccttaccagggcttgacatcctcagaactttccagagatggattggtgccttcgggaactgagtgacaggtgctgcatggctgtcgtcagctcgtgtcgtgagatgttgggttaagtcccgtaacgagcgcaacccttgtcctttgttgccaacacgtaatggtgggaactcaaaggagactgccggtgacaaaccggaggaaggtggggacgacgtcaagtcatcatggcccttacgtcctgggctacacacgtgctacaatggttggtacagacggttgcgaatccgcgaggtggagctaatccgagaaaaccaatcgtagtccggatcggagtctgcaactcgactccgtgaagtcggaatcgctagtaatcgtgaatcagaatgtcacggtgaatacgttcccgggccttgtacacaccgcccgtcacaccatgggagtgggttgctccagaagtggctagtctaaccttcggggggacggtcaccacgga

SEQ ID NO: 2113 - DNA, 1458 bp, Microbulbifer marinus
  source 1..1458: mol_type = unassigned DNA
attgaacgctggcggcaggcctaacacatgcaagtcgagcgcgaaagttccttcgggagcgagtagagcggcggacgggtgagtaacgcgtgggaaattgcccagtagtgggggacaactcgaggaaactcgagctaataccgcatacgccctacgggggaaagcgggggatcttcggacctcgtgctattggatatgcccgcgtcggattagcttgttggtgaggtaacggctcaccaaggcgacgatccgtagctggtctgagaggatgatcagccacactgggactgagacacggcccagactcctacgggaggcagcagtggggaatattggacaatgggggcaaccctgatccagccatgccgcgtgtgtgaagaaggccttcgggttgtaaagcactttcagcagggaggaaggccttaagattaatactcttaaggattgacgttacctgcagaagaagcaccggctaactccgtgccagcagccgcggtaatacggagggtgcaagcgttaatcggaattactgggcgtaaagcgcgcgtaggcggttagttaagctggatgtgaaagccctgggctcaacctgggaactgcattcagaactggctggctagagtacgagagagggtagtggaatttcctgtgtagcggtgaaatgcgtagatataggaaggaacatcagtggcgaaggcgactgcctggctcgatactgacgctgaggtgcgaaagcgtggggagcaaacaggattagataccctggtagtccacgccgtaaacgatgtctactagtcgtagggttccttgaggactttgtgacgcagctaacgcaataagtagaccgcctggggagtacggccgcaaggttaaaactcaaatgaattgacgggggcccgcacaagcggtggagcatgtggtttaattcgaagcaacgcgaagaaccttaccagggcttgacatcctcagaactttccagagatggattggtgccttcgggaactgagtgacaggtgctgcatggctgtcgtcagctcgtgtcgtgagatgttgggttaagtcccgtaacgagcgcaacccttgtccctagttgctagcaggtaatgctgagaactctagggagactgccggtgacaaaccggaggaaggtggggacgacgtcaagtcatcatggcccttacgtcctgggctacacacgtgctacaatggttggtacagacggtcgctaagccgcgaggtggagctaatccgaaaaaaccaatcgtagtccggatcggagtctgcaactcgactccgtgaagtcggaatcgctagtaatcgtgaatcagaatgtcacggtgaatacgttcccgggccttgtacacaccgcccgtcacaccatgggagtgggttgctccagaagtggctagtctaaccttcgggaggacggtcaccacggagtgattcatgactggggtg

SEQ ID NO: 2114 - DNA, 1457 bp, Microbulbifer thermotolerans
  source 1..1457: mol_type = unassigned DNA
attgaacgctggcggcaggcctaacacatgcaagtcgagcgcgaaagttccttcgggaataagtagagcggcggacgggtgagtaacgcgtgggaaattgcccagtagtgggggacaactcggggaaactcgagctaataccgcatacgccctacgggggaaagcgggggatcttcggacctcgcgctattggatatgcccgcgtcggattagctagttggtgaggtaaaggctcaccaaggcgacgatccgtagctggtctgagaggatgatcagccacactgggactgagacacggcccagactcctacgggaggcagcagtggggaatattggacaatgggcgcaagcctgatccagccatgccgcgtgtgtgaagaaggccctagggttgtaaagcactttcagtcgggaggaaggcctaatggttaatacccattaggattgacgttaccgacagaagaagcaccggctaactccgtgccagcagccgcggtaatacggagggtgcgagcgttaatcggaattactgggcgtaaagcgcgcgtaggcggttagttaagctggatgtgaaagccccgggctcaacctgggaactgcattcagaactggctggctagagtacgagagagggtagtggaatttcctgtgtagcggtgaaatgcgtagatataggaaggaacaccagtggcgaaggcgactgcctggctcgatactgacgctgaggtgcgaaagcgtggggagcaaacaggattagataccctggtagtccacgccgtaaacgatgtctactagtcgtagggctccttgagggctttgtgacgcagctaacgcaataagtagaccgcctggggagtacggccgcaaggttaaaactcaaatgaattgacgggggcccgcacaagcggtggagcatgtggtttaattcgaagcaacgcgaagaaccttaccagggcttgacatcctcggaactttccagagatggattggtgccttcgggaaccgagtgacaggtgctgcatggctgtcgtcagctcgtgtcgtgagatgttgggttaagtcccgtaacgagcgcaacccttgtccctagttgccagcactttgggtgggaactctagggagactgccggtgacaaaccggaggaaggtggggacgacgtcaagtcatcatggcccttacgtcctgggctacacacgtgctacaatggctggtacagacggttgcgagaccgcgaggtggagctaatccgagaaaaccagtcgtagtccggatcggagtctgcaactcgactccgtgaagtcggaatcgctagtaatcgcgaatcagaatgtcgcggtgaatacgttcccgggccttgtacacaccgcccgtcacaccatgggagtgggttgctccagaagtggctagtctaaccttcggggggacggtcaccacggagtgattcatgactggggtg

SEQ ID NO: 2115 - DNA, 1456 bp, Microbulbifer variabilis
  source 1..1456: mol_type = unassigned DNA
attgaacgctggcggcaggcctaacacatgcaagtcgagcgcgaaagttcttcggaatgagtagagcggcggacgggtgagtaacgcgtgggaaattgcccagtagtgggggacaacattcggaaacggatgctaataccgcatacgccctacgggggaaagcaggggatcttcggaccttgtgctattggatatgcccgcgtcggattagctagttggtgaggtaatggctcaccaaggcaacgatccgtagctggtctgagaggatgatcagccacactgggactgagacacggcccagactcctacgggaggcagcagtggggaatattggacaatgggcgcaagcctgatccagccatgccgcgtgtgtgaagaaggctctagggttgtaaagcactttcagtagggaggaaggccttaaagttaatacctttgaggattgacgttacctacagaagaagcaccggctaactccgtgccagcagccgcggtaatacggagggtgcgagcgttaatcggaattactgggcgtaaagcgcgcgtaggcggttagttaagctggatgtgaaagccccgggctcaacctgggaactgcattcagaactggctggctagagtacgagagagggtagtggaatttcctgtgtagcggtgaaatgcgtagatataggaaggaacatcagtggcgaaggcgactgcctggctcgatactgacgctgaggtgcgaaagcgtggggagcaaacaggattagataccctggtagtccacgccgtaaacgatgtctactagtcgtagggttccttgaggactttgtgacgcagctaacgcaataagtagaccgcctggggagtacggccgcaaggttaaaactcaaatgaattgacgggggcccgcacaagcggtggagcatgtggtttaattcgaagcaacgcgaagaaccttaccagggcttgacatcctcggaagtctgcagagatgcggatgtgccttcgggaaccgagtgacaggtgctgcatggctgtcgtcagctcgtgtcgtgagatgttgggttaagtcccgtaacgagcgcaacccttgtccttagttgccagcacgtaatggtgggaactctagggagactgccggtgacaaaccggaggaaggtggggacgacgtcaagtcatcatgggccttacgtcctgggctacacacgtgctacaatggttggtacagacggtcgctaagccgcgaggtggagctaatccgaaaaaaccaatcgtagtccggattggagtctgcaactcgactccatgaagtcggaatcgctagtaatcgtgaatcagaatgtcacggtgaatacgttcccgggccttgtacacaccgcccgtcacaccatgggagtgggttgctccagaagtggctagtctaaccttcggggggacggtcaccacggagtgattcatgactggggtg

SEQ ID NO: 2116 - DNA, 1458 bp, Microbulbifer yueqingensis
  source 1..1458: mol_type = unassigned DNA
attgaacgctggcggcaggcctaacacatgcaagtcgagcgcgaaagttccttcgggaacgagtagagcggcggacgggtgagtaacgcataggaatctgcccagtagtgggggatagcccggggaaacccggattaataccgcatacgccctacgggggaaagcaggggatcttcggaccttgcgctattggatgagcctatgtcggattagcttgttggtggggtaacggcccaccaaggcgacgatccgtagctggtctgagaggatgatcagccacactgggactgagacacggcccagactcctacgggaggcagcagtggggaatattggacaatgggggcaaccctgatccagccatgccgcgtgtgtgaagaaggccttcgggttgtaaagcactttcagcagggaggaaggcctgacggttaatacccgtcaggattgacgttacctgcagaagaagcaccggctaactccgtgccagcagccgcggtaatacggagggtgcaagcgttaatcggaattactgggcgtaaagcgcgcgtaggcggttagttaagctggatgtgaaagcccagggctcaaccttggaactgcattcagaactggctagctagagtacgagagagggtagtggaatttcctgtgtagcggtgaaatgcgtagatataggaaggaacaccagtggcgaaggcgactgcctggctcgatactgacgctgaggtgcgaaagcgtggggagcaaacaggattagataccctggtagtccacgccgtaaacgatgtctactagccgtagggttccttgaggactttgtggcgcagctaacgcaataagtagaccgcctggggagtacggccgcaaggttaaaactcaaatgaattgacgggggcccgcacaagcggtggagcatgtggtttaattcgaagcaacgcgaagaaccttaccagggcttgacatcctcggaactttctagagatagattggtgccttcgggaaccgagtgacaggtgctgcatggctgtcgtcagctcgtgtcgtgagatgttgggttaagtcccgtaacgagcgcaacccttgtcctttgttgccagcacgtaatggtgggaactcaaaggagactgccggtgacaaaccggaggaaggtggggacgacgtcaagtcatcatggcccttacgtcctgggctacacacgtgctacaatggttggtacagacggtcgctaagccgcgaggtggagctaatccgagaaaaccaatcgtagtccggatcggagtctgcaactcgactccgtgaagtcggaatcgctagtaatcgtgaatcagaatgtcacggtgaatacgttcccgggccttgtacacaccgcccgtcacaccatgggagtgggttgctccagaagtggctagtctaaccttcgggaggacggtcaccacggagtgattcatgactggggtg

SEQ ID NO: 2117 - DNA, 1410 bp, Microcoleus chthonoplastes
  source 1..1410: mol_type = unassigned DNA
gatgaacgctggcggtctgcttaacacatgcaagtcgaacgcaaccttcgggttgagtggcggacgggtgagtaacgcgtgagaatctgccttggggtcggggacaaccactggaaacggtggctaataccggataagccttcgggtaaaagatttattgccccaagaggagctcgcgtctgattagctagttggtgaggtaagagctcaccaaggcagcgatcagtagctggtctgagaggacgatcagccacactgggactgagacacggcccagactcctacgggaggcagcagtggggaattttccgcaatgggcgaaagcctgacggagcaagaccgcgtgagggaggaaggctcttgggttgtaaacctcttttctcagggaagaagctctgacggtacctgaggaatcagcctcggctaactccgtgccagcagccgcggtaatacggaggaggcaagcgttatccggaattattgggcgtaaagcgtccgcaggtggcgattcaagtctgctgtcaaagcacggggcttaactccgttaaggcagtggaaactgaatagctagagtgccgtaggggtagagggaattcccggtgtagcggtgaaatgcgtagagatcgggaagaacatcggtggcgaaagcgctctactggacggcaactgacactcagggacgaaagctaggggagcgaatgggattagataccccagtagtcctagctgtaaacgatggatactaggtgtagcttgtatcgacccgagctgtgccgaagctaacgcgttaagtatcccgcctggggagtacgcacgcaagtgtgaaactcaaaggaattgacgggggcccgcacaagcggtggagtatgtggtttaattcgatgcaacgcgaagaaccttaccagggcttgacatgtccggaaccccggtgaaagctgggggtgccttcgggagccggaacacaggtggtgcatggctgtcgtcagctcgtgtcgtgagatgttgggttaagtcccgcaacgagcgcaaccctcgtctttagttgccagcattaagttgggcactctagagagactgccggtgacaaaccggaggaaggtggggatgacgtcaagtcagcatgccccttacgctctgggcgacacacgtactacaatggtcgggacagagggcagctaacctgcgaaggcaagctaatcccagaaactcggcctcagttcagatcgcaggctgcaactcgcctgcgtgaaggaggaatcgctagtaatcgccggtcagaatacggcggtgaatccgttcccgggccttgtacacaccgcccgtcacaccatggaagctggccacgcccgaagtcgttaccctaaccctccggggagggggacgccgaaggcagggttggtgactggggtg

SEQ ID NO: 2118 - DNA, 1422 bp, Microcoleus vaginatus
  source 1..1422: mol_type = unassigned DNA
gatgaacgctggcggtctgcttaacacatgcaagtcgaacggagtagaaatacttagtggcggacgggtgagtaacgcgtgagaatctgccttcaggacggagacaacagttggaaacgactgctaagccccgatgaaccgaaagggaaaatatttatagcctgaagatgagctcgcgtccgattagctagttggcggggtaaaagcccaccaaggcgacgatcggtagctggtctgagaggacgatcagccacactgggactgagacacggcccagactcctacgggaggcagcagtggggaattttccgcaatgggcgaaagcctgacggagcaagaccgcgtgggggaagaaggctcttgggttgtaaaccccttttctctgggaagaaagttgtgaaagcaacctgacggtaccagaggaatcagcatcggctaactccgtgccagcagccgcggtaagacggaggatgcaagcgttatccggaatgattgggcgtaaagcgtccgcaggtggcagttcaagtctgctgtcaaagaccggggcttaacttcggaaaggcagtggaaactgaacagctagagtatggtaggggcagagggaattcctggtgtagcggtgaaatgcgtagagatcaggaagaacatcggtggcgaaggcgctctgctggaccataactgacactcagggacgaaagctaggggagcgaatgggattagataccccagtagtcctagccgtaaacgatggatactaggtgttgtctgtatcgacccggacagtgccgtagctaacgcgttaagtatcccgcctggggagtacgcacgcaagtgtgaaactcaaaggaattgacgggggcccgcacaagcggtggagtatgtggtttaattcgatgcaacgcgaagaaccttaccaggacttgacatgtcgcgaatcctttggaaacagaggagtgccttcgggagcgcgaacacaggtggtgcatggctgtcgtcagctcgtgtcgtgagatgttgggttaagtcccgcaacgagcgcaaccctcgtgtttagttgccatcattaagttgggcactctaaacagactgccggtgacaaaccggaggaaggtggggatgacgtcaagtcagcatgccccttacgtcctgggctacacacgtactacaatggtagggacagagggcagccaacccgcgagggcgagctaatcccgtaaaccctgcctcagttcagattgcaggctgcaactcgcctgcatgaaggcggaatcgctagtaatcgcaggtcagcatactgcggtgaatccgttcccgggccttgtacacaccgcccgtcacaccatggaagttggccacgcccgaagtcattactctaacctttcgaggaggaggatgccgaaggcagggctgatgactggggtg

SEQ ID NO: 2119 - DNA, 1411 bp, Microcystis aeruginosa
  source 1..1411: mol_type = unassigned DNA
gatgaacgctggcggcgtgcctaacacatgcaagtcgaacgggaatcttcggattccagtggcggacgggtgagtaacgcgtaagaatctaacttcaggacggggacaacagttggaaacgactgctaatacccgatgtgccgcgaggtgaaacctaattggcctgaagaagagcttgcgtctgattagctagttggtggggtaaaggcctaccaaggcgacgatcagtagctggtctgagaggatgagcagccacactgggactgagacacggcccagactcctacgggaggcagcagtggggaattttccgcaatgggcgaaagcctgacggagcaacgccgcgtgagggaggaaggtctttggattgtaaacctcttttctcaaggaagaagttctgacggtacttgaggaatcagcctcggctaactccgtgccagcagccgcggtaatacgggggaggcaagcgttatccggaattattgggcgtaaagcgtccgcaggtggtcagccaagtctgctgtcaaatcaggttgcttaacgacctaaaggcggtggaaactggcagactagagagcagtaggggtagcaggaattcccagtgtagcggtgaaatgcgtagagattgggaagaacatcggtggcgaaagcgtgctactgggctgtatctgacactcagggacgaaagctaggggagcgaaagggattagatacccctgtagtcctagccgtaaacgatggatactaggcgtggcttgtatcgacccgagccgtgccgaagctaacgcgttaagtatcccgcctggggagtacgcacgcaagtgtgaaactcaaaggaattgacgggggcccgcacaagcggtggagtatgtggtttaattcgatgcaacgcgaagaaccttaccaagacttgacatgtcgcgaaccctggtgaaagctgggggtgccttcgggagcgcgaacacaggtggtgcatggctgtcgtcagctcgtgtcgtgagatgttgggttaagtcccgcaacgagcgcaaccctcgttcttagttgccagcattaagttggggactctaaggagactgccggtgacaaaccggaggaaggtggggatgacgtcaagtcagcatgccccttacgtcttgggcgacacacgtactacaatggtcgggacaaagggcagcgaactcgcgagagccagcgaatcccagcaaacccggcctcagttcagattgcaggctgcaactcgcctgcatgaaggaggaatcgctagtaatcgccggtcagcatacggcggtgaattcgttcccgggccttgtacacaccgcccgtcacaccatggaagctggtcacgcccgaagtcattacctcaaccgcaaggagggggatgcctaaggcagggctagtgactggggtg

SEQ ID NO: 2120 - DNA, 1406 bp, Microcystis flosaquae
  source 1..1406: mol_type = unassigned DNA
acgctggcggcgtgcctaacacatgcaagtcgaacgggaatcttcggattctagtggcggacgggtgagtaacgcgtaagaatctaacttcaggacggggacaacagttggaaacgactgctaatacccgatgtgccgcaaggtgaaaactaattggcctgaagaagagcttgcgtctgattagctagttggtggggtaagagcctaccaaggcgacgatcagtagctggtctgagaggatgagcagccacactgggactgagacacggcccagactcctacgggaggcagcagtggggaattttccgcaatgggcgaaagcctgacggagcaacgccgcgtgagggaggaaggtctttggattgtaaacctcttttctcaaggaagaagttctgacggtacttgaggaatcagcctcggctaactccgtgccagcagccgcggtaatacgggggaggcaagcgttatccggaattattgggcgtaaagcgtccgcaggtggtcagccaagtctgctgtcaaatcaggttgcttaacgacctaaaggcggtggaaactggcagactagagagcagtaggggtagcaggaattcccagtgtagcggtgaaatgcgtagagattgggaagaacatcggtggcgaaagcgtgctactgggctgtatctgacactcagggacgaaagctaggggagcgaaagggattagatacccctgtagtcctagccgtaaacgatggatactaggcgtggcttgtatcgacccgagccgtgccgaagctaacgcgttaagtatcccgcctggggagtacgcacgcaagtgtgaaactcaaaggaattgacgggggcccgcacaagcggtggagtatgtggtttaattcgatgcaacgcgaagaaccttaccaagacttgacatgtcgcgaaccctggtgaaagctaggggtgccttcgggagcgcgaacacaggtggtgcatggctgtcgtcagctcgtgtcgtgagatgttgggttaagtcccgcaacgagcgcaaccctcgttcttagttgccagcattaagttggggactctaaggagactgccggtgacaaaccggaggaaggtggggatgacgtcaagtcagcatgccccttacgtcttgggcgacacacgtactacaatggtcgggacaaagggcagcgaactcgcgagagccagcgaatcccagcaaacccggcctcagttcagattgcaggctgcaactcgcctgcatgaaggaggaatcgctagtaatcgccggtcagcatacggcggtgaattcgttcccgggccttgtacacaccgcccgtcacaccatggaagctggtcacgcccgaagtcattacctcaaccgcaaggagggggatgcctaaggcagggctagtgactggggtg

SEQ ID NO: 2121 - DNA, 1406 bp, unidentified
  source 1..1406: mol_type = unassigned DNA; note = Microcystis novacekii
acgctggcggcgtgcctaacacatgcaagtcgaacgggaatcttcggattctagtggcggacgggtgagtaacgcgtaagaatctaacttcaggacggggacaacagttggaaacgactgctaatacccgatatgccgcgaggtgaaacctaattggcctgaagaagagcttgcgtctgattagctagttggtggggtaaaagcctaccaaggcgacgatcagtagctggtctgagaggatgagcagccacactgggactgagacacggcccagactcctacgggaggcagcagtggggaattttccgcaatgggcgaaagcctgacggagcaacgccgcgtgagggaggaaggtctttggattgtaaacctcttttctcaaggaagaagttctgacggtacttgaggaatcagcctcggctaactccgtgccagcagccgcggtaatacgggggaggcaagcgttatccggaattattgggcgtaaagcgtccgcaggtggtcagccaagtctgctgtcaaatcaggttgcttaacgacctaaaggcggtggaaactggcagactagagagcagtaggggtagcaggaattcccagtgtagcggtgaaatgcgtagagattgggaagaacatcggtggcgaaagcgtgctactgggctgtatctgacactcagggacgaaagctaggggagcgaaagggattagatacccctgtagtcctagccgtaaacgatggatactaggcgtggcttgtatcgacccgagccgtgccgaagctaacgcgttaagtatcccgcctggggagtacgcacgcaagtgtgaaactcaaaggaattgacgggggcccgcacaagcggtggagtatgtggtttaattcgatgcaacgcgaagaaccttaccaagacttgacatgtcgcgaaccctggtgaaagctgggggtgccttcgggagcgcgaacacaggtggtgcatggctgtcgtcagctcgtgtcgtgagatgttgggttaagtcccgcaacgagcgcaaccctcgttcttagttgccagcattaagttggggactctaaggagactgccggtgacaaaccggaggaaggtggggatgacgtcaagtcagcatgccccttacgtcttgggcgacacacgtactacaatggtcgggacaaagggcagcgaactcgcgagagccagcgaatcccagcaaacccggcctcagttcagattgcaggctgcaactcgcctgcatgaaggaggaatcgctagtaatcgccggtcagcatacggcggtgaattcgttcccgggccttgtacacaccgcccgtcacaccatggaagctggtcacgcccgaagtcattacctcaaccgcaaggagggggatgcctaaggcagggctagtgactggggtg

SEQ ID NO: 2122 - DNA, 1411 bp, unidentified
  source 1..1411: mol_type = unassigned DNA; note = Microcystis panniformis
gatgaacgctggcggcgtgcctaacacatgcaagtcgaacgggaatcttcggattctagtggcggacgggtgagtaacgcgtaagaatctaacttcaggacggggacaacagttggaaacgactgctaatacccgatgtgccgcaaggtgaaacctaattggcctggagaagagcttgcgtctgattagctagttggtggggtaagagcctaccaaggcgacgatcagtagctggtctgagaggatgagcagccacactgggactgagacacggcccagactcctacgggaggcagcagtggggaattttccgcaatgggcgaaagcctgacggagcaacgccgcgtgagggaggaaggtctttggattgtaaacctcttttctcaaggaagaagttctgacggtacttgaggaatcagcctcggctaactccgtgccagcagccgcggtaatacgggggaggcaagcgttatccggaattattgggcgtaaagcgtccgcaggtggtcagccaagtctgccgtcaaatcaggttgcttaacgacctaaaggcggtggaaactggcagactagagagcagtaggggtagcaggaattcccagtgtagcggtgaaatgcgtagagattgggaagaacatcggtggcgaaagcgtgctactgggctgtatctgacactcagggacgaaagctaggggagcgaaagggattagatacccctgtagtcctagccgtaaacgatggatactaggcgtggcttgtatcgacccgagccgtgccgaagctaacgcgttaagtatcccgcctggggagtacgcacgcaagtgtgaaactcaaaggaattgacgggggcccgcacaagcggtggagtatgtggtttaattcgatgcaacgcgaagaaccttaccaagacttgacatgtcgcgaaccctggtgaaagctgggggtgccttcgggagcgcgaacacaggtggtgcatggctgtcgtcagctcgtgtcgtgagatgttgggttaagtcccgcaacgagcgcaaccctcgttcttagttgccagcattaagttggggactctaaggagactgccggtgacaaaccggaggaaggtggggatgacgtcaagtcagcatgccccttacgtcttgggcgacacacgtactacaatggtcgggacaaagggcagcgaactcgcgagagccagcgaatcccagcaaacccggcctcagttcagattgcaggctgcaactcgcctgcatgaaggaggaatcgctagtaatcgccggtcagcatacggcggtgaattcgttcccgggccttgtacacaccgcccgtcacaccatggaagctggtcacgcccgaagtcattacctcaaccgcaaggagggggatgcctaaggcagggctagtgactggggtg

SEQ ID NO: 2123 - DNA, 1395 bp, unidentified
  source 1..1395: mol_type = unassigned DNA; note = Microcystis viridis
gcgtcctaacacatgcaagtcgaacgggaatcttcggattccagtggcggacgggtgagtaaggggtaagaatctaacttcaggacggggacaacagttggaaacgactgctaatacccgatgtgccgcgaggtgaaacctaattggcctgaagaagagcttgcgtctgattagctagttggtggggtaaaggcctaccaaggcgacgatcagtagctggtctgagaggatgagcagccacactgggactgagacacggcccagactcctacgggaggcagcagtggggaattttccgcaatgggcgaaagcctgacggagcaacgccgcgtgagggaggaaggtctttggattgtaaacctcttttctcaaggaagaagttctgacggtacttgaggaatcagccgcggctaactccgtgccagcagccgcggtaatacgggggaggcaaacgttatccggaattattggtgtaaagcgtccgcaggtggtcagccaagtctgctgtcaaatcaggttgcttaacgacctaaaggcggtggaaactggcagactagagagcagtaggggtagcagtaattcccagtgtagcggtgaaatgcgtagagattgggaagaacacggtggcgaaagcgtgctactgggctgtatctgacactcagggacgaaagctaggggagcgaaagggattagatacccctgtagtcctagccgtaaacgatggatactaggcgtggcttgtatcgacccgagccgtgccgaagctaacgcgttaagtatcccgcctggggagtacgcacgcaagtgtgaaactcaaaggaattgacgggggcccgcacaagcggtggagtatgtggtttaattcgatgcaacgcgaagaaccttaccaagacttgacatgtcgcgaaccctggtgaaagctgggggtgccttcgggagcgcgaacacaggtggtgcatggctgtcgtcagctcgtgtcgtgagatgttgggttaagtcccgcaacgagcgcaaccctcgttcttagttgccagcattaagttggggactctaaggagactgccggtgacaaactggaggaaggtggggatgacgtcaagtcagcatgccccttacgtcttgggcgacacacgtactacaatggtcgggacaaagggcagcgaactcgcgagagccagcgaatcccagcaaacccggcctcagttcagattgcaggctgcaactcgcctgcatgaaggaggaatcgctagtaatcgccggtcagcatacggcggtgaattcgttcccgggccttgtacacaccgcccgtcacaccatggaagctggtcacgcccgaagtcattacctcaaccgcaaggacgggggatgcctaaggcagggctagttactggtctg

SEQ ID NO: 2124 - DNA, 1394 bp, unidentified
  source 1..1394: mol_type = unassigned DNA; note = Microcystis wesenbergii
gcgtgcctaacacatgcaagtcgaacgggaatcttcggattccagtgacggacgggtgagtaacccgtaagaatctaacttcaggacggggacaacagttggaacgactgctcatacccgatgtgccgcaaggtgaaacctaattggcctgaagaagagcttgcgtctgattagctagttggtggggtaagagcctaccaaggcgtcgatcagtagctggtctgagaggatgagcagccacactgggactgagacacggcccagactcctacgggaggcagcagtggggaattttccgcaatgggcgaaagcctgacggagcaacgccgcgtgagggaggaaggtctttggattgtaaacctcttttctcaaggaagaagttctgacggtacttgaggaatcagcctcggctaactccgtgccagcagccgcggtaatacgggggaggcaagcgttatccggaattattgggcgtaaagcgtccgcaggtggtcagccaagtctgctgtcaaatcaggttgcttaacgacctaaaggcggtggaaactggcagactagagagcagtaggggtagcaggaattcccagtgtacggtgaaatcgtagagattgggaagaacatcggtggcgaaagcgtgctactgggctgtatctgacactcagggacgaaagctaggggagcgaaagggattagatacccctgtagtcctagccgtaaacgatggatactaggcgtggcttgtatcgacccgagccgtgccgaatctaacgcgttaagtatcccgcctggggagtacgcacgcaagtgtgaaactcaaaggaattgacgggggcccgcacaagcggtggagtatgtggtttaattcgatgcaacgcgaagaaccttaccaagacttgacatgtcgggaaccctggtgaaaggtgggggtgccttcgggagcccgaacacagatggtgcatggctgtcgtcagctcgtgtcgtgagatgttgggttaagtcccgcaacgagcgcaaccctcgttcttagttgccagcattaagttggggactctaaggagactgccggtgacaaaccggaggaaggtggggatgacgtcaagtcagcatgccccttacgtcttgggcgacacacgtactacaatggtcgggacaaagggcagcgaactcgcgagagccagcgaatcccagcaaacccggcctcagttcagattgcaggctgcaactcgcctgcatgaaggaggaatcgctagtaatcgccggtcagcatacggcggtgaattcgttcccgggccttgtacacaccgcccgtcacaccatggaagctggtcacgcccgaagtcattacctcaaccgcaaggagggggatgactaaggcagagcttgtgactggggtg

SEQ ID NO: 2125 - DNA, 1409 bp, Microvirga aerophila
  source 1..1409: mol_type = unassigned DNA
aacgaacgctggcggcaggcttaacacatgcaagtcgaacgcccctttcggggggagtggcagacgggtgagtaacacgtgggaacgtacccttttgttcggaataacccagggaaacttgggctaataccggatacgcccttacggggaaagatttatcgcagaaggatcggcccgcgtctgattagctagttggtgaggtaaaggctcaccaaggcgacgatcagtagctggtctgagaggatgatcagccacactgggactgagacacggcccagactcctacgggaggcagcagtggggaatattggacaatgggcgcaagcctgatccagccatgccgcgtgagtgatgaaggccttagggttgtaaagctctttcggcggggacgataatgacggtacccgcagaagaagccccggctaacttcgtgccagcagccgcggtaatacgaagggggctagcgttgttcggaatcactgggcgtaaagggcgcgtaggcggctttgtaagtcgggggtgaaagcctgtggctcaaccacagaattgccttcgatactgcatggcttgagaccggaagaggtaagtggaactgcgagtgtagaggtgaaattcgtagatattcgcaagaacaccagtggcgaaggcggcttactggtccggttctgacgctgaggcgcgaaagcgtggggagcaaacaggattagataccctggtagtccacgccgtaaacgatgaatgccagccgttgggcagcttgctgttcagtggcgcagctaacgctttaagcattccgcctggggagtacggtcgcaagattaaaactcaaaggaattgacgggggcccgcacaagcggtggagcatgtggtttaattcgaagcaacgcgcagaaccttaccaacctttgacatgtccagtatgggctccagagatggggctcttcagttcggctggctggaacacaggtgctgcatggctgtcgtcagctcgtgtcgtgagatgttgggttaagtcccgcaacgagcgcaaccctcgcccttagttgccatcattcagttgggcactctaaggggactgccggtgataagccgcgaggaaggtggggatgacgtcaagtcctcatggcccttacaggttgggctacacacgtgctacaatggcggtgacaatgggcagcgaacccgcgagggggagctaatcccaaaaagccgtctcagttcggattgcactctgcaactcgagtgcatgaaggtggaatcgctagtaatcgtggatcagaacgccacggtgaatacgttcccgggccttgtacacaccgcccgtcacaccatgggagttggtcttacccgacggcgctgcgccaaccgcaaggaggcaggcgaccacggtagggtcagcgactggggtg

SEQ ID NO: 2126 - DNA, 1409 bp, Microvirga guangxiensis
  source 1..1409: mol_type = unassigned DNA
aacgaacgctggcggcaggcttaacacatgcaagtcgaacgggcccttcggggtcagtggcagacgggtgagtaacgcgtgggaacgtgcccttcagtttggaataacccagggaaacttgggctaataccggatacgccctaacggggaaagatttatcgctgaaggatcggcccgcgtctgattagctagttggtgaggtaatggctcaccaaggcgacgatcagtagctggtctgagaggatgatcagccacattgggactgagacacggcccaaactcctacgggaggcagcagtggggaatattggacaatgggcgcaagcctgatccagccatgccgcgtgagtgatgacggccttagggttgtaaagctctttcggcggggacgataatgacggtacccgcagaagaagccccggctaacttcgtgccagcagccgcggtaatacgaagggggctagcgttgttcggaatcactgggcgtaaagggcgcgtaggcggcttgataagtcgggggtgaaagcctgtggctcaaccacagaattgccttcgatactgtctggcttgagaccggaagaggtaagtggaactgcgagtgtagaggtgaaattcgtagatattcgcaagaacaccagtggcgaaggcggcttactggtccggttctgacgctgaggcgcgaaagcgtggggagcaaacaggattagataccctggtagtccacgccgtaaacgatgaatgccagccgttgggcagcttgctgctcagtggcgcagctaacgctttaagcattccgcctggggagtacggtcgcaagattaaaactcaaaggaattgacgggggcccgcacaagcggtggagcatgtggtttaattcgaagcaacgcgcagaaccttaccagcctttgacatgtcccgtgtgattgccagagatggctttcttcagttcggctggcgggaacacaggtgctgcatggctgtcgtcagctcgtgtcgtgagatgttgggttaagtcccgcaacgagcgcaaccctcgcccctagttgccatcattcagttgggcactctagggggactgccggtgataagccgagaggaaggtggggatgacgtcaagtcctcatggcccttacgggctgggctacacacgtgctacaatggcggtgacaatgggcagctaacccgcgagggtgcgctaatcccaaaaagccgtctcagttcggattgcactctgcaactcgagtgcatgaaggtggaatcgctagtaatcgtggatcagaacgccacggtgaatacgttcccgggccttgtacacaccgcccgtcacaccatgggagttggtcttacccgacggcgctgcgccaaccgcaaggaggcaggcgaccacggtagggtcagcgactggggtg

SEQ ID NO: 2127 - DNA, 1409 bp, unidentified
  source 1..1409: mol_type = unassigned DNA; note = Microvirga lotononidis
aacgaacgctggcggcaggcttaacacatgcaagtcgaacgggcccttcggggtcagtggcagacgggtgagtaacgcgtgggaacgtgcccttcagtttggaataacccagggaaacttgggctaataccggatacgcccgcaaggggaaagatttatcgctgaaggatcggcccgcgtctgattagctggttggtgaggtaatggctcaccaaggcgacgatcagtagctggtctgagaggatgatcagccacattgggactgagacacggcccaaactcctacgggaggcagcagtggggaatattggacaatgggcgcaagcctgatccagccatgccgcgtgagtgatgacggccttagggttgtaaagctctttcgcacgcgacgataatgacggtagcgtgagaagaagccccggctaacttcgtgccagcagccgcggtaatacgaagggggctagcgttgttcggaatcactgggcgtaaagggcgcgtaggcggctttgtaagtcgggggtgaaagcctgtggctcaaccacagaattgccttcgatactgcatggcttgagaccggaagaggttagtggaactgcgagtgtagaggtgaaattcgtagatattcgcaagaacaccagtggcgaaggcggctgactggtccggatctgacgctgaggcgcgaaagcgtggggagcaaacaggattagataccctggtagtccacgccgtaaacgatgaatgccagccgttggcgagcttgctcgtcagtggcgcagctaacgctttaagcattccgcctggggagtacggtcgcaagattaaaactcaaaggaattgacgggggcccgcacaagcggtggagcatgtggtttaattcgaagcaacgcgcagaaccttaccagcctttgacatgtcccgtatgaggagtggagacacgcctcttcagttcggctggcgggaacacaggtgctgcatggctgtcgtcagctcgtgtcgtgagatgttgggttaagtcccgcaacgagcgcaaccctcgcccctagttgccatcattgagttgggcactctagggggactgccggtgataagccgcgaggaaggtggggatgacgtcaagtcctcatggcccttacgggctgggctacacacgtgctacaatggcggtgacaaagggcagcgaacccgcgagggggagctaatcctcaaaagccgtctcagttcggattgcactctgcaactcgagtgcatgaaggcggaatcgctagtaatcgtggatcagaacgccacggtgaatacgttcccgggccttgtacacaccgcccgtcacaccatgggagttggtcttacccgacggcgctgcgccaaccgcaaggaggcaggcgaccacggtagggtcagcgactggggtg

SEQ ID NO: 2128 - DNA, 1409 bp, unidentified
  source 1..1409: mol_type = unassigned DNA; note = Microvirga ossetica
aacgaacgctggcggcaggcttaacacatgcaagtcgaacgcatccttcggggtgagtggcagacgggtgagtaacgcgtgggaacgtgcccttcagttcgggataacccagggaaacttgggctaataccggatacgtgcgagagcagaaagattgatcgctgaaggatcggcccgcgtctgattagctagttggtggggtaatggcccaccaaggcgacgatcagtagctggtctgagaggatgatcagccacattgggactgagacacggcccaaactcctacgggaggcagcagtggggaatattggacaatgggcgcaagcctgatccagccatgccgcgtgagtgatgaaggccttagggttgtaaagctctttcgtccgggacgataatgacggtaccggaagaagaagccccggctaacttcgtgccagcagccgcggtaatacgaagggggctagcgttgttcggaatcactgggcgtaaagggcgcgtaggcggctttataagtcgggggtgaaagcctgtggctcaaccacagaattgccttcgatactgtagagcttgagaccggaagaggtaagtggaactgcgagtgtagaggtgaaattcgtagatattcgcaagaacaccagtggcgaaggcggcttactggtccggttctgacgctgaggcgcgaaagcgtggggagcaaacaggattagataccctggtagtccacgccgtaaacgatgaatgccagccgttggcgagcttgctcgtcagtggcgcagctaacgctttaagcattccgcctggggagtacggtcgcaagattaaaactcaaaggaattgacgggggcccgcacaagcggtggagcatgtggtttaattcgaagcaacgcgcagaaccttaccagcctttgacatgtcccgtatgggtgccggagacggcatccttcagttcggctggcgggaacacaggtgctgcatggctgtcgtcagctcgtgtcgtgagatgttgggttaagtcccgcaacgagcgcaaccctcgcccctagttgccatcatttggttgggcactctagggggactgccggtgataagccgagaggaaggtggggatgacgtcaagtcctcatggcccttacgggctgggctacacacgtgctacaatggcggtgacaaagggcagcgaacccgcgagggggagctaatcctaaaaagccgtctcagttcggattgcactctgcaactcgagtgcatgaaggcggaatcgctagtaatcgtggatcagaacgccacggtgaatacgttcccgggccttgtacacaccgcccgtcacaccatgggagttggtcttacccgacggcgctgcgccaaccgcaagggggcaggcgaccacggtagggtcagcgactggggtg

SEQ ID NO: 2129 - DNA, 1409 bp, unidentified
  source 1..1409: mol_type = unassigned DNA; note = Microvirga vignae
aacgaacgctggcggcaggcttaacacatgcaagtcgaacgggcccttcggggtcagtggcagacgggtgagtaacgcgtgggaacgtgcccttcagttcggaataacccagggaaacttgggctaataccggatacgtccgtaaggagaaagatttatcgctgaaggatcggcccgcgtctgattagctggttggtagggtaatggcctaccaaggcgacgatcagtagctggtctgagaggatgatcagccacattgggactgagacacggcccaaactcctacgggaggcagcagtggggaatattggacaatgggcgcaagcctgatccagccatgccgcgtgagtgatgacggccttagggttgtaaagctctttcggcggggacgataatgacggtacccgcagaagaagccccggctaacttcgtgccagcagccgcggtaatacgaagggggctagcgttgttcggaatcactgggcgtaaagggcgcgtaggcggctttgtaagtcgggggtgaaagcctgtggctcaaccacagaattgccttcgatactgcatggcttgagaccggaagaggtaagtggaactgcgagtgtagaggtgaaattcgtagatattcgcaagaacaccagtggcgaaggcggcttactggtccggttctgacgctgaggcgcgaaagcgtggggagcaaacaggattagataccctggtagtccacgccgtaaacgatgaatgccagccgttggcgagcttgctcgtcagtggcgcagctaacgctttaagcattccgcctggggagtacggtcgcaagattaaaactcaaaggaattgacgggggcccgcacaagcggtggagcatgtggtttaattcgaagcaacgcgcagaaccttaccagcctttgacatgtcccgtgtggatcctggagacaggatccttcagttcggctggcgggaacacaggtgctgcatggctgtcgtcagctcgtgtcgtgagatgttgggttaagtcccgcaacgagcgcaaccctcgcccctagttgccatcattgagttgggcactctagggggactgccggtgataagccgcgaggaaggtggggatgacgtcaagtcctcatggcccttacgggctgggctacacacgtgctacaatggcggtgacaatgggcagccaacccgcgagggtgcgctaatcccaaaaagccgtctcagttcagattgcactctgcaactcgagtgcatgaaggcggaatcgctagtaatcgtggatcagaacgccacggtgaatacgttcccgggccttgtacacaccgcccgtcacaccatgggagttggtcttacccgacggcgctgcgccaaccgcaaggaggcaggcgaccacggtagggtcagcgactggggtg

SEQ ID NO: 2130 - DNA, 1460 bp, Microvirgula aerodenitrificans
  source 1..1460: mol_type = unassigned DNA
attgaacgctggcggcatgctttacacatgcaagtcgaacggtaacaggggagcttgctcccgctgacgagtggcgaacgggtgagtaatgcatcggaacgtgccgaatagtgggggataacgcaccgaaaggtgtgctaataccgcatacgccctgagggggaaagtgggggaccgcaaggcctcacgctaatcgagcggccgatgtcggattagctagttggtggggtaaaggctcaccaaggcgacgatccgtagcgggtctgagaggatgatccgccacactgggactgagacacggcccagactcctacgggaggcagcagtggggaattttggacaatgggggaaaccctgatccagccatgccgcgtgtctgaagaaggccttcgggttgtaaaggacttttgtccgggaggaaaccctgatcgttaatagcggtcgggactgacagtaccggaagaataagcaccggctaactacgtgccagcagccgcggtaatacgtagggtgcaagcgttaatcggaattactgggcgtaaagcgtgcgcaggcggtgagataagtcagctgtgaaagccccgggctcaacctgggaactgcggccgaaactgtctcgctagagtacgtcagaggggggtggaattccacgtgtagcagtgaaatgcgtagagatgtggaggaacaccaatggcgaaggcagccccctgggatgatactgacgctcatgcacgaaagcgtggggagcaaacaggattagataccctggtagtccacgccctaaacgatgtcgactagccgttggagacctcggtctttggtggcgcagctaacgcgtgaagtcgaccgcctggggagtacggtcgcaagattaaaactcaaaggaattgacgggggcccgcacaagcggtggatgatgtggattaattcgatgcaacgcgaaaaaccttacctacccttgacatgccaggaatctcccggagatgggagagtgcccgaaagggaacctgggcacaggtgctgcatggctgtcgtcagctcgtgtcgtgagatgttgggttaagtcccgcaacgagcgcaacccttgccattagttgccatcattaagttgggcactttaatgggactgccggtgacaaaccggaggaaggtggggatgacgtcaagtcctcatggcccttatgggtagggcttcacacgtcatacaatggtcggtacagagggttgcgaagccgcgaggtgaagctaatcccagaaaaccgatcgtagtccggatcgcagtctgcaactcgactgcgtgaagtcggaatcgctagtaatcgcggatcagcatgccgcggtgaatacgttcccgggccttgtacacaccgcccgtcacaccatgggagtggaatccgccagaagtgggtagggtaaccgtaaggagcccgcttaccacggtaggtttcatgactggggtg

SEQ ID NO: 2131 - DNA, 1424 bp, unidentified
  source 1..1424: mol_type = unassigned DNA; note = Midichloria mitochondrii
agtgaacgctggcggcgtgcttaacacatgcaagtcgaacgggcaagagctgtagcgatacagagttctgctagtggcagacgggtgagtagtacatgggaatctaccttgcagtgcgaaataacagttggaagcaattgctaatgtcgcatatagccgagaggtgaaagatttatcgctgcaagacgagcccatgcaggattagctagttggtgaggtaatggctcaccaaggcaacgatctttagttggtctgagaggatgatcagccacactggaactgagacacggtccagactcctacgggaggcagcagtggggaatattggacaatgggcgcaagcctgatccagcgacgccgcgtgagtgaagaaggccttcgggttgtaaagctcttttagtggggaagataatgacggtacccacagaaaaagccccggctaacttcgtgccagcagccgcggtaatacgaagggggctagcgttactcggaattattgggcgtaaagcgtgcgtaggctgcttagtaagtcaaaagtgaaagccttgggctcaacctaagaattgcttttgaaactaccaagcttgagtactgtaggggatagcggaattcctagtgtaggggtgaaattcgtagatattaggaggaacaccggaggcgaaagcggttatctggacagttactgacgctgttgcacgaaagcgtggggagcaaacaggattagataccctggtagtccacgcagtaaacgatgagtgctagatgttgggatttaagtctcagtgtcgcagctaacgcattaagcactccgcctggggagtacggtcgcaagattaaaactcaaaggaattgacggggacccgcacaagcggtggaacatgtggtttaattcgatgctacgcgaaaaaccttaccaggccttgacatggtgatcatatggctgcgaaagcagttagtcggttcggccggatcgtcacaggtgttgcatggctgtcgtcagctcgtgtcgtgagatgttgggttaagtcccgcaacgagcgcaacccttatccttagttgccagcgagtgatgtcgggaactttaaggaaactgccggtgataagccggaggaaggtggggatgacgtcaagtcagcatggcccttacggcctgggctacacacgtgttacaatggtggtgacaaaaagaagcaatagggcgacctggagcagatcttataaaagctatctcagttcggattgcactctgcaactcgggtgcatgaagtcggaatcgctagtaatcgcagatcagcatgctgcggtgaatacgttcccgggtcttgtacacactgcccgtcacgccatgggagtcggttttgcctgaagtaggtgcgctaaccgcaaggaggcagcttaccacggtaaggttgacgactggggtg

SEQ ID NO: 2132 - DNA, 1494 bp, unidentified
  source 1..1494: mol_type = unassigned DNA; note = Mixta gaviniae
attgaacgctggcggcaggcctaacacatgcaagtcgaacggtaacaggaagcagcttgctgcttygctgacgagtggcggacgggtgagtaatgtctggggatctgcccgatggagggggataaccactggaaacggtggctaataccgcataacgtcgcaagaccaaagtgggggaccttcgggcctcacaccatcggatgaacccagatgggattagctagtaggtggggtaacggctcacctaggcgacgatccctagctggtctgagaggatgaccagccacactggaactgagacacggtccagactcctacgggaggcagcagtggggaatattgcacaatgggcgcaagcctgatgcagccatgccgcgtgtatgaagaaggccttcgggttgtaaagtactttcagcggggaggaagggatgrcgyttaatacgcgycgtcattgacgttacccgcagaagaagcaccggctaactccgtgccagcagccgcggtaatacggagggtgcaagcgttaatcggaattactgggcgtaaagcgcacgcaggcggtctgttaagtcagatgtgaaatccccgggcttaacctgggaactgcatttgaaactggcaggcttgagtctcgtagaggggggtagaattccaggtgtagcggtgaaatgcgtagagatctggaggaataccggtggcgaaggcggccccctggacgaagactgacgctcaggtgcgaaagcgtggggagcaaacaggattagataccctggtagtccacgccgtaaacgatgtcgacttggaggctgttcccttgaggagtggcttccggagctaacgcgttaagtcgaccgcctggggagtacggccgcaaggttaaaactcaaatgaattgacgggggcccgcacaagcggtggagcatgtggtttaattcgatgcaacgcgaagaaccttacctggtcttgacatccacggaattcggcagagatgccytagtgccttcgggaaccgtgagacaggtgctgcatggctgtcgtcagctcgtgttgtgaaatgttgggttaagtcccgcaacgagcgcaacccttatcctttgttgccagcggctcggccgggaactcaaaggagactgccggtgataaaccggaggaaggtggggatgacgtcaagtcatcatggcccttacgaccagggctacacacgtgctacaatggcgcatacaaagagaagcgacctcgcgagagcaagcggacctcataaagtgcgtcgtagtccggattggagtctgcaactcgactccatgaagtcggaatcgctagtaatcgtggatcagaatgccacggtgaatacgttcccgggccttgtacacaccgcccgtcacaccatgggagtgggttgcaaaagaagtaggtagcttaaccttcgggagggcgcttaccactttgtgattcatgactggggtgaagtcgtaacaaggtaaccgtaggggaacc

SEQ ID NO: 2133 - DNA, 1494 bp, unidentified
  source 1..1494: mol_type = unassigned DNA; note = Mixta theicola
attgaacgctggcggcaggcctaacacatgcaagtcgaacggtaacaggaagcagcttgctgcttcgctgacgagtggcggacgggtgagtaatgtctggggatctgcccgatggagggggataaccactggaaacggtggctaataccgcataacgtcgcaagaccaaagtgggggaccttcgggcctcacaccatcggatgaacccagatgggattagctagtaggtggggtaacggctcacctaggcgacgatccctagctggtctgagaggatgaccagccacactggaactgagacacggtccagactcctacgggaggcagcagtggggaatattgcacaatgggcgcaagcctgatgcagccatgccgcgtgtatgaagaaggccttcgggttgtaaagtactttcagcggggaggaagggartaaggttaataaccttgttcattgacgttacccgcagaagaagcaccggctaactccgtgccagcagccgcggtaatacggagggtgcaagcgttaatcggaattactgggcgtaaagcgcacgcaggcggtctgtcaagtcggatgtgaaatccccgggctcaacccgggaactgcattcgaaactggcaggctagagtctcgtagaggggggtagaattccaggtgtagcggtgaaatgcgtagagatctggaggaataccggtggcgaaggcggccccctggacgaagactgacgctcaggtgcgaaagcgtggggagcaaacaggattagataccctggtagtccacgccgtaaacgatgtcgacttggaggctgtgagcttgactcgtggcttccggagctaacgcgttaagtcgaccgcctggggagtacggccgcaaggttaaaactcaaatgaattgacgggggcccgcacaagcggtggagcatgtggtttaattcgatgcaacgcgaagaaccttacctggtcttgacatccacggaattctgcagagatgcggaagtgccttcgggaaccgtgagacaggtgctgcatggctgtcgtcagctcgtgttgtgaaatgttgggttaagtcccgcaacgagcgcaacccttatcctttgttgccagcggttcggccgggaactcaaaggagactgccggtgataaaccggaggaaggtggggatgacgtcaagtcatcatggcccttacgaccagggctacacacgtgctacaatggcgcatacaaagagaagcgacctcgcgagagcaagcggacctcataaagtgcgtcgtagtccggattggagtctgcaactcgactccatgaagtcggaatcgctagtaatcgtggatcagaatgccacggtgaatacgttcccgggccttgtacacaccgcccgtcacaccatgggagtgggttgcaaaagaagtaggtagcttaaccttcgggagggcgcttaccactttgtgattcatgactggggtgaagtcgtaacaaggtaaccgtaggggaacc

SEQ ID NO: 2134 - DNA, 1463 bp, unidentified
  source 1..1463: mol_type = unassigned DNA; note = Mizugakiibacter sediminis
attgaacgctggcggcatgcctaacacatgcaagtcgaacggcagcgcggggggcaacccctggcggcgagtggcggacgggtgaggaatgcatcggaatctgcccggtggtgggggataacgtagggaaacttacgctaataccgcatacgaccgagaggtgaaagcgggggatcttcggacctcgcgccattggatgagccgatgccggattagctagttggtggggtaaaggcccaccaaggcgacgatccgtagctggtctgagaggatgatcagccacactgggactgagacacggcccagactcctacgggaggcagcagtggggaatattggacaatgggcgcaagcctgatccagcaatgccgcgtgtgtgaagaaggccttcgggttgtaaagcacttttatcgggagcgaaatcgtttcggctaatacccggagcgtctgacggtacccgatgaataagcaccggctaactccgtgccagcagccgcggtaatacggagggtgcaagcgttaatcggaattactgggcgtaaagcgtgcgtaggcggttcgttaagtccgttgtgaaatccccgagctcaacttgggaatggcagtggatactggcgggctggagtgcggtagaggagggtggaattcccggtgtagcggtgaaatgcgtagagatcgggaggaacatcagtggcgaaggcggccctctggaccagcactgacgctgaggcacgaaagcgtggggagcaaacaggattagataccctggtagtccacgccctaaacgatgcgaactggacgttggtcacactacggtgatcagtgtcgaagctaacgcgttaagttcgccgcctggggagtacggtcgcaagactgaaactcaaaggaattgacgggggcccgcacaagcggtggagtatgtggtttaattcgatgcaacgcgcagaaccttacctggccttgacatccagggaacttggcagagatgccttggtgccttcgggaaccctgagacaggtgctgcatggctgtcgtcagctcgtgtcgtgagatgttgggttaagtcccgcaacgagcgcaacccttgtccctagttgccagcgagtaaagtcgggaactctagggagactgccggtgacaaaccggaggaaggtggggatgacgtcaagtcatcatggcccttacggccagggctacacacgtactacaatggtcggtacagagggttgcgataccgcgaggtggagccaatcccagaaagccgatcccagtccggatcggagtctgcaactcgactccgtgaagtcggaatcgctagtaatcgcagatcagcaatgctgcggtgaatacgttcccgggccttgtacacaccgcccgtcacaccatgggagttggctgcaccagaagccggtagtctaaccgcaaggaggacgccgaccacggtgtggtcaatgactggggtg

SEQ ID NO: 2135 - DNA, 1453 bp, unidentified
  source 1..1453: mol_type = unassigned DNA; note = Mobilisporobacter senegalensis
gatgaacgctggcggcgtgcttaacacatgcaagtcgaacgaagcagttaagtggaggtcttcggaccaaagcttaattgacttagtggcggacgggtgagtaacgcgtgggtaacctgcctcatacagggggataacagttggaaacgactgctaagaccgcataagcctacagtttcgcatgagacagtaggaaaatatttataggtatgagatggacccgcgtctgattagctagttggtgaggtaacggcccaccaaggcgacgatcagtagccgacttgagagagtgatcggccacattgggactgagacacggcccaaactcctacgggaggcagcagtggggaatattgcacaatgggggaaaccctgatgcagcgacgccgcgtgagtgaagaagtatttcggtatgtaaagctctatcagcaaggaagataatgacggtacttgactaagaagccccggctaactacgtgccagcagccgcggtaatacgtagggggcaagcgttatccggatttactgggtgcaaagggagcgtacgtggtatggtaagacagatgtgaaagcccccggcttgggactgcatttgaaactgccaaactagagtgcaggagaggtaagtggaattcctagtgtagcggtgaaatgcgtacatattaggaggaacaccagtggcgaaggcggcttactggactgtaactgacactgaggctcgaaagcgtggggagcaaacaggattagataccctggtagtccacgccgtaaacgatgaatactaggtgtcgggggtcataagaccttcggtgccgcagcaaacgcaataagtattccacctggggagtacgttcgcaagaatgaaactcaaaggaattgacggggacccgcacaagcggtggagcatgtggtttaattcgaagcaacgcgaagaacctaaccaggtcttgacatccctctgaccggtccttaaccgggccttcccttcggggcagaggagacaggtggtgcatggttgtcgtcagctcgtgtcgtgagatgttgggttaagtcccgcaacgagcgcaacccttatctttagtagccagcattttggatgggcactctagagagactgccagggataacctggaggaaggtggggatgacgtcaaatcatcatgccccttatgatctgggctacacacgtgctacaatggtgataacaaagagaagcgaagtcgtgaggcgaagcaaatctcaaaaatgtcatctcagttcggattgtagtctgcaactcgactacatgaagctggaatcgctagtaatcgcgaatcagaatgtcgcggtgaatacgttcccgggtcttgtacacaccgcccgtcacaccatgggagtcggaaatgcccgaagtctgtgacccaacccttatcagtggatatgacgtcgtgataattgaatgaacgaagtgagt

SEQ ID NO: 2136 - DNA, 1354 bp, unidentified
  source 1..1354: mol_type = unassigned DNA; note = Moorea bouillonii
cggacgggtgagtaacgcgtgagaatctgccttagggtcggggacaaccaccggaaacagtggctaataccggatgtgccgagaggtgaaagatttattgccataagaggagctcgcgtctgattagctagttggtagggtaaaggcttaccaaggcaacgatcagtagctggtctgagaggatgagcagccacactgggactgagacacggcccagactcctacgggaggcagcagtggggaattttccgcaatgggcgaaagcctgacggagcaataccgcgtgagggaggaaggcttttgggttgtaaacctcttttatcagggaagaagaaagtgacggtacctgaggaaaaagcatcggctaactccgtgccagcagccgcggtaatacggaggatgcaagcgttatccggaattattgggcgtaaagcgtccgtaggtggtacctcaagtcggctgttaaagaccagggcttaactctgggcaggcagtggaaactgaggaactagagggcagtaggggtagagggaattcccggtgtagcggtgaaatgcgtagatttcgggaagaacatcggtggcgaaggcgctctactggactgaacctgacactgagggacgaaagctaggggagcgaatgggattagataccccagtagtcctagctgtaaacgatggatactaggtgtagcttgtatcgacccaagctgtgccgaagccaacgcgttaagtatcccgcctggggagtacgcacgcaagtgtgaaactcaaaggaattgacgggggcccgcacaagcggtggagtatgtggtttaattcgatgcaacgcgaagaaccttaccagggcttgacatgtcgcgaatcccggtgaaagctgggagtgccttcgggagcgcgaacacaggtggtgcatggctgtcgtcagctcgtgtcgtgagatgttgggttaagtcccgcaacgagcgcaaccctcgtttttagttgccagcacgtggtggtgggcactctagagagactgccggtgacaaaccggaggaaggtggggatgacgtcaagtcagcatgccccttacgccctgggctacacacgtactacaatggtcaggacaatgggcagccaactcgcaagggggagctaatctcatcaaacctggcctcagttcagattgccggctgcaactcgccggcatgaaggaggaatcgctagtaatcgccggtcagaatacggcggtgaatccgttcccgggccttgtacacaccgcccgtcacaccatggaagctggccacgcccgaagtcgttaccctaacccgtatgggagggggatgccgaaggcagggttggtgactggggtg

SEQ ID NO: 2137 - DNA, 1412 bp, unidentified
  source 1..1412: mol_type = unassigned DNA; note = Moorea producens
gatgaacgctggcggtatgcttaacacatgcaagtcgaacgccccttcgggggagtggcggacgggtgagtaacgcgtgagaatctgccttagggtcggggacaaccaccggaaacagtggctaataccggatgtgccgagaggtgaaagatttattgccataagaggagctcgcgtctgattagctagttggtagggtaaaggcctaccaaggcaacgatcagtagctggtctgagaggatgagcagccacactgggactgagacacggcccagactcctacgggaggcagcagtggggaattttccgcaatgggcgaaagcctgacggagcaataccgcgtgagggaggaaggcttttgggttgtaaacctcttttatcagggaagaagaaagtgacggtacctgaggaaaaagcatcggctaactccgtgccagcagccgcggtaatacggaggatgcaagcgttatccggaattattgggcgtaaagcgtccgtaggtggtacctcaagtcggctgttaaagaccagggcttaactctgggcaggcagtggaaactgaggaactagagggcagtaggggtagagggaattcccggtgtagcggtgaaatgcgtagatttcgggaagaacatcggtggcgaaggcgctctactggactgaacctgacactgagggacgaaagctaggggagcgaatgggattagataccccagtagtcctagctgtaaacgatggatactaggtgtagcttgtatcgacccaagctgtgccgaagccaacgcgttaagtatcccgcctggggagtacgcacgcaagtgtgaaactcaaaggaattgacgggggcccgcacaagcggtggagtatgtggtttaattcgatgcaacgcgaagaaccttaccagggcttgacatgtcgcgaatcccggtgaaagctgggagtgccttcgggagcgcgaacacaggtggtgcatggctgtcgtcagctcgtgtcgtgagatgttgggttaagtcccgcaacgagcgcaaccctcgtttttagttgccagcacgtgaaggtgggcactctagagagactgccggtgacaaaccggaggaaggtggggatgacgtcaagtcagcatgccccttacgccctgggctacacacgtactacaatggtcaggacaatgggcagccaactcgcaagggggagctaatctcatcaaacctggcctcagttcagattgccggctgcaactcgccggcatgaaggaggaatcgctagtaatcgccggtcagaatacggcggtgaatccgttcccgggccttgtacacaccgcccgtcacaccatggaagctggccacgcccgaagtcgttaccctaacccgtatgggagggggatgccgaaggcagggttggtgactggggtg

SEQ ID NO: 2138 - DNA, 1353 bp, unidentified
  source 1..1353: mol_type = unassigned DNA; note = Moorea producta
cggacgggtgagtaacgcgtgagaatctgccttcgggtcggggacaaccaccggaaacagtggctaataccggatgtgccgagaggtaaaagatttattgccagaagaggagctcgcgtctgattagctagttggtagggtaaaggcctaccaaggcaacgatcagtagctggtctgagaggatgagcagccacactgggactgagacacggcccagactcctacgggaggcagcagtggggaattttccgcaatgggcgaaagcctgacggagcaataccgcgtgagggaggaaggcttttgggttgtaaacctcttttatcagggaagaagaaagtgacggtacctgaggaaaaagcatcggctaactccgtgccagcagccgcggtaatacggaggatgcaagcgttatccggaattattgggcgtaaagggtccgtaggtggtacctcaagtcggctgttaaagaccagggcttaactctgggcaggcagtggaaactgaggaactagagggcagtaggggtagagggaattcccggtgtagcggtgaaatgcgtagatttcgggaagaacatcggtggcgaaggcgctctactggactgaacctgacactgagggacgaaagctaggggagcgaatgggattagataccccagtagtcctagctgtaaacgatggatactaggtgtagcttgtatcgacccaagctgtgccgaagccaacgcgttaagtatcccgcctggggagtacgcacgcaagtgtgaaactcaaaggaattgacgggggcccgcacaagcggtggagtatgtggtttaattcgatgcaacgcgaagaaccttaccagggcttgacatgtcgcgaatcccggtgaaagctgggagtgccttagggagcgcgaacacaggtggtgcatggctgtcgtcagctcgtgtcgtgagatgttgggttaagtcccgcaacgagcgcaaccctcgtttttagttgccagcacttcaggtgggcactctagagagactgccggtgacaaaccggaggaaggtggggatgacgtcaagtcagcatgccccttacgccctgggcgacacacgtactacaatggtcaggacaaagggcagccaactcgcaagggggagctaatctcatcaaacctggcctcagttcagattgccggctgcaactcgccggcatgaaggaggaatcgctagtaatcgccggtcagaatacggcggtgaatccgttcccgggccttgtacacaccgcccgtcacaccatggaagctggccacgcccgaagtcgttaccctaacccttaggggagggggatgccgaaggcagggttggtgactggggtg

SEQ ID NO: 2139 - DNA, 1482 bp, Moorella glycerini
  source 1..1482: mol_type = unassigned DNA
gacaaacgctggcggcgtgcctaacacatgcaagtcgagcggtctttgacccggcggaatcttcggaggaagcgggttaaagatagcggcggacgggtgagtaacgcgtgggtaatctacccttcagaccgggataacaccgggaaactggtgctaataccggatacgttctgctggaggcatctccggtagaagaaaagggaacgtgagtgaccgctgaaggatgagcccgcgtcccattagctagttggtgaggtaacggctcaccaaggcgacgatgggtagccggcctgagagggtggccggccacactgggactgagacacggcccagactcctacgggaggcagcagtggggaatcttgcgcaatgggcgaaagcctgacgcagcgacgccgcgtgagcgatgaaggccttcgggttgtaaagctctgtcatcagggacgaagtctcgataagaggtgacggtacctgaggaggaagccccggctaactacgtgccagcagccgcggtaaaacgtagggggcgagcgttgtccggaattactgggcgtaaagggcgtgtaggcggcccggcaagtcagatgtgaaaaacccaggctcaacctggggggtgcatttgaaactggcgggcttgagggcaggagaggagagtggaattcccggtgtagcggtgaaatgcgtagatatcgggaggaacaccagtggcgaaggcgactctctggactgaccctgacgctgaggcgcgaaagcgtggggagcaaacaggattagataccctggtagtccacgccgtaaacgatgggtactaggtgttggaggtatcgacccctccagtgccgcagttaacacaataagtaccccgcctggggagtacggccgcaaggctgaaactcaaaggaattgacgggggcccgcacaagcggtggagcatgtggtttaattcgacgcaacgcgaagaaccttaccggggtttgacatcccgcgaacctggtggaaacaccggggtgccggttttaccggagcgcggagacaggtggtgcatggttgtcgtcagctcgtgtcgtgagatgttgggttaagtcccgcaacgagcgcaacccttacctttagttgccagcacgtgaaggtgggcactctaaagggactgccggtgacaaaccggaggaaggtggggatgacgtcaaatcatcatgccccttatatcccgggctacacacgtgctacaatggcctgtacaaaggggggcgaacccgcgagggggagcaaatcccaaaaagcaggtctcagttcggattgcaggctgcaactcgcctgcatgaagtcggaatcgctagtaatcgcggatcagcatgccgcggtgaatacgttcccgggccttgtacacaccgcccgtcacaccacgaaagctggcaacacccgaagccggtgacccaacccgcgagggagggaccgtccaaggtggggctggtgattggggtg

SEQ ID NO: 2140 - DNA, 1450 bp, Moraxella atlantae
  source 1..1450: mol_type = unassigned DNA
attgaacgctggcggcaggcttaacacatgcaagtcgaacgatggaacctagcttgctaggggaaatagtggcgaacgggtgagtaagatttaggaaactgccttatagagggggatagctcggggaaactcgaattaataccgcatacgtcctacgggagaaaggagcttttgggttctgctataagatgtgcctaaattagattagctagatggtgaggtaaaggctcaccatggcgacgatctataactggtcttagaggatgatcagtcacaccggaactgagacacggtccggactcctacgggaggcagcagtggggaatattggacaatgggggaaaccctgatccagccatgccgcgtgtgtgaagaaggtcataagattgtaaagcactttaagcagggaggaagagccagtggagaaacacactggtggtgacgttacctgcagaataagcaccggctaactctgtgccagcagccgcggtaatacagagggtgcgagcgttaatcggaattactgggcgtaaagcgggtgcaggtggtgcactaagtcatatgtgaaagccctgggcttaacctaggaacagcatatgatactggtgaactagagtatatgagagggaagtagaattccaggtgtagcggtgaaatgcgtagagatctggaggaataccgatggcgaaggcagctttctggcacaatactgacactcagacccgaaagcgtgggtagcaaacaggattagataccctggtagtccacgccgtaaacgatgtctactagccgttggggctcatgaagccttagtggcgcagctaacgcgataagtagaccgcctggggagtacggccgcaaggttaaaactcaaatgaattgacgggggcccgcacaagcggtggagcatgtggtttaattcgatgcaacgcgaagaaccttacctggtcttgacatagtgagaatcctacagagatgtgggagtgccttcgggaattcacatacaggtgctgcatggctgtcgtcagctcgtgtcgtgagatgttgggttaagtcccgcaacgagcgcaacccttatccttacttgctagcaggtgaagctgagaactgtaaggagactgccagtgacaaactggaggaaggcggggacgacgtcaagtcatcatggcccttacgaccagggctacacacgtgctacaatggtaggtacagagggcagctacacagcgatgtgacgcgaatctcaaaaagcctatcgtagtccggattggagtctgcaactcgactccatgaagtcggaatcgctagtaatcgcagatcagaatgctgcggtgaatacgttcccgggccttgtacacaccgcccgtcacaccatgggagtctattgcaccagaagtaggtagcctaacgaaagggggcgcttaccacggtgtggtcgatgactggggtg

SEQ ID NO: 2141 - DNA, 1455 bp, Moraxella boevrei
  source 1..1455: mol_type = unassigned DNA
attgaacgctggcggcaggcttaacacatgcaagtcgaacgatgagtatctagcttgctagatatgattagtggcgaacgggtgagtaatatttaggaatctgcctcataatgggggatagcttggggaaacccaaattaataccgcatacgtcctacgggggaaagatggcatttatgctgttgttatgagatgagcctaaattggattagctagttggtggggtaagggcttaccaaggcgacgatccatagctggtctgagaggatgatcagccacactgggactgagacacggcccagactcctacgggaggcagcagtggggaatattggacaatgggcgaaagcctgatccagccatgccgcgtgtgtgaagaaggccttttggttgtaaagcactttaagtagggaggaagagttatcaattaatacctgatgatgatgacgttacctacagaataagcaccggctaactctgtgccagcagccgcggtaatacagagggtgcgagcgttaatcggaattactgggcgtaaagcgagcgtaggtggcttgataagtcacatgtgaaatccctgggcttaacctaggaactgcatgtgatactgttaagctagagtagatgagaggggggtagaattccaggtgtagcggtgaaatgcgtagagatctggaggaataccgatggcgaaggcagccccctggcaccatactgacactgaggttcgaaagcgtgggtagcaaacaggattagataccctggtagtccacgccgtaaacgatgtctactagccgttgggtgacttgattacttagtggcgcagttaacgcgataagtagaccgcctggggagtacggccgcaaggttaaaactcaaatgaattgacgggggcccgcacaagcggtggagcatgtggtttaattcgatgcaacgcgaagaaccttacctggtcttgacatacagagaatttgctagagatagcttagtgcctttgggaactctgatacaggtgctgcatggctgtcgtcagctcgtgtcgtgagatgttgggttaagtcccgcaacgagcgcaacccttttccttacttgccagcgggtaaagccgggaactttaaggatactgccagtgacaaactggaggaaggcggggacgacgtcaagtcatcatggcccttacgaccagggctacacacgtgctacaatggtaggtacagagggtagctacacagcgatgtgatgccaatctcaaaaagcctatcgtagtccggattggagtctgcaactcgactccatgaagtcggaatcgctagtaatcgcggatcagaaagccgcggtgaatacgttcccgggccttgtacacaccgcccgtcacaccatgggagtctattgcaccagaagtagttagcctaacgtaagggggcgattaccacggtgtggtcgatgactggggtg

SEQ ID NO: 2142 - DNA, 1453 bp, Moraxella bovis
  source 1..1453: mol_type = unassigned DNA
attgaacgctggcggcaggcttaacacatgcaagtcgaacgatgactatctagcttgctagatatgattagtggcgaacgggtgagtaatgcttaggaatctgcctagtagtgggggataactatccgaaaggatagctaataccgcatacgacctacgggtgaaagggggcttttagctctcgctattagatgagcctaagtcggattagctagttggtggggtaaaggcctaccaaggcgacgatctgtagctggtctgagaggatgatcagccacactgggactgagacacggcccagactcctacgggaggcagcagtggggaatattggacaatgggcgaaagcctgatccagccatgccgcgtgtgtgaagaaggccttttggttgtaaagcactttaagtagggaggaaaagcttgtggttaatacccacaagccctgacgttacctacagaataagcaccggctaactctgtgccagcagccgcggtaatacagagggtgcaagcgttaatcggaattactgggcgtaaagcgagcgtaggtggtcatttaagtcagatgtgaaagccccgggcttaacctgggaactgcatctgatactggatgactagagtaggtgagagggaagtagaattccaggtgtagcggtgaaatgcgtagagatctggaggaataccgatggcgaaggcagcttcctggcatcatactgacactgaggttcgaaagcgtgggtagcaaacaggattagataccctggtagtccacgccgtaaacgatgtctaccagtcgttgggtctcttgaagacttagtgacgcagttaacgcaataagtagaccgcctggggagtacggccgcaaggttaaaactcaaatgaattgacgggggcccgcacaagcggtggagcatgtggtttaattcgatgcaacgcgaagaaccttacctggtcttgacataccaagaattcgctagagatagcttagtgccttcgggagcttggatacaggtgctgcatggctgtcgtcagctcgtgtcgtgagatgttgggttaagtcccgcaacgagcgcaacccttttccttagttaccagcgactcggtcgggaactctaaggatactgccagtgacaaactggaggaaggcggggacgacgtcaagtcatcatggcccttacgaccagggctacacacgtgctacaatggttggtacaaagggttgctacacagcgatgtgatgctaatctcaaaaagccaatcgtagtccggattggagtctgcaactcgactccatgaagtcggaatcgctagtaatcgcagatcagaatgctgcggtgaatacgttcccgggccttgtacacaccgcccgtcacaccatgggagttgatctcaccagaagtggttagcctaacgcaagagggcgatcaccacggtggggtcgatgactggggtg

SEQ ID NO: 2143 - DNA, 1453 bp, Moraxella bovoculi
  source 1..1453: mol_type = unassigned DNA
attgaacgctggcggcaggcttaacacatgcaagtcgaacgatgactatctagcttgctagatatgattagtggcgaacgggtgagtaatgcttaggaatctgcctattagtgggggataaccatccgaaaggatggctaataccgcatacgtcttacgagagaaagggggcttttagctctcgctaatagatgagcctaagtcggattagctagttggtggggtaaaggcctaccaaggcgacgatctgtagctggtctgagaggatgatcagccacactgggactgagacacggcccagactcctacgggaggcagcagtggggaatattggacaatgggcgaaagcctgatccagccatgccgcgtgtgtgaagaaggccttttggttgtaaagcactttaagtggggaggaaaagcttgtggttaatacccacaagccctgacgttacctacagaataagcaccggctaactctgtgccagcagccgcggtaatacagagggtgcaagcgttaatcggaattactgggcgtaaagcgagcgtaggtggtcatttaagtcagatgtgaaagccccgggcttaacctgggaactgcatctgatactgggtgactagagtaggtgagagggaagtagaattccaggtgtagcggtgaaatgcgtagagatctggaggaataccgatggcgaaggcagcttcctggcatcatactgacactgaggttcgaaagcgtgggtagcaaacaggattagataccctggtagtccacgccgtaaacgatgtctaccagtcgttgggtcttttaaagacttagtgacgcagttaacgcaataagtagaccgcctggggagtacggccgcaaggttaaaactcaaatgaattgacgggggcccgcacaagcggtggagcatgtggtttaattcgatgcaacgcgaagaaccttacctggtcttgacatagtaggaatcctgcagagatgcgggagtgccttcgggaatctacatacaggtgctgcatggctgtcgtcagctcgtgtcgtgagatgttgggttaagtcccgcaacgagcgcaacccttttccttagttaccagcgactcggtcgggaactctaaggatactgccagtgacaaactggaggaaggcggggacgacgtcaagtcatcatggcccttacgaccagggctacacacgtgctacaatggttggtacaaagggttgctacacagcgatgtgatgctaatctcaaaaagccaatcgtagtccggattagagtctgcaactcgactctatgaagtcggaatcgctagtaatcgcagatcagaatgctgcggtgaatacgttcccgggccttgtacacaccgcccgtcacaccatgggagttgatctcaccagaagtgggtagcctaacgcaagagggcgctcaccacggtggggtcgatgactggggtg

SEQ ID NO: 2144 - DNA, 1451 bp, Moraxella canis
  source 1..1451: mol_type = unassigned DNA
attgaacgctggcggcaggcttaacacatgcaagtcgaacgaggttagaaagcttgcttttgatacctagtggcggacgggtgagtaatgcttaggaatctgcctagtagtgggggataacttggggaaactcaagctaataccgcatacgacctacgggtgaaagggggcgcaagctctcgctattagatgagcctaagtcggattagctagttggtggggtaaaggcctaccaaggcgacgatctgtagctggtctgagaggatgatcagccacactgggactgagacacggcccagactcctacgggaggcagcagtggggaatattggacaatgggcgaaagcctgatccagccatgccgcgtgtgtgaagaaggccttttggttgtaaagcactttaagtggggaggaaaagttaatggttaatacccattagccctgacgttacccacagaataagcaccggctaactctgtgccagcagccgcggtaatacagagggtgcaagcgttaatcggaattactgggcgtaaagcgcgcgtaggtggttacttaagtcagatgtgaaagccccgggcttaacctgggaactgcatctgatactgggtgactagagtaggtgagaggggagtagaattccaggtgtagcggtgaaatgcgtagagatctggaggaataccgatggcgaaggcagctccctggcatcatactgacactgaggtgcgaaagcgtgggtagcaaacaggattagataccctggtagtccacgccgtaaacgatgtctaccagtcgttgggtcttttaaagacttagtgacgcagttaacgcaataagtagaccgcctggggagtacggccgcaaggttaaaactcaaatgaattgacgggggcccgcacaagcggtggagcatgtggtttaattcgatgcaacgcgaagaaccttacctggtcttgacatagtaggaatcctgcagagatgcgggagtgccttcgggaatctacatacaggtgctgcatggctgtcgtcagctcgtgtcgtgagatgttgggttaagtcccgcaacgagcgcaacccttttccttagttaccagcacctcgggtgggaactctaaggatactgccagtgacaaactggaggaaggcggggacgacgtcaagtcatcatggcccttacgaccagggctacacacgtgctacaatggtaggtacaaagggttgctacacagcgatgtgatgccaatctcaaaaagcctatcgtagtccggattggagtctgcaactcgactccatgaagtcggaatcgctagtaatcgcagatcagaatgctgcggtgaatacgttcccgggccttgtacacaccgcccgtcacaccatgggagttgatctcaccagaagtgggtagcctaacgcaagagggcgctcaccacggtggggtcgatgactggggtg

SEQ ID NO: 2145 - DNA, 1549 bp, Moraxella caprae
  source 1..1549: mol_type = unassigned DNA
attgaacgctggcggcaggcttaacacatgcaagtcgaacgatgaagtctagcttgctagacggattagtggcgaacgggtgagtaatgcttaggaatctgcctattagtgggggataacgtagggaaacttacgctaataccgcatacgtcttacgagagaaaggggcccgaccactaaatttaattttaagtaattgtcttttaaataaatacaatttgtgcttattaagcaacacctaacttaattaggatgagttaaatttagtggtcgggtctcgctaatagatgagcctaagtcggattagctagttggtggggtaaaggcctaccaaggcgacgatctgtagctggtctgagaggatgatcagccacactgggactgagacacggcccagactcctacgggaggcagcagtggggaatattggacaatgggcgaaagcctgatccagccatgccgcgtgtgtgaagaaggccttttggttgtaaagcactttaagtggggaggaaaagcttgtggttaatacccacaagccctgacgttacccacagaataagcaccggctaactctgtgccagcagccgcggtaatacagagggtgcaagcgttaatcggaattactgggcgtaaagcgagcgtaggtggtcatttaagtcagatgtgaaagccccgggcttaacctgggaactgcatctgatactgggtgactagagtaggtgagagggaagtagaattccaggtgtagcggtgaaatgcgtagagatctggaggaataccgatggcgaaggcagcttcctggcatcatactgacactgaggttcgaaagcgtgggtagcaaacaggattagataccctggtagtccacgccgtaaacgatgtctaccagtcgttgggtctcttgaagacttagtgacgcagttaacgcaataagtagaccgcctggggagtacggccgcaaggttaaaactcaaatgaattgacgggggcccgcacaagcggtggagcatgtggtttaattcgatgcaacgcgaagaaccttacctggtcttgacatacagagaattcgctagagatagcttagtgccttcgggaactctgatacaggtgctgcatggctgtcgtcagctcgtgtcgtgagatgttgggttaagtcccgcaacgagcgcaacccttttccttagttaccagcgactcggtcgggaactctaaggatactgccagtgacaaactggaggaaggcggggacgacgtcaagtcatcatggcccttacgaccagggctacacacgtgctacaatggttggtacaaagggttgctacacagcgatgtgatgctaatctcaaaaagccaatcgtagtccggattggagtctgcaactcgactccatgaagtcggaatcgctagtaatcgcagatcagaatgctgcggtgaatacgttcccgggccttgtacacaccgcccgtcacaccatgggagttgatctcaccagaagtggttagcctaacgcaagagggcgatcaccacggtggggtcgatgactggggtg

SEQ ID NO: 2146 - DNA, 1452 bp, Moraxella catarrhalis
  source 1..1452: mol_type = unassigned DNA
attgaacgctggcggcaggcttaacacatgcaagtcgaacgaagttaggaagcttgcttctgatacttagtggcggacgggtgagtaatgcttaggaatctgcctagtagtgggggataacttggggaaacccaagctaataccgcatacgacctacgggtgaaagggggcttttagctctcgctattagatgagcctaagtcggattagctggttggtggggtaaaggcctaccaaggcgacgatctgtagctggtctgagaggatgatcagccacactgggactgagacacggcccagactcctacgggaggcagcagtggggaatattggacaatgggcgaaagcctgatccagccatgccgcgtgtgtgaagaaggccttttggttgtaaagcactttaagtggggaggaaaagcttatggttaatacccataagccctgacgttacccacagaataagcaccggctaactctgtgccagcagccgcggtaatacagagggtgcaagcgttaatcggaattactgggcgtaaagcgcgcgtaggtggttatttaagtcagatgtgaaagccccgggcttaacctgggaactgcatctgatactggataactagagtaggtgagaggggagtagaattccaggtgtagcggtgaaatgcgtagagatctggaggaataccgatggcgaaggcagctccctggcatcatactgacactgaggtgcgaaagcgtgggtagcaaacaggattagataccctggtagtccacgccgtaaacgatgtctaccagtcgttgggtcttttaaagacttagtgacgcagttaacgcaataagtagaccgcctggggagtacggccgcaaggttaaaactcaaatgaattgacgggggcccgcacaagcggtggagcatgtggtttaattcgatgcaacgcgaagaaccttacctggtcttgacatagtgagaatcttgcagagatgcgagagtgccttcgggaattcacatacaggtgctgcatggctgtcgtcagctcgtgtcgtgagatgttgggttaagtcccgcaacgagcgcaacccttttccttagttaccagcgactcggtcgggaactctaaggatactgccagtgacaaactggaggaaggcggggacgacgtcaagtcatcatggcccttacgaccagggctacacacgtgctacaatggttggtacaaagggttgctacacagcgatgtgatgctaatctcaaaaagccaatcgtagtccggattggagtctgcaactcgactccatgaagtcggaatcgctagtaatcgcagatcagaatgctgcggtgaatacgttcccgggccttgtacacaccgcccgtcacaccatgggagttgatctcaccagaagtggttagcctaacgcaagagggcgatcaccacggtggggtcgatgactggggtg

SEQ ID NO: 2147 - DNA, 1452 bp, Moraxella caviae
  source 1..1452: mol_type = unassigned DNA
attgaacgctggcggcaggcttaacacatgcaagtcgaacgaggttagggagcttgctcctgatacctagtggcgaacgggtgagtaatgcttaggaatctgcctagtagtgggggataactacccgaaagggtagctaataccgcatacgacctacgggtgaaagggggcttttagctctcgctattagatgagcctaagtcggattagctagttggtggggtaaaggcctaccaaggcgacgatctgtagctggtctgagaggatgatcagccacactgggactgagacacggcccagactcctacgggaggcagcagtggggaatattggacaatgggcgaaagcctgatccagccatgccgcgtgtgtgaagaaggccttttggttgtaaagcactttaagtagggaggaaaagctaatggttaatacccattagccctgacgttacctacagaataagcaccggctaactctgtgccagcagccgcggtaatacagagggtgcgagcgttaatcggaattactgggcgtaaagcgagcgtaggtggttatttaagtcagatgtgaaagccccgggcttaacctgggaactgcatctgatactggataactagagtaggtgagagggaagtagaattccaggtgtagcggtgaaatgcgtagagatctggaggaataccgatggcgaaggcagcttcctggcatcatactgacactgaggttcgaaagcgtgggtagcaaacaggattagataccctggtagtccacgccgtaaacgatgtctaccagtcgttgggtctcttgaagacttagtgacgcagttaacgcaataagtagaccgcctggggagtacggccgcaaggttaaaactcaaatgaattgacgggggcccgcacaagcggtggagcatgtggtttaattcgatgcaacgcgaagaaccttacctggtcttgacatagtaggaatcttgcagagatgcgagagtgccttcgggaatctacatacaggtgctgcatggctgtcgtcagctcgtgtcgtgagatgttgggttaagtcccgcaacgagcgcaacccttttccttagttaccagcgattcggtcgggaactctaaggatactgccagtgacaaactggaggaaggcggggacgacgtcaagtcatcatggcccttacgaccagggctacacacgtgctacaatggttggtacaaagggttgctacctagcgataggatgctaatctcaaaaagccaatcgtagtccggattggagtctgcaactcgactccatgaagtcggaatcgctagtaatcgcagatcagaatgctgcggtgaatacgttcccgggccttgtacacaccgcccgtcacaccatgggagttgatctcaccagaagtggttagcctaacgcaagagggcgatcaccacggtggggtcgatgactggggtg

SEQ ID NO: 2148 - DNA, 1452 bp, Moraxella cuniculi
  source 1..1452: mol_type = unassigned DNA
attgaacgctggcggcaggcttaacacatgcaagtcgaacgaagttagggagcttgctcctgatacttagtggcggacgggtgagtaatgcttaggaatctgcctagtagtgggggataactatccgaaaggatagctaataccgcatacgacctacgggtgaaagggggcgtaagctctcgctattagatgagcctaagtcggattagctagttggtggggtaaaggcctaccaaggcgacgatctgtagctggtctgagaggatgatcagccacactgggactgagacacggcccagactcctacgggaggcagcagtggggaatattggacaatgggcgaaagcctgatccagccatgccgcgtgtgtgaagaaggccttttggttgtaaagcactttaagtggggaggaaaagctaatagctaatacctattagccctgacgttacccacagaataagcaccggctaactctgtgccagcagccgcggtaatacagagggtgcaagcgttaatcggaattactgggcgtaaagcgcgcgtaggtggttacttaagtcagatgtgaaagccccgggcttaacctgggaactgcatctgatactgggtaactagagtaggtgagagggaagtagaattccaggtgtagcggtgaaatgcgtagagatctggaggaataccgatggcgaaggcagcttcctggcatcatactgacactgaggtgcgaaagcgtgggtagcaaacaggattagataccctggtagtccacgccgtaaacgatgtctaccagtcgttgggtctcttgaagacttagtgacgcagttaacgcaataagtagaccgcctggggagtacggccgcaaggttaaaactcaaatgaattgacgggggcccgcacaagcggtggagcatgtggtttaattcgatgcaacgcgaagaaccttacctggtcttgacatacacagaattcgctagagatagcttagtgccttcgggaactgtgatacaggtgctgcatggctgtcgtcagctcgtgtcgtgagatgttgggttaagtcccgcaacgagcgcaacccttttccttagttaccagcactttaaggtgggaactctaaggatactgccagtgacaaactggaggaaggcggggacgacgtcaagtcatcatggcccttacgaccagggctacacacgtgctacaatggttggtacaaagggttgctacacagcgatgtgatgctaatctcaaaaagccaatcgtagtccggattggagtctgcaactcgactccatgaagtcggaatcgctagtaatcgcagatcagaatgctgcggtgaatacgttcccgggccttgtacacaccgcccgtcacaccatgggagttgatctcaccagaagtggttagcctaacgcaagagggcgatcaccacggtggggtcgatgactggggtg

SEQ ID NO: 2149 - DNA, 1451 bp, Moraxella equi
  source 1..1451: mol_type = unassigned DNA
attgaacgctggcggcaggcttaacacatgcaagtcgaacgatgaagtctagcttgctagacggattagtggcgaacgggtgagtaatgcttaggaatctgcctattagtgggggataacgtagggaaacttacgctaataccgcatacgtcttacgagagaaagggggcttttagctctcgctaatagatgagtctaagtcggattagctagttggtggggtaaaggcctaccaaggcgacgatctgtagctggtctgagaggatgatcagccacactgggactgagacacggcccagactcctacgggaggcagcagtggggaatattggacaatgggcgaaagcctgatccagccatgccgcgtgtgtgaagaaggccttttggttgtaaagcactttaagtggggaggaaaagcttgtggttaatacccacaagccctgacgttacccacagaataagcaccggctaactctgtgccagcagccgcggtaatacagagggtgcaagcgttaatcggaattactgggcgtaaagcgagcgtaggtggtcatttaagtcagatgtgaaagccccgggcttaacctgggaactgcatctgatactgggtgactagagtaggtgagagggaagtagaattccaggtgtagcggtgaaatgcgtagagatctggaggaataccgatggcgaaggcagcttcctggcatcatactgacactgaggttcgaaagcgtgggtagcaaacaggattagataccctggtagtccacgccgtaaacgatgtctaccagtcgttgggtctcttgaagacttagtgacgcagttaacgcaataagtagaccgcctggggagtacggccgcaaggttaaaactcaaatgaattgacgggggcccgcacaagcggtggagcatgtggtttaattcgatgcaacgcgaagaaccttacctggtcttgacatagtgagaatcctgcagagatgcgggagtgccttcgggaattcacatacaggtgctgcatggctgtcgtcagctcgtgtcgtgagatgttgggttaagtcccgcaacgagcgcaacccttttccttagttaccagcacttcgggtgggaactctaaggatactgccagtgacaaactggaggaaggcggggacgacgtcaagtcatcatggcccttacgaccagggctacacacgtgctacaatggttggtacaaagggttgctacacagcgatgtgatgctaatctcaaaaagccaatcgtagtccggattggagtctgcaactcgactccatgaagtcggaatcgctagtaatcgcagatcagaatgctgcggtgaatacgttcccgggccttgtacacaccgcccgtcacaccatgggagttgatctcaccagaagtggttagcctaacgcgagagggcgatcaccacggtggggtcgatgactggggtg

SEQ ID NO: 2150 - DNA, 1452 bp, Moraxella lacunata
  source 1..1452: mol_type = unassigned DNA
attgaacgctggcggcaggcttaacacatgcaagtcgaacgatgaagtctagcttgctagacggattagtggcgaacgggtgagtaatgcttaggaatctgcctattagtgggggataacgtagggaaacttacgctaataccgcatacgtcttacgagagaaagggggcttttagctctcgctaatagatgagcctaagtcggattagctagttggtggggtaaaggcctaccaaggcgacgatctgtagctggtctgagaggatgatcagccacactgggactgagacacggcccagactcctacgggaggcagcagtggggaatattggacaatgggcgaaagcctgatccagccatgccgcgtgtgtgaagaaggccttttggttgtaaagcactttaagtggggaggaaaagcttgtggttaatacctacaagccctgacgttacccacagaataagcaccggctaactctgtgccagcagccgcggtaatacagagggtgcaagcgttaatcggaattactgggcgtaaagcgagcgtaggtggtcatttaagtcagatgtgaaagccccgggcttaacctgggaactgcatctgatactgggtgactagagtaggtgagagggaagtagaattccaggtgtagcggtgaaatgcgtagagatctggaggaataccgatggcgaaggcagcttcctggcatcatactgacactgaggttcgaaagcgtgggtagcaaacaggattagataccctggtagtccacgccgtaaacgatgtctaccagtcgttgggtctcttgaagacttagtgacgcagttaacgcaataagtagaccgcctggggagtacggccgcaaggttaaaactcaaatgaattgacgggggcccgcacaagcggtggagcatgtggtttaattcgatgcaacgcgaagaaccttacctggtcttgacatagtgagaatcctgcagagatgcgggagtgccttcgggaattcacatacaggtgctgcatggctgtcgtcagctcgtgtcgtgagatgttgggttaagtcccgcaacgagcgcaacccttttccttagttaccagcgatttaagtcgggaactctaaggatactgccagtgacaaactggaggaaggcggggacgacgtcaagtcatcatggcccttacgaccagggctacacacgtgctacaatggttggtacaaagggttgctacacagcgatgtgatgctaatctcaaaaagccaatcgtagtccggattggagtctgcaactcgactccatgaagtcggaatcgctagtaatcgcagatcagaatgctgcggtgaatacgttcccgggccttgtacacaccgcccgtcacaccatgggagttgatctcaccagaagtggttagcctaacgcaagagggcgatcaccacggtggggtcgatgactggggtg

SEQ ID NO: 2151 - DNA, 1450 bp, Moraxella lincolnii
  source 1..1450: mol_type = unassigned DNA
attgaacgctggcggcaggcttaacacatgcaagtcgaacgaagaggtctagcttgctagactgattagtggcgaacgggtgagtaacatttaggaatctaccttatagagggggatagctcggggaaactcgaattaataccgcatacgacctacgggtgaaagggggcgcaagctcttgctataagatgagcctaaaccagattagctagttggtggggtaaaggcctaccaaggcgacgatctgtagctggtctgagaggatgatcagccacactgggactgagacacggcccagactcctacgggaggcagcagtggggaatattggacaatgggcgaaagcctgatccagccatgccgcgtgtgtgaagaaggccttatggttgtaaagcactttaagtggggaggaaaagcttatggataacacccataggttctgacgttacccacagaataagcaccggctaactctgtgccagcagccgcggtaatacagagggtgcaagcgttaatcggaattactgggcgtaaagcgagcgtaggtggtttattaagtcagatgtgaaatccctgggcttaacctaggaactgcatctgatactgataaactagagtaggtgagaggaaagtagaattccaggtgtagcggtgaaatgcgtagagatctggaggaataccgatggcgaaggcagctttctggcatcatactgacactgaggttcgaaagcgtgggtagcaaacaggattagataccctggtagtccacgccgtaaacgatgtctaccagtcgttgggtcttttaaaggcttagtgacgcagttaacgcgataagtagaccgcctggggagtacggccgcaaggttaaaactcaaatgaattgacgggggcccgcacaagcggtggagcatgtggtttaattcgatgcaacgcgaagaaccttacctggtcttgacatagtgagaatcttgcagagatgcgagagtgcctttgggaattcacatacaggtgctgcatggctgtcgtcagctcgtgtcgtgagatgttgggttaagtcccgcaacgagcgcaacccttttccttagttaccagcgacttggtcggggactttaaggacactgccagtgacaaactggaggaaggcggggacgacgtcaagtcatcatggcccttacgaccagggctacacacgtgctacaatggtaggtacagagggcagctacacggcgacgtgatgccaatctcaaaaagcctatcttagtccagattggagtctgcaactcgactccatgaagtcggaatcgctagtaatcgcggatcagaatgccgcggtgaatacgttcccgggccttgtacacaccgcccgtcacaccatgggagttgattgcaccagaagtggttagcctaacttaggagggcgatcaccacggtgtggttaatgactggggtg

SEQ ID NO: 2152 - DNA, 1443 bp, Moraxella nonliquefaciens
  source 1..1443: mol_type = unassigned DNA
ctggcggcaggcttaacacatgcaagtcgaacgatgaagtctagcttgctagacggattagtggcgaacgggtgagtaatgcttaggaatctgcctattagtgggggataacgtagggaaacttacgctaataccgcatacgacctacgggtgaaagggggcttttagctctcgctaatagatgagcctaagtcggattagctagttggtggggtaaaggcctaccaaggcgacgatctgtagctggtctgagaggatgatcagccacactgggactgagacacggcccagactcctacgggaggcagcagtggggaatattggacaatgggcgaaagcctgatccagccatgccgcgtgtgtgaagaaggccttttggttgtaaagcactttaagtggggaggaaaagcttatggttaatacccataagccctgacgttacccacagaataagcaccggctaactctgtgccagcagccgcggtaatacagagggtgcaagcgttaatcggaattactgggcgtaaagcgcgcgtaggtggttatttaagtcagatgtgaaagccccgggcttaacctgggaactgcatctgatactggataactagagtaggtgagaggggagtagaattccaggtgtagcggtgaaatgcgtagagatctggaggaataccgatggcgaaggcagctccctggcatcatactgacactgaggtgcgaaagcgtgggtagcaaacaggattagataccctggtagtccacgccgtaaacgatgtctaccagtcgttgggtcttttaaagacttagtgacgcagttaacgcaataagtagaccgcctggggagtacggccgcaaggttaaaactcaaatgaattgacgggggcccgcacaagcggtggagcatgtggtttaattcgatgcaacgcgaagaaccttacctggtcttgacatagtgagaatcttgcagagatgcgagagtgccttcgggaattcacatacaggtgctgcatggctgtcgtcagctcgtgtcgtgagatgttgggttaagtcccgcaacgagcgcaacccttttccttagttaccagcgactcggtcgggaactctaaggatactgccagtgacaaactggaggaaggcggggacgacgtcaagtcatcatggcccttacgaccagggctacacacgtgctacaatggttggtacaaagggttgctacacagcgatgtgatgctaatctcaaaaagccaatcgtagtccggattggagtctgcaactcgactccatgaagtcggaatcgctagtaatcgcagatcagaatgctgcggtgaatacgttcccgggccttgtacacaccgcccgtcacaccatgggagttgatctcaccagaagtggttagcctaacgcaagagggcgatcaccacggtggggtcgatgactggggtg

SEQ ID NO: 2153 - DNA, 1452 bp, Moraxella ovis
  source 1..1452: mol_type = unassigned DNA
attgaacgctggcggcaggcttaacacatgcaagtcgaacgatgagtatccagcttgctggatatgattagtggcgaacgggtgagtaatgcttaggaatctgcctagtagtgggggataaccatccgaaaggatggctaataccgcatacgacctacgggtgaaagggggcgtaagctctcgctattagatgagcctaagtcggattagctggttggtggggtaaaggcctaccaaggcgacgatctgtagctggtctgagaggatgatcagccacactgggactgagacacggcccagactcctacgggaggcagcagtggggaatattggacaatgggcgaaagcctgatccagccatgccgcgtgtgtgaagaaggccttttggttgtaaagcactttaagtggggaggaaaagcttgtggttaatacccacaagccctgacgttacccacagaataagcaccggctaactctgtgccagcagccgcggtaatacagagggtgcgagcgttaatcggaattactgggcgtaaagcgcgcgtaggtggttgtttaagtcagatgtgaaatccctgggcttaacctaggaactgcatctgatactggacaactagagtaggtgagagggaagtagaattccaggtgtagcggtgaaatgcgtagagatctggaggaataccgatggcgaaggcagcttcctggcatcatactgacactgaggtgcgaaagcgtgggtagcaaacaggattagataccctggtagtccacgccgtaaacgatgtctaccagtcgttgggtcttttaaagacttagtgacgcagttaacgcaataagtagaccgcctggggagtacggccgcaaggttaaaactcaaatgaattgacgggggcccgcacaagcggtggagcatgtggtttaattcgatgcaacgcgaagaaccttacctggtcttgacatatctagaatcctgcagagatgcgggagtgccttcgggaattagaatacaggtgctgcatggctgtcgtcagctcgtgtcgtgagatgttgggttaagtcccgcaacgagcgcaacccttttccttagttaccagcgactcggtcgggaactctaaggatactgccagtgacaaactggaggaaggcggggacgacgtcaagtcatcatggcccttacgaccagggctacacacgtgctacaatggttggtacaaagggttgctacacagcgatgtgatgccaatctcaaaaagccaatcgtagtccggattagagtctgcaactcgactctatgaagtcggaatcgctagtaatcgcagatcagaatgctgcggtgaatacgttcccgggccttgtacacaccgcccgtcacaccatgggagttgatctcaccagaagtgggtagcctaacgcaagagggcgctcaccacggtggggtcgatgactggggtg

SEQ ID NO: 2154 - DNA, 1452 bp, Moraxella pluranimalium
  source 1..1452: mol_type = unassigned DNA
attgaacgctggcggcaggcttaacacatgcaagtcgaacgaggttagggagcttgctcctgatacctagtggcgaacgggtgagtaatgcttaggaatctgcctagtagtgggggataacttggggaaactcaagctaataccgcatacgacctacgggtgaaagggggcgcaagctctcgctattagatgagcctaagtcggattagctagttggtggggtaaaggcctaccaaggcgacgatctgtagctggtctgagaggatgatcagccacactgggactgagacacggcccagactcctacgggaggcagcagtggggaatattggacaatgggcgaaagcctgatccagccatgccgcgtgtgtgaagaaggccttttggttgtaaagcactttaagtagggaggaaaagctaatggttaatacccattagccctgacgttacctacagaataagcaccggctaactctgtgccagcagccgcggtaatacagagggtgcaagcgttaatcggaattactgggcgtaaagcgcgcgtaggtggttacttaagtcagatgtgaaagccccgggcttaacctgggaactgcatctgatactgggtaactagagtaggtgagaggggagtagaattccaggtgtagcggtgaaatgcgtagagatctggaggaataccgatggcgaaggcagctccctggcatcatactgacactgaggtgcgaaagcgtgggtagcaaacaggattagataccctggtagtccacgccgtaaacgatgtctaccagtcgttgggtctcttgaagacttagtgacgcagttaacgcaataagtagaccgcctggggagtacggccgcaaggttaaaactcaaatgaattgacgggggcccgcacaagcggtggagcatgtggtttaattcgatgcaacgcgaagaaccttacctggtcttgacatacacagaattcgctagagatagcttagtgccttcgggaactgtgatacaggtgctgcatggctgtcgtcagctcgtgtcgtgagatgttgggttaagtcccgcaacgagcgcaacccttttccttagttaccagcgggttatgccgggaactctaaggatactgccagtgacaaactggaggaaggcggggacgacgtcaagtcatcatggcccttacgaccagggctacacacgtgctacaatggttggtacaaagggttgctacacagcgatgtgatgctaatctcaaaaagccaatcgtagtccggattggagtctgcaactcgactccatgaagtcggaatcgctagtaatcgcagatcagaatgctgcggtgaatacgttcccgggccttgtacacaccgcccgtcacaccatgggagttgatctcaccagaagtggttagcctaacgcaagagggcgatcaccacggtggggtcgatgactggggtg

SEQ ID NO: 2155 - DNA, 1451 bp, Moraxella porci
  source 1..1451: mol_type = unassigned DNA
attgaacgctggcggcaggcttaacacatgcaagtcgaacgaggttagaaagcttgctttcgatacctagtggcgaacgggtgagtaatgcttaggaatctgcctagtagtgggggataacttggggaaactcaagctaataccgcatacgacctacgggtgaaagggggcgcaagctctcgctattagatgagcctaagtcggattagctagttggtggggtaaaggcctaccaaggcgacgatctgtagctggtctgagaggatgatcagccacactgggactgagacacggcccagactcctacgggaggcagcagtggggaatattggacaatgggcgaaagcctgatccagccatgccgcgtgtgtgaagaaggccttttggttgtaaagcactttaagtagggaggaaaagctaatggttaatacccattagccctgacgttacctacagaataagcaccggctaactctgtgccagcagccgcggtaatacagagggtgcaagcgttaatcggaattactgggcgtaaagcgcgcgtaggtggttacttaagtcagatgtgaaagccccgggcttaacctgggaactgcatctgatactgggtgactagagtaggtgagaggggagtagaattccaggtgtagcggtgaaatgcgtagagatctggaggaataccgatggcgaaggcagctccctggcatcatactgacactgaggtgcgaaagcgtgggtagcaaacaggattagataccctggtagtccacgccgtaaacgatgtctaccagtcgttgggtctcttgaagacttagtgacgcagttaacgcaataagtagaccgcctggggagtacggccgcaaggttaaaactcaaatgaattgacgggggcccgcacaagcggtggagcatgtggtttaattcgatgcaacgcgaagaaccttacctggtcttgacatacagagaattcgctagagatagcttagtgccttcgggaactctgatacaggtgctgcatggctgtcgtcagctcgtgtcgtgagatgttgggttaagtcccgcaacgagcgcaacccttttccttagttaccagcacttcgggtgggaactctaaggatactgccagtgacaaactggaggaaggcggggacgatgtcaagtcatcatggcccttacgaccagggctacacacgtgctacaatggttggtacaaagggttgctacacagcgatgtgatgctaatctcaaaaagccaatcgtagtccggattggagtctgcaactcgactccatgaagtcggaatcgctagtaatcgcagatcagaatgctgcggtgaatacgttcccgggccttgtacacaccgcccgtcacaccatgggagttgatctcaccagaagtggttagcctaacgcaagagggcgatcaccacggtggggtcgatgactggggtg

SEQ ID NO: 2156 - DNA, 1356 bp, Morganella psychrotolerans
  source 1..1356: mol_type = unassigned DNA
agcttgcttctctgctgacgagcggcggacgggtgagtaatgtatggggatctgcctgatggagggggataactactggaaacggtagctaataccgcataatgtctccggaccaaagcgggggaccttcgggcctcgcaccatcagatgaacccatatgggattagctagtaggtgaggtaatggctcacctaggcgacgatctctagctggtctgagaggatgatcagccacactgggactgagacacggcccagactcctacgggaggcagcagtggggaatattgcacaatgggcgcaagcctgatgcagccatgccgcgtgtatgaagaaggccttagggttgtaaagtactttcagtcgggaggaaggtgttgagtttaatatgctcagcaattgacgttaccgacagaagaagcaccggctaactccgtgccagcagccgcggtaatacggagggtgcaagcgttaatcggaattactgggcgtaaagcgcacgcaggcggttgattaagtcagatgtgaaatccccgggctcaacccgggaattgcatctgagactggtcagctagagtcttgtagaggggggtagaattccatgtgtagcggtgaaatgcgtagagatgtggaggaataccggtggcgaaggcggccccctggacaaagactgacgctcaggtgcgaaagcgtggggagcaaacaggattagataccctggtagtccacgctgtaaacgatgtcgacttggaggttgtgcccttgaggcgtggcttccggagctaacgcgttaagtcgaccgcctggggagtacggccgcaaggttaaaactcaaatgaattgacgggggcccgcacaagcggtggagcatgtggtttaattcgatgcaacgcgaagaaccttacctactcttgacatccagagaacttagcagagatgctttggtgccttcgggaactctgagacaggtgctgcatggctgtcgtcagctcgtgttgtgaaatgttgggttaagtcccgcaacgagcgcaacccttatcctttgttgccagcgcgtaatggcgggaactcaaaggagactgccggtgataaaccggaggaaggtggggatgacgtcaagtcatcatggcccttacgagtagggctacacacgtgctacaatggcgtatacaaagggaagcgacctcgcgagagcaagcggaactcacaaagtacgtcgtagtccggattggagtctgcaactcgactccatgaagtcggaatcgctagtaatcgtagatcagaatgctacggtgaatacgttcccgggccttgtacacaccgcccgtcacaccatgggagtgggttgcaaaagaag

SEQ ID NO: 2157 - DNA, 1467 bp, Moritella dasanensis
  source 1..1467: mol_type = unassigned DNA
attgaacgctggcggtaggcttaacacatgcaagtcgagcggaaacgaagaatagcttgctattctggcgtcgagcggcggacgggtgagtaatgcttgggaatctgcctagtcgagggggacaacagttggaaacgactgctaataccgcatacgacctacgggtgaaagggggcctcttcttgaaagctcccgcgactagatgagcccaagtgggattagcttgttggtgaggtaagagctcaccaaggcgacgatccctagctggtctgagaggatgatcagccacactggaactgagacacggtccagactcctacgggaggcagcagtggggaatattgcacaatgggcgaaagcctgatgcagccataccgcgtgtatgaagaaggccttagggttgtaaagtactttcagcgaggaggaaaggttaacgattaatactcgttagctgtgacgttactcgcagaagaagcaccggctaactccgtgccagcagccgcggtaatacggagggtgcaagcgttaatcggaattactgggcgtaaagcgcatgcaggcggtttgttaagcgagatgtgaaagccccgggctcaacctgggaactgcatttcgaactggcaaactagagttcttgagagggtggtagaatttcaggtgtagcggtgaaatgcgtagagatctgaaggaataccagtggcgaaggcggccacctggcaagtaactgacgctcagatgcgaaagcgtgggtagcaaacgggattagataccccggtagtccacgccgtaaacgatgtctactcggagtttggttccttgcgaactgggctcttaagctaacgcattaagtagaccgcctggggagtacggccgcaaggttaaaactcaaatgaattgacgggggcccgcacaagcggtggagcatgtggtttaattcgatgcaacgcgaagaaccttacctactcttgacatccacagaatctggtagagatacctcagtgccttcgggaactgtgagacaggtgctgcatggctgtcgtcagctcgtgttgtgaaatgttgggttaagtcccgcaacgagcgcaacccttatccttatttgccagcacgtaatggtgggaactctaaggagactgccggtgataaaccggaggaaggtggggacgacgtcaagtcatcatggcccttacgagtagggctacacacgtgctacaatggcgcatacaaagggctgcaaaccagcgatggtaagcgaatcccataaagtgcgtcgtagtccggattggggtctgcaactcgaccccatgaagtcggaatcgctagtaatcgtgaatcagaatgtcacggtgaatacgttcccgggccttgtacacaccgcccgtcacaccatgggagtgggctgcaccagaagtcattagcttaaccttcgggagggcgatgaccacggtgtggttcatgactggggtg

SEQ ID NO: 2158 - DNA, 1426 bp, Moritella marina
  source 1..1426: mol_type = unassigned DNA
attgaacgctggcggtaggcttaacacatgcaagtcgagcggaaacgaagaatagcttgctattctggcgtcgagcggcggacgggtgagtaatgcttgggaatctgcctagtcgagggggacaacagttggaaacgactgctaataccgcatacgacctacgggtgaaagggggcctcttcttgaaagctctcgcgactagatgagctcaagtgggattagcttgttggtgaggtaagagctcaccaaggcgacgatccctagctggtctgagaggatgatcagccacactggaactgagacacggtccagactcctacgggaggcagcagtggggaatattgcacaatgggcgaaagcctgatgcagccataccgcgtgtatgaagaaggccttcgggttgtaaagtactttcagcgaggaggaaaggtggtaaattaatactttaccactgtgacgttactcgcagaagaagcaccggctaactccgtgccagcagccgcggtaatacggagggtgcaagtaatcggaattactgggcgtaaagcgcatgcaggcggtttgttaagcgagatgtgaaagccccgggctcaacctgggaactgcatttcgaagggtggtagaatttcaggtgtagcggtgaaatgcgtagagatctgaaggaataccagtggcgaaggcggccacctggcaagtaactgacgctcagatgcgaaagcgtgggtagcaaacgggattagataccccggttccacgccgtaaacgatgtctactttggttccttgagaactgggctcttaagctaacgcattaagtagaccgcctggggagtacggccgcaaggttaaaactcaaatgaattgacgggggcccgcacaagcggtggagcatgtggtttaattcgatgcaacgcgaagaaccttacctactcttgacatccatagaacttttcagagatgaattggtgccttcgggaactatgagacaggtgctgcatggctgtcgtcagctcgtgttgtgaaatgttgggttaagtcccgcaacgagcgcaacccttatccttatttgccagcataatggtgggaactctaaggagactgccggtgataaaccggaggaaggtggggacgacgtcaagtcatcatggcccttacgagtagggctacacacgtgctacaatggcgcatacaaagggctgcaaaccagcgatggtaatcccataaagtgcgtcgtagtccggattggggtctgcaactcgaccccatgaagtcggaatcgctagtaatcgtgaatcagaatgtcacggtgaatacgttcccgggccttgtacacaccgcccgtcacaccatgggagtgggctgcaccagaagtcattagcttaaccttcgggagggcgatgaccacggtgtggttcatgactggggtg

SEQ ID NO: 2159 - DNA, 1467 bp, Moritella viscosa
  source 1..1467: mol_type = unassigned DNA
attgaacgctggcggtaggcttaacacatgcaagtcgagcggaaacgaagaatagcttgctattctggcgtcgagcggcggacgggtgagtaatgcttgggaatctgcctagtcgagggggacaacagttggaaacgactgctaataccgcatacgacctacgggtgaaagggggcctcttcttgaaagctctcgcgactagatgagcccaagtgggattagcttgttggtgaggtaagagctcaccaaggcgacgatccctagctggtctgagaggatgatcagccacactggaactgagacacggtccagactcctacgggaggcagcagtggggaatattgcacaatgggggaaaccctgatgcagccataccgcgtgtatgaagaaggccttagggttgtaaagtactttcagcgaggaggaaaggtagtagattaatactctgctactgtgacgttactcgcagaagaagcaccggctaactccgtgccagcagccgcggtaatacggagggtgcaagcgttaatcggaattactgggcgtaaagcgcatgcaggcggtttgttaagcgagatgtgaaagccccgggctcaacctgggaactgcatttcgaactggcaaactagagttcttgagagggtggtagaatttcaggtgtagcggtgaaatgcgtagagatctgaaggaataccagtggcgaaggcggccacctggcaagtaactgacgctcagatgcgaaagcgtgggtagcaaacgggattagataccccggtagtccacgccgtaaacgatgtctactcggagtttggttccttgagaactgggctcttaagctaacgcattaagtagaccgcctggggagtacggccgcaaggttaaaactcaaatgaattgacgggggcccgcacaagcggtggagcatgtggtttaattcgatgcaacgcgaagaaccttacctactcttgacatccatagaactttccagagatgaattggtgccttcgggaactatgagacaggtgctgcatggctgtcgtcagctcgtgttgtgaaatgttgggttaagtcccgcaacgagcgcaacccttatccttatttgccagcacgtaatggtgggaactctaaggagactgccggtgataaaccggaggaaggtggggacgacgtcaagtcatcatggcccttacgagtagggctacacacgtgctacaatggcgcatacaaagggctgcaaaccagcaatggtaagcgaatcccataaagtgcgtcgtagtccggattggggtctgcaactcgaccccatgaagtcggaatcgctagtaatcgtgaatcagaatgtcacggtgaatacgttcccgggccttgtacacaccgcccgtcacaccatgggagtgggctgcaccagaagtcattagcttaaccttcgggagggcgatgaccacggtgtggttcatgactggggtg

SEQ ID NO: 2160 - DNA, 1466 bp, Moritella yayanosii
  source 1..1466: mol_type = unassigned DNA
attgaacgctggcggtaggcttaacacatgcaagtcgagcggaaacgaagaatagcttgctattctggcgtcgagcggcggacgggtgagtaatgcttgggaatctgcctagtcgagggggacaacagttggaaacgactgctaataccgcatacgacctacgggtgaaagggggcctcttcttgaaagctctcgcgactagatgagcccaagtgggattagcttgttggtgaggtaagagctcaccaaggcgacgatccctagctggtctgagaggatgatcagccacactggaactgagacacggtccagactcctacgggaggcagcagtggggaatattgcacaatggaggaaactctgatgcagccataccgcgtgtatgaagaaggccttagggttgtaaagtactttcagcaaggaggaaaggtggtgacttaatacgttatcactgtgacgttactcgcagaagaagcaccggctaactccgtgccagcagccgcggtaatacggagggtgcgagcgttaatcggaattactgggcgtaaagcgcatgcaggcggtttgttaagcgagatgtgaaagccccgggctcaacctgggaactgcatttcgaactggcaaactagagttcttgagagggtggtagaatttcaggtgtagcggtgaaatgcgtagagatctgaaggaataccagtggcgaaggcggccacctggcaagtaactgacgctcagatgcgaaagcgtgggtagcaaacgggattagataccccggtagtccacgccgtaaacgatgtctactcggagtttggttccttgagaactgggctcttaagctaacgcattaagtagaccgcctggggagtacggccgcaaggttaaaactcaaatgaattgacgggggcccgcacaagcggtggagcatgtggtttaattcgatgcaacgcgaagaaccttacctactcttgacatccatagaactttccagagatggattggtgccttcgggaactatgagacaggtgctgcatggctgtcgtcagctcgtgttgtgaaatgttgggttaagtcccgcaacgagcgcaacccttatccttatttgccagcacgtaatggtgggaactctaaggagactgccggtgataaaccggaggaaggtggggacgacgtcaagtcatcatggcccttacgagtagggctacacacgtgctacaatggcgcatacaaagggctgcaaaccagcaatggtaagcgaatcccacaaagtgcgtcgtagtccggattggggtctgcaactcgaccccatgaagtcggaatcgctagtaatcgtgaatcagaatgtcacggtgaatacgttcccgggccttgtacacaccgcccgtcacaccatgggagtgggctgcaccagaagtcattagcttaaccttcgggagggcgatgaccacggtgtggttcatgactgggtg

SEQ ID NO: 2161 - DNA, 1463 bp, Morococcus cerebrosus
  source 1..1463: mol_type = unassigned DNA
attgaacgctggcggcatgctttacacatgcaagtcggacggcagcacagagaagcttgcttcttgggtggcgagtggcgaacgggtgagtaacatatcggaacgtaccgagcagtgggggataactaatcgaaagattagctaataccgcatatattctgaggaagaaagcaggggaccatttggccttgcgctgtttgagcggccgatatctgattagctagttggtggggtaaaggcctaccaaggcgacgatcagtagcgggtctgagaggatgatccgccacactgggactgagacacggcccagactcctacgggaggcagcagtggggaattttggacaatgggcgaaagcctgatccagccatgccgcgtgtctgaagaaggccttcgggttgtaaaggacttttgtcagggaagaaaagggcggggttaatacccctgtctgatgacggtacctgaagaataagcaccggctaactacgtgccagcagccgcggtaatacgtagggtgcgagcgttaatcggaattactgggcgtaaagcgggcgcagacggttacttaagcaggatgtgaaatccccgggctcaacctgggaactgcgttctgaactgggtgactagagtgtgtcagagggaggtagaattccacgtgtagcagtgaaatgcgtagagatgtggaggaataccgatggcgaaggcagcctcctgggataacactgacgttcatgcccgaaagcgtgggtagcaaacaggattagataccctggtagtccacgccctaaacgatgtcgattagctgttgggcagcatgactgcttagtagcgaagctaacgcgtgaaatcgaccgcctggggagtacggtcgcaagattaaaactcaaaggaattgacggggacccgcacaagcggtggatgatgtggattaattcgatgcaacgcgaagaaccttacctggtcttgacatgtacggaatcctccagagacggaggagtgccttcgggagccgtaacacaggtgctgcatggctgtcgtcagctcgtgtcgtgagatgttgggttaagtcccgcaacgagcgcaacccttgtcattagttgccatcattaagttgggcactctaatgagactgccggtgacaagccggaggaaggtggggatgacgtcaagtcctcatggcccttatgaccagggcttcacacgtcatacaatggtcggtacagagggtagccaagccgcgaggtggagccaatctcacaaaaccgatcgtagtccggattgcactctgcaactcgagtgcatgaagtcggaatcgctagtaatcgcaggtcagcatactgcggtgaatacgttcccgggtcttgtacacaccgcccgtcacaccatgggagtgggggataccagaagtaggtagggtaaccgcaaggagcccgcttaccacggtatgcttcatgactggggtg

SEQ ID NO: 2162 - DNA, 1438 bp, Mucilaginibacter gracilis
  source 1..1438: mol_type = unassigned DNA
gatgaacgctagcggcaggcctaatacatgcaagtcggacgggatttgggagcttgctcctgatgagagtggcgcacgggtgcgtaacacgtatgtaacctaccttatccagggggatagcctctcgaaagagagattaagaccgcataacattacgactcagcattgagatgtaatcaaatatttatagggataagatgggcatgcgggacattagctagttggcggggtaacggcccaccaaggcgacgatgtctaggggatctgagaggatgaccccccacactggtactgagacacggaccagactcctacgggaggcagcagtaaggaatattggtcaatgggcggaagcctgaaccagccatgccgcgtgcaggaagacggccctacgggttgtaaactgcttttgcaggggaataaaccttcgtatgtatacgaagctgaatgtactctgagaataaggatcggctaactccgtgccagcagccgcggtaatacggaggatccaagcgttatccggatttattgggtttaaagggtgcgtaggcggccaattaagtcaggggtgaaagacggtagcttaactatcgcagtgcctttgatactgattggcttgaatggactagaggtaggcggaatgtgacaagtagcggtgaaatgcatagatatgtcacagaacaccaattgcgaaggcagcttactatggtttaattgacgctgaggcacgaaagcgtggggatcaaacaggattagataccctggtagtccacgccctaaacgatgaacactcgatgttagcgatatacagttagcgtctaagcgaaagcgttaagtgttccacctggggagtacgcccgcaagggtgaaactcaaaggaattgacgggggcccgcacaagcggaggagcatgtggtttaattcgatgatacgcgaggaaccttacccgggcttgaaagttagtgaatgattcagagacggatcagctcttcggagccaggaaattaggtgctgcatggctgtcgtcagctcgtgccgtgaggtgttgggttaagtcccgcaacgagcgcaacccctatgtttagttgccagcacgttaaggtggggactctaaacagactgcctacgcaagtagagaggaaggaggggacgacgtcaagtcatcatggcccttacgtccggggctacacacgtgctacaatggatggtacagagggcagctacctggcaacaggatgcaaatctcttaaagccattcacagttcggatcggggtctgcaactcgaccccgtgaagttggattcgctagtaatcgcatatcagcaatgatgcggtgaatacgttcccgggccttgtacacaccgcccgtcaagccatggaagctggaagtacctgaagtgcgtaaccgcaaggagcgtcctagggtaaagtcggtaac

SEQ ID NO: 2163 - DNA, 1471 bp, Mucispirillum schaedleri
  source 1..1471: mol_type = unassigned DNA
aacgaacgctggcggcgtgcttaacacatgcaagtcagggagaaagtctcttcggggatgattaaaccggcgcacgggtgagtaacacgtgagtgacctgccttttagactggaacaacttaccgaaaggtgagctaatgccggatgagttatataagtgcatgtttatataggaaaagttggggagacctgacgctgaaagatggactcgcgtcccattagctagttggtagggtaatggcctaccaaggcgacgatgggtagccggcctgagagggtggccggccacactgggactgagacacggcccagactcctacgggaggcagcagtggggaattttgcgcaatgctcgtaagagtgacgcagcgacgccgcgtgaatgacgaaggccttcgggtcgtaaagttctttcgacagggaagaaaatgcctataagtaactgtgtatgtattgacggtacctgtataagcagccccggctaactccgtgccagcagccgcggtaatacggagggggcgagcgttgttcggagtgactgggcgtaaagagcacgtaggcggtgttgtaagtcattagtcaaagactagagctcaactttagtaaggctagtgatactataatactagagtatcagagaggattgcagaattcctggtgtagcggtgaaatgcgtagatatcaggaggaataccgttagcgaaggcggcaatctggctggaaactgacgctgaggtgcgaaagcgtgggtagcaaacaggattagataccctggtagtccacgctgtaaacgatggatgctaggtgttgggcttttaagttcagtgccgcagcaaacgcgataagcatcccgcctggggagtacgtttgcaagaatgaaactcaaaggaattgacgggggcccgcacaagcggtggagcacgtggtttaattcgatgctaaccgaagaaccttacctgggtttgacatccacagaaggcgttagagataatgctgtgcctgatttatcaggagctgtgagacaggtgctgcatggctgtcgtcagctcgtgccgtgaggtgttgggttaagtcccgcaacgagcgcaacccctatttccagttgctaacggttgaagctgagcactctggagagactgccagcgataagctggaggaaggtggggacgacgtcaagtcatcatggcccttatgtccagggctacacacgtgctacaatggcataatcagagggaagcatctccgcaaggataagcgaatctcataaattatgtctcagttcagattgcagtctgcaactcgactgcatgaagtcggaatcgctagtaatcgcagatcagcaaagctgcggtgaatacgttcccgggccttgtacacaccgcccgtcacaccacgggagtcggtcgcgcctgaagccggtggcctatcagtaatgggggagccgtctatggcgagattggtaactggggtg

SEQ ID NO: 2164 - DNA, 1455 bp, unidentified
  source 1..1455: mol_type = unassigned DNA; note = Muribacter muris
  misc_difference 587..588: note = n is a, c, g, or t
  misc_difference 757: note = n is a, c, g, or t
  misc_difference 810: note = n is a, c, g, or t
  misc_difference 1057: note = n is a, c, g, or t
  misc_difference 1102: note = n is a, c, g, or t
  misc_difference 1135: note = n is a, c, g, or t
attgaacgctggcggcaggcttaacacatgcaagtcgaacggtagcagaagagagcttgctctcttgctgacgagtggcggacgggtgagtaatgcttgggaatctggcttatggagggggataactactggaaacggtagctaataccgcgtaatgtctgcggactaaagggggcgaaagctcttgccataagatgagcccaagtgggattaggtagttggtgaggtaayggctcaccaagccgtcgatctctagctggtctgagaggatgaccagccacactggaactgagacacggtccagactcctacgggaggcagcagtggggaatattgcacaatgggggaaaccctgatgcagccatgccgcgtgaatgaagaaggccttcgggttgtaaagttctttcggtgatgaggaaggtgtaatggttaatacccgttacaattgacgttagtcacagaagaagcaccggctaactccgtgccagcagccgcggtaatacggagggtgcgagcgttaatcggaataactgggcgtaaagggcacgcaggcggttgtttaagtgaggtgtgaaagccctgggccnnacctgggaattgcatttcagactggacaactagagtactttagggaggggtagaattccacgtgtagcggtgaaatgcgtagagatgtggaggaataccgaaggcgaaggcagccccttgggaatgtactgacgctcatgtgcgaaagcgtggggagcaaacaggattngataccctggtagtccacgccgtaaacgctgtcgatttggggattgggctttnagcttggtgcccgtagctaacgtgataaatcgaccgcctggggagtacggccgcaaggttaaaactcaaatgaattgacgggggcccgcacaagcggtggagcatgtggtttaattcgatgcaacgcgaagaaccttacctactcttgacatcctaagaagagactagagatagtcttgtgccttcgggaacttagagacaggtgctgcatggctgtcgtcagctcgtgttgtgaaatgttgggttnagtcccgcaacgagcgcaacccttatcctttgttgccagcgattngggtcgggaactcaaaggagactgccggtgatnaaccggaggaaggtggggatgacgtcaagtcatcatggcccttacgagtagggctacacacgtgctacaatggtgcatacagagggtagcgaacctgcgagggtaagccaatctcagaaagtgcatctaagtccggattggagtctgcaactcgactccatgaagtcggaatcgctagtaatcgcaaatcagaatgttgcggtgaatacgttcccgggccttgtacacaccgcccgtcacaccatgggagtgggttgtaccagaagtggatagcttaaccgcaaggggggcgttcaccacggtatgattcatgactgggg

SEQ ID NO: 2165 - DNA, 1462 bp, unidentified
  source 1..1462: mol_type = unassigned DNA; note = Muribaculum intestinale
gatgaacgctagcgacaggcctaacacatgcaagtcgaggggcatcggggagcgaagcttgctttgctccgccggcgaccggcgcacgggtgagtaacgcgtatgcaacctgcccgtttcagcgggataacccggagaaatccggcctaataccgcatgtggccgaggggaggcatcttctttcggccaaaggaggcgactccggagacggatgggcatgcgtgacattagcttgttggcggggtaacggcccaccaaggcgacgatgtctaggggttctgagaggaaggtcccccacactggtactgagacacggaccagactcctacgggaggcagcagtgaggaatattggtcaatgggcgagagcctgaaccagccaagtcgcgtgaaggatgacggccctacgggttgtaaacttcttttgtcagggagcaattgggtccacgcgtgggcttagcgagagtacctgaagaaaaagcatcggctaactccgtgccagcagccgcggtaatacggaggatgcgagcgttatccggatttattgggtttaaagggtgcgtaggcggaatatcaagtcagcggtaaaaattcggggctcaaccccgtcgtgccgttgaaactgatgttcttgagtgggcgagaagtatgcggaatgcgtggtgtagcggtgaaatgcatagatatcacgcagaactccgattgcgaaggcagcataccggcgcccaactgacgctgaagcacgaaagcgtgggtatcgaacaggattagataccctggtagtccacgcagtaaacgatgaatgctaattgtccggagggattgacctctgggtgatacagcgaaagcgttaagcattccacctggggagtacgccggcaacggtgaaactcaaaggaattgacgggggcccgcacaagcggaggaacatgtggtttaattcgatgatacgcgaggaaccttacccgggctcaaacgcaggaggaatacatttgaaagggtgtagctctacggagtcttctgcgaggtgctgcatggttgtcgtcagctcgtgccgtgaggtgtcggcttaagtgccataacgagcgcaacccctatcgacagttgccaacaggtgaagctgggaactctgtcgagactgccggcgcaagctgagaggaaggcggggatgacgtcaaatcagcacggcccttacgtccggggcgacacacgtgttacaatggcggccacagcgggaagccaggcggcgacgccgagcggaacccgaaaagccgtctcagttcggattggagtctgcaacccgactccatgaagctggattcgctagtaatcgcgcatcagccacggcgcggtgaatacgttcccgggccttgtacacaccgcccgtcaagccatgggagccgggagtgcctgaagtacgtgaccgcaaggagcgtcctagggtaagaccggtgactggggct

SEQ ID NO: 2166 - DNA, 1439 bp, unidentified
  source 1..1439: mol_type = unassigned DNA; note = Muricauda taeanensis
gatgaacgctagcggcaggcctaacacatgcaagtcgaggggtagggggtgcttgcacccctgagaccggcgcacgggtgcggaacgcgtatggaacctgcccctgtcaggggaatagcccagggaaacttggattaatgccccatggtatcattacatcgcatgatgttatgattaaagatttatcggacagggatggccatgcgtaccattagcttgatggtggggtaacggcccaccatggcaacgatggttaggggccctgagagggggatcccccacactggtactgagacacggaccagactcctacgggaggcagcagtgaggaatattggacaatggtcggaagactgatccagccatgccgcgtgcaggatgacggccctatgggttgtaaactgcttttatacgggaagaaacccacctacgtgtaggtggctgacggtaccgtaagaataaggaccggctaactccgtgccagcagccgcggtaatacggagggtccgagcgttatccggaatcattgggtttaaagggtccgtaggcgggcctgtaagtcaggggtgaaagtttgtggctcaaccataaaattgcctttgatactgcaggtcttgagtcatggtggggttgccggaacatgtggtgtagcggtgaaatgcatagatatcacatagaacaccgatcgcgaaggcaggtgaccaaccatgtactgacgctgatggacgaaagcgtgggtagcgaacgggattagataccccggtagtccacgccgtaaacgatggatactagctgtggggacattgtctccgtggccaagcgaaagtgataagtatcccacctggggagtacgaccgcaaggttgaaactcaaaggaattgacgggggcccgcacaagcggtggagcatgtggtttaattcgatgatacgcgaggaaccttaccagggcttaaatgcaggctgcatggggtggagacatcccttccttcggaccgcctgcaaggtgctgcatggttgtcgtcagctcgtgccgtgaggtgtcaggttaagtcctataacgagcgcaacccctaccgttagttgccagcgagtcaagtcggggactctaacgggactgccggtgcaaaccgtgaggaaggtggggacgacgtcaaatcatcacggcccttacgtcctgggccacacacgtgctacaatggccggtacagagggaagccaccccgcaagggggcgcggatctataaaaccggtcacagttcggatcggggtctgcaactcgaccccgtgaagctggaatcgctagtaatcggatatcagccatgatccggtgaatacgttcccgggccttgtacacaccgcccgtcaagccatggaagccgggagtgcctgaagtccgtcaccgcaaggagcggcctagggcaaaatcggtaactagggct

SEQ ID NO: 2167 - DNA, 1453 bp, unidentified
  source 1..1453: mol_type = unassigned DNA; note = Mycoavidus cysteinexigens
attgaacgctggcggcatgctttacacatgcaagtcgaacggcagcgcgggtttcggcctggcggcgagtggcgaacgggtgagtaatacatcggaacgtgtcctgtagagggggatagcccggcgaaagccggattaataccgcatacgatctacggatgaaagcgggggaccttcgggcctcgcgctataggggcggccgatgtcggattagctagttggtggggtaaaggcctaccaaggcgacgatccgtagctggtctgagaggacgaccagccacactgggactgagacacggcccagactcctacgggaggcagcagtggggaattttggacaatgggggcaaccctgatccagcaatgccgcgtgtgtgaagaaggccttcgggttgtaaagcacttttgttcgggaagaaagcgttagggtaaataatcttaatgtatgacggtaccgaaagaataagcaccggctaactacgtgccagcagccgcggtaatacgtagggtgcaagcgttaatcggaattattgggcgtaaagggtgcgtaggcggtttgttaagacggatgtgaaatccctgggctcaacctgggaactgcatacgtgactggcagactagagtatggcagagggaggtggaattccacgtgtagcagtgaaatgcgtagatatgtggaggaacaccgatggcgaaggcagcctcctgggccaatactgacgctgaggcacgaaagcgtggggagcaaacaggattagataccctggtagtccacgccctaaacgatgtcaactggttgttggggatagctatccttagtaacgaagctaacgcgtgaagttgaccgcctggggagtacgatcgcaagattaaaactcaaaggaattgacggggacccgcacaagcggtggatgatgtggattaattcgatgcaacgcgaaaaaccttacctacccttgacatgtacataatctggctgagaggtcagagtgctcgaaagagagatgtaacacaggtgctgcatggctgtcgtcagctcgtgtcgtgagatgttgggttaagtcccgcaacgagcgcaacccttatccttagttgctacgcaagggcactctaaggagactgccggtgacaaaccggaggaaggtggggatgatgtcaagtcctcatggcccttatgggtagggcttcacacgtcatacaatggtcggtacagagggctgcaaacccgcgagggggagccaatctcagaaagccgatcgtagtccggattgcagtctgcaactcgactgcatgaagttggaatcgctagtaatcgcggatcagcatgccgcggtgaatacgttcccgggtcttgtacacaccgcccgtcacaccatgggagtgggttttaccagaagtggctagtctaaccgtaaggagggcggtcaccacggtaggattcatgactggggtg

SEQ ID NO: 2168 - DNA, 1388 bp, unidentified
  source 1..1388: mol_type = unassigned DNA; note = Myroides indicus
atgcaagtcgaggggtagggatacttcggtttcctgagaccggcggatgggtgagtaacgcgtatgcaacctacctttcacaggggaatagcccggagaaatccggattaatgctccatggattatttggatggcatcatttaaataataaagatttatcggtgaaagatgggcatgcgtatcattagctagttggtgtggtaacggcacaccaaggcgacgatgattcggggtcctgagagggagatcccccacactggtactgagacacggaccagactcctacgggaggcagcagtgaggaatattggtcaatggaggcaactctgaaccagccatgccgcgtgcaggatgactgccctatgggttgtaaactgcttttatacaggaagaaatgtatctacgcgtagatatttgacggtactgtaggaataaggatcggctaactccgtgccagcagccgcggtaatacggaggatccgagcgttatccggaattattgggtttaaagggttcgtaggcggccttataagtcaggggtgaaatctctcagctcaactgagaacttgcctttgatactgtatggcttgaatagtagtgaagtaactagaatatgtagtgtagcggtgaaatgcatagatattacatggaataccaattgcgaaggcaggttactaattatttattgacgctgatgaacgaaagcgtgggtagcgaacaggattagataccctggtagtccacgccgtaaacgatggatactagctgtttgattttcggattgagtggctaagcgaaagtgataagtatcccacctggggagtacgttcgcaagaatgaaactcaaaggaattgacgggggcccgcacaagcggtggagcatgtggtttaattcgatgatacgcgaggaaccttaccaggtcttaaatgtgttttgccttacctggaaacaggtatttcttcggacaagatacaaggtgctgcatggttgtcgtcagctcgtgccgtgaggtgtcaggttaagtcctataacgagcgcaacccctattgttagttgccagcgagtcatgtcgggaactctagcaagactgccggtgcaaaccgcgaggaaggtggggatgacgtcaaatcatcacggcccttacgacctgggctacacacgtgctacaatggccggtacagagggcagctaccacgtgagtggatgcgaatcttcaaagccggtcacagttcggatcggagtctgcaactcgactccgtgaagctggaatcgctagtaatcggatatcagccatgatccggtgaatacgttcccgggccttgtacacaccgcccgtcaagccatggaagctgggggtacctgaagtcggtcgccgcaaggagctgcc

SEQ ID NO: 2169 - DNA, 1460 bp, Myxococcus fulvus
  source 1..1460: mol_type = unassigned DNA
aacgaacgctggcggcgtgcctaacacatgcaagtcgagcgcgaataggggcaacccttagtagagcggcgcacgggtgcgtaacacgtggataatctgcctggatgctcgggataaccagtcgaaagattggctaataccggataagcccacggtttcttcggagactgagggaaaaggtggcctctgtatacaagctatcacaaccagatgagtccgcggcccatcagctagttggcggggtaatggcccaccaaggcaacgacgggtagctggtctgagaggacgatcagccacactggaactgagacacggtccagactcctacgggaggcagcagtggggaattttgcgcaatgggcgaaagcctgacgcagcaacgccgcgtgtgtgatgaaggtcttcggattgtaaagcactttcgaccgggacgaaaacccgtagcccaacacgctacggcttgacggtaccgggagaagaagcaccggctaactctgtgccagcagccgcggtaatacagagggtgcaagcgttgttcggaattattgggcgtaaagcgcgtgtaggcggcgtgacaagtcgggtgtgaaagccctcagctcaactgaggaagtgcgcccgaaactgtcgtgcttgagtgccggagagggtggcggaattccccaagtagaggtgaaattcgtagatatggggaggaacaccggtggcgaaggcggccacctggacggtaactgacgctgagacgcgaaagcgtggggagcaaacaggattagataccctggtagtccacgccgtaaacgatgagaactaggtgtcgtgggagttgacccccgcggtgccgtagctaacgcattaagttctccgcctgggaagtacggtcgcaagactaaaactcaaaggaattgacgggggcccgcacaagcggtggagcatgtggtttaattcgacgcaacgcgcagaaccttacctggtcttgacatcctcggaatctctcagagatgagggagtgcccgcaagggaaccgagagacaggtgctgcatggctgtcgtcagctcgtgtcgtgagatgttgggttaagtcccgcaacgagcgcaaccctcgcctttagttgccacgcaagtggatctctagagggactgccggtgttaaaccggaggaaggtggggatgacgtcaagtcctcatggcctttatgaccagggctacacacgtgctacaatggccggtacagagcgttgccaacccgcgagggggagctaatcgcataaaaccggtctcagttcagattggagtctgcaactcgactccatgaaggcggaatcgctagtaatcgcagatcagcacgctgcggtgaatacgttcccgggccttgtacacaccgcccgtcacaccatgggagtcgattgctccagaagtcatctcaccaagagatgcccaaggagtggtcggtaactggggtg

SEQ ID NO: 2170 - DNA, 1493 bp, unidentified
  source 1..1493: mol_type = unassigned DNA; note = Myxococcus macrosporus
aacgaacgctggcggcgtgcctaacacatgcaagtcgagcgcgaataggggcaacccttagtagagcggcgcacgggtgcgtaacacgtggataatctgcctgagtgctcgggataaccagtcgaaagattggctaataccggataagcccacggtttcttcggagactgagggaaaaggtggcctctgtatacaagctatcacattcagatgagtccgcggcccatcagctagttggcggggtaatggcccaccaaggcgacgacgggtagctggtctgagaggacgatcagccacactggaactgagacacggtccagactcctacgggaggcagcagtggggaattttgcgcaatgggcgaaagcctgacgcagcaacgccgcgtgtgtgatgaaggtctttggattgtaaagcactttcgaccgggaagaaaacccgttggctaacatccaacggcttgacggtaccgggagaagaagcaccggctaactctgtgccagcagccgcggtaatacagagggtgcaagcgttgttcggaattattgggcgtaaagcgcgtgtaggcggcgtgacaagtcgggtgtgaaagccctcagctcaactgaggaagtgcgcccgaaactgtcgtgcttgagtgccggagagggtggcggaattccccaagtagaggtgaaattcgtagatatggggaggaacaccggtggcgaaggcggccacctggacggtaactgacgctgagacgcgaaagcgtggggagcaaacaggattagataccctggtagtccacgccgtaaacgatgagaactaggtgtcgtgggagttgacccccgcggtgccgaagctaacgcattaagttctccgcctgggaagtacggtcgcaagactaaaactcaaaggaattgacgggggcccgcacaagcggtggagcatgtggtttaattcgacgcaacgcgcagaaccttacctggtcttgacatcctcggaatccttcagagatgagggagtgcccgcaagggaaccgagagacaggtgctgcatggctgtcgtcagctcgtgtcgtgagatgttgggttaagtcccgcaacgagcgcaaccctcgcctttagttgccacgcaagtggatctctagagggactgccggtgttaaaccggaggaaggtggggatgacgtcaagtcctcatggcctttatgaccagggctacacacgtgctacaatggccggtacagagcgttgccaacccgcgagggggagctaatcgcataaaaccggtctcagttcagattggagtctgcaactcgactccatgaaggcggaatcgctagtaatcgcagatcagcacgctgcggtgaatacgttcccgggccttgtacacaccgcccgtcacaccatgggagtcgattgctccagaagtcatctcaccaagaggtgcccaaggagtggtcggtaactggggtgaagtcgtaacaaggtagccgtaggggaacctgc

SEQ ID NO: 2171 - DNA, 1458 bp, Myxococcus stipitatus
  source 1..1458: mol_type = unassigned DNA
aacgaacgctggcggcgtgcctaacacatgcaagtcgagcgcgaatagggaaaccttagtagagcggcgcacgggtgcgtaacacgtggataatctgcctggatgcctgggataaccagtcgaaagattggctaataccggataagcccacggtttcttcggagactgagggaaaaggtggcctctgtatacaagctatcacaaccagatgagtccgcggcccatcagctagttggcggggtaatggcccaccaaggcaacgacgggtagctggtctgagaggacgatcagccacactggaactgagacacggtccagactcctacgggaggcagcagtggggaattttgcgcaatgggcgaaagcctgacgcagcaacgccgcgtgtgtgatgaaggtcttcggattgtaaagcactttcgaccgggacgaaaacccgtagcccaacacgctacggcttgacggtaccgggagaagaagcaccggctaactctgtgccagcagccgcggtaatacagagggtgcaagcgttgttcggaattattgggcgtaaagcgcgtgtaggcggcgtgacaagtcgggtgtgaaagccctcagctcaactgaggaagtgcgcccgaaactgtcgtgcttgagtgccggagagggtggcggaattccccaagtagaggtgaaattcgtagatatggggaggaacaccggtggcgaaggcggccacctggacggtaactgacgctgagacgcgaaagcgtggggagcaaacaggattagataccctggtagtccacgccgtaaacgatgagaactaggtgtcgtgggagttgacccccgcggtgccgtagctaacgcattaagttctccgcctgggaagtacggtcgcaagactaaaactcaaaggaattgacgggggcccgcacaagcggtggagcatgtggtttaattcgacgcaacgcgcagaaccttacctggtcttgacatcctcggaatctttcagagatgagagagtgcccgcaagggaaccgagagacaggtgctgcatggctgtcgtcagctcgtgtcgtgagatgttgggttaagtcccgcaacgagcgcaaccctcgcctttagttgtcacgcaagtgaatctctagagggactgccggtgttaaaccggaggaaggtggggatgacgtcaagtcctcatggcctttatgaccagggctacacacgtgctacaatggccggtacagagcgttgccaacccgcgagggggagctaatcgcataaaaccggtctcagttcagattggagtctgcaactcgactccatgaaggcggaatcgctagtaatcgcagatcagcacgctgcggtgaatacgttcccgggccttgtacacaccgcccgtcacaccatgggagtcgattgctccagaagtcatctcaccaagagatgcccaaggagtggtcggtaactggggtg

SEQ ID NO: 2172 - DNA, 1460 bp, Myxococcus virescens
  source 1..1460: mol_type = unassigned DNA
aacgaacgctggcggcgtgcctaacacatgcaagtcgagcgcgaataggggcaacccttagtagagcggcgcacgggtgcgtaacacgtggataatctgcctgagtgctcgggataaccagtcgaaagattggctaataccggataagcccacggtttcttcggagactgagggaaaaggtggcctctgtatacaagctatcacattcagatgagtccgcggcccatcagctagttggcggggtaatggcccaccaaggcaacgacgggtagctggtctgagaggacgatcagccacactggaactgagacacggtccagactcctacgggaggcagcagtggggaattttgcgcaatgggcgaaagcctgacgcagcaacgccgcgtgtgtgatgaaggtctttggattgtaaagcactttcgaccgggaagaaaacccgttggctaacatccaacggcttgacggtaccgggagaagaagcaccggctaactctgtgccagcagccgcggtaatacagagggtgcaagcgttgttcggaattattgggcgtaaagcgcgtgtaggcggcgtgacaagtcgggtgtgaaagccctcagctcaactgaggaagtgcgcccgaaactgttgtgcttgagtgccggagagggtggcggaattccccaagtagaggtgaaattcgtagatatggggaggaacaccggtggcgaaggcggccacctggacggtaactgacgctgagacgcgaaagcgtggggagcaaacaggattagataccctggtagtccacgccgtaaacgatgagaactaggtgtcgtgggagttgacccccgcggtgccgaagctaacgcattaagttctccgcctgggaagtacggtcgcaagactaaaactcaaaggaattgacgggggcccgcacaagcggtggagcatgtggtttaattcgacgcaacgcgcagaaccttacctggtcttgacatcctcagaatccttcagagatgagggagtgcccgcaagggaactgagagacaggtgctgcatggctgtcgtcagctcgtgtcgtgagatgttgggttaagtcccgcaacgagcgcaaccctcgcctttagttgccacgcaagtggatctctagagggactgccggtgttaaaccggaggaaggtggggatgacgtcaagtcctcatggcctttatgaccagggctacacacgtgctacaatggccggtacagagcgttgccaacccgcgagggggagctaatcgcataaaaccggtctcagttcagattggagtctgcaactcgactccatgaaggcggaatcgctagtaatcgcagatcagcacgctgcggtgaatacgttcccgggccttgtacacaccgcccgtcacaccatgggagtcgattgctccagaaatcatctcaccaagaggtgctcaaggagtggtcggtaactggggtg

SEQ ID NO: 2173 - DNA, 1460 bp, Myxococcus xanthus
  source 1..1460: mol_type = unassigned DNA
aacgaacgctggcggcgtgcctaacacatgcaagtcgagcgcgaataggggcaacccttagtagagcggcgcacgggtgcgtaacacgtggataatctgcctgagtgctcgggataaccagtcgaaagattggctaataccggataagcccacggtttcttcggagactgagggaaaaggtggcctctgtatacaagctatcacattcagatgagtccgcggcccatcagctagttggcggggtaatggcccaccaaggcaacgacgggtagctggtctgagaggacgatcagccacactggaactgagacacggtccagactcctacgggaggcagcagtggggaattttgcgcaatgggcgaaagcctgacgcagcaacgccgcgtgtgtgatgaaggtctttggattgtaaagcactttcgaccgggaagaaaacccgttggctaacatccaacggcttgacggtaccgggagaagaagcaccggctaactctgtgccagcagccgcggtaatacagagggtgcaagcgttgttcggaattattgggcgtaaagcgcgtgtaggcggcgtgacaagtcgggtgtgaaagccctcagctcaactgaggaagtgcgcccgaaactgttgtgcttgagtgccggagagggtggcggaattccccaagtagaggtgaaattcgtagatatggggaggaacaccggtggcgaaggcggccacctggacggtaactgacgctgagacgcgaaagcgtggggagcaaacaggattagataccctggtagtccacgccgtaaacgatgagaactaggtgtcgtgggagttgacccccgcggtgccgaagctaacgcattaagttctccgcctgggaagtacggtcgcaagactaaaactcaaaggaattgacgggggcccgcacaagcggtggagcatgtggtttaattcgacgcaacgcgcagaaccttacctggtcttgacatcctcagaatccttcagagatgagggagtgcccgcaagggaactgagagacaggtgctgcatggctgtcgtcagctcgtgtcgtgagatgttgggttaagtcccgcaacgagcgcaaccctcgcctttagttgccacgcaagtggatctctagagggactgccggtgttaaaccggaggaaggtggggatgacgtcaagtcctcatggcctttatgaccagggctacacacgtgctacaatggccggtacagagcgttgccaacccgcgagggggagctaatcgcataaaaccggtctcagttcagattggagtctgcaactcgactccatgaaggaggaatcgctagtaatcgcagatcagcacgctgcggtgaatacgttcccgggccttgtacacaccgcccgtcacaccatgggagtcgattgctccagaaatcatctcaccaagaggtgctcaaggagtggtcggtaactggggtg

SEQ ID NO: 2174 - DNA, 1451 bp, Nannocystis exedens
  source 1..1451: mol_type = unassigned DNA
agcgaacgtttgcggcgggcctaacacatgcaagtcgaacgggctagcaatagtcagtggcgcacgggtgcgtaacacgtaggtaatcaacccctcggttcgggataacgttctgaaaggagcgctaataccggacgtgtcttcgggagcttcggctcctgtcgagaaagacccgcaagggttgccgagggacgagcctgcggcccatcagctagttggcgaggtaatagctcaccaaggcgaagacgggtagctggtctgagaggatgatcagtcacactggaactgagacacggtccagactcctacgggaggcagcagtggggaatattgcgcaatgggcgaaagcctgacgcagccacgccgcgtgagcgatgaaggccttcgggtcgtaaagctctgtggggagagacgaagaaagcctgtgaagagcgggccttgacggtatctccttagcaagcaccggctaactccgtgccagcagccgcggtaatacggagggtgcgaacgttgctcggaatcattgggcgtaaagcgcacgtaggcggcggcgtaagcgggatgtgaaagcccagggctcaaccctggaagtgcatcccgaactgcgtcgcttgaatctcggagggggacagagaattcccggtgtagaggtgaaattcgtagatatcgggaggaataccagtggcgaaggcgctgtcctggacgaagattgacgctgaggtgcgaaagcgtggggagcaaacaggattagataccctggtagtccacgctgtaaacgatgagtgctggacggtggaggatttgaccccttcgctgtcgaagctaacgcgttaagcactccgcctggggagtacggtcgcaagactaaaactcaaaggaattgacgggggcccgcacaagcggtggagcatgtggtttaattcgacgcaacgcgcagaaccttacctgggttaaatccactggaacctggctgaaaggctggggtgcccttcggggagccggtgagaaggtgctgcatggctgtcgtcagctcgtgtcgtgagatgttgggttaagtcccgcaacgagcgcaacccctatcgccagttgccaccattgagttgggaactctggcgagactgccggtctaaaccggaggaaggtggggacgacgtcaagtcctcatggcccttatgcccagggctacacacgtgctacaatggctggtacaaagagccgcaagcccgcgagggtgagcaaatctcaaaaaaccagtctcagttcggattgcagtctgcaactcgactgcatgaagctggaatcgctagtaatcggagatcagcacgctccggtgaatacgttcccgggccttgtacacaccgcccgtcacaccatgggagtcggctgctccagaagtaggaacctcaaccgcaaggaaaggccctaccaaggagcggtcggtgactggggtg

SEQ ID NO: 2175 - DNA, 1463 bp, Natranaerobius trueperi
  source 1..1463: mol_type = unassigned DNA
gacgaacgctggcggcgtgcttaacacatgcaagtcgagcgaacccttcggaaattagattcgtctattttccggtcagggttagcggcggacgggtgagtaacacgtggataacctaccctagagaccgggataacagctcgaaagggctgctaataccggataagctttacgtgctgcatggtatgtaaagaaaacgggtttaactgctctaggatgggtccgcgtcccattagctagttggtggggtaacagcctaccaaggcgacgatgggtagccgaccttagcgggtgatcggccacactgggactgagacacggcccagactcctacgggaggcagcagtggggaattttgcgcaatgggcgaaagcctgacgcagcgacgccgcgtgagcgatgaaggccttcgggtcgtaaagctctgtcgagggggaagaattcagacggtacccctcaagaaagccccggctaactacgtgccagcagccgcggtaacacgtagggggcgagcgttgtccggaattactgggcgtaaagggcgcgcaggctgcccagcaagtcagatgtgaaattccggagctcaactccggacttgcatttgaaactgttgggcttgagtacaggagaggggagtggaattcctagtgtagcggtgaaatgcgtagatattaggaagaacaccagtggcgaaggcgactccctggcctgttactgacgctgaggcgcgaaagcgtgggtagcgaacaggattagataccctggtagtccacgctgtaaacgctgggtactaggtgttgggggtttagataccctcagtgccgcagctaacgcattaagtaccccgcctggggagtacggtcgcaagactgaaactcaaaggaattgacgggggcccgcacaagcggtggagcatgtggtttaattcgaagcaacgcgaagaaccttaccagggcttgacatatagttgataagtgtagagatacacttttcccttcggggacagctatacaggtggtgcatggctgtcgtcagctcgtgtcgtgagatgttgggttaagtcccgtaacgagcgcaacccctgtccttagttgccatcggttcggccgggcactctagggagactgccggtgacaaaccggaggaaggtggggacgacgtcaagtcatcatgccccttatgccctgggctacacacgtgctacaatggcctgtacagagggaagcgaagccgcaaggtgtagccaaccccttaaagcaggtcccagttcggattgcaggctgcaattcgcctgcatgaagctggaatcgctagtaatcgcggatcagaatgccgcggtgaatacgttcccgggccttgtacacaccgcccgtcacaccacgaaagccggcaacacccgaagccagcgacgctaacctcttttgaggaagcagctgtcgaaggtggggccggtgattggggtg

SEQ ID NO: 2176 - DNA, 1456 bp, Natranaerovirga hydrolytica
  source 1..1456: mol_type = unassigned DNA
gatgaacgctggcggcgtgcctaacacatgcaagtcgagcgagaaacatataacggaaacttcggtagaaattatatgtggaaagcggcggacgggtgagtaacgcgtgggcaacctgccctatacattgggataacaacgagaaatcgttgctaataccgaataagcctccagtaaggcatcttactgaaggaaaaactccggtggtataggatgggcccgcgtctgattagctagttggtaaggtagaggcttaccaaggcaacgatcagtagccgacctgagagggtgaccggccacattgggactgagacacggcccaaactcctacgggaggcagcagtggggaatattgcacaatgggggaaaccctgatgcagcgacgccgcgtgaaggaagaaggttttcggatcgtaaacttctatcagcagggaagaaaaaaatgacggtacctgactaagaagccccggctaactacgtgccagcagccgcggtaatacgtagggggcaagcgttatccggaattactgggtgtaaagggtgcgtaggcggttatgcaagtcagatgtgaaagcccaagtctcaaactagggattgcatttgaaactgtgtaactagagtacaggagaggtaagtggaatttctagtgtagcggtgaaatgcgtagatattaggaagaacaccagtggcgaaggcggcttactggactgtaactgacgctgaggcacgaaagcgtggggagcgaacaggattagataccctggtagtccacgccgtaaacgatgaatgctaggtgtcgggggtcgacagaccttcggtgccgaagttaacacattaagcattccacctggggagtacgatcgcaagattgaaactcaaaggaattgacgggggcccgcacaagcagtggagcatgtggtttaattcgaagcaacgcgaagaaccttaccaagtcttgacatccctttgatcggaccgtaacgggaccttctcttcagagcaaaggtgacaggtggtgcatggttgtcgtcagctcgtgtcgtgagatgttgggttaagtcccccaacgagcgcaacccttatctttagtagccagccttacggatggggactctaaagagactgccggggataactcggaggaaggtggggatgacgtcaaatcatcatgccccttatgacttgggctacacacgtgctacaatggtggtgacaaagggaagcaagcaagtgattgtaagccaacctcaaaaaagccatctcagttcggattgtagtctccaactcgactatatgaagctggaattcctagtaatcgcggatcagaaacccgcggtgaatacgttcccgggccttgtacacaccccccgtcacaccatggaagtcggaagcccccgaagccggtgactcaaccgcaaggagagagccgtcgaaggtgaagtcgataactagggtg

SEQ ID NO: 2177 - DNA, 1454 bp, Natranaerovirga pectinivora
  source 1..1454: mol_type = unassigned DNA
gatgaacgctggcggcgtgcctaacacatgcaagtcgagcggacgaatatcaatgaagccttcgggtggatttgatatgagttagcggcggacgggtgagtaacgcgtgggcaacctgccctatacaggaggataacaacgagaaatcgttgctaatactgcataagaccccagtaaggcatcttactgaggtaaaaactccggtggtataggatgggcccgcgtctgattagctagttggtaaggtaatggcttaccaaggcgacgatcagtagccgacctgagagggtgatcggccacattgggactgagacacggcccaaactcctacgggaggcagcagtggggaatattgcacaatgggggaaaccctgatgcagcaacgccgcgtgaaggaagaaggtcttcggattgtaaacttctatcagcagggaagataatgacggtacctgactaagaagccccggctaactacgtgccagcagccgcggtaatacgtagggggcaagcgttatccggaattactgggtgtaaagggtgcgtaggcggctatgcaagtcagatgtgaaagcccagggctcaaccctgggactgcatttgaaactgtgtagctagagtgcaggagaggtaagtggaattcctagtgtagcggtgaaatgcgtagatattaggaggaacaccagtggcgaaggcggcttactggactgtaactgacgctgaggcacgaaagcgtggggagcgaacaggattagataccctggtagtccacgccgtaaacgatgagtgctaggtgtcgggggtcgacagaccttcggtgccgaagttaacacattaagcactccacctggggagtacgatcgcaagattgaaactcaaaggaattgacgggggcccgcacaagcagtggagcatgtggtttaattcgaagcaacgcgaagaaccttaccaagtcttgacatccctctgacccggtccgtaacgggaccttctcttcggagcagaggtgacaggtggtgcatggttgtcgtcagctcgtgtcgtgagatgttgggttaagtcccgcaacgagcgcaacccttatctttagtagccagcaattcggttggggactctagagagactgccggggataactcggaggaaggtggggatgacgtcaaatcatcatgccccttatgacttgggctacacacgtgctacaatggtgacgacaaagggaagcgaaggagtgatctggagccaaccccaaaaaagtcatctcagttcggattgtagtctgcaactcgactacatgaagctggaattgctagtaatcgcgaatcagaatgtcgcggtgaatacgttcccgggccttgtacacaccgcccgtcacaccatgggagtcggaagcgcccgaagccggtgactcaaccgcaaggagagagccgtcgaaggtgaagtcgatgactggggtg

SEQ ID NO: 2178 - DNA, 1547 bp, Natribacillus halophilus
  source 1..1547: mol_type = unassigned DNA
gacgaacgctggcggcgtgcctaatacatgcaagtcgaacggtctagaggtgagagttgagaggtgagaagtgagctgtcgtagacatcggcagagccgagtcacctaaatcccacttcccatttcccacctctcacttctagacagtggcggccgggtgagtaacacgtgggcaacctgccgcggagactggaataacaccgggaaaccggtgctaataccggatatgtccctgcctgcgcctgcaggcggggagaaaggcggtcttttgaccgccactccgcgaggggcccgcggcgcattagctggttggtggggtaaaagcctaccaaggcgacgatgcgtcgccgacctgagagggtgatcggccacactgggactgagacacggcccagactcctacgggaggcagcagtagggaatcatccgcaatggacgaaagtctgacggtgcaacgccgcgtgagtgaggaaggttttcggatcgtaaagctctgttgtgagggaagaaccccttcgggcggaaatacccggaggctgacggtacctcaccagaaagccacggctaactacgtgccagcagccgcggtaatacgtaggtggcaagcgttgtccggaattattgggcgtaaagggcacgcaggcggagcgttaagtctgatgtgaaaggccggggctcacccccggaatggcattggaaactggggctcttgagtgcagaagaggagagtggaattccacgtgtagcggtgaaatgcgtagagatgtggaggaacaccagtggcgaaggcgactctctgtctgcgactgacgctgaggtgcgaaagcgtggggagcgaacaggattagataccctggtagtccacgccgtaaacgttgagtgctaggtgttaggggtttcgatacccgtagtgccgaagcaaacgcaataagcactccgcctggggagtacgaccgcaaggttgaaactcaaaggaattgacgggggcccgcacaagcggtggagcatgtggtttaattcgaagcaacgcgaagcaccttaccaggccttgacatcctctgagcgccttggaaacaaggtttcccttttgggcagagtgacaggtggtgcatggttgtcgtcagctcgtgtcgtgagatgttgggttaagtcccgtaacgagcgcaacccttgaatgtcgttgccagcattgagttgggcactcgacattgactgccggtgacaaaccggaggaaggtggggatgacgtcaaatcatcatgccccttatggcctgggcgacacacgtgctacaatggacggtacagagggccgcgaagccgcgaggtggagcgaatccccgaaaagccgttctcagttcggattgcaggctgcaactcgcctgcatgaagctggaatcgctagtaatcgcggatcagcatgccgcggtgaatacgttcccgggccttgtacacaccgcccgtcacaccacgagagccggcaacacccgaagtcgatgaggcaacctacgggagccagtcgccgaaggtggggctggtgattggggtg

SEQ ID NO: 2179 - DNA, 1442 bp, Natronoflexus pectinivorans
  source 1..1442: mol_type = unassigned DNA
gatgaacgctagcgacaggcctaacacatgcaagtcgaggggtaacaggggtttcggcccgctgacgaccggcgcacgggtgagtaacgcgtatgcaacctacctgtaacagggggatagctccctgaaaggggaattaacaccgcataagactacgctaccgcatggtagcgtggtaaaatatttataggttacagatgggcatgcgtgacattagctagttggcggggtaacggcccaccaaggcaacgatgtctaggggttctgagaggaaggtcccccacactggtactgagacacggaccagactcctacgggaggcagcagtgaggaatattggtcaatgggcgcaagcctgaaccagccatgtcgcgtgcaggaagactgccctatgggttgtaaactgcttttttacgggaagaaaaccagctacgtgtagttgtttgccggtaccgtaggaataagcatcggctaactccgtgccagcagccgcggtaatacggaggatgcgagcgttatccggatttattgggtttaaagggtgcgtaggcggaatagtaagtcaggggtgaaatactgcagctcaactgtagaattgcctttgatactgttattcttgagtatagatgaggtaggcggaatgtggtgtgtagcggtgaaatgcatagatataccacagaacaccgattgcgaaggcagcttactaaactataactgacgctgatgcacgaaagcgtgggtatcaaacaggattagataccctggtagtccacgccgtaaacgatgattactggttgtttgcgatacattgcaagtgactgagcgaaagcattaagtaatccacctggggagtacgtcggcaacgatgaaactcaaaggaattgacgggggcccgcacaagcggaggaacatgtggtttaattcgatgatacgcgaggaaccttacctgggtttaaatgggaagtgacagacttggaaacaggtttttcttcggacacttttcaaggtgctgcatggttgtcgtcagctcgtgccgtgaggtgtcgggttaagtcccataacgagcgcaacccctattgtcagttaccagcacgtaatggtggggactctggcaagactgccggtgtaaaccgagaggaaggtggggatgacgtcaaatcagcacggcccttacatccagggctacacacgtgttacaatggccggtacaaagggccgctacctcgcgagaggatgcgaatcttaaaagccggtctcagttcggatcggagtctgcaacccgactccgtgaagctggattcgctagtaatcgcgcatcagccatggcgcggtgaatacgttcccgggccttgtacacaccgcccgtcaagccatggaagccgggggtacctgaagtatgtaaccgcaaggagcgtcctagggtaaaactggtgactggggct

SEQ ID NO: 2180 - DNA, 1428 bp, Nautilia profundicola
  source 1..1428: mol_type = unassigned DNA
agtgaacgctggcggcatgcttaacacatgcaagtcgaggggcagcaggcgggaacttcggttcccgtgctggcgaccggcggacgggtgagtaacacgtagctacttgccccacagagggggataacacaccgaaaggtgtgctaataccgcatacacccgagaggggaaagggcttcggtccgctgtgggatagggctgcggcgtatcagctagttggtgaggtaacggcttaccaaggcgatgacgcgtagctggtctgagaggatgatcagccacactggaactgagacacggtccagactcctacgggaggcagcagtggggaatattgggcaatgggggaaaccctgacccagcaatgccgcgtggaggaagaagcctttcggggtgtaaactccttttgcaggggaagaaactgacggtaccctgcgaataagctccggctaactccgtgccagcagccgcggtaatacggggggagcgagcgttactcggaatcactgggcgtaaagggtgcgtaggcggtttgataagttgggagtgaaatcctatggctcaaccatagaactgcttccaaaactgtcagactagagttcgggagaggccaagggaattcctggtgtaggggtgaaatccgtagagatcaggaggaatgccgaaagcgaaggcgcttggctggaacgatactgacgctgaggcacgaaagcgtggggagcaaacaggattagataccctggtagtccacgccctaaacgatgggtactagtggttggggggatagtccctcagtcacgcagcaaacgcgataagtaccccgcctggggagtacggccgcaaggctaaaactcaaaggaatagacggggacccgaacaagcggtggagcatgtggtttaattcgaagatacgcgaagaaccttacctgggcttgacatccctggaaccctgcagagatgcgggggtgctacttcggtagaaccaggagacaggtgctgcatggctgtcgtcagctcgtgtcgtgagatgttgggttaagtcccgcaacgagcgcaacccctgtccttagttggcatcagttcggctggccactctaaggagactgcccgggcaaccgggaggaaggtggggatgacgtcaagtcatcatggcccttatgtccagggcgacacacgtgctacaatggccgggacagagagatgcgaaaccgcgaggtggagcaaatctctaaacccggtctcagttcggattgcactctgcaactcgagtgcatgaaggcggaatcgctagtaatcgcggatcagccatgccgcggtgaatacgttcccgggtcttgtactcaccgcccgtcacaccatgggagtcgggttcacccgaagtcggtatccctaagataggggccgcctacggtggacccggcgactggggtg

SEQ ID NO: 2181 - DNA, 1355 bp, Neisseria animalis
  source 1..1355: mol_type = unassigned DNA
cagcggggaagtgcttgcacttctgccggcgagtggcgaacgggtgagtaacatattggaacgtaccgagtaatgggggataactgatcgaaagattagctaataccgcatacgctctgaggaggaaagcaggggaccttcgggccttgcgttattcgagcggccaatatctgattagctggttggtggggtaaaggcctaccaaggcgacgatcagtagcgggtctgagaggatgatccgccacactgggactgagacacggcccagactcctacgggaggcagcagtggggaattttggacaatgggcgcaagcctgatccagccatgccgcgtgtctgaagaaggccttcgggttgtaaaggacttttgtcagggaagaaaagggagatgctaataccatttcctcatgacggtacctgaagaataagcaccggctaactacgtgccagcagccgcggtaatacgtagggtgcgagcgttaatcggaattactgggcgtaaagcgagcgcagacggttacttaagcaggatgtgaaatccccgggctcaacctgggaactgcgttctgaactgggtgactagagtatgtcagaggggggtagaattccacgtgtagcagtgaaatgcgtagagatgtggaggaataccgatggcgaaggcagccccctgggataatactgacgttcatgctcgaaagcgtgggtagcaaacaggattagataccctggtagtccacgccctaaacgatgtcaattagctgttgggcaacttgattgcttagtagcgtagctaacgcgtgaaattgaccgcctggggagtacggtcgcaagattaaaactcaaaggaattgacggggacccgcacaagcggtggatgatgtggattaattcgatgcaacgcgaagaaccttacctggtcttgacatgtacggaatcctccagagacggaggagtgccttcgggagccgtaacacaggtgctgcatggctgtcgtcagctcgtgtcgtgagatgttgggttaagtcccgcaacgagcgcaacccttgtcattagttgccatcatttggttgggcactctaatgagactgccggtgacaagccggaggaaggtggggatgacgtcaagtcctcatggcccttatgaccagggcttcacacgtcatacaatggtcggtacagagggtagccaagccgcgaggcggagccaatctcacaaaaccgatcgtagtccggattgcactctgcaactcgagtgcatgaagtcggaatcgctagtaatcgcaggtcagcatactgcggtgaatacgttcccgggtcttgtacacaccgcccgtcacaccatgggagtggggg

SEQ ID NO: 2182 - DNA, 1463 bp, Neisseria animaloris
  source 1..1463: mol_type = unassigned DNA
attgaacgctggcggcatgctttacacatgcaagtcgaacggcagcacggaagagcttgctcttttggtggcgagtggcgaacgggtgagtaatacatcggaacgtaccgagtagtgggggataactgtccgaaaggatggctaataccgcatattctctgaggaggaaagcaggggaccttcgggccttgcgctatttgagcggccgatgtctgattagctagttggtggggtaaaggcctaccaaggcgacgatcagtagcgggtctgagaggatgatccgccacactgggactgagacacggcccagactcctacgggaggcagcagtggggaattttggacaatggggggaaccctgatccagccatgccgcgtgtctgaagaaggccttcgggttgtaaaggacttttgtcagggaagaaaagcttgaggttaatacccttgggtgatgacggtacctgaagaataagcaccggctaactacgtgccagcagccgcggtaatacgtagggtgcgagcgttaatcggaattactgggcgtaaagcgggcgcagacggttacttaagtcagatgtgaaatccccgggctcaacctgggaactgcgtttgaaactgggtgactagagtatgtcagaggggggtagaattccacgtgtagcagtgaaatgcgtagagatgtggaggaataccgatggcgaaggcagccccctgggataatactgacgttcatgcccgaaagcgtgggtagcaaacaggattagataccctggtagtccacgccctaaacgatgtcaattagctgttggggtacttgatgccttagtagcgtagctaacgcgtgaaattgaccgcctggggagtacggtcgcaagattaaaactcaaaggaattgacggggacccgcacaagcggtggatgatgtggattaattcgatgcaacgcgaagaaccttacctggtcttgacatgtacggaatcctccagagacggaggagtgccttcgggagccgtaacacaggtgctgcatggctgtcgtcagctcgtgtcgtgagatgttgggttaagtcccgcaacgagcgcaacccttgtcattagttgccatcattaagttgggcactctaatgagactgccggtgacaagccggaggaaggtggggatgacgtcaagtcctcatggcccttatgaccagggcttcacacgtcatacaatggtcggtacagagggtagccaagccgcgaggtggagccaatcccagaaaaccgatcgtagtccggattgcactctgcaactcgagtgcatgaagtcggaatcgctagtaatcgcaggtcagcatactgcggtgaatacgttcccgggtcttgtacacaccgcccgtcacaccatgggagtgggggataccagaagtaggtagggtaaccgtaaggagcccgcttaccacggtatgcttcatgactggggtg

SEQ ID NO: 2183 - DNA, 1463 bp, unidentified
  source 1..1463: mol_type = unassigned DNA; note = Neisseria arctica
attgaacgctggcggcatgctttacacatgcaagtcgaacggcagcacgaaagagcttgctcttttggtggcgagtggcgaacgggtgagtaatacattggaacgtaccgagtaatgggggataactgtccgaaaggatggctaataccgcatacgctctgaggaggaaagcgggggaccttcgggcctcgcgttattcgagcggccaatgtctgattagctagttggtggggtaaaggcctaccaaggcgacgatcagtagtgggtctgagaggatgatccgccacactgggactgagacacggcccagactcctacgggaggcagcagtggggaattttggacaatgggcgaaagcctgatccagccatgccgcgtgtctgaagaaggccttcgggttgtaaaggacttttgtcagggaagaaagggtttgggttaataccctgagcttatgacggtacctgaagaataagcaccggctaactacgtgccagcagccgcggtaatacgtagggtgcgagcgttaatcggaattactgggcgtaaagcgagcgcagacggttacttaagcaagatgtgaaagccccgggctcaacctgggaactgcgttttgaactgggtgactagagtgtgtcagaggggggtagaattccacgtgtagcagtgaaatgcgtagagatgtggaggaataccgatggcgaaggcagccccctgggataacactgacgttcatgctcgaaagcgtgggtagcaaacaggattagataccctggtagtccacgccctaaacgatgtcaattagctgttggggtacttgataccttagtagcgtagctaacgcgtgaaattgaccgcctggggagtacggtcgcaagattaaaactcaaaggaattgacggggacccgcacaagcggtggatgatgtggattaattcgatgcaacgcgaagaaccttacctggtcttgacatgtacggaaccctccagagacggaggggtgccttcgggaaccgtaacacaggtgctgcatggctgtcgtcagctcgtgtcgtgagatgttgggttaagtcccgcaacgagcgcaacccttgtcattagttgccatcatttagttgggcactctaatgagactgccggtgacaagccggaggaaggtggggatgacgtcaagtcctcatggcccttatgaccagggcttcacacgtcatacaatggtcggtacagagggtagccaagccgcgaggcggagccaatcccagaaaaccgatcgtagtccggattgcactctgcaactcgagtgcatgaagtcggaatcgctagtaatcgcaggtcagcatactgcggtgaatacgttcccgggtcttgtacacaccgcccgtcacaccatgggagtgggggataccagaattgggtagggtaaccttcgggagcccgcttaacacggtatgcttcatgactggggtg

SEQ ID NO: 2184 - DNA, 1463 bp, Neisseria bacilliformis
  source 1..1463: mol_type = unassigned DNA
attgaacgctggcggcatgctttacacatgcaagtcggacggcagcacagagaagcttgcttcttgggtggcgagtggcgaacgggtgagtaacgcatcggaacgtaccgagtaatgggggataactgtccgaaaggacagctaataccgcatacgccctgagggggaaagcgggggatcttaggacctcgcgttattcgagcggccgatgtctgattagctggttggcggggtaaaggcccaccaaggcgacgatcagtagcgggtctgagaggatgatccgccacactgggactgagacacggcccagactcctacgggaggcagcagtggggaattttggacaatgggcgcaagcctgatccagccatgccgcgtgtctgaagaaggccttcgggttgtaaaggacttttgtcagggaagaaaaggggcatgttaataccgtgctctgatgacggtacctgaagaataagcaccggctaactacgtgccagcagccgcggtaatacgtagggtgcgagcgttaatcggaattactgggcgtaaagcgggcgcagacggttacttaagcgggatgtgaaatccccgggctcaacccgggaactgcgttccgaactgggtggctagagtgtgtcagaggggggtagaattccacgtgtagcagtgaaatgcgtagagatgtggaggaataccgatggcgaaggcagccccctgggataacactgacgttcatgcccgaaagcgtgggtagcaaacaggattagataccctggtagtccacgccctaaacgatgtcgattagctgttggggcacttgatgccttagtagcgtagctaacgcgtgaaatcgaccgcctggggagtacggtcgcaagattaaaactcaaaggaattgacggggacccgcacaagcggtggatgatgtggattaattcgatgcaacgcgaagaaccttacctggtcttgacatgtacggaaccttccagagacggaagggtgccttcgggagccgtaacacaggtgctgcatggctgtcgtcagctcgtgtcgtgagatgttgggttaagtcccgcaacgagcgcaacccttgtcattagttgccatcatttggttgggcactctaatgagactgccggtgacaaaccggaggaaggtggggatgacgtcaagtcctcatggcccttatgaccagggcttcacacgtcatacaatggtcggtacagagggtagccaagccgcgaggcggagccaatcccagaaaaccgatcgtagtccggattgcactctgcaactcgagtgcatgaagtcggaatcgctagtaatcgcaggtcagcatactgcggtgaatacgttcccgggtcttgtacacaccgcccgtcacaccatgggagtgggggataccagaagcaggtaggctaaccgcaagggggccgcttgccacggtatgcttcatgactggggtg

SEQ ID NO: 2185 - DNA, 1463 bp, Neisseria dentiae
  source 1..1463: mol_type = unassigned DNA
attgaacgctggcggcatgctttacacatgcaagtcggacggcagcacagagaagcttgcttcttgggtggcgagtggcgaacgggtgagtaacgcatcggaacgtaccgagtagtgggggataactgtccgaaaggatggctaataccgcatacgctttgagaaggaaagcgggggctcttcggacctcgcgctattcgagcggccgatgtctgattagctggttggtggggtaaaggcctaccaaggcgacgatcagtagcgggtctgagaggatgatccgccacactgggactgagacacggcccagactcctacgggaggcagcagtggggaattttggacaatgggggcaaccctgatccagccatgccgcgtgtctgaagaaggccttcgggttgtaaaggacttttgtcagggaagaaaagcttcgggttaataccccggggtgatgacggtacctgaagaataagcaccggctaactacgtgccagcagccgcggtaatacgtagggtgcgagcgttaatcggaattactgggcgtaaagcgggcgcagacggttacttaagcaggatgtgaaatccccgggcttaacctgggaactgcgttctgaactgggtgactagagtatgtcagaggggggtagaattccacgtgtagcagtgaaatgcgtagagatgtggaggaataccgatggcgaaggcagccccctgggataatactgacgttcatgcccgaaagcgtgggtagcaaacaggattagataccctggtagtccacgccctaaacgatgtcaattagctgttggggtacttgataccttagtagcgtagctaacgcgtgaaattgaccgcctggggagtacggtcgcaagattaaaactcaaaggaattgacggggacccgcacaagcggtggatgatgtggattaattcgatgcaacgcgaagaaccttacctggtcttgacatgtacggaaccctccagagacggaggggtgccttcgggagccgtaacacaggtgctgcatggctgtcgtcagctcgtgtcgtgagatgttgggttaagtcccgcaacgagcgcaacccttgtcattagttgccatcatttggttgggcactctaatgagactgccggtgacaagccggaggaaggtggggatgacgtcaagtcctcatggcccttatgaccagggcttcacacgtcatacaatggtcggtacagagggtagccaagccgcgaggcggagccaatcccaaaaaaccgatcgtagtccggattgcactctgcaactcgagtgcatgaagtcggaatcgctagtaatcgcaggtcagcatactgcggtgaatacgttcccgggtcttgtacacaccgcccgtcacaccatgggagtgggggataccagaagtaggtaggctaaccgcaaggaggccgcttaccacggtatgcttcatgactggggtg

SEQ ID NO: 2186 - DNA, 1463 bp, unidentified
  source 1..1463: mol_type = unassigned DNA; note = Neisseria dumasiana
attgaacgctggcggcatgctttacacatgcaagtcggacggcagcacagagaagcttgcttcttgggtggcgagtggcgaacgggtgagtaacgcatcggaacgtaccgagtagtgggggataactgtccgaaaggatggctaataccgcatacgctttgagaaggaaagcgggggatcttcggacctcgcgctattcgagcggccgatgtctgattagctagttggtggggtaaaggcctaccaaggcgacgatcagtagcgggtctgagaggatgatccgccacactgggactgagacacggcccagactcctacgggaggcagcagtggggaattttggacaatgggcgcaagcctgatccagccatgccgcgtgtctgaagaaggccttcgggttgtaaaggacttttgtcagggaagaaaagcttgaggctaatacccttgagtgatgacggtacctgaagaataagcaccggctaactacgtgccagcagccgcggtaatacgtagggtgcgagcgttaatcggaattactgggcgtaaagcgggcgcagacggttacttaagtcagatgtgaaatccccgggctcaacctgggaactgcgtttgaaactgggtagctagagtatgtcagaggggggtagaattccacgtgtagcagtgaaatgcgtagagatgtggaggaataccgatggcgaaggcagccccctgggataatactgacgttcatgcccgaaagcgtgggtagcaaacaggattagataccctggtagtccacgccctaaacgatgtcaattagctgttggggcacttgatgccttagtagcgtagctaacgcgtgaaattgaccgcctggggagtacggtcgcaagattaaaactcaaaggaattgacggggacccgcacaagcggtggatgatgtggattaattcgatgcaacgcgaagaaccttacctggtcttgacatgtacggaatcctccagagacggaggagtgccttcgggagccgtaacacaggtgctgcatggctgtcgtcagctcgtgtcgtgagatgttgggttaagtcccgcaacgagcgcaacccttgtcattagttgccatcattaagttgggcactctaatgagactgccggtgacaagccggaggaaggtggggatgacgtcaagtcctcatggcccttatgaccagggcttcacacgtcatacaatggtcggtacagagggtagccaagccgcgaggtggagccaatcccacaaaaccgatcgtagtccggattgcactctgcaactcgagtgcatgaagtcggaatcgctagtaatcgcaggtcagcatactgcggtgaatacgttcccgggtcttgtacacaccgcccgtcacaccatgggagtgggggataccagaagtaggtagggtaaccgcaaggagcccgcttaccacggtatgcttcatgactggggtg

SEQ ID NO: 2187 - DNA, 1462 bp, Neisseria iguanae
  source 1..1462: mol_type = unassigned DNA
attgaacgctggcggcatgctttacacatgcaagtcggacggcagcacagggaagcttgcttcttgggtggcgagtggcgaacgggtgagtaacatatcggaacgtaccgagtagagggggataactgatcgaaagatgagctaataccgcatattctctgaggaggaaagccggggaccttcgggcctggcgctatttgagcggccgatatctgattagctggttggtggggtaaaggcctaccaaggcgacgatcagtagcgggtctgagaggatgatccgccacactgggactgagacacggcccagactcctacgggaggcagcagtggggaattttggacaatgggcgcaagcctgatccagccatgccgcgtgtctgaagaaggccttcgggttgtaaaggacttttgtcagggaagaaaagcaagatgcgaataacattttgtgatgacggtacctgaagaataagcaccggctaactacgtgccagcagccgcggtaatacgtagggtgcgagcgttaatcggaattactgggcgtaaagcgagcgcagacggttacttaagcaagatgtgaaagccccgggctcaacccgggaacggcgttttgaactgggtggctggagtgtgtcagaggggggtagaattccacgtgtagcagtgaaatgcgtagagatgtggaggaataccgatggcgaaggcagccccctgggataacactgacgttcatgctcgaaagcgtgggtagcaaacaggattagataccctggtagtccacgccctaaacgatgtcaattggctgttgggcaacttgattgcttagtagcgtagctaacgcgtgaaattgaccgcctggggagtacggtcgcaagattaaaactcaaaggaattgacggggacccgcacaagcggtggatgatgtggattaattcgatgcaacgcgaagaaccttacctggtcttgacatgtacggaaccttccggagacggaggggtgccttcgggagccgtaacacaggtgctgcatggctgtcgtcagctcgtgtcgtgagatgttgggttaagtcccgcaacgagcgcaacccttgtcattagttgccatcattcagttgggcactctaatgagactgccggtgacaagccggaggaaggtggggatgacgtcaagtcctcatggcccttatgaccagggcttcacacgtcatacaatggtcggtacagagggtagccaagccgcgaggcggagccaatctcacaaaaccgatcgtagtccggattgcactctgcaactcgagtgcatgaagtcggaatcgctagtaatcgcaggtcagcatactgcggtgaatacgttcccgggtcttgtacacaccgcccgtcacaccatgggagtgggggataccagaagtagatagggtaaccgtaaggagcccgttaccacggtatgcttcatgactggggtg

SEQ ID NO: 2188 - DNA, 1463 bp, Neisseria lactamica
  source 1..1463: mol_type = unassigned DNA
attgaacgctggcggcatgctttacacatgcaagtcggacggcagcggggtagtgcttgcactactgccggcgagtggcgaacgggtgagtaacatatcggaacgtaccgggcagtgggggataactgatcgaaagatcagctaataccgcatattttctgaggaagaaagcaggggaccttcgggccttgcgctatccgagcggccgatatctgattagctggttggcggggtaaaggcccaccaaggcgacgatcagtagcgggtctgagaggacgatccgccacactgggactgagacacggcccagactcctacgggaggcagcagtggggaattttggacaatgggcgcaagcctgatccagccatgccgcgtgtctgaagaaggccttcgggttgtaaaggacttttgtcggggaagaaaaggtcggggttaataccctcggctgatgacggtacccgaagaataagcaccggctaactacgtgccagcagccgcggtaatacgtagggtgcgagcgttaatcggaattactgggcgtaaagcgggcgcagacggttacttaagcaggatgtgaaatccccgggctcaacccgggaattgcgttctgaactgggtggctagagtgtgtcagagggaggtagaattccacgtgtagcagtgaaatgcgtagagatgtggaggaataccgatggcgaaggcagcctcctgggataacactgacgttcatgcccgaaagcgtgggtagcaaacaggattagataccctggtagtccacgccctaaacgatgtcgattagctgttgggcagcctgactgcttggtagcgaagctaacgcgtgaaatcgaccgcctggggagtacggtcgcaagattaaaactcaaaggaattgacggggacccgcacaagcggtggatgatgtggattaattcgatgcaacgcgaagaaccttacccggttttgacatgtacggaatcctccggagacgggggagtgccttcgggagccgtaacacaggtgctgcatggctgtcgtcagctcgtgtcgtgagatgttgggttaagtcccgcaacgagcgcaacccttgtcattagttgccatcattcagttgggcactctaatgagactgccggtgacaagccggaggaaggtggggatgacgtcaagtcctcatggcccttatgaccggggcttcacacgtcatacaatggtcggtacagagggtagccaagccgcgaggcggagccaatctcacaaaaccgatcgtagtccggattgcactctgcaactcgagtgcatgaagtcggaatcgctagtaatcgcaggtcagcatactgcggtgaatacgttcccgggtcttgtacacaccgcccgtcacaccatgggagtgggggataccagaagcaggtaggctaaccgcaaggaggccgcttgccacggtatgcttcatgactggggtg

SEQ ID NO: 2189 - DNA, 1463 bp, Neisseria polysaccharea
  source 1..1463: mol_type = unassigned DNA
attgaacgctggcggcatgctttacacatgcaagtcggacggcagcacagagaagcttgcttcttgggtggcgagtggcgaacgggtgagtaacatatcggaacgtaccgagtagtgggggataactgatcgaaagatcagctaataccgcatacgtcttgagagggaaagcaggggaccttcggaccttgcgctattcgagcggccgatatctgattagctagttggtggggtaaaggcctaccaaggcgacgatcagtagcgggtctgagaggatgatccgccacactgggactgagacacggcccagactcctacgggaggcagcagtggggaattttggacaatgggcgcaagcctgatccagccatgccgcgtgtctgaagaaggccttcgggttgtaaaggacttttgtcagggaagaaaaggctgttgctaatatcagcggctgatgacggtacctgaagaataagcaccggctaactacgtgccagcagccgcggtaatacgtagggtgcgagcgttaatcggaattactgggcgtaaagcgggcgcagacggttacttaagcaggatgtgaaatccccgggctcaacccgggaactgcgttctgaactgggtgactcgagtgtgtcagagggaggtagaattccacgtgtagcagtgaaatgcgtagagatgtggaggaataccgatggcgaaggcagcctcctgggataacactgacgttcatgcccgaaagcgtgggtagcaaacaggattagataccctggtagtccacgccctaaacgatgtcaattagctgttgggcaacttgattgcttggtagcgtagctaacgcgtgaaattgaccgcctggggagtacggtcgcaagattaaaactcaaaggaattgacggggacccgcacaagcggtggatgatgtggattaattcgatgcaacgcgaagaaccttacctggtcttgacatgtacggaatcctccagagacggaggagtgccttcgggagccgtaacacaggtgctgcatggctgtcgtcagctcgtgtcgtgagatgttgggttaagtcccgcaacgagcgcaacccttgtcattagttgccatcattcggttgggcactctaatgagactgccggtgacaagccggaggaaggtggggatgacgtcaagtcctcatggcccttatgaccagggcttcacacgtcatacaatggtcggtacagagggtagccaagccgcgaggtggagccaatctcacaaaaccgatcgtagtccggattgcactctgcaactcgagtgcatgaagtcggaatcgctagtaatcgcaggtcagcatactgcggtgaatacgttcccgggtcttgtacacaccgcccgtcacaccatgggagtgggggataccagaagtgggtaggataaccgcaaggggtccgcttaccacggtatgcttcatgactggggtg

SEQ ID NO: 2190 - DNA, 1463 bp, Neisseria shayeganii
  source 1..1463: mol_type = unassigned DNA
attgaacgctggcggcatgctttacacatgcaagtcggacggcagcacagagaagcttgcttcttgggtggcgagtggcgaacgggtgagtaacgcatcggaacgtaccgagtagtgggggataactgtccgaaaggatggctaataccgcatacgctttgagaaggaaagcgggggatcttcggacctcgcgctattcgagcggccgatgtctgattagctagttggtggggtaaaggcctaccaaggcgacgatcagtagcgggtctgagaggatgatccgccacactgggactgagacacggcccagactcctacgggaggcagcagtggggaattttggacaatgggcgcaagcctgatccagccatgccgcgtgtctgaagaaggccttcgggttgtaaaggacttttgtcagggaagaaaagctttgggttaataccctggagtgatgacggtacctgaagaataagcaccggctaactacgtgccagcagccgcggtaatacgtagggtgcgagcgttaatcggaattactgggcgtaaagcgagcgcagacggtttgttaagcaggatgtgaaatccccgggctcaacctgggaactgcgttctgaactggcaggctagagtatgtcagaggggggtagaattccacgtgtagcagtgaaatgcgtagagatgtggaggaataccgatggcgaaggcagccccctgggataatactgacgttcatgctcgaaagcgtgggtagcaaacaggattagataccctggtagtccacgccctaaacgatgtcaattagctgttggggtgcttgacaccttagtagcgtagctaacgcgtgaaattgaccgcctggggagtacggtcgcaagattaaaactcaaaggaattgacggggacccgcacaagcggtggatgatgtggattaattcgatgcaacgcgaagaaccttacctggtcttgacatgtacggaatcctccagagacggaggagtgccttcgggagccgtaacacaggtgctgcatggctgtcgtcagctcgtgtcgtgagatgttgggttaagtcccgcaacgagcgcaacccttgtcattagttgccatcatttagttgggcactctaatgagactgccggtgacaaaccggaggaaggtggggatgacgtcaagtcctcatggcccttatgaccagggcttcacacgtcatacaatggtcggtacagagggtagccaagccgcgaggcggagccaatcccaaaaaaccgatcgtagtccggattgcactctgcaactcgagtgcatgaagtcggaatcgctagtaatcgcaggtcagcatactgcggtgaatacgttcccgggtcttgtacacaccgcccgtcacaccatgggagtgggggataccagaagtaggtagggtaaccgcaaggagcccgcttaccacggtatgcttcatgactggggtg

SEQ ID NO: 2191 - DNA, 1463 bp, Neisseria sicca
  source 1..1463: mol_type = unassigned DNA
attgaacgctggcggcatgctttacacatgcaagtcggacggcagcacagagaagcttgcttcttgggtggcgagtggcgaacgggtgagtaacatatcggaacgtaccgagcagtgggggataactaatcgaaagattagctaataccgcatatcttctgaggaagaaagcaggggaccatttggccttgcgctgtttgagcggccgatatctgattagctagttggtggggtaaaggcctaccaaggcgacgatcagtagcgggtctgagaggatgatccgccacactgggactgagacacggcccagactcctacgggaggcagcagtggggaattttggacaatgggcgcaagcctgatccagccatgccgcgtgtctgaagaaggccttcgggttgtaaaggacttttgtcagggaagaaaagggcggggttaatacccctgtctgatgacggtacctgaagaataagcaccggctaactacgtgccagcagccgcggtaatacgtagggtgcgagcgttaatcggaattactgggcgtaaagcgggcgcagacggttacttaagcaggatgtgaaatccccgggctcaacttgggaactgcgttctgaactgggtgactagagtgtgtcagagggaggtagaattccacgtgtagcagtgaaatgcgtagagatgtggaggaataccgatggcgaaggcagcctcctgggataacactgacgttcatgcccgaaagcgtgggtagcaaacaggattagataccctggtagtccacgccctaaacgatgtcgattagctgttgggcagcatgactgcttagtagcgaagctaacgcgtgaaatcgaccgcctggggagtacggtcgcaagattaaaactcaaaggaattgacggggacccgcacaagcggtggatgatgtggattaattcgatgcaacgcgaagaaccttacctggtcttgacatgtacggaaccctccagagacggaggggtgccttcgggagccgtaacacaggtgctgcatggctgtcgtcagctcgtgtcgtgagatgttgggttaagtcccgcaacgagcgcaacccttgtcattagttgccatcattaagttgggcactctaatgagactgccggtgacaagccggaggaaggtggggatgacgtcaagtcctcatggcccttatgaccagggcttcacacgtcatacaatggtcggtacagagggtagccaagccgcgaggtggagccaatctcacaaaaccgatcgtagtccggattgcactctgcaactcgagtgcatgaagtcggaatcgctagtaatcgcaggtcagcatactgcggtgaatacgttcccgggtcttgtacacaccgcccgtcacaccatgggagtgggggataccagaagtaggtagggtaaccgcaaggagcccgcttaccacggtatgcttcatgactggggtg

SEQ ID NO: 2192 - DNA, 1463 bp, Neisseria wadsworthii
  source 1..1463: mol_type = unassigned DNA
attgaacgctggcggcatgctttacacatgcaagtcgaacggcagcgggggagagcttgctttcctgccggcgagtggcgaacgggtgagtaatgcatcggaacgtaccgagtagtgggggataactgtccgaaaggatggctaataccgcatacgctttgcgaaggaaagcgggggctcttaggacctcgcgctattcgagcggccgatgtctgattagctagttggtggggtaaaggcctaccaaggcgacgatcagtagcgggtctgagaggatgatccgccacactgggactgagacacggcccagactcctacgggaggcagcagtggggaattttggacaatggggggaaccctgatccagccatgccgcgtgtctgaagaaggccttcgggttgtaaaggacttttgtcagggaagaaaagcttcgggttaataccctggagtgatgacggtacctgaagaataagcaccggctaactacgtgccagcagccgcggtaatacgtagggtgcgagcgttaatcggaattactgggcgtaaagcgagcgcagacggttacttaagcaggatgtgaaatccccgggctcaacctgggaactgcgttctgaactgggtgactagagtatgtcagaggggggtagaattccacgtgtagcagtgaaatgcgtagagatgtggaggaataccgatggcgaaggcagccccctgggataatactgacgttcatgctcgaaagcgtgggtagcaaacaggattagataccctggtagtccacgccctaaacgatgtcaattagctgttggggcacttgatgctttagtagcgtagctaacgcgtgaaattgaccgcctggggagtacggtcgcaagattaaaactcaaaggaattgacggggacccgcacaagcggtggatgatgtggattaattcgatgcaacgcgaagaaccttacctggtcttgacatgtacggaatcctccggagacggaggagtgccttcgggagccgtaacacaggtgctgcatggctgtcgtcagctcgtgtcgtgagatgttgggttaagtcccgcaacgagcgcaacccttgtcattagttgccatcatttagttgggcactctaatgagactgccggtgacaaaccggaggaaggtggggatgacgtcaagtcctcatggcccttatgaccagggcttcacacgtcatacaatggtcggtacagagggtagccaagccgcgaggtggagccaatcccacaaaaccgatcgtagtccggattgcactctgcaactcgagtgcatgaagtcggaatcgctagtaatcgcaggtcagcatactgcggtgaatacgttcccgggtcttgtacacaccgcccgtcacaccatgggagtgggggataccagaagtaggtagggtaaccgcaaggagcccgcttaccacggtatgcttcatgactggggtg

SEQ ID NO: 2193 - DNA, 1463 bp, Neisseria weaveri
  source 1..1463: mol_type = unassigned DNA
attgaacgctggcggcatgctttacacatgcaagtcggacggcagcacagagaagcttgcttcttgggtggcgagtggcgaacgggtgagtaatatattggaacgtaccgagtaatgggggataacttgccgaaaggtaagctaataccgcatacgctctgaggaggaaagcaggggaccttcgggccttgcgttattcgagcggccaatatctgattagctagttggtggggtaaaggcctaccaaggcgacgatcagtagcgggtctgagaggatgatccgccacactgggactgagacacggcccagactcctacgggaggcagcagtggggaattttggacaatgggcgcaagcctgatccagccatgccgcgtgtctgaagaaggccttcgggttgtaaaggacttttgtcagggaagaaaaggttgtggctaatatccatgactgatgacggtacctgaagaataagcaccggctaactacgtgccagcagccgcggtaatacgtagggtgcgagcgttaatcggaattactgggcgtaaagcgagcgcagacggttacttaagcaggatgtgaaatccccgggctcaacctgggaactgcgttctgaactgggtgactagagtatgtcagaggggggtagaattccacgtgtagcagtgaaatgcgtagagatgtggaggaataccgatggcgaaggcagccccctgggataatactgacgttcatgctcgaaagcgtgggtagcaaacaggattagataccctggtagtccacgccctaaacgatgtcaattagctgttgggcaacttgattgcttagtagcgtagctaacgcgtgaaattgaccgcctggggagtacggtcgcaagattaaaactcaaaggaattgacggggacccgcacaagcggtggatgatgtggattaattcgatgcaacgcgaagaaccttacctggtcttgacatgtacggaatcctccggagacggaggagtgccttcgggagccgtaacacaggtgctgcatggctgtcgtcagctcgtgtcgtgagatgttgggttaagtcccgcaacgagcgcaacccttgtcattagttgccatcattaagttgggcactctaatgagactgccggtgacaaaccggaggaaggtggggatgacgtcaagtcctcatggcccttatgaccagggcttcacacgtcatacaatggtcggtacagagggtagccaagccgcgaggtggagccaatctcacaaaaccgatcgtagtccggattgcactctgcaactcgagtgcatgaagtcggaatcgctagtaatcgcaggtcagcatactgcggtgaatacgttcccgggtcttgtacacaccgcccgtcacaccatgggagtgggggataccagaagtaggtagggtaaccgcaaggagcccgcttaccacggtatgcttcatgactggggtg

SEQ ID NO: 2194 - DNA, 1550 bp, unidentified
  source 1..1550: mol_type = unassigned DNA; note = Neisseria zalophi
aacgctggcggcatgctttacacatgcaagtcgaacggcagcacggaagagcttgctcttttggtggcgagtggcgaacgggtgagtaatgcatcggaacgtaccgagtagtgggggataactgtccgaaaggatggctaataccgcatacgctttgagaaggaaagcgggggctcttaggacctcgcgctattcgagcggccgatgtctgattagctagttggtggggtaagagcctaccaaggcgacgatcagtagcgggtctgagaggatgatccgccacactgggactgagacacggcccagactcctacgggaggcagcagtggggaattttggacaatgggggcaaccctgatccagccatgccgcgtgtctgaagaaggccttcgggttgtaaaggacttttgtcagggaagaaagggtttgtgctaataccacgaacatatgacggtacctgaagaataagcaccggctaactacgtgccagcagccgcggtaatacgtagggtgcgagcgttaatcggaattactgggcgtaaagcgggcgcagacggttacttaagtcagatgtgaaatccccgggctcaacctgggaactgcgtttgaaactgggtagctagagtatgtcagaggggggtagaattccacgtgtagcagtgaaatgcgtagagatgtggaggaataccgatggcgaaggcagccccctgggataatactgacgttcatgcccgaaagcgtgggtagcaaacaggattagataccctggtagtccacgccctaaacgatgtcaattagctgttggggcacttgatgccttagtagcgtagctaacgcgtgaaattgaccgcctggggagtacggtcgcaagattaaaactcaaaggaattgacggggacccgcacaagcggtggatgatgtggattaattcgatgcaacgcgaagaaccttacctggtcttgacatgtacggaatcctccagagacggaggagtgccttcgggagccgtaacacaggtgctgcatggctgtcgtcagctcgtgtcgtgagatgttgggttaagtcccgcaacgagcgcaacccttgtcattagttgccatcattaagttgggcactctaatgagactgccggtgacaagccggaggaaggtggggatgacgtcaagtcctcatggcccttatgaccagggcttcacacgtcatacaatggtcggtacagagggtagccaagccgcgaggtggagccaatctcataaaaccgatcgtagtccggattgcactctgcaactcgagtgcatgaagtcggaatcgctagtaatcgcaggtcagcatactgcggtgaatacgttcccgggtcttgtacacaccgcccgtcacaccatgggagtgggggataccagaagtaggtagggtaaccgcaaggagcccgcttaccacggtatgcttcatgactggggtgaagtcgtaacaaggtagccgtaggggaacctgcggctggatcacctcctttctagagaaaagaagaggttgttgggtactcacacttatcg

SEQ ID NO: 2195 - DNA, 1463 bp, Neisseria zoodegmatis
  source 1..1463: mol_type = unassigned DNA
attgaacgctggcggcatgctttacacatgcaagtcggacggcagcacagagaagcttgcttcttgggtggcgagtggcgaacgggtgagtaatgcatcggaacgtaccgagtagtgggggataactgtccgaaaggatggctaataccgcatacgctttgagaaggaaagcaggggctcttcggaccttgcgctattcgagcggccgatgtctgattagctggttggtggggtaaaggcctaccaaggcgacgatcagtagcgggtctgagaggatgatccgccacactgggactgagacacggcccagactcctacgggaggcagcagtggggaattttggacaatgggcgcaagcctgatccagccatgccgcgtgtctgaagaaggccttcgggttgtaaaggacttttgtcagggaagaaaaggttgtggttaatacccatgactgatgacggtacctgaagaataagcaccggctaactacgtgccagcagccgcggtaatacgtagggtgcgagcgttaatcggaattactgggcgtaaagcgggcgcagacggttacttaagtcagatgtgaaatccccgggctcaacctgggaactgcgtttgaaactgggtgactagagtatgtcagaggggggtagaattccacgtgtagcagtgaaatgcgtagagatgtggaggaataccgatggcgaaggcagccccctgggataatactgacgttcatgcccgaaagcgtgggtagcaaacaggattagataccctggtagtccacgccctaaacgatgtcaattagctgttgggcaacttgattgcttagtagcgtagctaacgcgtgaaattgaccgcctggggagtacggtcgcaagattaaaactcaaaggaattgacggggacccgcacaagcggtggatgatgtggattaattcgatgcaacgcgaagaaccttacctggtcttgacatgtacggaatcctccagagacggaggagtgccttcgggagccgtaacacaggtgctgcatggctgtcgtcagctcgtgtcgtgagatgttgggttaagtcccgcaacgagcgcaacccttgtcattagttgccatcatttggttgggcactctaatgagactgccggtgacaagccggaggaaggtggggatgacgtcaagtcctcatggcccttatgaccagggcttcacacgtcatacaatggtcggtacagagggtagccaagccgcgaggtggagccaatcccacaaaaccgatcgtagtccggattgcactctgcaactcgagtgcatgaagtcggaatcgctagtaatcgcaggtcagcatactgcggtgaatacgttcccgggtcttgtacacaccgcccgtcacaccatgggagtgggggataccagaagtaggtagggtaaccgcaaggagcccgcttaccacggtatgcttcatgactggggtg

SEQ ID NO: 2196 - DNA, 1411 bp, Neoasaia chiangmaiensis
  source 1..1411: mol_type = unassigned DNA
agcgaacgctggcggcatgcttaacacatgcaagtcgcacggacctttcggggtgagtggcggacgggtgagtaacgcgtagggatttatccacgggtgggggataacactgggaaactggtgctaataccgcatgatgcctgagggccaaaggcgtaagtcgcctgtggaggagcctgcgttcgattagcttgttggtggggtaaaggcctaccaaggcgatgatcgatagctggtctgagaggatgatcagccacactgggactgagacacggcccagactcctacgggaggcagcagtggggaatattggacaatgggcgaaagcctgatccagcaatgccgcgtgtgtgaagaaggtcttcggattgtaaagcactttcgacggggacgatgatgacggtacccgtagaagaagccccggctaacttcgtgccagcagccgcggtaatacgaagggggctagcgttgctcggaattactgggcgtaaagggcgcgtaggcggttgtgacagtcagatgtgaaattcctgggcttaacctgggggctgcatttgatacgtgacgactagagtgtgagagagggttgtggaattcccagtgtagaggtgaaattcgtagatattgggaagaacaccggtggcgaaggcggcaacctggctcataactgacgctgaggcgcgaaagcgtggggagcaaacaggattagataccctggtagtccacgctgtaaacgatgtgtgctggatgttgggaaacttagtttttcagtgtcgaagctaacgcgctaagcacaccgcctggggagtacggccgcaaggttgaaactcaaaggaattgacgggggcccgcacaagcggtggagcatgtggtttaattcgaagcaacgcgcagaaccttaccagggcttgacatggggaggctgtgtccagagatgggcatttcccgcaagggacctcctgcacaggtgctgcatggctgtcgtcagctcgtgtcgtgagatgttgggttaagtcccgcaacgagcgcaaccctcgcctttagttgccagcatgtttgggtgggcactctagaggaactgccggtgacaagccggaggaaggtggggatgacgtcaagtcctcatggcccttatgtcctgggctacacacgtgctacaatggcggtgacagtgggaagctagacagtgatgtcatgctgatctctaaaaaccgtctcagttcggattgtactctgcaactcgagtgcatgaaggtggaatcgctagtaatcgcggatcagcatgccgcggtgaatacgttcccgggccttgtacacaccgcccgtcacaccatgggagttggttcgaccttaagctggtgagcgaaccgcaaggacgcagccaaccacggtcgggttagcgactagggtg

SEQ ID NO: 2197 - DNA, 1406 bp, Neokomagataea tanensis
  source 1..1406: mol_type = unassigned DNA
agcgaacgctggcggcatgcttaacacatgcaagtcgcacggacctttcggggtgagtggcggacgggtgagtaacgcgtaggtatctatccatgggtgggggataacattgggaaactggtgctaataccgcatgacacctgagggtcaaaggcgcaagtcgcctgtggaggagcctgcgttcgattagctagttggttgggtaatggctgaccaaggcgatgatcgatagctggtttgagaggatgatcagccacactgggactgagacacggcccagactcctacgggaggcagcagtggggaatattggacaatgggggcaaccctgatccagcaatgccgcgtgtgtgaagaaggtcttcggattgtaaagcactttcgttggggacgatgatgacggtacccaaagaagaagccccggctaacttcgtgccagcagccgcggtaatacgaagggggctagcgttgctcggaatgactgggcgtaaagggcgcgtaggcggtttaagcagtcagatgtgaaatccccgggcttaacctgggaactgcatttgagacgcttagactagagttcgagagagggttgtggaattcccagtgtagaggtgaaattcgtagatattgggaagaacaccggtggcgaaggcggcaacctggctcgatactgacgctgaggcgcgaaagcgtggggagcaaacaggattagataccctggtagtccacgctgtaaacgatgtgtgctggatgttaggtaacttagttacttagtgtcgaagctaacgcgctaagcacaccgcctggggagtacggccgcaaggttgaaactcaaaggaattgacgggggcccgcacaagcggtggagcatgtggtttaattcgaagcaacgcgcagaaccttaccagggcttgcatggggaggctgtagtcagagatgactatttcttcggacctcccgcacaggtgctgcatggctgtcgtcagctcgtgtcgtgagatgttgggttaagtcccgcaacgagcgcaacccttgtctttagttgccatcaggttgggctgggcactctagagagactgccggtgacaagccggaggaaggtggggatgacgtcaagtcctcatggcccttatgtcctgggctacacacgtgctacaatggcggtgacagtgggaagctatgtggtgacacagtgctgatctctaaaagccgtctcagttcggattgtactctgcaactcgagtacatgaaggtggaatcgctagtaatcgcggatcagcatgccgcggtgaatacgttcccgggccttgtacacaccgcccgtcacaccatgggagttggttcgaccttaagccggtgagcgaaccgtaaggacgcagccgaccacggacgggtcagcgactggggtg

SEQ ID NO: 2198 - DNA, 1403 bp, unidentified
  source 1..1403: mol_type = unassigned DNA; note = Neorhizobium galegae
  misc_difference 50..53: note = n is a, c, g, or t
  misc_difference 937: note = n is a, c, g, or t
aacgaacgctggcggcaggcttaacacatgcaagtcgagcgcctcgcaannnnagcggcagacgggtgagtaacgcgtgggaatctacccatccctacggaacaactccgggaaactggagctaattccgtatacgcccttcgggggaaagatttatcggggatggatgagcccgcgttggattagctagttggtggggtaaaggcctaccaaggcgacgatccatagctggtctgagaggatgatcagccacattgggactgagacacggcccaaactcctacgggaggcagcagtggggaatattggacaatgggcgcaagcctgatccagccatgccgcgtgagtgatgaaggtcttaggattgtaaagctctttcaccggagaagataatgacggtatccggagaagaagccccggctaacttcgtgccagcagccgcggtaatacgaagggggctagcgttgttcggaattactgggcgtaaagcgcacgtaggcggatatttaagtcaggggtgaaatcccagagctcaactctggaactgcctttgatactgggtatcttgagtatggaagaggtaagtggaattgcgagtgtagaggtgaaattcgtagatattcgcaggaacaccagtggcgaaggcggcttactggtccattactgacgctgaggtgcgaaagcgtggggagcaaacaggattagataccctggtagtccacgccgtaaacgatgaatgttagccgtcggcaagtttacttgtcggtggcgcacgtaacgcattaaacattccgcctggggagtacggtcgcaagattaaaactcaaaggaattgacgggggcccgcacaagcggtggagcatgtggtttaattcgaagcaacgcgcagaaccttaccagcccttgacatgcccggacagctacagagatgtagtgntcccttcggggaccgggacacaggtgctgcatggctgtcgtcagctcgtgtcgtgagatgttgggttaagtcccgcaacgagcgcaaccctcgcccttagttgccagcattcagttgggcactctaaggggactgccggtgataagccgagaggaaggtggggatgacgtcaagtcctcatggcccttacgggctgggctacacacgtgctacaatggtggtgacagtgggcagcgaaggagcgatcccgagctaatctccaaaagccatctcagttcggattgcactctgcaactcgagtgcatgaagttggaatcgctagtaatcgcggatcagcacgccgcggtgaatacgttcccgggccttgtacacaccgcccgtcacaccatgggagttggttttacccgaaggtagtgcgctaaccgcaaggaggcagctaaccacggtagggtcagcgactggggtg

SEQ ID NO: 2199 - DNA, 1410 bp, unidentified
  source 1..1410: mol_type = unassigned DNA; note = Neosynechococcus sphagnicola
gatgaacgctggcggtctgcttaacacatgcaagtcgaacgggctcttcggagctagtggcggacgggtgagtaacgcgtgagaatctgcctacaggtctgggacaacagttggaaacggctgctaataccggatgtgccgagaggtgaaagctttagtgcctgtagatgagctcgcgtctgattagctagttggtggggtaagagcctaccaaggcgacgatcagtagctggtctgagaggatgatcagccacactgggactgagacacggcccagactcctacgggaggcagcagtggggaattttccgcaatgggcgaaagcctgacggagcaagaccgcgtgagggaggaaggcttttgggttgtaaacctcttttctcagggaagaagatctgacggtacctgaggaatcagcatcggctaactccgtgccagcagccgcggtaatacggaggatgcaagcgttatccggaattattgggcgtaaagcgtccgcaggtggttttacaagtctgctgttaaagcgcggagcttaacttcgtaacggcggtggaaactgtgagactagagtacggtaggggtagcgggaattcccggtgtagcggtgaaatgcgtagatatcgggaagaacaccagcggcgaaagcgcgctactgggcctgtactgacactgagggacgaaagctaggggagcgaaagggattagatacccctgtagtcctagctgtaaacgatggatactaggtgttgcgcgtatcgacccgagcagtgccgtagctaacgcgttaagtatcccgcctggggagtacgctcgcaagagtgaaactcaaaggaattgacgggggcccgcacaagcggtggagtatgtggtttaattcgatgcaacgcgaagaaccttaccagggcttgacatgtcgcgaattccggtgaaagtcgggagtgccttcgggagcgcgaacacaggtggtgcatggctgtcgtcagctcgtgtcgtgagatgttgggttaagtcccgcaacgagcgcaacccacgtctttagttgccagcattaagttgggcactttagagagactgccggtgacaaaccggaggaaggtgtggatgacgtcaagtcagcatgccccttacgtcctgggctacacacgtactacaatgcttcggacagagggttgcgagctagcgatagcaagctaatcccgtaaaccgaggctcagttcagattgcaggctgcaactcgcctgcatgaaggcggaatcgctagtaatcgcaggtcagcatactgcggtgaatacgttcccgggccttgtacacaccgcccgtcacaccatgggagttggccacgcccgaagtcgttactccaaccgcttgcggaggaggatgcctaaggcagggctgatgactggggtg

SEQ ID NO: 2200 - DNA, 1462 bp, Neptuniibacter caesariensis
  source 1..1462: mol_type = unassigned DNA
attgaacgctggcggcaggcctaacacatgcaagtcgaacggtaacatgactagcttgctagttgatgacgagtggcggacgggtgagtaacgcgtaggaatctacccagtagcgggggataagccagagaaatttggtctaataccgcatacgcccttcgggggaaagcaggggatcttcggaccttgcactattggatgagcctgcgtgagattagcttgttggtgaggtaatggctcaccaaggcgacgatctctagctggtctgagaggatgatcagccacactggaactgagacacggtccagactcctacgggaggcagcagtggggaatattgcacaatgggcgcaagcctgatgcagccatgccgcgtgtgtgaagaaggccctagggttgtaaagcactttcagcagtgaggaaaggttagtagttaatacctgctagctgtgacgttaactgcagaagaagcaccggctaactccgtgccagcagccgcggtaatacggagggtgcgagcgttaatcggaattactgggcgtaaagcgcgcgtaggtggattggtcagtcagatgtgaaagcccagggctcaaccttggaactgcacctgatactgccaatctagaatacggtagagggtagtggaatttcctgtgtagcggtgaaatgcgtagatataggaaggaacaccagtggcgaaggcgactacctggaccgatattgacactgaggtgcgaaagcgtggggagcaaacaggattagataccctggtagtccacgccgtaaacgatgtctactagccgttgggggacttgatctcttagtggcgcagctaacgcgataagtagaccgcctggggagtacggccgcaaggttaaaactcaaatgaattgacgggggcccgcacaagcggtggagcatgtggtttaattcgaagcaacgcgaagaaccttaccaactcttgacatccagagaacttagcagagatgctttggtgccttcgggaactctgagacaggtgctgcatggctgtcgtcagctcgtgttgtgaaatgttgggttaagtcccgtaacgagcgcaacccttgtccttatttgccagcacttcgggtgggaactctaaggagactgccggtgacaaaccggaggaaggtggggacgacgtcaagtcatcatggcccttacgagttgggctacacacgtgctacaatggtcggtacagagggctgcaaacctgcgaaggtaagctaatctcacaaaaccggtcgtagtccggattggagtctgcaactcgactccatgaagtcggaatcgctagtaatcgtggatcagaatgccacggtgaatacgttcccgggccttgtacacaccgcccgtcacaccatgggagtggattgcaccagaagtagctagcttaaccttcgggagggcggttaccacggtgtggttcatgactggggtg

SEQ ID NO: 2201 - DNA, 1469 bp, Neptunomonas antarctica
  source 1..1469: mol_type = unassigned DNA
attgaacgctggcggcaggcttaacacatgcaagtcgagcggtaacagagagtagcttgctactttgctgacgagcggcggacgggtgagtaacgcgtaggaatctacctggtagcgggggatagcccagagaaatttggattaataccgcatacgccctacgggggaaaggaggggatctatttatagacctttcactatcagatgagcctgcgtgagattagcttgttggtgaggtaaaggctcaccaaggcgacgatctctagctggtctgagaggatgatcagccacactgggactgagacacggcccagactcctacgggaggcagcagtggggaatattgcacaatgggggaaaccctgatgcagccatgccgcgtgtgtgaagaaggccttcgggttgtaaagcactttcagcgaggaggaaagggttgttattaatactaacaatctgtgacgttactcgcagaagaagcaccggctaactccgtgccagcagccgcggtaatacggagggtgcaagcgttaatcggaattactgggcgtaaagcgcgcgtaggcggcttagtcagtcagatgtgaaagccccgggctcaacctgggaattgcacctgatactgctaggctagagtacagaagagggtggtggaatttcctgtgtagcggtgaaatgcgtagatataggaaggaacatcagtggcgaaggcggccacctggtctgatactgacgctgaggtgcgaaagcgtggggagcaaacaggattagataccctggtagtccacgccgtaaacgatgtcaactagccgttgggggacttgatcctttagtggcgcagctaacgcgataagttgaccgcctggggagtacggtcgcaagattaaaactcaaatgaattgacgggggcccgcacaagcggtggagcatgtggtttaattcgaagcaacgcgaagaaccttacctactcttgacatccagagaactcgctagagatagcttggtgccttcgggaactctgagacaggtgctgcatggctgtcgtcagctcgtgttgtgaaatgttgggttaagtcccgtaacgagcgcaacccttgtccttatttgccagcacgtaatggtgggaactctaaggagactgccggtgacaaaccggaggaaggtggggacgacgtcaagtcatcatggcccttacgagtagggctacacacgtgctacaatggccggtacagagggctgcaaacctgcgaaggtaagccaatctcacaaaaccggtcgtagtccggattggagtctgcaactcgactccatgaagtcggaatcgctagtaatcgtagatcagaatgctacggtgaatacgttcccgggccttgtacacaccgcccgtcacaccatgggagtggattgcaccagaagtagatagtctaaccttcggggggacgtttaccacggtgtggttcatgactggggtg

SEQ ID NO: 2202 - DNA, 1467 bp, unidentified
  source 1..1467: mol_type = unassigned DNA; note = Neptunomonas qingdaonensis
attgaacgctggcggcaggcttaacacatgcaagtcgagcggaaacgaagatagcttgctatcaggcgtcgagcggcggacgggtgagtaacgcgtaggaatctacctagtagtgggggatagcccagagaaatttggattaataccgcatacgccctacgggggaaaggaggggatctatttatagacctttcgctatcagatgagcctgcgtgagattagcttgttggtgaggtaaaggctcaccaaggcgacgatctctagctggtctgagaggatgatcagccacactgggactgagacacggcccagactcctacgggaggcagcagtggggaatattgcacaatgggggaaaccctgatgcagccatgccgcgtgtgtgaagaaggccttcgggttgtaaagcactttcagttgtgaggaaaggttgacgtttaatacgcgttaactgtgacgttagcaacagaagaaggaccggctaactccgtgccagcagccgcggtaatacggagggtccgagcgttaatcggaattactgggcgtaaagcgcgcgtaggcggcttggtcagtcagatgtgaaatccccgggctcaacctgggaattgcacctgatactgccaggctagagtacagaagagggtggtggaatttcctgtgtagcggtgaaatgcgtagatataggaaggaacatcagtggcgaaggcggccacctggtctgatactgacgctgaggtgcgaaagcgtggggagcaaacaggattagataccctggtagtccacgccgtaaacgatgtcaactagccgttggggaacttgattctttagtggcgcagctaacgcgataagttgaccgcctggggagtacggtcgcaagattaaaactcaaatgaattgacgggggcccgcacaagcggtggagcatgtggtttaattcgaagcaacgcgaagaaccttacctactcttgacatccagagaactcgccagagatggcttggtgccttcgggaactctgagacaggtgctgcatggctgtcgtcagctcgtgttgtgaaatgttgggttaagtcccgtaacgagcgcaacccttatccttatttgccagcacgtaatggtgggaactctaaggagactgccggtgacaaaccggaggaaggtggggacgacgtcaagtcatcatggcccttacgagtagggctacacacgtgctacaatggccggtacagagggctgcaaacctgcgaaggtaagctaatctcacaaaaccggtcgtagtccggatcggagtctgcaactcgactccgtgaagtcggaatcgctagtaatcgtggatcagaatgccacggtgaatacgttcccgggccttgtacacaccgcccgtcacaccatgggagtggattgcaccagaagtagatagtctaaccttcggggggacgtttaccacggtgtggttcatgactggggtg

SEQ ID NO: 2203 - DNA, 1452 bp, Niastella koreensis
  source 1..1452: mol_type = unassigned DNA
gatgaacgctagcggcaggcttaatacatgcaagtcgaggggcagcgcagtgtagcaatacatgggcggcgaccggcaaacgggtgcggaacacgtacgcaaccttccttcaagcgggggatagctttcggaaacgaaaattaataccccatagcaatgtctgatggcatctgaggacatttaaagatttatcacttgaagatgggcgtgcgcctgattaggtagttggcggggtaacggcccaccaagcctacgatcagtaactggtgtgagagcacgaccagtcacacgggcactgagacacgggcccgactccctacgggaggcagcagtaaggaatattggtcaatggacgcaagtctgaaccagccatgccgcgtggaggatgaaggtcctctggattgtaaacttcttttatcggagaagaaacccacgaaatcttttgtggttgacggtacccgatgaataagcaccggctaactccgtgccagcagccgcggtaatacggagggtgcaagcgttatccggattcactgggtttaaagggagcgtaggtgggctggtaagtcagtggtgaaatctccgggcttaactcggaaactgccgttgatactatcagtcttgaatgttgtggaggtaagcggaatatgtcatgtagcggtgaaatgcttagatatgacatagaacaccgatagcgaaggcagcttgctacacaattattgacactgaggctcgaaagcgtggggatcaaacaggattagataccctggtagtccacgccctaaacgatggatactcgacatacgcgatacacagtgtgtgtctgagcgaaagcattaagtatcccacctgggaagtacgaccgcaaggttgaaactcaaaggaattggcgggggtccgcacaagcggtggagcatgtggtttaattcgatgatacgcgaggaaccttacctgggctagaatgcaatttgaccgtgggtgaaagctcattttgtagcaatacacagattgtaaggtgctgcatggctgtcgtcagctcgtgccgtgaggtgttgggttaagtcccgcaacgagcgcaacccccatcattagttgccatcaggtaaagctgggaactctaatgaaactgccgtcgtaagacgcgaggaaggaggggatgatgtcaagtcatcatggcctttatgcccagggctacacacgtgctacaatggaagggacaaagagctgccacttggcaacaaggcgctaatctcaaaaaccctttctcagttcagattggagtctgcaactcgactccatgaagctggaatcgctagtaatcgtatatcagcaatgatacggtgaatacgttcccggaccttgcacacaccgcccgtcaagccatggaagctgggtgtacctaaagtcggtaaccgcaaggagccgcctagggtaaaactagtgactggggct

SEQ ID NO: 2204 - DNA, 1430 bp, Niastella populi
  source 1..1430: mol_type = unassigned DNA
ttatacatgcagtcgaggggcagcatgactgtagcaatacagttgatggcgaccggcaaacgggtgcggaacacgtacgcaaccttccttcaaatgggggatagcccaccgaaaggtggattaataccccgtaaaatttttgggtggcatcacctgattattatagctccggcgtttgaagatgggcgtgcgcctgattaggtagttggcggagtaacagcccaccaagcctacgatcagtaactggtgtgagagcacgaccagtcacacgggcactgagacacgggcccgactcctacgggaggcagcagtaaggaatattggtcaatggacgcaagtctgaaccagccatgccgcgtggaggatgaaggtcctctggattgtaaacttcttttatcggagaagaaacccatactttctagtgtggttgacggtacccgatgaataagcaccggctaactccgtgccagcagccgcggtaatacggagggtgcaagcgttatccggattcactgggtttaaagggtgcgtaggtgggttggtaagtcagtggtgaaatctccgggcttaactcggaaactgccgttgatactatcaatcttgaatgttgtggaggtaagcggaatatgtcatgtagcggtgaaatgcttagatatgacatagaacaccgatagcgaaggcagcttgctacacaataattgacactgaggcacgaaagcgtggggatcaaacaggattagataccctggtagtccacgccctaaacgatggatactcgacatacgcgatacacagtgtgtgtctgagcgaaagcattaagtatcccacctgggaagtacgaccgcaaggttgaaactcaaaggaattgggcggggtccgcacaagcggtggagcatgtggtttaattcgatgatacgcgaggaaccttacctgggctagaatgcagattgaccgtgggtgaaagctcattttgtagcaatacacagtctgtaaggtgctgcatggctgtcgtcagctcgtgccgtgaggtgttgggttaagtcccgcaacgagcgcaacccccatcattagttgccatcaggtaaagctgggaactctaatgaaactgccgtcgtaagacgcgaggaaggaggggatgatgtcaagtcatcatggcctttatgcccagggctacacacgtgctacaatgggagggacaaagagctgccacttggcgacaaggagctaatctcaaaaaccctttctcagttcagatcgcagtctgcaactcgactgcgtgaagctggaatcgctagtaatcgtatatcagcaatgatacggtgaatacgttcccggaccttgcacacaccgcccgtcaagccatggaagctgggtgtacctaaagtcggtaaccgcaaggagccgcctagggtaaaactagtgactgggct

SEQ ID NO: 2205 - DNA, 1451 bp, unidentified
  source 1..1451: mol_type = unassigned DNA; note = Niastella vici
gatgaacgctagcggcaggcttaatacatgcaagtcgaggggcagcgcagtgtagcaatacatgggcggcgaccggcaaacgggtgcggaacacgtacgcaaccttcctttaagtgagggatagctttcggaaacgaaaattaatacctcgtaacatcgttgagtggcatcacttgatgattatagctccggcgcttaaagatgggcgtgcgcctgattaggtagttggcggagtaacagcccaccaagcctacgatcagtaactggtgtgagagcacgaccagtcacacgggcactgagacacgggcccgactcctacgggaggcagcagtaaggaatattggtcaatggacgcaagtctgaaccagccatgccgcgtggaggatgaaggtcctctggattgtaaacttcttttatcggagaagaaaccccggaaatctttctgggttgacggtacccgatgaataagcaccggctaactccgtgccagcagccgcggtaatacggagggtgcaagcgttatccggattcactgggtttaaagggtgcgtaggtgggttggtaagtcagtggtgaaatctccgggcttaactcggaaactgccgttgatactatcaatcttgaatctcgtggaggtaagcggaatatgtcatgtagcggtgaaatgcttagatatgacatagaacaccgatagcgaaggcagcttgctacacgagtattgacactgaggcacgaaagcgtggggatcaaacaggattagataccctggtagtccacgccctaaacgatggatactcgacatacgcgatacacagtgtgtgtctgagcgaaagcattaagtatcccacctgggaagtacgaccgcaaggttgaaactcaaaggaattggcgggggtccgcacaagcggtggagcatgtggtttaattcgatgatacgcgaggaaccttacctgggctagaatgcattttgaccgtgggtgaaagctcactttgtagcaatacacaatttgtaaggtgctgcatggctgtcgtcagctcgtgccgtgaggtgttgggttaagtcccgcaacgagcgcaacccccatcattagttgccatcaggtaaagctgggaactctaatgaaactgccgtcgtaagacgcgaggaaggaggggatgatgtcaagtcatcatggcctttatgcccagggctacacacgtgctacaatggaggggacaaagggctgccacttggcgacaaggagctaatcccaaaaaccccttctcagttcagatcgcagtctgcaactcgactgcgtgaagctggaatcgctagtaatcgtatatcagcaatgatacggtgaatacgttcccggaccttgcacacaccgcccgtcaagccatggaagccgggtgtacctaaagtcggtaaccgcaaggagccgcctagggtaaaactggtgactggggct

SEQ ID NO: 2206 - DNA, 1451 bp, Niastella yeongjuensis
  source 1..1451: mol_type = unassigned DNA
gatgaacgctagcggcaggcttaatacatgcaagtcgaggggcagcgcagtgtagcaatacatgggcggcgaccggcaaacgggtgcggaacacgtacgcaaccttccttcaagcgggggatagctttcggaaacgaaaattaataccccatagtaatgtctgagggcatctgaggacatttaaagatttatcacttgaagatgggcgtgcgcctgattaggtagttggcggggtaacggcccaccaagcctacgatcagtaactggtgtgagagcacgaccagtcacacgggcactgagacacgggcccgactcctacgggaggcagcagtaaggaatattggtcaatggacgcaagtctgaaccagccatgccgcgtggaggatgaaggtcctctggattgtaaacttcttttatcggagaagaaaccccagatttttatttgggttgacggtacccgatgaataagcaccggctaactccgtgccagcagccgcggtaatacggagggtgcaagcgttatccggattcactgggtttaaagggagcgtaggtgggctggtaagtcagtggtgaaatctccgggcttaactcggaaactgccgttgatactatcagtcttgaatattgtggaggtaagcggaatatgtcatgtagcggtgaaatgcttagatatgacatagaacaccgatagcgaaggcagcttgctacacaattattgacactgaggctcgaaagcgtggggatcaaacaggattagataccctggtagtccacgccctaaacgatggatactcgacatatgcgatacacagtatgtgtctgagcgaaagcattaagtatcccacctgggaagtacgaccgcaaggttgaaactcaaaggaattggcgggggtccgcacaagcggtggagcatgtggtttaattcgatgatacgcgaggaaccttacctgggctagaatgcagattgaccgtgggtgaaagctcattttgtagcaatacacagtctgtaaggtgctgcatggctgtcgtcagctcgtgccgtgaggtgttgggttaagtcccgcaacgagcgcaacccccatcattagttgccatcaggtaaagctgggaactctaatgaaactgccgtcgtaagacgcgaggaaggaggggatgatgtcaagtcatcatggcctttatgcccagggctacacacgtgctacaatggaagggacaaagagctgccacttggcaacaaggcgctaatctcaaaaaccctttctcagttcagattggagtctgcaactcgactccatgaagctggaatcgctagtaatcgtatatcagcaatgatacggtgaatacgttcccggaccttgcacacaccgcccgtcaagccatggaagctgggtgtacctaaagtcggtaaccgcaaggagccgcctagggtaaaactagtgactggggct

SEQ ID NO: 2207 - DNA, 1365 bp, Nicoletella semolina
  source 1..1365: mol_type = unassigned DNA
attgaacgctggcggcaggcttaacacatgcaagtcgaacggtaacagggaggaagcttgctttctttgctgacgagtggcggacgggtgagtaatgcttgggaatctggcttatggagggggataacgacgggaaactgtcgctaataccgcgtagaatcttaggattaaagaatgggaccttcgggccattcgccataagatgagcccaagtgggattaggtagttggttaggtaaaggctgaccaagcctgcgatctctagctggtctgagaggatgaccagccacactggaactgagacacggtccagactcctacgggaggcagcagtggggaatattgcacaatggggggaaccctgatgcagccatgccgcgtgaatgaagaaggccttcgggttgtaaagttctttcggtgatgaggaaggtgtttgttttaatagggcaagcaattgacgttaatcacagaagaagcaccggctaactccgtgccagcagccgcggtaatacggagggtgcgagcgttaatcggaataactgggcgtaaagggcacgcaggcggacttttaagtgagatgtgaaatcccagagcttaactttggaattgcatttcagactgggggtctagagtactttagggaggggtagaattccacgtgtagcggtgaaatgcgtagagatgtggaggaataccgaaggcgaaggcagccccttgggaatgtactgacgctcatgtgcgaaagcgtggggagcaaacaggattagataccctggtagtccacgctgtaaacgctgtcgatttggggattgggctttatgcttggtgcccgtagctaacgtgataaatcgaccgcctggggagtacggccgcaaggttaaaactcaaatgaattgacgggggcccgcacaagcggtggagcatgtggtttaattcgatgcaacgcgaagaaccttacctactcttgacatcctaagaagagactagagatagtcttgtgccttcgggaacttagagacaggtgctgcatggctgtcgtcagctcgtgttgtgaaatgttgggttaagtcccgcaacgagcgcaacccttatcctttgttgccagcatgtaaagatgggaactcaaaggagactgccagtgataaactggaggaaggtggggatgacgtcaagtcatcatggcccttacgagtagggctacacacgtgctacaatggtgcatacagagggaagcaaacctgcgagggtaagcaaatctcacaaagtgcatctaagtccggattggagtctgcaactcgactccatgaagtcggaatcgctagtaatcgcaaatcagaatgttgcggtgaatacgttcccgggcctt

SEQ ID NO: 2208 - DNA, 1439 bp, Nitratifractor salsuginis
  source 1..1439: mol_type = unassigned DNA
agtgaacgctggcggcgtgcctaacacatgcaagtcgaacgagaacggcccctggcttgccaggggtgtcagctaagtggcgcacgggtgagtaaggtatagctaacgtgccctatggagggggataacggctggaaacggccgctaataccccatattccttcaccacataagtggtgttgggaaatggattccgccataggatcgggctatatggtatcagctagttggtgaggtaagagctcaccaaggctatgacgcctagctggtctgagaggatgatcagccacactggaactgagacacggtccagactcctacgggaggcagcagtggggaatattgcacaatgggcgaaagcctgatgcagcaacgccgcgtggaggatgacacccttcggggcgtaaactccttttataggggaagataatgacggtaccctatgaataagcaccggctaactccgtgccagcagccgcggtaatacggagggtgcaagcgttactcggaatcactgggcgtaaagcgcgcgcaggcgggttggtaagttgggtgtgaaagcctgcagctcaactgcagaactgcacccaaaactgccagcctagagtctgggagaggtgagtggaattagtggtgtaggggtaaaatccgtagagatcactaggaataccgaaagcgaaggcaactcactggaacagtactgacgctgaggcgcgaaagcgtggggagcaaacaggattagataccctggtagtccacgccctaaacgatggatgctagtcgttgccatgcacgtcatggcagtgatgcagctaacgcattaagcatcccgcctggggagtacggtcgcaagattaaaactcaaaggaatagacggggacccgcacaagtggtggagcatgtggtttaattcgaagatacgcgaagaaccttacccggccttgacatcccgcgaaccctccagagatggaggggtgctacttcggtagagcgcggtgacaggtgctgcacggctgtcgtcagctcgtgtcgtgagatgttgggttaagtcccgcaacgagcgcaaccctcgtgtccagttgctaacggttcggccgagcactctggacagactgcctgggtaaccaggaggaaggtgaggacgacgtcaagtcatcatggcccttacggccggggcgacacacgtgctacaatgggcaggacaatgagatgcgataccgcgaggtggagcaaatctagaaacctgctctcagttcggattgcagtctgcaactcgactgcatgaagctggaatcactagtaatcgtggatcagccatgccacggtgaatacgttcccgggtcttgtactcaccgcccgtcacaccatgggagttgagttcacccgaagacgggaagctaaaccggctaccgtccacggtgggctcagcgactggggtg

SEQ ID NO: 2209 - DNA, 1408 bp, Nitratireductor aquibiodomus
  source 1..1408: mol_type = unassigned DNA
aacgaacgctggcggcaggcttaacacatgcaagtcgagcgcccccttgtggggagcggcagacgggtgagtaatgcatgggaatctacccagctctacggaataactcagggaaacttgaactaataccgtatgcgcccttcgggggaaagatttatcggagttggatgagcccatgtctgattagctagttggtggggtaaaggcctaccaaggcgacgatcagtagctggtctgagaggatgatcagccacactgggactgagacacggcccagactcctacgggaggcagcagtggggaatattggacaatgggcgcaagcctgatccagccatgccgcgtgagtgatgaaggccctagggttgtaaagctctttcaccggtgaagataatgacggtaaccggagaagaagccccggctaacttcgtgccagcagccgcggtaatacgaagggggctagcgttgttcggaattactgggcgtaaagcgcgcgtaggcggatcggtcagttaggggtgaaatcccggggctcaaccccggaactgcctctaatactgccgatctagagttcgagagaggtgagtggaattccgagtgtagaggtgaaattcgtagatattcggaggaacaccagtggcgaaggcggctcactggctcgatactgacgctgaggtgcgaaagcgtggggagcaaacaggattagataccctggtagtccacgccgtaaacgatggaagctagccgttggcaggtttacctgtcggtggcgcagttaacgcattaagcttcccgcctggggagtacggtcgcaagattaaaactcaaaggaattgacgggggcccgcacaagcggtggagcatgtggtttaattcgaagcaacgcgcagaaccttaccagcccttgacatcccgatcgcggtttccagagatggattccttcagttaggctggatcggagacaggtgctgcatggctgtcgtcagctcgtgtcgtgagatgttgggttaagtcccgcaacgagcgcaaccctcgcccttagttgccagccttaagttgggcactctaaggggactgccggtgataagccgagaggaaggtggggatgacgtcaagtcctcatggcccttacgggctgggctacacacgtgctacaatggtggtgacagtgggcagcgagacggcaacgtcgagctaatctccaaaagccatctcagttcggattggggtctgcaactcgaccccatgaagttggaatcgctagtaatcgcggatcagcatgccgcggtgaatacgttcccgggccttgtacacaccgcccgtcacaccatgggagttgggtttacccgaaggcagtgcgctaaccgcaaggaggcagctgaccacggtaggctcagcgactggggtg

SEQ ID NO: 2210 - DNA, 1407 bp, Nitratireductor indicus
  source 1..1407: mol_type = unassigned DNA
aacgaacgctggcggcaggcttaacacatgcaagtcgagcgccccgcaaggggagcggcagacgggtgagtaacgcgtgggaatctacctagctctacggaataactcagggaaacttgaactaataccgtatacgccctttgggggaaagatttatcggagttggatgagcccgcgtctgattagctagttggtggggtaaaggcctaccaaggcgacgatcagtagctggtctgagaggatgatcagccacactgggactgagacacggcccagactcctacgggaggcagcagtggggaatattggacaatgggcgcaagcctgatccagccatgccgcgtgagtgatgaaggccctagggttgtaaagctctttcaccggtgaagataatgacggtaaccggagaagaagccccggctaacttcgtgccagcagccgcggtaatacgaagggggctagcgttgttcggaattactgggcgtaaagcgcacgtaggcggaccattaagtcaggggtgaaatcccggggctcaaccccggaactgcctttgatactggtggtctcgagttcgagagaggtgagtggaattccgagtgtagaggtgaaattcgtagatattcggaggaacaccagtggcgaaggcggctcactggctcgatactgacgctgaggtgcgaaagcgtggggagcaaacaggattagataccctggtagtccacgccgtaaacgatggaagctagccgttggcaggtttacctgtcggtggcgcagctaacgcattaagcttcccgcctggggagtacggtcgcaagattaaaactcaaaggaattgacgggggcccgcacaagcggtggagcatgtggtttaattcgaagcaacgcgcagaaccttaccagcccttgacatctgggtcgcggaaaccggagacggtttccttcagttaggctggacccaagacaggtgctgcatggctgtcgtcagctcgtgtcgtgagatgttgggttaagtcccgcaacgagcgcaaccctcgcccttagttgccagcattcagttgggcactctaaggggactgccggtgataagccgagaggaaggtggggatgacgtcaagtcctcatggcccttacgggctgggctacacacgtgctacaatggtggtgacagtgggcagcgagaccgcgaggtcgagctaatctccaaaagccatctcagttcggattgcactctgcaactcgggtgcatgaagttggaatcgctagtaatcgcggatcagcatgccgcggtgaatacgttcccgggccttgtacacaccgcccgtcacaccatgggagttgggtttacccgaaggcagtgcgctaaccgcaaggaggcagctgaccacggtaggctcagcgactggggtg

SEQ ID NO: 2211 - DNA, 1407 bp, Nitratireductor pacificus
  source 1..1407: mol_type = unassigned DNA
aacgaacgctggcggcaggcttaacacatgcaagtcgagcgccccgcaaggggagcggcagacgggtgagtaacacgtgggaatctacccagctctacggaataactcagggaaacttgaactaataccgtatacgtcctccgggagaaagatttatcggagttggatgagcccgcgtctgattagctagttggtggggtaaaggcctaccaaggcgacgatcagtagctggtctgagaggatgatcagccacactgggactgagacacggcccagactcctacgggaggcagcagtggggaatattggacaatgggcgcaagcctgatccagccatgccgcgtgagtgatgaaggccctagggttgtaaagctctttcaccggtgaagataatgacggtaaccggagaagaagccccggctaacttcgtgccagcagccgcggtaatacgaagggggctagcgttgttcggatttactgggcgtaaagcgcacgtaggcggatcggtcagttaggggtgaaatcccggggctcaaccccggaactgcctctaatactgccggtctagagttcgagagaggtgagtggaattccgagtgtagaggtgaaattcgtagatattcggaggaacaccagtggcgaaggcggctcactggctcgatactgacgctgaggtgcgaaagcgtggggagcaaacaggattagataccctggtagtccacgccgtaaactatgagagctagccgtcggcaagtttacttgtcggtggcgcagctaacgcattaagctctccgcctggggagtacggtcgcaagattaaaactcaaaggaattgacgggggcccgcacaagcggtggagcatgtggtttaattcgaagcaacgcgcagaaccttaccagcccttgacatcccgatcgcggtttccagagatggattccttcagttaggctggatcggtgacaggtgctgcatggctgtcgtcagctcgtgtcgtgagatgttgggttaagtcccgcaacgagcgcaaccctcgcccttagttgccagccttaagttgggcactctaaggggactgccggtgataagccgagaggaaggtggggatgacgtcaagtcctcatggcccttacgggctgggctacacacgtgctacaatggtggtgacagtgggcagcgagaccgcgaggtcgagctaatctccaaaaaccatctcagttcggattgcactctgcaactcgagtgcatgaagttggaatcgctagtaatcgcggatcagcatgccgcggtgaatacgttcccgggccttgtacacaccgcccgtcacaccatgggagttgggtttacccgaaggcagtgcgctaaccgcaaggaggcagctgaccacggtaggctcagcgactggggtg

SEQ ID NO: 2212 - DNA, 1453 bp, Nitratiruptor tergarcus
  source 1..1453: mol_type = unassigned DNA
agtgaacgctggcggcgtgcttaacacatgcaagtcgagcgagaacggctctatccttcgggatagagtgtcagctaagcggcgcacgggtgagtaacacgtagctaacctgccccatagtgggggataacagcccgaaagggctgctaataccctatactccttccatacgaaagtatggttgtggaaagcgttagcgctatgggatggggctgcggcctatcagctagttggtggggtaaaggcctaccaaggctatgacgggtagctggtctgagaggatggtcagccacactggaactgagacacggtccagactcctacgggaggcagcagtggggaatattgcacaatgggggaaaccctgatgcagcaacgccgcgtggaggatgacgcccttcggggtgtaaactccttttgacagggaagaagatgacggtacctgtcgaataagcaccggctaactccgtgccagcagccgcggtaatacggagggtgcaagcgttactcggaatcactgggcgtaaagggcgcgtaggcggtctgctaagttggatgtgaaagcccacagcttaactgtggaactgcgtccaaaactggtagactagagtccggaagaggcaggtggaattggtggtgtaggggtaaaatccgtagagatcaccaggaatacccattgcgaaggcgacctgctgggacggtactgacgctgaggcgcgaaagcgtggggagcaaacaggattagataccctggtagtccacgccctaaacgatggatgctagtcgttggggtgctagtcacctcagtgatgcagctaacgcaataagcatcccgcctggggagtacggccgcaaggctaaaactcaaaggaatagacggggacccgcacaagcggtggagcatgtggtttaattcgaagatacgcgaagaaccttacctgggcttgacatccctggaaccctctagagatagaggggtgcctccttttgggggagccaggtgacaggtgctgcacggctgtcgtcagctcgtgtcgtgagatgttgggttaagtcccgcaacgagcgcaaccctcgtccttagttgccagcacttcgggtgggcactctaaggagactgcccgggtaaccgggaggaaggtgaggatgacgtcaagtcatcatggcccttatgcccagggcgacacacgtgctacaatggcgcgtacagagagaggcaataccgcgaggtggagcaaatctctaaagcgcgtcccagttcggattgcagtctgcaactcgactgcatgaagtcggaatcgctagtaatcgcggatcagccatgccgcggtgaatacgttcccgggtcttgtactcaccgcccgtcacaccatgggagttgagctcacccgaagccgggggaccgacccgaaagggaggacccctgtcgacggtgggctcagcgactggggtg

SEQ ID NO: 2213 - DNA, 1382 bp, Nitrincola lacisaponensis
  source 1..1382: mol_type = unassigned DNA
gggtgagtaacgcgtgggaatctacctggtagtgggggacaacttggggaaactcaagctaataccgcatacgccctacgggggaaaggaggggctcttcggacctttcgctatcagatgagcctgcgtaggattagctagttggtagggtaaaggcctaccaaggcgacgatccttagctggtctgagaggatgatcagccacactgggactgagacacggcccagactcctacgggaggcagcagtggggaatattggacaatgggggcaaccctgatccagccatgccgcgtgtgtgaagaaggccttcgggttgtaaagcactttcagtggtgaggaagggtgtraagttaatacctktatacattgacgttagccacagaagaagcaccggctaactccgtgccagcagccgcggtaatacggagggtgcaagcgttaatcggaattactgggcgtaaagcgcgcgtaggtggttcagtcagtcagatgtgaaagccccgggcttaacctgggaattgcacctgatactgctgagctagagtacagtagaggggagtggaatttcctgtgtagcggtgaaatgcgtagatataggaaggaacaccagtggcgaaggcgactctctggactgatactgacactgaggtgcgaaagcgtggggagcaaacaggattagataccctggtagtccacgctgtaaacgatgtcaactagccgttgggacacttgatgtcttagtggcgcagctaacgcgataagttgaccgcctggggagtacggtcgcaagattaaaactcaaatgaattgacgggggcccgcacaagcggtggagcatgtggtttaattcgacgcaacgcgaagaaccttacctactcttgacatccagagaactttccagagatggattggtgccttcgggaactctgagacaggtgctgcatggctgtcgtcagctcgtgttgtgaaatgttgggttaagtcccgtaacgagcgcaacccttgtccttacttgccagcgggtaatgccgggaactttaaggagactgccggtgacaaaccggaggaaggtggggacgacgtcaagtcatcatggcccttacgagtagggctacacacgtgctacaatggccggtacagagggccgcgataccgcgaggtggagcaaatctcagaaaaccggtcgtagtccggatcgcagtctgcaactcgactgcgtgaagtcggaatcgctagtaatcgcgaatcagaatgtcgcggtgaatacgttcccgggccttgtacacaccgcccgtcacaccatgggagtgggttgcaccagaagtagctagtctaaccttaggggggacggttaccacggtgtgattcatgactggggtg

SEQ ID NO: 2214 - DNA, 1411 bp, Nitrobacter hamburgensis
  source 1..1411: mol_type = unassigned DNA
agcgaacgctggcggcaggcttaacacatgcaagtcgaacgggcgtagcaatacgtcagtggcagacgggtgagtaacacgtgggaacgtaccttttggttcggaacaactgagggaaacttcagctaataccggataagcccttacggggaaagatttatcgccgaaagatcggcccgcgtctgattagcttgttggtgaggtaatggctcaccaaggcgacgatcagtagctggtctgagaggatgatcagccacattgggactgagacacggcccaaactcctacgggaggcagcagtggggaatattggacaatgggcgaaagcctgatccagccatgccgcgtgagtgatgaaggccctagggttgtaaagctcttttgtgcgggaagataatgacggtaccgcaagaataagccccggctaacttcgtgccagcagccgcggtaatacgaagggggctagcgttgctcggaatcactgggcgtaaagggtgcgtaggcggatctttaagtcaggggtgaaatcctggagctcaactccagaactgcctttgatactgaaggtcttgagttcgggagaggtgagtggaactgcgagtgtagaggtgaaattcgtagatattcgcaagaacaccagtggcgaaggcggctcactggcccgatactgacgctgaggcacgaaagcgtggggagcaaacaggattagataccctggtagtccacgccgtaaacgatgaatgccagccgttagtgggtttactcactagtggcgcagctaacgctttaagcattccgcctggggagtacggtcgcaagattaaaactcaaaggaattgacgggggcccgcacaagcggtggagcatgtggtttaattcgacgcaacgcgcagaaccttaccagcccttgacatgtccatgaccggtcgcagagatgtgaccttctcttcggagcatggagcacaggtgctgcatggctgtcgtcagctcgtgtcgtgagatgttgggttaagtcccgcaacgagcgcaacccccgtccttagttgctaccatttagttgagcactctaaggagactgccggtgataagccgcgaggaaggtggggatgacgtcaagtcctcatggcccttacgggctgggctacacacgtgctacaatggcggtgacaatgggaagcaaaggggcaacccctagcaaatctcaaaaaaccgtctcagttcggattgggctctgcaactcgagcccatgaagttggaatcgctagtaatcgtggatcagcatgccacggtgaatacgttcccgggccttgtacacaccgcccgtcacaccatgggagttggttttacctgaaggcggtgcgctaacccgcaagggaggcagccgaccacggtagggtcagcgactggggtg

SEQ ID NO: 2215 - DNA, 1411 bp, Nitrobacter vulgaris
  source 1..1411: mol_type = unassigned DNA
agcgaacgctggcggcaggcttaacacatgcaagtcgaacgggcgtagcaatacgtcagtggcagacgggtgagtaacgcgtgggaacgtaccttttggttcggaacaacacagggaaacttgtgctaataccggataagcccttacggggaaagatttatcgccgaaagatcggcccgcgtctgattagcttgttggtgaggtaatggctcaccaaggcgacgatcagtagctggtctgagaggatgatcagccacattgggactgagacacggcccaaactcctacgggaggcagcagtggggaatattggacaatgggcgcaagcctgatccagccatgccgcgtgagtgatgaaggccctagggttgtaaagctcttttgtgcgggaagataatgacggtaccgcaagaataagccccggctaacttcgtgccagcagccgcggtaatacgaagggggctagcgttgctcggaattactgggcgtaaagggtgcgtaggcgggtctttaagtcagaggtgaaatcctggagctcaactccagaactgcctttgatactgaggatcttgagttcgggagaggtgagtggaactgcgagtgtagaggtgaaattcgtagatattcgcaagaacaccagtggcgaaggcggctcactggcccgatactgacgctgaggcacgaaagcgtggggagcaaacaggattagataccctggtagtccacgccgtaaacgatgaatgccagccgttagtgggtttactcactagtggcgcagctaacgctttaagcattccgcctggggagtacggtcgcaagattaaaactcaaaggaattgacgggggcccgcacaagcggtggagcatgtggtttaattcgacgcaacgcgcagaaccttaccagcccttgacatgtccatgaccggtcgcagagatgtgaccttctcttcggagcatggagcacaggtgctgcatggctgtcgtcagctcgtgtcgtgagatgttgggttaagtcccgcaacgagcgcaacccccgtccttagttgctaccatttagttgagcactctaaggagactgccggtgataagccgcgaggaaggtggggatgacgtcaagtcctcatggcccttacgggctgggctacacacgtgctacaatggcggtgacaatgggaagcaaaggggcaacccctagcaaatctcaaaaaaccgtctcagttcggattgggctctgcaacccgagcccatgaagttggaatcgctagtaatcgtggatcagcatgccacggtgaatacgttcccgggccttgtacacaccgcccgtcacaccatgggagttggttttacctgaaggcggtgcgctaacccgcaagggaggcagccgaccacggtagggtcagcgactggggtg

SEQ ID NO: 2216 - DNA, 1411 bp, Nitrobacter winogradskyi
  source 1..1411: mol_type = unassigned DNA
agcgaacgctggcggcaggcttaacacatgcaagtcgaacgggcgtagcaatacgtcagtggcagacgggtgagtaacgcgtgggaacgtaccttttggttcggaacaacccagggaaacttgggctaataccggataagcccttacggggaaagatttatcgccgaaagatcggcccgcgtctgattagcttgttggtgaggtaacggctcaccaaggcgacgatcagtagctggtctgagaggatgatcagccacattgggactgagacacggcccaaactcctacgggaggcagcagtggggaatattggacaatgggcgcaagcctgatccagccatgccgcgtgagtgatgaaggccctagggttgtaaagctcttttgtgcgggaagataatgacggtaccgcaagaataagccccggctaacttcgtgccagcagccgcggtaatacgaagggggctagcgttgctcggaattactgggcgtaaagggtgcgtaggcgggtctttaagtcaggggtgaaatcctggagctcaactccagaactgcctttgatactgaggatcttgagttcgggagaggtgagtggaactgcgagtgtagaggtgaaattcgtagatattcgcaagaacaccagtggcgaaggcggctcactggcccgatactgacgctgaggcacgaaagcgtggggagcaaacaggattagataccctggtagtccacgccgtaaacgatgaatgccagccgttagtgggtttactcactagtggcgcagctaacgctttaagcattccgcctggggagtacggtcgcaagattaaaactcaaaggaattgacgggggcccgcacaagcggtggagcatgtggtttaattcgacgcaacgcgcagaaccttaccagcccttgacatgtccatgaccggtcgcagagatgtgaccttctcttcggagcatggagcacaggtgctgcatggctgtcgtcagctcgtgtcgtgagatgttgggttaagtcccgcaacgagcgcaacccccgtccttagttgctaccatttagttgagcactctaaggagactgccggtgataagccgcgaggaaggtggggatgacgtcaagtcctcatggcccttacgggctgggctacacacgtgctacaatggcggtgacaatgggaagcaaaggggtgacccctagcaaatctcaaaaaaccgtctcagttcggattgggctctgcaacccgagcccatgaagttggaatcgctagtaatcgtggatcagcatgccacggtgaatacgttcccgggccttgtacacaccgcccgtcacaccatgggagttggttttacctgaaggcggtgcgctaacccgcaagggaggcagccgaccacggtagggtcagcgactggggtg

SEQ ID NO: 2217 - DNA, 1431 bp, Nitrococcus mobilis
  source 1..1431: mol_type = unassigned DNA
attgaacgctggcggcatgcctaacacatgcaagtcgagcggcagcagcgcctttcttcggaaaggtggctggcgagcggcggacgggtgagtaacgcgtgggaatctacccttcggtgggggatagcccggggaaactcggattaataccgcatacgccctatgggggaaagcgggcctctgcttgcaagctcgcaccgatggatgagcccgcgtccgattagctagttggtggggtaaaggcctaccaaggcgacgatcggtagctggtctgagaggacgatcagccacactgggactgagacacggcccagactcctacgggaggcagcagtggggaatattggacaatgggcgaaagcctgatccagcaatgccgcgtgggtgaagaaggcttgcgggttgtaaagccctttcagccgggaggaaaagcatcgggttaatacctcgatgttttgacgttaccggcagaagaagcaccggctaactccgtgccagcagccgcggtaatacggagggtgcaagcgttaatcggaattactgggcgtaaagcgcatgtaggcggtcgaataagtcgggtgtgaaagccccgggctcaacctgggaattgcatccgatactgtttggctagagtctggtagagggaggcggaattcccggtgtagcggtgaaatgcgtagatatcgggaggaacaccagtggcgaaggcggtctcctggatcaagactgacgctgaggtgcgaaagcgtggggagcaaacaggattagataccctggtagtccacgccgtaaacgatgaggactagccgttggattcatttatgagtctagtggcgcagctaacgcgttaagtcctccgcctggggagtacggccgcaaggttaaaactcaaaggaattgacgggggcccgcacaagcggtggagcatgtggtttaattcgatgcaacgcgaagaaccttacctgctcttgacatctccggaaccttgcagagatgtgagggtgccttcgggaaccggatgacaggtgctgcatggctgtcgtcagctcgtgtcgtgagatgttgggttaagtcccgcaacgagcgcaacccttgcccttagttaccagcggttcggccggggactctagggggactgccggtgacaaaccggaggaaggtggggatgacgtcaagtcatcatggcccttatgggcagggctacacacgtgctacaatggccggtacaaagggttgcaaacccgtgagggggagctaatcccaaaaagccggtcccagtccggattgcagtctgcaactcgactgcatgaagtcggaatcgctagtaatcgcggatcagcaatgccgcggtgaatacgttcccgggccttgtacacaccgcccgtcacaccatgggagtcggctgcaccagaagtcggtagtctaaccttc

SEQ ID NO: 2218 - DNA, 1467 bp, unidentified
  source 1..1467: mol_type = unassigned DNA; note = Nitrosococcus halophilus
attgaacgctggcggcatgcttaacacatgcaagtcggacggcagcagcgcttaagcttgcttaggcggctggcgagtggcggacgggtgagtaacgcgtaggaatctggcctctagagggggataacccggggaaactcgggctaataccgcatatactctgaggaggaaagcgggggactttcgggcctcgcgctaggggatgagcctgcgtccgattagctagttggtggggtaagggcctaccaaggcgacgatcggtagctggtctgagaggacgatcagccacactgggactgagacacggcccagactcctacgggaggcagcagtggggaatattggacaatgggcgcaagcctgatccagcaatgccgcgtgggtgaagaaggccttcgggttgtaaagccctttcagtggggaagaaaagcggtgtgtgaatagcgcatcgtattgacgttacccacagaagaagcaccggctaactccgtgccagcagccgcggtaatacggagggtgcgagcgttaatcggaattactgggcgtaaagggcgcgtaggcggcttagtaagttgggtgtgaaagccctgggctcaacctgggaattgcacttgatactgctgagctagagtgtggtagagggaggcggaatttccggtgtagcggtgaaatgcgtagatatcggaaggaacaccagtggcgaaggcggcctcctggaccataactgacgctgaggtgcgaaagcgtggggagcgaacaggattagataccctggtagtccacgccctaaacgatgagaactagacgttgggagggtaagcctttcagtgttgtagccaacgcgataagttctccgcctggggagtacggccgcaaggttgaaactcaaatgaattgacgggggcccgcacaagcggtggagcatgtggtttaattcgatgcaacgcgaagaaccttacctggttttgacatcctcggaaccctgcagagatgcgggggtgccttcgggagccgggagacaggtgctgcatggctgtcgtcagctcgtgtcgtgagatgttgggttaagtcccgcaacgagcgcaacccttacctctagttgccagcggttaggccgggcactctagggggactgccgttgacaaaacggaggaaggtggggatgacgtcaagtcatcatggcccttatggccagggctacacacgtgctacaatggccggtacagagggtggccaagcagcgatgcggagctaatctcagaaagccggtcgtagtccggattgcagtctgcaactcgactgcatgaagtcggaatcgctagtaatcgcggatcagcaatgccgcggtgaatacgttcccgggccttgtacacaccgcccgtcacaccatgggagttggctgcaccagaagtaggtggcttaaccttcgggggggcgcttaccacggtgtggtcaatgactggggtg

SEQ ID NO: 2219 - DNA, 1467 bp, Nitrosococcus oceani
  source 1..1467: mol_type = unassigned DNA
attgaacgctggcggcatgcttaacacatgcaagtcgaacggcagcagcacctaagcttgcttaggtggctggcgagtggcggacgggtgagtaacgcgtgggaatctggcctctagagggggataactcggggaaactcgggctaataccgcataatctctaaggaggaaagcgggggaccgaaaggcctcgcgctgggggatgagcctgcgtccgattagctagttggtggggtaagggcctaccaaggcgatgatcggtagctggtctgagaggacgatcagccacactgggactgagacacggcccagactcctacgggaggcagcagtggggaatattggacaatgggggcaaccctgatccagcaatgccgcgtgggtgaagaaggctttcgggttgtaaagccctttcagtggggaagaaaagcgatgtgtgaatagcacatcgtgttgacgttacctacagaagaagcaccggctaactccgtgccagcagccgcggtaatacggagggtgcgagcgttaatcggaattactgggcgtaaagggcgcgtaggcggtttggtaagttgggtgtgaaagccccgggctcaacctgggaatggcacttgatactgcctggctagagtatggtagagggaggcggaatttccggtgtagcggtgaaatgcgtagatatcggaaggaacaccagtggcgaaggcggcctcctggaccactactgacgctgaggtgcgaaagcgtggggagcaaacaggattagataccctggtagtccacgccctaaacgatgagaactagacgttgggagggatagcctttcagtgttgcagctaacgcgttaagttctccgcctggggagtacggccgcaaggttgaaactcaaatgaattgacgggggcccgcacaagcggtggagcatgtggtttaattcgatgcaacgcgaagaaccttacctggccttgacatccccggaactttgctgagaggcgaaggtgccttcgggagccgggagacaggtgctgcatggctgtcgtcagctcgtgtcgtgagatgttgggttaagtcccgcaacgagcgcaacccttatctctagttgccagcggttcggccgggcactctagagggactgccgttgacaaaacggaggaaggtggggatgacgtcaagtcatcatggcccttatggccagggctacacacgtgctacaatggccggtacagagggtggccaagcagcgatgcggagctaatctcagaaaaccggtcgtagtccggattgcagtctgcaactcgactgcatgaagtcggaatcgctagtaatcgcggatcagcaatgccgcggtgaatacgttcccgggccttgtacacaccgcccgtcacaccatgggagttggttgcaccagaagtgggtagtttaaccttcgggaggacgcttactacggtgtggtcaatgactggggtg

SEQ ID NO: 2220 - DNA, 1467 bp, unidentified
  source 1..1467: mol_type = unassigned DNA; note = Nitrosococcus watsoni
attgaacgctggcggcatgcttaacacatgcaagtcgaacggcagcagcacttaagcttgcttaggtggctggcgagtggcggacgggtgagtaacgcgtgggaatctagcctctagagggggataactcggggaaactcgggctaataccgcataatctctaaggaggaaagcgggggaccgaaaggcctcgcgctggaggatgagcctgcgtccgattagctagttggtggggtaagggcctaccaaggcgatgatcggtagctggtctgagaggacgatcagccacactgggactgagacacggcccagactcctacgggaggcagcagtggggaatattggacaatgggggcaaccctgatccagcaatgccgcgtgggtgaagaaggctttcgggttgtaaagccctttcagtagggaagaaaagcgatgtgtgaatagcccatcgtgttgacgttacctacagaagaagcaccggctaactccgtgccagcagccgcggtaatacggagggtgcgagcgttaatcggaattactgggcgtaaagggcgcgtaggcggtttggtaagttgggtgtgaaagccccgggctcaacctgggaatggcacttgatactgcctggctagagtatggtagagggaggcggaatttccggtgtagcggtgaaatgcgtagatatcggaaggaacaccagtggcgaaggcggcctcctggaccactactgacgctgaggtgcgaaagcgtggggagcaaacaggattagataccctggtagtccacgccctaaacgatgagaactagacgttgggagggatagcctttcagtgttgcagctaacgcgttaagttctccgcctggggagtacggccgcaaggttgaaactcaaatgaattgacgggggcccgcacaagcggtggagcatgtggtttaattcgatgcaacgcgaagaaccttacctggccttgacatccccggaactttgctgagaggcgaaggtgccttcgggagccgggagacaggtgctgcatggctgtcgtcagctcgtgtcgtgagatgttgggttaagtcccgcaacgagcgcaacccttatctctagttgccagtggttcggccgggcactctagagagactgccgttgacaaaacggaggaaggtggggatgacgtcaagtcatcatggcccttatggccagggctacacacgtgctacaatggccggtacagagggtggccaagcagcgatgcggagctaatctcagaaagccggtcgtagtccggattgcagtctgcaactcgactgcatgaagtcggaatcgctagtaatcgcggatcagcaatgccgcggtgaatacgttcccgggccttgtacacaccgcccgtcacaccatgggagttggttgcaccagaagtgggtggtttaaccttcgggaggacgcttactacggtgtggtcaatgactggggtg

SEQ ID NO: 2221 - DNA, 1450 bp, Nitrosomonas aestuarii
  source 1..1450: mol_type = unassigned DNA
ttgaacgctggcggcatgctttacacatgcaagtcgaacggcagcacgggtgcttgcacctggtggcgagtggcggacgggtgagtaatgcatcggaacgtgtccagaagtgggggataacgcatcgaaagatgtgctaataccgcatattctctacggaggaaagcaggggatcgaaagaccttgtgcttttggagcggccgatgcctgattagctagttggtggggtaaaggcctaccaaggcaacgatcagtagttggtctgagaggacgaccagccacactgggactgagacacggcccagactcctacgggaggcagcagtggggaattttggacaatgggcgaaagcctgatccagcaatgccgcgtgagtgaagaaggccttcgggttgtaaagctctttcagtcgagaagaaaaggttgtgactaataatcacaacttatgacggtaccgacagaagaagcaccggctaactacgtgccagcagccgcggtaatacgtagggtgcaagcgttaatcggaattactgggcgtaaagggtgcgcaggcggctttgtaagtcagatgtgaaatccccgggcttaacctgggaattgcgtttgaaactacaaagctagagtgtagcagaggggggtggaattccatgtgtagcagtgaaatgcgtagagatatggaagaacatcgatggcgaaggcagccccctgggttaacactgacgctcatgcacgaaagcgtggggagcaaacaggattagataccctggtagtccacgccctaaacgatgtcaactagttgttgggccttactaggcttggtaacgtagctaacgcgtgaagttgaccgcctggggagtacggtcgcaagattaaaactcaaaggaattgacggggacccgcacaagcggtggattatgtggattaattcgatgcaacgcgaaaaaccttacctacccttgacatgtagcgaatattttagagataaaatagtgccttcgggaacgctaacacaggtgctgcatggctgtcgtcagctcgtgtcgtgagatgttgggttaagtcccgcaacgagcgcaacccttgtcattaattgccatcatttagttgggcactttaatgagactgccggtgacaaaccggaggaaggtggggatgacgtcaagtcctcatggcccttatgggtagggcttcacacgtaatacaatggcgcgtacagagggttgccaacccgcgagggggagctaatctcagaaagcgcgtcgtagtccggatcggagtctgcaactcgactccgtgaagtcggaatcgctagtaatcgcggatcagcatgtcgcggtgaatacgttcccgggtcttgtacacaccgcccgtcacaccatgggagtgggtttcaccagaagcagatagtctaaccgtaaggagggcgtttgccacggtgagattcatgac

SEQ ID NO: 2222 - DNA, 1460 bp, Nitrosomonas communis
  source 1..1460: mol_type = unassigned DNA
attgaacgctggcggcatgctttacacatgcaagtcgaacggcagcacgggggcaaccctggtggcgagtggcgaacgggtgagtaatacatcggaacgtgtcttaaagtgggggataacgcatcgaaagatgtgctaataccgcataatctctaaggaggaaagcaggggatcgaaagaccttgtgcttttagagcggccgatgcctgattagctagttggtaaggtaaaggcttaccaaggcaacgatcagtagctggtctgagaggacgaccagccacactgggactgagacacggcccagcctcctacgggaggcagcagtggggaattttggacaatgggcgcaagcctgatccagccatgccgcgtgagtgaagaaggccttcgggttgtaaagctctttcggtcgggaagaaatagttatggctaatatccataatgaatgacggtaccgacataagaagcaccggctaactacgtgccagcagccgcggtaatacgtagggtgcaagcgttaatcggaattattgggcgtaaagggtgcgcaggcggatgtataagtcagatgtgaaatccccgggcttaacctgggaattgcgtttgaaactatatgactagagtgtgatagaggggagtggaattccatgtgtagcagtgaaatgcgtagagatgtggaagaacaccgatggcgaaggcagctccctggattaacactgacgctcatgcacgaaagcgtggggagcaaacaggattagataccctggtagtccacgccctaaacgatgtcaactagttgtcggatctgttaaaagatttggtaacgtagctaacgcgtgaagttgaccgcctgggaagtacggtcgcaagattaaaactcaaaggaattgacggggacccgcacaagcggtggattatgtggattaattcgatgcaacgcgaaaaaccttacctacccttgacatgctcgaaattccacagagatgtggaagtgcccgaaagggaatcgaggcacaggtgctgcatggctgtcgtcagctcgtgtcgtgagatgttgggttaagtcccgcaacgagcgcaacccttgtcactaattgccatcattcagttgggcactttagtgagactgccggtgacaaaccggaggaaggtggggatgacgtcaagtcctcatggcccttatgggtagggcttcacacgtaatacaatggcgcgtacagagggttgccaacccgcgagggggagctaatctcagaaagcgcgtcgtagtccggatcggagtctgcaactcgactccgtgaagtcggaatcgctagtaatcgcggatcagcatgtcgcggtgaatacgttcccgggtcttgtacacaccgcccgtcacaccatgggagtagttttcaccagaagcagatagtctaaccgcaaggagggcgtttgccacggtgagagttatgactggggtg

SEQ ID NO: 2223 - DNA, 1460 bp, unidentified
  source 1..1460: mol_type = unassigned DNA; note = Nitrosomonas cryotolerans
attgaacgctggcggcatgctttacacatgcaagtcgaacggcagcacgggagcttgctcctggtggcgagtggcggacgggtgagtaatacatcggaacgtgtccttaagtgggggataacgcatcgaaagatgtgctaataccgcataatctctgaggagaaaagcaggggatcgtaagaccttgtgcttttggagcggccgatgtctgattagctagttggtgaggtaatggctcaccaaggcgacgatcagtagttggtctgagaggacgaccagccacactgggactgagacacggcccagactcctacgggaggcagcagtggggaattttggacaatgggcgaaagcctgatccagccatgccgcgtgagtgaagaaggccttcgggttgtaaagctctttcagtcgagaagaaaaggttgcgactaataatcgtaactaatgacggtatcgacagaagaagcaccggctaactacgtgccagcagccgcggtaatacgtagggtgcgagcgttaatcggaattactgggcgtaaagggtgcgcaggcggttttgtaagtcagatgtgaaatccccgggcttaacctgggaactgcgtttgaaactacaaagctagagtgtagcagaggggggtggaattccatgtgtagcagtgaaatgcgtagagatatggaggaacaccgatggcgaaggcagccccctgggttaacactgacgctcaggcacgaaagcgtggggagcaaacaggattagataccctggtagtccacgccctaaactatgtcaactagttgtcggatcttaataggtttggtaacgtagctaacgcgtgaagttgaccgcctggggagtacggtcgcaagattaaaactcaaaggaattgacggggacccgcacaagcggtggattatgtggattaattcgatgcaacgcgaaaaaccttacctacccttgacatgtatctaagctcgctgagaggtgagtgtgcccgaaagggaaagataacacaggtgctgcatggctgtcgtcagctcgtgtcgtgagatgttgggttaagtcccgcaacgagcgcaacccttgtcattaattgccatcatttagttgggcactttaatgagactgccggtgacaaaccggaggaaggtggggatgacgtcaagtcctcatggcccttatgggtagggcttcacacgtaatacaatggcgcgtacagagggttgccaacccgcgagggggagctaatctcagaaagcgcgtcgtagtccggatcggagtctgcaactcgactccgtgaagtcggaatcgctagtaatcgcggatcagcatgtcgcggtgaatacgttcccgggtcttgtacacaccgcccgtcacaccatgggagtgggtttcaccagaagcaggtagtctaaccgcaaggagggcgcttgccacggtgagattcatgactggggtg

SEQ ID NO: 2224 - DNA, 1460 bp, Nitrosomonas europaea
  source 1..1460: mol_type = unassigned DNA
attgaacgctggcggcatgctttacacatgcaagtcgaacggcagcgggggcttcggcctgccggcgagtggcgaacgggtgagtaatacatcggaacgtgtccttaagtggggaataacgcatcgaaagatgtgctaataccgcatatctctgaggagaaaagcaggggatcgcaagaccttgcgctaaaggagcggccgatgtctgattagctagttggtggggtaaaggcttaccaaggcaacgatcagtagttggtctgagaggacggccaaccacactgggactgagacacggcccagactcctacgggaggcagcagtggggaattttggacaatgggcgaaagcctgatccagccatgccgcgtgagtgaagaaggccttcgggttgtaaagctcttttagtcggaaagaaagagttgcaatgaataattgtgatttatgacggtaccgacagaaaaagcaccggctaactacgtgccagcagccgcggtaatacgtagggtgcgagcgttaatcggaattactgggcgtaaagggtgcgcaggcggtcttgcaagtcagatgtgaaagccccgggcttaacctgggaattgcgtttgaaactacaaggctagagtgcagcagaggggagtggaattccatgtgtagcagtgaaatgcgtagagatgtggaagaacaccgatggcgaaggcagctccctgggttgacactgacgctcatgcacgaaagcgtggggagcaaacaggattagataccctggtagtccacgccctaaacgatgtcaactagttgtcggatctaattaaggatttggtaacgtagctaacgcgtgaagttgaccgcctggggagtacggtcgcaagattaaaactcaaaggaattgacggggacccgcacaagcggtggattatgtggattaattcgatgcaacgcgaaaaaccttacctacccttgacatgcttggaatctaatggagacataagagtacccgaaagggagccaagacacaggtgctgcatggctgtcgtcagctcgtgtcgtgagatgttgggttaagtcccgcaacgagcgcaacccttgtcactaattgctatcatttttaatgagcactttagtgagactgccggtgacaaaccggaggaaggtggggatgacgtcaagtcctcatggcccttatgggtagggcttcacacgtaatacaatggcgtgtacagagggttgccaacccgcgagggggagccaatctcagaaagcacgtcgtagtccggatcggagtctgcaactcgactccgtgaagtcggaatcgctagtaatcgcggatcagcatgccgcggtgaatacgttcccgggtcttgtacacaccgcccgtcacaccatgggagtggttttcaccagaagcaggtagcttaaccgtaaggagggcgcttgccacggtgggggtcatgactggggtg

SEQ ID NO: 2225 - DNA, 1459 bp, Nitrosomonas eutropha
  source 1..1459: mol_type = unassigned DNA
attgaacgctggcggcatgctttacacatgcaagtcgaacggcagcgggggcttcggcctgccggcgagtggcgaacgggtgagtaatacatcggaacgtgtccttaagtggggaataacgcatcgaaagatgtgctaataccgcatatctctcaggaggaaagcaggggatcgaaagaccttgcgctaaaggagcggctgatgtctgattagctagttggtggggtaaaggcttaccaaggcaacgatcagtagctggtctgagaggacgaccagccacactgggactgagacacggcccagactcctacgggaggcagcagtggggaattttggacaatgggcgaaagcctgatccagccatgccgcgtgagtgaagaaggccttcgggttgtaaagctcttttagtcggaaagaaagagtcatagtaaatagctatgatttatgacggtaccgacagaaaaagcaccggctaactacgtgccagcagccgcggtaatacgtagggtgcgagcgttaatcggaattactgggcgtaaagggtgcgcaggcggccttgtaagtcagatgtgaaagccccgggcttaacctgggaattgcgtttgaaactacaaagctagagtgcagcagaggggagtggaattccatgtgtagcagtgaaatgcgtagagatgtggaagaacaccgatggcgaaggcagctccctgggttgacactgacgctcatgcacgaaagcgtggggagcaaacaggattagataccctggtagtccacgccctaaactatgtcaactagttgtcggatctaattaaggatttggtaacgtagctaacgcgtgaagttgaccgcctggggagtacgatcgcaagattaaaactcaaaggaattgacggggacccgcacaagcggtggattatgtggattaattcgatgcaacgcgaaaaaccttacctacccttgacatgcttggaatctaatggagacataagagtgcccgaaagggagccaagacacaggtgctgcatggctgtcgtcagctcgtgtcgtgagatgttgggttaagtcccgcaacgagcgcaacccttgtcgctaattgctatcattttaatgagcactttagcgagactgccggtgacaaaccggaggaaggtggggatgacgtcaagtcctcatggcccttatgggtagggcttcacacgtaatacaatggcgcgtacagagggttgccaatccgcgaggaggagccaatctcagaaagcgcgtcgtagtccggatcggagtctgcaactcgactccgtgaagtcggaatcgctagtaatcgcggatcagcatgccgcggtgaatacgttcccgggtcttgtacacaccgcccgtcacaccatgggagtgattttcaccagaagcaggtagtttaaccgcaaggagggcgcttgccacggtgggggtcatgactggggtg

SEQ ID NO: 2226 - DNA, 1460 bp, Nitrosomonas halophila
  source 1..1460: mol_type = unassigned DNA
attgaacgctggcggcatgctttacacatgcaagtcgaacggcagcacgggggcaaccctggtggcgagtggcgaacgggtgagtaatgcatcggaacgtatccttaagtggggaataacgcatcgaaagatgtgctaataccgcataaactctgaggagaaaagcaggggatcgcaagaccttgcgctaaaggagcggccgatgtctgattagctagttggtggggtaaaggcctaccaaggcgacgatcagtagttggtctgagaggacgaccaaccacactgggactgagacacggcccagactcctacgggaggcagcagtggggaattttggacaatgggcgaaagcctgatccagccatgccgcgtgagtgaagaaggccttcgggttgtaaagctctttcagtcggaaagaaacgattgtgattaatactcacaattaatgacggtaccgacagaagaagcaccggctaactacgtgccagcagccgcggtaatacgtagggtgcgagcgttaatcggaattactgggcgtaaagggtgcgcaggcggtcttgtaagtcagatgtgaaatccccgggcttaacctgggaattgcgtttgaaactgcagggctagagtgcagcagaggggagtggaattccacgtgtagcagtgaaatgcgtagagatgcggaagaacaccgatggcgaaggcagctccctgggctgacactgacgctcatgcacgaaagcgtggggagcaaacaggattagataccctggtagtccacgccctaaacgatgtcaactagttgtcggatctaattaaggatttggtaacgtagctaacgcgtgaagttgaccgcctggggagtacggtcgcaagattaaaactcaaaggaattgacggggacccgcacaagcggtggattatgtggattaattcgatgcaacgcgaaaaaccttacctacccttgacatgcttggaatcctgtggagacatgggagtgcccgaaagggagccaagacacaggtgctgcatggctgtcgtcagctcgtgtcgtgagatgttgggttaagtcccgcaacgagcgcaacccttgtcactaattgctatcattcacttgagcactttagtgagactgccggtgacaaaccggaggaaggtggggatgacgtcaagtcctcatggcccttatgggtagggcttcacacgtaatacaatggcgtgtacagagggttgccaacccgcgagggggagccaatcccagaaagcacgtcgtagtccggatcggagtctgcaactcgactccgtgaagtcggaatcgctagtaatcgcggatcagcatgccgcggtgaatacgttcccgggtcttgtacacaccgcccgtcacaccatgggagtggttttcaccagaagcaggtagtttaaccgcaaggagggcgcttgccacggtggggatcatgactggggtg

SEQ ID NO: 2227 - DNA, 1458 bp, Nitrosomonas marina
  source 1..1458: mol_type = unassigned DNA
attgaacgctggcggcatgctttacacatgcaagtcgaacggcagcacgggtgcttgcacctggtggcgagtggcgaacgggtgagtaatgcatcggaacgtgtccaagagtgggggataacgcatcgaaagatgtgctaataccgcatattctctaaggagaaaagcaggggatcgtaagaccttgcgcttttggagtggccgatgcctgattagctagttggtggggtaaaggcctaccaaggcgacgatcagtagttggtctgagaggacgaccagccacactgggactgagacacggcccagactcctacgggaggcagcagtggggaattttggacaatgggcgaaagcctgatccagcaatgccgcgtgagtgaagaaggccttcgggttgtaaagctctttcagtcgagaagaaaagattgtgatgaataatcacaattcatgacggtatcgacagaagaagcaccggctaactacgtgccagcagccgcggtaatacgtagggtgcaagcgttaatcggaattactgggcgtaaagggtgcgcaggcggctttgtaagtcagatgtgaaatccccgggcttaacctgggaattgcgtttgaaactacaaagctagagtgtagcagaggggagtggaattccatgtgtagcagtgaaatgcgtagagatatggaagaacatcgatggcgaaggcagctccctgggttaacactgacgctcatgcacgaaagcgtggggagcaaacaggattagataccctggtagtccacgccctaaacgatgtcaactagttgttgggccttactaggcttagtaacgtagctaacgcgtgaagttgaccgcctggggagtacggtcgcaagattaaaactcaaaggaattgacggggacccgcacaagcggtggattatgtggattaattcgatgcaacgcgaaaaaccttacctacccttgacatgtagcgaattttctagagatagattagtgccttcgggaacgctaacacaggtgctgcatggctgtcgtcagctcgtgtcgtgagatgttgggttaagtcccgcaacgagcgcaacccttgtcattaattgccatcattaggttgggcactttaatgagactgccggtgacaaaccggaggaaggtggggatgacgtcaagtcctcatggcccttatgggtagggcttcacacgtaatacaatggcgcgtacagagggttgccaacccgcgagggggagctaatcccagaaagcgcgtcgtagtccggatcggagtctgcaactcgactccgtgaagtcggaatcgctagtaatcgcggatcagcatgtcgcggtgaatacgttcccgggtcttgtacacaccgcccgtcacaccatgggagtgggttccaccagaagcagatagtctaaccgcaaggagggcgtttgccacggtgagattcatgactggggtg

SEQ ID NO: 2228 - DNA, 1460 bp, Nitrosomonas nitrosa
  source 1..1460: mol_type = unassigned DNA
attgaacgctggcggcatgctttacacatgcaagtcgaacggcagcacgggggcaaccctggtggcgagtggcgaacgggtgagtaatacatcggaacgtgtcttaaagagggggataacgcatcgaaagatgtgctaataccgcatattctctacggaggaaagcaggggatcgcaagaccttgcgctttttgagcggccgatgcctgattagctagttggtaaggtaatggcttaccaaggcaacgatcagtagctggtctgagaggacgaccagccacactgggactgagacacggcccagactcctacgggaggcagcagtggggaattttggacaatgggcgaaagcctgatccagccatgccgcgtgagtgaagaaggccttcgggttgtaaagctctttcggtcgggaagaaatagttgtggctaatatccacaatgaatgacggtaccgacataagaagcaccggctaactacgtgccagcagccgcggtaatacgtagggtgcaagcgttaatcggaattattgggcgtaaagggtgcgcaggcggttgtataagtcagatgtgaaatccctgggcttaacctaggaattgcgtttgaaactatatgactagagtgtgacagaggggagtggaattccatgtgtagcagtgaaatgcgtagagatgtggaagaacaccgatggcgaaggcagctccctgggttaacactgacgctcatgcacgaaagcgtggggagcaaacaggattagataccctggtagtccacgccctaaacgatgtcaactagttgtcggatctatataaagattaggtaacgtagctaacgcgtgaagttgaccgcctgggaagtacggtcgcaagattaaaactcaaaggaattgacggggacccgcacaagcggtggattatgtggattaattcgatgcaacgcgaaaaaccttacctacccttgacatgctcgaaatttcgcagagatgcgaaagtgcccgaaagggaatcgagacacaggtgctgcatggctgtcgtcagctcgtgtcgtgagatgttgggttaagtcccgcaacgagcgcaacccttgtcactaattgccatcatttagttgggcactttagtgagactgccggtgacaaaccggaggaaggtggggatgacgtcaagtcctcatggcccttatgggtagggcttcacacgtaatacaatggcgcgtacagagggttgccaacctgcgaaggggagctaatctcataaagcgcgtcgtagtccggatcggagtctgcaactcgactccgtgaagtcggaatcgctagtaatcgcggatcagcatgtcgcggtgaatacgttcccgggtcttgtacacaccgcccgtcacaccatgggagtaattttcaccagaagcaaatagtctaaccgcaaggagggcgtttgccacggtgagagttatgactggggtg

SEQ ID NO: 2229 - DNA, 1460 bp, Nitrosomonas oligotropha
  source 1..1460: mol_type = unassigned DNA
attgaacgctggcggcatgctttacacatgcaagtcgaacggcagcacgggtgcttgcatctggtggcgagtggcggacgggtgagtaatacatcggaacgtgtcctgaagtgggggataacgcatcgaaagatgtgctaataccgcatattctctgaggagaaaagtaggggatcgaaagaccttatgcttttggagcggccgatgtctgattagctagttggtagggtaatggcttaccaaggcaacgatcagtagttggtctgagaggacggccagccacactgggactgagacacggcccagactcctacgggaggcagcagtggggaattttggacaatgggcgcaagcctgatccagcaatgccgcgtgagtgaagaaggccttcgggttgtaaagctctttcagttgaaaagaaaaaattgtgactaataatcataattcatgacggtatcaacagaagaagcaccggctaactacgtgccagcagccgcggtaatacgtagggtgcaagcgttaatcggaattactgggcgtaaagggtgcgcaggcggttctgtaagtcagatgtgaaatccccgggcttaacctgggaactgcgtttgaaactgcagagctagagtgcagcagagggaggtggaattccatgtgtagcagtgaaatgcgtagagatatggaagaacatcgatggcgaaggcaacctcctgggctagcactgacgctcatgcacgaaagcgtggggagcaaacaggattagataccctggtagtccacgccctaaactatgtcaactagttgtcgggtcttattagacttggtaacgtagctaacgcgtgaagttgaccgcctggggagtacggtcgcaagattaaaactcaaaggaattgacggggacccgcacaagcggtggattatgtggattaattcgatgcaacgcgaaaaaccttacctacccttgacatgtcagaaaattttcagagatggatttgtgcccgaaagggaatctgaacacaggtgctgcatggctgtcgtcagctcgtgtcgtgagatgttgggttaagtcccgcaacgagcgcaacccttgtcattaattgccatcatttagttgggcactttaatgagactgccggtgataaaccggaggaaggtggggatgacgtcaagtcctcatggcccttatgggtagggcttcacacgtaatacaatggcgcgtacagagggttgccaacccgcgagggggagctaatctcagaaagcgcgtcgtagtccggatcggagtctgcaactcgactccgtgaagttggaatcgctcgtaatcgcggatcagcatgtcgcggtgaatacgttcccgggtcttgtacacaccgcccgtcacaccatgggagtgggtttcaccagaagcaggtagtctaaccgtaaggagggcgcttgccacggtgaggttcatgactggggtg

SEQ ID NO: 2230 - DNA, 1462 bp, unidentified
  source 1..1462: mol_type = unassigned DNA; note = Nitrosomonas stercoris
attgaacgctggcgcagctttacacatgcaagtcgaacggcagcgcggagagcttgctctctggcggcgagtggcgaacgggtgagtaatgcatcggaacgtgtccttaagtggggaataacgcatcgaaagatgtgctaataccgcatatctctcaggaggaaagcaggggatcgcaagaccttgcgctaaaggagcggccgatgtctgattagttagttggtggggtaaaggcctaccaaggcaacgatcagtagctggtctgagaggacgatcagccacactgggactgagacacggcccagactcctacgggaggcagcagtggggaattttggacaatgggcgaaagcctgatccagccatgccgcgtgaatgaagaaggccttcgggttgtaaagttcttttagttggaaagaaaaaattatgatgaataatcataattcatgacggtaccgacagaaaaagcaccggctaactacgtgccagcagccgcggtaatacgtagggtgcaagcgttaatcggaattactgggcgtaaagggtgtgcaggcggccttgtaagtcagatgtgaaagccccgggcttaacctgggaattgcgtttgaaactacagggctagagtgcagcagaggggagtggaattccatgtgtagcagtgaaatgcgtagagatatggaagaacaccgatggcgaaggcagctccctgggctgacactgacgctcatacacgaaagcggggggagcaaacaggattagataccctggtagtccacgccctaaactatgtcaactagttgtcggatctaattggggatttggtaacgtagctaacgcgtgaagttgaccgcctggggactacggccgcaaggctaaaactcaaaggaattgacggggacccgcacaagcggtggattatgtggattaattcgatgcaacgcgaaaaaccttacctacccttgacatgcttggaatctaatggagacataagagtgcccgaaagggagccaagacacaggtgctgcatggctgtcgtcagctcgtgtcgtgagatgttgggttaagtcccgcaacgagcgcaacccttgtcgttaattgctatcatttttaatgagcactttaacgagactgccggtgacaaaccggaggaaggtggggatgacgtcaagtcctcatggcccttatgggtagggcttcacacgtaatacaatggcgtgtacagagggttgccaatccgtgaggaggagctaatctcagaaagcacgtcgtagtccggatcggagtctgcaattcgactccgtgaagtcggaatcgctagtaatcgcggatcagaatgtcgcggtgaatacgttcccgggtcttgtacacaccgcccgtcacaccatggaagtgattttcaccagaagcaggtagtttaaccgcaaggagggcgcttgccacggtgggggtcatgactggggtg

SEQ ID NO: 2231 - DNA, 1460 bp, Nitrosomonas ureae
  source 1..1460: mol_type = unassigned DNA
attgaacgctggcggcatgctttacacatgcaagtcgaacggcagcacggatgcttgcatctggtggcgagtggcggacgggtgagtaatacatcggaacgtgtccttaagtgggggataacgcatcgaaagatgtgctaataccgcataatatctaaggaggaaagtgggggatcgaaagacctcatgcttttggagcggccgatgtctgattagctagttggtaaggtaatggcttaccaaggcaacgatcagtagttggtctgagaggacgaccagccacactgggactgagacacggcccagactcctacgggaggcagcagtggggaattttggacaatgggcgcaagcctgatccagcaatgccgcgtgagtgaagaaggccttcgggttgtaaagctctttcagttgagaagaaaaaattctggctaatacccagaattcatgacggtatcgacagaagaagcaccggctaactacgtgccagcagccgcggtaatacgtagggtgcaagcgttaatcggaattactgggcgtaaagggtgcgcaggtggttttgtaagtcagatgtgaaatccccgggcttaacctgggaattgcgtttgaaactacaagactagagtgtggcagaggggggtggaattccatgtgtagcagtgaaatgcgtagagatatggaagaacatcgatggcgaaggcagccccctgggttaacactgacactcaggcacgaaagcgtggggagcaaacaggattagataccctggtagtccacgccctaaactatgtcaactagttgttgggtcttattagacttggtaacgaagctaacgcgtgaagttgaccgcctggggagtacggtcgcaagattaaaactcaaaggaattgacggggacccgcacaagcggtggattatgtggattaattcgatgcaacgcgaaaaaccttacctacccttgacatgttagaaaatattcagagatgaatttgtgctcgaaagagaatctaaacacaggtgctgcatggctgtcgtcagctcgtgtcgtgagatgttgggttaagtcccgcaacgagcgcaacccttgtcattaattgccagcattaagttgggcactttaatgagactgccggtgataaaccggaggaaggtggggatgacgtcaagtcctcatggcccttatgggtagggcttcacacgtaatacaatggcgcgtacagagggttgccaactcgcgagagggagccaatctcaaaaagcgcgtcgtagtccggatcggagtctgcaactcgactccgtgaagtcggaatcgctagtaatcgcggatcagcatgtcgcggtgaatacgttcccgggtcttgtacacaccgcccgtcacaccatgggagtgggtttcaccagaagcaggtagtctaaccgtaaggagggcgcttgccacggtgaggttcatgactggggtg

SEQ ID NO: 2232 - DNA, 1458 bp, Nitrosospira briensis
  source 1..1458: mol_type = unassigned DNA
attgaacgctggcggcatgctttacacatgcaagtcgaacggcagcacgggggcaaccctggtggcgagtggcgaacgggtgagtaatgcatcggaacgtatcttcaagtgggggataacgcaccgaaaggtgtgctaataccgcataatctctacggagaaaagcaggggatcgcaagaccttgcgcttttggagcggccgatgtctgattagctagttggtgaggtaaaggcttaccaaggcttcgatcagtagctggtctgagaggacgaccagccacactgggactgagacacggcccagactcctacgggaggcagcagtggggaattttggacaatgggggaaaccctgatccagccatgccgcgtgagtgaagaaggccttcgggttgtaaagctctttcagccggaacgaaacggtcacggttaatacccgtgatcactgacggtaccggaagaagaagcaccggctaactacgtgccagcagccgcggtaatacgtagggtgcgagcgttaatcggaattactgggcgtaaagcgtgcgcaggcggttttgtaagtcagatgtgaaatccccgggctcaacctgggaactgcgtttgaaactacaaggctagagtgtagcagaggggggtggaattccacgtgtagcagtgaaatgcgtagagatgtggaggaacaccgatggcgaaggcagccccctgggttaacactgacgctcaggcacgaaagcgtggggagcaaacaggattagataccctggtagtccacgccctaaacgatgtcaactagttgtcgggtcttaacgggcttggtaacgcagctaacgcgtgaagttgaccgcctggggagtacggtcgcaagattaaaactcaaaggaattgacggggacccgcacaagcggtggattatgtggattaattcgatgcaacgcgaaaaaccttacctacccttgacatgtaccgaagtccgctgagaggtggatgtgcccgaaagggaacggtaacacaggtgctgcatggctgtcgtcagctcgtgtcgtgagatgttgggttaagtcccgcaacgagcgcaacccttgtcattaattgccatcattcagttgggcactttaatgagactgccggtgacaaaccggaggaaggtggggatgacgtcaagtcctcatggcccttatgggtagggcttcacacgtaatacaatggcgcgtacagagggttgccaacccgcgagggggagctaatctcagaaagcgcgtcgtagtccggatcggagtctgcaactcgactccgtgaagtcggaatcgctagtaatcgcggatcagcatgtcgcggtgaatacgttcccgggtcttgtacacaccgcccgtcacaccatgggagtgggttccaccagaagcaggtagtctaaccgcaaggagggcgcctgccacggtgagattcatgactggggtg

SEQ ID NO: 2233 - DNA, 1458 bp, unidentified
  source 1..1458: mol_type = unassigned DNA; note = Nitrosospira lacus
attgaacgctggcggcatgctttacacatgcaagtcgaacggcagcacgggggcaaccctggtggcgagtggcgaacgggtgagtaatgcatcggaacgtatccttaagtgggggataacgcatcgaaagatgcgctaataccgcataatctctgaggagaaaagcaggggatcgcaagaccttgcgcttttggagcggccgatgtctgattagctagttggtgaggtaaaggcttaccaaggcttcgatcagtagctggtctgagaggacgaccagccacactgggactgagacacggcccagactcctacgggaggcagcagtggggaattttggacaatgggggaaaccctgatccagccatgccgcgtgagtgaagaaggccttcgggttgtaaagctctttcagccggaacgaaaaggttacggttaatacccgtgactaatgacggtaccggaagaagaagcaccggctaactacgtgccagcagccgcggtaatacgtagggtgcgagcgttaatcggaattactgggcgtaaagcgtgcgcaggcggttttgtaagtcagatgtgaaatccccgggctcaacctgggaactgcgtttgaaactacaaggctagagtgtggcagaggggggtggaattccacgtgtagcagtgaaatgcgtagagatgtggaggaacaccgatggcgaaggcagccccctgggttaacactgacgctcaggcacgaaagcgtggggagcaaacaggattagataccctggtagtccacgccctaaacgatgtcaactagttgtcgggtcttaacggacttggtaacgtagctaacgcgtgaagttgaccgcctggggagtacggtcgcaagattaaaactcaaaggaattgacggggacccgcacaagcggtggattatgtggattaattcgatgcaacgcgaaaaaccttacctacccttgacatgtaccgaagcttgccgagaggtgagcgtgcccgaaagggaacggtaacacaggtgctgcatggctgtcgtcagctcgtgtcgtgagatgttgggttaagtcccgcaacgagcgcaacccttgtcattaattgccatcattcagttgggcactttaatgaaactgccggtgacaaaccggaggaaggtggggatgacgtcaagtcctcatggcccttatgggtagggcttcacacgtaatacaatggcgcgtacagagggttgccaacccgcgagggggagctaatctcagaaagcgcgtcgtagtccggatcggagtctgcaactcgactccgtgaagtcggaatcgctagtaatcgcggatcagcatgtcgcggtgaatacgttcccgggtcttgtacacaccgcccgtcacaccatgggagtgggtttcaccagaagcaggtagtctaaccgcaaggagggcgcttgccacggtgagattcatgactggggtg

SEQ ID NO: 2234 - DNA, 1458 bp, Nitrosospira multiformis
  source 1..1458: mol_type = unassigned DNA
attgaacgctggcggcatgctttacacatgcaagtcgaacggcagcacgggggcaaccctggtggcgagtggcgaacgggtgagtaatacatcggaacgtatccttaagtgggggataacgcaccgaaaggtgtgctaataccgcataatctccgaggagaaaagcaggggatcgcaagaccttgcgcttttggagcggccgatgtctgattagctagttggtgaggtaaaggcttaccaaggcgtcgatcagtagctggtctgagaggacgaccagccacactgggactgagacacggcccagactcctacgggaggcagcagtggggaattttggacaatgggggaaaccctgatccagccatgccgcgtgagtgaagaaggccttcgggttgtaaagctctttcagccggaacgaaacggtcacggttaatacccgtgactactgacggtaccggaagaagaagcaccggctaactacgtgccagcagccgcggtaatacgtagggtgcgagcgttaatcggaattactgggcgtaaagcgtgcgcaggcggttttgtaagtcagatgtgaaatccccgggcttaacctgggaactgcgtttgaaactacaaggctagagtgtggcagaggggggtggaattccacgtgtagcagtgaaatgcgtagagatgtggaggaacaccgatggcgaaggcagccccctgggttaacactgacgctcaggcacgaaagcgtggggagcaaacaggattagataccctggtagtccacgccctaaacgatgtcaactagttgtcgggtcttaacggacttggtaacgcagctaacgcgtgaagttgaccgcctggggagtacggtcgcaagattaaaactcaaaggaattgacggggacccgcacaagcggtggattatgtggattaattcgatgcaacgcgaaaaaccttacctacccttgacatgtgccggagcccgccgagaggtgggtgtgcccgaaagggaacggcaacacaggtgctgcatggctgtcgtcagctcgtgtcgtgagatgttgggttaagtcccgcaacgagcgcaacccttgtcattaattgccatcattcagttgggcactttaatgaaactgccggtgacaaaccggaggaaggtggggatgacgtcaagtcctcatggcccttatgggtagggcttcacacgtaatacaatggcgcgtacagagggttgccaacccgcgagggggagctaatctcagaaagcgcgtcgtagtccggatcggagtctgcaactcgactccgtgaagtcggaatcgctagtaatcgcggatcagcatgtcgcggtgaatacgttcccgggtcttgtacacaccgcccgtcacaccatgggagtgggttccaccagaagcaggtagtctaaccgcaaggagggcgcctgccacggtgagattcatgactggggtg

SEQ ID NO: 2235 - DNA, 1437 bp, Nitrospina gracilis
  source 1..1437: mol_type = unassigned DNA
  misc_difference 55: note = n is a, c, g, or t
cgctggcggcgtgcctaacacatgcaagtcgaacgagaaagttccttcgggaatngtgaaagtggcgcaagggtgagtaacacgtgaataatctgcctttgagtttgggataacctgacgaaagttaggctaataccgaataagaccacgtctcacaagagatgcggtaaaaggagtctcaaactccactcaaagatgagttcgcggaccattagctagttggtgagataaaagctcaccaaggctacgatggttagccggcctgagagggtgatcggccacactggaactgagacacggtccagactcctacgggaggcagcagtggggaattttgcgcaatgggcgaaagcctgacgcagcaacgccgcgtgagcgatgaaggccttcgggtcgtaaagctctgtcgggtgggaagaacaaaatgacggtaccaccaaaggaagccccggctaactccgtgccagcagccgcggtaacacggagggggcgagcgttgttcggaatcattgggcgtaaagcgtatgtaggtggccggataagtcagacgtgtaagcccacggctcaaccgtggaattgcgtttgaaactattcggcttgagtgcagaagaggaaagcggaatttccagtgtagcggtgaaatgcgttgatattgggaagaacaccagtggcgaaggcggctttctggtctgcaactgacactgagatacgaaagccaggggagcgaacgggattagataccctggtagtcctggctgtaaacgatgggcactaggtgtaggaggtgttgatcccttctgtgccgtagctaacgcattaagtgccccgcctggggagtacggtcgcaaggctgaaactcaaaggaattgacgggggcccgcacaagcggtggagcatgtggtttaattcgacgcaacgcgaagaaccttacctggatttgacttgcttgggaccgccttggaaacaaggtttccttcggggcccttgcacaggtgctgcatggctgtcgtcagctcgtgtcgtgagatgttgggttaagttccgcaacgagcgcaacccctacctttagttgccagcgggtaatgccgggaactctaaaggaactgtcggtgataaaccggaggaaggtggggatgacgtcaagtcctcatggcctttatgtccagggctacacacgtgctacaatggccggtacaaagagttgcaataccgcgaggtggagctaatctcaaaaagccggtctcagttcggattggagtctgcaactcgactccatgaagctggaatcgctagtaatcgcggatcagcatgccgcggtgaatacgttcccgggccttgtacacaccgcccgtcacaccatgaaagccgactgtaccagaagtcacgatgctaaccttcggggagctactgcctaaggtatggttggtgatcggggtg

SEQ ID NO: 2236 - DNA, 1461 bp, unidentified
  source 1..1461: mol_type = unassigned DNA; note = Nitrospira defluvii
aacgaacgctggcggcgcgcctaatacatgcaagtcgagcgagaaggtgtagcaatacacttgtaaagcggcgaacgggtgaggaatacatgggtaatctaccatcgagtggggaataaccagccgaaaggttggctaataccgcgtacgcctccgaatcttcgggttcggagggaaagccacactgtgagtgcggcgctctttgatgagctcatgtcctatcagcttgttggtagggtaacggcctaccaaggctttgacgggtagctggtctgagaggacgatcagccacactggcactgcgacacgggccagactcctacgggaggcagcagtaaggaatattgcgcaatgggcgaaagcctgacgcagcgacgccgcgtgggggatgaaggtcttcggattgtaaacccctttcgggagggaagatggagcgagcaatcgttcggacggtacctccagaagcagccacggccaacttcgtgccagcagccgcggtaatacgaaggtggcaagcgttgttcggattcactgggcgtacagggtgtgtaggcggtttggtaagccttctgttaaagcttcgggcccaacccggaaagcgcagagggtactgccaggctagagggtgggagaggagcgcggaattcccggtgtagcggtgaaatgcgtagagatcgggaggaaggccggtggcgaaggcggcgctctggaacatacctgacgctgagacacgaaagcgtggggagcaaacaggattagataccctggtagtccacgccctaaactatggatactaagtgtcggcgggttaccgccggtgccgcagctaacgcattaagtatcccgcctgggaagtacggccgcaaggttgaaactcaaaggaattgacgggggcccgcacaagcggtggagcatgtggtttaattcgacgcaacgcgaagaaccttacccaggttggacatgcacgtagtagaaaggtgaaagcctgacgaggtagcaataccagcgtgctcaggtgctgcatggctgtcgtcagctcgtgccgtgaggtgttgggttaagtcccgcaacgagcgcaacccctgctttcagttgctaccgggtcatgccgagcactctgaaaggactgcccaggataacggggaggaaggtggggatgacgtcaagtcagcatggcctttatgcctggggccacacacgtgctacaatggccggtacaaagcgctgcaaacctgcaaaggggagccaatcgcaaaaaaccggcctcagttcagattgaggtctgcaactcgacctcatgaaggcggaatcgctagtaatcgcggatcagcacgccgcggtgaatacgttcccgggccttgtacacaccgcccgtcacaccacgaaagcctgttgtacctgaagtcgcccaagccaaccgcaaggaggcaggcgcccacggtatggccggtgattggggtg

SEQ ID NO: 2237 - DNA, 1463 bp, unidentified
  source 1..1463: mol_type = unassigned DNA; note = Nitrospira japonica
aacgaacgctggcggcgcgcctaatacatgcaagtcgaacgagaatgtgtagcaatacacatgtacagtggcgaacgggtgaggactacatgggtaacctaccctcgagtggggaataactagccgaaaggttagctaataccgcgtacgcctcccggactgcggttcgggggggaaagcgataccgtgggtatcgcgctcttggatgggctcatgccctatcagcttgttggtgaggtaacggctcaccaaggcatcgacgggtagctgatctgagaggatgatcagccacactggcactgcgacacgggccagactcctacgggaggcagcagtaaggaatattgcgcaatgggcgaaagcctgacgcagcgacgccgcgtgggggatgaaggtcttcggattgtaaacccctttcgggagggaagatgggatagggtaacctatccggacggtacctccagaagcagccacggctaacttcgtgccagcagccgcggtaatacgaaggtggcaagcgttgttcggatttactgggcgtacagggagcgtaggcggttggataagccctccgtgaaatctccaggcttaacctggaaagtgcagaggggactgttcagctagaggatgggagaggagcgcggaattcccggtgtagcggtgaaatgcgtagagatcgggaggaaggccggtggcgaaggcggcgctctggaacatttctgacgctgaggctcgaaagcgtggggagcaaacaggattagataccctggtagtccacgccttaaacgatggatactaagtgtcggcgggttaccgccggtgccgcagctaacgcagtaagtatcccgcctgggaagtacggccgcaaggttgaaactcaaaggaattgacgggggcccgcacaagcggtggagcatgtggtttaattcgacgcaacgcgaagaaccttacccaggctggacatgcaggtagtagaagggtgaaagcctaacgaggtagcaataccatcctgctcaggtgctgcatggctgtcgtcagctcgtgccgtgaggtgttgggttaagtcccgcaacgagcgcaacccctgtcttcagttactaacgggtcaagccgagaactctggagagactgcccaggagaacggggaggaaggtggggatgacgtcaagtcagcatggcctttatgcctggggccacacacgtgctacaatggccggtacaaagggctgcaaacccgtgagggggagccaatcccaaaaaaccggcctcagttcagatcgaggtctgcaactcgacctcgtgaaggcggaatcgctagtaatcccggatcagcacgccggggtgaatacgttcccgggccttgtacacaccgcccgtcacaccacgaaagtttgttgtacctgaagtcgttggcgccaaccgcaaggaggcagacgcccacggtatgaccgatgattggggtg

SEQ ID NO: 2238 - DNA, 1499 bp, unidentified
  source 1..1499: mol_type = unassigned DNA; note = Nitrospira lenta
agagtttgatcctggctcagaacgaacgctggcggcgcgcctaatacatgcaagtcgagcgagaaggtgtagcaatacacttgtaaagcggcgaacgggtgaggaatgcatgggtaacctaccctcgagtggggaataactagccgaaaggttagctaataccgcatacgtttccggaacttcggtttcggaaagaaagcaataccgtgggtattgcgctcatggatgggctcatgtcctatcagcttgttggtgaggtaacggctcaccaaggcttcgacgggtagctggtctgagaggacgatcagccacactggcactgcgacacgggccagactcctacgggaggcagcagtaaggaatattgcgcaatggacgaaagtctgacgcagcgacgccgcgtgggggatgaaggtcttcggattgtaaacccctttcgggagggaagatggagtgggtaaccacttggacggtacctccagaagcagccacggctaacttcgtgccagcagccgcggtaatacgaaggtggcaagcgttgttcggattcactgggcgtacagggagcgtaggcggttgggtaagccctccgtgaaatctccgggcctaacccggaaagtgcagaggggactgctcagctagaggatgggagaggagcgcggaattcccggtgtagcggtgaaatgcgtagagatcgggaggaaggccggtggcgaaggcggcgctctggaacatttctgacgctgaggctcgaaagcgtggggagcaaacaggattagataccctggtagtccacgccttaaactatggatactaagtgtcggcggtttaccgccggtgccgcagctaacgcaataagtatcccgcctgggaagtacggccgcaaggttgaaactcaaaggaattgacgggggcccgcacaagcggtggagcatgtggtttaattcgacgcaacgcgaagaaccttacccaggctggacatgcaggtagtagaagggtgaaagcccaacgaggtagaaataccatcctgctcaggtgctgcatggctgtcgtcagctcgtgccgtgaggtgttgggttaagtcccgcaacgagcgcaacccctgtcttcagttactaacaggtcaagctgagaactctggagagactgcccaggagaacggggaggaaggtggggatgacgtcaagtcagcatggcctttatgcctggggctacacacgtgctacaatggccggtacaaagggctgcaaacccgcaagggggagccaatcccaaaaaaccggcctcagttcagattggggtctgcaactcgaccccatgaaggcggaatcgctagtaatcgcggatcagaacgccgcggtgaatacgttcccgggccttgtacacaccgcccgtcacaccacgaaagtttgttgtacctgaagtcgttgcgccaaccgcaaggaggcaggcgcccacggtatgaccgatgattggggtgaagtcgtaacaaggtaacc

SEQ ID NO: 2239 - DNA, 1461 bp, Nitrospira moscoviensis
  source 1..1461: mol_type = unassigned DNA
aacgaacgctggcggcgcgcctaatacatgcaagtcgagcgagaaggcgtagcaatacgcttgtaaagcggcgaacgggtgaggaatacatgggtaacctaccctcgagtggggaataaccagccgaaaggttggctaataccgcatacgattcccggactgcggttcgggaaagaaagcgttaccgtgggtagcgcgctcttggatgggctcatgtcctatcagcttgttggtgaggtaacggctcaccaaggcttcgacgggtagctggtctgagaggacgatcagccacactggcactgcgacacgggccagactcctacgggaggcagcagtaaggaatattgcgcaatgggcgaaagcctgacgcagcgacgccgcgtgggggatgaaggtcttcggattgtaaacccctttcgggagggaagatggaacgggtaaccgttcggacggtacctccagaagcagccacggctaacttcgtgccagcagccgcggtaatacgaaggtggcaagcgttgttcggattcactgggcgtacagggagcgtaggcggttgggtaagccctccgtgaaatctccgggcctaacccggaaagtgcagaggggactgctcggcttgaggatgggagaggagcgcggaattcccggtgtagcggtgaaatgcgtagagatcgggaggaaggccggtggcgaaggcggcgctctggaacatttctgacgctgaggctcgaaagcgtggggagcaaacaggattagataccctggtagtccacgccttaaactatggatactaagtgtcggcgggttaccgccggtgccgcagctaacgcagtaagtatcccgcctgggaagtacggccgcaaggttgaaactcaaaggaattgacgggggcccgcacaagcggtggagcatgtggtttaattcgacgcaacgcgaagaaccttacccaggctggacatgcacgtagtaggaggatgaaagtccgacgaggtagcaataccagcgtgctcaggtgctgcatggctgtcgtcagctcgtgccgtgaggtgttgggttaagtcccgcaacgagcgcaacccctgtcttcagttaccaccgggtcatgccgggaactctggagagactgcccaggagaacggggaggaaggtggggatgacgtcaagtcagcatggcctttatgcctggggccacacacgtgctacaatggccggcacaaagagctgcaaacccgtgagggggagccaatctcaaaaaaccggcctcagttcagattgaggtctgcaactcgacctcatgaaggcggaatcgctagtaatcgcggatcagcacgccgcggtgaatacgttcccgggccttgtacacaccgcccgtcacaccacgaaagtttgttgtacctgaagtcgtcgacgccaaccgcaagggggcaggcgcccacggtatgaccgatgattggggtg

SEQ ID NO: 2240 - DNA, 1441 bp, Nocardia brasiliensis
  source 1..1441: mol_type = unassigned DNA
gacgaacgctggcggcgtgcttaacacatgcaagtcgagcggtaaggcccttcggggtacacgagcggcgaacgggtgagtaacacgtgggtgatctgcctcgcacttcgggataagcctgggaaactgggtctaataccggatatgacctttcagtgcatgctgttgggtggaaagatttatcggtgcgagatgggcccgcggcctatcagcttgttggcggggtaacggcccaccaaggcgacgacgggtagccgacctgagagggtgaccggccacactgggactgagacacggcccagactcctacgggaggcagcagtggggaatattgcacaatgggcggaagcctgatgcagcgacgccgcgtgagggatgacggccttcgggttgtaaacctctttcgacagggacgaagcgcaagtgacggtacctgtagaagaagcaccggccaactacgtgccagcagccgcggtaatacgtagggtgcgagcgttgtccggaattactgggcgtaaagagcttgtaggcggtttgtcgcgtcgtccgtgaaaacttggggctcaaccccaagcttgcgggcgatacgggcagacttgagtacttcaggggagactggaattcctggtgtagcggtgaaatgcgcagatatcaggaggaacaccggtggcgaaggcgggtctctgggaagtaactgacgctgagaagcgaaagcgtgggtagcgaacaggattagataccctggtagtccacgccgtaaacggtgggtactaggtgtgggtttccttccacgggatccgtgccgtagctaacgcattaagtaccccgcctggggagtacggccgcaaggctaaaactcaaaggaattgacgggggcccgcacaagcggcggagcatgtggattaattcgatgcaacgcgaagaaccttacctgggtttgacatacaccggaaacctgcagagatgtaggcccccttgtggtcggtgtacaggtggtgcatggctgtcgtcagctcgtgtcgtgagatgttgggttaagtcccgcaacgagcgcaacccttgtcctgtgttgccagcggattatgccggggactcgcaggagactgccggggtcaactcggaggaaggtggggacgacgtcaagtcatcatgccccttatgtccagggcttcacacatgctacaatggccggtacagagggctgcgataccgtgaggtggagcgaatcccttaaagccggtctcagttcggatcggggtctgcaactcgaccccgtgaagttggagtcgctagtaatcgcagatcagcaacgctgcggtgaatacgttcccgggccttgtacacaccgcccgtcacgtcatgaaagtcggtaacacccgaagccggtggcctaaccccttgtgggagggagccgtcgaaggtgggattggcgattgggacg

SEQ ID NO: 2241 - DNA, 1412 bp, Nodularia spumigena
  source 1..1412: mol_type = unassigned DNA
gatgaacgctggcggtatgcttaacacatgcaagtcgaacggtctcttcggagatagtggcggacgggtgagtaacgcgtgagaatctrgcttcaggtcggggacaaccackggaaackgtggctaataccggatatgccgagaggtgaaaggcttgctgcctgaagatgagctcgcgtctgattagctagtaggtgtggtaaaagcgcacctaggcgacgatcagtagctggtctgagaggatgatcagccacactgggactgagacacggcccagactcctacgggaggcagcagtggggaattttccgcaatgggcgaaagcctgacggagcaataccgcgtgagggaggaaggctcttgggttgtaaacctcttttctcagggaagaaaaaaatgacggtacttgaggaataagcatcggctaactccgtgccagcagccgcggtaatacggaggatgcaagcgttatccggaatgattgggcgtaaagggtccgcaggtggctatgtaagtctgctgttaaagaayctagctyaactagrtaaaagcagtggaaactacaaggctagagtgcgttcggggtagagggaattcctggtgtagcggtgaaatgcgtagatatcaggaagaacaccagtggcgaaggcgctctactaggccgcaactgacactgagggacgaaagctaggggagcgaatgggattagataccccagtagtcctagccgtaaacgatggatactaggcgtggctygtatcgacccragccgtgccggagctaacgcgttaagtatcccgcctggggagtacgcacgcaagtgtgaaactcaaaggaattgacgggcgcccgcacaagcggtggagtatgtggtttaattcgatgcaacgcgaagaaccttaccaagacttgacatgtcgcgaatctctctgaaaggagagagtgccttcgggagcgcgaacacaggtggtgcatggctgtcgtcagctcgtgtcgtgagatgttgggttaagtcccgcaacgagcgcaaccctcgtttttagttgccagcattaagttgggcactctagagagactgccggtgacaaaccggaggaaggtggggatgacgtcaagtcagcatgccccttacgtcttgggctacacacgtactacaatgctacggacaaagggcagctacacagcaatgtgatgcaaatctcacaaaaccgtagctcagttcagatcgcaggctgcaactcgcctgcgtgaagtcggaatcgctagtaattgcaggtcagcatactgcagtgaattcgttcccgggccttgtacacaccgcccgtcacaccatggaagctggtcacgcccgaagtcgttaccccaactgttcgcagagggggatgccgaaggcaggactggtgactggggtg

SEQ ID NO: 2242 - DNA, 1412 bp, unidentified
  source 1..1412: mol_type = unassigned DNA; note = Nostoc azollae
gatgaacgctggcggtatgcttaacacatgcaagtcgaacgaagttcttaggaacttagtggcggacgggtgagtaacgcgtgagaatttggctttaggtcggggacaaccactggaaacggtggctaataccggatatgccgagaggtgaaagatttattgcctgaagataagctcgcgtctgattagctagttggtggggtaagagcctaccaaggcgacgatcagtagctggtctgagaggatgatcagccacactgggactgagacacggcccagactcctacgggaggcagcagtggggaattttccgcaatgggcgaaagcctgacggagcaataccgcgtgagggaggaaggctcttgggtcgtaaacctcttttctcagggaagaaaaaaatgacggtacctgaggaataagcatcggctaactccgtgccagcagccgcggtaatacggaggatgcaagcgttatccggaatgattgggcgtaaagggtccgtaggtggtactgtaagtctgctgttaaagagcaaggctcaaccttgtaaaagcagtggaaactacagaactagagtgcgttcggggcagaagggaattcctggtgtagcggtgaaatgcgtagatatcaggaagaacaccggtggcgaaagcgttctgctaggccgcaactgacactgagggacgaaagctaggggagcgaatgggattagataccccagtagtcctagccgtaaacgatggatactaggcgtggcttgtatcgacccgagccgtgccggagctaacgcgttaagtatcccgcctggggagtacgcacgcaagtgtgaaactcaaaggaattgacgggggcccgcacaagcggtggagtatgtggtttaattcgatgcaacgcgaagaaccttaccaagacttgacatgtcgcgaatttcggtgaaagctgagagtgccttcgggagcgcgaacacaggtggtgcatggctgtcgtcagctcgtgtcgtgagatgttgggttaagtcccgcaacgagcgcaaccctcgtttttagttgccagcattaagttgggcactctaaagagactgccggtgacaaaccggaggaaggtgaggatgacgtcaagtcagcatgccccttacgttttgggctacacacgtactacaatgctacggacaaagggcagcaagctagcaatagcaagcaaatctcataaaccgtagctcagttcagatcgaaggctgcaactcgccttcgtgaaggaggaatcgctagtaattgcaggtcagcatactgcagtgaattcgttcccgggccttgtacacaccgcccgtcacaccatggaagttggtcacgcccgaagtcattaccccaaccttttggagggggatgcctaaggtaggactggtgactggggtg

SEQ ID NO: 2243 - DNA, 1411 bp, Nostoc calcicola
  source 1..1411: mol_type = unassigned DNA
  misc_difference 1364: note = n is a, c, g, or t
gatgaacgctggcggtatgcttaacacatgcaagtcgaacggtgtcttcggacacagtggcggacgggtgagtaacgcgtgagaatctggctttaggtctgggacaaccactggaaacggtggctaataccggatgtgccgagaggtgaaaggttaactgcctgaagatgagctcgcgtctgattagctagtaggtagtgtaatggactacctaggcgacgatcagtagctggtctgagaggacgatcagccacactgggactgagacacggcccagactcctacgggaggcagcagtggggaattttccgcaatgggcgaaagcctgacggagcaataccgcgtgagggaggaaggctcttgggtcgtaaacctcttttctcagggaagaacacaatgacggtacctgaggaataagcatcggctaactccgtgccagcagccgcggtaatacggaggatgcaagcgttatccggaatgattgggcgtaaagcgtccgcaggtggctatgtaagtctgctgttaaagagtctagctcaactagataagagcagtggaaactacatggctagagtgcgttcggggcagagggaattcctggtgtagcggtgaaatgcgtagagatcaggaagaacaccggtggcgaaggcgctctgctaggccgcaactgacactgagggacgaaagctaggggagcgaatgggattagataccccagtagtcctagccgtaaacgatggatactaggcgtggcttgtatcgacccgagccgtgccgtagctaacgcgttaagtatcccgcctggggagtacgccggcaacggtgaaactcaaaggaattgacgggggcccgcacaagcggtggagtatgtggtttaattcgatgcaacgcgaagaaccttaccaaggcttgacatgtcgcgaatcttcttgaaagggaagagtgccttcgggagcgcgaacacaggtggtgcatggctgtcgtcagctcgtgtcgtgagatgttgggttaagtcccgcaacgagcgcaaccctcgtttttagttgccagcattaagttgggcactctagagagactgccggtgacaaaccggaggaaggtggggatgacgtcaagtcagcatgccccttacgccttgggctacacacgtactacaatgctccggacagagggcagcaagcatgcgaatgcaagcaaatcccgtaaaccggagctcagttcagatcgcaggctgcaactcgcctgcgtgaaggaggaatcgctagtaattgcaggtcagcatactgcagtgaattcgttcccgggccttgtacacaccgcccgtcacaccatggaagctggtagtgcccgaagtcattactccnacctttcgggggggaggatgcctaaggcaggactggtgactggggtg

SEQ ID NO: 2244 - DNA, 1411 bp, unidentified
  source 1..1411: mol_type = unassigned DNA; note = Nostoc carneum
gatgaacgctggcggtatgcttaacacatgcaagtcgaacggtctcttcggagatagtggcggacgggtgagtaacgcgtgagaatctagcttcaggtcggggacaaccactggaaacggtggctaataccggatgtgccgaaaggtgaaagrcttgctgcctgaagatgagctcgcgtctgattagctagtaggtgtggtaagagcgcacctaggcgacgatcagtagctggtctgagaggatgatcagccacactgggactgagacacggcccagactcctacgggaggcagcagtggggaattttccgcaatgggcgaaagcctgacggagcaataccgcgtgagggaggaaggctcttgggttgtaaacctcttttctcagggaagaaaaaaatgacggtacctgaggaataagcatcggctaactccgtgccagcagccgcggtaatacggaggatgcaagcgttatccggaatgattgggcgtaaagcgtccgcaggtggcaatgtaagtctgctgttaaagagtgaggctcaacctcataagagcagtggaaactacatagctagagtgcgttcggggcagagggaattcctggtgtagcggtgaaatgcgtagagatcaggaagaacaccggtggcgaaagcgctctgctaggccgcaactgacactgagggacgaaagctaggggagcgaatgggattagataccccagtagtcctagccgtaaacgatggatactaggcgtggcttgtatcgacccgagccgtgccggagctaacgcgttaagtatcccgcctggggagtacgcacgcaagtgtgaaactcaaaggaattgacgggggcccgcacaagcggtggagtatgtggtttaattcgatgcaacgcgaagaaccttaccaagacttgacatgtcgcgaacttttctgaaaggaagaggtgccttcgggagcgcgaacacaggtggtgcatggctgtcgtcagctcgtgtcgtgagatgttgggttaagtcccgcaacgagcgcaaccctcgtttttagttgccagcattaagttgggcactctagagagactgccggtgacaaaccggaggaaggtggggatgacgtcaagtcagcatgccccttacgtcttgggctacacacgtactacaatgctacggacaaagggcagcgagctagtgatagcaagcaaatctcataaaccgtggctcagttcagatcgcaggctgcaactcgcctgcgtgaaggaggaatcgctagtaattgcaggtcagcatactgcagtgaattcgttcccgggccttgtacacaccgcccgtcacaccatggaagctggcaacgcccgaagtcattactccaaccattcgtgggggaggatgccgaaggcagtgctggtgactggggtg

SEQ ID NO: 2245 - DNA, 1415 bp, Nostoc commune
  source 1..1415: mol_type = unassigned DNA
gatgaacgctggcggtatgcttaacacatgcaagtcgaacggtgtcttcggacacagtggcggacgggtgagtaacgcgtgagaatctggctttaggtctgggacaaccactggaaacggtggctaataccggatgtgcccgtaattgggtgaaaggttaactgcctgaagatgagctcgcgtctgattagctagtaggtagtgtaatggactacctaggcgacgatcagtagctggtctgagaggacgatcagccacactgggactgagacacggcccagactcctacgggaggcagcagtggggaattttccgcaatgggcgaaagcctgacggagcaataccgcgtgagggaggaaggctcttgggtcgtaaacctcttttctcagggaagaacacaatgacggtacctgaggaataagcatcggctaactccgtgccagcagccgcggtaatacggaggatgcaagcgttatccggaatgattgggcgtaaagcgtccgcaggtggcgatgtaagtctgctgttaaagagtctagctcaactagataagagcagtggaaactacatagctagagtacgttcggggcagagggaattcctggtgtagcggtgaaatgcgtagagatcaggaagaacaccagtggcgaaggcgctctgctaggccgtaactgacactgagggacgaaagctaggggagcgaatgggattagataccccagtagtcctagccgtaaacgatggatactaggcgtggcttgtatcgacccgagccgtgccgtagctaacgcgttaagtatcccgcctggggagtacgccggcaacggtgaaactcaaaggaattgacgggggcccgcacaagcggtggagtatgtggtttaattcgatgcaacgcgaagaaccttaccaaggcttgacatgtcgcgaatcctggtgaaagccgggagtgccttcgggagcgcgaacacaggtggtgcatggctgtcgtcagctcgtgtcgtgagatgttgggttaagtcccgcaacgagcgcaaccctcgtttttagttgccagcattaagttgggcactctagagagactgccggtgacaaaccggaggaaggtggggatgacgtcaagtcagcatgccccttacgccttgggctacacacgtactacaatgctccggacagagggcagcaagcgggcgaccgcaagcaaatcccggaaaccggagctcagttcagatcgcaggctgcaactcgcctgcgtgaaggaggaatcgctagtaattgcaggtcagcatactgcagtgaattcgttcccgggccttgtacacaccgcccgtcacaccatggaagctggtagtgcccgaagtcattactccaaccattcgtggaggaggatgcctaaggcaggactggtgactggggtg

SEQ ID NO: 2246 - DNA, 1411 bp, unidentified
  source 1..1411: mol_type = unassigned DNA; note = Nostoc flagelliforme
gatgaacgctggcggtatgcttaacacatgcaagtcgaacggtgtcttcggacacagtggcggacgggtgagtaacgcgtgagaatctggctttaggtctgggacaaccactggaaacggtggctaataccggatgtgccgaaaggtgaaaggttaactgcctgaagatgagctcgcgtctgattagctagtaggtgtggtaaaggcgcacctaggcgacgatcagtagctggtctgagaggacgatcagccacactgggactgagacacggcccagactcctacgggaggcagcagtggggaattttccgcaatgggcgaaagcctgacggagcaataccgcgtgagggaggaaggctcttgggtcgtaaacctcttttctcagggaagaacacaatgacggtacctgaggaataagcatcggctaactccgtgccagcagccgcggtaatacggaggatgcaagcgttatccggaatgattgggcgtaaagcgtccgcaggtggcgatgtaagtctgctgttaaagagtctagctcaactagataagagcagtggaaactacatagctagagtacgttcggggcagagggaattcctggtgtagcggtgaaatgcgtagagatcaggaagaacaccagtggcgaaggcgctctgctaggccgtaactgacactgagggacgaaagctaggggagcgaatgggattagataccccagtagtcctagccgtaaacgatggatactaggcgtggcttgtatcgacccgagccgtgccgtagctaacgcgttaagtatcccgcctggggagtacgccggcaacggtgaaactcaaaggaattgacgggggcccgcacaagcggtggagtatgtggtttaattcgatgcaacgcgaagaaccttaccaaggcttgacatgtcgcgaatcctggtgaaagctgggagtgccttcgggagcgcgaacacaggtggtgcatggctgtcgtcagctcgtgtcgtgagatgttgggttaagtcccgcaacgagcgcaaccctcgtttttagttgccagcattaagttgggcactctagagagactgccggtgacaaaccggaggaaggtggggatgacgtcaagtcagcatgccccttacgccttgggctacacacgtactacaatgctccggacagagggcagcaagcatgcgaatgcaagcaaatcccgtaaaccggagctcagttcagatcgcaggctgcaactcgcctgcgtgaaggaggaatcgctagtaattgcaggtcagcatactgcagtgaattcgttcccgggccttgtacacaccgcccgtcacaccatggaagctggtagtgcccgaagtcattactccaacctttcgggggggaggatgcctaaggcaggactggtgactggggtg

SEQ ID NO: 2247 - DNA, 1411 bp, unidentified
  source 1..1411: mol_type = unassigned DNA; note = Nostoc linckia
gatgaacgctggcggtatgcttaacacatgcaagtcgaacgaactcttcggagttagtggcggacgggtgagtaacgcgtgagaatctagcttcaggtctgggacaaccactggaaacggtggctaataccggatgtgccgaaaggtgaaaggcttgctgcctgaagatgagctcgcgtctgattagctagtaggtggggtaagagcctacctaggcgacgatcagtagctggtctgagaggacgatcagccacactgggactgagacacggcccagactcctacgggaggcagcagtggggaattttccgcaatgggcgaaagcctgacggagcaataccgcgtgagggaggaaggctcttgggttgtaaacctcttttctcagggaagaacacaatgacggtacctgaggaatcagcatcggctaactccgtgccagcagccgcggtaatacggaggatgcaagcgttatccggaatgattgggcgtaaagcgtccgcaggtggctgtgtaagtctgctgtcaaagagcgaagctcaacttcgtaaaggcagtggaaactacacggctagagtgcgttcggggcagagggaattcctggtgtagcggtgaaatgcgtagagatcaggaagaacaccggtggcgaaggcgctctgctaggccgcaactgacactgagggacgaaagctaggggagcgaatgggattagataccccagtagtcctagctgtaaacgatggatactaggcgtggcttgtatcgacccgagccgtgccgtagctaacgcgttaagtatcccgcctggggagtacgcacgcaagtgtgaaactcaaaggaattgacgggggcccgcacaagcggtggagtatgtggtttaattcgatgcaacgcgaagaaccttaccaaggcttgacatgtcgcgaaccttcttgaaagagaagggtgccttcgggagcgcgaacacaggtggtgcatggctgtcgtcagctcgtgtcgtgagatgttgggttaagtcccgcaacgagcgcaaccctcgtttttagttgccagcattaagttgggcactctagagagactgccggtgacaaaccggaggaaggtggggatgacgtcaagtcagcatgccccttacgccttgggctacacacgtactacaatgctacggacagagggcagcaagctagcgatagcaagctaatcccataaaccgtggctcagttcagatcgaaggctgcaactcgccttcgtgaaggaggaatcgctagtaattgcaggtcagcatactgcagtgaattcgttcccgggccttgtacacaccgcccgtcacaccatggaagctggcaacgcccgaagtcattactccaaccattcgtgggggaggatgcctaaggcagtgctggtgactggggtg

SEQ ID NO: 2248 - DNA, 1387 bp, unidentified
  source 1..1387: mol_type = unassigned DNA; note = Nostoc piscinale
atgaacgctggcggtatgcttaacacatgcaagtcgaacggaatcttaggattcagtggcggacgggtgagtaacgcgtgagaatctagcttcaggtcggggataactactggaaacggtggctaataccggatgtgccgagaggtgaaaggctagctgcctgaagatgagctcgcgtctgattagctagttggtgtggtaagagcgcaccaaggcgacgatcagtagctggtctgagaggatgatcagccacactgggactgagacacggcccagactcctacgggaggcagcagtggggaattttccgcaatgggcgaaagcctgacggagcaataccgggtgagggaggaaggctcttgggttgtaaacctcttttctcaaggaagaaaaaatgacggtacttgaggaataagcatcggctaactccgtgccagcagccgcggtaatacggaggatgcaagcgttatccggaatgattgggcgtaaagcgtccgcaggtggcgatgtaagtctgctgttaaagagtctagcttaactagataaaagcagtggaaactacatagctagagtgcgttcggggtagagggaattcctggtgtagcggtgaaatgcgtagagatcaggaagaacgccggtggcgaaggcgctctactaggccgcaactaacactgagggacgaaagctaggggagcgaatgggattagatgccccagtagtcctagccgtaaacgatggatactagcgttgctgatcgtcacacgcagtgccggagccaacgcgttaagtatcccgcctggggagtacgcacgcaagtgtgaaactcaaaggaattgacgggggcccgcacaagcggtggagtatgtggtttaattcgatgcaacgcgaagaaccttaccaagacttgacatgtcgcgaatccttgtgaaagcagggagtgccttcgggagcgcgaacacaggtggtgcatggctgtcgtcagctcgtgtcgtgagatgttgggttaagtcccgcaacgagcgcaaccctcgtttttagttgccagcattaagttgggcactctagagagactgccggtgacaaaccggaggaaggtggggatgacgtcaagtcagcatgccccttacgtcttgggctacacacgtactacaatgctccgaacagagggcagcgagctagcgatagcaagcaaatcccggaaatcggagctcagttcagatcgaaggctgcaactcgccttcgtgaaggaggaatcgctagtaattgcaggtcagcatactgcagtgaattcgttcccgggccttgtacacaccgcccgtcacaccatggaagctggcaacgcccgaagtcattaccccaaccgtgaggagggggatgcctaaggcag

SEQ ID NO: 2249 - DNA, 1411 bp, unidentified
  source 1..1411: mol_type = unassigned DNA; note = Nostoc punctiforme
gatgaacgctggcggtatgcttaacacatgcaagtcgaacggtgtcttcggacacagtggcggacgggtgagtaacgcgtgagaatctggctctaggtctgggacaaccactggaaacggtggctaataccggatgtgccgagaggtgaaaggttaactgcctagagatgagctcgcgtctgattagctagtaggtagtgtaatggactacctaggcgacgatcagtagctggtttgagaagacgatcagccacactgggactgagacacggcccagactcctacgggaggcagcagtggggaattttccgcaatgggcgaaagcctgacggagcaataccgcgtgagggaggaaggctcttgggtcgtaaacctcttttctcagggaagaacacaatgacggtacctgaggaataagcatcggctaactccgtgccagcagccgcggtaatacggaggatgcaagcgttatccggaatgattgggcgtaaagcgtccgcaggtggcaatgtaagtctgctgttaaagagtctagctcaactagatacaagcagtggaaactacatagctagagtacgttcggggcagagggaattcctggtgtagcggtgaaatgcgtagagatcaggaagaacaccggtggcgaaggcgctctgctaggccgtaactgacactgagggacgaaagctaggggagcgaatgggattagataccccagtagtcctagccgtaaacgatggatactaggcgtggcttgtatcgacccgagccgtgccgtagctaacgcgttaagtatcccgcctggggagtacgccggcaacggtgaaactcaaaggaattgacgggggcccgcacaagcggtggagtatgtggtttaattcgatgcaacgcgaagaaccttaccaaggcttgacatgtcgcgaatcctggtgaaagccgggagtgccttcgggagcgcgaacacaggtggtgcatggctgtcgtcagctcgtgtcgtgagatgttgggttaagtcccgcaacgagcgcaaccctcgtttttagttgccagcattaagttgggcactctagagagactgccggtgacaaaccggaggaaggtggggatgacgtcaagtcagcatgccccttacgccttgggctacacacgtactacaatgctccggacagagggcagcaagcatgcgaatgcaagcaaatcccgtaaaccggagctcagttcagatcgcaggctgcaactcgcctgcgtgaaggaggaatcgctagtaattgcaggtcagcatactgcagtgaattcgttcccgggccttgtacacaccgcccgtcacaccatggaagctggtagtgcccgaagtcattactccaacctttcggggaggaggatgcctaaggcaggactggtgactggggtg

SEQ ID NO: 2250 - DNA, 1413 bp, unidentified
  source 1..1413: mol_type = unassigned DNA; note = Notoacmeibacter marinus
aacgaacgctggcggcaggcttaacacatgcaagtcgaacgatcccttcggggatagtggcagacgggtgagtaacgcgtgggaatctaccccaaggtacgggataacagttggaaacgactgctaataccgtatgtgtcctccgggacaaagatttatcgccttgggacgagcccgcgttggattagctagttggtggggtaatggcccaccaaggcgacgatccatagctggtctgagaggatgatcagccacattgggactgagacacggcccaaactcctacgggaggcagcagtggggaatattggacaatgggggaaaccctgatccagccatgccgcgtgagtgatgaaggccctagggttgtaaagctctttcgccggagaagataatgacggtatccggtaaagaagccccggctaacttcgtgccagcagccgcggtaatacgaagggggctagcgttgttcggaattactgggcgtaaagcgcacgtaggcggaccatttagtcaggggtgaaatcccggggctcaaccccggaactgcctttgatactgatggtcttgaggtcgagagaggtgagtggaattgcgagtgtagaggtgaaattcgtagatattcgcaggaacaccagtggcgaaggcggctcactggctcgatactgacgctgaggtgcgaaagcgtggggagcaaacaggattagataccctggtagtccacgccgtaaacgatgaatgccagccgtcggagggtttacccttcggtggcgcagttaacgctttgagcattccgcctggggagtacggtcgcaagattaaaactcaaaggaattgacgggggcccgcacaagcggtggagcatgtggtttaattcgaagcaacgcgcagaaccttaccagctcttgacataccgatcgcggattggggagaccctttccttcagttaggctggatcggatacaggtgctgcatggctgtcgtcagctcgtgtcgtgagatgttgggttaagtcccgcaacgagcgcaaccctcgcccttagttgccatcattcagttgggcactctaaggggactgccggtgataagccgagaggaaggtggggatgacgtcaagtcctcatggcccttacgggctgggctacacacgtgctacaatggtggtgacagtgggcagcgagaccgcgaggtcgagctaatctccaaaagccatctcagttcggattgcactctgcaactcgagtgcatgaagttggaatcgctagtaatcgcggatcagcatgccgcggtgaatacgttcccgggccttgtacacaccgcccgtcacaccatgggagttgggtctgcccgaaggcggtgcgccaacctcgcaagaggaggcagccgaccacggtaggctcagcgactggggtg

SEQ ID NO: 2251 - DNA, 1453 bp, unidentified
  source 1..1453: mol_type = unassigned DNA; note = Noviherbaspirillum autotrophicum
attgaacgctggcggcatgccttacacatgcaagtcgaacggcagcgcgggagcaatcctggcggcgagtggcgaacgggtgagtaatatatcggaacgtgccttagagtgggggataactagtcgaaagactagctaataccgcatacgacctacgggtgaaagtgggggatcgcaagacctcatgctcttagagcggccgatatctgattagctagttggtggggtaaaagcctaccaaggcgacgatcagtagctggtctgagaggacgaccagccacactgggactgagacacggcccagactcctacgggaggcagcagtggggaattttggacaatgggggcaaccctgatccagcaatgccgcgtgtgtgaagaaggccttcgggttgtaaagcacttttgttcgggaagaaatcccttgggctaataccccggggggatgacggtaccggaagaataagcaccggctaactacgtgccagcagccgcggtaatacgtagggtgcaagcgttaatcggaattactgggcgtaaagcgtgcgcaggcggttgtgcaagacagatgtgaaatccccgggcttaacctgggaactgcatttgtgactgcacggctagagtgtgtcagaggggggtagaattccacgtgtagcagtgaaatgcgtagatatgtggaggaataccgatggcgaaggcagccccctgggataacactgacgctcatgcacgaaagcgtggggagcaaacaggattagataccctggtagtccacgccctaaacgatgtcaactagttgtcgggtcttaattgacttggtaacgcagctaacgcgtgaagttgaccgcctggggagtacggtcgcaagattaaaactcaaaggaattgacggggacccgcacaagcggtggatgatgtggattaattcgatgcaacgcgaaaaaccttacctacccttgacatggaaggaatcctcgagagatcggggagtgcccgaaagggagccttcacacaggtgctgcatggctgtcgtcagctcgtgtcgtgagatgttgggttaagtcccgcaacgagcgcaacccttgtcattagttgctacgaaagggcactctaatgagactgccggtgacaaaccggaggaaggtggggatgacgtcaagtcctcatggcccttatgggtagggcttcacacgtcatacaatggtacatacagagggctgccaacccgcgagggggagctaatcccagaaagtgtatcgtagtccggattgtagtctgcaactcgactacatgaagttggaatcgctagtaatcgcggatcagcatgtcgcggtgaatacgttcccgggtcttgtacacaccgcccgtcacaccatgggagcgggttttaccagaagtaggtagcctaaccgcaaggagggcgcttaccacggtaggattcgtgactggggtg

SEQ ID NO: 2252 - DNA, 1453 bp, unidentified
  source 1..1453: mol_type = unassigned DNA; note = Noviherbaspirillum humi
attgaacgctggcggcatgccttacacatgcaagtcgaacggcagcacgggggcaaccctggtggcgagtggcgaacgggtgagtaacatatcggaacgtgccctggagtgggggataactagtcgaaagactagctaataccgcatacgacccaagggtgaaagtgggggaccgcaaggcctcatgctcgtggagcggccgatatctgattagctagttggcggggtaagagcccaccaaggcgacgatcagtagctggtctgagaggacgaccagccacactgggactgagacacggcccagactcctacgggaggcagcagtggggaattttggacaatgggggcaaccctgatccagcaatgccgcgtgagtgaagaaggccttcgggttgtaaagctcttttgtccgggaagaaatcccatttcctaataggggatggggatgacggtactggaagaataagcaccggctaactacgtgccagcagccgcggtaatacgtagggtgcaagcgttaatcggaattactgggcgtaaagcgtgcgcaggcggttgtgcaagacagatgtgaaagccccgggctcaacctgggaatggcatttgtgactgcacggctagagtgtgtcagaggggggtagaattccacgtgtagcagtgaaatgcgtagagatgtggaggaataccgatggcgaaggcagccccctgggataacactgacgctcatgcacgaaagcgtggggagcaaacaggattagataccctggtagtccacgccctaaacgatgtcaactagttgtcggggattcatttccttggtaacgcagctaacgcgtgaagttgaccgcctggggagtacggtcgcaagattaaaactcaaaggaattgacggggacccgcacaagcggtggatgatgtggattaattcgatgcaacgcgaaaaaccttacctacccttgacatggcaggaacccttcagagatggaggggtgctcgaaagagaacctgcacacaggtgctgcatggctgtcgtcagctcgtgtcgtgagatgttgggttaagtcccgcaacgagcgcaacccttgtcattagttgctacgaaagggcactctaatgagactgccggtgacaaaccggaggaaggtggggatgacgtcaagtcctcatggcccttatgggtagggcttcacacgtcatacaatggtacatacagagggccgccaacccgcgagggggagccaatcccagaaagtgtatcgtagtccggattgcagtctgcaactcgactgcatgaagttggaatcgctagtaatcgcggatcagcatgtcgcggtgaatacgttcccgggtcttgtacacaccgcccgtcacaccatgggagcgggttttaccagaagtgggtagcctaaccgcaaggagggcgcttaccacggtaggattcgtgactggggtg

SEQ ID NO: 2253 - DNA, 1431 bp, unidentified
  source 1..1431: mol_type = unassigned DNA; note = Novimethylophilus kurashikiensis
attgaacgctggcggcatgctttacacatgcaagtcgaacggcagcatgacctagcttgctaggttgatggcgagtggcgaacgggtgagtaatgcatcggaacgtaccgtgtaatgggggataacgcagcgaaagttgtgctaataccgcatacgtcctacgggagaaagcaggggatcttcggaccttgcgttatacgagcggccgatgtcagattagctagttggtagggtaaaggcctaccaaggcgacgatctgtagctggtctgagaggatgatcagccacactgggactgagacacggcccagactcctacgggaggcagcagtggggaattttggacaatgggggcaaccctgatccagccatgccgcgtgagtgaagaaggccttcgggttgtaaagctctttcgtgagggaagaaacggcggactctaacatagttcgctaatgacggtacctcaagaagaagcaccggctaactacgtgccagcagccgcggtaatacgtagggtgcgagcgttaatcggaattactgggcgtaaagcgtgcgcaggcggtttgacaagtctgatgtgaaagccccgggctcaacctgggaactgcgttggaaactgtcaggctagagtgtgtcagagggaggtagaattccacgtgtagcagtgaaatgcgtagagatgtggaggaataccgatggcgaaggcagcctcctgggataacactgacgctcatgcacgaaagcgtggggagcaaacaggattagataccctggtagtccacgccctaaacgatgtctactagttgttggaggagtgaaatccttcagtaacgcagctaacgcgtgaagtagaccgcctggggagtacggtcgcaagattaaaactcaaaggaattgacgggggcccgcacaagcggtggattatgtggattaattcgatgcaacgcgaaaaaccttacctggccttgacatgccactaacgaagcagagatgcattaggtgcccgaaagggaaagtggacacaggtgctgcatggctgtcgtcagctcgtgtcgtgagatgttgggttaagtcccgcaacgagcgcaacccttgccaataattgccatcatttagttgggcactttattgggactgccggtgacaaaccggaggaaggtggggatgacgtcaagtcctcatggcccttatggccagggcttcacacgtaatacaatggtcggtacagagggttgccaacccgcgagggggagccaatcccagaaagccgatcgtagtccggattgttctctgcaactcgagagcatgaagtcggaatcgctagtaatcgcggatcagcatgtcgcggtgaatacgttcccgggccttgtacacaccgcccgtcacaccatgggagtgggttccaccagaagtagttagcctaaccgcaagg

SEQ ID NO: 2254 - DNA, 1409 bp, Novispirillum itersonii
  source 1..1409: mol_type = unassigned DNA
  misc_difference 169: note = n is a, c, g, or t
aacgaacgctggcggcaggcctaacacatgcaagtcgagcgctcaccttcgggtgggagcggcgcacgggtgagtaacacgtgggaacctaccttgaagtacggaataactgagggaaacttcagctaataccgtatacgccctacgggggaaagatttatcgcttcangacgggcccgcgttggattagctagttggtgaggtaatggctcaccaaggcaacgatccatagctgatttgagagaatgatcagccacactgggactgagacacggcccagactcctacgggaggcagcagtggggaatattggacaatgggcggaagcctgatccagccatgccgcgtgagtgatgaaggccttcgggttgtaaagctctttcagatgggacgatgatgacggtaccatcagaagaagccccggctaacttcgtgccagcagccgcggtaatacgaagggggctagcgttgttcggaattactgggcgtaaagcgcgcgtaggcggctttgtcagtcaggggtgaaatcccggggcttaacctcggaactgcccttgatactgcaaggcttgagtctgtgagaggatggtggaatacccagtgtagaggtgaaattcgtagatattgggtggaacaccagtggcgaaggcggccatctggcacagtactgacgctgaggtgcgaaagcgtggggagcaaacaggattagataccctggtagtccacgccgtaaacgatgagtgctagctgtcgggttgcatgcaactcggtggcgcagctaacgcattaagcactccgcctggggagtacggtcgcaagattaaaactcaaaggaattgacgggggcccgcacaagcggtggagcatgtggtttaattcgaagcaacgcgcagaaccttaccagcccttgacatggggatcaccgctgccagagatggcggcttcagttcggctggatcccacacaggtgctgcatggctgtcgtcagctcgtgtcgtgagatgttgggttaagtcccgcaacgagcgcaaccctcgtccttagttgccatcattcagttgggcactctagggaaactgccggtgacaagccggaggaaggtggggatgacgtcaagtcctcatggcccttacgggctgggctacacacgtgctacaatggcgactacagtgggcagcgacctcgcgagaggaagcaaatctccaaaagtcgtctcagttcggattgcactctgcaactcgagtgcatgaagtcggaatcgctagtaatcgtggatcagcacgccacggtgaatacgttcccgggccttgtacacaccgcccgtcacaccatgggagttggttctacccgaagatggttcgctaaccgcaaggaggcagccagccacggtagggtcagcgactggggtg

SEQ ID NO: 2255 - DNA, 1407 bp, Novosphingobium aromaticivorans
  source 1..1407: mol_type = unassigned DNA
aacgaacgctggcggcatgcctaacacatgcaagtcgaacgaacccttcggggttagtggcgcacgggtgcgtaacgcgtgggaatctgccctttgcttcggaataacagttagaaatgactgctaataccggatgatgtcttcggaccaaagatttatcggcaagggatgagcccgcgtaggattaggtagttggtggggtaaaggcctaccaagccgacgatccttagctggtctgagaggatgatcagccacactgggactgagacacggcccagactcctacgggaggcagcagtggggaatattggacaatgggcgcaagcctgatccagcaatgccgcgtgagtgatgaaggccttcgggtcgtaaagctcttttaccagggatgataatgacagtacctggagaataagctccggctaactccgtgccagcagccgcggtaatacggagggagctagcgttgttcggaattactgggcgtaaagcgcacgtaggcggctactcaagtcagaggtgaaagcccggggctcaaccccggaactgcctttgaaactaggtagctggaatcttggagaggtcagtggaattccgagtgtagaggtgaaattcgtagatattcggaagaacaccagtggcgaaggcgactgactggacaagtattgacgctgaggtgcgaaagcgtggggagcaaacaggattagataccctggtagtccacgccgtaaacgatgataactagctgtccggtcacttggtgattgggtggcgcagctaacgcattaagttatccgcctggggagtacggtcgcaagattaaaactcaaaggaattgacgggggcctgcacaagcggtggagcatgtggtttaattcgaagcaacgcgcagaaccttaccagcgtttgacatcccgcgctacttccagagatggaaggttcccttcggggacgcggtgacaggtgctgcatggctgtcgtcagctcgtgtcgtgagatgttgggttaagtcccgcaacgagcgcaaccctcgtccttagttgccatcatttagttgggcactctaaggaaaccgccggtgataagccggaggaaggtggggatgacgtcaagtcctcatggcccttacacgctgggctacacacgtgctacaatggcggtgacagtgggcagcaagcacgcgagtgtgagctaatctccaaaagccgtctcagttcggattgttctctgcaactcgagagcatgaaggcggaatcgctagtaatcgcggatcagcatgccgcggtgaatacgttcccaggccttgtacacaccgcccgtcacaccatgggagttgggttcacccgaaggcgttgcgctaactcgcaagagaggcaggcgaccacggtgggcttagcgactggggtg

SEQ ID NO: 2256 - DNA, 1411 bp, unidentified
  source 1..1411: mol_type = unassigned DNA; note = Novosphingobium barchaimii
aacgaacgctggcggcatgcctaacacatgcaagtcgaacgagaccttcgggtctagtggcgcacgggtgcgtaacgcgtgggaatctgcccttgggttcggaataacagtgagaaattactgctaataccggatgatgtcttcggaccaaagatttatcgcccagggatgagcccgcgtaggattaggtagttggtggggtaatggcctaccaagccgacgatccttagctggtctgagaggatgatcagccacactgggactgagacacggcccagactcctacgggaggcagcagtggggaatattggacaatgggcgaaagcctgatccagcaatgccgcgtgagtgatgaaggccttagggttgtaaagctcttttaccagggatgataatgacagtacctggagaataagctccggctaactccgtgccagcagccgcggtaatacggagggagctagcgttgttcggaattactgggcgtaaagcgcgcgtaggcggttactcaagtcagaggtgaaagcccggggctcaaccccggaactgcctttgaaactaggtaactagaatcttggagaggtcagtggaattccgagtgtagaggtgaaattcgtagatattcggaagaacaccagtggcgaaggcgactgactggacaagtattgacgctgaggtgcgaaagcgtggggagcaaacaggattagataccctggtagtccacgccgtaaacgatgataactagctgtccgggtacttggtacttgggtggcgcagctaacgcattaagttatccgcctggggagtacggtcgcaagattaaaactcaaaggaattgacgggggcctgcacaagcggtggagcatgtggtttaattcgaagcaacgcgcagaaccttaccagcgtttgacatcctcatcgcggattagagagatcttttccttcagttcggctggatgagtgacaggtgctgcatggctgtcgtcagctcgtgtcgtgagatgttgggttaagtcccgcaacgagcgcaaccctcgtccttagttgccatcatttagttgggcactctaaggaaactgccggtgataagccggaggaaggtggggatgacgtcaagtcctcatggcccttacacgctgggctacacacgtgctacaatggcggtgacagtgggcagcaagcacgcgagtgtgagctaatctccaaaagccgtctcagttcggattgttctctgcaactcgagagcatgaaggcggaatcgctagtaatcgcggatcagcatgccgcggtgaatacgttcccaggccttgtacacaccgcccgtcacaccatgggagttggattcactcgaaggcgttgagctaacccgcaagggaggcaggcgaccacagtgggtttagcgactggggtg

SEQ ID NO: 2257 - DNA, 1405 bp, unidentified
  source 1..1405: mol_type = unassigned DNA; note = Novosphingobium fuchskuhlense
aacgaacgctggcggcatgcctaacacatgcaagtcgaacgagaccttcgggtctagtggcgcacgggtgcgtaacgcgtgggaatctgccctttgcttcggaataacagttagaaatgactgctaataccggatgatgtcttcggaccaaagatttatcggcaaaggatgagcccgcgtaggattaggtagttggtggggtaaaggcctaccaagccgacgatccttagctggtctgagaggatgatcagccacactgggactgagacacggcccagactcctacgggaggcagcagtggggaatattggacaatgggcgaaagcctgatccagcaatgccgcgtgagtgatgaaggccttcgggtcgtaaagctcttttaccagggatgataatgacagtacctggagaataagctccggctaactccgtgccagcagccgcggtaatacggagggagctagcgttgttcggaattactgggcgtaaagagtacgtaggcggttattcaagtcagaggtgaaagcccggggctcaaccccggaactgcctttgaaactagataactagagtcttggagaggttagtggaattccgagtgtagaggtgaaattcgtagatattcggaagaacaccagtggcgaaggcgactaactggacaagtactgacgctgaggtacgaaagcgtggggagcaaacaggattagataccctggtagtccacgccgtaaacgatgataactagttgttcggtcacttggtgactgagtgacgcagctaacgcattaagttatccgcctggggagtacggtcgcaagattaaaactcaaaggaattgacgggggcctgcacaagcggtggagcatgtggtttaattcgaagcaacgcgcagaaccttaccagcgtttgacatcccgcgctacccagagagatttggggttcccttcggggacgcggtgacaggtgctgcatggctgtcgtcagctcgtgtcgtgagatgttgggttaagtcccgcaacgagcgcaaccctcgtccttagttgccatcattcagttgggcactctaaggaaaccgccggtgataagccggaggaaggtggggatgacgtcaagtcctcatggcccttacacgctgggctacacacgtgctacaatggcggtgacagtgggcagcaaactcgcgagggtgagctaatctccaaaagccgtctcagttcggattgttctctgcaactcgagagcatgaaggcggaatcgctagtaatcgcggatcagcatgccgcggtgaatacgttcccaggccttgtacacaccgcccgtcacaccatgggagttggtttcacccgaaggcagtgcgctaaccgcaaggaggcagctgaccacggtgggatcagcgactggggtg

SEQ ID NO: 2258 - DNA, 1407 bp, unidentified
  source 1..1407: mol_type = unassigned DNA; note = Novosphingobium ginsenosidimutans
aacgaacgctggcggcatgcctaacacatgcaagtcgaacgaacccttcggggttagtggcgcacgggtgcgtaacacgtgggaatctgccctttgcttcggaataacagttagaaatgactgctaataccggatgatgtcgaaagaccaaagatttatcggcaaaggatgagcccgcgtaggattaggtagttggtggggtaaaggcctaccaagccgacgatccttagctggtctgagaggatgatcagccacactgggactgagacacggcccagactcctacgggaggcagcagtggggaatattggacaatgggcgaaagcctgatccagcaatgccgcgtgagtgatgaaggccttagggttgtaaagctcttttaccagggatgataatgacagtacctggagaataagctccggctaactccgtgccagcagccgcggtaatacggagggagctagcgttgttcggaattactgggcgtaaagcgcacgtaggcggctactcaagtcagaggtgaaagcccggggctcaaccccggaactgcctttgaaactaggtagctagaatcttggagaggtcagtggaattccgagtgtagaggtgaaattcgtagatattcggaagaacaccagtggcgaaggcgactgactggacaagtattgacgctgaggtgcgaaagcgtggggagcaaacaggattagataccctggtagtccacgccgtaaacgatgataactagctgtccgggcacttggtgcttgggtggcgcagctaacgcattaagttatccgcctggggagtacggtcgcaagattaaaactcaaaggaattgacgggggcctgcacaagcggtggagcatgtggtttaattcgaagcaacgcgcagaaccttaccagcctttgacatcccgcgctacaaccagagatggttggttcccttcggggacgcggtgacaggtgctgcatggctgtcgtcagctcgtgtcgtgagatgttgggttaagtcccgcaacgagcgcaaccctcgtccttagttgccatcattcagttgggcactctaaggaaaccgccggtgataagccggaggaaggtggggatgacgtcaagtcctcatggcccttacaggctgggctacacacgtgctacaatggcggtgacagtgggcagccacctcgcgagagggagctaatcccaaaaagccgtctcagttcggattgttctctgcaactcgagagcatgaaggcggaatcgctagtaatcgcggatcagcatgccgcggtgaatacgttcccaggccttgtacacaccgcccgtcacaccatgggagttgggttcacccgaaggcgttgcgctaactcgcaagagaggcaggcgaccacggtgggcttagcgactggggtg

SEQ ID NO: 2259 - DNA, 1411 bp, unidentified
  source 1..1411: mol_type = unassigned DNA; note = Novosphingobium guangzhouense
aacgaacgctggcggcatgcctaacacatgcaagtcgaacgatcccttcggggatagtggcgcacgggtgcgtaacgcgtgggaatctgccctttgcttcggaataacagtgagaaattactgctaataccggatgatgtcttcggaccaaagatttatcggcaagggatgagcccgcgtaggattaggtagttggtggggtaatggcctaccaagccgacgatccttagctggtctgagaggatgatcagccacactgggactgagacacggcccagactcctacgggaggcagcagtggggaatattggacaatgggcgcaagcctgatccagcaatgccgcgtgagtgatgaaggccttagggttgtaaagctcttttaccagggatgataatgacagtacctggagaataagctccggctaactccgtgccagcagccgcggtaatacggagggagctagcgttgttcggaattactgggcgtaaagcgcgcgtaggcggttactcaagtcagaggtgaaagcccggggctcaaccccggaactgcctttgaaactaggtgactagaatcttggagaggtcagtggaattccgagtgtagaggtgaaattcgtagatattcggaagaacaccagtggcgaaggcgactgactggacaagtattgacgctgaggtgcgaaagcgtggggagcaaacaggattagataccctggtagtccacgccgtaaacgatgataactagctgtccggggacttggtctttgggtggcgcagctaacgcattaagttatccgcctggggagtacggtcgcaagattaaaactcaaaggaattgacgggggcctgcacaagcggtggagcatgtggtttaattcgaagcaacgcgcagaaccttaccagcgtttgacatcctcatcgcggattagagagatcttttccttcagttcggctggatgagtgacaggtgctgcatggctgtcgtcagctcgtgtcgtgagatgttgggttaagtcccgcaacgagcgcaaccctcgtccttagttgccagcatttagttgggcactctaaggaaactgccggtgataagccggaggaaggtggggatgacgtcaagtcctcatggcccttacacgctgggctacacacgtgctacaatggcggtgacagtgggcagcaagcaggcgactgcaagctaatctccaaaagccgtctcagttcggattgttctctgcaactcgagagcatgaaggcggaatcgctagtaatcgcggatcagcatgccgcggtgaatacgttcccaggccttgtacacaccgcccgtcacaccatgggagttggattcactcgaaggcgttgagctaacccgcaagggaggcaggcgaccacagtgggtttagcgactggggtg

SEQ ID NO: 2260 - DNA, 1409 bp, unidentified
  source 1..1409: mol_type = unassigned DNA; note = Novosphingobium kunmingense
aacgaacgctggcggcatgcctaacacatgcaagtcgaacgaagccttcgggcttagtggcgcacgggtgcgtaacgcgtgggaacctgcctttcggttcggaataacagttagaaatgactgctaataccggatgatgtcttcggaccaaagatttatcgccgaaagatgggcccgcgtaggattagctagttggtggggtaaaggctcaccaaggcgacgatccttagctggtctgagaggatgatcagccacactgggactgagacacggcccagactcctacgggaggcagcagtggggaatattggacaatgggcgaaagcctgatccagcaatgccgcgtgagtgatgaaggccttagggttgtaaagctcttttaccagggatgataatgacagtacctggagaataagctccggctaactccgtgccagcagccgcggtaatacggagggagctagcgttgttcggaattactgggcgtaaagcgcacgtaggcggcgactcaagtcagaggtgaaagcccggggctcaaccccggaactgcctttgaaactaggtcgctagaatcttggagaggtcagtggaattccgagtgtagaggtgaaattcgtagatattcggaagaacaccagtggcgaaggcgactgactggacaagtattgacgctgaggtgcgaaagcgtggggagcaaacaggattagataccctggtagtccacgccgtaaacgatgataactagctgtccgggcacttggtgcttgggtggcgcagctaacgcattaagttatccgcctggggagtacggtcgcaagattaaaactcaaaggaattgacgggggcctgcacaagcggtggagcatgtggtttaattcgaagcaacgcgcagaaccttaccagcctttgacatcctaggacgacttctggagacagatttcttcccttcggggacctagtgacaggtgctgcatggctgtcgtcagctcgtgtcgtgagatgttgggttaagtcccgcaacgagcgcaaccctcgtccttagttgccatcattcagttgggcactctaaggaaaccgccggtgataagccggaggaaggtggggatgacgtcaagtcctcatggcccttacaggctgggctacacacgtgctacaatggcggtgacagtgggcagccactacgcgagtaggagctaatcccaaaaagccgtctcagttcggattgttctctgcaactcgagagcatgaaggcggaatcgctagtaatcgcggatcagcatgccgcggtgaatacgttcccaggccttgtacacaccgcccgtcacaccatgggagttgggttcacccgaaggcgttgcgctaactcgcaagagaggcaggcgaccacggtgggcttagcgactggggtg

SEQ ID NO: 2261 - DNA, 1411 bp, unidentified
  source 1..1411: mol_type = unassigned DNA; note = Novosphingobium lindaniclasticum
aacgaacgctggcggcatgcctaacacatgcaagtcgaacgagaccttcgggtctagtggcgcacgggtgcgtaacgcgtgggaatctgcccttgggttcggaataacagtgagaaattactgctaataccggatgatgtcttcggaccaaagatttatcgcccagggatgagcccgcgtaggattagctagttggtggggtaatggcctaccaaggcgacgatccttagctggtctgagaggatgatcagccacactgggactgagacacggcccagactcctacgggaggcagcagtggggaatattggacaatgggcgcaagcctgatccagcaatgccgcgtgagtgatgaaggccttagggttgtaaagctcttttacccgggatgataatgacagtaccgggagaataagctccggctaactccgtgccagcagccgcggtaatacggagggagctagcgttgttcggaattactgggcgtaaagcgcgcgtaggcggctgctcaagtcagaggtgaaagcccggggctcaaccccggaactgcctttgaaactaggtagctagaatcttggagaggtcagtggaattccgagtgtagaggtgaaattcgtagatattcggaagaacaccagtggcgaaggcgactgactggacaagtattgacgctgaggtgcgaaagcgtggggagcaaacaggattagataccctggtagtccacgccgtaaacgatgataactagctgtccgggcacttggtgcttgggtggcgcagctaacgcattaagttatccgcctggggagtacggtcgcaagattaaaactcaaaggaattgacgggggcctgcacaagcggtggagcatgtggtttaattcgaagcaacgcgcagaaccttaccagcgtttgacatcctcatcgcggatttgagagatcatttccttcagttcggctggatgagtgacaggtgctgcatggctgtcgtcagctcgtgtcgtgagatgttgggttaagtcccgcaacgagcgcaaccctcgtccttagttgccagcatttggttgggcactctaaggaaactgccggtgataagccggaggaaggtggggatgacgtcaagtcctcatggcccttacacgctgggctacacacgtgctacaatggcggtgacagtgggcagcaagcaggcgactgcaagctaatctccaaaagccgtctcagttcggattgttctctgcaactcgagagcatgaaggcggaatcgctagtaatcgcggatcagcatgccgcggtgaatacgttcccaggccttgtacacaccgcccgtcacaccatgggagttggattcactcgaaggcgttgagctaactcgcaagagaggcaggcgaccacagtgggtttagcgactggggtg

SEQ ID NO: 2262 - DNA, 1411 bp, unidentified
  source 1..1411: mol_type = unassigned DNA; note = Novosphingobium malaysiense
aacgaacgctggcggcatgcctaacacatgcaagtcgaacgaacccttcggggttagtggcgcacgggtgcgtaacgcgtgggaatctgcccttcggttcggaataactcagggaaacttgagctaataccggatgatgtcttcggaccaaagatttatcgccgaaggatgagcccgcgttagattaggtagttggtggggtaatggcctaccaagccgacgatctatagctggtctgagaggatgatcagccacactgggactgagacacggcccagactcctacgggaggcagcagtggggaatattggacaatgggcgaaagcctgatccagcaatgccgcgtgagtgatgaaggccctagggttgtaaagctcttttaccagggatgataatgacagtacctggagaataagctccggctaactccgtgccagcagccgcggtaatacggagggagctagcgttgttcggaattactgggcgtaaagcgcgcgtaggcggtttttcaagtcagaggtgaaagcccggggctcaaccccggaactgcctttgaaactggatgactagaatcttggagaggcgagtggaattccgagtgtagaggtgaaattcgtagatattcggaagaacaccagtggcgaaggcgactcgctggacaagtattgacgctgaggtgcgaaagtgtggggagcaaacaggattagataccctggtagtccacaccgtaaacgatgataactagctgtccgggctcttggagtttgggtggcgcagctaacgcattaagttatccgcctggggagtacggtcgcaagattaaaactcaaaggaattgacgggggcctgcacaagcggtggagcatgtggtttaattcgaagcaacgcgcagaaccttaccagcctttgacatcctggtcgcgattggcagagatgcctttcttcagttcggctggaccagtgacaggtgctgcatggctgtcgtcagctcgtgtcgtgagatgttgggttaagtcccgcaacgagcgcaaccctcgtccttagttgccaccatttagttgggcactctaaggaaactgccggtgataagccggaggaaggtggggatgacgtcaagtcctcatggcccttacaggctgggctacacacgtgctacaatggcggtgacagtgggcagcgagcacgcgagtgtgagctaatctccaaaagccgtctcagttcggattgttctctgcaactcgagagcatgaaggcggaatcgctagtaatcgcggatcagcatgccgcggtgaatacgttcccaggccttgtacacaccgcccgtcacaccatgggagttggtttcacccgaaggcgctgcgttaacccgcaagggagacaggcgaccacggtgggatcagcgactggggtg

SEQ ID NO: 2263 - DNA, 1411 bp, Novosphingobium mathurense
  source 1..1411: mol_type = unassigned DNA
aacgaacgctggcggcatgcctaacacatgcaagtcgaacgagaccttcgggtctagtggcgcacgggtgcgtaacgcgtgggaatctgccctttgcttcggaataacagtgagaaattactgctaataccggatgatgtcttcggaccaaagatttatcggcaagggatgagcccgcgtaggattagctagttggtggggtaatggcctaccaaggcgacgatccttagctggtctgagaggatgatcagccacactgggactgagacacggcccagactcctacgggaggcagcagtggggaatattggacaatgggcgaaagcctgatccagcaatgccgcgtgagtgatgaaggccttagggttgtaaagctcttttaccagggatgataatgacagtacctggagaataagctccggctaactccgtgccagcagccgcggtaatacggagggagctagcgttgttcggaattactgggcgtaaagcgcgcgtaggcggttactcaagtcagaggtgaaagcccggggctcaaccccggaactgcctttgaaactaggtgactagaatcttggagaggtcagtggaattccgagtgtagaggtgaaattcgtagatattcggaagaacaccagtggcgaaggcgactgactggacaagtattgacgctgaggtgcgaaagcgtggggagcaaacaggattagataccctggtagtccacgccgtaaacgatgataactagctgtccgggcacatggtgtttgggtggcgcagctaacgcattaagttatccgcctggggagtacggtcgcaagattaaaactcaaaggaattgacgggggcctgcacaagcggtggagcatgtggtttaattcgaagcaacgcgcagaaccttaccagcgtttgacatcctgatcgcggattagagagatcttttccttcagttcggctggatcagtgacaggtgctgcatggctgtcgtcagctcgtgtcgtgagatgttgggttaagtcccgcaacgagcgcaaccctcgtccttagttgccatcatttggttgggcactctaaggaaactgccggtgataagccggaggaaggtggggatgacgtcaagtcctcatggcccttacacgctgggctacacacgtgctacaatggcggtgacagtgggcagcaagtgcgcgagcacaagctaatctccaaaagccgtctcagttcggattgttctctgcaactcgagagcatgaaggcggaatcgctagtaatcgcggatcagcatgccgcggtgaatacgttcccaggccttgtacacaccgcccgtcacaccatgggagttggtttcacccgaaggtagtgcgctaaccggcaacggaggcagctaaccacggtgggatcagcgactggggtg

SEQ ID NO: 2264 - DNA, 1384 bp, Novosphingobium nitrogenifigens
  source 1..1384: mol_type = unassigned DNA
aacgaacgctggcggcatgcctaacacatgcaagtcgaacgatgccttcgggcatagtggcgcacgggtgcgtaacgcgtgggaatctgcctttgggtctgggataactcagggaaacttgagctaataccggatgatgactttggtccaaagatttatcgcccaaagatgagcccgcgtaggattagctagttggtggggtaaaggcctaccaaggcgacgatccttagctggtctgagaggatgatcagccacactgggactgagacacggcccagactcctacgggaggcagcagtggggaatattggacaatgggcgaaagcctgatccagcaatgccgcgtgagtgatgaaggccttcgggtcgtaaagctcttttacccgggatgataatgacagtaccgggagaataagctccggctaactccgtgccagcagccgcggtaatacggagggagctagcgttgttcggaattactgggcgtaaagcgcacgtaggcggctactcaagtcagaggtgaaagcccggggctcaaccccggaactgcctttgaaactaggtggctagaatcttggagaggcgagtggaattccgagtgtagaggtgaaattcgtagatattcggaagaacaccagtggcgaaggcgactcgctggacaagtattgacgctgaggtgcgaaagcgtggggagcaaacaggattagataccctggtagtccacgccgtaaacgatgataactagctgtccgggcacatggtgtttgggtggcgcagctaacgcattaagttatccgcctggggagtacggtcgcaagattaaaactcaaaggaattgacgggggcctgcacaagcggtggagcatgtggtttaattcgaagcaacgcgcagaaccttaccagcgtttgacatcctacgctacccagagagatttggggttcccttcggggacgtagagacaggtgctgcatggctgtcgtcagctcgtgtcgtgagatgttgggttaagtcccgcaacgagcgcaaccctcgtccttagttgccatcatttagttgggcactctaaggaaaccgccggtgataagccggaggaaggtggggatgacgtcaagtcctcatggcccttacacgctgggctacacacgtgctacaatggcggtgacagtgggaaaatccccaaaaaccgtctcagttcggattgtcctctgcaactcgagggcatgaaggcggaatcgctagtaatcgcggatcagcatgccgcggtgaatacgttcccaggccttgtacacaccgcccgtcacaccatgggagttggtttcacccgaaggcagtgcgctaaccgcaaggaggcagctgaccacggtgggatcagcgactggggtg

SEQ ID NO: 2265 - DNA, 1411 bp, Novosphingobium pentaromativorans
  source 1..1411: mol_type = unassigned DNA
aacgaacgctggcggcatgcctaacacatgcaagtcgaacgagaccttcgggtctagtggcgcacgggtgcgtaacgcgtgggaatctgcccttcggttcggaataactcagggaaacttgagctaataccggataatgacttcggtccaaagatttattgccgagggatgagcccgcgtaggattagctagttggtggggtaatggcctaccaaggcgacgatccttagctggtctgagaggatgatcagccacactgggactgagacacggcccagactcctacgggaggcagcagtggggaatattggacaatgggcgaaagcctgatccagcaatgccgcgtgagtgatgaaggccttagggttgtaaagctcttttaccagggatgataatgacagtacctggagaataagctccggctaactccgtgccagcagccgcggtaatacggagggagctagcgttgttcggaattactgggcgtaaagcgcgcgtaggcggttactcaagtcagaggtgaaagcccggggctcaaccccggaactgcctttgaaactaggtgactagaatcttggagaggtcagtggaattccgagtgtagaggtgaaattcgtagatattcggaagaacaccagtggcgaaggcgactgactggacaagtattgacgctgaggtgcgaaagcgtggggagcaaacaggattagataccctggtagtccacgccgtaaacgatgataactagctgtccgggcacatggtgtttgggtggcgcagctaacgcattaagttatccgcctggggagtacggtcgcaagattaaaactcaaaggaattgacgggggcctgcacaagcggtggagcatgtggtttaattcgaagcaacgcgcagaaccttaccagcgtttgacatcctgatcgcggattagagagatcttttccttcagttcggctggatcagtgacaggtgctgcatggctgtcgtcagctcgtgtcgtgagatgttgggttaagtcccgcaacgagcgcaaccctcgtccttagttgccatcatttggttgggcactctaaggaaactgccggtgataagccggaggaaggtggggatgacgtcaagtcctcatggcccttacacgctgggctacacacgtgctacaatggcggtgacagtgggcagcgagtgcgcgagcacaagctaatctccaaaagccgtctcagttcggattgttctctgcaactcgagagcatgaaggcggaatcgctagtaatcgcggatcagcatgccgcggtgaatacgttcccaggccttgtacacaccgcccgtcacaccatgggagttggtttcacccgaaggtagtgcgctaaccggcaacggaggcagctaaccacggtgggatcagcgactggggtg

SEQ ID NO: 2266 - DNA, 1411 bp, Novosphingobium resinovorum
  source 1..1411: mol_type = unassigned DNA
aacgaacgctggcggcatgcctaacacatgcaagtcgaacgagatcttcggatctagtggcgcacgggtgcgtaacgcgtgggaatctgcccttgggttcggaataacagtgagaaattactgctaataccggatgatgtcttcggaccaaagatttatcgcccagggatgagcccgcgtaggattaggtagttggtggggtaatggcctaccaagccgacgatccttagctggtctgagaggatgatcagccacactgggactgagacacggcccagactcctacgggaggcagcagtggggaatattggacaatgggcgaaagcctgatccagcaatgccgcgtgagtgatgaaggccttagggttgtaaagctcttttaccagggatgataatgacagtacctggagaataagctccggctaactccgtgccagcagccgcggtaatacggagggagctagcgttgttcggaattactgggcgtaaagcgcgcgtaggcggttactcaagtcagaggtgaaagcccggggctcaaccccggaactgcctttgaaactaggtgactagaatcttggagaggtcagtggaattccgagtgtagaggtgaaattcgtagatattcggaagaacaccagtggcgaaggcgactgactggacaagtattgacgctgaggtgcgaaagcgtggggagcaaacaggattagataccctggtagtccacgccgtaaacgatgataactagctgtccgggtacttggtacttgggtggcgcagctaacgcattaagttatccgcctggggagtacggtcgcaagattaaaactcaaaggaattgacgggggcctgcacaagcggtggagcatgtggtttaattcgaagcaacgcgcagaaccttaccagcgtttgacatgccggtcgcggatttgggagaccatttccttcagttcggctggaccgtgcacaggtgctgcatggctgtcgtcagctcgtgtcgtgagatgttgggttaagtcccgcaacgagcgcaaccctcgtccttagttgccagcattgagttgggcactctaaggaaactgccggtgataagccggaggaaggtggggatgacgtcaagtcctcatggcccttacacgctgggctacacacgtgctacaatggcggtgacagtgggcagcaagcacgcgagtgtgagctaatctccaaaagccgtctcagttcggattgttctctgcaactcgagagcatgaaggcggaatcgctagtaatcgcggatcagcatgccgcggtgaatacgttcccaggccttgtacacaccgcccgtcacaccatgggagttggattcactcgaaggcgttgagctaacccgcaagggaggcaggcgaccacagtgggtttagcgactggggtg

SEQ ID NO: 2267 - DNA, 1363 bp, unidentified
  source 1..1363: mol_type = unassigned DNA; note = Novosphingobium sediminis
ggcggcatgcctaacacatgcaagtcgaacgagaccttcgggtctagtggcgcacgggtgcgtaacgcgtgggaatctgccctttgcttcggaataacagttagaaatgactgctaataccggatgatgtcttcggaccaaagatttatcggcaaaggatgagcccgcgtaggattaggtagttggtggggtaaaggcctaccaagccgacgatccttagctggtctgagaggatgatcagccacactgggactgagacacggcccagactcctacgggaggcagcagtggggaatattggacaatgggcgaaagcctgatccagcaatgccgcgtgagtgatgaaggccttcgggtcgtaaagctcttttaccagggatgataatgacagtacctggagaataagctccggctaactccgtgccagcagccgcggtaatacggagggagctagcgttgttcggaattactgggcgtaaagagtacgtaggcggttattcaagtcagaggtgaaagcccggggctcaaccccggaactgcctttgaaactagataactagagtcttggagaggttagtggaattccgagtgtagaggtgaaattcgtagatattcggaagaacaccagtggcgaaggcgactaactggacaagtactgacgctgaggtacgaaagcgtggggagcaaacaggattagataccctggtagtccacgccgtaaacgatgataactagttgttcggtcacttggtgactgagtgacgcagctaacgcattaagttatccgcctggggagtacggtcgcaagattaaaactcaaaggaattgacgggggcctgcacaagcggtggagcatgtggtttaattcgaagcaacgcgcagaaccttaccagcgtttgacatcccgcgctacttccagagatggaaggttcccttcggggacgcggtgacaggtgctgcatggctgtcgtcagctcgtgtcgtgagatgttgggttaagtcccgcaacgagcgcaaccctcgtccttagttgccatcattaagttgggcactctaaggaaaccgccggtgataagccggaggaaggtggggatgacgtcaagtcctcatggcccttacacgctgggctacacacgtgctacaatggcggtgacagtgggcagcaaactcgcgagggtgagctaatctccaaaagccgtctcagttcggattgttctctgcaactcgagagcatgaaggcggaatcgctagtaatcgcggatcagcatgccgcggtgaatacgttcccaggccttgtacacaccgcccgtcacaccatgggagttggtttcacccgaaggcagtgcgctaaccgcaaggaggc

SEQ ID NO: 2268 - DNA, 1407 bp, Novosphingobium subterraneum
  source 1..1407: mol_type = unassigned DNA
aacgaacgctggcggcatgcctaacacatgcaagtcgaacgaacccttcggggttagtggcgcacgggtgcgtaacgcgtgggaatctgccctttgcttcggaataacagttagaaatgactgctaataccggatgatgtcttcggaccaaagatttatcggcaagggatgagcccgcgtaggattaggtagttggtggggtaaaggcctaccaagccgacgatccttagctggtctgagaggatgatcagccacactgggactgagacacggcccagactcctacgggaggcagcagtggggaatattggacaatgggcgcaagcctgatccagcaatgccgcgtgagtgatgaaggccttcgggtcgtaaagctcttttaccagggatgataatgacagtacctggagaataagctccggctaactccgtgccagcagccgcggtaatacggagggagctagcgttgttcggaattactgggcgtaaagcgcacgtaggcggcgacacaagtcagaggtgaaagcccggggctcaaccccggaactgcctttgaaactaggttgctagaatcttggagaggtcagtggaattccgagtgtagaggtgaaattcgtagatattcggaagaacaccagtggcgaaggcgactgactggacaagtattgacgctgaggtgcgaaagcgtggggagcaaacaggattagataccctggtagtccacgccgtaaacgatgataactagctgtccgggcacttggtgtttgggtggcgcagctaacgcattaagttatccgcctggggagtacggtcgcaagattaaaactcaaaggaattgacgggggcctgcacaagcggtggagcatgtggtttaattcgaagcaacgcgcagaaccttaccagcgtttgacatcccgcgctatcacaagagattgtgagttcccttcggggacgcggtgacaggtgctgcatggctgtcgtcagctcgtgtcgtgagatgttgggttaagtcccgcaacgagcgcaaccctcgtccttagttgccatcattcagttgggcactctaaggaaaccgccggtgataagccggaggaaggtggggatgacgtcaagtcctcatggcccttacacgctgggctacacacgtgctacaatggcggtgacagtgggcagcaagcacgcgagtgtgagctaatctccaaaagccgtctcagttcggattgttctctgcaactcgagagcatgaaggcggaatcgctagtaatcgcggatcagcatgccgcggtgaatacgttcccaggccttgtacacaccgcccgtcacaccatgggagttgggttcacccgaaggcgttgcgctaactcgcaagagaggcaggcgaccacggtgggcttagcgactggggtg

SEQ ID NO: 2269 - DNA, 1340 bp, Novosphingobium taihuense
  source 1..1340: mol_type = unassigned DNA
ctaacacatgcaagtcgaacgaacccttcggggttagtggcgcacgggtgcgtaacgcgtgggaatctgccctttggttcggaataacagttagaaatgactgctaataccggatgatgacttcggtccaaagatttatcgccagaggatgagcccgcgtaggattaggtagttggtggggtaaaggcctaccaagccgacgatccttagctggtctgagaggatgatcagccacactgggactgagacacggcccagactcctacgggaggccgcagtggggaatattggacaatgggcgaaagcctgatccagcaatgccgcgtgagtgatgaaggccttcgggtcgtaaagctcttttacccgggatgataatgacagtaccgggagaataagctccggctaactccgtgccagcagccgcggtaatacggagggagctagcgttgttcggaattactgggcgtaaagcgcacgtaggcggttattcaagtcagaggtgaaagcccggggctcaaccccggaactgcctttgaaactagatgactggaatcttggagaggtcagtggaattccgagtgtagaggtgaaattcgtagatattcggaagaacaccagtggcgaaggcgactgactggacaagtattgacgctgaggtgggaaagcgtggggagcaaacaggattagataccctggtagtccacgccgtaaacgatgataactagctgtccgggtacttggtatttgggtggcgcagctaacgcattaagttatccgcctgggagtacggtcgcaagattaaactcaaaggaattgacgggggcctgcacaagcggtggagcatgtggtttaattcgaagcaacgcgcagaaccttaccagcgtttgacatcccgcgctatccagagagatttggagttcccttcggggacgcggtgacaggtgctgcatggctgtcgtcagctcgtgtcgtgagatgttgggttaagtcccgcaacgagcgcaaccctcgtccttagttgccatcattcagttgggcactctaaggaaaccgccggtgataagccggaggaaggtggggatgacgtcaagtcctcatggcccttacacgctgggctacacacgtgctacaatggcggtgacagtgggcagcaagcacgcgagtgtgagctaatctccaaaagccgtctcagttcggattgttctctgcaactcgagagcatgaaggcggaatcgctagtaatcgcggatcagcatgccgcggtgaatacgttcccaggccttgtacacaccgcccgtcacaccatgggagttggtttcacccgaaggcagtgcgctaac

SEQ ID NO: 2270 - DNA, 1407 bp, Novosphingobium tardaugens
  source 1..1407: mol_type = unassigned DNA
aacgaacgctggcggcatgcctaacacatgcaagtcgaacgaacccttcggggttagtggcgcacgggtgcgtaacgcgtgggaacctgcctttaggttcggaataacagttagaaatgactgctaataccggatgatgtcttcggaccaaagatttatcgcctttagatgggcccgcgttggattagctagttggtggggtaaaggcctaccaaggcgacgatccatagctggtctgagaggatgatcagccacactgggactgagacacggcccagactcctacgggaggcagcagtggggaatattggacaatgggcgaaagcctgatccagcaatgccgcgtgagtgatgaaggccttagggttgtaaagctcttttaccagggatgataatgacagtacctggagaataagctccggctaactccgtgccagcagccgcggtaatacggagggagctagcgttgttcggaattactgggcgtaaagcgcgcgtaggcggctatttaagtcaggggtgaaatcccggggctcaaccccggaactgcctttgaaactggatagctagaatcttggagaggtcagtggaattccgagtgtagaggtgaaattcgtagatattcggaagaacaccagtggcgaaggcgactgactggacaagtattgacgctgaggtgcgaaagcgtggggagcaaacaggattagataccctggtagtccacgccgtaaacgatgataactagctgtccgggctcatggagtttgggtggcgcagctaacgcattaagttatccgcctggggagtacggtcgcaagattaaaactcaaaggaattgacgggggcctgcacaagcggtggagcatgtggtttaattcgaagcaacgcgcagaaccttaccagcgtttgacatcccgcgctaacccaagagattgggtgttcccttcggggacgcggtgacaggtgctgcatggctgtcgtcagctcgtgtcgtgagatgttgggttaagtcccgcaacgagcgcaaccctcgtccttagttgccatcattaagttgggcactctaaggaaaccgccggtgataagccggaggaaggtggggatgacgtcaagtcctcatggcccttacacgctgggctacacacgtgctacaatggcggtgacagtgggcagcaacctcgcgaggggtagctaatctccaaaaaccgtctcagttcggattgttctctgcaactcgagagcatgaaggcggaatcgctagtaatcgcggatcagcatgccgcggtgaatacgttcccaggccttgtacacaccgcccgtcacaccatgggagttgggttcacccgaaggcgttgcgctaactcgcaagagaggcaggcgaccacggtgggcttagcgactggggtg

SEQ ID NO: 2271 - DNA, 1468 bp, unidentified
  source 1..1468: mol_type = unassigned DNA; note = Oblitimonas alkaliphila
attgaacgctggcggcaggcctaacacatgcaagtcgagcggtaacagagagaagcttgcttctctgctgacgagcggcggacgggtgagtaaagcctaggaatctgcctagtagtgggggataacttgccgaaaggtaagctaataccgcgtacgtcctacgggagaaagcaggggcctcttcggagccttgcgctattagatgagcctaggtcagattagctagttggtgaggtaaaggctcaccaaggcgacgatctgtaactggtctgagaggatgatcagtcacactggaactgagacacggtccagactcctacgggaggcagcagtggggaatattggacaatgggggaaaccctgatccagccatgccgcgtgtgtgaagaaggtcttcggattgtaaagcactttaagttgggaggaagggcttacggttaatacccgctaagttttgacgttaccaacagaataagcaccggctaacttcgtgccagcagccgcggtaatacgaagggtgcaagcgttaatcggaattactgggcgtaaagcgcgcgtaggtggtttgttaagttggaagtgaaagccccgggctcaacctgggaattgctttcaaaactagcaggctagagtacagtagagggtagtggaatttcctgtgtagcggtgaaatgcgtagatataggaaggaacatcagtggcgaaggcgactacctggactgatactgacactgaggtgcgaaagcgtggggagcaaacaggattagataccctggtagtccacgccgtaaacgatgtcaactagttgttgggttccttgagaacttagtaacgcagctaacgcattaagttgaccgcctggggagtacggccgcaaggttaaaactcaaatgaattgacgggggcccgcacaagcggtggagcatgtggtttaattcgaagcaacgcgaagaaccttacctggccttgacatgtagcgaactttctagagatagatgggtgccttcgggaacgctaacacaggtgctgcatggctgtcgtcagctcgtgtcgtgagatgttgggttaagtcccgtaacgagcgcaacccttgtccttagttaccagcacgttatggtgggcactctaaggagactgccggtgacaaaccggaggaaggtggggatgacgtcaagtcatcatggcccttacggccagggctacacacgtgctacaatggtcggtacaacgggttgccaagccgcgaggtggagctaatctcataaagccgatcgtagtccggatcgcagtctgcaactcgactgcgtgaagtcggaatcgctagtaatcgcggatcagaatgccgcggtgaatacgttcccgggccttgtacacaccgcccgtcacaccatgggagtgggttgcaccagaagtagctagtctaactttcgagaggacggttaccacggtgtgattcatgactggggtg

SEQ ID NO: 2272 - DNA, 1410 bp, Oceanibaculum indicum
  source 1..1410: mol_type = unassigned DNA
aacgaacgctggcggcatgcttaacacatgcaagtcgaacgatctcttcggagatagtggcggacgggtgagtaacgcgtgggaacctgccccgaggtacggaataactcatggaaacgtgagctaataccgtatgtgacctgagggtgaaagatttatcgccttgggaggggcccgcgtcggattaggtagttggtggggtaatggcctaccaagcctgcgatccgtagctggtctgagaggatgatcagccacactggaacttagacacggtccagactcctacgggaggcagcagtggggaatattggacaatgggggcaaccctgatccagcaatgccgcgtgcgtgatgaaggccttagggttgtaaagcgctttcggcggggaagatgatgacggtacccgcagaagaagccccggctaactccgtgccagcagccgcggtaatacggagggggctagcgttgttcggaattactgggcgtaaagggcgcgtaggcggcgatttaagttaggcgtgaaagccccgggcttaacctgggaactgcgcttgatactggattgcttgaggacgggagagggtagtggaattcccagtgtagaggtgaaattcgtagatattgggaagaacaccagtggcgaaggcgactgcctggcccgttactgacgctgaggcgcgaaagcgtggggagcaaacaggattagataccctggtagtccacgccgtaaacgatgagtgctagacgttggggaacatggtttctcggtgtcgcagctaacgcattaagcactccgcctggggagtacggccgcaaggttaaaactcaaaggaattgacgggggcccgcacaagcggtggagcatgtggtttaattcgaagcaacgcgcagaaccttaccagcccttgacatggggagtttgggtcctggagacaggatccttcagttcggctggctcccgcacaggtgctgcatggctgtcgtcagctcgtgtcgtgagatgttgggttaagtcccgcaacgagcgcaacccccatctttagttgccatcggttcggccgggcactctagagaaactgccggtgacaagccggaggaaggcggggatgacgtcaagtcctcatggcccttatgggctgggctacacacgtgctacaatggcggtgacagagggcagcgagagggcgacctcaagctaatccctaaaaaccgtctcagttcggattgtactctgcaactcgagtgcatgaaggtggaatcgctagtaatcgcggatcagcatgccgcggtgaatacgttcccgggccttgtacacaccgcccgtcacaccatgggagttggttttacccgaagccggtgcgctaaccgcaaggaggcagccgaccacggtaaggtgagcgactggggtg

SEQ ID NO: 2273 - DNA, 1379 bp, Oceanibulbus indolifex
  source 1..1379: mol_type = unassigned DNA
ctcagaacgaacgctggcggcaggcctaacacatgcaagtcgagcgagaccttcgggtctagcggcggacgggttagtaacgcgtgggaacgtacccttctctgcggaatagccactggaaacggtgagtaataccgcatacgcccttcgggggaaagatttatcggagaaggatcggcccgcgttagattagatagttggtggggtaatggcctaccaagtctacgatctatagctggttttagaggatgatcagcaacactgggactgagacacggcccagactcctacgggaggcagcagtggggaatcttagacaatgggcgcaagcctgatctagccatgccgcgtgtgtgatgaaggtcttaggatcgtaaagcactttcgccagggatgataatgacagtccctggtaaagaaaccccggctacctccgtgccagcagccgcggtaatacggagggggttagcgttgttcggaattactgggcgtaaagcgtacgtaggcggatcagaaagtaaggggtgaaatcccagggctcaaccctggaactgcctcttaaactcctggtcttgagttcgagagaggtgagtggaattccaagtgtagaggtgaaattcgtagatatttggaggaacaccagtggcgaaggcggctcactggctcgatactgacgctgaggtacgaaagtgtggggagcaaacaggattagataccctggtagtccacaccgtaaacgatgaatgccagtcgtcgggcagtatactgttcggtgacacacctaacggattaagcattccgcctggggagtacggtcgcaagattaaaactcaaaggaattgacgggggcccgcacaagcggtggagcatgtggtttaattcgaagcaacgcgcagaaccttaccaacccttgacatcctgtgctaacccgagagatcgggcgttcacttcggtgacgcagtgacaggtgctgcatggctgtcgtcagctcgtgtcgtgagatgttcggttaagtccggcaacgagcgcaacccacatccttagttgccagcagttcggctgggcactctaaggaaactgcccgtgataagcgggaggaaggtgtggatgacgtcaagtcctcatggcccttacgggttgggctacacacgtgctacaatggcagtgacaatgggttaatccccaaaagctgtctcagttcggattggggtctgcaactcgaccccatgaagtcggaatcgctagtaatcgtggaacagcatgccacggtgaatacgttcccgggccttgtacacaccgcccgtcacaccatgggagttggttctacccgacggccgtgcgccaacctttcgaggaggcagcggaccacggtaggatca

SEQ ID NO: 2274 - DNA, 1389 bp, Oceanicaulis alexandrii
  source 1..1389: mol_type = unassigned DNA
aacgaacgctggcggaaggcttaacacatgcaagtcgagcgcacccttcggggtgagcggcagacgggtgagtaacgcgtgggaacgtgccctttggttcggaatagcccttggaaacgaggagtaatgccgaatgtgcccttcgggggaaagatttatcgccaaaggatcggcccgcgttagattagcttgttggtgaggtaacggctcaccaaggcgacgatctatagctggtctgagaggatgatcagccacactgggactgagacacggcccagactcctacgggaggcagcagtggggaatcttggacaatgggcgaaagcctgatccagccattccgcgtggatgatgaaggccctagggttgtaaaatcctttcggcagggaagataatgacggtacctgctaaagaagccccggctaactccgtgccagcagccgcggtaatacggagggggctagcgttgttcggaattactgggcgtaaagcgcacgtaggcggatcagtcagtcagaggtgaaatcccggagctcaacttcggaactgcctttgatactgctgatctagagtccgggagaggtgcatggaattccgagtgtagaggtgaaattcgtagatattcggaggaacaccagaggcgaaggcgatgcactggaccggtactgacgctgaggtgcgaaagcgtggggagcaaacaggattagataccctggtagtccacgccgtaaacgatgagagctagttgtctggcagcatgctgtcaggtgacgcagctaacgcattaagctctccgcctggggagtacggccgcaaggttaaaactcaaagaaattgacgggggcccgcacaagcggtggagcatgtggtttaattcgaagcaacgcgaagaaccttacctgcgcttgacatccctatcgcggattagagagatcttttccttcagctcggctggataggtgacaggtgctgcatggctgtcgtcagctcgtgtcgtgagatgttgggttaagtcccgcaacgagcgcaaccctcgccgttagttgccagcacgtttgggtgggcactctaacgggactgccggtgtcaaaccggaggaaggtggggatgacgtcaagtcatcatggcccttacgcgcagggctacacacgtgctacaatggcagtgacaatgagttaatctctaaaagctgtctcagttcgaattggggtctgcaactcgaccccatgaagtcggaatcgctagtaatcgtggatcagcatgccacggtgaatacgttcccgggccttgtacacaccgcccgtcacaccatgggagttggttctacccgacgacgctgcgctaaccttcgggaggcaggcggccacggtaggatcagcgactggggtg

SEQ ID NO: 2275 - DNA, 1458 bp, unidentified
  source 1..1458: mol_type = unassigned DNA; note = Oceanicoccus sagamiensis
attgaacgctggcggtaggcttaacacatgcaagtcgaacgtgaaagctcttcggagtgagtagagtggcggacgggtgagtaacgcgtaggaatctacctagtagtgggggacaacatgtggaaacgcatgctaataccgcatacgccctatgggggaaagtgtgggaccttcgggccacacgctattagatgagcctgcgtaagattagctagttggtgaggtaaaggctcaccaaggcgacgatctttagctggtctgagaggatgatcagccacactgggactgagacacggcccagactcctacgggaggcagcagtggggaatattgcgcaatgggggaaaccctgacgcagccataccgcgtgtgtgaagaaggccttagggttgtaaagcactttcagcgaggaggaaaggttgtacgttaatagcgtgcagctgtgacgttactcgcagaagaagcaccggctaattcagtgccagcagccgcggtaatactgaaggtgcaagcgttaatcggaattactgggcgtaaagcgcgcgtaggcggcttgttaagtcggatgtgaaagccctgggctcaacctgggaactgcatacgatactggcaagctagagtatgggagagggctgtggaatttctagtgtagcggtgaaatgcgtagatattagaaggaacatcagtggcgaaggcggcagcctggcccaatactgacgctgaggtgcgaaagcgtggggagcaaacaggattagataccctggtagtccacgccgtaaacgatgtctactagccgttggggaacttgattccttagtggcgcagctaacgcactaagtagaccgcctggggagtacggccgcaaggttaaaactcaaatgaattgacgggggcccgcacaagcggtggagcatgtggtttaattcgatgcaacgcgaagaaccttaccaggtcttgacatcccgagaagttactagagatagtttcgtgccttcgggaactcggtgacaggtgctgcatggctgtcgtcagctcgtgtcgtgagatgttgggttaagtcccgtaacgagcgcaacccttgtccttagttgctaacaggttaagctgagaactctaaggagactgccggtgacaaaccggaggaaggtggggacgacgtcaagtcatcatggcccttacgacctgggctacacacgtgctacaatggccagtacaaagggctgcaaaaccgcgaggtggagctaatcccataaaactggtcgtagtccggattggagtctgcaactcgactccatgaagtcggaatcgctagtaatcgtgaatcagaatgtcacggtgaatacgttcccgggccttgtacacaccgcccgtcacaccatgggagtgggttgctccagaagtggctagtctaactgcttgcagaggacggtcaccacggagtgattcatgactggggtg

SEQ ID NO: 2276 - DNA, 1465 bp, Oceanimonas baumannii
  source 1..1465: mol_type = unassigned DNA
attgaacgctggcggcaggcctaacacatgcaagtcgagcggtaacagagagtagcttgctactttgctgacgagcggcggacgggtgagtaatgcttggggatctgcccggtcgagggggataaccgttggaaacgacggctaataccgcatacgccctacgggggaaagcaggggaccttcgggccttgcgcgattggatgaacccaagtgagattagcttgttggtgaggtaacggctcaccaaggcgacgatctctagctggtctgagaggatgaccagtcacactgggactgagacacggcccagactcctacgggaggcagcagtggggaatattgcacaatgggggaaaccctgatgcagccatgccgcgtgtgtgaagaaggccttcgggttgtaaagcactttcagtggtgaggaaaggaggttggctaatacctgacctctgtgacgttaaccacagaagaagcaccggctaactccgtgccagcagccgcggtaatacggagggtgcaagcgttaatcggaataactgggcgtaaagcgcacgcaggcggtttgttaagccagatgtgaaagccccgggctcaacccgggaactgcatttggaactggcagactagagtcttggagaggggggtagaatttccggtgtagcggtgaaatgcgtagagatcggaaggaataccagtggcgaaggcggccccctggccaaagactgacgctcaggtgcgaaagcgtggggagcaaacaggattagataccctggtagtccacgccgtaaacgatgtcaacttggagtctgtgccatttgagcgcgggttccggagctaacgcgttaagttgaccgcctggggagtacggccgcaaggttaaaactcaaatgaattgacgggggcccgcacaagcggtggagcatgtggtttaattcgatgcaacgcgaagaaccttacctacccttgacatacagcgaacttggcagagatgccttggtgccttcgggaacgctgatacaggtgctgcatggctgtcgtcagctcgtgtcgtgagatgttgggttaagtcccgcaacgagcgcaacccttgtccttttttgccagcgggtgatgccgggaactcaaaggagactgccggtgataaaccggaggaaggtggggacgacgtcaagtcatcatggcccttacgggtagggctacacacgtgctacaatggcgcgtacagagggctgcaaactcgcgagagtaagcgaatcccaaaaagcgcgtcgtagtccggatcggagtctgcaactcgactccgtgaagtcggaatcgctagtaatcgtggatcagaatgccacggtgaatacgttcccgggccttgtacacaccgcccgtcacaccatgggagtgggttgctccagaagtagatagcttaaccttcgggagggcgtttaccacggagtgattcatgactggggtg

SEQ ID NO: 2277 - DNA, 1463 bp, Oceanimonas doudoroffii
  source 1..1463: mol_type = unassigned DNA
gaacgctggcggcaggcctaacacatgcaagtcgagcggcagcgggaaagtagcttgctacttttgccggcgagcggcggacgggtgagtaatgcttggggatctgcccggtcgagggggataaccgttggaaacgacggctaataccgcatacgccctacgggggaaagcaggggaccttcgggccttgcgcgattggatgaacccaagtgagattagctagttggtgaggtaacggctcaccaaggcgacgatctctagctggtctgagaggatgaccagtcacactgggactgagacacggcccagactcctacgggaggcagcagtggggaatattgcacaatgggggaaaccctgatgcagccatgccgcgtgtgtgaagaaggccttcgggttgtaaagcactttcagtggtgaggaaaggaggttggctaatacctggcctctgtgacgttaaccacagaagaagcaccggctaactccgtgccagcagccgcggtaatacggagggtgcaagcgttaatcggaataactgggcgtaaagcgcacgcaggcggtttgttaagccagatgtgaaagccccgggctcaacccgggaactgcatttggaactggcagactagagtcttggagaggggggtagaatttccggtgtagcggtgaaatgcgtagagatcggaaggaataccagtggcgaaggcggccccctggccaaagactgacgctcaggtgcgaaagcgtggggagcaaacaggattagataccctggtagtccacgccgtaaacgatgtcaacttgaagtctgtgccatttgagcgcgggtttcggagctaacgcgttaagttgaccgcctggggagtacggccgcaaggttaaaactcaaatgaattgacgggggcccgcacaagcggtggagcatgtggtttaattcgatgcaacgcgaagaaccttacctacccttgacatacagcgaacttggcagagatgccttggtgccttcgggaacgctgatacaggtgctgcatggctgtcgtcagctcgtgtcgtgagatgttgggttaagtcccgcaacgagcgcaacccttgtcctttgttgccagcgattcggtcgggaactcaaaggagactgccggtgataaaccggaggaaggtggggacgacgtcaagtcatcatggcccttacgggtagggctacacacgtgctacaatggcgcgtacagagggcggcgaaccagtgatggtaagcgaatcccaaaaagcgcgtcgtagtccggatcggagtctgcaactcgactccgtgaagtcggaatcgctagtaatcgtggatcagaatgccacggtgaatacgttcccgggccttgtacacaccgcccgtcacaccatgggagtgggttgctccagaagtagatagcttaaccttcgggagggcgtttaccacggagtgattcatgactggggtg

SEQ ID NO: 2278 - DNA, 1467 bp, Oceanimonas smirnovii
  source 1..1467: mol_type = unassigned DNA
attgaacgctggcggcaggcctaacacatgcaagtcgagcggtaacaggagagtagcttgctacttttgctgacgagcggcggacgggtgagtaatgcttggggatctgcccggtcgagggggataaccgttggaaacgacggctaataccgcatacgccctacgggggaaagcaggggaccttcgggccttgcgcgattggatgaacccaagtgagattagcttgttggtgaggtaacggctcaccaaggcgacgatctctagctggtctgagaggatgaccagtcacactgggactgagacacggcccagactcctacgggaggcagcagtggggaatattgcacaatgggggaaaccctgatgcagccatgccgcgtgtgtgaagaaggccttcgggttgtaaagcactttcagtggtgaggaaaggcggttggctaatacccgaccgctgtgacgttaaccacagaagaagcaccggctaactccgtgccagcagccgcggtaatacggagggtgcaagcgttaatcggaataactgggcgtaaagcgcacgcaggcggtttgttaagccagatgtgaaagccccgggctcaacccgggaactgcatttggaactggcagactagagtcttggagaggggggtagaatttccggtgtagcggtgaaatgcgtagagatcggaaggaataccagtggcgaaggcggccccctggccaaagactgacgctcaggtgcgaaagcgtggggagcaaacaggattagataccctggtagtccacgccgtaaacgatgtcaacttgaagtctgtgccatttgagcgcgggtttcggagctaacgcgttaagttgaccgcctggggagtacggccgcaaggttaaaactcaaatgaattgacgggggcccgcacaagcggtggagcatgtggtttaattcgatgcaacgcgaagaaccttacctacccttgacatagyaagaastytycagagatgrattsgtgccttcgggarcttrcatacaggtgctgcatggctgtcgtcagctcgtgtcgtgagatgttgggttaagtcccgcaacgagcgcaacccttgtccttttttgccagcgggtratgccgggaactcaaaggagactgccggtgataaaccggaggaaggtggggacgacgtcaagtcatcatggcccttacgggtagggctacacacgtgctacaatggcgcgtacagagggcagcgaacttgcgagagtragcgaatcccaaaaagcgcgtcgtagtccggatcggagtctgcaactcgactccgtgaagtcggaatcgctagtaatcgtggatcagaatgccacggtgaatacgttcccgggccttgtacacaccgcccgtcacaccatgggagtgggttgctccagaagtagatagcttaaccttcgggagggcgtttaccacggagtgattcatgactggggtg

SEQ ID NO: 2279 - DNA, 1463 bp, unidentified
  source 1..1463: mol_type = unassigned DNA; note = Oceanisphaera arctica
attgaacgctggcggcaggcctaacacatgcaagtcgagcggtaacacaagggagcttgctcctgaggtgacgagcggcggacgggtgagtaaggcttgggtatctgcccagtcgtgggggataaccattggaaacgatggctaataccgcatacgccctacgggggaaaggaggggatcttcggacctttcgcgattggatgagcccaagtgagattagctagttggtggggtaatggctcaccaaggcaacgatctctagctggtctgagaggatgaccagccacactgggactgagacacggcccagactcctacgggaggcagcagtggggaatattgcacaatgggggaaaccctgatgcagccatgccgcgtgtgtgaagaaggccttcgggttgtaaagcactttcagtggtgaggaaaggtgaacggcgaatacccgtttactgtgacgttaaccacagaagaagcaccggctaactccgtgccagcagccgcggtaatacggagggtgcaagcgttaatcggaatgactgggcgtaaagcgcacgcaggcggtttgttaagccagatgtgaaagccccgagctcaactcgggaactgcatttggaactggcaaactagagtcttggagaggggggtagaatttccggtgtagcggtgaaatgcgtagagatcggaaggaataccagtggcgaaggcggccccctggccaaagactgacgctcaggtgcgaaagcgtggggagcaaacaggattagataccctggtagtccacgctgtaaacgatgtcaacttgaagtctgtgccttagagcgtgggtttcggagctaacgcgttaagttgaccgcctggggagtacggccgcaaggttaaaactcaaatgaattgacgggggcccgcacaagcggtggagcatgtggtttaattcgatgcaacgcgaagaaccttacctacccttgacatacagcgaactttccagagatggattggtgccttcgggaacgctgatacaggtgctgcatggctgtcgtcagctcgtgtcgtgagatgttgggttaagtcccgcaacgagcgcaacccttatcctttgttgccagcgattcggtcgggaactcaaaggagactgccggtgataaaccggaggaaggtggggacgacgtcaagtcatcatggcccttacgggtagggctacacacgtgctacaatggcgcgtacagagggctgccaaccagcgatggtgagcgaatcccaaaaagcgcgtcgtagtccggatcggagtctgcaactcgactccgtgaagtcggaatcgctagtaatcgtggatcagaatgccacggtgaatacgttcccgggccttgtacacaccgcccgtcacaccatgggagtgggttgctccagaagtagatagcttaaccttcgggggggcgtttaccacggagtgattcatgactggggtg

SEQ ID NO: 2280 - DNA, 1465 bp, unidentified
  source 1..1465: mol_type = unassigned DNA; note = Oceanisphaera profunda
attgaacgctggcggcaggcctaacacatgcaagtcgagcggtaacagagagtagcttgctactttgctgacgagcggcggacgggtgagtaatgcttggggatctgcccagtcgtgggggataaccattggaaacgatggctaataccgcatacgccctacgggggaaaggaggggaccttcgggcctttcgcgattggatgaacccaagtgagattagcttgttggtgaggtaatggctcaccaaggcgacgatctctaactggtctgagaggatgaccagtcacactgggactgagacacggcccagactcctacgggaggcagcagtggggaatattgcacaatgggggaaaccctgatgcagccatgccgcgtgtgtgaagaaggccttcgggttgtaaagcactttcagtggtgaggaaaggtgtgagcttaatacgtttacactgtgacgttaaccacagaagaagcaccggctaacttcgtgccagcagccgcggtaatacgaggggtgcaagcgttaatcggaataactgggcgtaaagcgcacgcaggcggtttgttaagccagatgtgaaagccccgagctcaactcgggaactgcatttggaactggcaaactagagtcttgtagaggggggtagaatttccagtgtagcggtgaaatgcgtagagattggaaggaataccagtggcgaaggcggccccctggacaaagactgacgctcatgtgcgaaagcgtggggagcaaacaggattagataccctggtagtccacgctgtaaacgatgtcaacttgaagtctgtgtccttgtgacgtgggtttcggagctaacgcattaagttgaccgcctggggagtacggccgcaaggttaaaactcaaatgaattgacgggggcccgcacaagcggtggagcatgtggtttaattcgatgcaacgcgaagaaccttacctacccttgacatacagcgaattttccagagatggattagtgccttcgggaacgctgatacaggtgctgcatggctgtcgtcagctcgtgtcgtgagatgttgggttaagtcccgcaacgagcgcaacccttatcctttgttgccagcgcgtaatggcgggaactcaagggagactgccggtgataaaccggaggaaggtggggacgacgtcaagtcatcatggcccttacgggtagggctacacacgtgctacaatggcgcgtacagagggaagccaaccagcgatggtgagcggatcccagaaagcgcgtcgtagtccggattggagtctgcaactcgactccatgaagtaggaatcgctagtaatcgtggatcagaatgccacggtgaatacgttcccgggccttgtacacaccgcccgtcacaccatgggagtgggttgcaaaagaagtaggtagcttaaccttcgggagggcgcttaccactttgtgattcacgactggggtg

SEQ ID NO: 2281 - DNA, 1413 bp, unidentified
  source 1..1413: mol_type = unassigned DNA; note = Oceanisphaera psychrotolerans
gcgctaccatgcagtcgagcggtaacacaagggagcttgctcctgaggtgacgagcggcggacgggtgagtaaggcttgggtatctgcccagtcgagggggataaccattggaaacgatggctaataccgcatacgccctacgggggaaagcaggggaccttcgggccttgcgcgattggatgagcccaagtgagattagctagttggtgaggtaatggctcaccaaggcgacgatctctagctggtctgagaggatgaccagccacactgggactgagacacggcccagactcctacgggaggcagcagtggggaatattgcacaatgggggaaaccctgatgcagccatgccgcgtgtgtgaagaaggccttcgggttgtaaagcactttcagtggtgaggaaaggtgaacggcgaatacccgtttactgtgacgttaaccacagaagaagcaccggctaactccgtgccagcagccgcggtaatacggagggtgcaagcgttaatcggaatgactgggcgtaaagcgcacgcaggcggtttgttaagccagatgtgaaagccccgagctcaactcgggaactgcatttggaactggcaaactagagtcttgtagaggggggtagaatttccagtgtagcggtgaaatgcgtagagattggaaggaataccagtggcgaaggcggccccctggacaaagactgacgctcaggtgcgaaagcgtggggagcaaacaggattagataccctggtagtccacgctgtaaacgatgtcaacttggagtctgtgccttagagcgtgggttccggagctaacgcattaagttgaccgcctggggagtacggccgcaaggttaaaactcaaatgaattgacgggggcccgcacaagcggtggagcatgtggtttaattcgatgcaacgcgaagaaccttacctacccttgacatacagcgaacttggcagagatgccttggtgccttcgggaacgctgatacaggtgctgcatggctgtcgtcagctcgtgtcgtgagatgttgggttaagtcccgcaacgagcgcaacccttatcctttgttgccagcgattcggtcgggaactcaaaggagactgccggtgataaaccggaggaaggtggggacgacgtcaagtcatcatggcccttacgggtagggctacacacgtgctacaatggcgcgtacagagggcagccaactcgcgagagtgagcgaatcccaaaaagcgcgtcgtagtccggatcggagtctgcaactcgactccgtgaagtcggaatcgctagtaatcgtggatcagaatgccacggtgaatacgttcccgggccttgtacacaccgcccgtcacaccatgggagtgggttgctccagaagtagatagcttaacctgtggtggggcg

SEQ ID NO: 2282 - DNA, 1488 bp, Oceanobacillus caeni
  source 1..1488: mol_type = unassigned DNA
gacgaacgctggcggcgtgcctaatacatgcaagtcgagcgctggaagctaatttcatcccttcgggatgaaattagtggaaagagcggcggacgggtgagtaacacgtgggcaacctacctataagactgggataactcgcggaaacgtgagctaataccggataatactttttattgcataataaggagtttgaaaggcggcgtaagctgtcacttatagatgggcccgcggcgcattagctagttggtgaggtaaaggctcaccaaggcaacgatgcgtagccgacctgagagggtgatcggccacactgggactgagacacggcccagactcctacgggaggcagcagtagggaatcttccgcaatggacgaaagtctgacggaacaacgccgcgtgagtgaagaaggttttcggatcgtaaaactctgttgttagggaagaacaagtcaggtagtaactgacctgaccttgacggtacctaaccagaaagccacggctaactacgtgccagcagccgcggtaatacgtaggtggcaagcgttgtccggatttattgggcgtaaagcgctcgcaggcggtcttttaagtctgatgtgaaagcccacggcttaaccgtggagggtcattggaaactggaggacttgagtgcagaagaggagagtggaattccatgtgtagcggtgaaatgcgtagagatatggaggaacaccagtggcgaaggcgactctctggtctgtaactgacgctgaggagcgaaagcgtgggtagcgaacaggattagataccctggtagtccacgccgtaaacgatgagtgctaggtgttagggggtttccgccccttagtgctgaagttaacgcattaagcactccgcctggggagtacggccgcaaggctgaaactcaaaagaattgacggggacccgcacaagcggtggagcatgtggtttaattcgaagcaacgcgaagaaccttaccaggtcttgacatcctttcgacctccctagagatagggatttcccttcggggacgaaagtgacaggtggtgcatggttgtcgtcagctcgtgtcgtgagatgttgggttaagtcccgcaacgagcgcaacccttgatcttagttgccagcattaagttgggcactctaaggtgactgccggtgacaaaccggaggaaggtggggatgacgtcaaatcatcatgccccttatgacctgggctacacacgtgctacaatggatggtacaaagggcagcgaaaccgcaaggtcaagcaaatcccataaaaccattctcagttcggattgtaggctgcaactcgcctacatgaagccggaatcgctagtaatcgcggatcagcatgccgcggtgaatacgttcccgggtcttgtacacaccgcccgtcacaccacgagagttggtaacacccgaagtcggtgaggtaaccttttggagccagccgccgaaggtgggaccaatgattggggtg

SEQ ID NO: 2283 - DNA, 1487 bp, Oceanobacillus kimchii
  source 1..1487: mol_type = unassigned DNA
gacgaacgctggcggcgtgcctaatacatgcaagtcgagcgcaggaagttatctgatcctcttttagaggtgacgataatggaatgagcggcggacgggtgagtaacacgtaggcaacctgcctgtaagactgggataactcgtggaaacgcgagctaataccggataacacttttcatctcctgatgagaagttgaaaggcggcttttgctgtcacttacagatgggcctgcggcgcattagctagttggtaaggtaatggcttaccaaggcgacgatgcgtagccgacctgagagggtgatcggccacactgggactgagacacggcccagactcctacgggaggcagcagtagggaatcttccgcaatggacgaaagtctgacggagcaacgccgcgtgagtgatgaaggttttcggatcgtaaaactctgttgttagggaagaacaagtgccatagtaactgatggcaccttgacggtacctaaccagaaagccacggctaactacgtgccagcagccgcggtaatacgtaggtggcaagcgttgtccggaattattgggcgtaaagcgctcgcaggcggttctttaagtctgatgtgaaatcttacggctcaaccgtaaacgtgcattggaaactggggaacttgagtgcagaagaggagagtggaattccacgtgtagcggtgaaatgcgtagagatgtggaggaacaccagtggcgaaggcgactctctggtctgtaactgacgctgaggagcgaaagcgtggggagcgaacaggattagataccctggtagtccacgccgtaaacgatgagtgctaggtgttagggggtttccgccccttagtgctgaagttaacgcattaagcactccgcctggggagtacggccgcaaggctgaaactcaaaagaattgacgggggcccgcacaagcggtggagcatgtggtttaattcgaagcaacgcgaagaaccttaccaggtcttgacatcctctgaacactctagagatagagttttcccttcggggacagagtgacaggtggtgcatggttgtcgtcagctcgtgtcgtgagatgttgggttaagtcccgcaacgagcgcaacccttgatcttagttgccagcattcagttgggcactctaaggtgactgccggtgacaaaccggaggaaggtggggacgacgtcaaatcatcatgccccttatgacctgggctacacacgtgctacaatggatggaacaaagggaagcgaacccgcgaggtcaagcaaatcccacaaaaccattctcagttcggattgtaggctgcaactcgcctacatgaagccggaatcgctagtaatcgcggatcagcatgccgcggtgaatacgttcccgggccttgtacacaccgcccgtcacaccacgagagttggtaacacccgaagtcggtgaggtaaccttttggagccagccgccgaaggtgggactaatgattggggtg

SEQ ID NO: 2284 - DNA, 1354 bp, Oceanobacillus profundus
  source 1..1354: mol_type = unassigned DNA
cggacgggtgagtaacacgtgggcaacctgcctgtaagatcgggataactcgcggaaacgtgagctaataccggataacacttttcatctcatggtgagaagataaaagacggtttcggctgtcacttacagatgggcccgcggcgcattagctagttggtgaggtaacggctcaccaaggcgacgatgcgtagccgacctgagagggtgatcggccacactgggactgagacacggcccagactcctacgggaggcagcagtagggaatcttccgcaatggacgaaagtctgacggagcaacgccgcgtgagtgatgaaggttttcggatcgtaaaactctgttgttagggaagaacaagttgggtagtaactgacccaaccttgacggtacctaaccagaaagccacggctaactacgtgccagcagccgcggtaatacgtaggtggcaagcgttgtccggaattattgggcgtaaagcgctcgcaggcggtcttttaagtctgatgtgaaagcccacggcttaaccgtggagggtcattggaaactggaggacttgagtacagaagaggagagtggaattccacgtgtagcggtgaaatgcgtagagatgtggaggaacaccagtggcgaaggcgactctctggtctgtaactgacgctgaggagcgaaagcgtgggtagcgaacaggattagataccctggtagtccacgccgtaaacgatgagtgctaggtgttagggggtttccgccccttagtgctgaagttaacgcattaagcactccgcctggggagtacggccgcaaggctgaaactcaaaagaattgacgggggcccgcacaagcggtggagcatgtggtttaattcgaagcaacgcgaagaaccttaccaggtcttgacatcctctgatacctctagagatagagttttcccttcggggacagagtgacaggtggtgcatggttgtcgtcagctcgtgtcgtgagatgttgggttaagtcccgcaacgagcgcaacccttgatcttagttgccagcattcagttgggcactctaaggtgactgccggtgacaaaccggaggaaggtggggatgacgtcaaatcatcatgccccttatgacctgggctacacacgtgctacaatggatggaacaaagggaagcgaacccgtgaggtcaagccaatcccataaaaccattctcagttcggattgtaggctgcaactcgcctacatgaagccggaatcgctagtaatcgcggatcagcatgccgcggtgaatacgttcccgggccttgtacacaccgcccgtcacaccacgagagttggtaacacccgaagtcggtgaggtaacc

SEQ ID NO: 2285 - DNA, 1462 bp, unidentified
  source 1..1462: mol_type = unassigned DNA; note = Oceanococcus atlanticus
attgaacgctggcggcaggcttaacacatgcaagtcgagcggtaacaggggtagcttgctacccgctgacgagcggcggacgggtgagtaatgcctaagaatctgcctagtagtgggggatagcccggggaaacccggattaataccgcatacgccctacgggggaaagcgggggatcttcggacctcgcgctattagatgagcttaggtcggattagcttgttggtgaggtaatggctcaccaaggcgacgatccgtagctggtctgagaggatgatcagccacactgggactgagacacggcccagactcctacgggaggcagcagtggggaatattggacaatgggcgaaagcctgatccagccatgccgcgtgtgtgaagaaggctctagggttgtaaagcactttaagcagggaagatagtgcgttggttaatactcctacgtatggacggtacctgcagaataagcaccggctaactccgtgccagcagccgcggtaatacggagggtgcaagcgttaatcggatttactgggcgtaaagcgtgcgtaggtggtttgttaagtcagttgtgaaatcccagggctcaaccttggaattgcatctgatactggcagactagagatcggtagaggttagtggaattccaggtgtagcggtgaaatgcgtagatatctggaggaacatcgatggcgaaggcaactgactgggcctgatctgacactgaggtacgaaagcgtggggagcaaacaggattagataccctggtagtccacgccgtaaacgatgagaacttgatgttgggatgcttagcatttcagtgtcgaagctaacgcgataagttctccgcctggggagtacgccggcaacggtaaaactcaaaggaattgacgggggcccgcacaagcggtggagcatgtggtttaattcgatgcaacgcgaagaaccttacctgcccttgacatcctcggaacttgtcagagatgacttggtgccttcgggaaccgagtgacaggtgctgcatggctgtcgtcagctcgtgtcgtgagatgttgggttaagtcccgcaacgagcgcaacccctatccttagttgccagcatttggttgggcactctaaggagactgccggtgacaaaccggaggaaggtggggatgacgtcaagtcatcatggcccttatgggcagggctacacacgtgctacaatggtcggtacaaagggttgccaacccgcgagggggagctaatcccataaagccgatcgtagtccggattgcagtctgcaactcgactgcatgaagtcggaatcgctagtaatcgtggatcagcattgccacggtgaatacgttcccgggccttgtacacaccgcccgtcacaccatgggagttggttgcaccagaagtagctagactaaccttcgggaggtcggttaccacggtgtgatcaatgactggggtg

SEQ ID NO: 2286 - DNA, 1458 bp, Oceanospirillum multiglobuliferum
  source 1..1458: mol_type = unassigned DNA
attgaacgctggcggcaggcctaacacatgcaagtcgagcggtagagagaagcttgcttctcttgagagcggcggacgggtgagtaacgcgtaggaatctgcccgatagtgggggatagcccagagaaatttggattaataccgcatacgccctaagggggaaagcaggggatcttcggaccttgcgctatcggatgagcctgcgtgagattagcttgttggtgaggtaatggctcaccaaggcgacgatctctagctggtctgagaggatgatcagccacaccggaactgagacacggtccggactcctacgggaggcagcagtggggaatattggacaatgggcgcaagcctgatccagccatgccgcgtgtgtgaagaaggccttcgggttgtaaagcactttcagtagggaggaaaggttgtaagctaataccttgcagctgtgacgttacctacagaagaaggaccggctaactccgtgccagcagccgcggtaatacggagggtccaagcgttaatcggaattactgggcgtaaagcgcgcgtaggcggcttgttaagccagatgtgaaagccctgggctcaacctaggaattgcatttggaactggctcgctagagtacagaagagggtggtggaatttcctgtgtagcggtgaaatgcgtagatataggaaggaacatcagtggcgaaggcggccacctggtctgatactgacgctgaggtgcgaaagcgtggggagcaaacaggattagataccctggtagtccacgccgtaaacgatgtcaactagccgttgggtcccttgaggacttagtggcgcagctaacgcaataagttgaccgcctggggagtacggtcgcaagattaaaactcaaatgaattgacgggggcccgcacaagcggtggagcatgtggtttaattcgaagcaacgcgaagaaccttacctactcttgacatccagagaattcggcagagatgccttagtgccttcgggagctctgagacaggtgctgcatggctgtcgtcagctcgtgttgtgaaatgttgggttaagtcccgtaacgagcgcaacccttatccttatttgccagcacttcgggtgggaactctaaggagactgccggtgacaaaccggaggaaggtggggacgacgtcaagtcatcatggcccttacgagtagggctacacacgtgctacaatggccggtacagagggttgcaataccgcgaggtggagctaatctcacaaaaccggtcgtagtccggattggagtctgcaactcgactccatgaagtcggaatcgctagtaatcgtgaatcagaatgtcacggtgaatacgttcccgggccttgtacacaccgcccgtcacaccatgggagtgggttgctccagaagtggctagtctaaccttcggggggacggtcaccacggagtgattcatgactggggtg

SEQ ID NO: 2287 - DNA, 1405 bp, Ochrobactrum cytisi; identical to SEQ ID NO: 250
  source 1..1405: mol_type = unassigned DNA

SEQ ID NO: 2288 - DNA, 1406 bp, Ochrobactrum gallinifaecis
  source 1..1406: mol_type = unassigned DNA
aacgaacgctggcggcaggcttaacacatgcaagtcgagcgcccttttcggagggagcggcagacgggtgagtaacgcgtgggaatctaccaatcactagggaataactcagggaaacttgtgctaataccctatacgaccgagaggtgaaagatttatcggtgattgatgagcccgcgttggattagctagttggtggggtaaaggcctaccaaggcgacgatccatagctggtctgagaggatgatcagccacactgggactgagacacggcccagactcctacgggaggcagcagtggggaatattggacaatgggcgcaagcctgatccagccatgccgcgtgagtgatgacggtcttaggattgtaaagctctttcaccggtgaagataatgacggtaaccggagaagaagccccggctaacttcgtgccagcagccgcggtaatacgaagggggctagcgttgttcggatttactgggcgtaaagcgcacgtaggcggattggtcagttaggggtgaaatcccagggcttaaccctggaactgcctttaatactgccagtcttgagtatggtagaggtgagtggaattccgagtgtagaggtgaaattcgtagatattcggaggaacaccagtggcgaaggcggctcactggaccattactgacgctgaggtgcgaaagcgtggggagcaaacaggattagataccctggtagtccacgccgtaaacgatgaatgttagccgtcgggggatttatctttcggtggcgcagctaacgcattaaacattccgcctggggagtacggtcgcaagattaaaactcaaaggaattgacgggggcccgcacaagcggtggagcatgtggtttaattcgaagcaacgcgcagaaccttaccagcccttgacataccggtcgcggacacagagatgtgtctttcagtttggctggaccggatacaggtgctgcatggctgtcgtcagctcgtgtcgtgagatgttgggttaagtcccgcaacgagcgcaaccctcgcctttagttgccatcatttagttgggcactctaaagggactgccagtgataagctggaggaaggtggggatgacgtcaagtcctcatggcccttacgggctgggctacacacgtgctacaatggtggtgacagtgggcagcgaacacgcgagtgtaagctaatctccaaaagccatctcagttcggattgcactctgcaactcgagtgcatgaagttggaatcgctagtaatcgcggatcagcatgccgcggtgaatacgttcccgggccttgtacacaccgcccgtcacaccatgggagttggttttacccgaaggcgctgtgctaaccgcaaggaggcaggcgaccacggtagggtcagcgactggggtg

SEQ ID NO: 2289 - DNA, 1404 bp, Ochrobactrum grignonense
  source 1..1404: mol_type = unassigned DNA
aacgaacgctggcggcaggcttaacacatgcaagtcgagcgcctcgcaagaggagcggcagacgggtgagtaacgcgtgggaatctaccttttgctacggaataactcagggaaacttgtgctaataccgtatgtgcccttttggggaaagatttatcggcaaaggatgagcccgcgttggattagctagttggtagggtaatggcctaccaaggcgacgatccatagctggtctgagaggatgatcagccacactgggactgagacacggcccagactcctacgggaggcagcagtggggaatattggacaatgggcgcaagcctgatccagccatgccgcgtgagtgatgaaggccctagggttgtaaagctctttcaccggtgaagataatgacggtaaccggagaagaagccccggctaacttcgtgccagcagccgcggtaatacgaagggggctagcgttgttcggatttactgggcgtaaagcgcacgtaggcggacttttaagtcaggggtgaaatcccggggctcaaccccggaactgcctttgatactggaagtcttgagtatggtagaggtgagtggaattccgagtgtagaggtgaaattcgtagatattcggaggaacaccagtggcgaaggcggctcactggaccattactgacgctgaggtgcgaaagcgtggggagcaaacaggattagataccctggtagtccacgccgtaaacgatgaatgttagccgtcggggagtttactcttcggtggcgcagctaacgcattaaacattccgcctggggagtacggtcgcaagattaaaactcaaaggaattgacgggggcccgcacaagcggtggagcatgtggtttaattcgaagcaacgcgcagaaccttaccagcccttgacataccggtcgcggacacagagatgtgtctttcagttcggctggaccggatacaggtgctgcatggctgtcgtcagctcgtgtcgtgagatgttgggttaagtcccgcaacgagcgcaaccctcgcctttagttgccatcatttagttgggcactctaaagggactgccagtgataagctggaggaaggtggggatgacgtcaagtcctcatggcccttacgggctgggctacacacgtgctacaatggtggtgacagtgggcagcaagcacgcgagtgtgagctaatctccaaaagccatctcagttcggattgcactctgcaactcgagtgcatgaagttggaatcgctagtaatcgcggatcagcatgccgcggtgaatacgttcccgggccttgtacacaccgcccgtcacaccatgggagttggttctgcccgaaggcactgtgctaaccgtaaggaggcaggtgaccacggtagggtcagcgactggggtg

SEQ ID NO: 2290 - DNA, 1388 bp, Ochrobactrum haematophilum
  source 1..1388: mol_type = unassigned DNA
caggcttaacacatgcaagtcgagcgccccgcaaggggagcggcagacgggtgagtaacgcgtgggaatctaccatttgctacggaacaactccgggaaactggagctaataccgtatgtgccctaacggggaaagatttatcggcaaatgatgagcccgcgttggattagctagttggtggggtaaaggcctaccaaggcgacgatccatagctggtctgagaggatgatcagccacactgggactgagacacggcccagactcctacgggaggcagcagtggggaatattggacaatgggcgcaagcctgatccagccatgccgcgtgagtgatgaaggccctagggttgtaaagctctttcaccggtgaagataatgacggtaaccggagaagaagccccggctaacttcgtgccagcagccgcggtaatacgaagggggctagcgttgttcggatttactgggcgtaaagcgcacgtaggcggacttttaagtcaggggtgaaatcccggggctcaaccccggaactgcctttgatactggaagtcttgagtatggtagaggtgagtggaattccgagtgtagaggtgaaattcgtagatattcggaggaacaccagtggcgaaggcggctcactggaccattactgacgctgaggtgcgaaagcgtggggagcaaacaggattagataccctggtagtccacgccgtaaacgatgaatgttagccgtcggggagtttactcttcggtggcgcagctaacgcattaaacattccgcctggggagtacggtcgcaagattaaaactcaaaggaattgacgggggcccgcacaagcggtggagcatgtggtttaattcgaagcaacgcgcagaaccttaccagcccttgacataccggtcgcggacacagagatgtgtctttcagttcggctggaccggatacaggtgctgcatggctgtcgtcagctcgtgtcgtgagatgttgggttaagtcccgcaacgagcgcaaccctcgcccttagttgccagcatttagttgggcactctaaggggactgccggtgataagccgagaggaaggtggggatgacgtcaagtcctcatggcccttacgggctgggctacacacgtgctacaatggtggtgacagtgggcagcgagcacgcgagtgtgagctaatctccaaaagccatctcagttcggattgcactctgcaactcgagtgcatgaagttggaatcgctagtaatcgcggatcagaatgccgcggtgaatacgttcccgggccttgtacacaccgcccgtcacaccatgggagttggttttacccgaaggcgctgtgctaaccgcaaggaggcaggcgaccacggtagggtcagcgactgggg

SEQ ID NO: 2291 - DNA, 1407 bp, Ochrobactrum intermedium
  source 1..1407: mol_type = unassigned DNA
aacgaacgctggcggcaggcttaacacatgcaagtcgagcgccccgcaaggggagcggcagacgggtgagtaacgcgtgggaacgtaccatttgctacggaataactcagggaaacttgtgctaataccgtatgtgcccgaaaggggaaagatttatcggcaaatgatcggcccgcgttggattagctagttggtggggtaaaggcctaccaaggcgacgatccatagctggtctgagaggatgatcagccacactgggactgagacacggcccagactcctacgggaggcagcagtggggaatattggacaatgggcgcaagcctgatccagccatgccgcgtgagtgatgaaggccctagggttgtaaagctctttcaccggtgaagataatgacggtaaccggagaagaagccccggctaacttcgtgccagcagccgcggtaatacgaagggggctagcgttgttcggatttactgggcgtaaagcgcacgtaggcgggctaataagtcaggggtgaaatcccggggctcaaccccggaactgcctttgatactgttagtcttgagtatggtagaggtgagtggaattccgagtgtagaggtgaaattcgtagatattcggaggaacaccagtggcgaaggcggctcactggaccattactgacgctgaggtgcgaaagcgtggggagcaaacaggattagataccctggtagtccacgccgtaaacgatgaatgttagccgttggggagtttactcttcggtggcgcagctaacgcattaaacattccgcctggggagtacggtcgcaagattaaaactcaaaggaattgacgggggcccgcacaagcggtggagcatgtggtttaattcgaagcaacgcgcagaaccttaccagcccttgacatcccgatcgcggttagtggagacactatccttcagttcggctggatcggagacaggtgctgcatggctgtcgtcagctcgtgtcgtgagatgttgggttaagtcccgcaacgagcgcaaccctcgcccttagttgccagcattcagttgggcactctaaggggactgccggtgataagccgagaggaaggtggggatgacgtcaagtcctcatggcccttacgggctgggctacacacgtgctacaatggtggtgacagtgggcagcgagcacgcgagtgtgagctaatctccaaaagccatctcagttcggattgcactctgcaactcgagtgcatgaagttggaatcgctagtaatcgcggatcagcatgccgcggtgaatacgttcccgggccttgtacacaccgcccgtcacaccatgggagttggttttacccgaaggcgctgtgctaaccgcaaggaggcaggcgaccacggtagggtcagcgactggggtg

SEQ ID NO: 2292 - DNA, 1405 bp, Ochrobactrum lupini; identical to SEQ ID NO: 250
  source 1..1405: mol_type = unassigned DNA

SEQ ID NO: 2293 - DNA, 1409 bp, Ochrobactrum oryzae
  source 1..1409: mol_type = unassigned DNA
aacgaacgctggcggcaggcttaacacatgcaagtcgagcgcccttttcggagggagcggcagacgggtgagtaacgcgtgggaatctacctatctctagggaataactcagggaaacttgtgctaataccctatacgtccttcgggagaaagatttatcggagatggatgagcccgcgttggattagctagttggtggggtaaaggcctaccaaggcgacgatccatagctggtctgagaggatgatcagccacactgggactgagacacggcccagactcctacgggaggcagcagtggggaatattggacaatgggcgcaagcctgatccagccatgccgcgtgagtgatgaaggccctagggttgtaaagctctttcaccggtgaagataatgacggtaaccggagaagaagccccggctaacttcgtgccagcagccgcggtaatacgaagggggctagcgttgttcggatttactgggcgtaaagcgcacgtaggcggattggtcagttaggggtgaaatcccagggctcaaccctggaactgcctttaatactgccagtcttgagtatggaagaggtgagtggaattccgagtgtagaggtgaaattcgtagatattcggaggaacaccagtggcgaaggcggctcactggtccattactgacgctgaggtgcgaaagcgtggggagcaaacaggattagataccctggtagtccacgccgtaaacgatgaatgttagccgttggggagtttactcttcggtggcgcagctaacgcattaaacattccgcctggggagtacggtcgcaagattaaaactcaaaggaattgacgggggcccgcacaagcggtggagcatgtggtttaattcgaagcaacgcgcagaaccttaccagcccttgacatcccgatcgcggttagtggagacactatccttcagtttggctggatcggagacaggtgctgcatggctgtcgtcagctcgtgtcgtgagatgttgggttaagtcccgcaacgagcgcaaccctcgcccttagttgccagcattgagttgggcactctaaggggactgccggtgataagccgagaggaaggtggggatgacgtcaagtcctcatggcccttacgggctgggctacacacgtgctacaatggtggtgacagtgggcagcgagcacgcgagtgtgagctaatctccaaaagccatctcagttcggattgcactctgcaactcgagtgcatgaagttggaatcgctagtaatcgcggatcagcatgccgcggtgaatacgttcccgggccttgtacacaccgcccgtcacaccatgggagttggttttacccgaaggcgctgtgctaaccgcaaggaggcaggcgaccacggtagggtcagcgactggggtg

SEQ ID NO: 2294 - DNA, 1386 bp, Ochrobactrum pecoris
  source 1..1386: mol_type = unassigned DNA
caggcttaacacatgcaagtcgaacggtctcttcggaggcagtggcagacgggtgagtaacgcgtgggaatctaccttttgctacggaacaacagttggaaacgactgctaataccgtatgtgcccgaaaggggaaagatttatcggcaaaggatgagcccgcgttggattagctagttggtagggtaaaggcctaccaaggcgacgatccatagctggtctgagaggatgatcagccacactgggactgagacacggcccagactcctacgggaggcagcagtggggaatattggacaatgggcgcaagcctgatccagccatgccgcgtgagtgatgaaggccctagggttgtaaagctctttcaccggtgaagataatgacggtaaccggagaagaagccccggctaacttcgtgccagcagccgcggtaatacgaagggggctagcgttgttcggatttactgggcgtaaagcgcacgtaggcggacttttaagtcaggggtgaaatcccggggctcaaccccggaactgcctttgatactggaagtcttgagtatggtagaggtgagtggaattccgagtgtagaggtgaaattcgtagatattcggaggaacaccagtggcgaaggcggctcactggaccattactgacgctgaggtgcgaaagcgtggggagcaaacaggattagataccctggtagtccacgccgtaaacgatgaatgttagccgttggggagtttactcttcggtggcgcagctaacgcattaaacattccgcctggggagtacggtcgcaagattaaaactcaaaggaattgacgggggcccgcacaagcggtggagcatgtggtttaattcgaagcaacgcgcagaaccttaccagcccttgacataccggtcgcggacacagagatgtgtctttcagttaggctggaccggatacaggtgctgcatggctgtcgtcagctcgtgtcgtgagatgttgggttaagtcccgcaacgagcgcaaccctcgcccttagttgccagcatttagttgggcactctaaggggactgccagtgataagctggaggaaggtggggatgacgtcaagtcctcatggcccttacgggctgggctacacacgtgctacaatggtggtgacagtgggcagcgagcacgcgagtgtgagctaatctccaaaagccatctcagttcggatcgcactctgcaactcgagtgcgtgaagttggaatcgctagtaatcgcggatcagcatgccgcggtgaatacgttcccgggccttgtacacaccgcccgtcacaccatgggagttggttttacccgaaggcgctgtgctaaccgcaaggaggcaggcgaccacggtagggtcagcgactg

SEQ ID NO: 2295 - DNA, 1404 bp, Ochrobactrum pseudogrignonense
  source 1..1404: mol_type = unassigned DNA
aacgaacgctggcggcaggcttaacacatgcaagtcgagcgccccgcaaggggagcggcagacgggtgagtaacgcgtgggaatctaccttttgctacggaataactcagggaaacttgtgctaataccgtatgtgcccttcgggggaaagatttatcggcaaaggatgagcccgcgttggattagctagttggtggggtaaaggcccaccaaggcgacgatccatagctggtctgagaggatgatcagccacactgggactgagacacggcccagactcctacgggaggcagcagtggggaatattggacaatgggcgcaagcctgatccagccatgccgcgtgagtgatgaaggccctagggttgtaaagctctttcaccggtgaagataatgacggtaaccggagaagaagccccggctaacttcgtgccagcagccgcggtaatacgaagggggctagcgttgttcggatttactgggcgtaaagcgcacgtaggcggacttttaagtcaggggtgaaatcccagagctcaactctggaactgcctttgatactggaagtcttgagtatggtagaggtgagtggaattccgagtgtagaggtgaaattcgtagatattcggaggaacaccagtggcgaaggcggctcactggaccattactgacgctgaggtgcgaaagcgtggggagcaaacaggattagataccctggtagtccacgccgtaaacgatgaatgttagccgtcggggtgtttacacttcggtggcgcagctaacgcattaaacattccgcctggggagtacggtcgcaagattaaaactcaaaggaattgacgggggcccgcacaagcggtggagcatgtggtttaattcgaagcaacgcgcagaaccttaccagcccttgacataccggtcgcggacacagagatgtgtctttcagttcggctggaccggatacaggtgctgcatggctgtcgtcagctcgtgtcgtgagatgttgggttaagtcccgcaacgagcgcaaccctcgcctttagttgccatcatttagttgggcactctaaagggactgccagtgataagctggaggaaggtggggatgacgtcaagtcctcatggcccttacgggctgggctacacacgtgctacaatggtggtgacagtgggcagcaagcacgcgagtgtgagctaatctccaaaagccatctcagttcggattgcactctgcaactcgagtgcatgaagttggaatcgctagtaatcgcggatcagcatgccgcggtgaatacgttcccgggccttgtacacaccgcccgtcacaccatgggagttggttctgcccgaaggcactgtgctaaccgtaaggaggcaggtgaccacggtagggtcagcgactggggtg

SEQ ID NO: 2296 - DNA, 1404 bp, Ochrobactrum rhizosphaerae
  source 1..1404: mol_type = unassigned DNA
aacgaacgctggcggcaggcttaacacatgcaagtcgagcgccccgcaaggggagcggcagacgggtgagtaacgcgtgggaatctaccttttgctacggaacaacagttggaaacgactgctaataccgtatgtgcccttcgggggaaagatttatcggcaaaggatgagcccgcgttggattagctagttggtgaggtaaaggctcaccaaggcgacgatccatagctggtctgagaggatgatcagccacactgggactgagacacggcccagactcctacgggaggcagcagtggggaatattggacaatgggcgcaagcctgatccagccatgccgcgtgagtgatgaaggccctagggttgtaaagctctttcaccggtgaagataatgacggtaaccggagaagaagccccggctaacttcgtgccagcagccgcggtaatacgaagggggctagcgttgttcggatttactgggcgtaaagcgcacgtaggcggatttttaagtcaggggtgaaatcccggggctcaaccccggaactgcctttgatactggaagtcttgagtatggtagaggtgagtggaattccgagtgtagaggtgaaattcgtagatattcggaggaacaccagtggcgaaggcggctcactggaccattactgacgctgaggtgcgaaagcgtggggagcaaacaggattagataccctggtagtccacgccgtaaacgatgaatgttagccgtcggggggtttacctttcggtggcgcagctaacgcattaaacattccgcctggggagtacggtcgcaagattaaaactcaaaggaattgacgggggcccgcacaagcggtggagcatgtggtttaattcgaagcaacgcgcagaaccttaccagcccttgacataccggtcgcggacacagagatgtgtctttcagttcggctggaccggatacaggtgctgcatggctgtcgtcagctcgtgtcgtgagatgttgggttaagtcccgcaacgagcgcaaccctcgcctttagttgccagcatttagttgggcactctaaagggactgccagtgataagctggaggaaggtggggatgacgtcaagtcctcatggcccttacgggctgggctacacacgtgctacaatggtggtgacagtgggcagcaagcacgcgagtgtgagctaatctccaaaagccatctcagttcggattgcactctgcaactcgagtgcatgaagttggaatcgctagtaatcgcggatcagcatgccgcggtgaatacgttcccgggccttgtacacaccgcccgtcacaccatgggagttggttttacccgaaggcactgtgctaaccgcaaggaggcaggtgaccacggtagggtcagcgactggggtg

SEQ ID NO: 2297 - DNA, 1404 bp, Ochrobactrum thiophenivorans
  source 1..1404: mol_type = unassigned DNA
aacgaacgctggcggcaggcttaacacatgcaagtcgagcgccccgcaaggggagcggcagacgggtgagtaacgcgtgggaatctaccttttgctacggaataactcagggaaacttgtgctaataccgtatgtgcccttttggggaaagatttatcggcaaaggatgagcccgcgttggattagctagttggtgaggtaaaggctcaccaaggcgacgatccatagctggtctgagaggatgatcagccacactgggactgagacacggcccagactcctacgggaggcagcagtggggaatattggacaatgggcgcaagcctgatccagccatgccgcgtgagtgatgaaggccctagggttgtaaagctctttcaccggtgaagataatgacggtaaccggagaagaagccccggctaacttcgtgccagcagccgcggtaatacgaagggggctagcgttgttcggatttactgggcgtaaagcgcacgtaggcggacttttaagtcaggggtgaaatcccggggctcaaccccggaactgcctttgatactggaagtcttgagtatggtagaggtgagtggaattccgagtgtagaggtgaaattcgtagatattcggaggaacaccagtggcgaaggcggctcactggaccattactgacgctgaggtgcgaaagcgtggggagcaaacaggattagataccctggtagtccacgccgtaaacgatgaatgttagccgtcggggtgtttacacttcggtggcgcagctaacgcattaaacattccgcctggggagtacggtcgcaagattaaaactcaaaggaattgacgggggcccgcacaagcggtggagcatgtggtttaattcgaagcaacgcgcagaaccttaccagcccttgacataccggtcgcggacacagagatgtgtctttcagtttggctggaccggatacaggtgctgcatggctgtcgtcagctcgtgtcgtgagatgttgggttaagtcccgcaacgagcgcaaccctcgcctttagttgccatcatttagttgggcactctaaagggactgccagtgataagctggaggaaggtggggatgacgtcaagtcctcatggcccttacgggctgggctacacacgtgctacaatggtggtgacagtgggcagcaagcacgcgagtgtgagctaatctccaaaagccatctcagttcggattgcactctgcaactcgagtgcatgaagttggaatcgctagtaatcgcggatcagcatgccgcggtgaatacgttcccgggccttgtacacaccgcccgtcacaccatgggagttggttctgcccgaaggcactgtgctaaccgcaaggaggcaggtgaccacggtagggtcagcgactggggtg

SEQ ID NO: 2298 - DNA, 1258 bp, unidentified
  source 1..1258: mol_type = unassigned DNA; note = Okeania hirsuta
aggtctgggacaacagaaggaaacttccgctaatcccggatgagcctaatggtaaaagataaattgcctggagatgagctcgcgtctgactagctagttggtggggtaaaagcctaccaaggcaacgatcagtagctggtctgagaggatgagcagccacactgggactgagacacggcccagactcctacgggaggcagcagtggggaattttccgcaatgggcgaaagcctgacggagcaagaccgcgtgggggaggaaggctttagggttgtaaaccccttttctttgggaagaagttctgacggtaccaaaggaatcagcctcggctaactccgtgccagcagccgcggtaatacggaggaggcaagcgttatccggaatgattgggcgtaaagcgtccgcaggtggccatgtaagtctgctgtcaaaacccagggctcaactctggtcaggcagtggaaactacaaagctagagtctggtaggggcaaagggaattcccggcgtagcggtgaaatgcgtagatttcgggaagaacatcggtggcgaaagcgctttgctagaccagaactgacactcagggacgaaagctaggggagcgaatgggattagataccccggtagtcctagccgtaaacgatggatactaggtgttgcctgtatcgacccaggcagtgccgtagctaacgcgttaagtatcccgcctggggagtacgcacgcaagtgtgaaactcaaaggaattgacgggggcccgcacaagcggtggagtatgtggtttaattcgatgcaacgcgaagaaccttaccaggactcgacatgtcgcgaatctcagggaaacttgagagtgccttcgggagcgcgaacacaggtggtgcatggctgtcgtcagctcgtgtcgtgagatgttgggttaagtcccgcaacgagcgcaaccctcgtttttagttgccatcattaagttgggcactctaaagagactgccggtgacaaaccggaggaaggtggggatgacgtcaagtcagcatgccccttacgtcctgggctacacacgtactacaatggtctggacagagggtagccaacccgcgagggcgagccaatctcaaaaaccaggcctcagttcagattgcaggctgcaactcgcctgcatgaaggaggaatcgctagtaatcgcaggtcagcatactgcggtgaatccgttcccgggccttgtacacaccgcccgtcacaccatggaagttggccacgcccgaag

SEQ ID NO: 2299 - DNA, 1469 bp, unidentified
  source 1..1469: mol_type = unassigned DNA; note = Oleiagrimonas soli
attgaacgctggcggcatgcctaacacatgcaagtcgaacggcagcatgagagagcttgctctcttgatggcgagtggcggacgggtgagtaaggcatcgggatctaccctgtcgtgggggacaacctagggaaacttaggctaataccgcatacgtcctacgggagaaagtgggggacccttcggggcctcacgcgattggatgaaccgatgttcgattagctagttggtggggtaatggcctaccaaggcgacgatcgatagctggtctgagaggatgatcagccacactgggactgagacacggcccagactcctacgggaggcagcagtggggaatattggacaatgggcgaaagcctgatccagcaatgccgcgtgtgtgaagaaggccctcgggttgtaaagcacttttatcaggaacgaaataccaccggccaatacccggtggggctgacggtacctgaggaataagcaccggctaactccgtgccagcagccgcggtaatacggagggtgcaagcgttaatcggaattactgggcgtaaagcgtgcgtaggcggttcgttaagtctgctgtgaaagccccgggctcaacctgggaatggcagtggatactggcgagctagagtgtggtagaggaaggtggaattcccggtgtagcggtgaaatgcgtagagatcgggaggaacatcagtggcgaaggcggccttctggaccaacactgacgctcaggcacgaaagcgtggggagcaaacaggattagataccctggtagtccacgccctaaacgatgcgaactggacgttggccacacttcggtggtcagtgtcgaagctaacgcgttaagttcgccgcctggggagtacggtcgcaagactgaaactcaaaggaattgacgggggcccgcacaagcggtggagtatgtggtttaattcgatgcaacgcgaagaaccttacctggtcttgacatgtccggaacttggcagaaatgccttggtgccttcgggaaccggaacacaggtgctgcatggctgtcgtcagctcgtgtcgtgagatgttgggttaagtcccgcaacgagcgcaacccttgtccttagttgccagcacgtaatggtgggaactctagggagactgccggtgacaaaccggaggaaggtggggatgacgtcaagtcatcatggcccttacgaccagggctacacacgtactacaatggtcggtacagagggttgccaagccgcgaggtggagccaatcccacaaagccgatcccagtccggatcgcagtctgcaactcgactgcgtgaagtcggaatcgctagtaatcgtggatcagctatgccacggtgaatacgttcccgggccttgtacacaccgcccgtcacaccatgggagtgggctgctccagaagccgttagtctaaccttcgggaggacgacgaccacggagtggttcatgactggggtg

SEQ ID NO: 2300 - DNA, 1455 bp, Oleibacter marinus
  source 1..1455: mol_type = unassigned DNA
attgaacgctggcggcaggcttaacacatgcaagtcgagcggtaacagagatagcttgctatctgctgacgagcggcggacgggtgagtaacgcgtaggaaactacccggtagtgggggacaaccattggaaacgatggctaataccgcatacgctctacggaggaaagggggcttcggctctcgctatcggatgtgcctgcgtgagattagctagttggtggggtaaaggcctaccaaggcgacgatctctagctggtctgagaggatgatcagccacactgggactgagacacggcccagactcctacgggaggcagcagtggggaatattggacaatgggcgcaagcctgatccagccatgccgcgtgtgtgaagaaggctttcgggttgtaaagcactttcatcagtgaggaaagggtagtagttaatacctgctatctgtgacgttaactgaagaagaagcaccggctaactccgtgccagcagccgcggtaatacggagggtgcaagcgttaatcggaattactgggcgtaaagcgcgcgtaggttgtttgttaagcgagatgtgaaagccccgggcttaacctgggaactgcatttcgaactggcagactagagtacagtagagggtggcggaatttcctgtgtagcggtgaaatgcgtagagatgggaaggaacatcagtggcgaaggcggccacctggactgatactgacactgaggtgcgaaagcgtggggagcaaacaggattagataccctggtagtccacgccgtaaacgatgtctactagttgtcgggagacttgatcttttggtaacgaagctaacgcgataagtagaccgcctggggagtacggccgcaaggttaaaactcaaatgaattgacgggggcccgcacaagcggtggagcatgtggtttaattcgaagcaacgcgaagaaccttacctactcttgacatcctgcgaacttggtagagataccttggtgccttcgggaacgcagagacaggtgctgcatggctgtcgtcagctcgtgttgtgaaatgttgggttaagtcccgtaacgagcgcaacccttgtccttagttgccatcatttagttggggactctaaggagactgccggtgacaaaccggaggaaggcggggacgacgtcaagtcatcatggcccttacgagtagggctacacacgtgctacaatggcaagtacagagggccgcgaagccgcgaggtggagctaatctcacaaagcttgtcgtagtccggattggagtctgcaactcgactccatgaagtcggaatcgctagtaatcgcaaatcagaatgttgcggtgaatacgttcccgggccttgtacacaccgcccgtcacaccatgggagtgggttgctccagaagtagatagcttaaccttcgggagagcgtttaccacggagtgattcatgactggggtg

SEQ ID NO: 2301 - DNA, 1452 bp, Oleiphilus messinensis
  source 1..1452: mol_type = unassigned DNA
attgaacgctggcggcaggcctaacacatgcaagtcgagcggtaacgaccacttcggtggggcgacgagcggcggacgggtgagtaacgcgtaggaatctacccagcagagggggatagcccggggaaacccggattaataccgcatattctctaaggaggaaagggggcttcggctctcgctgttggatgagcctgcgtaggattagctagttggtggggtaaaggcctaccaaggcgacgatctttagctggtctgagaggatgatcagccacactgggactgagacacggcccagactcctacgggaggcagcagtggggaatattgcacaatgggggaaaccctgatgcagccatgccgcgtgtgtgaagaaggccttcgggttgtaaagcactttcagtggtgaggaaggccataaggttaatacccttatggattgacgttaaccacagaagaagcaccggctaactccgtgccagcagccgcggtaatacggagggtgcaagcgttaatcggaattactgggcgtaaagcgcgcgtaggcggtttgctaagcgagatgtgaaagccccgggcttaacctgggaactgcatttcgaactggcagactagagtacagtagagggtggtggaatttccagtgtagcggtgaaatgcgtagagattggaaggaacatcagtggcgaaggcggccacctggactgatactgacgctgaggtgcgaaagcgtggggagcaaacaggattagataccctggtagtccacgccgtaaacgatgagaactagccgttgggatacttgatatcttagtggcgcagctaacgcgataagttctccgcctggggagtacggccgcaaggttaaaactcaaatgaattgacgggggcccgcacaagcggtggagcatgtggtttaattcgatgcaacgcgaagaaccttacctggccttgacatcctgcgaactttcgagagatcgattggtgccttcgggaacgcagagacaggtgctgcatggctgtcgtcagctcgtgttgtgaaatgttgggttaagtcccgtaacgagcgcaacccttatccctatttgccagcacttcgggtgggaactctagggagactgccggtgacaaaccggaggaaggtggggacgacgtcaagtcatcatggcccttacggccagggctacacacgtgctacaatgggacatacagagggtcgcgaagccgcgaggtggagccaatctcagaaaatgtctcgtagtccggattggagtctgcaactcgactccatgaagtcggaatcgctagtaatcgcgaatcagaatgtcgcggtgaatacgttcccgggccttgtacacaccgcccgtcacaccatgggagtggattgcaccagaagtaggtagcttaaccttcgggagggcgcttaccacggtgtggttcatgactggggtg

SEQ ID NO: 2302 - DNA, 1461 bp, Oleispira antarctica
  source 1..1461: mol_type = unassigned DNA
attgaacgctggcggcaggcttaacacatgcaagtcgagcggaaacgaaggtagcttgctaccagacgtcgagcggcggacgggtgagtaatgcttaggaatctaccgagtagtgggggatagccattggaaacgatgattaataccgcatatatcctacgggggaaagcaggggaccttcgggccttgcgctattcgatgagcctgagtgagattagctagttggtggggtaaaggcctaccaaggcgacgatctctagctggtctgagaggatgatcagccacactgggactgagacacggcccagactcctacgggaggcagcagtggggaatattgcacaatggacgaaagtctgatgcagccatgccgcgtgtgtgaagaaggccttcgggttgtaaagcactttcagcgaggaggaaaggtcagtaagtaatatttgctggctgtgacgttactcgcagaagaagcaccggctaatttagtgccagcagccgcggtaatactaaaggtgcaagcgttaatcggaattactgggcgtaaagcgcgcgtaggtggtttgttaagttggatgtgaaagcccagggctcaaccttggaactgcattcaaaactgactcactagagtacgagagaggttagtggaatttcctgtgtagcggtgaaatgcgtagagatgggaaggaacaccagtggcgaaggcgactgactggctcgatactgacactgaggtgcgaaagcgtggggagcaaacgggattagataccccggtagtccacgccgtaaacgatgtctactagccgttggaggacttgatcctttagtggcgcagctaacgcgataagtagaccgcctggggagtacggtcgcaagattaaaactcaaatgaattgacgggggcccgcacaagcggtggagcatgtggtttaattcgaagcaacgcgaagaaccttacctactcttgacatccagtgaacttttgagagatcaattggtgccttcgggaacactgagacaggtgctgcatggctgtcgtcagctcgtgttgtgaaatgttgggttaagtcccgtaacgagcgcaacccttgtccttagttaccatcattaagttggggactctaaggagactgccggtgacaaaccggaggaaggcggggacgacgtcaagtcatcatggcccttacgagtagggctacacacgtgctacaatggcatgtacaaagggttgccaagccgcgaggtggagctaatcccataaagcatgtcgtagtccggattggagtctgcaactcgactccatgaagtcggaatcgctagtaatcgtgaatcagaatgtcacggtgaatacgttcccgggccttgtacacaccgcccgtcacaccatgggagtgggttgctccagaagtagatagcttaaccttcgggagggcgtttaccacggagtgattcatgactggggtg

SEQ ID NO: 2303 - DNA, 1459 bp, Oligella ureolytica
  source 1..1459: mol_type = unassigned DNA
attgaacgctagcgggatgctttacacatgcaagtcgaacggcagcacagaggaacttgttccttgggtggcgagtggcggacgggtgagtaatgtatcggaacgtgcccagtagtgggggataactacgcgaaagcgtggctaataccgcatattctctacggaggaaagggggggatcatttgacctctcgctattggagcggccgatattagattagctagttggtggggtaacggcctaccaaggcagtgatctatagctggtttgagaggacgaccagccacactgggactgagacacggcccagactcctacgggaggcagcagtggggaattttcgacaatggggggaaccctgatcgagccatcccgcgtgtgggacgaaggccttcgggttgtaaaccacttttctcaacgaagaaaagtcttaggctaataccttaagatgctgacggtagttgaggaataagcaccggctaactatgtgccagcagccgcggtaatacatagggtgcaagcgttaatcggaattactgggcgtaaagggtgcgcaggcggcttggaaagaacggtgtgaaatcccggggctcaacctcggaactgcactattaactatcaagctagagtatgtcagaggggggtggaattccgcgtgtagcagtgaaatgcgtagatatgcggaggaacaccaatggcgaaggcagccccctgggataatactgacgctcaggcacgaaagcgtgggtagcaaacaggattagataccctggtagtccacgccctaaacgatgtcaactagctgttgggccggttacggcttagtagcgcagctaacgcgtgaagttgaccgcctggggactacggtcgcaagactaaaactcaaaggaattgacggggacccgcacaagcggtggatgatgtggattaattcgatgcaacgcgaaaaaccttacctacccttgacatgcctggaagctttaagagattaaagtgtgctcgcaagagaaccggtgcacaggtgctgcatggctgtcgtcagctcgtgtcgtgagatgttgggttaagtcccgcaacgagcgcaacccttgtcattagttgctacgtaagagcactctagtgagactgccggtgacaaaccggaggaaggtggggatgacgtcaagtcctcatggcccttatgggtagggcttcacacgtcatacaatggtcgggacagagggttgccaagccgcgaggtggagctaatctcttaaacccgatcgtagtccggattgcaggctgcaactcgcctgcatgaagtcggaatcgctagtaatcgcagatcagaatgctgcggtgaatacgttcccgggtcttgtacacaccgcccgtcacaccatgggagtgggttttaccagaagtagttagtctaaccgcaagggggacgattaccacggtaggattcatgactggggtg

SEQ ID NO: 2304 - DNA, 1411 bp, Oligotropha carboxidovorans
  source 1..1411: mol_type = unassigned DNA
agcgaacgctggcggcaggcttaacacatgcaagtcgaacgggcgtagcaatacgtcagtggcagacgggtgagtatcgcgtgggaacgtaccttttggttcggaacaacacagggaaacttgtgctaataccgaataagcccttacggggaaagatttatcgccgaaagatcggcccgcgtctgattagcttgttggtgaggtaacggctcaccaaggcgacgatcagtagctggtctgagaggatgatcagccacattgggactgagacacggcccaaactcctacgggaggcagcagtggggaatattggacaatgggcgaaagcctgatccagccatgccgcgtgagtgatgaaggccctagggttgtaaagctcttttgtgcgggaagataatgacggtaccgcaagaataagccccggctaacttcgtgccagcagccgcggtaatacgaagggggctagcgttgctcggaatcactgggcgtaaagggtgcgtaggcggatctttaagtcagaggtgaaagcctggagctcaactccagaactgcctttgatactgaggatctcgagttcgggagaggtgagtggaactgcgagtgtagaggtgaaattcgtagatattcgcaagaacaccagtggcgaaggcggctcactggcccgatactgacgctgaggcacgaaagcgtggggagcaaacaggattagataccctggtagtccacgccgtaaacgatgaatgccagccgttggagggtttactcttcagtggcgcagttaacgctttaagcattccgcctggggagtacggtcgcaagattaaaactcaaaggaattgacgggggcccgcacaagcggtggagcatgtggtttaattcgacgcaacgcgcagaaccttaccagcccttgacatgtccaggaccggtcgcagagatgtgaccttctcttcggagcctggagcacaggtgctgcatggctgtcgtcagctcgtgtcgtgagatgttgggttaagtcccgcaacgagcgcaacccccgtccttagttgctaccatttagttgagcactctaaggagactgccggtgataagccgcgaggaaggtggggatgacgtcaagtcctcatggcccttacgggctgggctacacacgtgctacaatggcggtgacaatgggatgcaaaggcgcgagccctagcaaatctcaaaaagccgtctcagttcggattgggctctgcaactcgagcccatgaagttggaatcgctagtaatcgtggatcagcacgccacggtgaatacgttcccgggccttgtacacaccgcccgtcacaccatgggagttggttttacctgaagacggtgcgctaacccgcaagggaggcagccggccacggtagggtcagcgactggggtg

SEQ ID NO: 2305 - DNA, 1440 bp, unidentified
  source 1..1440: mol_type = unassigned DNA; note = Olleya namhaensis
gatgaacgctagcggcaggcttaacacatgcaagtcgaggggtaacattgtgcttgcacagatgacgaccggcgaacgggtgcgtaacgcgtatagaatctacctcttactaagggatagcccagagaaatttggattaataccttatagtatgcagacttggcatcaagactgcattaaagattacggtaggagatgactatgcgtcctattagctagatggtgtggtaacggcacaccatggcaacgataggtaggggccctgagagggggatcccccacactggtactgagacacggaccagactcctacgggaggcagcagtgaggaatattggacaatggaggcaactctgatccagccatgccgcgtgcaggaagactgccctatgggttgtaaactgcttttatacaggaagaaacactgctacgtgtagcagcttgacggtactgtaagaataaggatcggctaactccgtgccagcagccgcggtaatacggaggatccaagcgttatccggaatcattgggtttaaagggtccgtaggtggataattaagtcagaggtgaaatcctgcagctcaactgtagaattgcctttgatactggttatcttgagttattatgaagtagttagaatatgtagtgtagcggtgaaatgcatagatattacatagaataccaattgcgaaggcagattactaataatatactgacactgatggacgaaagcgtggggagcgaacaggattagataccctggtagtccacgccgtaaacgatggtcactagctgttcgaacttcggtttgagtggctaagcgaaagtgataagtgacccacctggggagtacgttcgcaagaatgaaactcaaaggaattgacgggggcccgcacaagcggtggagcatgtggtttaattcgatgatacgcgaggaaccttaccagggcttaaatgtagattgacaggactagagatagttttttcttcggacaatttacaaggtgctgcatggttgtcgtcagctcgtgccgtgaggtgtcaggttaagtcctataacgagcgcaacccctgttgttagttgccagcgagtcatgtcgggaactctaacaagactgccagtgcaaactgtgaggaaggtggggatgacgtcaaatcatcacggcccttacgtcctgggctacacacgtgctacaatggtagggacagagagcagccactgggcgaccaggagcgaatctataaaccctatcacagttcggatcggagtctgcaactcgactccgtgaagctggaatcgctagtaatcgcatatcagccatgatgcggtgaatacgttcccgggccttgtacacaccgcccgtcaagccatggaagctgggagtgcctgaagtccgtcgccgtaaggagcggcctagggtaaaatcggtaactagggct

SEQ ID NO: 2306 - DNA, 1437 bp, Olsenella umbonata
  source 1..1437: mol_type = unassigned DNA
gatgaacgctggcggcgcgcctaacacatgcaagtcgaacggttaaagcaccttcgggtgtgtataaagtggcgaacggctgagtaacacgtgggcaacctgcccctcgcaccgggatagcctcgggaaaccgtggttaataccggatactccgggacccccgcatgggggtgccgggaaagccctgacggcgagggatgggcccgcggcctgttagcttgttggcggggtaacggcccaccaaggcgattatgggtagccgggttgagagaccgaccggccagattgggactgagacacggcccagactcctacgggaggcagcagtggggaatcttgcacaatgggcgaaagcctgatgcagcgacgccgcgtgcgggacgaaggccttcgggttgtaaaccgctttcagcagggacgaggccgcaaggtgacggtacctgcagaagaagccccggctaactacgtgccagcagccgcggtaatacgtagggggcgagcgttatccggattcattgggcgtaaagcgcgcgtaggcggcctgctaggtcgggactcaaatccgggggctcaacccccgcccggtcccgataccgacaggcttgagtctggtaggggaaggcggaattccaagtgtagcggtggaatgcgcagatatttggaagaacaccggtggcgaaggcggccttctgggccacgactgacgctgaggcgcgaaagctaggggagcgaacaggattagataccctggtagtcctagccgtaaacgatggacactaggtgtggggggatgtgccctccgtgccgcagccaacgcattaagtgtcccgcctggggagtacggccgcaaggctaaaactcaaaggaattgacgggggcccgcacaagcagcggagcatgtggcttaattcgaagcaacgcgaagaaccttaccagggcttgacattcaggtgaagcggcggaaacgccgtggccgagaggagcctgaacaggtggtgcatggctgtcgtcagctcgtgtcgtgagatgttgggttaagtcccgcaacgagcgcaaccctcgtcgcatgttgccagcggttcggccgggcacccatgcgagaccgccggcgtcaagccggaggaaggtggggacgacgtcaagtcatcatgccccttatgtcctgggctgcacacgtgctacaatgaccggcacaatgggctgccactgcgcgagcaggagcgaatccccaaagccggccccagttcggattggaggctgcaacccgcctccatgaagtcggagttgctagtaatcgcggatcagcacgccgcggtgaatgcgttcccgggccttgtacacaccgcccgtcacaccacccgagtcgtctgcacccgaagtcgtcggcccaacccgcaagggagggaggcgccgaaggtgtggagggtaaggggggtg

SEQ ID NO: 2307 - DNA, 1480 bp, Opitutus terrae
  source 1..1480: mol_type = unassigned DNA
aatgaacgctggcggcgtggttaagacatgcaagtcgaacggtttttccggtgtagcaatacatcggaaagacagtggcgaacgggtgcgtaacacgtgaacaatctacctccaaatggggaatagctcggcgaaagccggattaataccgcatgtggttgcttctcgcatgagaggtataccaaagtcggggaccgcaaggcctgacgttaggagaggagttcgcggcctatcagctagttggcgaggtaacggctcaccaaggcaaagacgggtagctggtctgagaggatgatcagccacactggaactgagacacggtccagacacctacgggtggcagcagtttcgaatcattcacaatgggcgaaagcctgatggtgcgacgccgcgtgagggatgaaggtcttcggattgtaaacctctgtcaccggggaagaaacgctttatattaatcgtataaagcctgacttaacccggagaggaagcagtggctaactctgtgccagcagccgcggtaatacagagactgcgagcgttattcggattcactgggcgtaaagggtgcgcaggcggccgggtgtgtggggcgtgaaagcctggagcttaactccagaattgcgcctcaaactacacggctagagcattggagagggtagcggaattcacggtgtagcagtgaaatgcgtagatatcgtgaggaacaccagaggcgaaggcggctacctggacaattgctgacgctcaggcacgaaagcgtggggagcaaaagggattagatacccctgtagtccacgccctaaacggtgcacactaggtcttggcggattcgacccctccagggccccagctaacgcgttaagtgtgccgcctgaggactacggccgcaaggctaaaactcaaaggaattgacgggggcccgcacaagcggtggagtatgtggctcaattcgatgcaacgcgaagaaccttaccaagccttgacatgcattggacaggcgctgaaaggcgccctcccttcggggccggtgcacaggtgctgcatggctgtcgtcagctcgtgtcgtgagatgttgcgttaagtcgcgcaacgagcgcaacccctgtccttagttgccatcattcagttgggcactctagggagacaaaccctctttgagggtgggaaggtggggatgacgtcaagtcaggatggcccttacggcttgggctgcacacgtactacaatgcccggtacagagggacgcaataccgcgaggtggagcaaatcctcaaaaccgggcccagttcagattgtagtctgcaactcgactacatgaagttggaatcgctagtaatggcgcatcagctacggcgccgtgaatacgttcccgggccttgtacacaccgcccgtcacgtcatgaaagccggtttcgcccgaagtgcgtttgccaaccagcaatggaggcggcgccctaaggtgaggctggtgattgggacg

SEQ ID NO: 2308 - DNA, 1463 bp, Orenia marismortui
  source 1..1463: mol_type = unassigned DNA
gacgaacgctggcggcgtgcttaacacatgcaagttgaacgcgaaagttaccttcgggtaatgagtagagtagcggacgggtgagtaacgcgtgggttatctacctttaagttagggataacctctcgaaagaggggctaatacctgataatctcttacgagcaaagatggcttcttcttagctatcgcttaaagatgagcctgcgtcccattagctagttggtgaggtaagagctcaccaaggcgacaatgggtagccgacctgagagggtgatcggccacactgggactgagacacggcccagactcctacgggaggctgcagtggggaatcttccgcaatggacgaaagtctgacggagcaacgccgcgtgaatgatgaaggccttcgggtcgtaaaattctgtccttagggaagaatattttggttgttaataacagctgaagttgacggtacctttggaggaagccctggctaactacgtgccagcagccgcggtaatacgtagagggcaagcgttgtccggaatcattgggcgtaaagggtacgcaggcggtctagtaagtcagaggtgaaatccaccggctcaaccggtgaactgcctttgatactgctagacttgaggataagagaagaaagcggaattcctagtgtagtggtgaaatacgtagatattaggaagaataccaatggcgaaagcagctttctaacttactcctgacgctcaggtacgaaagctagggtagcaaacgggattagataccccggtagtcctagccgtaaacgatggatactaggtgttggaggttcgattccttcggcgccgcagttaacgcattaagtatcccgcctggggattacgaccgcaaggttgaaactcaaaggaattgacgggggcccgcacaagcggtggagcatgtggtttaattcgatgcaacgcgaagaaccttaccagaacttgacatccctgtgactatttcttaaccgaaagtctcctctttgaggacacagaagacaggtggtgcatggctgtcgtcagctcgtgtcgtgagatgttgggttaagtcccgtaacgagcgcaacccctatccttagttgccagcacgtaatggtggggactctaaggagactgccgcggaaaaacgcggaggaaggtggggatgacgtcaagtcatcatgccccttatgttctgggctacacacgtgctacaatggtctatacagagggtggctacaccgcgaggtgatgctaatctctaaagtagatctcagttcggattgcaggctgaaactcgcctgcatgaagctggaatcgctagtaatcgcggatcagaatgccgcggtgaatacgttcccgggccttgtacacaccgcccgtcacaccacccgagtcgggggcaccagaagtcatcggcccaacttagtgagggagatgccgaaggtgtgcctggtaaggggggtg

SEQ ID NO: 2309 - DNA, 1466 bp, unidentified
  source 1..1466: mol_type = unassigned DNA; note = Orenia metallireducens
gacgaacgctggcggcgtgcttaacacatgcaagttgaacgcgaaagttttcttcggaaaacaagtagagtagcggacgggtgagtaacgcgtgggtaatctacctttaagttaggaataacttttcgaaagaggagctaatacctaataatctcttacgagcaaagatggcttcttcttagctatcgcttaaagatgagcctgcgtcccattagcttgttggtgaggtaaaagctcaccaaggcaacaatgggtagccgacctgagagggtgatcggccacactgggactgagacacggcccagactcctacgggaggctgcagtggggaatcttccgcaatggacgaaagtctgacggagcaacgccgcgtgaacgatgaaggccttcgggtcgtaaagttctgtcctttgggaagaatactttagttgctaataccagctatagttgacggtacctttggaggaagctctggctaactacgtgccagcagccgcggtaatacgtagagagcaagcgttgtccggaatcattgggcgtaaagggtacgcaggcggtctattaagtcagaggtgaaatccaacagctcaactgttgaactgcctttgatactggtagacttgaggataagagaagaaaacggaattcctagtgtagcggtgaaatgcgtagatattaggaagaataccaatggcgaaagcagttttctaacttactcctgacgctcaggtacgaaagctagggtagcaaacgggattagataccccggtagtcctagccgtaaacgatggatactaggtggttggggggttcgaccccctcggtgccgcagttaacgcattaagtatcccgcctggggattacgaccgcaaggttgaaactcaaaggaattgacgggggcccgcacaagcggtggagcatgtggtttaattcgatgcaacgcgaagaaccttaccagaacttgacatccctgtgactatttcttaatcgaaagtcttcccttttgggaacacaggtgacaggtggtgcatggctgtcgtcagctcgtgtcgtgagatgttgggttaagtcccgtaacgagcgcaacccctatccttagttgccagcacataatggtggggactctaaggagactgccgcggaaaaacgcggaggaaggtggggatgacgtcaagtcatcatgccccttatgttctgggctacacacgtgctacaatggcttatacagagggttgctacactgtgaagtgatgctaatctctaaagtaagtctcagttcggattgcaggctgcaactcgcctgcatgaagctggaatcgctagtaatcgtggatcagaatgccacggtgaatacgttcccgggccttgtacacaccgcccgtcacaccacccgagtcgggggcaccagaagtcgtcggcctaacttttagaaggagacgccgaaggtgcgttcggtaaggggggtg

SEQ ID NO: 2310 - DNA, 1410 bp, unidentified
  source 1..1410: mol_type = unassigned DNA; note = Oricola cellulosilytica
aacgaacgctggcggcaggcttaacacatgcaagtcgagcgccctgcttgcagggagcggcagacgggtgagtaacgcgtgggaatctacccatccctacggaatagctccgggaaactggaattaataccgtatacgcccttcgggggaaagatttatcggggatggatgagcccgcgttggattagctagttggtggggtaatggcctaccaaggcgacgatccatagctggtctgagaggatgatcagccacactgggactgagacacggcccagactcctacgggaggcagcagtggggaatattggacaatgggcgaaagcctgatccagccatgccgcgtgagtgatgaaggccctagggttgtaaagctctttcaacggtgaagataatgacggtaaccgtagaagaagccccggctaacttcgtgccagcagccgcggtaatacgaagggggctagcgttgttcggaattactgggcgtaaagcgcacgtaggcggattgatcagtcagaggtgaaatcccagggctcaaccctggaactgcctttgatactgtctgtctagaggtcgagagaggtgagtggaattccgagtgtagaggtgaaattcgtagatattcggaggaacaccagtggcgaaggcggctcactggctcgatactgacgctgaggtgcgaaagcgtggggagcaaacaggattagataccctggtagtccacgccgtaaacgatggaagctagccgtcgggcagtatactgttcggtggcgcagttaacgcattaagcttcccgcctggggagtacggtcgcaagattaaaactcaaaggaattgacgggggcccgcacaagcggtggagcatgtggtttaattcgaagcaacgcgcagaaccttaccagcccttgacatcccggtcgcggtttccagagatggattccttcagttcggctggaccggtgacaggtgctgcatggctgtcgtcagctcgtgtcgtgagatgttgggttaagtcccgcaacgagcgcaaccctcgcccttagttgccagcattcagttgggcactctaaggggactgccggtgataagccgagaggaaggtggggatgacgtcaagtcctcatggcccttacgggctgggctacacacgtgctacaatggtggtgacagtgggcagcgagactgcaaagtcgagctaatctccaaaagccatctcagttcggattgcactctgcaactcgggtgcatgaagttggaatcgctagtaatcgtggatcagcatgccacggtgaatacgttcccgggccttgtacacaccgcccgtcacaccatgggagttggttctacccgaagatggtgcgctaaccgcaagggaggcagccagccacggtagggtcagcgactggggtg

SEQ ID NO: 2311 - DNA, 1453 bp, unidentified
  source 1..1453: mol_type = unassigned DNA; note = Orrella dioscoreae
attgaacgctagcgggatgctttacacatgcaagtcgaacggcagcacggacttcggtctggtggcgagtggcgaacgggtgagtaatgtatcggaacgtgcccagtagcgggggataactacgcgaaagcgtagctaataccgcatacgccctacgggggaaagggggggatcgcaagacctctcactattggagcggccgatatcggattagctagttggtggggtaaaggcctaccaaggcaacgatccgtagctggtttgagaggacgaccagccacactgggactgagacacggcccagactcctacgggaggcagcagtggggaattttggacaatgggggaaaccctgatccagccatcccgcgtgtgcgatgaaggccttcgggttgtaaagcacttttggcaggaaagaaattgcgcatattaataccatgcgtagatgacggtacctgcagaataagcaccggctaactacgtgccagcagccgcggtaatacgtagggtgcaagcgttaatcggaattactgggcgtaaagcgtgcgcaggcggttcggaaagaaagatgtgaaatcccagggcttaaccttggaactgcatttttaactaccgggctagagtgtgtcagaggggggtggaattccgcgtgtagcagtgaaatgcgtagatatgcggaggaacaccgatggcgaaggcagccccctgggataacactgacgctcatgcacgaaagcgtggggagcaaacaggattagataccctggtagtccacgccctaaacgatgtcaactagctgttggggccttcgggccttagtagcgcagctaacgcgtgaagttgaccgcctggggagtacggtcgcaagattaaaactcaaaggaattgacggggacccgcacaagcggtggatgatgtggattaattcgatgcaacgcgaaaaaccttacctacccttgacatgtctggaatcctgaagagatttaggagtgctcgcaagagaaccggaacacaggtgctgcatggctgtcgtcagctcgtgtcgtgagatgttgggttaagtcccgcaacgagcgcaacccttgtcattagttgctacgaaagggcactctaatgagactgccggtgacaaaccggaggaaggtggggatgacgtcaagtcctcatggcccttatgggtagggcttcacacgtcatacaatggtcgggacagagggtcgccaacccgcgagggggagccaatcccagaaacccgatcgtagtccggattgtagtctgcaactcgactgcatgaagtcggaatcgctagtaatcgcggatcagcatgtcgcggtgaatacgttcccgggtcttgtacacaccgcccgtcacaccatgggagtgggttctaccagaagtagttagcctaaccgtaaggggggcgattaccacggtagggttcatgactggggtg

SEQ ID NO: 2312 - DNA, 1466 bp, unidentified
  source 1..1466: mol_type = unassigned DNA; note = Oryzomicrobium terrae
aatgaacgctggcggcatgccttacacatgcaagtcgaacggcagcatgacctagcttgctaggttgatggcgagtggcgaacgggtgagtaatgcatcggaacgtgccttttagtgggggataacgtagcgaaagttacgctaataccgcatattctccgaggaggaaagcaggggaccttcgggccttgcgctagaagagcggccgatgtcggattagctagttggtgaggtaaaggctcaccaaggcaacgatccgtagcgggtctgagaggatgatccgccacactgggactgagacacggcccagactcctacgggaggcagcagtggggaattttggacaatgggcgaaagcctgatccagccatgccgcgtgagtgaagaaggccttcgggttgtaaagctctttcggccgggacgaaatcgcattctctaatacaggatgtggatgacggtaccggaataagaagcaccggctaactacgtgccagcagccgcggtaatacgtagggtgcgagcgttattcggaattactgggcgtaaagcgtgcgcaggcggttgtgtaagacagacgtgaaatccccgggctcaacctgggaactgcgtttgtgactgcacggctagagtacggcagaggggggtggaattccacgtgtagcagtgaaatgcgtagagatgtggaggaacaccgatggcgaaggcagccccctgggccagtactgacgctcatgcacgaaagcgtggggagcaaacaggattagataccctggtagtccacgccctaaacgatgtcaactagctgttggtggggttaaacccattagtagcgtagctaacgcgtgaagttgaccgcctggggagtacggccgcaaggttaaaactcaaaggaattgacggggacccgcacaagcggtggatgatgtggattaattcgatgcaacgcgaaaaaccttacctacccttgacatgccaggaacttgccagagatggcttggtgcccgaaagggagcctggacacaggtgctgcatggctgtcgtcagctcgtgtcgtgagatgttgggttaagtcccgcaacgagcgcaacccttgtcattagttgccatcattcagttgggcactctaatgagactgccggtgacaaaccggaggaaggtggggatgacgtcaagtcctcatggcccttatgggtagggcttcacacgtcatacaatggtcggtccagagggttgccaacccgcgagggggagctaatcccagaaagccgatcgtagtccggatcgcagtctgcaactcgactgcgtgaagtcggaatcgctagtaatcgcggatcagcatgccgcggtgaatacgttcccgggtcttgtacacaccgcccgtcacaccatgggagcgggttccgccagaagtaggtagcctaaccgcaaggagggcgcttaccacggcggggttcgtgactggggtg

SEQ ID NO: 2313 - DNA, 1412 bp, Oscillatoria acuminata
  source 1..1412: mol_type = unassigned DNA
gatgaacgctggcggtctgcttaacacatgcaagtcgaacggtgaactttagggttcatagtggcggacgggtgagtaacacgtgagaatctgcctccaggtcggggacaacagtgggaaactgctgctaatacccgatgtgcctacgggtgaaagattaattgcctggagatgagctcgcgtccgattagctagttggtaaggtaaaggcttaccaaggctccgatcggtagctggtctgagaggatgagcagccacactgggactgagacacggcccagactcctacgggaggcagcagtggggaattttccgcaatgggcgaaagcctgacggagcaagaccgcgtgggggatgaaggctcttgggttgtaaaccccttttctcagggaagaataactgacggtacctgaggaataagcatcggctaactccgtgccagcagccgcggtaagacggaggatgcaagcgttatccggaattattgggcgtaaagcgttcgtaggtggctgttcaagtctgccgttaaagaccggggcttaactccggaaaaactgtggaaactgaacagctagagtatggtaggggtaaggggaattcccggtgtagcggtgaaatgcgtagatatcgggaagaacaccggtggcgaaggcgccttactgggccataactgacactgagggacgaaagctaggggagcgaaagggattagatacccctgtagtcctagctgtaaacgatggatactaggtgttgcccgtatcgacccgggcagtgccgtagctaacgcgttaagtatcccgcctggggagtacgcacgcaagtgtgaaactcaaaggaattgacgggggcccgcacaagcggtggagtatgtggtttaattcgatgcaacgcgaagaaccttaccagggcttgacatgtccagaatcttggggaaacctaagagtgccttcgggagctggaacacaggtggtgcatggctgtcgtcagctcgtgtcgtgagatgttgggttaagtcccgcaacgagcgcaaccctcgtccttagttgccatcattaagttgggcactttagggagactgccggtgacaaaccggaggaaggtggggatgacgtcaagtcagcatgccccttacgtcctgggctacacacgtactacaatgggaaggacagagggtagcaagcgcgcgagtgcaagccaatcccataaacctttcctcagttcagattgaagtttgcaactcaacttcatgaaggcggaatcgctagtaatcgcaggtcagcatactgcggtgaatacgttcccgggccttgtacacaccgcccgtcacaccatggaagttggccatgcccgaagtcattaccctaaccgcaaggagggggatgccgaaggcagggctgatgactggggtg

SEQ ID NO: 2314 - DNA, 1452 bp, unidentified
  source 1..1452: mol_type = unassigned DNA; note = Oscillatoria nigroviridis
gatgaacgctggcggtctgcttaacacatgcaagtcgaacggagtagaaatacttagtggcggacgggtgagtaacgcgtgagaatctgccttcaggacggagacaacagttggaaacgactgctaagccccgatgaaccgaaagggaaaatatttatagcctgaagatgagctcgcgtccgattagctagttggcggagtaaaagcccaccaaggcgacgatcggtagctggtctgagaggacgatcagccacactgggactgagacacggcccagactcctacgggaggcagcagtggggaattttccgcaatgggcgaaagcctgacggagcaagaccgcgtgggggaagaaggctcttgggttgtaaaccccttttctctgggaagaaagttgtgaaagcaacctgacggtaccagaggaatcagcatcggctaactccgtgccagcagccgcggtaagacggaggatgcaagcgttatccggaatgattgggcgtaaagcgtccgcaggtggcagttcaagtctgctgtcaaagaccggggcttaacttcggaaaggcagtggaaactgaacagctagagtatggtaggggcagagggaattcctggtgtagcggtgaaatgcgtagagatcaggaagaacatcggtggcgaaggcgctctgctggaccataactgacactcagggacgaaagctaggggagcgaatgggattagataccccagtagtcctagccgtaaacgatggatactaggtgttgtctgtatcgacccggacagtgccgtagctaacgcgttaagtatcccgcctggggagtacgcacgcaagtgtgaaactcaaaggaattgacgggggcccgcacaagcggtggagtatgtggtttaattcgatgcaacgcgaagaaccttaccaggacttgacatgtcgcgaatcttctggaaacagaggagtgccttcgggagcgcgaacacaggtggtgcatggctgtcgtcagctcgtgtcgtgagatgttgggttaagtcccgcaacgagcgcaaccctcgtgtttagttgccatcattaagttgggcactctaaacagactgccggtgacaaaccggaggaaggtggggatgacgtcaagtcagcatgccccttacgttctgggctacacacgtactacaatggtagggacagagggcagccaacccgcgagggcgagctaatcccgtaaaccctgcctcagttcagattgcaggctgcaactcgcctgcatgaaggcggaatcgctagtaatcgcaggtcagcatactgcggtgaatccgttcccgggccttgtacacaccgcccgtcacaccatggaagttggccacgcccgaagtcattactctaacctttcgaggaggaggatgccgaaggcagggctgatgactggggtgaagtcgtaacaaggtagccgtaccggaagg

SEQ ID NO: 2315 - DNA, 1410 bp, unidentified
  source 1..1410: mol_type = unassigned DNA; note = Otariodibacter oris
aagcttgcttttctgctgacgagtggcggacgggtgagtaatgcttgggaatctggcttatggagggggataactacgggaaactgtagctaataccgcgtaatatctacggattaaagtgtgggaccgcaaggccacatgccataagatgagcccaagtgggattaggtagttggtggggtaaaggcctaccaagccgacgatctctagctggtctgagaggatgaccagccacactggaactgagacacggtccagactcctacgggaggcagcagtggggaatattgcacaatggggggaaccctgatgcagccatgccgcgtgaatgaagaaggccttcgggttgtaaagttctttcggtgatgaggaaggctattgttttaatagaacagtagattgacgttagtcacagaagaagcaccggctaactccgtgccagcagccgcggtaatacggagggtgcgagcgttaatcggaatgactgggcgtaaagggtacgcaggcggtgacttaagtgaggtgtgaaatccctgggctcaacctaggaattgcacttcatactgggtcgctagagtattttagggaggggtagaattccacgtgtagcggtgaaatgcgtagagatgtggaggaataccgaaggcgaaggcagccccttgggaatatactgacgctcaagtacgaaagcgtggggagcaaacaggattagataccctggtagtccacgccgtaaacgatgtcgatttggggattgggctataagcttggtgcccgtagctaacgtgataaatcgaccgcctggggagtacggccgcaaggttaaaactcaaatgaattgacgggggcccgcacaagcggtggagcatgtggtttaattcgatgcaacgcgaagaaccttacctactcttgacatccatagaagaacgcagagatgtgtttgtgccttcgggaactatgagacaggtgctgcatggctgtcgtcagctcgtgttgtgaaatgttgggttaagtcccgcaacgagcgcaacccttatcctttgttgctagcaggtaatgctgagaactcaaaggagactgccagtgataaactggaggaaggtggggatgacgtcaagtcatcatggcccttacgagtagggctacacacgtgctacaatggcgtatacagagggaagcgatatagcgatatggagcgaatctcagaaagtacgtctaagtccggattggagtctgcaactcgactccatgaagtcggaatcgctagtaatcgcgaatcagaatgtcgcggtgaatacgttcccgggccttgtacacaccgcccgtcacaccatgggagtgggttgtaccagaagtagatagcttaaccttcgggggggcgtttaccacggtatgattcatgactggggt

SEQ ID NO: 2316 - DNA, 1392 bp, Pacificibacter maritimus
  source 1..1392: mol_type = unassigned DNA
aacgaacgctggcggcaggcctaacacatgcaagtcgagcgctttccttcgggaaggagcggcggacgggttagtaacgcgtgggaatgtacccttctctatggaatagcctttggaaacgaagagtaataccatatacgcccttcgggggaaagatttatcggagaaggatcagcccgcgtaagattagatagttggtggggtaatggcctaccaagtctacgatctttagctggtttgagaggatgatcagcaacactgggactgagacacggcccagactcctacgggaggcagcagtggggaatcttagacaatgggcgcaagcctgatctagccatgccgcgtgagtgatgaaggccttagggtcgtaaagctctttcacctgtgaagataatgacggtagcaggaaaagaaaccccggctaactccgtgccagcagccgcggtaatacggagggggttagcgttgttcggaattactgggcgtaaagcgtacgtaggcggattagtaagttagaggtgaaatcccatggctcaaccatggaactgcctttaaaactgctagtcttgagttcgagagaggtgagtggaattccaagtgtagaggtgaaattcgtagatatttggaggaacaccagtggcgaaggcggctcactggctcgatactgacgctgaggtacgaaagtgtggggagcaaacaggattagataccctggtagtccacaccgtaaacgatgaatgccagtcgtcgggtagcatgctgctcggtgacacacctaacggattaagcattccgcctggggagtacggtcgcaagattaaaactcaaaggaattgacgggggcccgcacaagcggtggagcatgtggtttaattcgaagcaacgcgcagaaccttaccaacccttgacatacttgtcgcggatcgtagagatactttccttcagttcggctggacaatgtacaggtgctgcatggctgtcgtcagctcgtgtcgtgagatgttcggttaagtccggcaacgagcgcaacccacatccttagttgccagcagttcggctgggcactctagggaaactgcccgtgataagcgggaggaaggtgtggatgacgtcaagtcctcatggcccttacgggttgggctacacacgtgctacaatggcagtgacaatgggttaatcccaaaaagctgtctcagttcggattggggtctgcaactcgaccccatgaagtcggaatcgctagtaatcgcgtaacagcatgacgcggtgaatacgttcccgggccttgtacacaccgcccgtcacaccatgggagttggttctacccgacgacgctgcgctaacccttcggggaggcaggcggccacggtaggatcagcgactggggtg

SEQ ID NO: 2317 - DNA, 1411 bp, unidentified
  source 1..1411: mol_type = unassigned DNA; note = Pacificimonas flava
aacgaacgctggcggcatgcctaacacatgcaagtcgaacgagaccttcgggtctagtggcgcacgggtgcgtaacacgtgggaatgtacccaggggtacggaataactcagagaaatttgagctaataccgtataatgacttcggtccaaagatttatcgcccctggatcagcccgcgccggattagcttgttggtggggtaaaggcctaccaaggcgacgatccgtagctggtctgagaggatgatcagccacactgggactgagacacggcccagactcctacgggaggcagcagtggggaatattggacaatgcacgaaagtgtgatccagcaatgccgcgtgagtgaagaaggccttagggttgtaaagctcttttaccagggatgataatgacagtacctggagaataagctccggctaactccgtgccagcagccgcggtaatacggagggagctagcgttgttcggaattactgggcgtaaagcgcgcgtaggcggcttttcaagtcagaggtgaaatcccggggcttaaccccggaactgcctttgaaactggatggctagaatcttggagaggtgagtggaattccgagtgtagaggtgaaattcgtagatattcggaagaacaccagtggcgaaggcgactcactggacaagtattgacgctgaggtgcgaaagcgtggggagcaaacaggattagataccctggtagtccacgccgtaaacgatgacaactagctgtcagggccattgtggctttggtggcgcagctaacgcattaagttgtccgcctggggagtacggtcgcaagattaaaactcaaaggaattgacgggggcctgcacaagcggtggagcatgtggtttaattcgaagcaacgcgcagaaccttaccagcgtttgacatccgggtcgcggatcgcagagatgctttccttcagttcggctggacccgtgacaggtgctgcatggctgtcgtcagctcgtgtcgtgagatgttgggttaagtcccgcaacgagcgcaaccctcatccttagttgctaccatttagttgggcactctagggaaactgccggtgataagccggaggaaggtggggatgacgtcaagtcctcatggcccttatgcgctgggctacacacgtgctacaatggcggtgacagtgagcagcgatcccgcaagggtcagctaatctccaaaaaccgtctcagttcggattgttctctgcaactcgagagcatgaaggcggaatcgctagtaatcgcggatcagcatgccgcggtgaatacgttcccaggccttgtacacaccgcccgtcacatcatgggagttggtttcacccgaaggcagtgcgctaacccgcaagggaggcagctgaccacggtgggatcagcgactgggatg

SEQ ID NO: 2318 - DNA, 1476 bp, Paenibacillus agaridevorans
  source 1..1476: mol_type = unassigned DNA
gacgaacgctggcggcgtgcctaatacatgcaagtcgagcggagttgatgaggtgcttgcacctctgatgcttagcggcggacgggtgagtaacacgtaggtaacctgcccgacagaccgggataacattcggaaacgaatgctaataccggatacgcgatttggtcgcatggccgaatcgggaaagacggagcaatctgtcactgttggatggacctgcggcgcattagctagttggtgaggtaacggctcaccaaggcgacgatgcgtagccgacctgagagggtgatcggccacactgggactgagacacggcccagactcctacgggaggcagcagtagggaatcttccgcaatgggcgaaagcctgacggagcaacgccgcgtgagtgatgaaggttttcggatcgtaaagctctgttgccagggaagaacgcttgggagagtaactgctcccaaggtgacggtacctgagaagaaagccccggctaactacgtgccagcagccgcggtaatacgtagggggcaagcgttgtccggaattattgggcgtaaagcgcgcgcaggcggttcattaagtctggtgtttaaggctggggctcaaccctggttcgcactggaaactggtggacttgagtgcagaagaggaaagtggaattccacgtgtagcggtgaaatgcgtagagatgtggaggaacaccagtggcgaaggcgactttctgggctgtaactgacgctgaggcgcgaaagcgtggggagcaaacaggattagataccctggtagtccacgccgtaaacgatgaatgctaggtgttaggggtttcgatacccttggtgccgaagttaacacattaagcattccgcctggggagtacggtcgcaagactgaaactcaaaggaattgacggggacccgcacaagcagtggagtatgtggtttaattcgaagcaacgcgaagaaccttaccaggtcttgacatccctctgaccgtcctagagatagggctttccttcgggacagaggagacaggtggtgcatggttgtcgtcagctcgtgtcgtgagatgttgggttaagtcccgcaacgagcgcaacccttgatcttagttgccagcatttcggatgggcactctaaggtgactgccggtgacaaaccggaggaaggtggggatgacgtcaaatcatctagccccttatgacctgggctacacacgtactacaatggccagtacaacgggaagcgaaaccgcgaggtggagccaatcctatcaaagctggtctcagttcggattgcaggctgcaactcgcctgcatgaagtcggaattgctagtaatcgcggatcagcatgccgcggtgaatacgttcccgggtcttgtacacaccgcccgtcacaccacgagagtttacaacacccgaagtcggtggggtaacccgcaagggagccagccgccgaaggtgggtagatgattggggtg

SEQ ID NO: 2319 - DNA, 1476 bp, Paenibacillus algorifonticola
  source 1..1476: mol_type = unassigned DNA
gacgaacgctggcggcgtgcctaatacatgcaagtcgagcggagttgatagagtgcttgcactcttgatgcttagcggcggacgggtgagtaacacgtaggtaacctgcccgtaagactgggataacattcggaaacgaatgctaataccggatacacaacttggtcgcatgatcgagttgggaaagacggagcaatctgtcacttacggatggacctgcggcgcattagctagttggtgaggtaacggctcaccaaggcgacgatgcgtagccgacctgagagggtgatcggccacactgggactgagacacggcccagactcctacgggaggcagcagtagggaatcttccgcaatggacgaaagtctgacggagcaacgccgcgtgagtgatgaaggttttcggatcgtaaagctctgttgccagggaagaacgctaaggagagtaactgctccttaggtgacggtacctgagaagaaagccccggctaactacgtgccagcagccgcggtaatacgtagggggcaagcgttgtccggaattattgggcgtaaagcgcgcgcaggcggccttgtaagtctgttgtttcaggcacaagctcaacttgtgttcgcaatggaaactgcaaagcttgagtgcagaagaggaaagtggaattccacgtgtagcggtgaaatgcgtagagatgtggaggaacaccagtggcgaaggcgactttctgggctgtaactgacgctgaggcgcgaaagcgtggggagcaaacaggattagataccctggtagtccacgccgtaaacgatgaatgctaggtgttaggggtttcgatacccttggtgccgaagttaacacattaagcattccgcctggggagtacggtcgcaagactgaaactcaaaggaattgacggggacccgcacaagcagtggagtatgtggtttaattcgaagcaacgcgaagaaccttaccaggtcttgacatccctctgaccggtacagagatgtacctttccttcgggacagaggagacaggtggtgcatggttgtcgtcagctcgtgtcgtgagatgttgggttaagtcccgcaacgagcgcaacccttgatcttagttgccagcaggtagagctgggcactctaggatgactgccggtgacaaaccggaggaaggtggggatgacgtcaaatcatcatgccccttatgacctgggctacacacgtactacaatggccgatacaacgggaagcgaaaccgcgaggtggagccaatcctatcaaagtcggtctcagttcggattgcaggctgcaactcgcctgcatgaagtcggaattgctagtaatcgcggatcagcatgccgcggtgaatacgttcccgggtcttgtacacaccgcccgtcacaccacgagagtttacaacacccgaagccggtggggtaaccgcaaggagccagccgtcgaaggtggggtagatgattggggtg

SEQ ID NO: 2320 - DNA, 1480 bp, Paenibacillus antarcticus
  source 1..1480: mol_type = unassigned DNA
gacgaacgctggcggcatgcctaatacatgcaagtcgagcggagttgttttggaagcttgcttccaaaacaacttagcggcggacgggtgagtaacacgtaggtaacctgcctataagactgggataactaccggaaacggtagctaataccggataatttgtttcttctcatgaagaggcactgaaaggcggagtaatctgccacttatagatgggcctgcggcgcattagctagttggtgaggtaacggctcaccaaggcgacgatgcgtagccgacctgagagggtgaacggccacactgggactgagacacggcccagactcctacgggaggcagcagtagggaatcttccgcaatggacgaaagtctgacggagcaatgccgcgtgagtgatgaaggttttcggatcgtaaagctctgttgccagggaagaatgcttgggagagtaactgctctcaaggtgacggtacctgagaagaaagccccggctaactacgtgccagcagccgcggtaatacgtagggggcaagcgttgtccggaattattgggcgtaaagcgcgcgcaggcggtcatttaagtctggtgtttaatcccggggctcaaccccgggtcgcactggaaactggatgacttgagtacagaagaggagagtggaattccacgtgtagcggtgaaatgcgtagatatgtggaggaacaccagtggcgaaggcgactctctgggctgtaactgacgctgaggcgcgaaagcgtggggagcaaacaggattagataccctggtagtccacgccgtaaacgatgagtgctaggtgttaggggtttcgatacccttggtgccgaagttaacacattaagcactccgcctggggagtacggtcgcaagactgaaactcaaaggaattgacggggacccgcacaagcagtggagtatgtggtttaattcgaagcaacgcgaagaaccttaccaggtcttgacatccctctgaatccactagagatagtggcggccttcgggacagaggagacaggtggtgcatggttgtcgtcagctcgtgtcgtgagatgttgggttaagtcccgcaacgagcgcaacccttatatttagttgccagcacattatggtgggcactctagatagactgccggtgacaaaccggaggaaggtggggatgacgtcaaatcatcatgccccttatgacctgggctacacacgtactacaatggccggtacaacgggctgcgaaatcgcgagatggagccaatcccaacaaagccggtctcagttcggattgcaggctgcaacccgcctgcatgaagtcggaattgctagtaatcgcggatcagcatgccgcggtgaatacgttcccgggtcttgtacacaccgcccgtcacaccacgagagtttacaacacccgaagtcggtggggtaacccgcaagggagccagccgccgaaggtggggtagatgattggggtg

SEQ ID NO: 2321 - DNA, 1465 bp, unidentified
  source 1..1465: mol_type = unassigned DNA; note = Paenibacillus aquistagni
  misc_difference 11: note = n is a, c, g, or t
ggcggcgtgcntaatacatgcaagtcgagcggagtcttacactttcttcggaaagtgtttggcttagcggcggacgggtgagtaacacgtaggtaacctgcccataagactgggataacccacggaaacgtgagctaataccagataggcatcttcttcgcatgaaggagatgagaaagacggtttcggctgtcacttatggatggacctgcggcgcattagctagttggtgaggtaacggctcaccaaggcgacgatgcgtagccgacctgagagggtgatcggccacactgggactgagacacggcccagactcctacgggaggcagcagtagggaatcttccgcaatgggcgaaagcctgacggagcaacgccgcgtgagtgatgaaggttttcggatcgtaaagctctgttgccaaggaagaacgctcaggagagtaactgctcttgaggtgacggtacttgagaagaaagccccggctaactacgtgccagcagccgcggtaatacgtagggggcaagcgttgtccggaattattgggcgtaaagcgcgcgcaggcggcgatgtaagttgggtgtttaaacctagggctcaaccttgggtcgcacccaaaactgcatggcttgagtgcagcagaggaaagtggaattccacgtgtagcggtgaaatgcgtagagatgtggaggaacaccagtggcgaaggcgactttctgggctgtaactgacgctgaggcgcgaaagcgtggggagcaaacaggattagataccctggtagtccacgccgtaaacgatgaatgctaggtgttaggggtttcgatacccttggtgccgaagttaacacattaagcattccgcctggggagtacggtcgcaagactgaaactcaaaggaattgacggggacccgcacaagcagtggagtatgtggtttaattcgaagcaacgcgaagaaccttaccaggtcttgacatctgaatgaccgtcctagagataggactttccttcgggacattcaagacaggtggtgcatggttgtcgtcagctcgtgtcgtgagatgttgggttaagtcccgcaacgagcgcaacccttaactttagttgccagcattaagttgggcactctagagtgactgccggtgacaaaccggaggaaggtggggatgacgtcaaatcatcatgccccttatgacctgggctacacacgtactacaatggtcggtacaacgggaagcgaagccgcgaggtggagccaatcctaaaaagccgatctcagttcggattgcaggctgcaactcgcctgcatgaagtcggaattgctagtaatcgcggatcagcatgccgcggtgaatacgttcccgggtcttgtacacaccgcccgtcacaccacgagagtttacaacacccgaagtcggtgaggtaaccgcaaggggccagccgccgaaggtggggtagatgatkggggtg

SEQ ID NO: 2322 - DNA, 1468 bp, unidentified
  source 1..1468: mol_type = unassigned DNA; note = Paenibacillus baekrokdamisoli
gacgaacgctggcggcgtgcctaatacatgcaagtcgagcggatttaagaggaagcttgcttccgattaaattagcggcggacgggtgagtaacacgtaggcaacctgcctacaagatcgggataacattcggaaacgaatgctaataccggatacacaatttggctgcatggccgaattgggaaaggcggagcaatctgccgcttgtagatgggcctgcggcgcattagctagttggtgaggtaacggctcaccaaggcgacgatgcgtagccgacctgagagggtgatcggccacactgggactgagacacggcccagactcctacgggaggcagcagtagggaatcttccgcaatggacgaaagtctgacggagcaacgccgcgtgagtgatgaaggttctcggatcgtaaagctctgttgccagggaagaacagcgaggagagtaactgctcctcgtgtgacggtacctgagaagaaagccccggctaactacgtgccagcagccgcggtaatacgtagggggcaagcgttgtccggaattattgggcgtaaagcgcgcgcaggcggccttgtaagtctagtgtttaatctcggagctcaactccgattcgcactggaaactgcaaagcttgagtacagaagaggaaagtggaattccacgtgtagcggtgaaatgcgtagagatgtggaggaacaccagtggcgaaggcgactttctgggctgtaactgacgctgaggcgcgaaagcgtggggagcaaacaggattagataccctggtagtccacgccgtaaacgatgaatgctaggtgttaggggtttcaatacccttggtgccgaagttaacacattaagcattccgcctggggagtacgctcgcaagagtgaaactcaaaggaattgacggggacccgcacaagcagtggagtatgtggtttaattcgaagcaacgcgaagaaccttaccagctcttgacatcccgatgtaagcattagagatagtgcccctcttcggagcatcggagacaggtggtgcatggttgtcgtcagctcgtgtcgtgagatgttgggttaagtcccgcaacgagcgcaacccttgatcttagttgccagcaggttaagctgggcactctaaggtgactgccggtgacaaaccggaggaaggtggggatgacgtcaaatcatcatgccccttatgagctgggctacacacgtactacaatggccggtacaacgggcagcgataccgcgaggtggagcgaatccttaaaagccggtctcagttcggattgcaggctgcaactcgcctgcatgaagtcggaattgctagtaatcgcggatcagcatgccgcggtgaatacgttcccgggtcttgtacacaccgcccgtcacaccacgagagtttacaacacccgaagtcggtggggtaacccgcaagggagccagccgccgaaggtggggtagatg

SEQ ID NO: 2323 - DNA, 1473 bp, unidentified
  source 1..1473: mol_type = unassigned DNA; note = Paenibacillus beijingensis
gacgaacgctggcggcgtgcctaatacatgcaagtcgagcggacttgaagggagcttgctcccggatagttagcggcggacgggtgagtaacacgtaggcaacctgcctgtaagaccgggataaccttcggaaacgaaagctaataccggataagcggttcctttgcatagaggaaccgggaaagacggcgcaagctgtcacttgcagatgggcctgcggcgcattagctagttggtggggtaacggctcaccaaggcgacgatgcgtagccgacctgagagggtgatcggccacactgggactgagacacggcccagactcctacgggaggcagcagtagggaatcttccgcaatggacgaaagtctgacggagcaacgccgcgtgagtgaggaaggccttcgggtcgtaaagctctgttgccagggaagaatgtcgcggagagtaactgctctgcgaatgacggtacctgagaagaaagccccggctaactacgtgccagcagccgcggtaatacgtagggggcaagcgttgtccggaattattgggcgtaaagcgcgcgcaggcggctttgtaagtctggtgtttaaccctcgggctcaacctgaggtcgcatcggaaactgcaaggcttgagtacagaagaggaaagtggaattccacgtgtagcggtgaaatgcgtagagatgtggaggaacaccagtggcgaaggcgactttctgggctgtaactgacgctgaggcgcgaaagcgtggggagcaaacaggattagataccctggtagtccacgccgtaaacgatgaatgctaggtgttaggggtttcgatacccttggtgccgaagttaacacagtaagcattccgcctggggagtacgctcgcaagagtgaaactcaaaggaattgacggggacccgcacaagcagtggagtatgtggtttaattcgaagcaacgcgaagaaccttaccaggtcttgacatccccctgaatccgctagagatagcggcggccttcgggacaggggagacaggtggtgcatggttgtcgtcagctcgtgtcgtgagatgttgggttaagtcccgcaacgagcgcaacccttaggttcagttgccagcacgtaatggtgggcactctgaaacgactgccggtgacaaaccggaggaaggtggggatgacgtcaaatcatcatgccccttatgacctgggctacacacgtactacaatggccggtacaacgggctgcgaagccgcgaggcggagccaatcctataaagccggtctcagttcggattgcaggctgcaactcgcctgcatgaagtcggaattgctagtaatcgcggatcagcatgccgcggtgaatacgttcccgggtcttgtacacaccgcccgtcacaccacgagagtttacaacacccgaagtcggtggggtaaccgcaaggagccagccgccgaaggtggggtagatgattggggtg

SEQ ID NO: 2324 - DNA, 1480 bp, Paenibacillus borealis
  source 1..1480: mol_type = unassigned DNA
gacgaacgctggcggcgtgcctaatacatgcaagtcgagcggagtttgaatggaagcttgcttccattcctgcttagcggcggacgggtgagtaacacgtaggcaacctgccctcaagactgggataactaccggaaacggtagctaataccggataatttctttcctctcctgaagagagaatgaaaggcggagcaatctgtcgcttggggatgggcctgcggcgcattagctagttggtggggtaacggctcaccaaggcgacgatgcgtagccgacctgagagggtgaacggccacactgggactgagacacggcccagactcctacgggaggcagcagtagggaatcttccgcaatgggcgaaagcctgacggagcaacgccgcgtgagtgatgaaggttttcggatcgtaaagctctgttgccagggaagaacgtccggtagaataactgctaccggagtgacggtacctgagaagaaagccccggctaactacgtgccagcagccgcggtaatacgtagggggcaagcgttgtccggaattattgggcgtaaagcgcgcgcaggcggtcatttaagtctggtgtttaaaccttgggctcaacctgaggtcgcactggaaactgggtgacttgagtacagaagaggaaagtggaattccacgtgtagcggtgaaatgcgtagatatgtggaggaacaccagtggcgaaggcgactttctgggctgtaactgacgctgaggcgcgaaagcgtggggagcaaacaggattagataccctggtagtccacgccgtaaacgatgagtgctaggtgttaggggtttcgatacccttggtgccgaagttaacacagtaagcactccgcctggggagtacggtcgcaagactgaaactcaaaggaattgacggggacccgcacaagcagtggagtatgtggtttaattcgaagcaacgcgaagaaccttaccaggtcttgacatccctctgaatccgctagagatagcggcggccttcgggacagaggagacaggtggtgcatggttgtcgtcagctcgtgtcgtgagatgttgggttaagtcccgcaacgagcgcaacccttgactttagttgccagcaggttaagctgggcactctagagtgactgccggtgacaaaccggaggaaggtggggatgacgtcaaatcatcatgccccttatgacctgggctacacacgtactacaatggccggtacaacgggaagcgaaaccgcgaggtggagccaatcccagcaaagccggtctcagttcggattgcaggctgcaactcgcctgcatgaagtcggaattgctagtaatcgcggatcagcatgccgcggtgaatacgttcccgggtcttgtacacaccgcccgtcacaccacgagagtttacaacacccgaagtcggtggggtaacccgcaagggagccagccgccgaaggtggggtagatgattggggtg

SEQ ID NO: 2325 - DNA, 1477 bp, unidentified
  source 1..1477: mol_type = unassigned DNA; note = Paenibacillus bovis
gacgaacgctggcggcgtgcctaatacatgcaagtcgagcggagttaataggaagcttgcttccttgagacttagcggcggacgggtgagtaacacgtaggcaacctgcccctcagactgggataactaccggaaacggtagctaataccggataatcgatttcttctcctgaagagaccgggaaagacggagcaatctgtcactgagggatgggcctgcggcgcattagctagttggtggggtaacggctcaccaaggcgacgatgcgtagccgacctgagagggtgatcggccacactgggactgagacacggcccagactcctacgggaggcagcagtagggaatcttccgcaatggacgaaagtctgacggagcaacgccgcgtgagtgatgaaggttttcggatcgtaaagctctgttgccagggaagaacgtcttctagagtaactgctagaagagtgacggtacctgagaagaaagccccggctaactacgtgccagcagccgcggtaatacgtagggggcaagcgttgtccggaattattgggcgtaaagcgcgcgcaggcggtcatttaagtctggtgtttaatcccgaagctcaacttcgggtcgcatcggaaactggatgacttgagtgcagaagaggagagtggaattccacgtgtagcggtgaaatgcgtagagatgtggaggaacaccagtggcgaaggcgactctctgggctgtaactgacgctgaggcgcgaaagcgtggggagcaaacaggattagataccctggtagtccacgccgtaaacgatgaatgctaggtgttaggggtttcgatacccttggtgccgaagttaacacattaagcattccgcctggggagtacggtcgcaagactgaaactcaaaggaattgacggggacccgcacaagcagtggagtatgtggtttaattcgaagcaacgcgaagaaccttaccaggtcttgacatctgaatgaccggtgcagagatgtaccttttcttcggaacattcaagacaggtggtgcatggttgtcgtcagctcgtgtcgtgagatgttgggttaagtcccgcaacgagcgcaacccttatgcttagttgccagcacattatggtgggcactctaagcagactgccggtgacaaaccggaggaaggtggggatgacgtcaaatcatcatgccccttatgacctgggctacacacgtactacaatggtcggtacaacgggaagcgaagccgcgaggtggagcgaatcctaaaaagccgatctcagttcggattgcaggctgcaactcgcctgcatgaagtcggaattgctagtaatcgcggatcagcatgccgcggtgaatacgttcccgggtcttgtacacaccgcccgtcacaccacgagagtttgcaacacccgaagtcggtggggtaacccgcaagggagccagccgccgaaggtggggtagatgattggggtg

SEQ ID NO: 2326 - DNA, 1467 bp, unidentified
  source 1..1467: mol_type = unassigned DNA; note = Paenibacillus catalpae
gacgaacgctggcggcgtgcctaacacatgcaagtcgagcggatcttgttcttcgggacaaggttagcggcggacgggtgagtaacacgtgggtaacctgcccataagactgggataacattcggaaacgaatgctaataccggatacgcgaatcggtcgcatggccgaatcgggaaaggcggagcaatctgccacttatggatggacccgcggcgcattagctagttggtggggtaacggctcaccaaggcgacgatgcgtagccgacctgagagggtgatcggccacactgggactgagacacggcccagactcctacgggaggcagcagtagggaatcttccgcaatggacgaaagtctgacggagcaacgccgcgtgagtgatgaaggttttcggatcgtaaagctctgttgccagggaagaacgcttacgagagtaactgctcgtaaggtgacggtacctgagaagaaagccccggctaactacgtgccagcagccgcggtaatacgtagggggcaagcgttgtccggaattattgggcgtaaagcgcgcgcaggcggccttgtaagtctgtcgtttaaactcggagctcaacttcgagtcgcgatggaaactgcaaagcttgagtgcagaagaggaaagtggaattccacgtgtagcggtgaaatgcgtagagatgtggaggaacaccagtggcgaaggcgactttctgggctgtaactgacgctgaggcgcgaaagcgtggggagcaaacaggattagataccctggtagtccacgccgtaaacgatgaatgctaggtgttaggggtttcgatacccttggtgccgaagttaacacattaagcattccgcctggggagtacggtcgcaagactgaaactcaaaggaattgacggggacccgcacaagcagtggagtatgtggtttaattcgaagcaacgcgaagaaccttaccaggtcttgacatccctctgaccgtcctagagatagggctttccttcgggacagaggagacaggtggtgcatggttgtcgtcagctcgtgtcgtgagatgttgggttaagtcccgcaacgagcgcaacccttgatcttagttgccagcactttgggtgggcactctaggatgactgccggtgacaaaccggaggaaggtggggatgacgtcaaatcatcatgccccttatgacctgggctacacacgtactacaatggccgatacaacgggaagcgaaaccgcgaggtggagccaatcctatcaaagtcggtctcagttcggattgcaggctgcaactcgcctgcatgaagtcggaattgctagtaatcgcggatcagcatgccgcggtgaatacgttcccgggtcttgtacacaccgcccgtcacaccacgagagtttacaacacccgaagccggtggggtaaccgcatggagccagccgtcgaaggtggggtagatgattggggtg

SEQ ID NO: 2327 - DNA, 1474 bp, Paenibacillus cellulosilyticus
  source 1..1474: mol_type = unassigned DNA
gacgaacgctggcggcgtgcctaatacatgcaagtcgagcggagttgatgaggtgcttgcacctctgatgcttagcggcggacgggtgagtaacacgtaggcaacctgcctgcaggactgggataacattcggaaacgaatgctaataccggataatcgatttcctcgcatggggagatcgggaaagacggagcaatctgtcacctgtggatgggcctgcggcgcattagctagttggtggggtaacggcctaccaaggcgacgatgcgtagccgacctgagagggtgatcggccacactgggactgagacacggcccagactcctacgggaggcagcagtagggaatcttccgcaatggacgaaagtctgacggagcaacgccgcgtgagtgatgaaggctttcgggtcgtaaagctctgttgccagggaagaacacttgggagagtaactgctcttaaggtgacggtacctgagaagaaagccccggctaactacgtgccagcagccgcggtaatacgtagggggcaagcgttgtccggaattattgggcgtaaagcgcgcgcaggcggctttgtaagtctgtcgtttaagttcggggctcaaccccgtatcgcgatggaaactgcaaggcttgagtgcagaagaggaaagtggaattccacgtgtagcggtgaaatgcgtagagatgtggaggaacaccagtggcgaaggcgactttctgggctgtaactgacgctgaggcgcgaaagcgtggggagcaaacaggattagataccctggtagtccacgccgtaaacgatgaatgctaggtgttaggggtttcaatacccttggtgccgaagttaacacattaagcattccgcctggggagtacgctcgcaagagtgaaactcaaaggaattgacggggacccgcacaagcagtggagtatgtggtttaattcgaagcaacgcgaagaaccttaccaggtcttgacatccctctgaccggtctggagacaggccttcccttcgggacagaggagacaggtggtgcatggttgtcgtcagctcgtgtcgtgagatgttgggttaagtcccgcaacgagcgcaacccttgattttagttgccagcacttcggatgggcactctagaatgactgccggtgacaaaccggaggaaggcggggatgacgtcaaatcatcatgccccttatgacctgggctacacacgtactacaatggccggtacaacgggctgcgaaggagcgatccggagcgaatcctataaagccggtctcagttcggattggaggctgcaactcgcctccatgaagtcggaattgctagtaatcgcggatcagcatgccgcggtgaatacgttcccgggtcttgtacacaccgcccgtcacaccacgagagtttacaacacccgaagccggtggggtaaccgcaaggagccagccgtcgaaggtggggtagatgattggggtg

SEQ ID NO: 2328 - DNA, 1476 bp, Paenibacillus chitinolyticus
  source 1..1476: mol_type = unassigned DNA
gacgaacgctggcggcgtgcctaatacatgcaagtcgagcggacttgatgagaagcttgcttctctgatggttagcggcggacgggtgagtaacacgtaggcaacctgcctgtaagatcgggataactaccggaaacggtagctaagaccggataaccggtttctccgcatggagagatcgtgaaacacggagcaatctgtggcttacggatgggcctgcggcgcattagctagttggtgaggtaacggctcaccaaggcgacgatgcgtagccgacctgagagggtgaacggccacactgggactgagacacggcccagactcctacgggaggcagcagtagggaatcttccgcaatggacgcaagtctgacggagcaacgccgcgtgagtgatgaaggttttcggatcgtaaagctctgttgccagggaagaacgccaaggagagtaactgctctttgggtgacggtacctgagaagaaagccccggctaactacgtgccagcagccgcggtaatacgtagggggcaagcgttgtccggaattattgggcgtaaagcgcgcgcaggcggttttttaagtctggtgtttaatcccgaggctcaacctcggttcgcaccggaaactgggagactggagtgcaggagaggaaagtggaattccacgtgtagcggtgaaatgcgtagagatgtggaggaacaccagtggcgaaggcgactttctggcctgtaactgacgctgaggcgcgaaagcgtggggagcaaacaggattagataccctggtagtccacgccgtaaacgatgcatgctaggtgttaggggtttcgatacccttggtgccgaagttaacacagtaagcatgccgcctggggagtacgctcgcaagagtgaaactcaaaggaattgacggggacccgcacaagcagtggagtatgtggtttaattcgaagcaacgcgaagaaccttaccaggtcttgacatccctctgaccggcttagagataagcctttccttcgggacagaggtgacaggtggtgcatggttgtcgtcagctcgtgtcgtgagatgttgggttaagtcccgcaacgagcgcaacccttgaacttagttgccagcaggtgaagctgggcactctaagttgactgccggtgacaaaccggaggaaggcggggatgacgtcaaatcatcatgccccttatgacctgggctacacacgtactacaatggccggtacaacgggaagcgaagccgcgaggtggagccaatcctacaaaagccggtctcagttcggattgcaggctgcaactcgcctgcatgaagtcggaattgctagtaatcgcggatcagcatgccgcggtgaatacgttcccgggtcttgtacacaccgcccgtcacaccacgagagtttacaacacccgaagtcggtgaggtaaccgcaaggggccagccgccgaaggtggggtagatgattggggtg

SEQ ID NO: 2329 - DNA, 1453 bp, Paenibacillus contaminans
  source 1..1453: mol_type = unassigned DNA
ggcggcgtgcctaatacatgcaagtcgagcggatctttccttcgggaaaggttagcggcggacgggtgagtaacacgtaggcaacctgcctgtaagatcgggataactcacggaaacgtgtgctaaaaccggataggtggtttctcctcctggagagatcaggaaagacggcgcaagctgtcacttacagatgggcctgcggcgcattagctagttggtgaggtaacggctcaccaaggcgacgatgcgtagccgacctgagagggtgaacggccacactgggactgagacacggcccagactcctacgggaggcagcagtagggaatcttcggcaatggacgaaagtctgaccgagcaacgccgcgtgagtgatgaaggttttcggatcgtaaaactctgttgccagggaagaaggatgaggagagtaactgctcttcatttgacggtacctgagaagaaagccccggctaactacgtgccagcagccgcggtaatacgtagggggcaagcgttgtccggaattattgggcgtaaagcgcgcgcaggcggtcttttaagttcggtgtttaaacccagggctcaaccttgggtcgcactggaaactgggagactggagtgtaggagaggaaagtggaattccacgtgtagcggtgaaatgcgtagagatgtggaggaacaccagtggcgaaggcgactttctggcctataactgacgctgaggcgcgaaagcgtggggagcaaacaggattagataccctggtagtccacgccgtaaacgatgcatgctaggtgttaggggtttcgatacccttggtgccgaagtaaacacattaagcatgccgcctggggagtacgctcgcaagagtgaaactcaaaggaattgacggggacccgcacaagcagtggagtatgtggtttaattcgaagcaacgcgaagaaccttaccaggtcttgacatctggatgcaagcactagagatagtgccctccttcgggacatccaagacaggtggtgcatggttgtcgtcagctcgtgtcgtgagatgttgggttaagtcccgcaacgagcgcaacccttgatcttagttgccagcattgagttgggcactctaggatgactgccggtgacaaaccggaggaaggtggggatgacgtcaaatcatcatgccccttatgacctgggctacacacgtactacaatggccggtacaacgggctgcgaagccgcgaggtggagccaatcctaaaaagccggtctcagttcggattgcaggctgcaactcgcctgcatgaagtcggaattgctagtaatcgcggatcagcatgccgcggtgaatacgttcccgggtcttgtacacaccgcccgtcacaccacgagagtttacaacacccgaagtcggtgaggtaaccgcaaggagccagccgccgaaggtggggtagatgattggggtg

SEQ ID NO: 2330 - DNA, 1478 bp, unidentified
  source 1..1478: mol_type = unassigned DNA; note = Paenibacillus crassostreae
gacgaacgctggcggcgtgcctaatacatgcaagtcgagcggagtgatttgaaagcttgctttcaaatcacttagcggcggacgggtgagtaacacgtaggtaacctgcctgtaagactgggataactaccggaaacggtagctaataccggataacttgtttcctctcctggggagacactgaaaggcggagcaatctgccacttacagatgggcctgcggcgcattagctagttggtgaggtaacggctcaccaaggcgacgatgcgtagccgacctgagagggtgaacggccacactgggactgagacacggcccagactcctacgggaggcagcagtagggaatcttccgcaatggacgaaagtctgacggagcaacgccgcgtgagtgatgaaggttttcggatcgtaaagctctgttgccagggaagaacgcttgggagagtaactgctctcaaggtgacggtacctgagaagaaagccccggctaactacgtgccagcagccgcggtaatacgtagggggcaagcgttgtccggaattattgggcgtaaagcgcgcgcaggcggtcatttaagtttggtgtttaattccagggctcaaccctgggtcgcactgaaaactgggtgacttgagtacagaagaggagagtggaattccacgtgtagcggtgaaatgcgtagatatgtggaggaacaccagtggcgaaggcgactctctgggctgtaactgacgctgaggcgcgaaagcgtggggagcaaacaggattagataccctggtagtccacgccgtaaacgatgagtgctaggtgttaggggtttcgatacccttggtgccgaagttaacacattaagcactccgcctggggagtacggtcgcaagactgaaactcaaaggaattgacggggacccgcacaagcagtggagtatgtggtttaattcgaagcaacgcgaagaaccttaccaggtcttgacatccctctgaatccactagagatagtggcggccttcgggacagaggagacaggtggtgcatggttgtcgtcagctcgtgtcgtgagatgttgggttaagtcccgcaacgagcgcaacccttatgcttagttgccagcacattatggtgggcactctaagcagactgccggtgacaaaccggaggaaggtggggatgacgtcaaatcatcatgccccttatgacctgggctacacacgtactacaatggccagtacaacgggctgcgaaaccgcgaggtggagccaatcccaacaaagctggtctcagttcggattgtaggctgcaacccgcctacatgaagtcggaattgctagtaatcgcggatcagcatgccgcggtgaatacgttcccgggtcttgtacacaccgcccgtcacaccacgagagtttacaacacccgaagtcggtggggtaacccgcaagggagccagccgccgaaggtggggtagatgattggggtg

SEQ ID NO: 2331 - DNA, 1475 bp, Paenibacillus curdlanolyticus
  source 1..1475: mol_type = unassigned DNA
gacgaacgctggcggcgtgcctaatacatgcaagtcgagcggacttgatggagtgcttgcactcctgaaagttagcggcggacgggtgagtaacacgtaggcaacctgcccgtaagactgggataacattcggaaacgaatgctaataccggataggcgattttctcgcatgagagaatcgggaaagaaggagcaatctttcacttacggatgggcctgcggcgcattagctagttggtggggtaatggctcaccaaggcgacgatgcgtagccgacctgagagggtgatcggccacactgggactgagacacggcccagactcctacgggaggcagcagtagggaatcttccgcaatggacgaaagtctgacggagcaacgccgcgtgagtgaagaaggctttcgggtcgtaaagctctgttgccagggaagaacacttgagagagtaactgctcttgagttgacggtacctgagaagaaagccccggctaactacgtgccagcagccgcggtaatacgtagggggcaagcgttgtccggaattattgggcgtaaagcgcgcgcaggcggctttgtaagtctgtcgtttaagttcggggctcaaccccgtgtcgcgatggaaactgcaaggcttgagtacagaagaggaaagtggaattccacgtgtagcggtgaaatgcgtagagatgtggaggaacaccagtggcgaaggcgactttctgggctgtaactgacgctgaggcgcgaaagcgtggggagcaaacaggattagataccctggtagtccacgccgtaaacgatgaatgctaggtgttaggggtttcaatacccttggtgccgaagttaacacattaagcattccgcctggggagtacgctcgcaagagtgaaactcaaaggaattgacggggacccgcacaagcagtggagtatgtggtttaattcgaagcaacgcgaagaaccttaccaggtcttgacatccctctgaccgtcgcagagatgtgacttcccttcggggcagaggagacaggtggtgcatggttgtcgtcagctcgtgtcgtgagatgttgggttaagtcccgcaacgagcgcaacccttgattttagttgccagcactttaaggtgggcactctagaatgactgccggtgacaaaccggaggaaggcggggatgacgtcaaatcatcatgccccttatgacctgggctacacacgtactacaatggccggtacaacgggctgcgaaagagcgatctggagcgaatcctataaagccggtctcagttcggattgcaggctgcaactcgcctgcatgaagtcggaattgctagtaatcgcggatcagcatgccgcggtgaatacgttcccgggtcttgtacacaccgcccgtcacaccacgagagtttacaacacccgaagccggtggggtaaccgcaaggagccagccgtcgaaggtggggtagatgattggggtg

SEQ ID NO: 2332 - DNA, 1434 bp, unidentified
  source 1..1434: mol_type = unassigned DNA; note = Paenibacillus darwinianus
gacgaacgctggcggcgtgcctaatacatgcaagtcgagcggatttagtcgggagcttgctcctgactgagttagcggcggacgggtgagtaacacgtaggtaacctgcccgtaagaccgggataacattcggaaacggatgctaatagcggatacgcaataccctcgcatgggggaattgggaaaggcggagcaatctgccgcttacggatggacctgcggcgcattagctagttggtgaggtaacggctcaccaaggcgacgatgcgtagccgacctgagagggtgatcggccacactgggactgagacacggcccagactcctacgggaggcagcagtagggaatcttccgcaatggacgaaagtctgacggagcaacgccgcgtgagtgaggaaggccttcgggtcgtaaagctctgttgccagggaagaacgggtaggagagtaactgctcttgccatgacggtacctgagaagaaagccccggctaactacgtgccagcagccgcggtaatacgtagggggcaagcgttgtccggaattattgggcgtaaagcgcgcgcaggcggctttgtaagtcttgtgtttaaacgtggggctcaactccaggtcgcatgggaaactgcaaggcttgagtgcagaagaggaaagtggaattccacgtgtagcggtgaaatgcgtagagatgtggaggaacaccagtggcgaaggcgactttctgggctgtaactgacgctgaggcgcgaaagcgtggggagcaaacaggattagataccctggtagtccacgccgtaaacgatgaatgctaggtgttaggggtttcgatacccttggtgccgaagttaacacattaagcattccgcctggggagtacggtcgcaagactgaaactcaaaggaattgacggggacccgcacaagcagtggagtatgtggtttaattcgaagcaacgcgaagaaccttaccaggtcttgacatccccctgaccgcatcagagatggtgttttccttcgggacaggggagacaggtggtgcatggttgtcgtcagctcgtgtcgtgagatgttgggttaagtcccgcaacgagcgcaacccttgatgttagttgccagcaggtaaagctgggcactctaagatgactgccggtgacaaaccggaggaaggtggggatgacgtcaaatcatcatgccccttatgacctgggctacacacgtactacaatggccggtacaacgggaagcgaagtcgcgagatggagccaatcctatcaaagccggtctcagttcggattgcaggctgcaactcgcctgcatgaagtcggaattgctagtaatcgcggatcagcatgccgcggtgaatacgttcccgggtcttgtacacaccgcccgtcacaccacgagagtttacaacacccgaagccggtggggtaacc

SEQ ID NO: 2333 - DNA, 1480 bp, unidentified
  source 1..1480: mol_type = unassigned DNA; note = Paenibacillus donghaensis
gacgaacgctggcggcatgcctaatacatgcaagtcgagcggagttcaatcggaagcttgcttccgattggattcagcggcggacgggtgagtaacacgtaggcaacctgccccttagcctgggataactaccggaaacggtagctaataccggataattccttggttctcctgaaccgaggatgaaaggcggagcaatctgcccttaagggatgggcctgcggcgcattagctagttggtgaggtaacggctcaccaaggcgacgatgcgtagccgacctgagagggtgaacggccacactgggactgagacacggcccagactcctacgggaggcagcagtagggaatcttccgcaatgggcgaaagcctgacggagcaatgccgcgtgagtgatgaaggttttcggatcgtaaagctctgttgccagggaagaacgtccggtagagtaactgctatcggagtgacggtacctgagaagaaagccccggctaactacgtgccagcagccgcggtaatacgtagggggcaagcgttgtccggaattattgggcgtaaagcgcgcgcaggcggctatttaagtctggtgtttaaaccttgggctcaacctaaggtcgcactggaaactgggtggcttgagtacagaagaggaaagtggaattccacgtgtagcggtgaaatgcgtagatatgtggaggaacaccagtggcgaaggcgactttctgggctgtaactgacgctgaggcgcgaaagcgtggggagcaaacaggattagataccctggtagtccacgccgtaaacgatgagtgctaggtgttaggggtttcgatacccttggtgccgaagttaacacagtaagcactccgcctggggagtacggtcgcaagactgaaactcaaaggaattgacggggacccgcacaagcagtggagtatgtggtttaattcgaagcaacgcgaagaaccttaccaggtcttgacatccctctgaatctgctagagatagcagcggccttcgggacagaggagacaggtggtgcatggttgtcgtcagctcgtgtcgtgagatgttgggttaagtcccgcaacgagcgcaacccttatgcttagttgccagcacgtgatggtgggcactctaagcagactgccggtgacaaaccggaggaaggtggggatgacgtcaaatcatcatgccccttatgacctgggctacacacgtactacaatggccggtacaaagggctgcgaaaccgcgaggtggagcgaatcccaacaaagccggtctcagttcggattgcaggctgcaactcgcctgcatgaagtcggaattgctagtaatcgcggatcagcatgccgcggtgaatacgttcccgggtcttgtacacaccgcccgtcacaccacgagagtttacaacacccgaagtcggtggggtaacccgcaagggagccagccgccgaaggtggggtagataattggggtg

SEQ ID NO: 2334 - DNA, 1477 bp, Paenibacillus durus
  source 1..1477: mol_type = unassigned DNA
gacgaacgctggcggcgtgcctaatacatgcaagtcgagcggagtttcatcggaagcttgcttccgatgaggcttagcggcggacgggtgagtaacacgtaggcaacctgccccttggactgggataactaccggaaacggtagctaataccggataattcctcttagctcctgctaggaggctgaaaggcggagcaatctgtcaccaagggatgggcctgcggcgcattagctagttggtggggtaacggctcaccaaggcgacgatgcgtagccgacctgagagggtgaacggccacactgggactgagacacggcccagactcctacgggaggcagcagtagggaatcttccgcaatgggcgaaagcctgacggagcaacgccgcgtgagtgatgaaggttttcggatcgtaaagctctgttgccagggaagaacgttcttaagagtaactgcttaaggagtgacggtacctgagaagaaagccccggctaactacgtgccagcagccgcggtaatacgtagggggcaagcgttgtccggaattattgggcgtaaagcgcgcgcaggcggctgtttaagtctggtgtttaaaccatgggctcaacctgtggtcgcactggaaactggacagcttgagtgcagaagaggaaagtggaattccacgtgtagcggtgaaatgcgtagagatgtggaggaacaccagtggcgaaggcgactttctgggctgtaactgacgctgaggcgcgaaagcgtggggagcaaacaggattagataccctggtagtccacgccgtaaacgatgagtgctaggtgttaggggtttcgatacccttggtgccgaagttaacacagtaagcactccgcctggggagtacggtcgcaagactgaaactcaaaggaattgacggggacccgcacaagcagtggagtatgtggtttaattcgaagcaacgcgaagaaccttaccaggtcttgacatccctctgaatcgtctagagataggcgcggccttcgggacagaggagacaggtggtgcatggttgtcgtcagctcgtgtcgtgagatgttgggttaagtcccgcaacgagcgcaacccttgactttagttgccagcaggtgaagctgggcactctagagtgactgccggtgacaaaccggaggaaggtggggatgacgtcaaatcatcatgccccttatgacctgggctacacacgtactacaatggccggtacaacgggaagcgaagccgcgaggcggagccaatcttagaaagccggtctcagttcggattgcaggctgcaactcgcctgcatgaagtcggaattgctagtaatcgcggatcagcatgccgcggtgaatacgttcccgggtcttgtacacaccgcccgtcacaccacgagagtttacaacacccgaagtcggtggggtaaccgcaaggagccagccgccgaaggtggggtagatgattggggtg

SEQ ID NO: 2335 - DNA, 1454 bp, Paenibacillus elgii
  source 1..1454: mol_type = unassigned DNA
cgaacgctggcggcgtgcctaatacatgcaagtcgagcggacccttcggggttagcggcggacgggtgagtaacacgtaggcaacctgcctgtaagactgggataactaccggaaacggtagctaagaccggataagtgattctttcgcatgagaggatcaagaaacacggggcaacctgtgacttacagatgggcctgcggcgcattagctagttggtggggtaacggctcaccaaggcgacgatgcgtagccgacctgagagggtgatcggccacactgggactgagacacggcccagactcctacgggaggcagcagtagggaatcttccgcaatggacgcaagtctgacggagcaacgccgcgtgagtgatgaaggttttcggatcgtaaagctctgttgccagggaagaacgtcgtggagagtaactgctctgcgaatgacggtacctgagaagaaagccccggctaactacgtgccagcagccgcggtaatacgtagggggcaagcgttgtccggaattattgggcgtaaagcgcgcgcaggcggccgcttaagtctggtgtttaagcccgaggctcaacctcggttcgcactggaaactgggtggcttgagtgcaggagaggaaagcggaattccacgtgtagcggtgaaatgcgtagagatgtggaggaacaccagtggcgaaggcggctttctggcctgtaactgacgctgaggcgcgaaagcgtggggagcaaacaggattagataccctggtagtccacgccgtaaacgatgagtgctaggtgttaggggtttcgatacccttggtgccgaagtaaacacaataagcactccgcctggggagtacgctcgcaagagtgaaactcaaaggaattgacggggacccgcacaagcagtggagtatgtggtttaattcgaagcaacgcgaagaaccttaccaggtcttgacatccctctgaatatcctagagatagggtaggccttcgggacagaggagacaggtggtgcatggttgtcgtcagctcgtgtcgtgagatgttgggttaagtcccgcaacgagcgcaacccttgaacttagttgccagcattgagttgggcactctaagttgactgccggtgacaaaccggaggaaggtggggatgacgtcaaatcatcatgccccttatgacctgggctacacacgtactacaatggccggtacaacgggaagcgaagtcgcgagatggagccaatcctaagaaagccggtctcagttcggattgcaggctgcaactcgcctgcatgaagtcggaattgctagtaatcgcggatcagcatgccgcggtgaatacgttcccgggtcttgtacacaccgcccgtcacaccacgagagtttacaacacccgaagtcggtggggtaaccgcaaggagccagccgccgaaggtggggtagatgattggggtg

SEQ ID NO: 2336 - DNA, 1335 bp, unidentified
  source 1..1335: mol_type = unassigned DNA; note = Paenibacillus etheri
tcgagcggagttactttgaaagcttgctttcaaagtaacttagcggcggacgggtgagtaacacgtaggcaacctgccccttagactgggataactaccggaaacggtagctaataccggataatttctttcttctcctgaagaaagaatgaaagacggagcaatctgtcactgagggatgggcctgcggcgcattagctagttggtggggtaacggcccaccaaggcgacgatgcgtagccgacctgagagggtgaacggccacactgggactgagacacggcccagactcctacgggaggcagcagtagggaatcttccgcaatggacgaaagtctgacggagcaacgccgcgtgagtgatgaaggttttcggatcgtaaagctctgttgccagggaagaacgtccggtagagtaactgctaccggagtgacggtacctgagaagaaagccccggctaactacgtgccagcagccgcggtaatacgtagggggcaagcgttgtccggaattattgggcgtaaagcgcgcgcaggcggtcatttaagtctggtgtttaaaccttgggctcaacctaaggtcgcactggaaactgggtgacttgagtacagaagaggaaagtggaattccacgtgtagcggtgaaatgcgtagatatgtggaggaacaccagtggcgaaggcgactttctgggctgtaactgacgctgaggcgcgaaagcgtggggagcaaacaggattagataccctggtagtccacgccgtaaacgatgagtgctaggtgttaggggtttcgatacccttggtgccgaagttaacacagtaagcactccgcctggggagtacggtcgcaagactgaaactcaaaggaattgacggggacccgcacaagcagtggagtatgtggtttaattcgaagcaacgcgaagaaccttaccaggtcttgacatccctctgaatccgctaaagatagtggcggccttcgggacagaggagacaggtggtgcatggttgtcgtcagctcgtgtcgtgagatgttgggttaagtcccgcaacgagcgcaacccttaactttagttgccagcaagtaatgttgggcactctagagtgactgccggtgacaaaccggaggaaggtggggatgacgtcaaatcatcatgccccttatgacctgggctacacacgtactacaatggccggtacaacgggaagcgaagccgcgaggtgaagccaatcccatcaaagccggtctcatttcggattgcaggctgcaactcgcctgcatgaagttcggaattgctagtaatcgcggatcagcatgccgcggtgaatacgtt

SEQ ID NO: 2337 - DNA, 1451 bp, unidentified
  source 1..1451: mol_type = unassigned DNA; note = Paenibacillus faecis
tacatgcaagtcgagcggagttaatcgggagcttgctcctggttgacttagcggcggacgggtgagtaacacgtaggcaacctgcccgtaagaccgggataactagcggaaacgttagctaataccggataatcaagtttctcgcatgggggacttgggaaaggcggagcaatctgtcacttacggatgggcctgcggcgcattagctagttggtggggtaacggctcaccaaggcgacgatgcgtagccgacctgagagggtgaacggccacactgggactgagacacggcccagactcctacgggaggcagcagtagggaatcttccgcaatggacgaaagtctgacggagcaacgccgcgtgagtgaagaaggttttcggatcgtaaagctctgttgccagggaagaacgtccgctagagtaactgctagcggagtgacggtacctgagaagaaagccccggctaactacgtgccagcagccgcggtaatacgtagggggcaagcgttgtccggaattattgggcgtaaagcgcgcgcaggcggctatttaagtctggtgtttaatcctggggctcaaccccgggtcgcactggaaactgggtggcttgagtgcagaagaggagagtggaattccacgtgtagcggtgaaatgcgtagagatgtggaggaacaccagtggcgaaggcgactctctgggctgtaactgacgctgaggcgcgaaagcgtggggagcaaacaggattagataccctggtagtccacgccgtaaacgatgaatgctaggtgttaggggtttcgatacccttggtgccgaagttaacacattaagcattccgcctggggagtacggtcgcaagactgaaactcaaaggaattgacggggacccgcacaagcagtggagtatgtggtttaattcgaagcaacgcgaagaaccttaccaggtcttgacatccccctgaccggtacagagatgtacctttccttcgggacaggggagacaggtggtgcatggttgtcgtcagctcgtgtcgtgagatgttgggttaagtcccgcaacgagcgcaacccttgactttagttgccagcaggtcaagctgggcactctagagtgactgccggtgacaaaccggaggaaggtggggatgacgtcaaatcatcatgccccttatgacctgggctacacacgtactacaatggctggtacaacgggaagcgaaggagcgatccggagcgaatcctaaaaagccagtctcagttcggattgcaggctgcaactcgcctgcatgaagtcggaattgctagtaatcgcggatcagcatgccgcggtgaatacgttcccgggtcttgtacacaccgcccgtcacaccacgagagtttacaacacccgaagtcggtgaggtaaccgcaaggagccagccgccgaaggtggggtagatgattggggtg

SEQ ID NO: 2338 - DNA, 1466 bp, unidentified
  source 1..1466: mol_type = unassigned DNA; note = Paenibacillus ferrarius
gacgaacgctggcggcgtgcctaatacatgcaagtcgagcggagcatttccttcggggaatgcttagcggcggacgggtgagtaacacgtaggtaacctgcctatcagatcgggataactatcggaaacgatagctaagaccggataactggttttctcgcatgagagaattatgaaacacggagcaatctgtggctgatagatgggcctgcggcgcattagctagttggtggggtaacggctcaccaaggcgacgatgcgtagccgacctgagagggtgaacggccacactgggactgagacacggcccagactcctacgggaggcagcagtagggaatcttccgcaatggacgcaagtctgacggagcaacgccgcgtgagtgatgaaggttttcggatcgtaaagctctgttgccctagacgaacagcatgaggagtaactgccttgtgtgtgacggtataggagaagaaagccccggctaactacgtgccagcagccgcggtaatacgtagggggcaagcgttgtccggaattattgggcgtaaagcgcgcgcaggcggttaattaagttgggtgtttaagcccggggctcaaccccggttcgcatccaaaactggttgacttgagcgtaggaaaggaaagtggaattccacgtgtagcggtgaaatgcgtagagatgtggaggaacaccagtggcgaaggcgactttctggcctataactgacgctgaggcgcgaaagcgtggggagcaaacaggattagataccctggtagtccacgccgtaaacgatgcatactaggtgtcggggattcgatttctcggtgccgaagttaacacagtaagtatgccgcctggggagtacgctcgcaagagtgaaactcaaaggaattgacggggacccgcacaagcagtggagtatgtggtttaattcgaagcaacgcgaagaaccttaccaggtcttgacatcccaatgtaacgcctagagataggcgccctcttcggagcattggagacaggtggtgcatggttgtcgtcagctcgtgtcgtgagatgttgggttaagtcccgcaacgagcgcaacccttgatcttagttgccagcacttcgggtgggcactctaagatgactgccggtgacaaaccggaggaaggtggggatgacgtcaaatcatcatgccccttatgacctgggctacacacgtactacaatggtcggtacaacgggaagcgaagccgcgaggcggagcaaatccttataagccgatctcagttcggattgcaggctgcaactcgcctgcatgaagtcggaattgctagtaatcgcggatcagcatgccgcggtgaatacgttcccgggtcttgtacacaccgcccgtcacaccacgagagtttacaacacccgaagtcggtggggtaacccgcaagggagccagccgccgaaggtggggtagatgattggggtg

SEQ ID NO: 2339 - DNA, 1449 bp, Paenibacillus fonticola
  source 1..1449: mol_type = unassigned DNA
tgcaagtcgagcgaggttattttggaagcttgcttccgaaataacctagcggcggacgggtgagtaatacgtaggcaacctgcccctatgctcgggataactagcggaaacgttagctaataccggataatttgctttctcgcatgagggagcaatgaaagacggagcaatctgtcacaaagggatgggcctacggcgcattagctagttggtaaggtaaaggcttaccaaggcgacgatgcgtagccgacctgagagggtgaacggccacactgggactgagacacggcccagactcctacgggaggcagcagtagggaatcttccgcaatggacgcaagtctgacggagcaacgccgcgtgagtgatgaaggttttcggatcgtaaagctctgttgccagggaagaacgtccgtgagagtaactgctcacggagtgacggtacctgagaagaaagccccggctaactacgtgccagcagccgcggtaatacgtagggggcaagcgttgtccggaattattgggcgtaaagcgcgcgcaggcggtcatttaagtctggtgtataatcccggggctcaactccgggccgcactggaaactgggtggcttgagtgcagaagaggagagtggaattccacgtgtagcggtgaaatgcgtagagatgtggaggaacaccagtggcgaaagcgactctctgggctgtaactgacgctgaggcgcgaaagcgtgggtagcaaacaggattagataccctggtagtccacgccgtaaacgatgaatgctaggtgttaggggtttcgatacccttggtgccgaagtaaacacattaagcattccgcctggggagtacggtcgcaagactgaaactcaaaggaattgacggggacccgcacaagcagtggagtatgtggtttaattcgaagcaacgcgaagaaccttaccaggtcttgacatgcctctgaccgctctagagatagagcttctcttcggagcaggggacacaggtggtgcatggttgtcgtcagctcgtgtcgtgagatgttgggttaagtcccgcaacgagcgcaacccttaactttagttgccagcatttcggatgggcactctagagtgactgccggtgacaaaccggaggaaggtggggatgacgtcaaatcatcatgccccttatgacctgggctacacacgtactacaatggccagtacaacgggaagcgaagccgcgaggtggagcgaatcctatcaaagctggtctcagttcggattgcaggctgcaactcgcctgcatgaagtcggaattgctagtaatcgcggatcagcatgccgcggtgaatacgttcccgggtcttgtacacaccgcccgtcacaccacgagagtttacaacacccgaagtcggtgaggtaaccgcaaggagccagccgccgaaggtggggtagatgacaggggtg

SEQ ID NO: 2340 - DNA, 1456 bp, Paenibacillus ginsengarvi
  source 1..1456: mol_type = unassigned DNA
gacgaacgctggcggcgtgcctaatacatgcaagtcgagcgaatccttcggggttagcggcggacgggtgagtaacacgtaggcaacctgcccgtaagtctgggataactatcggaaacgatagctaataccggatacgaagagagaaygcatgttctcttttggaaaggcggagcaatctgccacttacggatgggcctgcggcgcattagctagtaggcggggtaacggcccacctaggcgacgatgcgtagccgacctgagagggtgatcggccacactgggactgagacacggcccagactcctacgggaggcagcagtagggaatcttccgcaatgggcgaaagcctgacggagcaacgccgcgtgagtgatgaaggttttcggatcgtaaagctctgttgccagagaagaacgccgaggagagtaactgctcttcgggtgacggtatctgagaagaaagccccggctaactacgtgccagcagccgcggtaatacgtagggggcaagcgttgtccggaattattgggcgtaaagcgcgcgcaggcggctgtttaagtctggtgtttaagcccggggctcaaccccggttcgcactggaaactggatggcttgagtgcaggagagggaagtggaattccacgtgtagcggtgaaatgcgtagagatgtggaggaacaccagtggcgaaggcgacttcctggcctgtaactgacgctgaggcgcgaaagcgtggggagcaaacaggattagataccctggtagtccacgccgtaaacgatgagtgctaggtgttaggggtttcgatacccttggtgccgaagtaaacacagtaagcactccgcctggggagtacggtcgcaagactgaaactcaaaggaattgacggggacccgcacaagcagtggagtatgtggtttaattcgaagcaacgcgaagaaccttaccaggtcttgacatccccctgaatatyctagagatagggtaggccttcgggacaggggagacaggtggtgcatggttgtcgtcagctcgtgtcgtgagatgttgggttaagtcccgcaacgagcgcaacccttgattttagttgccagcacttcgggtgggcactctagaatgactgccggtgacaaaccggaggaaggcggggatgacgtcaaatcatcatgccccttatgacctgggctacacacgtactacaatggccggtacaacgggccgcgaagccgcgaggtggagccaatcctaaaaagccggtctcagttcggattgcaggctgcaactcgcctgcatgaagtcggaattgctagtaatcgcggatcagcatgccgcggtgaatacgttcccgggtcttgtacacaccgcccgtcacaccacgagagtttacaacacccgaagtcggtgaggtaaccgcaaggagccagccgccgaaggtggggtagatgattggggtg

SEQ ID NO: 2341 - DNA, 1472 bp, Paenibacillus ginsengihumi
  source 1..1472: mol_type = unassigned DNA
gacgaacgctggcggcgtgcctaatacatgcaagtcgagcgctggatgrtttccttcggggaattatccggagcggcggacgggtgagtaacacgtaggcaacctgcccggaagaccgggataactaccggaaacggtagctaataccggataggtggcttcttcgcatgggggagccaagaaacgcggagcaatctgcggcttacggatgggcctgcggcgcattagctagttggcagggtaacggcctaccaaggcgacgatgcgtagccgacctgagagggtgatcggccacactgggactgagacacggcccagactcctacgggaggcagcagtagggaatcttccgcaatgggcgaaagcctgacggagcaacgccgcgtgagtgaggaaggtcttcggatcgtaaagctctgttgccaaggaagaacggcccggagagtcactgctccgggagtgacggtacttgagaagaaagccccggctaactacgtgccagcagccgcggtaatacgtagggggcaagcgttgtccggaattattgggcgtaaagcgcgcgcaggcggtctgttaagtcttgtgtttaagcccggggctcaaccccggttcgcatgggaaactggcagacttgagtgcaggagaggaaagcggaattccacgtgtagcggtgaaatgcgtagagatgtggaggaacaccagtggcgaaggcggctttctggactgtaactgacgctgaggcgcgaaagcgtggggagcaaacaggattagataccctggtagtccacgccgtaaacgatgagtgctaggtgtcgggggtttcgatacccgcggtgccgaagttaacgcaataagcactccgcctggggagtacgctcgcaagagtgaaactcaaaggaattgacggggacccgcacaagcagtggagtatgtggtttaattcgaagcaacgcgaagaaccttaccaggtcttgacatccctctgaccggtgcagagatgtgcctttccttcgggacagaggagacaggtggtgcatggttgtcgtcagctcgtgtcgtgagatgttgggttaagtcccgcaacgagcgcaacccttagctttagttgccagcatgagagatgggcactctagagcgactgccggtgacaaaccggaggaaggtggggatgacgtcaaatcatcatgccccttatgacctgggctacacacgtactacaatggccggtacagagggaagcgaaggagcgatctggagcgaatcccaaaaaagcggtctcagttcggattgcaggctgcaactcgcctgcatgaagtcggaattgctagtaatcgcggatcagcatgccgcggtgaatacgttcccgggtcttgtacacaccgcccgtcacaccacgagagtttacaacacccgaagtcggtgaggtaaccgyaaggagccagccgccgaaggtggggtagatgattggggtg

SEQ ID NO: 2342 - DNA, 1480 bp, Paenibacillus glacialis
  source 1..1480: mol_type = unassigned DNA
gacgaacgctggcggcatgcctaatacatgcaagtcgagcggagtcattttggaagcttgcttccaaaatgacttagcggcggacgggtgagtaacacgtaggtaacctgcctataagactgggataactaccggaaacggtagctaataccggataatttatttcttctcatgaagagatactgaaaggcggagtaatctgccacttatagatgggcctgcggcgcattagctagttggtgaggtaacggctcaccaaggcgacgatgcgtagccgacctgagagggtgaacggccacactgggactgagacacggcccagactcctacgggaggcagcagtagggaatcttccgcaatggacgaaagtctgacggagcaatgccgcgtgagtgatgaaggttttcggatcgtaaagctctgttgccagggaagaacgcttgggagagtaactgctctcaaggtgacggtacctgagaagaaagccccggctaactacgtgccagcagccgcggtaatacgtagggggcaagcgttgtccggaattattgggcgtaaagcgcgcgcaggcggtcatttaagtctggtgtttaatcctggggctcaaccccaggtcgcactggaaactggatgacttgagtacagaagaggagagtggaattccacgtgtagcggtgaaatgcgtagatatgtggaggaacaccagtggcgaaggcgactctctgggctgtaactgacgctgaggcgcgaaagcgtggggagcaaacaggattagataccctggtagtccacgccgtaaacgatgagtgctaggtgttaggggtttcgatacccttggtgccgaagttaacacattaagcactccgcctggggagtacggtcgcaagactgaaactcaaaggaattgacggggacccgcacaagcagtggagtatgtggtttaattcgaagcaacgcgaagaaccttaccaggtcttgacatccctctgaatccactagagatagtggcggccttcgggacggaggagacaggtggtgcatggttgtcgtcagctcgtgtcgtgagatgttgggttaagtcccgcaacgagcgcaacccttatgcttagttgccagcacattatggttggcactctaagcagactgccggtgacaaaccggaggaaggtggggatgacgtcaaatcaccatgccccttatgacctgggctacacacgtactacaatggccggtacaacgggctgcgaaatcgcgagatggagccaatcccaccaaagccggtctcagttcggattgcaggctgcaacccgcctgcatgaagtcggaattgctagtaatcgcggatcagcatgccgcggtgaatacgttcccgggtcttgtacacaccgcccgtcacaccacgagagtttacaacacccgaagtcggtggggtaacccgcaagggagccagccgccgaaggtggggtagatgattggggtg

SEQ ID NO: 2343 - DNA, 1481 bp, Paenibacillus graminis
  source 1..1481: mol_type = unassigned DNA
gacgaacgctggcggcgtgcctaatacatgcaagtcgagcggatttactggagtgcttgcactccagtaggttagcggcggacgggtgagtaacacgtaggcaacctaccctctagactgggataactaccggaaacggtagctaataccggataattccctgacccccctgggctagggatgaaaggcggagcaatctgctgctagaggatgggcctgcggcgcattagctagttggtggggtaacggcctaccaaggcgacgatgcgtagccgacctgagagggtgaacggccacactgggactgagacacggcccagactcctacgggaggcagcagtagggaatcttccgcaatgggcgaaagcctgacggagcaacgccgcgtgagtgatgaaggttttcggatcgtaaagctctgttgccagggaagaacgtccggtagagtaactgctgccggagtgacggtacctgagaagaaagccccggctaactacgtgccagcagccgcggtaatacgtagggggcaagcgttgtccggaattattgggcgtaaagcgcgcgcaggcggctatttaagtctggtgtttaaaccttgggctcaacctggggtcgcactggaaactgggtggcttgagtacagaagaggaaagtggaattccacgtgtagcggtgaaatgcgtagagatgtggaggaacaccagtggcgaaggcgactttctgggctgtaactgacgctgaggcgcgaaagcgtggggagcaaacaggattagataccctggtagtccacgccgtaaacgatgagtgctaggtgttaggggtttcgatacccttggtgccgaagttaacacagtaagcactccgcctggggagtacggtcgcaagactgaaactcaaaggaattgacggggacccgcacaagcagtggagtatgtggtttaattcgaagcaacgcgaagaaccttaccaggtcttgacatccaactaacgaagcagagatgcattaggtgcccttcggggaaagttgagacaggtggtgcatggttgtcgtcagctcgtgtcgtgagatgttgggttaagtcccgcaacgagcgcaacccttgactttagttgccagcaggtaaggctgggcactctagagtgactgccggtgacaaaccggaggaaggtggggatgacgtcaaatcatcatgccccttatgacctgggctacacacgtactacaatggccggtacaacgggaagcgaagccgcgaggtggagccaatcccagcaaagccggtctcagttcggattgcaggctgcaactcgcctgcatgaagtcggaattgctagtaatcgcggatcagcatgccgcggtgaatacgttcccgggtcttgtacacaccgcccgtcacaccacgagagtttacaacacccgaagtcggtggggtaacccgcaagggggccagccgccgaaggtggggtagatgattggggtg

SEQ ID NO: 2344 - DNA, 1453 bp, unidentified
  source 1..1453: mol_type = unassigned DNA; note = Paenibacillus hemerocallicola
gacgaacgctggcggcgtgcctaatacatgcaagtcgagcgaggccttcgggcctagcggcggacgggtgagtaacacgtaggcaacctgcctgtaagcttgggataactatcggaaacgatagctaataccgaatagatggaggaagggcatccttactcttggaaaggcggagcaatctgccacttacggatgggcctgcggcgcattagctagttggcggggtaacagcccaccaaggcgacgatgcgtagccgacctgagagggtgatcggccacactgggactgagacacggcccagactcctacgggaggcagcagtagggaatcttccgcaatgggcgaaagcctgacggagcaacgccgcgtgagtgacgaaggtcttcggatcgtaaagctctgttgccaaagaagaacggcttggagagtaactgctctgagtttgacggtatttgagaagaaagccccggctaactacgtgccagcagccgcggtaatacgtagggggcaagcgttgttcggattattgggcgtaagcgcgcgcaggcggctgtttaagtctggtgtttaagcccggggctcaaccccggttcgcaccggaaactggatggcttgagtgcaggagagggaagtggaattccacgtgtagcggtgaaatgcgtagagatgtggaggaacaccagtggcgaaggcgacttcctggcctgtaactgacgctgaggcgcgaaagcgtggggagcaaacaggattagataccctggtagtccacgccgtaaacgatgagtgctaggtgttaggggtttcgatacccttggtgccgaagttaacacagtaagcactccgcctggggagtacggtcgcaagactgaaactcaaaggaattgacggggacccgcacaagcagtggagtatgtggtttaattcgaagcaacgcgaagaaccttaccaggtcttgacatccctctgaaatctctagagatagaggcttccttcgggacagaggagacaggtggtgcatggttgtcgtcagctcgtgtcgtgagatgttgggttaagtcccgcaacgagcgcaacccttgatcttagttgccagcacctcgggtgggcactctaggatgactgccggtgacaaaccggaggaaggcggggatgacgtcaaatcatcatgccccttatgacctgggctacacacgtactacaatggccggtacaacgggccgcgaagccgcgaggtggagccaatcctagaaagccggtctcagttcggattgcaggctgcaactcgcctgcatgaagtcggaattgctagtaatcgcggatcagcatgccgcggtgaatacgttcccgggtcttgtacacaccgcccgtcacaccacgagagtttacaacacccgaagtcggtgaggtaaccgcaaggagccagccgccgaagtggggtagatgattggggtg

SEQ ID NO: 2345 - DNA, 1477 bp, unidentified
  source 1..1477: mol_type = unassigned DNA; note = Paenibacillus herberti
gacgaacgctggcggcgtgcctaatacatgcaagtcgagcggattgatgagggagcttgcttccgattcagttagcggcggacgggtgagtaacacgtaggcaacctgccctcaagactgggataaccttcggaaacggatgctaataccagataggcggtttctccacctggagagatcgagaaagacggagcaatctgttacttggggatgggcctgcggcgcattagctagttggtgaggtaacggctcaccaaggcgacgatgcgtagccgacctgagagggtgatcggccacactgggactgagacacggcccagactcctacgggaggcagcagtagggaatcttccgcaatggacgaaagtctgacggagcaacgccgcgtgagtgaggaaggccttcgggtcgtaaagctctgttgccagggaagaacgggtagaggagtaactgcctttgccatgacggtacctgagaagaaagccccggctaactacgtgccagcagccgcggtaatacgtagggggcaagcgttgtccggaattattgggcgtaaagcgcgcgcaggcggctttgtaagtctggtgtttaatcttggggctcaaccccaagtcgcacgagaaactgcaaggcttgagtgcagaagaggaaagtggaattccacgtgtagcggtgaaatgcgtagagatgtggaggaacaccagtggcgaaggcgactttctgggctgtaactgacgctgaggcgcgaaagcgtggggagcaaacaggattagataccctggtagtccacgccgtaaacgatgaatgctaggtgttaggggtttcgatacccttggtgccgaagttaacacaataagcattccgcctggggagtacgctcgcaagagtgaaactcaaaggaattgacggggacccgcacaagcagtggagtatgtggtttaattcgaagcaacgcgaagaaccttaccaggtcttgacatccctctgaatctgctagagatagcagcggccttcgggacagaggagacaggtggtgcatggttgtcgtcagctcgtgtcgtgagatgttgggttaagtcccgcaacgagcgcaacccttgaattcagttgccagcacatcatggtgggcactctgaattgactgccggtgacaaaccggaggaaggcggggatgacgtcaaatcatcatgccccttatgacctgggctacacacgtactacaatggccggtacaacgggccgcgaaaccgcgaggtggagccaatcctaaaaagccggtctcagttcggattgcaggctgcaactcgcctgcatgaagtcggaattgctagtaatcgcggatcagcatgccgcggtgaatacgttcccgggtcttgtacacaccgcccgtcacaccacgagagtttacaacacccgaagtcggtggggtaacccgcaagggagccagccgccgaaggtggggtagatgattggggtg

SEQ ID NO: 2346 - DNA, 1477 bp, unidentified
  source 1..1477: mol_type = unassigned DNA; note = Paenibacillus ihbetae
gacgaacgctggcggcgtgcctaatacatgcaagtcgagcggagcaacggtttccttcgggaaaccattagcttagcggcggacgggtgagtaacacgtaggcaacctgccctcaagactgggataactaccggaaacggtagctaataccggataattaaatccgctgcatggcggggttatgaaaggcggagcaatctgtcacttgaggatgggcctgcggcgcattagctagttggtgaggtaacggctcaccaaggcgacgatgcgtagccgacctgagagggtgaacggccacactgggactgagacacggcccagactcctacgggaggcagcagtagggaatcttccgcaatgggcgaaagcctgacggagcaacgccgcgtgagtgatgaaggttttcggatcgtaaagctctgttgccagggaagaacgtctcatagagtaactgctatgagagtgacggtacctgagaagaaagccccggctaactacgtgccagcagccgcggtaatacgtagggggcaagcgttgtccggaattattgggcgtaaagcgcgcgcaggcggttctttaagtctggtgtttaaacccgaggctcaacttcgggacgcactggaaactggggaacttgagtgcagaagaggagagtggaattccacgtgtagcggtgaaatgcgtagatatgtggaggaacaccagtggcgaaggcgactctctgggctgtaactgacgctgaggcgcgaaagcgtggggagcgaacaggattagataccctggtagtccacgccgtaaacgatgaatgctaggtgttaggggtttcgatacccttggtgccgaagttaacacattaagcattccgcctggggagtacggtcgcaagactgaaactcaaaggaattgacggggacccgcacaagcagtggagtatgtggtttaattcgaagcaacgcgaagaaccttaccaagtcttgacatccctctgaatcctctagagatagaggcggccttcgggacagaggagacaggtggtgcatggttgtcgtcagctcgtgtcgtgagatgttgggttaagtcccgcaacgagcgcaacccttgatcttagttgccagcacttaaggtgggcactctaaggtgactgccggtgacaaaccggaggaaggtggggatgacgtcaaatcatcatgccccttatgacttgggctacacacgtactacaatggctggtacaacgggaagcgaaggagcgatctggagccaatcctaaaaagccagtctcagttcggattgcaggctgcaactcgcctgcatgaagtcggaattgctagtaatcgcggatcagcatgccgcggtgaatacgttcccgggtcttgtacacaccgcccgtcacaccacgagagtttacaacacccgaagtcggtggggtaacccttacgggagccagccgccgaaggtggggtagatgattggggtg

SEQ ID NO: 2347 - DNA, 1467 bp, Paenibacillus jilunlii
  source 1..1467: mol_type = unassigned DNA
ggcggcgtgcctaatacatgcaagtcgagcggagtcttgttggaagcttgcttccaacctggcttagcggcggacgggtgagtaacacgtaggcaacctaccctctagactgggataactaccggaaacggtagctaataccggataattccttggccctcctgggcttgggatgaaaggcggagcaatctgctgctagaggatgggcctgcggcgcattagctagttggtggggtaacggcccaccaaggcgacgatgcgtagccgacctgagagggtgaacggccacactgggactgagacacggcccagactcctacgggaggcagcagtagggaatcttccgcaatgggcgaaagcctgacggagcaacgccgcgtgagtgatgaaggttttcggatcgtaaagctctgttgccagggaagaacgtccggtagagtaactgctgccggagtgacggtacctgagaagaaagccccggctaactacgtgccagcagccgcggtaatacgtagggggcaagcgttgtccggaattattgggcgtaaagcgcgcgcaggcggcgacttaagtctggtgtttaaaccttgggctcaacctggggtcgcactggaaactgggtggcttgagtacagaagaggaaagtggaattccacgtgtagcggtgaaatgcgtagagatgtggaggaacaccagtggcgaaggcgactttctgggctgtaactgacgctgaggcgcgaaagcgtggggagcaaacaggattagataccctggtagtccacgccgtaaacgatgagtgctaggtgttaggggtttcgatacccttggtgccgaagttaacacagtaagcactccgcctggggagtacggtcgcaagactgaaactcaaaggaattgacggggacccgcacaagcagtggagtatgtggtttaattcgaagcaacgcgaagaaccttaccaggtcttgacatccaactaacgaagcagagatgcattaggtgcccttcggggaaagttgagacaggtggtgcatggttgtcgtcagctcgtgtcgtgagatgttgggttaagtcccgcaacgagcgcaacccttgactttagttgccagcaggttgagctgggcactctagagtgactgccggtgacaaaccggaggaaggtggggatgacgtcaaatcatcatgccccttatgacctgggctacacacgtactacaatggccggtacaacgggaagcgaagccgcgaggtggagccaatcccagcaaagccggtctcagttcggattgcaggctgcaactcgcctgcatgaagtcggaattgctagtaatcgcggatcagcatgccgcggtgaatacgttcccgggtcttgtacacaccgcccgtcacaccacgagagtttacaacacccgaagtcggtggggtaacccgcaagggggccagccgccgaaggtggggtagatgatt

SEQ ID NO: 2348 - DNA, 1478 bp, Paenibacillus kribbensis
  source 1..1478: mol_type = unassigned DNA
gacgaacgctggcggcgtgcctaatacatgcaagtcgagcggggtcatgtagaagcttgcttctacatgacctagcggcggacgggtgagtaacacgtaggcaacctgcccacaagacagggataactaccggaaacggtagctaatacccgatacatccttttcctgcatgggagaaggaggaaagacggagcaatctgtcacttgtggatgggcctgcggcgcattagctagttggtggggtaaaggcctaccaaggcgacgatgcgtagccgacctgagagggtgatcggccacactgggactgagacacggcccagactcctacgggaggcagcagtagggaatcttccgcaatgggcgaaagcctgacggagcaacgccgcgtgagtgatgaaggttttcggatcgtaaagctctgttgccagggaagaacgcttgggagagtaactgctctcaaggtgacggtacctgagaagaaagccccggctaactacgtgccagcagccgcggtaatacgtagggggcaagcgttgtccggaattattgggcgtaaagcgcgcgcaggcggctctttaagtctggtgtttaatcccgaggctcaacttcgggtcgcactggaaactggagagcttgagtgcagaagaggagagtggaattccacgtgtagcggtgaaatgcgtagagatgtggaggaacaccagtggcgaaggcgactctctgggctgtaactgacgctgaggcgcgaaagcgtggggagcaaacaggattagataccctggtagtccacgccgtaaacgatgaatgctaggtgttaggggtttcgatacccttggtgccgaagttaacacattaagcattccgcctggggagtacggtcgcaagactgaaactcaaaggaattgacggggacccgcacaagcagtggagtatgtggtttaattcgaagcaacgcgaagaaccttaccaggtcttgacatccctctgaccggtctagagatagatctttccttcgggacagaggagacaggtggtgcatggttgtcgtcagctcgtgtcgtgagatgttgggttaagtcccgcaacgagcgcaacccttatgcttagttgccagcaggtgaagctgggcactctaagcagactgccggtgacaaaccggaggaaggtggggatgacgtcaaatcatcatgccccttatgacctgggctacacacgtactacaatggccggtacaacgggaagcgaaatcgcgaggtggagccaatcctagaaaagccggtctcagttcggattgtaggctgcaactcgcctacatgaagtcggaattgctagtaatcgcggatcagcatgccgcggtgaatacgttcccgggtcttgtacacaccgcccgtcacaccacgagagtttacaacacccgaagtcggtggggtaacccgcaagggagccagccgccgaaggtggggtagatgattggggtg

SEQ ID NO: 2349 - DNA, 1467 bp, Paenibacillus lentimorbus
  source 1..1467: mol_type = unassigned DNA
tgcctaatacatgcaagtcgagcggagcgacggttcccttcggggaaccgttagcttagcggcggacgggtgagtaatacgtaggtaacctgcccttaagaccgggataactcacggaaacgtgggctaataccggataggcgatttcctcgcatgagggaatcgggaaaggcggttccgawtaatcggggctgccacttatggatggacctacggcgcattagctagttggtggggtaacggctcaccaaggcgacgatgcgtagccgacctgagagggtgatcggccacactgggactgagacacggcccagactcctacgggaggcagcagtagggaatcttccgcaatggacgcaagtctgacggagcaacgccgcgtgagtgatgaaggttttcggatcgtaaagctctgttgccagggaagaacgctatggagagtaactgctctataggtgacggtacctgagaagaaagccccggctaactacgtgccagcagccgcggtaatacgtagggggcaagcgttgtccggaattattgggcgtaaagcgcgcgcaggcggtcatgtaagtctggtgtttaaacccggggctcaactccgggtcgcatcggaaactgtgtgacttgagtgcagaagaggaaagtggaattccacgtgtagcggtgaaatgcgtagagatgtggaggaacaccagtggcgaaggcgactttctgggctgtaactgacgctgaggcgcgaaagcgtggggagcaaacaggattagataccctggtagtccacgccgtaaacgatgaatgctaggtgttaggggtttcgatacccttggtgccgaagttaacacattaagcattccgcctggggagtacggtcgcaagactgaaactcaaaggaattgacggggacccgcacaagcagtggagtatgtggtttaattcgaagcaacgcgaagaaccttaccaggtcttgacatcccactgaccgctctagagatagagcttcccttcggggcagaggagacaggtggtgcatggttgtcgtcagctcgtgtcgtgagatgttgggttaagtcccgcaacgagcgcaacccttaactttagttgccagcattgagttgggcactctagagtgactgccggtgacaaaccggaggaaggtggggatgacgtcaaatcatcatgccccttatgacctgggctacacacgtactacaatggctggtacaacgggaggcgaagccgcgaggtggagcgaatcctaaaaagccagtctcagttcggattgcaggctgcaactcgcctgcatgaagtcggaattgctagtaatcgcggatcagcatgccgcggtgaatacgttcccgggtcttgtacacaccgcccgtcacaccacgagagtttacaacacccgaagtcggtggggtaaccgcaaggagccagccgccgaaggtggggtagatgattggggtg

SEQ ID NO: 2350 - DNA, 1477 bp, unidentified
  source 1..1477: mol_type = unassigned DNA; note = Paenibacillus lentus
gacgaacgctggcggcgtgcctaatacatgcaagtcgagcgggattattttggaagcttgcttccgaaatgatctagcggcggacgggtgagtaatacgtaggcaacctgcccctcagcctgggataactagcggaaacgttagctaataccggataatttytttcttcgcatgaaggaayaatgaaagacggagcaatctgtcactaagggatgggcctacggcgcattagctagttggtgaggtaatggctcaccaaggcgacgatgcgtagccgacctgagagggtgaacggccacactgggactgagacacggcccagactcctacgggaggcagcagtagggaatcttccgcaatggacgcaagtctgacggagcaacgccgcgtgagtgatgaaggttttcggatcgtaaagctctgttgccagggaagaacgtcttggagagtaactgctctaagagtgacggtacctgagaagaaagccccggctaactacgtgccagcagccgcggtaatacgtagggggcaagcgttgtccggaattattgggcgtaaagcgcgcgcaggcggtcatttaagtctggtgtttaatcccggggctcaactccgggtcgcactggaaactgggtggcttgagtgcagaagaggagagtggaattccacgtgtagcggtgaaatgcgtagatatgtggaggaacaccagtggcgaaggcgactctctgggctgtaactgacgctgaggcgcgaaagcgtgggtagcaaacaggattagataccctggtagtccacgccgtaaacgatgaatgctaggtgttaggggtttcgatacccttggtgccgaagtaaacacattaagcattccgcctggggagtacggtcgcaagactgaaactcaaaggaattgacggggacccgcacaagcagtggagtatgtggtttaattcgaagcaacgcgaagaaccttaccaggtcttgacatgcctctgaccgctctagagatagagcttctcttcggagcaggggacacaggtggtgcatggttgtcgtcagctcgtgtcgtgagatgttgggttaagtcccgcaacgagcgcaacccttgatcttagttgccagcatttcggatgggcactctaaggtgactgccggtgacaaaccggaggaaggtggggatgacgtcaaatcatcatgccccttatgacctgggctacacacgtactacaatggccagtacaacgggaagcgaaaccgcgaggtggagcgaatcctatcaaagctggtctcagttcggattgcaggctgcaactcgcctgcatgaagtcggaattgctagtaatcgcggatcagcatgccgcggtgaatacgttcccgggtcttgtacacaccgcccgtcacaccacgagagtttacaacacccgaagtcggtgaggtaaccgcaaggggccagccgccgaaggtggggtagatgattggggtg

SEQ ID NO: 2351 - DNA, 1480 bp, Paenibacillus macquariensis
  source 1..1480: mol_type = unassigned DNA
gacgaacgctggcggcatgcctaatacatgcaagtcgagcggagttgttttgaaagcttgctttcaaaacaacttagcggcggacgggtgagtaacacgtaggtaacctgcctgtaagactgggataactaccggaaacggtagctaataccggataatttgtttcttctcatgaagagacactgaaaggcggagtaatctgccacttatagatgggcctgcggcgcattagctagttggtgaggtaacggctcaccaaggcgacgatgcgtagccgacctgagagggtgaacggccacactgggactgagacacggcccagactcctacgggaggcagcagtagggaatcttccgcaatggacgaaagtctgacggagcaatgccgcgtgagtgatgaaggttttcggatcgtaaagctctgttgccagggaagaacgcttgggagagtaactgctctcaaggtgacggtacctgagaagaaagccccggctaactacgtgccagcagccgcggtaatacgtagggggcaagcgttgtccggaattattgggcgtaaagcgcgcgcaggcggtcatttaagtctggtgtttaatcccggggctcaaccccgggtcgcactggaaactggatgacttgagtacagaagaggagagtggaattccacgtgtagcggtgaaatgcgtagatatgtggaggaacaccagtggcgaaggcgactctctgggctgtaactgacgctgaggcgcgaaagcgtggggagcaaacaggattagataccctggtagtccacgccgtaaacgatgagtgctaggtgttaggggtttcgatacccttggtgccgaagttaacacattaagcactccgcctggggagtacggtcgcaagactgaaactcaaaggaattgacggggacccgcacaagcagtggagtatgtggtttaattcgaagcaacgcgaagaaccttaccaggtcttgacatccctctgaatccactagagatagtggcggccttcgggacagaggagacaggtggtgcatggttgtcgtcagctcgtgtcgtgagatgttgggttaagtcccgcaacgagcgcaacccttatatttagttgccagcacattatggtgggcactctagatagactgccggtgacaaaccggaggaaggtggggatgacgtcaaatcatcatgccccttatgacctgggctacacacgtactacaatggccggtacaacgggctgcgaaatcgcgagatggagccaatcccaccaaagccggtctcagttcggattgcaggctgcaacccgcctgcatgaagtcggaattgctagtaatcgcggatcagcatgccgcggtgaatacgttcccgggtcttgtacacaccgcccgtcacaccacgagagtttacaacacccgaagtcggtggggtaacccgcaagggagccagccgccgaaggtggggtagatgattggggtg

SEQ ID NO: 2352 - DNA, 1474 bp, Paenibacillus massiliensis
  source 1..1474: mol_type = unassigned DNA
gacgaacgctggcggcgtgcctaatacatgcaagtcgagcggacttgatggagagcttgctctcctgatggttagcggcggacgggtgagtaacacgtaggcaacctgccctttggactgggataactaccggaaacggtagctaataccagataattcacttcttcgcatggagaagtgaggaaagacggagcaatctgtcaccggaggatgggcctgcggcgcattagctagttggagaggtaacggctccccaaggcgacgatgcgtagccgacctgagagggtgatcggccacactgggactgagacacggcccagactcctacgggaggcagcagtagggaatcttccgcaatgggcgaaagcctgacggagcaacgccgcgtgagtgatgaaggttttcggatcgtaaagctctgttgccaaggaagaacgtccttaagagtaactgcttaaggagtgacggtacttgagaagaaagccccggctaactacgtgccagcagccgcggtaatacgtagggggcaagcgttgtccggaattattgggcgtaaagcgcgcgcaggcggtcatttaagtctggtgtttaagcccggggctcaaccccggatcgcacgggaaactggatgacttgagtgcagaagaggagagtggaattccacgtgtagcggtgaaatgcgtagagatgtggaggaacaccagtggcgaaggcgactctctgggctgtaactgacgctgaggcgcgaaagcgtggggagcaaacaggattagataccctggtagtccacgccgtaaacgatgagtgctaggtgttaggggtttcgatacccttggtgccgaagttaacacattaagcactccgcctggggagtacggtcgcaagactgaaactcaaaggaattgacggggacccgcacaagcagtggagtatgtggtttaattcgaagcaacgcgaagaaccttaccaggtcttgacatctgaatgaccggtwcagagatgtwcctttccttcgggacattcaagacaggtggtgcatggttgtcgtcagctcgtgtcgtgagatgttgggttaagtcccgcaacgagcgcaacccttgaccttagttgccagcacttcgggtgggcactctagggtgactgccggtgacaaaccggaggaaggtggggatgacgtcaaatcatcatgccccttatgacctgggctacacacgtactacaatggctggtacaacgggaagcgaagccgcgaggtggagccaatcctaaaaagccagtctcagttcggattgcaggctgcaactcgcctgcatgaagtcggaattgctagtaatcgcggatcagcatgccgcggtgaatacgttcccgggtcttgtacacaccgcccgtcacaccacgagagtttacaacacccgaagtcggtggggtaaccgcaaggagccagccgccgaaggtggggtagatgattggggtg

SEQ ID NO: 2353 - DNA, 1459 bp, Paenibacillus mucilaginosus
  source 1..1459: mol_type = unassigned DNA
gacgaacgctggcggcgtgcctaatacatgcaagtcgagcggagcacttcggtgcttagcggcggacgggtgagtaacacgtaggcaacctgcctgtaagatcgggataactaccggaaacggtagctaagaccggatagctggtttcggtgcatgccggaatcatgaaacacggggcaacctgtggcttacggatgggcctgcggcgcattagctagttggcggggtaatggcccaccaaggcgacgatgcgtagccgacctgagagggtgatcggccacactgggactgagacacggcccagactcctacgggaggcagcagtagggaatcttccgcaatgggcgcaagcctgacggagcaacgccgcgtgagtgatgaaggttttcggatcgtaaagctctgttgccagggaagaatgtcgtggagagtaactgctctgcgaatgacggtacctgagaagaaagccccggctaactacgtgccagcagccgcggtaatacgtagggggcaagcgttgtccggaattattgggcgtaaagcgcgcgcaggcggtcttttaagtctggtgtttaagcccggggctcaaccccggttcgcaccggaaactggaagacttgagtgcaggagaggaaagcggaattccacgtgtagcggtgaaatgcgtagagatgtggaggaacaccagtggcgaaggcggctttctggactgtaactgacgctgaggcgcgaaagcgtggggagcaaacaggattagataccctggtagtccacgccgtaaacgatgagtgctaggtgttaggggtttcgatacccttggtgccgaagtaaacacaataagcactccgcctggggagtacgctcgcaagagtgaaactcaaaggaattgacggggacccgcacaagcagtggagtatgtggtttaattcgaagcaacgcgaagaaccttaccaggtcttgacatccctctgaaagccctagagatagggccctccttcgggacagaggtgacaggtggtgcatggttgtcgtcagctcgtgtcgtgagatgttgggttaagtcccgcaacgagcgcaacccttgactttagttgccagcattgagttgggcactctagagtgactgccggtgacaaaccggaggaaggtggggatgacgtcaaatcatcatgccccttatgacctgggctacacacgtactacaatggccggtacaacgggaagcgaagtcgcgagatggagcgaatccttagaagccggtctcagttcggattgcaggctgcaactcgcctgcatgaagtcggaattgctagtaatcgcggatcagcatgccgcggtgaatacgttcccgggtcttgtacacaccgcccgtcacaccacgagagtttacaacacccgaagccggtggggtaacccgtaagggagccagccgtcgaaggtggggtagatgattggggtg

SEQ ID NO: 2354 - DNA, 1459 bp, Paenibacillus nanensis
  source 1..1459: mol_type = unassigned DNA
gacgaacgctggcggcgtgcctaatacatgcaagtcgagcggagctaagtagaagctcgctttcgcgatgcttagcggcggacgggtgagtaacacgtaggtaacctgcctgtaagactgggataacattcggaaacgaatgctaataccggatacgcgagttggtcgcatggccgactcgggaaagacggagcaatctgtcgcttacagatggacctgcggcgcattagctagttggtgaggtaacggctcaccaaggcgacgatgcgtagccgacctgagagggtgatcggccacactgggactgagacacggcccagactcctacgggaggcagcagtagggaatcttccgcaatgggcgaaagcctgacggagcaacgccgcgtgagtgatgaaggttttcggatcgtaaagctctgttgccagggaagaacgcttgggagagtaactgctcccaaggtgacggtacctgagaagaaagccccggctaactacgtgccagcagccgcggtaatacgtagggggcaagcgttgtccggaattattgggcgtaaagcgcgcgcaggcggttcattaagtctggtgtttaaggctggggctcaaccccggttcgcactggaaactggtgaacttgagtgcagaagaggaaagtggaattccacgtgtagcggtgaaatgcgtagagatgtggaggaacaccagtggcgaaggcgactttctgggctgtaactgacgctgaggcgcgaaagcgtggggagcaaacaggattagataccctggtagtccacgccgtaaacgatgaatgctaggtgttaggggtttcgatacccttggtgccgaagttaacacattaagcattccgcctggggagtacggtcgcaagactgaaactcaaaggaattgacggggacccgcacaagcagtggagtatgtggtttaattcgaagcaacgcgaagaaccttaccaggtcttgacatccctctgaccggtctagagataggcctttccttcgggacagaggagacaggtggtgcatggttgtcgtcagctcgtgtcgtgagatgttgggttaagtcccgcaacgagcgcaacccttatttttagttgccagcactttgggtgggcactctaaagagactgccggtgacaaaccggaggaaggtggggatgacgtcaaatcatcatgccccttatgacctgggctacacacgtactacaatggccagtacaacgggaagcgaaggagcgatctggagccaatcctatcaaagctggtctcagttcggattgcaggctgcaactcgcctgcatgaagtcggaattgctagtaatcgcggatcagcatgccgcggtgaatacgttcccgggtcttgtacacaccgcccgtcacaccacgagagtttacaacacccgaagtcggtggggtaacccgcaagggagccagccgccgaaggtg

SEQ ID NO: 2355 - DNA, 1423 bp, unidentified
  source 1..1423: mol_type = unassigned DNA; note = Paenibacillus oryzae
ctataatgcagtcgagcggattagattgaaagcttgctttcaatctggttagcggcggacgggtgagtaacacgtgggtaacctgcccgacagaccgggataacagtcggaaacgattgctaataccggatacgcgattctgttgcatgacggaatcgggaaaggcggagtaatctgccactgacggatggacctgcggcgcattagctagttggtgaggtaacggctcaccaaggcgacgatgcgtagccgacctgagagggtgatcggccacactgggactgagacacggcccagactcctacgggaggcagcagtagggaatcttccgcaatgggcgaaagcctgacggagcaacgccgcgtgagtgatgaaggttttcggatcgtaaagctctgttgccagggaagaacggctaggagagtaactgctcctggtttgacggtacctgagaagaaagccccggctaactacgtgccagcagccgcggtaatacgtagggggcaagcgttgtccggaattattgggcgtaaagcgcgcgcaggcggtttggaaagtctggtgtttaaggctgaggctcaacctcagttcgcactggaaactgtcagacttgagtgcagaagaggaaagtggaattccacgtgtagcggtgaaatgcgtagagatgtggaggaacaccagtggcgaaggcgactttctgggctgtaactgacgctgaggcgcgaaagcgtggggagcaaacaggattagataccctggtagtccacgccgtaaacgatgaatgctaggtgttaggggtttcgatacccttggtgccgaagttaacacattaagcattccgcctggggagtacggtcgcaagactgaaactcaaaggaattgacggggacccgcacaagcagtggagtatgtggtttaattcgaagcaacgcgaagaaccttaccaggtcttgacatctgaatgaccggtgcagagatgtgcctttccttcgggacattcaagacaggtggtgcatggttgtcgtcagctcgtgtcgtgagatgttgggttaagtcccgcaacgagcgcaacccttgatgttagttgccagcaggtgaagctgggcactctaacgtgactgccggtgacaaaccggaggaaggtggggatgacgtcaaatcatcatgccccttatgacctgggctacacacgtactacaatggccagtacaacgggaagcgaaaccgcgaggtggagcgaatccaatcaaagctggtctcagttcggattgcaggctgcaactcgcctgcatgaagtcggaattgctagtaatcgcggatcagcatgccgcggtgaatacgttcccgggtcttgtacacaccgcccgtcacaccacgagagtttacaacacccgaagtcggtggggtaacccgcaagggagcc

SEQ ID NO: 2356 - DNA, 1402 bp, Paenibacillus pectinilyticus
  source 1..1402: mol_type = unassigned DNA
tgcaagtcgagcgggtttatccttcgggataagctagcggcggacgggtgagtaacacgtaggtaacctgcctttaagactgggataactatcggaaacgatagctaagaccggataaccggttttctcgcatgagagaatcgtaaaacacggagcaatctgtggcttraagatgggcctgcggcgcattagctagttggtggggtaacggctcaccaaggcgacgatgcgtagccgacctgagagggtgaacggccacactgggactgagacacggcccagactcctacgggaggcagcagtagggaatcttccgcaatggacgcaagtctgacggagcaacgccgcgtgagtgatgaaggttttcggatcgtaaagctctgttgccctagacgaacagcatgaggagtaactgccttgtgtgtgacggtataggagaagaaagccccggctaactacgtgccagcagccgcggtaatacgtagggggcaagcgttgtccggaattattgggcgtaaagcgcgcgcaggcggtcatttaagtctggtgtttaatcctggggctcaaccccagttcgcatcggaaactggatgacttgagtgtaagagaggaaagtggaattccacgtgtagcggtgaaatgcgtagagatgtggaggaacaccagtggcgaaggcgactttctggcttataactgacgctgaggcgcgaaagcgtggggagcaaacaggattagataccctggtagtccacgccgtaaacgatgcatactaggtgtcggggattcgatttctcggtgccgaagttaacacagtaagtatgccgcctggggagtacgctcgcaagagtgaaactcaaaggaattgacggggacccgcacaagcagtggagtatgtggtttaattcgaagcaacgcgaagaaccttaccaggtcttgacatccctctgaatcctctagagatagaggcgtcyttcgggacagaggagacaggtggtgcatggttgtcgtcagctcgtgtcgtgagatgttgggttaagtcccgcaacgagcgcaacccttgatcttagttgccagcacttcgggtgggcactctaggatgactgccggtgacaaaccggaggaaggtggggatgacgtcaaatcatcatgccccttatgacctgggctacacacgtactacaatggtcggtacaacgggaagcgaagccgcgaggtggagccaatccttataagccgatctcagttcggattgcaggctgcaactcgcctgcatgaagtcggaattgctagtaatcgcggatcagcatgccgcggtgaatacgttcccgggtcttgtacacaccgcccgtcacaccacgagagtttacaacacccgaagtcggtggggtaacccgcaaggagc

SEQ ID NO: 2357 - DNA, 1469 bp, Paenibacillus peoriae
  source 1..1469: mol_type = unassigned DNA
cgctggcggcgtgcgtaatacatgcaagtcgagcggggtttagaagcttgcttctaaacaacctagcggcggacgggtgagtaacacgtaggcaacctgcccacaagacagggataactaccggaaacggtagctaatacccgatacatccttttcctgcatgggagaaggaggaaagacggagcaatctgtcacttgtggatgggcctgcggcgcattagctagttggtggggtaaaggcctaccaaggcgacgatgcgtagccgacctgagagggtgatcggccacactgggactgagacacggcccagactcctacgggaggcagcagtagggaatcttccgcaatgggcgaaagcctgacggagcaacgccgcgtgagtgatgaaggttttcggatcgtaaagctctgttgccagggaagaacgtcttgtagagtaactgctacaagagtgacggtacctgagaagaaagccccggctaactacgtgccagcagccgcggtaatacgtagggggcaagcgttgtccggaattattgggcgtaaagcgcgcgcaggcggctctttaagtctggtgtttaatcccgaggctcaacttcgggtcgcactggaaactggggagcttgagtgcagaagaggagagtggaattccacgtgtagcggtgaaatgcgtagagatgtggaggaacaccagtggcgaaggcgactctctgggctgtaactgacgctgaggcgcgaaagcgtggggagcaaacaggattagataccctggtagtccacgccgtaaacgatgaatgctaggtgttaggggtttcgatacccttggtgccgaagttaacacattaagcattccgcctggggagtacggtcgcaagactgaaactcaaaggaattgacggggacccgcacaagcagtggagtatgtggtttaattcgaagcaacgcgaagaaccttaccaggtcttgacatccctctgatcggtctagagatagatctttccttcgggacagaggagacaggtggtgcatggttgtcgtcagctcgtgtcgtgagatgttgggttaagtcccgcaacgagcgcaacccttatgcttagttgccagcaggtcaagctgggcactctaagcagactgccggtgacaaaccggaggaaggtggggatgacgtcaaatcatcatgccccttatgacctgggctacacacgtactacaatggccggtacaacgggaagcgaaatcgcgaggtggagccaatcctagaaaagccggtctcagttcggattgtaggctgcaactcgcctacatgaagtcggaattgctagtaatcgcggatcagcatgccgcggtgaatacgttcccgggtcttgtacacaccgcccgtcacaccacgagagtttacaacacccgaagtcggtggggtaacccgcaagggagccagccgccgaaggtggggtagatgattggggtg

SEQ ID NO: 2358 - DNA, 1473 bp, Paenibacillus pini
  source 1..1473: mol_type = unassigned DNA
gacgaacgctggcggcgtgcctaatacatgcaagtcgagcggacttgaagagaagcttgcttctcggatagttagcggcggacgggtgagtaacacgtaggtaacctgcctgtaagactgggataacattcggaaacgaatgctaataccggatacgcggtttgatcgcatggtcgaaccgggaaagacggagcaatctgtcacttacagatggacctgcggcgcattagctagttggtgaggtaacggctcaccaaggcgacgatgcgtagccgacctgagagggtgatcggccacactgggactgagacacggcccagactcctacgggaggcagcagtagggaatcttccgcaatggacgaaagtctgacggagcaacgccgcgtgagtgaggaaggccttcgggtcgtaaagctctgttgccagggaagaacgggtggaggagtaactgccttcatcatgacggtacctgagaagaaagccccggctaactacgtgccagcagccgcggtaatacgtagggggcaagcgttgtccggaattattgggcgtaaagcgcgcgcaggcggctttgtaagtcgggtgtttaaacttggggctcaacctcaagtcgcatccgaaactgcaaggcttgagtacagaagaggaaagtggaattccacgtgtagcggtgaaatgcgtagagatgtggaggaacaccagtggcgaaggcgactttctgggctgtaactgacgctgaggcgcgaaagcgtggggagcaaacaggattagataccctggtagtccacgccgtaaacgatgaatgctaggtgttaggggtttcgatacccttggtgccgaagttaacacattaagcattccgcctggggagtacggtcgcaagactgaaactcaaaggaattgacggggacccgcacaagcagtggagtatgtggtttaattcgaagcaacgcgaagaaccttaccaggtcttgacatccctctgaatcctctagagatagaggcggcctcgggacagaggagacaggtggtgcatggttgtcgtcagctcgtgtcgtgagatgttgggttaagtcccgcaacgagcgcaacccttgatcttagttgccagcactttgggtgggcactctaggatgactgccggtgacaaaccggaggaaggtggggatgacgtcaaatcatcatgccccttatgacctgggctacacacgtactacaatgggcagtacaacgggaagcgaagtcgcgaggcggagccaatccttaaaagctgctctcagttcggattgcaggctgcaactcgcctgcatgaagtcggaattgctagtaatcgcggatcagcatgccgcggtgaatacgttcccgggtcttgtacacaccgcccgtcacaccacgagagtttacaacacccgaagtcggtggggtaaccgcaaggagccagccgccgaaggtggggtagatgattggggtg

SEQ ID NO: 2359 - DNA, 1482 bp, unidentified
  source 1..1482: mol_type = unassigned DNA; note = Paenibacillus pinisoli
gacgaacgctggcggcgtgcctaatacatgcaagtcgagcggacttgatggagtgcttgcactcctgatagttagcggcggacgggtgagtaacacgtaggtaacctgcctgtaagactgggataacattcggaaacgaatgctaataccggatacgcgagttggtcgcatggccgactcgggaaagacggagcaatctgtcacttacagatggacctgcggcgcattagctagttggtgaggtaacggctcaccaaggcgacgatgcgtagccgacctgagagggtgatcggccacactgggactgagacacggcccagactcctacgggaggcagcagtagggaatcttccgcaatggacgaaagtctgacggagcaacgccgcgtgagtgatgaaggttttcggatcgtaaagctctgttgccagggaagaacgcttgggagagtaactgctcccaaggtgacggtacctgagaagaaagccccggctaactacgtgccagcagccgcggtaatacgtagggggcaagcgttgtccggaattattgggcgtaaagcgcgcgcaggcggtcaattaagtctggtgtttaaggctggggctcaaccccagttcgcactggaaactggttgacttgagtgcagaagaggaaagtggaattccacgtgtagcggtgaaatgcgtagagatgtggaggaacaccagtggcgaaggcgactttctgggctgtaactgacgctgaggcgcgaaagcgtggggagcaaacaggattagataccctggtagtccacgccgtaaacgatgaatgctaggtgttaggggtttcgatacccttggtgccgaagttaacacattaagcattccgcctggggagtacggtcgcaagactgaaactcaaaggaattgacggggacccgcacaagcagtggagtatgtggtttaattcgaagcaacgcgaagaaccttaccaggtcttgacatctgaatgaccggtgcagagatgtgcctttccttcgggacattcaagacaggtggtgcatggttgtcgtcagctcgtgtcgtgagatgttgggttaagtcccgcaacgagcgcaacccctatttttagttgccagcacttcgggtgggcactctaaagagactgccggtgacaaaccggaggaaggtggggatgacgtcaaatcatcatgccccttatgacctgggctacacacgtactacaatggccagtacaacgggaagcgaaaccgcgaggtggagccaatcctatcaaagctggtctcagttcggattgcaggctgcaactcgcctgcatgaagtcggaattgctagtaatcgcggatcacaatgccgcggtggaatacgtttcccgggtctttgtacacacccgcccgtcacaccacggagagtttacaacacccgaagtcggtggggtaacccgcaagggagccagccgccgaaggtggggtagatgattggggtg

SEQ ID NO: 2360 - DNA, 1455 bp, unidentified
  source 1..1455: mol_type = unassigned DNA; note = Paenibacillus polysaccharolyticus
gatggcggctgctatacatgcaagtcgagcggacttgaagagaagcttgcttctctgatggttagcggcggacgggtgagtaacacgtaggcaacctgccctcaagcttgggacaactaccggaaacggtagctaataccgaatacttgttttcttcgcctgaagagaactggaaagacggagcaatctgtcacttggggatgggcctgcggcgcattagctagttggtgaggtaacggctcaccaaggcgacgatgcgtagccgacctgagagggtgatcggccacactgggactgagacacggcccagactcctacgggaggcagcagtagggaatcttccgcaatgggcgaaagcctgacggagcaatgccgcgtgagtgatgaaggttttcggatcgtaaagctctgttgccagggaagaacgcttgggagagtaactgctctcaaggtgacggtacctgagaagaaagccccggctaactacgtgccagcagccgcggtaatacgtagggggcaagcgttgtccggaattattgggcgtaaagcgcgcgcaggcggtcatgtaagtctggtgtttaatcccggggctcaaccccggatcgcactggaaactgtgtgacttgagtgcagaagaggagagtggaattccacgtgtagcggtgaaatgcgtagagatgtggaggaacaccagtggcgaaggcgactctctgggctgtaactgacgctgaggcgcgaaagcgtggggagcaaacaggattagataccctggtagtccacgccgtaaacgatgagtgctaggtgttaggggtttcgatacccttggtgccgaagttaacacattaagcactccgcctggggagtacggtcgcaagactgaaactcaaaggaattgacggggacccgcacaagcagtggagtatgtggtttaattcgaagcaacgcgaagaaccttaccaggtcttgacatccaactaacgaggcagagatgcgtcaggtgcccttcggggaaagttgagacaggtggtgcatggttgtcgtcagctcgtgtcgtgagatgttgggttaagtcccgcaacgagcgcaacccttatatttagttgccagcatttcgggtgggcactctagatagactgccggtgacaaaccggaggaaggtggggatgacgtcaaatcatcatgccccttatgacctgggctacacacgtactacaatggccggtacaacgggcagcgaaatcgcgagatggagccaatcccaacaaagccggtctcagttcggattgcaggctgcaactcgcctgcatgaagtcggaattgctagtaatcgcggatcagcatgccgcggtgaatacgttcccgggtcttgtacacaccgcccgtcacaccacgagagtttataacacccgaagtcggtggggtaaccgcaaggagccagccgccgaaggtgcatga

SEQ ID NO: 2361 - DNA, 1458 bp, Paenibacillus popilliae
  source 1..1458: mol_type = unassigned DNA
tgcctaatacatgcaagtcgagcggactcaactgtttccttcgggaaaccgttaggttagcggcggacgggtgagtaatacgtaggtaacctgcccttaagacygggataactcacggaaacgtgggctaawaccggataggcgatttgctcgcatgagggaatcgggaaaggcggagcaatctgccacttatggatggacctacggcgcattagctagttggtgrggtaacggctcaccaaggcgacgatgcgtagccgacctgagagggtgatcggccacactgggactgagacacggcccagactcctacgggaggcagcagtagggaatcttccgcaatggacgcaagtctgacggagcaacgccgcgtgagtgatgaaggttttcggatcgtaaagctctgttgccagggaagaacgctatggagagtaactgttccataggtgacggtacctgagaagaaagccccggctaactacgtgccagcagccgcggtaatacgtagggggcaagcgttgtccggaattattgggcgtaaagcgcgcgcaggcggtcatgtaagtctggtgtttaaacccggggctcaactccgggtcgcatcggaaactgtgtgacttgagtgcagaagaggaaagtggaattccacgtgtagcggtgaaatgcgtagagatgtggaggaacaccagtggcgaaggcgactttctgggctgtaactgacgctgaggcgcgaaagcgtggggagcaaacaggattagataccctggtagtccacgccgtaaacgatgaatgctaggtgttaggggtttcgatacccttggtgccgaagttaacacattaagcattccgcctggggagtacggtcgcaagactgaaactcaaaggaattgacggggacccgcacaagcagtggagtatgtggtttaattcgaagcaacgcgaagaaccttaccaggtcttgacatccctctgaccgcgctagagatagggcttcccttcggggcagaggagacaggtggtgcatggttgtcgtcagctcgtgtcgtgagatgttgggttaagtcccgcaacgagcgcaacccttaactttagttgccagcattgagttgggcactctagagtgactgccggtgacaaaccggaggaaggtggggatgacgtcaaatcatcatgccccttatgacctgggctacacacgtactacaatggctggtacaacgggaagcgaagccgcgaggtggagcgaatcctaaaaagccagtctcagttcggattgcaggctgcaactcgcctgcatgaagtcggaattgctagtaatcgcggatcagcatgccgcggtgaatacgttcccgggtcttgtacacaccgcccgtcacaccacgagagtttacaacacccgaagtcggtggggtaaccgcaaggagccagccgccgaaggtggggtagatgattggggtg

SEQ ID NO: 2362 - DNA, 1468 bp, Paenibacillus prosopidis
  source 1..1468: mol_type = unassigned DNA
gacgaacgctggcggcgtgcctaatacatgcaagtcgagcggatcttatccttcgggataagattagcggcggacgggtgagtaacacgtaggtaacctgcccgtaagactgggataacattcggaaacgaatgctaataccggatacacagcttggtcgcatgaccttgctgggaaagatggagcaatctatcacttacggatggacctgcggcgcattagctagttggtgaggtaacggctcaccaaggcgacgatgcgtagccgacctgagagggtgatcggccacactgggactgagacacggcccagactcctacgggaggcagcagtagggaatcttccgcaatggacgaaagtctgacggagcaacgccgcgtgagtgatgaaggttttcggatcgtaaagctctgttgccagggaagaacgcttgggagagtaactgctctcaaggtgacggtacctgagaagaaagccccggctaactacgtgccagcagccgcggtaatacgtagggggcaagcgttgtccggaattattgggcgtaaagcgcgcgcaggcggccttgtaagtctgttgtttaaactcggggctcaaccccgagtcgcaatggaaactgcaaagcttgagtgcccaacattaaagtggaattccacgtgtagcggtgaaatgcgtagagatgtagaagaacaccagtggcggaggggattttctgggctgtaactgacgctgaggcgcgaaagcgtggggagcaaacaggattagataccctggtagtccacgccgtaaacgatgaatgctaggtgttaggggtttcgatacccttggtgccgaagttaacacattaagcattccgcctggggagtacggtcgcaagactgaaactcaaaggaattgacggggacccgcacaagcagtggagtatgtggtttaattcgaagcaacgcgaagaaccttaccaggtcttgacatccctctgaccgctctagagatagggctttccttcgggacagaggagacaggtggtgcatggttgtcgtcagctcgtgtcgtgagatgttgggttaagtcccgcaacgagcgcaacccttgatcttagttgccagcactttgggtgggcactctaagatgactgccggtgacaaaccggaggaaggtggggatgacgtcaaatcatcatgccccttatgacctgggctacacacgtactacaatggccgatacaacgggaagcgaaaccgcgaggtggagccaatcctatcaaagtcggtctcagttcggattgcaggctgcaactcgcctgcatgaagtcggaattgctagtaatcgcggatcagcatgccgcggtgaatacgttcccgggtcttgtacacaccgcccgtcacaccacgagagtttacaacacccgaagccggtggggtaacccgcaagggagctagccgtcgaaggtggggtagatgattggggg

SEQ ID NO: 2363 - DNA, 1465 bp, Paenibacillus rigui
  source 1..1465: mol_type = unassigned DNA
gacgaacgctggcggcgtgcctaatacatgcaagtcgagcggatttcaccttcgggtgaagttagcggcggacgggtgagtaacacgtaggcaacctgcctgtaagactgggataactatcggaaacgatagctaagaccggatagctggttctctcgcatgagggaatcatgaaacacggagcaatctgtggcttacagatgggcctgcggcgcattagctagttggtgaggtaacggctcaccaaggcgacgatgcgtagccgacctgagagggtgatcggccacactgggactgagacacggcccagactcctacgggaggcagcagtagggaatcttccgcaatggacgcaagtctgacggagcaacgccgcgtgagtgatgaaggttttcggatcgtaaagctctgttgccagggaagaacgctcaggagagtaactgctcctgaggtgacggtacctgagaagaaagccccggctaactacgtgccagcagccgcggtaatacgtagggggcaagcgttgtccggaattattgggcgtaaagcgcgcgcaggcggttatttaagtttggtgtttaagcccggggctcaaccccggatcgcactgaaaactggatgacttgagtgcgggagaggaaagtggaattccacgtgtagcggtgaaatgcgtagagatgtggaggaacaccagtggcgaaggcgactttctggaccgtaactgacgctgaggcgcgaaagcgtggggagcaaacaggattagataccctggtagtccacgccgtaaacgatgagtgctaggtgttaggggtttcgatacccttggtgccgaagtaaacacagtaagcactccgcctggggagtacgctcgcaagagtgaaactcaaaggaattgacggggacccgcacaagcagtggagtatgtggtttaattcgaagcaacgcgaagaaccttaccaggtcttgacatccctctgcaagccatagagatatggccctccttcgggacagaggagacaggtggtgcatggttgtcgtcagctcgtgtcgtgagatgttgggttaagtcccgcaacgagcgcaacccttgactttagttgccagcattaagttgggcactctagagtgactgccggtgacaaaccggaggaaggtggggatgacgtcaaatcatcatgccccttatgacctgggctacacacgtactacaatggccggtacaacgggaagcgaagccgcgaggtggagcgaatctttagaagccggtctcagttcggattgcaggctgcaactcgcctgcatgaagtcggaattgctagtaatcgcggatcagcatgccgcggtgaatacgttcccgggtcttgtacacaccgcccgtcacaccacgagagtttacaacacccgaagtcggtggggtaacccgcaagggagccagccgccgaaggtggggtagatgattggggtg

SEQ ID NO: 2364 - DNA, 1473 bp, Paenibacillus riograndensis
  source 1..1473: mol_type = unassigned DNA
gacgaacgctggcggcgtgcctaatacatgcaagtcgagcggagtttatccttcgggataagcttagcggcggacgggtgagtaacacgtaggcaacctaccctctagactgggataactaccggaaacggtagctaataccggataattccttaacccacctgggataaggatgaaaggcggagcaatctgctgctagaggatgggcctgcggcgcattagctagttggtggggtaacggcctaccaaggcgacgatgcgtagccgacctgagagggtgaacggccacactgggactgagacacggcccagactcctacgggaggcagcagtagggaatcttccgcaatgggcgaaagcctgacggagcaacgccgcgtgagtgatgaaggttttcggatcgtaaagctctgttgccagggaagaacgtccggtagagtaactgctaccggagtgacggtacctgagaagaaagccccggctaactacgtgccagcagccgcggtaatacgtagggggcaagcgttgtccggaattattgggcgtaaagcgcgcgcaggcggctgcttaagtctggtgtttaaaccttgggctcaacctggggtcgcactggaaactgggcagcttgagtacagaagaggaaagtggaattccacgtgtagcggtgaaatgcgtagagatgtggaggaacaccagtggcgaaggcgactttctgggctgtaactgacgctgaggcgcgaaagcgtggggagcaaacaggattagataccctggtagtccacgccgtaaacgatgagtgctaggtgttaggggtttcgatacccttggtgccgaagttaacacagtaagcactccgcctggggagtacggtcgcaagactgaaactcaaaggaattgacggggacccgcacaagcagtggagtatgtggtttaattcgaagcaacgcgaagaaccttaccaggtcttgacatccaactaacgaagcagagatgcattaggtgcccttcggggaaagttgagacaggtggtgcatggttgtcgtcagctcgtgtcgtgagatgttgggttaagtcccgcaacgagcgcaacccttgactttagttgccagcaggtaaggctgggcactctagagtgactgccggtgacaaaccggaggaaggtggggatgacgtcaaatcatcatgccccttatgacctgggctacacacgtactacaatggccggtacaacgggaagcgaagccgcgaggtggagccaatcccagcaaagccggtctcagttcggattgcaggctgcaactcgcctgcatgaagtcggaattgctagtaatcgcggatcagcatgccgcggtgaatacgttcccgggtcttgtacacaccgcccgtcacaccacgagagtttacaacacccgaagtcggtggggtaacccgcaagggggccagccgccgaaggtggggtagatgattggggtg

SEQ ID NO: 2365 - DNA, 1479 bp, Paenibacillus sabinae
  source 1..1479: mol_type = unassigned DNA
gacgaacgctggcggcgtgcctaatacatgcaagtcgagcggagtattttgaagagcttgctcttcaaaatacttagcggcggacgggtgagtaacacgtaggcaacctgccccttggactgggataactaccggaaacggtagctaataccggataagaccttctggtgcataccggaaggcggaaaggcggagtaatctgtcaccaggggatgggcctgcggcgcattagctagttggtggggtaacggctcaccaaggcgacgatgcgtagccgacctgagagggtgaacggccacactgggactgagacacggcccagactcctacgggaggcagcagtagggaatcttccgcaatgggcgaaagcctgacggagcaacgccgcgtgagtgatgaaggttttcggatcgtaaagctctgttgccagggaagaacgtctcttagagtaactgctaagagagtgacggtacctgagaagaaagccccggctaactacgtgccagcagccgcggtaatacgtagggggcaagcgttgtccggaattattgggcgtaaagcgcgcgcaggcggctgtttaagtctggtgtttaaaccatgggctcaacctgtggtcgcactggaaactgggcagcttgagtgcagaagaggaaagtggaattccacgtgtagcggtgaaatgcgtagagatgtggaggaacaccagtggcgaaggcgactttctgggctgtaactgacgctgaggcgcgaaagcgtggggagcaaacaggattagataccctggtagtccacgccgtaaacgatgagtgctaggtgttaggggtttcgatacccttggtgccgaagttaacacagtaagcactccgcctggggagtacggtcgcaagactgaaactcaaaggaattgacggggacccgcacaagcagtggagtatgtggtttaattcgaagcaacgcgaagaaccttaccaggtcttgacatccctctgaccggactagagatagtcctttccttcgggacagaggagacaggtggtgcatggttgtcgtcagctcgtgtcgtgagatgttgggttaagtcccgcaacgagcgcaacccttgactttagttgccagcaggtaaagctgggcactctagagtgactgccggtgacaaaccggaggaaggtggggatgacgtcaaatcatcatgccccttatgacctgggctacacacgtactacaatggccggtacaacgggaagcgaagccgcgaggcggagccaatcttataaagccggtctcagttcggattgcaggctgcaactcgcctgcatgaagtcggaattgctagtaatcgcggatcagcatgccgcggtgaatacgttcccgggtcttgtacacaccgcccgtcacaccacgagagtttacaacacccgaagtcggtggggtaacccgcaagggagccagccgccgaaggtggggtagatgattggggtg

SEQ ID NO: 2366 - DNA, 1475 bp, Paenibacillus sanguinis
  source 1..1475: mol_type = unassigned DNA
gacgaacgctggcggcgtgcctaatacatgcaagtcgagcggagtgattggggagcttgctcccggatcacttagcggcggacgggtgagtaacacgtaggcaacctgcctgtaagcctgggataactagcggaaacgttagctaataccggatagtcaagcctctcgcatgggagacttgggaaagacggagcaatctgtcacttatggatgggcctgcggcgcattagctagttggtagggtaatggcctaccaaggcgacgatgcgtagccgacctgagagggtgaacggccacactgggactgagacacggcccagactcctacgggaggcagcagtagggaatcttccgcaatggacgcaagtctgacggagcaacgccgcgtgagtgaagaaggttttcggatcgtaaagctctgttgccagggaagaacgaccctaagagtaactgcttagggagtgacggtacctgagaagaaagccccggctaactacgtgccagcagccgcggtaatacgtagggggcagcgttgtccggaattattgggcgtaaagcgcgcgcaggcggctgtttaagtctggtgtataaccttggggcttaacctcaagtggcactggaaactgggcagctggagtgcagaagaggagagtggaattccacgtgtagcggtgaaatgcgtagagatgtggaggaacaccagtggcgaaggcgactctctgggctgtaactgacgctgaggcgcgaaagcgtggggagcaaacaggattagataccctggtagtccacgccgtaaacgatgaatgctaggtgttaggggtttcgatacccttggtgccgaagttaacacattaagcattccgcctggggagtacggccgcaaggctgaaactcaaaggaattgacggggacccgcacaagcagtggagtatgtggtttaattcgaagcaacgcgaagaaccttaccaggtcttgacatctgaatgaccgctctagagatagggttttccttcgggacattcaagacaggtggtgcatggttgtcgtcagctcgtgtcgtgagatgttgggttaagtcccgcaacgagcgcaacccttgactttagttgccagcaggtaaagctgggcactctagagtgactgccggtgacaaaccggaggaaggtggggatgacgtcaaatcatcatgccccttatgacctgggctacacacgtactacaatggccggtacaacgggaagcgaagtcgcgagatggagcgaatcctagaaaagccggtctcagttcggattgcaggctgcaactcgcctgcatgaagtcggaattgctagtaatcgcggatcagcatgccgcggtgaatacgttcccgggtcttgtacacaccgcccgtcacaccacgagagtttacaacacccgaagtcggtgaggtaaccgcaaggagccagccgccgaaggtggggtagatgattggggtg

SEQ ID NO: 2367 - DNA, 1469 bp, unidentified
  source 1..1469: mol_type = unassigned DNA; note = Paenibacillus selenitireducens
gacgaacgctggcggcgtgcctaatacatgcaagtcgagcggagttattccttcgggagtaacttagcggcggacgggtgagtaacacgtaggcaacctgcctgtaagactgggataactaccggaaacggtagctaagaccggatacacgatttgatcgcatgatcgaattgggaaaagcggagcaatctgctacttacagatgggcctgcggcgcattagctagttggtgaggtaacggctcaccaaggcgacgatgcgtagccgacctgagagggtgaacggccacactgggactgagacacggcccagactcctacgggaggcagcagtagggaatcttccgcaatggacgcaagtctgacggagcaacgccgcgtgagtgatgaaggttttcggatcgtaaagctctgttgccagggaagaacgctatggagagtaactgctctgtaggtgacggtacctgagaagaaagccccggctaactacgtgccagcagccgcggtaatacgtagggggcaagcgttgtccggaattattgggcgtaaagcgcgcgcaggcggctttgtaagtctggtgtttaaacctagggctcaaccctgggtcgcattggaaactgcaaggcttgagtgcagaagaggagagtggaattccacgtgtagcggtgaaatgcgtagagatgtggaggaacaccagtggcgaaggcgactctctgggctgtaactgacgctgaggcgcgaaagcgtggggagcaaacaggattagataccctggtagtccacgccgtaaacgatgaatgctaggtgttaggggtttcgatacccttggtgccgaagttaacacattaagcattccgcctggggagtacggtcgcaagactgaaactcaaaggaattgacggggacccgcacaagcagtggagtatgtggtttaattcgaagcaacgcgaagaaccttaccaggtcttgacatctgaatgcaaacctctagagatagaagtccttcttcggaacattcaagacaggtggtgcatggttgtcgtcagctcgtgtcgtgagatgttgggttaagtcccgcaacgagcgcaacccttgatcttagttgccagcacttcgggtgggcactctaggatgactgccggtgacaaaccggaggaaggtggggatgacgtcaaatcatcatgccccttatgacctgggctacacacgtactacaatggtcgatacaacgggaagcgaagccgcgaggtggagccaatcctatcaaagtcgatctcagttcggattgcaggctgcaactcgcctgcatgaagtcggaattgctagtaatcgcggatcagcatgccgcggtgaatacgttcccgggtcttgtacacaccgcccgtcacaccacgagagtttacaacacccgaagccggtggggtaaccgcaaggagccagccgtcgaaggtggggtagatgattggggtg

SEQ ID NO: 2368 - DNA, 1421 bp, unidentified
  source 1..1421: mol_type = unassigned DNA; note = Paenibacillus silvae
gcaagtcgagcggagttgacggaaagcttgctttcctgatacttagcggcggacgggtgagtaacacgtaggcaacctgccctcaagcttgggacaactaccggaaacggtagctaataccgaatacttgttttcttcgcctgaagggaactggaaagacggagcaatctgtcacttgaggatgggcctgcggcgcattagctagttggtgaggtaacggctcaccaaggcgacgatgcgtagccgacctgagagggtgatcggccacactgggactgagacacggcccagactcctacgggaggcagcagtagggaatcttccgcaatgggcgaaagcctgacggagcaatgccgcgtgagtgatgaaggttttcggatcgtaaagctctgttgccagggaagaacgcttgggagagtaactgctctcaaggtgacggtacctgagaagaaagccccggctaactacgtgccagcagccgcggtaatacgtagggggcaagcgttgtccggaattattgggcgtaaagcgcgcgcaggcggtcatgtaagtctggtgtttaatcccggggctcaaccccggatcgcactggaaactgcgtgacttgagtgcagaagaggagagtggaattccacgtgtagcggtgaaatgcgtagagatgtggaggaacaccagtggcgaaggcgactctctgggctgtaactgacgctgaggcgcgaaagcgtggggagcaaacaggattagataccctggtagtccacgccgtaaacgatgaatgctaggtgttaggggtttcgatacccttggtgccgaagttaacacattaagcattccgcctggggagtacggtcgcaagactgaaactcaaaggaattgacggggacccgcacaagcagtggagtatgtggtttaattcgaagcaacgcgaagaaccttaccaggtcttgacatccaactaacgaggcagagatgcgttaggtgcccttcggggaaagttgagacaggtggtgcatggttgtcgtcagctcgtgtcgtgagatgttgggttaagtcccgcaacgagcgcaacccttatatttagttgccagcacttcgggtgggcactctaaatagactgccggtgacaaaccggaggaaggtggggatgacgtcaaatcatcatgccccttatgacctgggctacacacgtactacaatggccggtacaacgggcagtgaagccgcgaggtggaaccaatcctaaaaagccggtctcagttcggattgcaggctgcaactcgcctgcatgaagtcggaattgctagtaatcgcggatcagcatgccgcggtgaatacgttcccgggtcttgtacacaccgcccgtcacaccacgagagtttataacacccgaagtcggtggggtaaccgcaaggagccagccg

SEQ ID NO: 2369 - DNA, 1448 bp, unidentified
  source 1..1448: mol_type = unassigned DNA; note = Paenibacillus solani
gcagtcgagcggacttgatggagagcttgctctcctgagagttagcggcggacgggtgagtaacacgtaggtaacctgcccttaagactgggataactaccggaaacggtagctaataccggataatttattttgctgcatggcgaaataatgaaagacggagcaatctgtcacttgaggatggacctgcggcgcattagctagttggtggggtaacggctcaccaaggcgacgatgcgtagccgacctgagagggtgaacggccacactgggactgagacacggcccagactcctacgggaggcagcagtagggaatcttccgcaatggacgaaagtctgacggagcaacgccgcgtgagtgatgaaggttttcggatcgtaaagctctgttgccagggaagaacgcccgttagagtaactgctctcggagtgacggtacctgagaagaaagccccggctaactacgtgccagcagccgcggtaatacgtagggggcaagcgttgtccggaattattgggcgtaaagcgcgcgcaggcggttctttaagtctggtgtttaaacccgaggctcaacttcgggtcgcattggaaactgggggacttgagtgcagaagaggagagtggaattccacgtgtagcggtgaaatgcgtagatatgtggaggaacaccagtggcgaaggcgactctctgggctgtaactgacgctgaggcgcgaaagcgtggggagcaaacaggattagataccctggtagtccacgccgtaaacgatgaatgctaggtgttaggggtttcgatacccttggtgccgaagttaacacattaagcattccgcctggggagtacggtcgcaagactgaaactcaaaggaattgacggggacccgcacaagcagtggagtatgtggtttaattcgaagcaacgcgaagaaccttaccaagtcttgacatccctctgaatcctctagagatagaggcggccttcgggacagaggtgacaggtggtgcatggttgtcgtcagctcgtgtcgtgagatgttgggttaagtcccgcaacgagcgcaacccttgattttagttgccagcatgtaatgatgggcactctagaatgactgccggtgacaaaccggaggaaggcggggatgacgtcaaatcatcatgccccttatgacttgggctacacacgtactacaatggctggtacaacgggaagcgaagccgcgaggtgaagccaatcctataaaagccagtctcagttcggattgcaggctgcaactcgcctgcatgaagtcggaattgctagtaatcgcggatcagcatgccgcggtgaatacgttcccgggtcttgtacacaccgcccgtcacaccacgagagtttacaacacccgaagtcggtggggtaacccgcaagggagccagccgccgaaggtggggtagatgattggggtg

SEQ ID NO: 2370 - DNA, 1463 bp, Paenibacillus sophorae
  source 1..1463: mol_type = unassigned DNA
ggcggcgtgcctaatacatgcaagtcgagcggagtatttttgagagcttgctctcaaaaatacttagcggcggacgggtgagtaacacgtaggcaacctgccccttgaactgggataactaccggaaacggtagctaataccggataattcctcttggcacctgctgggaggctgaaaggcggagcaatctgctgtcaagggatgggcctgcggcgcattagctagttggtggggtaacggctcaccaaggcgacgatgcgtagccgacctgagagggtgaacggccacactgggactgagacacggcccagactcctacgggaggcagcagtagggaatcttccgcaatgggcgaaagcctgacggagcaacgccgcgtgagtgatgaaggttttcggatcgtaaagctctgttgccagggaagaacgtctcttagagtaactgctaagagagtgacggtacctgagaagaaagccccggctaactacgtgccagcagccgcggtaatacgtagggggcaagcgttgtccggaattattgggcgtaaagcgcgcgcaggcggctgtttaagtctggtgtttaaaccatgggctcaacctgtggtcgcactggaaactgggcagcttgagtgcagaagaggaaagtggaattccacgtgtagcggtgaaatgcgtagagatgtggaggaacaccagtggcgaaggcgactttctgggctgtaactgacgctgaggcgcgaaagcgtggggagcaaacaggattagataccctggtagtccacgccgtaaacgatgagtgctaggtgttaggggtttcgatacccttggtgccgaagttaacacagtaagcactccgcctggggagtacggtcgcaagactgaaactcaaaggaattgacggggacccgcacaagcagtggagtatgtggtttaattcgaagcaacgcgaagaaccttaccaggtcttgacatccctctgaatcgcctagagataggcgcggccttcgggacagaggagacaggtggtgcatggttgtcgtcagctcgtgtcgtgagatgttgggttaagtcccgcaacgagcgcaacccttgactttagttgccagcaggtaaagctgggcactctagagtgactgccggtgacaaaccggaggaaggtggggatgacgtcaaatcatcatgccccttatgacctgggctacacacgtactacaatggccggtacaacgggaagcgaagccgcgaggtggagccaatcttataaagccggtctcagttcggattgcaggctgcaactcgcctgcatgaagtcggaattgctagtaatcgcggatcagcatgccgcggtgaatacgttcccgggtcttgtacacaccgcccgtcacaccacgagagtttacaacacccgaagtcggtggggtaacccgcaagggagccagccgccgaaggtggggtagatgatt

SEQ ID NO: 2371 - DNA, 1478 bp, unidentified
  source 1..1478: mol_type = unassigned DNA; note = Paenibacillus swuensis
gacgaacgctggcggcgtgcctaatacatgcaagtcgagcggagttgatgagaagcttgcttctctgatgctcagcggcggacgggtgagtaacacgtaggtaacctgcctgtaagatcgggataactaccggaaacggtagctaagaccggatacacggttctcttgcatgagaggattgggaaaagcggagcaatctgctgcttacagatgggcctgcggcgcattagctagttggtggggtaacggctcaccaaggcgacgatgcgtagccgacctgagagggtgatcggccacactgggactgagacacggcccagactcctacgggaggcagcagtagggaatcttccgcaatggacgaaagtctgacggagcaacgccgcgtgagtgatgaaggttttcggatcgtaaagctctgttgccagggaagaacgccgaggagagtaactgctcttcgggtgacggtacctgagaagaaagccccggctaactacgtgccagcagccgcggtaatacgtagggggcaagcgttgtccggaattattgggcgtaaagcgcgcgcaggcggttttgtaagtctagtgtttaattccagggctcaaccctggatcgcaccggaaactgcaagacttgagtgtaggagaggaaagtggaattccacgtgtagcggtgaaatgcgtagagatgtggaggaacaccagtggcgaaggcgactttctggcctataactgacgctgaggcgcgaaagcgtggggagcaaacaggattagataccctggtagtccacgccgtaaacgatgaatgctaggtgttaggggtttcgatacccttggtgccgaagttaacacattaagcattccgcctggggagtacgctcgcaagagtgaaactcaaaggaattgacggggacccgcacaagcagtggagtatgtggtttaattcgaagcaacgcgaagaaccttaccaggtcttgacatccctctgaatacgctggagacagcgtaggccttcgggacagaggagacaggtggtgcatggttgtcgtcagctcgtgtcgtgagatgttgggttaagtcccgcaacgagcgcaacccttgatcttagttgccagcgagtcaagtcgggcactctaggatgactgccggtgacaaaccggaggaaggtggggatgacgtcaaatcatcatgccccttatgacctgggctacacacgtactacaatggccggtacaacgggaagcgaagccgcgaggtggagccaatcttataaaagccggtctcagttcggattgcaggctgcaactcgcctgcatgaagtcggaattgctagtaatcgcggatcagcatgccgcggtgaatacgttcccgggtcttgtacacaccgcccgtcacaccacgagagtttacaacacccgaagtcggtggggtaacccgcaagggagccagccgccgaaggtggggtagatgattggggtg

SEQ ID NO: 2372 - DNA, 1474 bp, Paenibacillus taichungensis
  source 1..1474: mol_type = unassigned DNA
gacgaacgctggcggcatgcctaatacatgcaagtcgagcggacttgawgagaagcttgcttctctgatggttagcggcggacgggtgagtaacacgtaggcaacctgccctcaagcttgggacaactaccggaaacggtagctaataccgaatagttgttttcttctcctgaagagaactggaaagacggagcaatctgtcacttggggatgggcctgcggcgcattagctagttggtggggtaacggctcaccaaggcgacgatgcgtagccgacctgagagggtgatcggccacactgggactgagacacggcccagactcctacgggaggcagcagtagggaatcttccgcaatgggcgaaagcctgacggagcaatgccgcgtgagtgatgaaggttttcggatcgtaaagctctgttgccagggaagaacgcttgggagagtaactgctctcaaggtgacggtacctgagaagaaagccccggctaactacgtgccagcagccgcggtaatacgtagggggcaagcgttgtccggaattattgggcgtaaagcgcgcgcaggcggtcatttaagtctggtgtttaatcccggggctcaaccccggatcgcactggaaactgggtgacttgagtgcagaagaggagagtggaattccacgtgtagcggtgaaatgcgtagatatgtggaggaacaccagtggcgaaggcgactctctgggctgtaactgacgctgaggcgcgaaagcgtggggagcaaacaggattagataccctggtagtccacgccgtaaacgatgagtgctaggtgttaggggtttcgatacccttggtgccgaagttaacacattaagcactccgcctggggagtacggtcgcaagactgaaactcaaaggaattgacggggacccgcacaagcagtggagtatgtggtttaattcgaagcaacgcgaagaaccttaccaggtcttgacatccctctgaccggtacagagatgtacctttccttcgggacagaggagacaggtggtgcatggttgtcgtcagctcgtgtcgtgagatgttgggttaagtcccgcaacgagcgcaacccttgatcttagttgccagcacttcgggtgggcactctaaggtgactgccggtgacaaaccggaggaaggtggggatgacgtcaaatcatcatgccccttatgacctgggctacacacgtactacaatggccggtacaacgggctgtgaagccgcgaggtggaacgaatcctaaaaagccggtctcagttcggattgcaggctgcaactcgcctgcatgaagtcggaattgctagtaatcgcggatcagcatgccgcggtgaatacgttcccgggtcttgtacacaccgcccgtcacaccacgagagtttataacacccgaagtcggtggggtaaccgcaaggagccagccgccgaaggtgggatagatgattggggtg

SEQ ID NO: 2373 - DNA, 1469 bp, unidentified
  source 1..1469: mol_type = unassigned DNA; note = Paenibacillus taihuensis
gacgaacgctggcggcgtgcctaatacatgcaagtcgagcggatcttaccttcgggtaaggttagcggcggacgggtgagtaacacgtaggcaacctgcctgtaagaccgggataacattcggaaacgaatgctaataccggatatgcaacttggctgcatggtcgagttgggaaagacggtgcaagctgtcgcttacagatgggcctgcggtgcattagctagttggtgaggtaacggctcaccaaggcgacgatgcatagccgacctgagagggtgatcggccacactgggactgagacacggcccagactcctacgggaggcagcagtagggaatcttccgcaatggacgaaagtctgacggagcaacgccgcgtgagtgatgaaggttttcggatcgtaaagctcagttgccagggaagaacagccgagagagtaactgctcttggaatgacggtacctgagaagaaagccccggctaactacgtgccagcagccgcggtaatacgtagggggcaagcgttgtccggaattattgggcgtaaagcgcgcgcaggcggctttgtaagtttggtgtttaatctcagagctcaactctgattcgcatcgaaaactgcaaggcttgagtacagaagaggaaagtggaattccacgtgtagcggtgaaatgcgtagagatgtggaggaacaccagtggcgaaggcgactttctgggctgtaactgacgctgaggcgcgaaagcgtggggagcaaacaggattagataccctggtagtccacgccgtaaacgatgaatgctaggtgttaggggtttcgatacccttggtgccgaagttaacacattaagcattccgcctggggagtacgctcgcaagagtgaaactcaaaggaattgacggggacccgcacaagcagtggagtatgtggtttaattcgaagcaacgcgaagaaccttaccagctcttgacatccctctgaatcctctagagatagaggcggcccttcggggacggaggagacaggtggtgcatggttgtcgtcagctcgtgtcgtgagatgttgggttaagtcccgcaacgagcgcaacccttgatcttagttgccagcagttcggctgggcactctaaggtgactgccggtgacaaaccggaggaaggtggggatgacgtcaaatcatcatgccccttatgagctgggctacacacgtactacaatggccggtacaacgggaagcgaagccgcgaggtggagcgaatcctataaaagccggtctcagttcggattgcaggctgcaactcgcctgcatgaagtcggaattgctagtaatcgcggatcagcatgccgcggtgaatacgttcccgggtcttgtacacaccgcccgtcacaccacgagagtttacaacacccgaagtcggtggggtaacccgcaagggagccagccgccgaaggtggggtagatgattggggtg

SEQ ID NO: 2374 - DNA, 1480 bp, Paenibacillus terrae
  source 1..1480: mol_type = unassigned DNA
gacgaacgctggcggcgtgcctaatacatgcaagtcgagcggggttatgttagaagcttgcttctaacataacctagcggcggacgggtgagtaacacgtaggcaacctgcccatgagactgggataactaccggaaacggtagctaataccggatacatcctttccctgcatggggagaggaggaaagacggagcaatctgtcactgatggatgggcctgcggcgcattagctagttggtggggtcaaggcctaccaaggcgacgatgcgtagccgacctgagagggtgatcggccacactgggactgagacacggcccagactcctacgggaggcagcagtagggaatcttccgcaatgggcgaaagcctgacggagcaacgccgcgtgagtgatgaaggttttcggatcgtaaagctctgttgccagggaagaacgtcttgtagagtaactgctacaagagtgacggtacctgagaagaaagccccggctaactacgtgccagcagccgcggtaatacgtagggggcaagcgttgtccggaattattgggcgtaaagcgcgcgcaggcggctctttaagtctggtgtttaatcccgaggctcaacttcgggtcgcactggaaactggggagcttgagtgcagaagaggagagtggaattccacgtgtagcggtgaaatgcgtagatatgtggaggaacaccagtggcgaaggcgactctctgggctgtaactgacgctgaggcgcgaaagcgtggggagcaaacaggattagataccctggtagtccacgccgtaaacgatgaatgctaggtgttaggggtttcgatacccttggtgccgaagttaacacattaagcattccgcctggggagtacggtcgcaagactgaaactcaaaggaattgacggggacccgcacaagcagtggagtatgtggtttaattcgaagcaacgcgaagaaccttaccaggtcttgacatccccctgaccggtctagagatagacctttccttcgggacaggggagacaggtggtgcatggttgtcgtcagctcgtgtcgtgagatgttgggttaagtcccgcaacgagcgcaacccttatgcttagttgccagcaggtcaagctgggcactctaagcagactgccggtgacaaaccggaggaaggtggggatgacgtcaaatcatcatgccccttatgacctgggctacacacgtactacaatggccggtacaacgggaagcgaaagagcgatctggagcgaatcctagaaaagccggtctcagttcggattgcaggctgcaactcgcctgcatgaagtcggaattgctagtaatcgcggatcagcatgccgcggtgaatacgttcccgggtcttgtacacaccgcccgtcacaccacgagagtttacaacacccgaagtcggtggggtaacccgcaagggagccagccgccgaaggtggggtagatgattggggtg

SEQ ID NO: 2375 - DNA, 1463 bp, unidentified
  source 1..1463: mol_type = unassigned DNA; note = Paenibacillus thermophilus
aaacgatggcggcgtgctatacatgcaagtcgagcggacctgatggagtgcttgcactcctgatggttagcggcggacgggtgagtaacacgtaggcaacctgcccgtaagaccgggataactaccggaaacggtagctaataccggataatcaagtcttccgcatgggaggcttgggaaaggcggagcaatctgtcacttacggatgggcctgcggcgcattagctagttggtggggtaacggctcaccaaggcgacgatgcgtagccgacctgagagggtgaacggccacactgggactgagacacggcccagactcctacgggaggcagcagtagggaatcttccgcaatggacgaaagtctgacggagcaacgccgcgtgagtgatgaaggttttcggatcgtaaagctctgttgccagggaagaacgtcttctggagtaactgccaggagagtgacggtacctgagaagaaagccccggctaactacgtgccagcagccgcggtaatacgtagggggcaagcgttgtccggaattattgggcgtaaagcgcgcgcaggcggctgtttaagtctggtgtataatcctggggctcaactccgggtcgcactggaaactggacggcttgagtgcagaagaggagagtggaattccacgtgtagcggtgaaatgcgtagagatgtggaggaacaccagtggcgaaggcgactctctgggctgtaactgacgctgaggcgcgaaagcgtggggagcaaacaggattagataccctggtagtccacgccgtaaacgatgagtgctaggtgttaggggtttcgatacccttggtgccgaagtaaacacattaagcactccgcctggggagtacggccgcaaggctgaaactcaaaggaattgacggggacccgcacaagcagtggagtatgtggtttaattcgaagcaacgcgaagaaccttaccaggtcttgacatccctctgaccgctgtagagatatggctttccttcgggacagaggagacaggtggtgcatggttgtcgtcagctcgtgtcgtgagatgttgggttaagtcccgcaacgagcgcaacccttgactttagttgccagcaagtgaagttgggcactctagagtgactgccggtgacaaaccggaggaaggtggggatgacgtcaaatcatcatgccccttatgacctgggctacacacgtactacaatggccggtacaacgggaagcgaaggagcgatctggagcgaatcctagaaaagccggtctcagttcggattgcaggctgcaactcgcctgcatgaagtcggaattgctagtaatcgcggatcagcatgccgcggtgaatacgttcccgggtcttgtacacaccgcccgtcacaccacgagagtttacaacacccgaagtcggtgaggtaaccgcaaggggccagccgccgaaggtgggtagatatt

SEQ ID NO: 2376 - DNA, 1484 bp, Paenibacillus tianmuensis
  source 1..1484: mol_type = unassigned DNA
gacgaacgctggcggcgtgcctaatacatgcaagtcgagcgggttttaccttcgggtaaagctagcggcggacgggtgagtaacacgtaggtaacctgcctgtaagactgggataaccaccggaaacggtagctaagaccggataagtggccttctcgcatgaggagatcaagaaacacggggcaacctgtggcttacagatgggcctgcggcgcattagctagttggtggggtaacggctcaccaaggcgacgatgcgtagccgacctgagagggtgatcggccacactgggactgagacacggcccagactcctacgggaggcagcagtagggaatcttccgcaatggacgcaagtctgacggagcaacgccgcgtgagtgatgaaggttttcggatcgtaaagctctgttgccagggaagaatgtcgtggagagtaactgctctgcgaatgacggtacctgagaagaaagccccggctaactacgtgccagcagccgcggtaatacgtagggggcaagcgttgtccggagttattgggcgtaaagcgcgcgcaggcggccgtttaagtctggtgtttaagcccggggctcaaccccggttcgcactggaaactgggcggcttgagtgcaggagaggaaagcggaattccacgtgtagcggtgaaatgcgtagatatgtggaggaacaccagtggcgaaggcggctttctggcctgtaactgacgctgaggcgcgaaagcgtggggagcaaacaggattagataccctggtagtccacgccgtaaacgatgagtgctaggtgttaggggtttcgatacccttggtgccgaagtaaacacaataagcactccgcctggggagtacgctcgcaagagtgaaactcaaaggaattgacggggacccgcacaagcagtggagtatgtggtttaattcgaagcaacgcgaagaaccttaccaggtcttgacatccctctgaatatcctagagataggataggccttcgggacagaggagacaggtggtgcatggttgtcgtcagctcgtgtcgtgagatgttgggttaagtcccgcaacgagcgcaacccttgaacttagttgccagcattaagttgggcactctaagttgactgccggtgacaaaccggaggaaggtggggatgacgtcaaatcatcatgccccttatgacctgggctacacacgtactacaatggccggtacaacgggaagcaaagtcgcgagatggagccaatcctaagaaagccggtctcagttcggattgcaggctgcaactcgcctgcatgaagtcggaattgctagtaatcgcggatcagcatgccgcggtgaatacgttcccgggtcttgtacacaccgcccgtcacaccacgagagtttacaacacccgaagtcggtggggtaaccttggtgcaaacttgtttgcaccgtggagccagccgccgaaggtggggtagatgattggggtg

SEQ ID NO: 2377 - DNA, 1498 bp, unidentified
  source 1..1498: mol_type = unassigned DNA; note = Paenibacillus tyrfis
agagtttgatcctggctcaggacgaacgctggcggcgtgcctaatacatgcaagtcgagcggacccttcggggttagcggcggacgggtgagtaacacgtaggcaacctgcctgtaagactgggataactaccggaaacggtagctaagaccggataagtgattcttttgcatgagaggatcaagaaacacggggcaacctgtggcttacagatgggcctgcggcgcattagctagttggtggggtaacggctcaccaaggcgacgatgcgtagccgacctgagagggtgatcggccacactgggactgagacacggcccagactcctacgggaggcagcagtagggaatcttccgcaatggacgcaagtctgacggagcaacgccgcgtgagtgatgaaggttttcggatcgtaaagctctgttgccagggaagaacgtcgtggagagtaactgctctgcgaatgacggtacctgagaagaaagccccggctaactacgtgccagcagccgcggtaatacgtagggggcaagcgttgtccggaattattgggcgtaaagcgcgcgcaggcggccgcttaagtctggtgtttaagcccgaggctcaacctcggttcgcactggaaactgggtggcttgagtgcaggagaggaaagcggaattccacgtgtagcggtgaaatgcgtagagatgtggaggaacaccagtggcgaaggcggctttctggcctgtaactgacgctgaggcgcgaaagcgtggggagcaaacaggattagataccctggtagtccacgccgtaaacgatgagtgctaggtgttaggggtttcgatacccttggtgccgaagtaaacacaataagcactccgcctggggagtacgctcgcaagagtgaaactcaaaggaattgacggggacccgcacaagcagtggagtatgtggtttaattcgaagcaacgcgaagaaccttaccaggtcttgacatccctctgaatatcctagagatagggtaggccttcgggacagaggagacaggtggtgcatggttgtcgtcagctcgtgtcgtgagatgttgggttaagtcccgcaacgagcgcaacccttgaacttagttgccagcattaagttgggcactctaagttgactgccggtgacaaaccggaggaaggtggggatgacgtcaaatcatcatgccccttatgacctgggctacacacgtactacaatggccggtacaacgggaagcgaagtcgcgagatggagccaatcctaagaaagccggtctcagttcggattgcaggctgcaactcgcctgcatgaagtcggaattgctagtaatcgcggatcagcatgccgcggtgaatacgttcccgggtcttgtacacaccgcccgtcacaccacgagagtttacaacacccgaagtcggtggggtaaccgcaaggagccagccgccgaaggtggggtagatgattggggtgaagtcgtaacaaggtaaccgta

SEQ ID NO: 2378 - DNA, 1477 bp, Paenibacillus uliginis
  source 1..1477: mol_type = unassigned DNA
gacgaacgctggcggcgtgcctaatacatgcaagtcgagcggacttgatgaggagcttgctcctctgatggttagcggcggacgggtgagtaacacgtaggcaacctgccctcaagactgggataactaccggaaacggtagctaataccggataatttattttgycwcatggygraataatgaaaggcggagcaatctgccacttgaggatgggcctgcggcgcattagctagttggtggggtaatggcccaccaaggcgacgatgcgtagccgacctgagagggtgaacggccacactgggactgagacacggcccagactcctacgggaggcagcagtagggaatcttccgcaatggacgaaagtctgacggagcaacgccgcgtgagtgatgaaggttttcggatcgtaaagctctgttgccagggaagaacgcttaggagagtaactgctcctgaggtgacggtacctgagaagaaagccccggctaactacgtgccagcagccgcggtaatacgtagggggcaagcgttgtccggaattattgggcgtaaagcgcgcgcaggcggttctttaagtctggtgtttaaacctggggctcaacttcaggtcgcactggaaactgggggacttgagtgcagaagaggagagtggaattccacgtgtagcggtgaaatgcgtagatatgtggaggaacaccagtggcgaaggcgactctctgggctgtaactgacgctgaggcgcgaaagcgtggggagcaaacaggattagataccctggtagtccacgccgtaaacgatgaatgctaggtgttaggggtttcgatacccttggtgccgaagttaacacattaagcattccgcctggggagtacggtcgcaagactgaaactcaaaggaattgacggggacccgcacaagcagtggagtatgtggtttaattcgaagcaacgcgaagaaccttaccaggtcttgacatccctctgaccggtacagagatgtacctttccttcgggacagaggagacaggtggtgcatggttgtcgtcagctcgtgtcgtgagatgttgggttaagtcccgcaacgagcgcaacccttgatcttagttgccagcaattcggttgggcactctaaggtgactgccggtgacaaaccggaggaaggtggggatgacgtcaaatcatcatgccccttatgacctgggctacacacgtactacaatggctggtacaacgggaagcgaagccgcgaggtggagccaatcctataaaagccagtctcagttcggattgcaggctgcaactcgcctgcatgaagtcggaattgctagtaatcgcggatcagcatgccgcggtgaatacgttcccgggtcttgtacacaccgcccgtcacaccacgagagtttacaacacccgaagtcggtggggtaacccgcaagggagccagccgccgaaggtggggtagatgattggggtg

SEQ ID NO: 2379 - DNA, 1480 bp, Paenibacillus wynnii
  source 1..1480: mol_type = unassigned DNA
gacgaacgctggcggcatgcctaatacatgcaagtcgagcggagtgattttgaaagcttgctttcaaaatcatttagcggcggacgggtgagtaacacgtaggcaacctgccccttagactgggataactaccggaaacggtagctaataccggataatttctttcctcacctgaggagagaatgaaagacggagtaatctgtcactgagggatgggcctgcggcgcattagctagttggtgaggtaacggctcaccaaggcgacgatgcgtagccgacctgagagggtgaacggccacactgggactgagacacggcccagactcctacgggaggcagcagtagggaatcttccgcaatgggcgaaagcctgacggagcaatgccgcgtgagtgatgaaggttttcggatcgtaaagctctgttgccagggaagaacgtccggtagagtaactgctatcggagtgacggtacctgagaagaaagccccggctaactacgtgccagcagccgcggtaatacgtagggggcaagcgttgtccggaattattgggcgtaaagcgcgcgcaggcggctatttaagtctggtgtttaaaccttgggctcaacctgaggtcgcactggaaactgggtggcttgagtacagaagaggaaagtggaattccacgtgtagcggtgaaatgcgtagatatgtggaggaacaccagtggcgaaggcgactttctgggctgtaactgacgctgaggcgcgaaagcgtggggagcaaacaggattagataccctggtagtccacgccgtaaacgatgagtgctaggtgttaggggtttcgatacccttggtgccgaagttaacacattaagcactccgcctggggagtacggtcgcaagactgaaactcaaaggaattgacggggacccgcacaagcagtggagtatgtggtttaattcgaagcaacgcgaagaaccttaccaggtcttgacatcccgatgtaagcattagagatagtgcccctcttcggagcatcggagacaggtggtgcatggttgtcgtcagctcgtgtcgtgagatgttgggttaagtcccgcaacgagcgcaacccttatgcttagttgccagcacattatggtgggcactctaagcagactgccggtgacaaaccggaggaaggtggggatgacgtcaaatcatcatgccccttatgacctgggctacacacgtactacaatggccggtacaacgggctgcgaaatcgcaaggtggagcgaatcccaacaaagccggtctcagttcggattgcaggctgcaactcgcctgcatgaagtcggaattgctagtaatcgcggatcagcatgccgcggtgaatacgttcccgggtcttgtacacaccgcccgtcacaccacgagagtttacaacacccgaagtcggtggggtaacccgcaagggagccagccgccgaaggtggggtagatgattggggtg

SEQ ID NO: 2380 - DNA, 1475 bp, Paenibacillus xylanexedens
  source 1..1475: mol_type = unassigned DNA
gacgaacgctggcggcatgcctaatacatgcaagtcgagcggagtggataggaagcttgcttccttgatacttagcggcggacgggtgagtaacacgtaggcaacctgccctcaagtttgggacaactaccggaaacggtagctaataccgaataattgttttcttcgcctgaaggaaactggaaagacggagcaatctgtcacttggggatgggcctgcggcgcattagctagttggtgaggtaacggctcaccaaggcgacgatgcgtagccgacctgagagggtgatcggccacactgggactgagacacggcccagactcctacgggaggcagcagtagggaatcttccgcaatgggcgaaagcctgacggagcaatgccgcgtgagtgatgaaggttttcggatcgtaaagctctgttgccagggaagaacgcttgggagagtaactgctctcaaggtgacggtacctgagaagaaagccccggctaactacgtgccagcagccgcggtaatacgtagggggcaagcgttgtccggaattattgggcgtaaagcgcgcgcaggcggtcatttaagtctggtgtttaatcccggggctcaaccccggatcgcactggaaactgggtgacttgagtgcagaagaggagagtggaattccacgtgtagcggtgaaatgcgtagatatgtggaggaacaccagtggcgaaggcgactctctgggctgtaactgacgctgaggcgcgaaagcgtggggagcaaacaggattagataccctggtagtccacgccgtaaacgatgagtgctaggtgttaggggtttcgatacccttggtgccgaagttaacacattaagcactccgcctggggagtacggtcgcaagactgaaactcaaaggaattgacggggacccgcacaagcagtggagtatgtggtttaattcgaagcaacgcgaagaaccttaccaggtcttgacatccctctgatcgatgcagagatgtatctttccttcgggacagaggagacaggtggtgcatggttgtcgtcagctcgtgtcgtgagatgttgggttaagtcccgcaacgagcgcaacccttatatttagttgccagcatttcggatgggcactctagatagactgccggtgacaaaccggaggaaggtggggatgacgtcaaatcatcatgccccttatgacctgggctacacacgtactacaatggccggtacaacgggctgcgaaatcgcgagatggagccaatcccaacaaagccggtctcagttcggattgcaggctgcaactcgcctgcatgaagtcggaattgctagtaatcgcggatcagcatgccgcggtgaatacgttcccgggtcttgtacacaccgcccgtcacaccacgagagtttataacacccgaagtcggtggggtaaccgcaaggagccagccgccgaaggtgggatagatgattggggtg

SEQ ID NO: 2381 - DNA, 1477 bp, unidentified
  source 1..1477: mol_type = unassigned DNA; note = Paenibacillus yonginensis
gacgaacgctggcggcgtgcctaatacatgcaagtcgagcggagtggatcgggagcttgctcctgatccacttagcggcggacgggtgagtaacacgtaggcaacctgcctgcaagactgggataactaccggaaacggtagctaataccggatacgcaagagagtcgcatgactttcttgggaaagacggagcaatctgtcgcttgtggatgggcctgcggcgcattagctagttggtgaggtaacggctcaccaaggcgacgatgcgtagccgacctgagagggtgaacggccacactgggactgagacacggcccagactcctacgggaggcagcagtagggaatcttccgcaatggacgaaagtctgacggagcaacgccgcgtgagtgatgaaggttttcggatcgtaaagctctgttgccagggaagaacgtcgggtagagtaactgctatccgagtgacggtacctgagaagaaagccccggctaactacgtgccagcagccgcggtaatacgtagggggcaagcgttgtccggaattattgggcgtaaagcgcgcgcaggcggtcatttaagtctggtgtttaatcccggggctcaactccgggtcgcactggaaactgggtgacttgagtgcagaagaggaaagtggaattccacgtgtagcggtgaaatgcgtagagatgtggaggaacaccagtggcgaaggcgactttctgggctgtaactgacgctgaggcgcgaaagcgtggggagcaaacaggattagataccctggtagtccacgccgtaaacgatgaatgctaggtgttaggggtttcgatacccttggtgccgaagttaacacattaagcattccgcctggggagtacggtcgcaagactgaaactcaaaggaattgacggggacccgcacaagcagtggagtatgtggtttaattcgaagcaacgcgaagaaccttaccaggtcttgacatccccctgaccggtctagagataggcctttccttcgggacaggggagacaggtggtgcatggttgtcgtcagctcgtgtcgtgagatgttgggttaagtcccgcaacgagcgcaacccttgactttagttgccagcaggtaaagctgggcactctagagtgactgccggtgacaaaccggaggaaggtggggatgacgtcaaatcatcatgccccttatgacctgggctacacacgtactacaatggccggtacaacgggaagcgaaggagcgatctggagcgaatctttagaagccggtctcagttcggattgcaggctgcaactcgcctgcatgaagtcggaattgctagtaatcgcggatcagcatgccgcggtgaatacgttcccgggtcttgtacacaccgcccgtcacaccacgagagtttacaacacccgaagtcggtggggtaacccgcaagggagccagccgccgaaggtggggtagacgattggggtg

SEQ ID NO: 2382 - DNA, 1446 bp, unidentified
  source 1..1446: mol_type = unassigned DNA; note = Paenisporosarcina antarctica
tacatgcaagtcgagcggagagaagaagcttgcttcttctcttagcggcggacgggtgagtaacacgtgggcaacctaccttgtagattgggataactccgggaaaccggggctaataccaaataatccattttgcttcatggcgaaatgttgaaaggcggcttcggctgtcactacaagatgggcccgcggcgtattagctagttggtagggtaatggcctaccaaggcgacgatacgtagccgacctgagagggtgatcggccacactgggactgagacacggcccagactcctacgggaggcagcagtagggaatcttccacaatggacgaaagtctgatggagcaacgccgcgtgagtgaagaaggttttcggatcgtaaaactctgttgtaagggaagaacacgtacgagagtaactgctcgtaccttgacggtaccttattagaaagccacggctaactacgtgccagcagccgcggtaatacgtaggtggcaagcgttgtccggaattattgggcgtaaagcgcgcgcaggcggtcctttaagtccgatgtgaaagcccacggctcaaccgtggagggtcattggaaactgggggacttgagtacagaagaggaaagcggaattccacgtgtagcggtgaaatgcgtagagatgtggaggaacaccagtggcgaaggcggctttctggtctgtaactgacgctgaggcgcgaaagcgtggggagcaaacaggattagataccctggtagtccacgccgtaaacgatgagtgctaagtgttagggggtttccgccccttagtgctgcagctaacgcattaagcactccgcctggggagtacggccgcaaggctgaaactcaaaggaattgacgggggcccgcacaagcggtggagcatgtggtttaattcgaagcaacgcgaagaaccttaccaggtcttgacatcccactgaccggtttagagataagcctttcccttcggggacagtggtgacaggtggtgcatggttgtcgtcagctcgtgtcgtgagatgttgggttaagtcccgcaacgagcgcaacccttgatcttagttgccagcattcagttgggcactctaaggtgactgccggtgataaaccggaggaaggtggggatgacgtcaaatcatcatgccccttatgacctgggctacacacgtgctacaatggacgatacaaagggctgcaaacccgcgagggggagccaatcccataaaatcgttctcagttcggattgtaggctgcaactcgcctacatgaagccggaatcgctagtaatcgcggatcagcatgccgcggtgaatacgttcccgggccttgtacacaccgcccgtcacaccacgagagtttgtaacacccgaagtcggtgaggtaacccttgtggagccagccgccgaaggtgggacagatgattggggt

SEQ ID NO: 2383 - DNA, 1450 bp, Paludibacter propionicigenes
  source 1..1450: mol_type = unassigned DNA
gatgaacgctagcgacaggcctaacacatgcaagtcgaggggcagcataaaggtagcaatactttggtggcgaccggcgcacgggtgagtaacacgtatgcaacctacctgtaagaggggaataacccggagaaattcggactaataccgcataataccactgaactgcatggtttagtggttaaacatttatggcttacagatgggcatgcgtatgattagctagttggtgaggtaacggctcaccaaggcaacgatcattaggggttctgagaggaaggtcccccacactggtactgagacacggaccagactcctacgggaggcagcagtgaggaatattggtcaatgggcgagagcctgaaccagccaagtcgcgtgaaggaagaaggttctatggattgtaaacttcttttgtaagggaataaaaaagagtacgtgtactctattgtatgtactttacgaataaggatcggctaactccgtgccagcagccgcggtaatacggaggatccgagcgttatccggatttattgggtttaaagggtgcgtaggcggacccttaagtcagtggtgaaagtttgcggctcaaccgtaaaattgccattgaaactgagggtcttgagtgtaaatgaggtaggcggaatgtgttgtgtagcggtgaaatgcttagatataacacagaacaccaattgcgaaggcagcttactgggatacaactgacgctgaggcacgaaagcgtggggatcaaacaggattagataccctggtagtccacgcagtaaacgatgaatactagctgtatgcgatatactgtatgtggcaaagcgaaagcgttaagtattccacctggggagtacgttcgcaagaatgaaactcaaaggaattgacgggggcccgcacaagcggaggaacatgtggtttaattcgatgatacgcgaggaaccttacccgggcttgaaatgcatctgaccgacttggaaacaggtcttctagcaatagcagatgtgtaggtgctgcatggttgtcgtcagctcgtgccgtgaggtgtcggcttaagtgccataacgagcgcaacccctattgatagttactaacaggttaagctgaggactctattgagactgccaccgtaaggtgtgaggaaggtggggatgacgtcaaatcagcacggcccttacgtccggggcgacacacgtgttacaatggggggtacagagggttgctacttggtgacaagatgctaatctcttaaagcctctctcagttcggatcggagtctgcaactcgactccgtgaagctggattcgctagtaatcgcgcatcagccatggcgcggtgaatacgttcccgggccttgtacacaccgcccgtcaagccatggaagctggggggacctgaagtacgtaaccgcaaggagcgtcctagggtaaaactagtaactggggct

SEQ ID NO: 2384 - DNA, 1362 bp, unidentified
  source 1..1362: mol_type = unassigned DNA; note = Paludifilum halophilum
gacgaacgctggcggcgtgcctaatacatgcaagtcgagcggaccgaaggggagcttgctccctggaggtcagcggcggacgggtgagtaacacgtgggcaacctgcccgcaagtccgggataaccccgggaaaccggagctaataccggatattcccattgtctcacctggggcgatggggaaaggcggcttaggctgtcacttgcggatgggcccgcggcgcattagctggttggtggggtaacggcctaccaaggcgacgatgcgtagccgacctgagagggtgaccggccacactgggactgagacacggcccagactcctacgggaggcagcagtagggaattttccgcaatgggcgaaagcctgacggagcaacgccgcgtgagtgaggacggctttcgggttgtaaagctctgttctccgggaagaacggcgggaggttgaagaagccttttgcatgacggtaccggagaagaaagccccggctaactacgtgccagcagccgcggtaatacgtagggggcgagcgttgtccgggaattattgggcgtaaagcgcgcgcaggcggcctgttaagtctggtgtgaaagaccgcggctcaaccgtgggggtgcatcagaaactggcaggcttgagtgcaggagaggggagcggaattcccggtgtagcggtggaatgcgtagagatcgggaggaacaccagtggcgaaggcggctctctggcctgtaactgacgctgaggcgcgaaagcgtggggagcgaacaggattagataccctggtagtccacgccgtaaacgatgagtgctaggtgttgggggtttcacgccctctgtgccgaaggtaacccaataagcactccgcctggggagtacggccgcaaggctgaaactcaaaggaattgacgggggcccgcacaagcggtggagcatgtggtttaattcgaagcaacgcgaagaaccttaccagggcttgacatcccgctgaccggtgtagagatacaccttcccttcggggcagcggagacaggtggtgcatggttgtcgtcagctcgtgtcgtgagatgttgggttcagtcccgcaacgagcgcaacccttatctttagttgccagcacgtcaaggtgggcactctagagagacagccggtgaaagccggaggaaggtggggatgacgtcaaatcatcatgccccttatgccctgggcgacacacgtgctacaatggctggtacaacgggaagcgaagccgtgaggtgaagccaatccccaaaaaccagtctcagttcggatcgcaggctgcaacccgcctgcgtgaagctggaatcgctagtaatcgcggatcagcatgccgcggtgaatcc

SEQ ID NO: 2385 - DNA, 1443 bp, unidentified
  source 1..1443: mol_type = unassigned DNA; note = Paludisphaera borealis
aatgaacgttggcggcgtggattaggcatgcaagtcgaacgggtccggcttcggccgggccagtggcggaagggtgagtaaggcgacggcaaccaaccccgaggttgggtatagccgcgggaaactgcgggtaatccccagcgacgtgacgacgccggcatcggcgtttcaccaaaggcttcggccgccttgggacgggccgtcgtggtattaggtagttggcggggttacggcccaccaagccgatgatgcctaccgggcgtgcgagcgtggcccggcacactgggactgagacactgcccagactcttacgggaggctgcagtcgagaatcttcggcaatgggcgcaagcctgaccgagcgacgccgcgtggaggatgaaggccttcgggttgtaaactcctgtcgagggggaggaaggggcaaccttgaccgatccctggaggaagcacgggctaagttcgtgccagcagccgcggtaagacgaaccgtgcgaacgttattcggaatcactgggcttaaagcgcgtgtaggcggatgggtgcgtcggcttctgaaagcccccggctcaaccggggaagtggggccgaaacgacccgtctggagggacgtagggggatctggaacttccggtggagcggtgaaatgcgttgagatcggaaggaacgcccgtggcgaaagcgagatcctggacgttttctgacgctgagacgcgaaagctaggggagcaaacgggattagataccccggtagtcctagccgtaaacgatgagcactaggtagggggctcgccgatgggctctctgccgtagggaaaccgtgaagtgctccgcctggggagtatggtcgcaaggctgaaactcaaaggaattgacgggggctcacacaagcggtggagcatgtggcttaattcgaggctacgcgaaaaaccttatcctgggcttgacatgcagggattagccggcggaaacgtcggtgacgccgcaaggtggaacctgtgcaggtgctgcatggctgtcgtcagctcgtgccgtgaggtgttgggttaagtcccctaacgagcgcaacccctgtgactagttgccagcacgtaaaggtggggactctagtcagaccgccggcgtcaagccggaggaaggcggggacgacgtcaagtcatcatggcccttatgcccagggctgcacacgtgctacaatggggcggacaaagcgtcgccaggccgcaaggccgcgctaatcgcaaaaaccgctcctcagttcggattgcgggctgcaactcgcccgcatgaagctggaatcgctagtaatcgcggatcagcattgccgcggtgaatgtgttcctgagccttgtacacaccgcccgtcaagccaccaaagcggggggcatccgaagtcgtcggagccgaaaggcaggcgccgaagatgaaacccgtgatggggact

SEQ ID NO: 2386 - DNA, 1450 bp, Panacagrimonas perspica
  source 1..1450: mol_type = unassigned DNA
attgaacgctggcggcatgcctaacacatgcaagtcgaacgggttgtagcaatacaactagtggcggacgggtgaggaatacataggaatttgcctttaggtgggggatagtccggggaaactcggtttaataccgcatgatgtcgcaagaccaaagcaggggatcgcaagaccttgcgcctttagagaagcctatgtcggattagctagttggtagggtaatggcctaccaaggcgacgatccgtaactggtctgagaggacgatcagtcacaccggaactgagacacggtccggactcctacgggaggcagcagtggggaatattggacaatgggcgaaagcctgatccagcaatgccgcgtgtgtgaagaaggccttcgggttgtaaagcactttaggctgggaagaaaaagcttcacctaatacgtggagccttgacggtaccagcggaataagcaccggctaactctgtgccagcagccgcggtaatacagagggtgctagcgttaatcggatttactgggcgtaaagcgtgtgtaggcggttcgttaagtcggatgtgaaagccctgggctcaacctaggaattgcattcgatactggcgggctagagtacggtagagggcggcggaattccgggtgtagcggtgaaatgcgtagatatccggaggaacaccgatggcgaaggcaaccgcctgggcctgtactgacgctgagacacgaaagcgtggggagcaaacaggattagataccctggtagtccacgccgtaaacgatgagaacttgacgtcggtttgctctgcgaatcggtgtcgtagctaacgcgctaagttctccgcctggggagtacggccgcaaggttgaaactcaaaggaattgacgggggcccgcacaagcggtggagtatgtggtttaattcgatgcaacgcgaagaaccttacctggtcttgacatgtcagaaaccctgcagagatgcgggggtgccttcgggaatctgaacacaggtgctgcatggctgtcgtcagctcgtgtcgtgagatgttgggttaagtcccgcaacgagcgcaacccttgcccttagttgccatcattcagttgggcactctaaggggaccgccggtgacaaaccggaggaaggtggggatgacgtcaagtcatcatggcccttatgaccagggctacacacgtactacaatggtcggtacagagggttgccaacccgcgagggggagctaatcccaaaaagccgatcgtagtccggattggagtctgcaactcgactccatgaagtcggaatcgctagtaatcgcggatcagcacttgtcgcggtgaatacgttcccgggccttgtacacaccgcccgtcacaccatggaagtctgctgcaccagaagtaggtagtctaaccgcaaggggggcgcctaccacggtgtggccgatgactggggtg

SEQ ID NO: 2387 - DNA, 1455 bp, Pandoraea apista
  source 1..1455: mol_type = unassigned DNA
attgaacgctggcggcatgccttacacatgcaagtcgaacggcagcacgggtgcttgcacctggtggcgagtggcgaacgggtgagtaatacatcggaatgtaccttgtagtgggggatagctcggcgaaagccggattaataccgcatacgctctgaggaggaaagcgggggaccttcgggcctcgcgctacaagagcagccgatgtcagattagctagttggtgaggtaaaagctcaccaaggcgacgatctgtagctggtctgagaggacgaccagccacactgggactgagacacggcccagactcctacgggaggcagcagtggggaattttggacaatgggcgcaagcctgatccagcaatgccgcgtgtgtgaagaaggccttcgggttgtaaagcacttttgtccggaaagaaatcctctgggttaatacctcggggggatgacggtaccggaagaataagcaccggctaactacgtgccagcagccgcggtaatacgtagggtgcaagcgttaatcggaattactgggcgtaaagcgtgcgcaggcggttttgtaagacggatgtgaaatccccgggcttaacctgggaactgcattcgtgactgcaaggctagagtatggcagaggggggtagaattccacgtgtagcagtgaaatgcgtagagatgtggaggaataccgatggcgaaggcagccccctgggccaatactgacgctcatgcacgaaagcgtggggagcaaacaggattagataccctggtagtccacgccctaaacgatgtcaactagttgttggggattcatttccttagtaacgaagctaacgcgtgaagttgaccgcctggggagtacggtcgcaagattaaaactcaaaggaattgacggggacccgcacaagcggtggatgatgtggattaattcgatgcaacgcgaaaaaccttacctacccttgacatgtacggaatcctgctgagaggtgggagtgctcgaaagagaaccgtaacacaggtgctgcatggctgtcgtcagctcgtgtcgtgagatgttgggttaagtcccgcaacgagcgcaacccttgtccttagttgctacgcaagagcactctaaggagactgccggtgacaaaccggaggaaggtggggatgacgtcaagtcctcatggcccttatgggtagggcttcacacgtcatacaatggtcggtacagagggtcgccaagccgcgaggtggagctaaccccagaaaaccgatcgtagtccggatcgcagtctgcaactcgactgcgtgaagctggaatcgctagtaatcgcggatcagcatgtcgcggtgaatacgttcccgggtcttgtacacaccgcccgtcacaccatgggagtgggttttgccagaagtaggtagcctaaccgtaaggagggcgcttaccacggcaggattcatgactggggtg

SEQ ID NO: 2388 - DNA, 1455 bp, Pandoraea faecigallinarum
  source 1..1455: mol_type = unassigned DNA
attgaacgctggcggcatgccttacacatgcaagtcgaacggcagcacgggtgcttgcacctggtggcgagtggcgaacgggtgagtaacatatcggaacgtaccttgtagtgggggatagctcggcgaaagccggattaataccgcatacgctctgaggaggaaagcgggggacctttgggcctcgcgctacaagagcggccgatatcagattagctagttggtgaggtaaaagctcaccaaggcgacgatctgtagctggtctgagaggacgaccagccacactgggactgagacacggcccagactcctacgggaggcagcagtggggaattttggacaatgggcgcaagcctgatccagcaatgccgcgtgtgtgaagaaggccttcgggttgtaaagcacttttgtccggaaagaaatcctctgggttaatacctcggggggatgacggtaccggaagaataagcaccggctaactacgtgccagcagccgcggtaatacgtagggtgcgagcgttaatcggaattactgggcgtaaagcgtgcgcaggcggttttgtaagacggatgtgaaatccccgggctcaacctgggaactgcattcgtgactgcaaggctagagtatggcagaggggggtagaattccacgtgtagcagtgaaatgcgtagagatgtggaggaataccgatggcgaaggcagccccctgggccaatactgacgctcatgcacgaaagcgtggggagcaaacaggattagataccctggtagtccacgccctaaacgatgtcaactagttgttggggattcatttccttagtaacgtagctaacgcgtgaagttgaccgcctggggagtacggtcgcaagattaaaactcaaaggaattgacggggacccgcacaagcggtggatgatgtggattaattcgatgcaacgcgaaaaaccttacctacccttgacatgtacggaatcctgctgagaggcgggagtgctcgaaagagagccgtaacacaggtgctgcatggctgtcgtcagctcgtgtcgtgagatgttgggttaagtcccgcaacgagcgcaacccttgtccttagttgctacgcaagagcactctaaggagactgccggtgacaaaccggaggaaggtggggatgacgtcaagtcctcatggcccttatgggtagggcttcacacgtcatacaatggtcggtacagagggctgccaaaccgcgaggtggagctaaccccagaaaaccgatcgtagtccggatcgcagtctgcaactcgactgcgtgaagctggaatcgctagtaatcgcggatcagcatgtcgcggtgaatacgttcccgggtcttgtacacaccgcccgtcacaccatgggagtgggttttgccagaagtaggtagcctaaccgcaaggagggcgcttaccacggcaggattcatgactggggtg

SEQ ID NO: 2389 - DNA, 1455 bp, Pandoraea norimbergensis
  source 1..1455: mol_type = unassigned DNA
attgaacgctggcggcatgccttacacatgcaagtcgaacggcagcacgggtgcttgcacctggtggcgagtggcgaacgggtgagtaatacatcggaatgtaccttgtagtgggggatagctcggcgaaagccggattaataccgcatacgctctgaggaggaaagcgggggaccttcgggcctcgtgctacaagagcagccgatgtcagattagcttgttggtgaggtaaaagctcaccaaggcgacgatctgtagctggtctgagaggacgaccagccacactgggactgagacacggcccagactcctacgggaggcagcagtggggaattttggacaatgggcgaaagcctgatccagcaatgccgcgtgtgtgaagaaggccttcgggttgtaaagcacttttgtccggaaagaaatcctttgggttaatacctcggggggatgacggtaccggaagaataagcaccggctaactacgtgccagcagccgcggtaatacgtagggtgcaagcgttaatcggaattactgggcgtaaagcgtgcgcaggcggttttgtaagacggatgtgaaatccccgggcttaacctgggaactgcattcgtgactgcaaggctagagtatggcagaggggggtagaattccacgtgtagcagtgaaatgcgtagagatgtggaggaataccgatggcgaaggcagccccctgggccaatactgacgctcatgcacgaaagcgtggggagcaaacaggattagataccctggtagtccacgccctaaacgatgtcaactagttgttggggattcatttccttagtaacgaagctaacgcgtgaagttgaccgcctggggagtacggtcgcaagattaaaactcaaaggaattgacggggacccgcacaagcggtggatgatgtggattaattcgatgcaacgcgaaaaaccttacctacccttgacatgtacggaatcttgctgaaaggtgagagtgctcgaaagagagccgtaacacaggtgctgcatggctgtcgtcagctcgtgtcgtgagatgttgggttaagtcccgcaacgagcgcaacccttgtccttagttgctacgcaagagcactctaaggagactgccggtgacaaaccggaggaaggtggggatgacgtcaagtcctcatggcccttatgggtagggcttcacacgtcatacaatggtcggtacagagggctgccaaatcgcgagatggagctaaccccagaaaaccgatcgtagtccggatcgcagtctgcaactcgactgcgtgaagttggaatcgctagtaatcgcggatcagcatgtcgcggtgaatacgttcccgggtcttgtacacaccgcccgtcacaccatgggagtgggttttgccagaagtaggtagcctaaccgtaaggagggcgcttaccacggcaggattcatgactggggtg

SEQ ID NO: 2390 - DNA, 1455 bp, Pandoraea oxalativorans
  source 1..1455: mol_type = unassigned DNA
attgaacgctggcggcatgccttacacatgcaagtcgaacggcagcacgggtgcttgcacctggtggcgagtggcgaacgggtgagtaatatatcggaacgtaccttgtagtgggggatagctcggcgaaagccggattaataccgcatacgctctgaggaggaaagcgggggaccttcgggcctcgcgctacaagagcggccgatatcagattagctagttggtggggtaaaagcttaccaaggcgacgatctgtagctggtctgagaggacgaccagccacactgggactgagacacggcccagactcctacgggaggcagcagtggggaattttggacaatgggcgaaagcctgatccagcaatgccgcgtgtgtgaagaaggccttcgggttgtaaagcacttttgtccggaaagaaatcctctgggttaatacctcggggggatgacggtaccggaagaataagcaccggctaactacgtgccagcagccgcggtaatacgtagggtgcaagcgttaatcggaattactgggcgtaaagcgtgcgcaggcggttttgtaagacggatgtgaaatccccgggcttaacctgggaactgcattcgtgactgcaaggctagagtatggcagaggggggtagaattccacgtgtagcagtgaaatgcgtagagatgtggaggaataccgatggcgaaggcagccccctgggccaatactgacgctcatgcacgaaagcgtggggagcaaacaggattagataccctggtagtccacgccctaaacgatgtcaactagttgttggggattcatttccttagtaacgaagctaacgcgtgaagttgaccgcctggggagtacggtcgcaagattaaaactcaaaggaattgacggggacccgcacaagcggtggatgatgtggattaattcgatgcaacgcgaaaaaccttacctacccttgacatgtacggaagtctgctgagaggcggatgtgctcgaaagagaaccgtaacacaggtgctgcatggctgtcgtcagctcgtgtcgtgagatgttgggttaagtcccgcaacgagcgcaacccttgtccttagttgctacgcaagagcactctaaggagactgccggtgacaaaccggaggaaggtggggatgacgtcaagtcctcatggcccttatgggtagggcttcacacgtcatacaatggtcggtacagagggctgccaaaccgcgaggtggagctaaccccagaaaaccgatcgtagtccggatcgcagtctgcaactcgactgcgtgaagctggaatcgctagtaatcgcggatcagcatgtcgcggtgaatacgttcccgggtcttgtacacaccgcccgtcacaccatgggagtgggttttgccagaagtaggtagcctaaccgtaaggagggcgcttaccacggcaggattcatgactggggtg

SEQ ID NO: 2391 - DNA, 1455 bp, Pandoraea pnomenusa
  source 1..1455: mol_type = unassigned DNA
attgaacgctggcggcatgccttacacatgcaagtcgaacggcagcacgggtgcttgcacctggtggcgagtggcgaacgggtgagtaatacatcggaacgtaccttgtagtgggggatagctcggcgaaagccggattaataccgcatacgctctgaggaggaaagcgggggaccttcgggcctcgcgctacaagagcggccgatgtcagattagctagttggtggggtaaaagctcaccaaggcgacgatctgtagctggtctgagaggacgaccagccacactgggactgagacacggcccagactcctacgggaggcagcagtggggaattttggacaatgggcgaaagcctgatccagcaatgccgcgtgtgtgaagaaggccttcgggttgtaaagcacttttgtccggaaagaaatcctctgggttaatacctcggggggatgacggtaccggaagaataagcaccggctaactacgtgccagcagccgcggtaatacgtagggtgcaagcgttaatcggaattactgggcgtaaagcgtgcgcaggcggttttgtaagacggatgtgaaatccccgggcttaacctgggaactgcattcgtgactgcaaggctagagtatggcagaggggggtagaattccacgtgtagcagtgaaatgcgtagagatgtggaggaataccgatggcgaaggcagccccctgggccaatactgacgctcatgcacgaaagcgtggggagcaaacaggattagataccctggtagtccacgccctaaacgatgtcaactagttgttggggattcatttccttagtaacgtagctaacgcgtgaagttgaccgcctggggagtacggtcgcaagattaaaactcaaaggaattgacggggacccgcacaagcggtggatgatgtggattaattcgatgcaacgcgaaaaaccttacctacccttgacatgtacggaatcctgctgagaggtgggagtgctcgaaagagaaccgtaacacaggtgctgcatggctgtcgtcagctcgtgtcgtgagatgttgggttaagtcccgcaacgagcgcaacccttgtccttagttgctacgcaagagcactctaaggagactgccggtgacaaaccggaggaaggtggggatgacgtcaagtcctcatggcccttatgggtagggcttcacacgtcatacaatggtcggtacagagggctgccaaaccgcgaggtggagctaaccccagaaaaccgatcgtagtccggatcgcagtctgcaactcgactgcgtgaagctggaatcgctagtaatcgcggatcagcatgtcgcggtgaatacgttcccgggtcttgtacacaccgcccgtcacaccatgggagtgggttttgccagaagtaggtagcctaaccgtaaggagggcgcttaccacggcaggattcatgactggggtg

SEQ ID NO: 2392 - DNA, 1455 bp, Pandoraea pulmonicola
  source 1..1455: mol_type = unassigned DNA
attgaacgctggcggcatgccttacacatgcaagtcgaacggcagcacgggtgcttgcacctggtggcgagtggcgaacgggtgagtaatacatcggaacgtaccttgtagtgggggatagctcggcgaaagccggattaataccgcatacgctctgaggaggaaagcgggggaccttcgggcctcgcgctacaagagcggccgatgtcagattagctagttggtggggtaaaagcctaccaaggcgacgatctgtagctggtctgagaggacgaccagccacactgggactgagacacggcccagactcctacgggaggcagcagtggggaattttggacaatgggcgcaagcctgatccagcaatgccgcgtgtgtgaagaaggccttcgggttgtaaagcacttttgtccggaaagaaaacctctgggttaatacctcggggggatgacggtaccggaagaataagcaccggctaactacgtgccagcagccgcggtaatacgtagggtgcgagcgttaatcggaattactgggcgtaaagcgtgcgcaggcggttttgtaagacggatgtgaaatccccgggcttaacctgggaactgcattcgtgactgcaaggctagagtatggcagaggggggtagaattccacgtgtagcagtgaaatgcgtagagatgtggaggaataccgatggcgaaggcagccccctgggccaatactgacgctcatgcacgaaagcgtggggagcaaacaggattagataccctggtagtccacgccctaaacgatgtcaactagttgttggggattcatttccttagtaacgtagctaacgcgtgaagttgaccgcctggggagtacggtcgcaagattaaaactcaaaggaattgacggggacccgcacaagcggtggatgatgtggattaattcgatgcaacgcgaaaaaccttacctacccttgacatgtacggaatcctgctgagaggtgggagtgctcgaaagagagccgtaacacaggtgctgcatggctgtcgtcagctcgtgtcgtgagatgttgggttaagtcccgcaacgagcgcaacccttgtccttagttgctacgcaagagcactctaaggagactgccggtgacaaaccggaggaaggtggggatgacgtcaagtcctcatggcccttatgggtagggcttcacacgtcatacaatggtcggtacagagggctgccaaaccgcgaggtggagctaaccccagaaaaccgatcgtagtccggatcgcagtctgcaactcgactgcgtgaagctggaatcgctagtaatcgcggatcagcatgtcgcggtgaatacgttcccgggtcttgtacacaccgcccgtcacaccatgggagtgggttttgccagaagtaggtagcctaaccgcaaggagggcgcttaccacggcaggattcatgactggggtg

SEQ ID NO: 2393 - DNA, 1455 bp, Pandoraea sputorum
  source 1..1455: mol_type = unassigned DNA
attgaacgctggcggcatgccttacacatgcaagtcgaacggcagcacgggtgcttgcacctggtggcgagtggcgaacgggtgagtaatatatcggaacgtaccttgtagtgggggatagctcggcgaaagccggattaataccgcatacgctctgaggaggaaagcgggggaccttcgggcctcgcgctacaagagcggccgatatcagattagctagttggtggggtaaaagcttaccaaggcgacgatctgtagctggtctgagaggacgaccagccacactgggactgagacacggcccagactcctacgggaggcagcagtggggaattttggacaatgggcgaaagcctgatccagcaatgccgcgtgtgtgaagaaggccttcgggttgtaaagcacttttgtccggaaagaaatcctctgggttaatacctcggggggatgacggtaccggaagaataagcaccggctaactacgtgccagcagccgcggtaatacgtagggtgcgagcgttaatcggaattactgggcgtaaagcgtgcgcaggcggttttgtaagacggatgtgaaatccccgggctcaacctgggaactgcattcgtgactgcaaggctagagtatggcagaggggggtagaattccacgtgtagcagtgaaatgcgtagagatgtggaggaataccgatggcgaaggcagccccctgggccaatactgacgctcatgcacgaaagcgtggggagcaaacaggattagataccctggtagtccacgccctaaacgatgtcaactagttgttggggattcatttccttagtaacgtagctaacgcgtgaagttgaccgcctggggagtacggtcgcaagattaaaactcaaaggaattgacggggacccgcacaagcggtggatgatgtggattaattcgatgcaacgcgaaaaaccttacctacccttgacatgtacggaagtctgctgagaggcggatgtgctcgaaagagaaccgtaacacaggtgctgcatggctgtcgtcagctcgtgtcgtgagatgttgggttaagtcccgcaacgagcgcaacccttgtccttagttgctacgcaagagcactctaaggagactgccggtgacaaaccggaggaaggtggggatgacgtcaagtcctcatggcccttatgggtagggcttcacacgtcatacaatggtcggtacagagggctgccaaaccgcgaggtggagctaaccccagaaaaccgatcgtagtccggatcgcagtctgcaactcgactgcgtgaagctggaatcgctagtaatcgcggatcagcatgtcgcggtgaatacgttcccgggtcttgtacacaccgcccgtcacaccatgggagtgggttttgccagaagtaggtagcctaaccgtaaggagggcgcttaccacggcaggattcatgactggggtg

SEQ ID NO: 2394 - DNA, 1455 bp, unidentified
  source 1..1455: mol_type = unassigned DNA; note = Pandoraea terrae
attgaacgctggcggcatgccttacacatgcaagtcgaacggcagcacgggtgcttgcacctggtggcgagtggcgaacgggtgagtaatatatcggaacgtgccttgtagtgggggatagctcggcgaaagccggattaataccgcatacgatctacggatgaaagcgggggaccttcgggcctcgtgctataagagcggccgatatcagattagctagttggtgaggtaaaggctcaccaaggcgacgatctgtagctggtctgagaggacgaccagccacactgggactgagacacggcccagactcctacgggaggcagcagtggggaattttggacaatgggcgaaagcctgatccagcaatgccgcgtgtgtgaagaaggccttcgggttgtaaagcacttttgttcgggaagaaatcccttgggctaatacctcggggggatgacggtaccggaagaataagcaccggctaactacgtgccagcagccgcggtaatacgtagggtgcaagcgttaatcggaattactgggcgtaaagcgtgcgcaggcggttttgtaagacggatgtgaaatccccgggcttaacctgggaactgcattcgtgactgcaaggctagagtatggcagaggggggtagaattccacgtgtagcagtgaaatgcgtagagatgtggaggaataccgatggcgaaggcagccccctgggccaatactgacgctcatgcacgaaagcgtggggagcaaacaggattagataccctggtagtccacgccctaaacgatgtcaactagttgttggggattcatttccttagtaacgaagctaacgcgtgaagttgaccgcctggggagtacggtcgcaagattaaaactcaaaggaattgacggggacccgcacaagcggtggatgatgtggattaattcgatgcaacgcgaaaaaccttacctacccttgacatgtacggaatcctgctgagaggtgggagtgctcgaaagagaaccgtaacacaggtgctgcatggctgtcgtcagctcgtgtcgtgagatgttgggttaagtcccgcaacgagcgcaacccttgtccttagttgctacgcaagagcactctagggagactgccggtgacaaaccggaggaaggtggggatgacgtcaagtcctcatggcccttatgggtagggcttcacacgtcatacaatggtcggtacagagggctgccaaaccgcgaggtggagctaaccccagaaaaccgatcgtagtccggatcgcagtctgcaactcgactgcgtgaagctggaatcgctagtaatcgcggatcagcatgtcgcggtgaatacgttcccgggtcttgtacacaccgcccgtcacaccatgggagtgggttttgccagaagtaggtagcctaaccgcaaggagggcgcttaccacggcaggattcatgactggggtg

SEQ ID NO: 2395 - DNA, 1457 bp, Pandoraea thiooxydans
  source 1..1457: mol_type = unassigned DNA
attgaacgctggcggcatgccttacacatgcaagtcgaacggcagcgcggagagcttgctctctggcggcgagtggcgaacgggtgagtaatacatcggaacgtgccctgtagtgggggatagctcggcgaaagccggattaataccgcataagctctacggaggaaagcgggggaccgcaaggcctcgtgctataggagcggccgatggcagattagctagttggtgaggtaaaggctcaccaaggcgacgatctgtagctggtctgagaggacgaccagccacactgggactgagacacggcccagactcctacgggaggcagcagtggggaattttggacaatgggcgaaagcctgatccagcaatgccgcgtgtgtgaagaaggccttcgggttgtaaagcacttttgttcgggaagaaagtattcgtgctaataccatggatagatgacggtaccggaagaataagcaccggctaactacgtgccagcagccgcggtaatacgtagggtgcgagcgttaatcggaattactgggcgtaaagcgtgcgcaggcggttttgtaagacagatgtgaaatccccgggcttaacctgggaactgcatttgtgactgcaaggctagagtatggcagaggggggtagaattccacgtgtagcagtgaaatgcgtagagatgtggaggaataccgatggcgaaggcagccccctgggccaatactgacgctcatgcacgaaagcgtggggagcaaacaggattagataccctggtagtccacgccctaaacgatgtcaactagttgttggggattcatttccttagtaacgtagctaacgcgtgaagttgaccgcctggggagtacggtcgcaagattaaaactcaaaggaattgacggggacccgcacaagcggtggatgatgtggattaattcgatgcaacgcgaaaaaccttacctacccttgacatgtacggaatcctgctgagaggtgggagtgctcgaaagagaaccgtaacacaggtgctgcatggctgtcgtcagctcgtgtcgtgagatgttgggttaagtcccgcaacgagcgcaacccttgtccttagttgctacgcaagggcactctaaggagactgccggtgacaaaccggaggaaggtggggatgacgtcaagtcctcatggcccttatgggtagggcttcacacgtcatacaatggtcggtacagagggctgccaaaccgcgaggtggagctaaccccagaaaaccgatcgtagtccggattgcagtctgcaactcgactgcatgaagctggaatcgctagtaatcgcggatcagcatgtcgcggtgaatacgttcccgggtcttgtacacaccgcccgtcacaccatgggagtgggttttaccagaagtaggtagcctaaccgcaaggagggcgcttaccacggtaggattcatgactggggtg

SEQ ID NO: 2396 - DNA, 1455 bp, Pandoraea vervacti
  source 1..1455: mol_type = unassigned DNA
attgaacgctggcggcatgccttacacatgcaagtcgaacggcagcacgggtgcttgcacctggtggcgagtggcgaacgggtgagtaatatatcggaacgtaccttgtagtgggggatagctcggcgaaagccggattaataccgcatacgctctgaggaggaaagcgggggaccttcgggcctcgcgctacaagagcggccgatatcagattagctagttggtgaggtaaaagctcaccaaggcgacgatctgtagctggtctgagaggacgaccagccacactgggactgagacacggcccagactcctacgggaggcagcagtggggaattttggacaatgggcgaaagcctgatccagcaatgccgcgtgtgtgaagaaggccttcgggttgtaaagcacttttgtccggaaagaaatcctttgggttaatacctcggggggatgacggtaccggaagaataagcaccggctaactacgtgccagcagccgcggtaatacgtagggtgcaagcgttaatcggaattactgggcgtaaagcgtgcgcaggcggttttgtaagacggatgtgaaatccccgggctcaacctgggaactgcattcgtgactgcaaggctagagtatggcagaggggggtagaattccacgtgtagcagtgaaatgcgtagagatgtggaggaataccgatggcgaaggcagccccctgggccaatactgacgctcatgcacgaaagcgtggggagcaaacaggattagataccctggtagtccacgccctaaacgatgtcaactagttgttggggattcatttccttagtaacgtagctaacgcgtgaagttgaccgcctggggagtacggtcgcaagattaaaactcaaaggaattgacggggacccgcacaagcggtggatgatgtggattaattcgatgcaacgcgaaaaaccttacctacccttgacatgtacggaatcctgctgagaggcgggagtgctcgaaagagaaccgtaacacaggtgctgcatggctgtcgtcagctcgtgtcgtgagatgttgggttaagtcccgcaacgagcgcaacccttgtccttagttgctacgcaagagcactctaaggagactgccggtgacaaaccggaggaaggtggggatgacgtcaagtcctcatggcccttatgggtagggcttcacacgtcatacaatggtcggtacagagggctgccaaaccgcgaggtggagctaaccccagaaaaccgatcgtagtccggatcgcagtctgcaactcgactgcgtgaagctggaatcgctagtaatcgcggatcagcatgtcgcggtgaatacgttcccgggtcttgtacacaccgcccgtcacaccatgggagtgggttttgccagaagtaggtagcctaaccgcaaggagggcgcttaccacggcaggattcatgactggggtg

SEQ ID NO: 2397 - DNA, 1405 bp, unidentified
  source 1..1405: mol_type = unassigned DNA; note = Pannonibacter indicus
aacgaacgctggcggcaggcttaacacatgcaagtcgaacgccctggtaacggggagtggcagacgggtgagtaacacgtgggaacataccctttggtgcggaacaacagctggaaacggctgctaataccgcatgcgccctacgggggaaagatttatcgccgaaggattggcccgcgtctgattagctagttggtggggtaatggctcaccaaggcgacgatcagtagctggtctgagaggatgatcagccacactgggactgagacacggcccagactcctacgggaggcagcagtggggaatattggacaatgggcgcaagcctgatccagccatgccgcgtgagtgatgaaggccctagggttgtaaagctctttcagcgaggaggataatgacgttactcgcagaagaagccccggctaacttcgtgccagcagccgcggtaatacgaagggggctagcgttgttcggaatcactgggcgtaaagcgcacgtaggcggacttttaagtcaggggtgaaatcccggggctcaacctcggaactgcctttgatactgggagtctggagtccgggagaggtgagtggaactccgagtgtagaggtgaaattcgtagatattcggaagaacaccagtggcgaaggcggctcactggcccggtactgacgctgaggtgcgaaagcgtggggagcaaacaggattagataccctggtagtccacgccgtaaacgatggaagctagccgtcagggtgcatgcatcttggtggcgcagttaacgcattaagcttcccgcctggggagtacggtcgcaagattaaaactcaaaggaattgacgggggcccgcacaagcggtggagcatgtggtttaattcgaagcaacgcgcagaaccttaccagcccttgacatttggtgctaccacgggagaccgtgggttcccttcggggacgccaggacaggtgctgcatggctgtcgtcagctcgtgtcgtgagatgttgggttaagtcccgcaacgagcgcaaccctcgcccttagttgccagcattgagttgggcactctagggggactgccggtgataagccgagaggaaggtggggatgacgtcaagtcctcatggcccttacgggctgggctacacacgtgctacaatggcggtgacagtgggcagcgaaggggcgacccggagctaatctccaaaagccgtctcagttcggattgttctctgcaactcgagagcatgaagttggaatcgctagtaatcgcgtaacagcatgacgcggtgaatacgttcccgggccttgtacacaccgcccgtcacaccatgggagttgggtttacccgaaggtggtgcgctaaccgcaaggaggcagccaaccacggtaggctcagcgactggggtg

SEQ ID NO: 2398 - DNA, 1403 bp, Pannonibacter phragmitetus
  source 1..1403: mol_type = unassigned DNA
aacgaacgctggcggcaggcttaacacatgcaagtcgaacgccccgcaaggggagtggcagacgggtgagtaacacgtgggaacataccctttggtgcggaacaacagctggaaacggctgctaataccgcatgcgccctacgggggaaagatttatcgccgaaggattggcccgcgtctgattagctagttggtgaggtaatggctcaccaaggcgacgatcagtagctggtctgagaggatgatcagccacactgggactgagacacggcccagactcctacgggaggcagcagtggggaatattggacaatgggcgcaagcctgatccagccatgccgcgtgagtgatgaaggccttagggttgtaaagctctttcagcgaggaggataatgacgttactcgcagaagaagccccggctaacttcgtgccagcagccgcggtaatacgaagggggctagcgttgttcggaatcactgggcgtaaagcgcacgtaggcggacttttaagtcaggggtgaaatcccggggctcaacctcggaactgcctttgatactggaagtctggagtccgagagaggtgagtggaactccgagtgtagaggtgaaattcgtagatattcggaagaacaccagtggcgaaggcggctcactggctcggtactgacgctgaggtgcgaaagcgtggggagcaaacaggattagataccctggtagtccacgccgtaaacgatggaagctagccgtcagggtgcatgcatcttggtggcgcagttaacgcattaagcttcccgcctggggagtacggtcgcaagattaaaactcaaaggaattgacgggggcccgcacaagcggtggagcatgtggtttaattcgaagcaacgcgcagaaccttaccagctcttgacatttggtgctaccacgggagaccgtgggttcccttcggggacgccaggacaggtgctgcatggctgtcgtcagctcgtgtcgtgagatgttgggttaagtcccgcaacgagcgcaaccctcgcccttagttgccagcattcagttgggcactctagggggactgccggtgataagccgagaggaaggtggggatgacgtcaagtcctcatggcccttacgggctgggctacacacgtgctacaatggcggtgacagtgggcagcgaaggggtgacccggagctaatctccaaaagccgtctcagttcggattgttctctgcaactcgagagcatgaagttggaatcgctagtaatcgcgtaacagcatgacgcggtgaatacgttcccgggccttgtacacaccgcccgtcacaccatgggagttgggtttacccgaaggtggtgcgctaaccgcaaggaggcagccaaccacggtaggctcagcgactggggtg

SEQ ID NO: 2399 - DNA, 1464 bp, unidentified
  source 1..1464: mol_type = unassigned DNA; note = Pantoea alhagi
attgaacgctggcggcaggcctaacacatgcaagtcgaacggtaacagggagcagcttgctgctccgctgacgagtggcggacgggtgagtaatgtctggggatctgcccgatggagggggataaccactggaaacggtggctaataccgcataacgtcgcaagaccaaagtgggggaccttcgggcctcacaccatcggatgaacccagatgggattagctagtaggtggggtaacggctcacctaggcgacgatccctagctggtctgagaggatgaccagccacactggaactgagacacggtccagactcctacgggaggcagcagtggggaatattgcacaatgggcgcaagcctgatgcagccatgccgcgtgtatgaagaaggccttcgggttgtaaagtactttcagcggggaggaagggagcgaggttaataacctggttcattgacgttacccgcagaagaagcaccggctaactccgtgccagcagccgcggtaatacggagggtgcaagcgttaatcggaattactgggcgtaaagcgcacgcaggcggtctgtcaagtcggatgtgaaatccccgggctcaacccgggaactgcattcgaaactggcaggctagagtcttgtagaggggggtagaattccaggtgtagcggtgaaatgcgtagagatctggaggaataccggtggcgaaggcggccccctggacaaagactgacgctcaggtgcgaaagcgtggggagcaaacaggattagataccctggtagtccacgccgtaaacgatgtcgacttggaggctgtgagcttgactcgtggcttccggagctaacgcgttaagtcgaccgcctggggagtacggccgcaaggttaaaactcaaatgaattgacgggggcccgcacaagcggtggagcatgtggtttaattcgatgcaacgcgaagaaccttacctggccttgacatccacggaattctgcagagatgcggaagtgccttcgggaaccgtgagacaggtgctgcatggctgtcgtcagctcgtgttgtgaaatgttgggttaagtcccgcaacgagcgcaacccttatcctttgttgccagcgattcggtcgggaactcaagggagactgccggtgataaaccggaggaaggtggggatgacgtcaagtcatcatggcccttacggccagggctacacacgtgctacaatggcgcatacaaagagaagcgacctcgcgagagcaagcggacctcataaagtgcgtcgtagtccggatcggagtctgcaactcgactccgtgaagtcggaatcgctagtaatcgtggatcagaatgccacggtgaatacgttcccgggccttgtacacaccgcccgtcacaccatgggagtgggttgcaaaagaagtaggtagcttaaccttcgggagggcgcttaccactttgtgattcatgactggggtg

SEQ ID NO: 2400 - DNA, 1462 bp, Pantoea allii
  source 1..1462: mol_type = unassigned DNA
attgaacgctggcggcaggcctaacacatgcaagtcggacggtagcacagagagcttgctctcgggtgacgagtggcggacgggtgagtaatgtctggggatctgcccgatagagggggataaccactggaaacggtggctaataccgcataacgtcgcaagaccaaagagggggaccttcgggcctctcactatcggatgaacccagatgggattagctagtaggcggggtaacggcccacctaggcgacgatccctagctggtctgagaggatgaccagccacactggaactgagacacggtccagactcctacgggaggcagcagtggggaatattgcacaatgggcgcaagcctgatgcagccatgccgcgtgtatgaagaaggccttcgggttgtaaagtactttcagcggggaggaaggcattgtggttaataaccgcagtgattgacgttacccgcagaagaagcaccggctaactccgtgccagcagccgcggtaatacggagggtgcaagcgttaatcggaattactgggcgtaaagcgcacgcaggcggtctgttaagtcagatgtgaaatccccgggcttaacctgggaactgcatttgaaactggcaggcttgagtctcgtagaggggggtagaattccaggtgtagcggtgaaatgcgtagagatctggaggaataccggtggcgaaggcggccccctggacgaagactgacgctcaggtgcgaaagcgtggggagcaaacaggattagataccctggtagtccacgccgtaaacgatgtcgacttggaggttgttcccttgaggagtggcttccggagctaacgcgttaagtcgaccgcctggggagtacggccgcaaggttaaaactcaaatgaattgacgggggcccgcacaagcggtggagcatgtggtttaattcgatgcaacgcgaagaaccttacctactcttgacatccagagaacttagcagagatgctttggtgccttcgggaactctgagacaggtgctgcatggctgtcgtcagctcgtgttgtgaaatgttgggttaagtcccgcaacgagcgcaacccttatcctttgttgccagcgattcggtcgggaactcaaaggagactgccggtgataaaccggaggaaggtggggatgacgtcaagtcatcatggcccttacgagtagggctacacacgtgctacaatggcgcatacaaagagaagcgacctcgcgagagcaagcggacctcacaaagtgcgtcgtagtccggatcggagtctgcaactcgactccgtgaagtcggaatcgctagtaatcgtggatcagaatgccacggtgaatacgttcccgggccttgtacacaccgcccgtcacaccatgggagtgggttgcaaaagaagtaggtagcttaacctccgggagggcgcttaccactttgtgattcatgactggggtg

SEQ ID NO: 2401 - DNA, 1462 bp, Pantoea ananatis
  source 1..1462: mol_type = unassigned DNA
attgaacgctggcggcaggcctaacacatgcaagtcggacggtagcacagagagcttgctctcgggtgacgagtggcggacgggtgagtaatgtctggggatctgcccgatagagggggataaccactggaaacggtggctaataccgcataacgtcgcaagaccaaagagggggaccttcgggcctctcactatcggatgaacccagatgggattagctagtaggcggggtaacggcccacctaggcgacgatccctagctggtctgagaggatgaccagccacactggaactgagacacggtccagactcctacgggaggcagcagtggggaatattgcacaatgggcgcaagcctgatgcagccatgccgcgtgtatgaagaaggccttcgggttgtaaagtactttcagcggggaggaaggcgatgtggttaataaccgcgtcgattgacgttacccgcagaagaagcaccggctaactccgtgccagcagccgcggtaatacggagggtgcaagcgttaatcggaattactgggcgtaaagcgcacgcaggcggtctgttaagtcagatgtgaaatccccgggcttaacctgggaactgcatttgaaactggcaggcttgagtctcgtagaggggggtagaattccaggtgtagcggtgaaatgcgtagagatctggaggaataccggtggcgaaggcggccccctggacgaagactgacgctcaggtgcgaaagcgtggggagcaaacaggattagataccctggtagtccacgccgtaaacgatgtcgacttggaggttgttcccttgaggagtggcttccggagctaacgcgttaagtcgaccgcctggggagtacggccgcaaggttaaaactcaaatgaattgacgggggcccgcacaagcggtggagcatgtggtttaattcgatgcaacgcgaagaaccttacctactcttgacatccagagaacttagcagagatgctttggtgccttcgggaactctgagacaggtgctgcatggctgtcgtcagctcgtgttgtgaaatgttgggttaagtcccgcaacgagcgcaacccttatcctttgttgccagcgattcggtcgggaactcaaaggagactgccggtgataaaccggaggaaggtggggatgacgtcaagtcatcatggcccttacgagtagggctacacacgtgctacaatggcgcatacaaagagaagcgacctcgcgagagcaagcggacctcataaagtgcgtcgtagtccggatcggagtctgcaactcgactccgtgaagtcggaatcgctagtaatcgtggatcagaatgccacggtgaatacgttcccgggccttgtacacaccgcccgtcacaccatgggagtgggttgcaaaagaagtaggtagcttaaccttcgggagggcgcttaccactttgtgattcatgactggggtg

SEQ ID NO: 2402 - DNA, 1402 bp, Pantoea anthophila
  source 1..1402: mol_type = unassigned DNA
cttgggtgacgagtggcggacgggtgagtaatgtctggggatctgcccgatagagggggataaccactggaaacggtggctaataccgcataacgtcgcaagaccaaagagggggaccttcgggcctctcactatcggatgaacccagatgggattagctagtaggcggggtaatggcccacctaggcgacgatccctagctggtctgagaggatgaccagccacactggaactgagacacggtccagactcctacgggaggcagcagtggggaatattgcacaatgggcgcaagcctgatgcagccatgccgcgtgtatgaagaaggccttcgggttgtaaagtactttcagcggggaggaaggcggtgaggttaataacctygccgattgacgttacccgcagaagaagcaccggctaactccgtgccagcagccgcggtaatacggagggtgcaagcgttaatcggaattactgggcgtaaagcgcacgcaggcggtctgttaagtcagatgtgaaatccccgggcttaacctgggaactgcatttgaaactggcaggcttgagtctygtagaggggggtagaattccaggtgtagcggtgaaatgcgtagagatctggaggaataccggtggcgaaggcggccccctggacgaagactgacgctcaggtgcgaaagcgtggggagcaaacaggattagataccctggtagtccacgccgtaaacgatgtcgacttggaggttgttcccttgaggagtggcttccggagctaacgcgttaagtcgaccgcctggggagtacggccgcaaggttaaaactcaaatgaattgacgggggcccgcacaagcggtggagcatgtggtttaattcgatgcaacgcgaagaaccttacctactcttgacatccagagaacttagcagagatgctttggtgccttcgggaactctgagacaggtgctgcatggctgtcgtcagctcgtgttgtgaaatgttgggttaagtcccgcaacgagcgcaacccttatcctttgttgccagcgattcggtcgggaactcaaaggagactgccggtgataaaccggaggaaggtggggatgacgtcaagtcatcatggcccttacgagtagggctacacacgtgctacaatggcgcatacaaagagaagcgacctcgcgagagcaagcggacctcacaaagtgcgtcgtagtccggatcggagtctgcaactcgactccgtgaagtcggaatcgctagtaatcgtggatcagaatgccacggtgaatacgttcccgggccttgtacacaccgcccgtcacaccatgggagtgggttgcaaaagaagtaggtagcttaaccttcgggagggcgcttaccactttgtgattcatgactggggtg

SEQ ID NO: 2403 - DNA, 1445 bp, unidentified
  source 1..1445: mol_type = unassigned DNA; note = Pantoea coffeiphila
ggcctaacacatgcaagtcgaacggtagcacagagagcttgctcttgggtgacgagtggcggacgggtgagtaatgtctgggaaactgcccgatggagggggataactactggaaacggtagctaataccgcataacgtcgcaagaccaaagtgggggaccttcgggcctcacaccatcggatgtgcccagatgggattagctagtaggtggggtaatggctcacctaggcgacgatccctagctggtctgagaggatgaccagccacactggaactgagacacggtccagactcctacgggaggcagcagtggggaatattgcacaatgggcgcaagcctgatgcagccatgccgcgtgtatgaagaaggccttcgggttgtaaagtactttcagcggggaggaaggcgataaggttaatagccttgtcgattgacgttacccgcagaagaagcaccggctaactccgtgccagcagccgcggtaatacggagggtgcaagcgttaatcggaattactgggcgtaaagcgcacgcaggcggtctgttaagtcagatgtgaaatccccgggcttaacctgggaactgcatttgaaactggcaggcttgagtctcgtagaggggggtagaattccaggtgtagcggtgaaatgcgtagagatctggaggaataccggtggcgaaggcggccccctggacgaagactgacgctcaggtgcgaaagcgtggggagcaaacaggattagataccctggtagtccacgccgtaaacgatgtcgacttggaggttgtgcccttgaggcgtggcttccggagctaacgcgttaagtcgaccgcctggggagtacggccgcaaggttaaaactcaaatgaattgacgggggcccgcacaagcggtggagcatgtggtttaattcgatgcaacgcgaagaaccttacctggccttgacatccacagaacttaccagagatgctttggtgccttcgggaactgtgagacaggtgctgcatggctgtcgtcagctcgtgttgtgaaatgttgggttaagtcccgcaacgagcgcaacccttatcctttgttgccagcgattcggtcgggaactcaaaggagactgccggtgataaaccggaggaaggtggggatgacgtcaagtcatcatggcccttacggccagggctacacacgtgctacaatggcgcatacaaagagaagcgacctcgcgagagcaagcggacctcataaagtgcgtcgtagtccggatcggagtctgcaactcgactccgtgaagtcggaatcgctagtaatcgtggatcagaatgccacggtgaatacgttcccgggccttgtacacaccgcccgtcacaccatgggagtgggttgcaaaagaagtaggtagcttaaccttcgggagggcgcttaccactttgtgattcatgactggggtg

SEQ ID NO: 2404 - DNA, 1463 bp, Pantoea conspicua
  source 1..1463: mol_type = unassigned DNA
attgaacgctggcggcaggcctaacacatgcaagtcggacggtagcacaggggagcttgctccctgggtgacgagtggcggacgggtgagtaatgtctggggatctgcccgatagagggggataaccactggaaacggtggctaataccgcataacgtcgcaagaccaaagagggggaccttcgggcctctcactatcggatgaacccagatgggattagctagtaggcggggtaatggcccacctaggcgacgatccctagctggtctgagaggatgaccagccacactggaactgagacacggtccagactcctacgggaggcagcagtggggaatattgcacaatgggcgcaagcctgatgcagccatgccgcgtgtatgaagaaggcctcgggttgtaaagtactttcagcggggaggaaggcgatgcggttaataaccgcgtcgattgacgttacccgcagaagaagcaccggctaactccgtgccagcagccgcggtaatacggagggtgcaagcgttaatcggaattactgggcgtaaagcgcacgcaggcggtctgttaagtcagatgtgaaatccccgggcttaacctgggaactgcatttgaaactggcaggcttgagtctcgtagaggggggtagaattccaggtgtagcggtgaaatgcgtagagatctggaggaataccggtggcgaaggcggccccctggacgaagactgacgctcaggtgcgaaagcgtggggagcaaacaggattagataccctggtagtccacgccgtaaacgatgtcgacttggaggttgttcccttgaggagtggcttccggagctaacgcgttaagtcgaccgcctggggagtacggccgcaaggttaaaactcaaatgaattgacgggggcccgcacaagcggtggagcatgtggtttaattcgatgcaacgcgaagaaccttacctactcttgacatccagcgaacttggcagagatgccttggtgccttcgggaacgctgagacaggtgctgcatggctgtcgtcagctcgtgttgtgaaatgttgggttaagtcccgcaacgagcgcaacccttatcctttgttgccagcgattcggtcgggaactcaaaggagactgccggtgataaaccggaggaaggtggggatgacgtcaagtcatcatggcccttacgagtagggctacacacgtgctacaatggcgcatacaaagagaagcgacctcgcgagagcaagcggacctcacaaagtgcgtcgtagtccggatcggagtctgcaactcgactccgtgaagtcggaatcgctagtaatcgtggatcagaatgccacggtgaatacgttcccgggccttgtacacaccgcccgtcacaccatgggagtgggttgcaaaagaagtaggtagcttaaccttcgggagggcgcttaccactttgtgattcatgactggggtg

SEQ ID NO: 2405 - DNA, 1464 bp, Pantoea cypripedii
  source 1..1464: mol_type = unassigned DNA
attgaacgctggcggcaggcctaacacatgcaagtcgaacggtagcacagaggagcttgctccttgggtgacgagtggcggacgggtgagtaatgtctggggatctgcccgatggagggggataactactggaaacggtagctaataccgcataacgtcgcaagaccaaagtgggggaccttcgggcctcacaccatcggatgaacccagatgggattagctagtaggtggggtaacggctcacctaggcgacgatccctagctggtctgagaggatgaccagccacactggaactgagacacggtccagactcctacgggaggcagcagtggggaatattgcacaatgggcgcaagcctgatgcagccatgccgcgtgtatgaagaaggccttcgggttgtaaagtactttcagcggggaggaaggggttgagtttaatacgctcaatcattgacgttacccgcagaagaagcaccggctaactccgtgccagcagccgcggtaatacggagggtgcaagcgttaatcggaattactgggcgtaaagcgcacgcaggcggtctgtcaagtcggatgtgaaatccccgggcttaacctgggaactgcattcgaaactggcaggctagagtctcgtagaggggggtagaattccaggtgtagcggtgaaatgcgtagagatctggaggaataccggtggcgaaggcggccccctggacgaagactgacgctcaggtgcgaaagcgtggggagcaaacaggattagataccctggtagtccacgccgtaaacgatgtcgacttggaggttgtgcccttgaggcgtggcttccggagctaacgcgttaagtcgaccgcctggggagtacggccgcaaggttaaaactcaaatgaattgacgggggcccgcacaagcggtggagcatgtggtttaattcgatgcaacgcgaagaaccttacctggccttgacatccagagaacttagcagagatgctttggtgccttcgggaactctgagacaggtgctgcatggctgtcgtcagctcgtgttgtgaaatgttgggttaagtcccgcaacgagcgcaacccttatcctttgttgccagcgattcggtcgggaactcaaaggagactgccggtgataaaccggaggaaggtggggatgacgtcaagtcatcatggcccttacggccagggctacacacgtgctacaatggcgcatacaaagagaagcgacctcgcgagagcaagcggacctcataaagtgcgtcgtagtccggattggagtctgcaactcgactccatgaagtcggaatcgctagtaatcgtagatcagaatgctacggtgaatacgttcccgggccttgtacacaccgcccgtcacaccatgggagtgggttgcaaaagaagtaggtagcttaaccttcgggagggcgcttaccactttgtgattcatgactggggtg

SEQ ID NO: 2406 - DNA, 1394 bp, Pantoea deleyi
  source 1..1394: mol_type = unassigned DNA
  misc_difference 912: note = n is a, c, g, or t
acgagtggcggacgggtgagtaatgtctggggatctgcccgatagagggggataaccactggaaacggtggctaataccgcataacgtcgcaagaccaaagagggggaccttcgggcctctcactatcggatgaacccagatgggattagctagtaggcggggtaatggcccacctaggcgacgatccctagctggtctgagaggatgaccagccacactggaactgagacacggtccagactcctacgggaggcagcagtggggaatattgcacaatgggcgcaagcctgatgcagccatgccgcgtgtatgaagaaggccttcgggttgtaaagtactttcagcggggaggaaggcggtgcggttaataaccgcgccgattgacgttacccgcagaagaagcaccggctaactccgtgccagcagccgcggtaatacggagggtgcaagcgttaatcggaattactgggcgtaaagcgcacgcaggcggtctgttaagtcagatgtgaaatccccgggcttaacctgggaactgcatttgaaactggcaggcttgagtctcgtagaggggggtagaattccaggtgtagcggtgaaatgcgtagagatctggaggaataccggtggcgaaggcggccccctggacgaagactgacgctcaggtgcgaaagcgtggggagcaaacaggattagataccctggtagtccacgccgtaaacgatgtcgacttggaggttgttcccttgaggagtggcttccggagctaacgcgttaagtcgaccgcctggggagtacggccgcaaggttaaaactcaaatgaattgacgggggcccgcacaagcggtggagcatgtggtttaattcgatgcaacgcgaagaaccttacctactcttgacatccagcgaacggngcagagatgccccggtgccttcgggaacgctgagacaggtgctgcatggctgtcgtcagctcgtgttgtgaaatgttgggttaagtcccgcaacgagcgcaacccttatcctttgttgccagcgattcggtcgggaactcaaaggagactgccggtgataaaccggaggaaggtggggatgacgtcaagtcatcatggcccttacgagtagggctacacacgtgctacaatggcgcatacaaagagaagcgacctcgcgagagcaagcggacctcacaaagtgcgtcgtagtccggatcggagtctgcaactcgactccgtgaagtcggaatcgctagtaatcgtggatcagaatgccacggtgaatacgttcccgggccttgtacacaccgcccgtcacaccatgggagtgggttgcaaaagaagtaggtagcttaaccttcgggagggcgcttaccactttgtgattcatgactggggtg

SEQ ID NO: 2407 - DNA, 1347 bp, Pantoea dispersa
  source 1..1347: mol_type = unassigned DNA
ggacgggtgagtaatgtctgggaaactgcccgatggagggggataactactggaaacggtagctaataccgcataacgtcgcragaccaaagtgggggaccttcgggcctcacaccatcggatgtgcccagatgggattagctagtaggtggggtaatggctcacctaggcgacgatccctagctggtctgagaggatgaccagccacactggaactgagacacggtccagactcctacgggaggcagcagtggggaatattgcacaatgggcgcaagcctgatgcagccatgccgcgtgtatgaagaaggccttcgggttgtaaagtactttcagcggggaggaaggcggtgaggttaataacctygccgattgacgttacccgcagaagaagcaccggctaactccgtgccagcagccgcggtaatacggagggtgcaagcgttaatcggaattactgggcgtaaagcgcacgcaggcggtctgttaagtcagatgtgaaatccccgggcttaacctgggaactgcatttgaaactggcaggcttgagtctcgtagaggggggtagaattccaggtgtagcggtgaaatgcgtagagatctggaggaataccggtggcgaaggcggccccctggacgaagactgacgctcaggtgcgaaagcgtggggagcaaacaggattagataccctggtagtccacgccgtaaacgatgtcgacttggaggttgtgcccttgaggygtggcttccggagctaacgcgttaagtcgaccgcctggggagtacggccgcaaggttaaaactcaaatgaattgacgggggcccgcacaagcggtggagcatgtggtttaattcgatgcaacgcgaagaaccttacctggccttgacatccagagaacttagcagagatgctttggtgccttcgggaactctgagacaggtgctgcatggctgtcgtcagctcgtgttgtgaaatgttgggttaagtcccgcaacgagcgcaacccttatcctttgttgccagcggytcggccgggaactcaaaggagactgccggtgataaaccggaggaaggtggggatgacgtcaagtcatcatggcccttacggccagggctacacacgtgctacaatggcgcatacaaagagaagcgacctcgcgagagcaagcggacctcataaagtgcgtcgtagtccggattggagtctgcaactcgactccatgaagtcggaatcgctagtaatcgtagatcagaatgctacggtgaatacgttcccgggccttgtacacaccgcccgtcacaccatgggagtgggttgcaaaagaagtaggtagcttaaccttcg

SEQ ID NO: 2408 - DNA, 1348 bp, Pantoea eucalypti
  source 1..1348: mol_type = unassigned DNA
  misc_difference 354: note = n is a, c, g, or t
ggacgggtgagtaatgtctggggatctgcccgatagagggggataaccactggaaacggtggctaataccgcataacgtcgcaagaccaaagagggggaccttcgggcctctcactatcggatgaacccagatgggattagctagtaggcggggtaatggcccacctaggcgacgatccctagctggtctgagaggatgaccagccacactggaactgagacacggtccagactcctacgggaggcagcagtggggaatattgcacaatgggcgcaagcctgatgcagccatgccgcgtgtatgaagaaggccttcgggttgtaaagtactttcagcggggaggaaggcgatgnggttaataacctcatcgattgacgttacccgcagaagaagcaccggctaactccgtgccagcagccgcggtaatacggagggtgcaagcgttaatcggaattactgggcgtaaagcgcacgcaggcggtctgttaagtcagatgtgaaatccccgggcttaacctgggaactgcatttgaaactggcaggcttgagtcttgtagaggggggtagaattccaggtgtagcggtgaaatgcgtagagatctggaggaataccggtggcgaaggcggccccctggacaaagactgacgctcaggtgcgaaagcgtggggagcaaacaggattagataccctggtagtccacgccgtaaacgatgtcgacttggaggttgttcccttgaggagtggcttccggagctaacgcgttaagtcgaccgcctggggagtacggccgcaaggttaaaactcaaatgaattgacgggggcccgcacaagcggtggagcatgtggtttaattcgatgcaacgcgaagaaccttacctactcttgacatccagagaacttagcagagatgctttggtgccttcgggaactctgagacaggtgctgcatggctgtcgtcagctcgtgttgtgaaatgttgggttaagtcccgcaacgagcgcaacccttatcctttgttgccagcgcgtgatggcgggaactcaaaggagactgccggtgataaaccggaggaaggtggggatgacgtcaagtcatcatggcccttacgagtagggctacacacgtgctacaatggcgcatacaaagagaagcgacctcgcgagagcaagcggacctcacaaagtgcgtcgtagtccggatcggagtctgcaactcgactccgtgaagtcggaatcgctagtaatcgtggatcagaatgccacggtgaatacgttcccgggccttgtacacaccgcccgtcacaccatgggagtgggttgcaaaagaagtaggtagcttaaccttcg

SEQ ID NO: 2409 - DNA, 1462 bp, unidentified
  source 1..1462: mol_type = unassigned DNA; note = Pantoea rodasii
attgaacgctggcggcaggcctaacacatgcaagtcgaacggtagcacagagagcttgctcttgggtgacgagtggcggacgggtgagtaatgtctgggaaactgcccgatggagggggataactactggaaacggtagctaataccgcataacgtcttcggaccaaagtgggggaccttcgggcctcacaccatcggatgtgcccagatgggattagctagtaggtggggtaatggctcacctaggcgacgatccctagctggtctgagaggatgaccagccacactggaactgagacacggtccagactcctacgggaggcagcagtggggaatattgcacaatgggcgcaagcctgatgcagccatgccgcgtgtatgaagaaggcctcgggttgtaaagtactttcagtggggaggaaggcgatgtggttaataaccgcatcgattgacgttacccgcagaagaagcaccggctaactccgtgccagcagccgcggtaatacggagggtgcaagcgttaatcggaattactgggcgtaaagcgcacgcaggcggtctgtcaagtcggatgtgaaatccccgggctcaacctgggaactgcattcgaaactggcaggctagagtcttgtagaggggggtagaattccaggtgtagcggtgaaatgcgtagagatctggaggaataccggtggcgaaggcggccccctggacaaagactgacgctcaggtgcgaaagcgtggggagcaaacaggattagataccctggtagtccacgccgtaaacgatgtcgacttggaggttgttcccttgaggagtggcttccggagctaacgcgttaagtcgaccgcctggggagtacggccgcaaggttaaaactcaaatgaattgacgggggcccgcacaagcggtggagcatgtggtttaattcgatgcaacgcgaagaaccttacctactcttgacatccagagaacttagcagagatgctttggtgccttcgggaactctgagacaggtgctgcatggctgtcgtcagctcgtgttgtgaaatgttgggttaagtcccgcaacgagcgcaacccttatcctttgttgccagcgggttatgccgggaactcaaaggagactgccagtgataaactggaggaaggtggggatgacgtcaagtcatcatggcccttacgagtagggctacacacgtgctacaatggcgcatacaaagagaagcgacctcgcgagagcaagcggacctcataaagtgcgtcgtagtccggatcggagtctgcaactcgactccgtgaagtcggaatcgctagtaatcgtagatcagaatgctacggtgaatacgttcccgggccttgtacacaccgcccgtcacaccatgggagtgggttgcaaaagaagtaggtagcttaaccttcgggagggcgcttaccactttgtgattcatgactggggtg

SEQ ID NO: 2410 - DNA, 1464 bp, unidentified
  source 1..1464: mol_type = unassigned DNA; note = Pantoea rwandensis
attgaacgctggcggcaggcctaacacatgcaagtcgaacggtagcacagaggagcttgctccttgggtgacgagtggcggacgggtgagtaatgtctgggaaactgcccgatggagggggataactactggaaacggtagctaataccgcataacgtcttcggaccaaagtgggggaccttcgggcctcacaccatcggatgtgcccagatgggattagctagtaggtggggtaatggctcacctaggcgacgatccctagctggtctgagaggatgaccagccacactggaactgagacacggtccagactcctacgggaggcagcagtggggaatattgcacaatgggcgcaagcctgatgcagccatgccgcgtgtatgaagaaggccttcgggttgtaaagtactttcagtggggaggaaggcgatgtggttaataaccgcatcgattgacgttacccgcagaagaagcaccggctaactccgtgccagcagccgcggtaatacggagggtgcaagcgttaatcggaattactgggcgtaaagcgcacgcaggcggtctgtcaagtcggatgtgaaatccccgggctcaacctgggaactgcattcgaaactggcaggctagagtcttgtagaggggggtagaattccaggtgtagcggtgaaatgcgtagagatctggaggaataccggtggcgaaggcggccccctggacaaagactgacgctcaggtgcgaaagcgtggggagcaaacaggattagataccctggtagtccacgccgtaaacgatgtcgacttggaggttgttcccttgaggagtggcttccggagctaacgcgttaagtcgaccgcctggggagtacggccgcaaggttaaaactcaaatgaattgacgggggcccgcacaagcggtggagcatgtggtttaattcgatgcaacgcgaagaaccttacctactcttgacatccacggaattcggcagagatgccttagtgccttcgggaaccgtgagacaggtgctgcatggctgtcgtcagctcgtgttgtgaaatgttgggttaagtcccgcaacgagcgcaacccttatcctttgttgccagcggttcggccgggaactcaaaggagactgccagtgataaactggaggaaggtggggatgacgtcaagtcatcatggcccttacgagtagggctacacacgtgctacaatggcgcatacaaagagaagcgacctcgcgagagcaagcggacctcataaagtgcgtcgtagtccggatcggagtctgcaactcgactccgtgaagtcggaatcgctagtaatcgtagatcagaatgctacggtgaatacgttcccgggccttgtacacaccgcccgtcacaccatgggagtgggttgcaaaagaagtaggtagcttaaccttcgggagggcgcttaccactttgtgattcatgactggggtg

SEQ ID NO: 2411 - DNA, 1464 bp, Pantoea stewartii
  source 1..1464: mol_type = unassigned DNA
attgaacgctggcggcaggcctaacacatgcaagtcggacggtagcacagaggagcttgctcctcgggtgacgagtggcggacgggtgagtaatgtctgggaaactgcccgatggagggggataactactggaaacggtagctaataccgcataacgtcgcaagaccaaagtgggggacctccgggcctcacaccatcggatgtgcccagatgggattagctagtaggcggggtaacggcccacctaggcgacgatccctagctggtctgagaggatgaccagccacactggaactgagacacggtccagactcctacgggaggcagcagtggggaatattgcacaatgggcgcaagcctgatgcagccatgccgcgtgtatgaagaaggccttcgggttgtaaagtactttcagcgggraggaaggtggtgaggttaataacctcatcaattgacgttacccgcagaaraagcaccggctaactccgtgccagcagccgcggtaatacggagggtgcaagcgttaatcggaattactgggcgtaaagcgcacgcaggcggtctgttaagtcagatgtgaaatccccgggcttaacctgggaactgcatttgaaactggcaggcttgagtctcgtagaggggggtagaattccaggtgtagcggtgaaatgcgtagagatctggaggaataccggtggcgaaggcggccccctggacgaagactgacgctcaggtgcgaaagcgtggggagcaaacaggattagataccctggtagtccacgccgtaaacgatgtcgacttggaggttgttcccttgaggagtggcttccggagctaacgcgttaagtcgaccgcctggggagtacggccgcaaggttaaaactcaaatgaattgacgggggcccgcacaagcggtggagcatgtggtttaattcgatgcaacgcgaagaaccttacctactcttgacatccagcgaacttggcagagatgccttggtgccttcgggaacgctgagacaggtgctgcatggctgtcgtcagctcgtgttgtgaaatgttgggttaagtcccgcaacgagcgcaacccttatcctttgttgccagcgattcggtcgggaactcaaaggagactgccggtgataaaccggaggaaggtggggatgacgtcaagtcatcatggcccttacgagtagggctacacacgtgctacaatggcgcatacaaagagaagcgacctcgcgagagcaagcggacctcataaastgcgtcgtagtccggatcggagtctscaactcgactccgtgaagtcggaatcgctagtaatcgtggatcagaatgccacggtgaatacgttcccgggccttgtacacaccgcccgtcacaccatgggagtgggttgcaaaagaagtaggtagcttaacccccgggagggcgcttaccactttgtgattcatgactggggtg

SEQ ID NO: 2412 - DNA, 1399 bp, Pantoea vagans
  source 1..1399: mol_type = unassigned DNA
gggtgacgagtggcggacgggtgagtaatgtctggggatctgcccgatagagggggataaccactggaaacggtggctaataccgcataacgtcgcaagaccaaagagggggaccttcgggcctctcactatcggatgaacccagatgggattagctagtaggcggggtaatggcccacctaggcgacgatccctagctggtctgagaggatgaccagccacactggaactgagacacggtccagactcctacgggaggcagcagtggggaatattgcacaatgggcgcaagcctgatgcagccatgccgcgtgtatgaagaaggccttcgggttgtaaagtactttcagcggggaggaaggcgatgcggttaataaccgcgtcgattgacgttacccgcagaagaagcaccggctaactccgtgccagcagccgcggtaatacggagggtgcaagcgttaatcggaattactgggcgtaaagcgcacgcaggcggtctgttaagtcagatgtgaaatccccgggcttaacctgggaactgcatttgaaactggcaggcttgagtcttgtagaggggggtagaattccaggtgtagcggtgaaatgcgtagagatctggaggaataccggtggcgaaggcggccccctggacaaagactgacgctcaggtgcgaaagcgtggggagcaaacaggattagataccctggtagtccacgccgtaaacgatgtcgacttggaggttgttcccctgaggagtggcttccggagctaacgcgttaagtcgaccgcctggggagtacggccgcaaggttaaaactcaaatgaattgacgggggcccgcacaagcggtggagcatgtggtttaattcgatgcaacgcgaagaaccttacctactcttgacatccasrgaayttrgcagagatgctttrgtgccttcgggaactstgagacaggtgctgcatggctgtcgtcagctcgtgttgtgaaatgttgggttaagtcccgcaacgagcgcaacccttatcctttgttgccagcgattcggtcgggaactcaaaggagactgccggtgataaaccggaggaaggtggggatgacgtcaagtcatcatggcccttacgagtagggctacacacgtgctacaatggcgcatacaaagagaagcgacctcgcgagagcaagcggacctcacaaagtgcgtcgtagtccggatcggagtctgcaactcgactccgtgaagtcggaatcgctagtaatcgtggatcagaatgccacggtgaatacgttcccgggccttgtacacaccgcccgtcacaccatgggagtgggttgcaaaagaagtaggtagcttaaccttcgggagggcgcttaccactttgtgattcatgactggggtg

SEQ ID NO: 2413 - DNA, 1465 bp, unidentified
  source 1..1465: mol_type = unassigned DNA; note = Pantoea wallisii
attgaacgctggcggcaggcctaacacatgcaagtcggacggtagcacagaagagcttgctcttcgggtgacgagtggcggacgggtgagtaatgtctgggaaactgcccgatggcgggggataactactggaaacggtagctaataccgcataacgtcgcaagaccaaagtgggggaccttcgggcctcacgccatcggatgtgcccagatgggattagctagtaggtggggtaacggctcacctaggcgacgatccctagctggtctgagaggatgaccagccacactggaactgagacacggtccagactcctacgggaggcagcagtggggaatattgcacaatgggcgcaagcctgatgcagccatgccgcgtgtatgaagaaggccttcgggttgtaaagtactttcagcggggaggaaggcggtaaggttaataaccttgccgattgacgttacccgcagaagaagcaccggctaactccgtgccagcagccgcggtaatacggagggtgcaagcgttaatcggaattactgggcgtaaagcgcacgcaggcggtctgttaagtcagatgtgaaatccccgggcttaacctgggaactgcatttgaaactggcaggcttgagtctcgtagaggggggtagaattccaggtgtagcggtgaaatgcgtagagatctggaggaataccggtggcgaaggcggccccctggacgaagactgacgctcaggtgcgaaagcgtggggagcaaacaggattagataccctggtagtccacgccgtaaacgatgtcgacttggaggttgtgcccttgaggcgtggcttccggagctaacgcgttaagtcgaccgcctggggagtacggccgcaaggttaaaactcaaatgaattgacgggggcccgcacaagcggtggagcatgtggtttaattcgatgcaacgcgaagaaccttacctggccttgacatccagagaactttccagagatggattggtgccttcgggaactctgagacaggtgctgcatggctgtcgtcagctcgtgttgtgaaatgttgggttaagtcccgcaacgagcgcaacccttatcctttgttgccagcgggtagtgccgggaactcaaaggagactgccggtgataaaccggaggaaggtggggatgacgtcaagtcatcatggcccttacggccagggctacacacgtgctacaatggcgcatacaaagagaagcgacctcgcgagagcaagcggacctcataaagtgcgtcgtagtccggatcggagtctgcaactcgactccgtgaagtcggaatcgctagtaatcgtagatcagaatgctacggtgaatacgttcccgggccttgtacacaccgcccgtcacaccatgggagtgggttgcaaaagaagtaggtagcttaaccttcgggagggcgcttaccactttgtgattcatgactggggtg

SEQ ID NO: 2414 - DNA, 1450 bp, unidentified
  source 1..1450: mol_type = unassigned DNA; note = Parabacteroides chinchillae
gatgaacgctagcgacaggcttaacacatgcaagtcgaggggtagcagggggtagcaatatcccgctgacgaccggcgcacgggtgagtaacgcgtatgcaacttacctatcagagagggataacccggcgaaagtcggactaataccacatgaaacaggggtcccgcatgggaatatttgttaaagatttattgctgatagataggcatgcgttccattagatagttggtggggtaacggcccaccaagtctgcgatggataggggttctgagaggaaggtcccccacattggtactgagacacggaccaaactcctacgggaggcagcagtgaggaatattggtcaatgggcgagagcctgaaccagccaagtcgcgtgaaggatgaaggttctatggattgtaaacttcttttagaggggaataaagtgcgggacgtgtcctgttttgtatgtaccctctgaataagcatcggctaactccgtgccagcagccgcggtaatacggaggatgcgagcgttatccggatttattgggtttaaagggtgcgtaggtggatgtttaagtcagcggtgaaagtttgtggctcaaccataaaattgccgttgaaactggatatcttgagtatgtttgaggtaggcggaatgcgtggtgtagcggtgaaatgcatagatatcacgcagaactccgattgcgaaggcagcttactaaaccaacactgacactgaagcacgaaagcgtgggtatcaaacaggattagataccctggtagtccacgcagtaaacgatgattactaggagtttgcgatatattgtaagctctacagcgaaagcgttaagtaatccacctggggagtacgccggcaacggtgaaactcaaaggaattgacgggggcccgcacaagcggaggaacatgtggtttaattcgatgatacgcgaggaaccttacccgggtttgaacgtaagaagaccggagtggaaacactctttctagcaatagctttttacgaggtgctgcatggttgtcgtcagctcgtgccgtgaggtgtcggcttaagtgccataacgagcgcaacccttatcactagttactaacaggtcaagctgaggactctagtgagactgccagcgtaagctgtgaggaaggtggggatgacgtcaaatcagcacggcccttacatccggggcgacacacgtgttacaatggcatggacaaagggcggctacacagcgatgtgatgctaatccccaaaccatgtctcagttcggatcggagtctgcaactcgactccgtgaagctggattcgctagtaatcgcgcatcagccatggcgcggtgaatacgttcccgggccttgtacacaccgcccgtcaagccatgggagccgggggtacctgaagtccgtaaccgttgaggatcggcctagggtaaaactggtgactggggct

SEQ ID NO: 2415 - DNA, 1455 bp, unidentified
  source 1..1455: mol_type = unassigned DNA; note = Paraburkholderia aromaticivorans
attgaacgctggcggcatgccttacacatgcaagtcgaacggcagcacgggggcaaccctggtggcgagtggcgaacgggtgagtaatacatcggaacgtgtcctgtagtgggggatagcccggcgaaagccggattaataccgcatacgatctgcggatgaaagcgggggctccttcgggacctcgcgctgcaggggcggccgatggcagattagctagttggtggggtaaaggcctaccaaggcgacgatctgtagctggtctgagaggacgaccagccacactgggactgagacacggcccagactcctacgggaggcagcagtggggaattttggacaatgggcgaaagcctgatccagcaatgccgcgtgtgtgaagaaggccttcgggttgtaaagcacttttgtccggaaagaaaacctcttggttaatacccgagggggatgacggtaccggaagaataagcaccggctaactacgtgccagcagccgcggtaatacgtagggtgcaagcgttaatcggaattactgggcgtaaagcgtgcgcaggcggttcgctaagacagatgtgaaatccccgggcttaacctgggaactgcatttgtgactggcgggctagagtatggcagaggggggtagaattccacgtgtagcagtgaaatgcgtagagatgtggaggaataccgatggcgaaggcagccccctgggccaatactgatgctcatgcacgaaagcgtggggagcaaacaggattagataccctggtagtccacgccctaaacgatgtcaactagttgtcgggtcttcattgacttggtaacgtagctaacgcgtgaagttgaccgcctggggagtacggtcgcaagattaaaactcaaaggaattgacggggacccgcacaagcggtggatgatgcggattaattcgatgcaacgcgaaaaaccttacctacccttgacatgtatggaatcctgctgagaggtgggagtgcccgaaagggagccataacacaggtgctgcatggctgtcgtcagctcgtgtcgtgagatgttgggttaagtcccgcaacgagcgcaacccttgtccctagttgctacgcaagagcactctagggagactgccggtgacaaaccggaggaaggtggggatgacgtcaagtcctcatggcccttatgggtagggcttcacacgtcatacaatggtcggaacagagggtcgccaacccgcgagggggagccaatcccagaaaaccgatcgtagtccggatcgcactctgcaactcgagtgcgtgaagctggaatcgctagtaatcgcggatcagcatgccgcggtgaatacgttcccgggtcttgtacacaccgcccgtcacaccatgggagtgggttttaccagaagtggctagtctaaccgcaaggaggacggtcaccacggtaggattcatgactggggtg

SEQ ID NO: 2416 - DNA, 1409 bp, unidentified
  source 1..1409: mol_type = unassigned DNA; note = Paraburkholderia aspalathi
tgcaagtcgaacggcagcacgggggcaaccctggtggcgagtggcgaacgggtgagtaatacatcggaacgtgtcctgtagtgggggatagcccggcgaaagccggattaataccgcatacgctctacggaggaaagggggggatctcaggacctcccgctacaggggcggccgatggcagattagctagttggtggggtaaaggcctaccaaggcgacgatctgtagctggtctgagaggacgaccagccacactgggactgagacacggcccagactcctacgggaggcagcagtggggaattttggacaatgggcgaaagcctgatccagcaatgccgcgtgtgtgaagaaggccttcgggttgtaaagcacttttgtccggaaagaaaacctccgccctaatatggtggggggatgacggtaccggaagaataagcaccggctaactacgtgccagcagccgcggtaatacgtagggtgcaagcgttaatcggaattactgggcgtaaagcgtgcgcaggcggtccgctaagacagatgtgaaatccccgggcttaacctgggaactgcctttgtgactggcgggctagagtatggaagaggggggtagaattccacgtgtagcagtgaaattcgtagagatgtggaggaacaccgatggcgaaggcagccccctgggccaatactgacgctcatgcacgaaagcgtggggagcaaacaggattagataccctggtagtccacgccctaaacgatgacaactagttgtcggggattcatattgtttagtaacgtagctaacgcgtgaagttgtccgcctggggagtacggtcgcaagattaaaactcaaaggaattgacggggacccgcacaagcggtggatgatgtggattaattcgatgcaacgcgaaaaaccttacctacccttgacatcgcatggaatcctgctgagaggtgggagtgcccgtaagggagccatgagacaggtgctgcatggctgtcgtcagctcgtgtcgtgagatgttgggttaagtcccgcaacgagcgcaacccttgtccctagttgctacgcatttagttgagcactctagggagactgccggtgataaaccgagaggaaggtggggatgacgtcaagtcctcatggcccttatgggtagggcttcacacgtcatacaatggtcggaacagagggtcgccaacccgcgagggggagccaatctccagaaaaccgatcgtagtccggatcgcactctgcaactcgagtgcgtgaagctggaatcgctagtaatcgcggatcagcatgccgcggtgaatacgttcccgggtcttgtacacaccgcccgtcacaccatgggagtgggttttaccagaagtggctagtctaaccgcaaggaggacggtca

SEQ ID NO: 2417 - DNA, 1453 bp, unidentified
  source 1..1453: mol_type = unassigned DNA; note = Paraburkholderia azotifigens
attgaacgctggcggcatgccttacacatgcaagtcggacggcagcacgggggcaaccctggtggcgagtggcgaacgggtgagtaatacatcggaacgtgtcctggagtgggggatagcccggcgaaagccggattaataccgcatacgctctatggaggaaagcgggggatcttcggacctcgcgctcaaggggcggccgatggcagattagctagttggtggggtaaaggcctaccaaggcgacgatctgtagctggtctgagaggacgaccagccacactgggactgagacacggcccagactcctacgggaggcagcagtggggaattttggacaatgggggcaaccctgatccagcaatgccgcgtgtgtgaagaaggccttcgggttgtaaagcacttttgtccggaaagaaaaccatcgccctaatatggtggtgggatgacggtaccggaagaataagcaccggctaactacgtgccagcagccgcggtaatacgtagggtgcgagcgttaatcggaattactgggcgtaaagcgtgcgcaggcggttcgctaagaccgatgtgaaatccccgggcttaacctgggaactgcattggtgactggcgggctagagtatggcagaggggggtagaattccacgtgtagcagtgaaatgcgtagagatgtggaggaataccgatggcgaaggcagccccctgggccaatactgacgctcatgcacgaaagcgtggggagcaaacaggattagataccctggtagtccacgccctaaacgatgtcaactagttgtcgggtcttcattgacttggtaacgtagctaacgcgtgaagttgaccgcctggggagtacggtcgcaagattaaaactcaaaggaattgacggggacccgcacaagcggtggatgatgtggattaattcgatgcaacgcgaaaaaccttacctacccttgacatgtacggaatcctgctgagaggtgggagtgcccgaaagggagccgtaacacaggtgctgcatggctgtcgtcagctcgtgtcgtgagatgttgggttaagtcccgcaacgagcgcaacccttgtccctagttgctacgcaagagcactctagggagactgccggtgacaaaccggaggaaggtggggatgacgtcaagtcctcatggcccttatgggtagggcttcacacgtcatacaatggtcggaacagagggttgccaagccgcgaggtggagccaatcccagaaaaccgatcgtagtccggatcgcagtctgcaactcgactgcgtgaagctggaatcgctagtaatcgcggatcagcatgccgcggtgaatacgttcccgggtcttgtacacaccgcccgtcacaccatgggagtgggttttaccagaagtggctagtctaaccgcaaggaggacggtcaccacggtaggattcatgactggggtg

SEQ ID NO: 2418 - DNA, 1453 bp, unidentified
  source 1..1453: mol_type = unassigned DNA; note = Paraburkholderia bryophila
  misc_difference 161: note = n is a, c, g, or t
attgaacgctggcggcatgccttacacatgcaagtcgaacggcagcacgggagcaatcctggtggcgagtggcgaacgggtgagtaatacatcggaacgtgtcctgtagtgggggatagcccggcgaaagccggattaataccgcatacgctctacggagnaaagggggggatcttaggacctcccgctacaggggcggccgatggcagattagctagttggtggggtaaaggcctaccaaggcgacgatctgtagctggtctgagaggacgaccagccacactgggactgagacacggcccagactcctacgggaggcagcagtggggaattttggacaatgggcgaaagcctgatccagcaatgccgcgtgtgtgaagaaggccttcgggttgtaaagcacttttgtccggaaagaaaacttctgccctaatacggcgggaggatgacggtaccggaagaataagcaccggctaactacgtgccagcagccgcggtaatacgtagggtgcaagcgttaatcggaattactgggcgtaaagcgtgcgcaggcggtccgctaagacagatgtgaaatccccgggcttaacctgggaactgcatttgtgactggcgggctagagtatggcagaggggggtagaattccacgtgtagcagtgaaatgcgtagagatgtggaggaataccgatggcgaaggcagccccctgggccaatactgacgctcatgcacgaaagcgtggggagcaaacaggattagataccctggtagtccacgccctaaacgatgtcaactagttgttgggtcttcattgacttggtaacgtagctaacgcgtgaagttgaccgcctggggagtacggtcgcaagattaaaactcaaaggaattgacggggacccgcacaagcggtggatgatgtggattaattcgatgcaacgcgaaaaaccttacctacccttgacatgtatggaaccctgctgagaggtgggggtgcccgaaagggagccataacacaggtgctgcatggctgtcgtcagctcgtgtcgtgagatgttgggttaagtcccgcaacgagcgcaacccttgtccctagttgctacgcaagagcactccagggagactgccggtgacaaaccggaggaaggtggggatgacgtcaagtcctcatggcccttatgggtagggcttcacacgtcatacaatggtcggaacagagggttgccaagccgcgaggtggagccaatcccagaaaaccgatcgtagtccggatcgcactctgcaactcgagtgcgtgaagctggaatcgctagtaatcgcggatcagcatgccgcggtgaatacgttcccgggtcttgtacacaccgcccgtcacaccatgggagtgggtttcaccagaagtaggtagcctaaccgtaaggagggcgcttaccacggtgggattcatgactggggtg

SEQ ID NO: 2419 - DNA, 1453 bp, unidentified
  source 1..1453: mol_type = unassigned DNA; note = Paraburkholderia caballeronis
attgaacgctggcggcatgccttacacatgcaagtcgaacggcagcgcgggggcaaccctggcggcgagtggcgaacgggtgagtaatacatcggaacgtgtccattagtgggggatagcccggcgaaagccggattaataccgcatacgatctgtggatgaaagcgggggaccgaaaggcctcgcgctaacggggcggccgatggcggattaggtagttggtggggtaaaggcctaccaagccgacgatccgtagctggtctgagaggacgaccagccacactgggactgagacacggcccagactcctacgggaggcagcagtggggaattttggacaatgggggcaaccctgatccagcaatgccgcgtgtgtgaagaaggccttcgggttgtaaagcacttttgtccggaaagaaatcatccctgctaataccgggggtggatgacggtaccggaagaataagcaccggctaactacgtgccagcagccgcggtaatacgtagggtgcgagcgttaatcggaattactgggcgtaaagcgtgcgcaggcggtgatgtaagaccgatgtgaaatccccgggcttaacctgggaactgcattggtgactgcatcgctggagtatggcagaggggggtggaattccacgtgtagcagtgaaatgcgtagagatgtggaggaacaccgatggcgaaggcagccccctgggccaatactgacgctcatgcacgaaagcgtggggagcaaacaggattagataccctggtagtccacgccctaaacgatgtcaactggttgttggggattcatttccttagtaacgtagctaacgcgtgaagttgaccgcctggggagtacggtcgcaagattaaaactcaaaggaattgacggggacccgcacaagcggtggatgatgtggattaattcgatgcaacgcgaaaaaccttacctacccttgacatgtacggaaccctggtgagagccgggggtgcccgaaagggagccgtaacacaggtgctgcatggctgtcgtcagctcgtgtcgtgagatgttgggttaagtcccgcaacgagcgcaacccttgtccctagttgctacgcaagagcactccagggagactgccggtgacaaaccggaggaaggtggggatgacgtcaagtcctcatggcccttatgggtagggcttcacacgtcatacaatggtcggaacagagggtcgccaacccgcgagggggagccaatcccagaaaaccgatcgtagtccggatcgcagtctgcaactcgactgcgtgaagctggaatcgctagtaatcgcggatcagcatgccgcggtgaatacgttcccgggtcttgtacacaccgcccgtcacaccatgggagtgggttttgccagaagtggctagtctaaccgcaaggaggacggtcaccacggcaggattcatgactggggtg

SEQ ID NO: 2420 - DNA, 1457 bp, unidentified
  source 1..1457: mol_type = unassigned DNA; note = Paraburkholderia caledonica
attgaacgctggcggcatgccttacacatgcaagtcgaacggcagcacgggagcaatcctggtggcgagtggcgaacgggtgagtaatacatcggaacgtgtcctgtagtgggggatagcccggcgaaagccggattaataccgcatacgctctgcggaggaaagcgggggatccttcgggacctcgcgctacaggggcggccgatggcagattagctagttggtggggtaaaggcctaccaaggcgacgatctgtagctggtctgagaggacgaccagccacactgggactgagacacggcccagactcctacgggaggcagcagtggggaattttggacaatgggcgcaagcctgatccagcaatgccgcgtgtgtgaagaaggccttcgggttgtaaagcacttttgtccggaaagaaaacctcgtggttaatacccgtgggggatgacggtaccggaagaataagcaccggctaactacgtgccagcagccgcggtaatacgtagggtgcaagcgttaatcggaattactgggcgtaaagcgtgcgcaggcggttcgctaagacagatgtgaaatccccgggcttaacctgggaactgcatttgtgactggcgggctagagtatggcagaggggggtagaattccacgtgtagcagtgaaatgcgtagagatgtggaggaataccgatggcgaaggcagccccctgggccaatactgacgctcatgcacgaaagcgtggggagcaaacaggattagataccctggtagtccacgccctaaacgatgtcaactagttgtcgggtcttcattgacttggtaacgtagctaacgcgtgaagttgaccgcctggggagtacggtcgcaagattaaaactcaaaggaattgacggggacccgcacaagcggtggatgatgtggattaattcgatgcaacgcgaaaaaccttacctacccttgacatgtatggaaccctgctgagaggtgggggtgcccgaaagggagccataacacaggtgctgcatggctgtcgtcagctcgtgtcgtgagatgttgggttaagtcccgcaacgagcgcaacccttgtccctagttgctacgcaagagcactccagggagactgccggtgacaaaccggaggaaggtggggatgacgtcaagtcctcatggcccttatgggtagggcttcacacgtcatacaatggtcggaacagagggtcgccaacccgcgagggggagccaatcccagaaaaccgatcgtagtccggatcgcactctgcaactcgagtgcgtgaagctggaatcgctagtaatcgcggatcagcatgccgcggtgaatacgttcccgggtcttgtacacaccgcccgtcacaccatgggagtgggtttcaccagaagtaggtagcctaacctgcaaaggagggcgcttaccacggtgggattcatgactggggtg

SEQ ID NO: 2421 - DNA, 1453 bp, unidentified
  source 1..1453: mol_type = unassigned DNA; note = Paraburkholderia caribensis
attgaacgctggcggcatgccttacacatgcaagtcggacggcagcgcgggggcaaccctggcggcgagtggcgaacgggtgagtaatacatcggaacgtgtcctggagtgggggatagcccggcgaaagccggattaataccgcatacgctctgtggaggaaagcgggggatcttcggacctcgcgctcaaggggcggccgatggcagattagctagttggtggggtaaaggcctaccaaggcgacgatctgtagctggtctgagaggacgaccagccacactgggactgagacacggcccagactcctacgggaggcagcagtggggaattttggacaatgggggcaaccctgatccagcaatgccgcgtgtgtgaagaaggccttcgggttgtaaagcacttttgtccggaaagaaaaccgcttctctaatacagaggcgggatgacggtaccggaagaataagcaccggctaactacgtgccagcagccgcggtaatacgtagggtgcaagcgttaatcggaattactgggcgtaaagcgtgcgcaggcggttcgctaagaccgatgtgaaatccccgggcttaacctgggaactgcattggtgactggcgggctagagtatggcagaggggggtagaattccacgtgtagcagtgaaatgcgtagagatgtggaggaataccgatggcgaaggcagccccctgggccaatactgacgctcatgcacgaaagcgtggggagcaaacaggattagataccctggtagtccacgccctaaacgatgtcaactagttgtcgggtcttcattgacttggtaacgaagctaacgcgtgaagttgaccgcctggggagtacggtcgcaagattaaaactcaaaggaattgacggggacccgcacaagcggtggatgatgtggattaattcgatgcaacgcgaaaaaccttacctacccttgacatgtacggaaccttgctgagaggtgagggtgcccgaaagggagccgtaacacaggtgctgcatggctgtcgtcagctcgtgtcgtgagatgttgggttaagtcccgcaacgagcgcaacccttgtccctagttgctacgcaagagcactctagggagactgccggtgacaaaccggaggaaggtggggatgacgtcaagtcctcatggcccttatgggtagggcttcacacgtcatacaatggtcggaacagagggttgccaagccgcgaggtggagccaatcccagaaaaccgatcgtagtccggatcgcagtctgcaactcgactgcgtgaagctggaatcgctagtaatcgcggatcagcatgccgcggtgaatacgttcccgggtcttgtacacaccgcccgtcacaccatgggagtgggttttaccagaagtggctagtctaaccgcaaggaggacggtcaccacggtaggattcatgactggggtg

SEQ ID NO: 2422 - DNA, 1395 bp, unidentified
  source 1..1395: mol_type = unassigned DNA; note = Paraburkholderia diazotrophica
cctggcggcgagtggcgaacgggtgagtaagacatcggaacgtgtcctggagtgggggatagcccggcgaaagccggattaataccgcatacgctctgtggaggaaagcgggggatcgaaagacctcgcgctcaaggggcggccgatggcagattagctagttggtggggtaaaggcctaccaaggcgacgatctgtagctggtctgagaggacgaccagccacactgggactgagacacggcccagactcctacgggaggcagcagtggggaattttggacaatgggggcaaccctgatccagcaatgccgcgtgtgtgaagaaggccttcgggttgtaaagcacttttgtccggaaagaaaactttcgccctaatacggcgggaggatgacggtaccggaagaataagcaccggctaactacgtgccagcagccgcggtaatacgtagggtgcgagcgttaatcggaattactgggcgtaaagcgtgcgcaggcggtgctgtaagaccgatgtgaaatccccgggcttaacctgggaactgcattggtgactgcagcgctggagtatggcagaggggggtggaattccacgtgtagcagtgaaatgcgtagagatgtggaggaacaccgatggcgaaggcagccccctgggccaatactgacgctcatgcacgaaagcgtggggagcaaacaggattagataccctggtagtccacgccctaaacgatgtcaactggttgtcgggccttcattggcttggtaacgtagctaacgcgtgaagttgaccgcctggggagtacggtcgcaagattaaaactcaaaggaattgacggggacccgcacaagcggtggatgatgtggattaattcgatgcaacgcgaaaaaccttacctacccttgacatggatggaaccttgctgagaggcgagggtgcccgaaagggagccatcacacaggtgctgcatggctgtcgtcagctcgtgtcgtgagatgttgggttaagtcccgcaacgagcgcaacccttgtccctggttgctacgcaagagcactccagggagactgccggtgacaaaccggaggaaggtggggatgacgtcaagtcctcatggcccttaggggtagggcttcacacgtcatacaatggtgggaacagagggtcgagaagccgcgaggtggagccaatcccagaaaaccgatcgtagtccggatcgcagtctgcaactcgactgcgtgaagctggaatcgctagtaatcgcggatcagcatgccgcggtgaatacgttcccgggtcttgtacacaccgcccgtcacaccatgggagtgggttttaccagaagtggctagtctaaccgcaaggaggacggtcaccacggtaggattcatgactggggg

SEQ ID NO: 2423 - DNA, 1427 bp, unidentified
  source 1..1427: mol_type = unassigned DNA; note = Paraburkholderia dipogonis
tgcaagtcgaacggcagcacggacttcggtctggtggcgagtggcgaacgggtgagtaatacatcggaacgtgtcctgtagtgggggatagcccggcgaaagccggattaataccgcatacgatctgtggatgaaagcgggggatccttcgggacctcgcgctacaggggcggccgatggcagattagctagttggtggggtaaaggcctaccaaggcgacgatctgtagctggtctgagaggacgaccagccacactgggactgagacacggcccagactcctacgggaggcagcagtggggaattttggacaatgggcgcaagcctgatccagcaatgccgcgtgtgtgaagaaggccttcgggttgtaaagcacttttgtccggaaagaaaacctcttggttaatacctgagggggatgacggtaccggaagaataagcaccggctaactacgtgccagcagccgcggtaatacgtagggtgcaagcgttaatcggaattactgggcgtaaagcgtgcgcaggcggttcgctaagacagatgtgaaatccccgggcttaacctgggaactgcatttgtgactggcgggctagagtatggcagaggggggtagaattccacgtgtagcagtgaaatgcgtagagatgtggaggaataccgatggcgaaggcagccccctgggccaatactgacgctcatgcacgaaagcgtggggagcaaacaggattagataccctggtagtccacgccctaaacgatgtcaactagttgtcgggtcttcattgacttggtaacgtagctaacgcgtgaagttgaccgcctggggagtacggtcgcaagattaaaactcaaaggaattgacggggacccgcacaagcggtggatgatgtggattaattcgatgcaacgcgaaaaaccttacctacccttgacatgtatggaaccctgctgagaggtgggggtgcccgaaagggagccataacacaggtgctgcatggctgtcgtcagctcgtgtcgtgagatgttgggttaagtcccgcaacgagcgcaacccttgtccctagttgctacgcaagagcactctagggagactgccggtgacaaaccggaggaaggtggggatgacgtcaagtcctcatggcccttatgggtagggcttcacacgtcatacaatggtcggaacagagggtcgccaacccgcgagggggagccaatcccagaaaaccgatcgtagtccggatcgcactctgcaactcgagtgcgtgaagctggaatcgctagtaatcgcggatcagcatgccgcggtgaatacgttcccgggtcttgtacacaccgcccgtcacaccatgggagtgggttttaccagaagtggctagtctaaccgcaaggaggacggtcaccacggtaggattcatgactggggtg

SEQ ID NO: 2424 - DNA, 1426 bp, unidentified
  source 1..1426: mol_type = unassigned DNA; note = Paraburkholderia eburnea
atgacgctggcggcatgcttacacatgcagtcgaacggcagcacgggtgcttgcacctggtggcgagtggcgaacgggtgagtaatacatcggaacatgtccagtagtgggggatagcccggcgaaagccggattaataccgcatacgctctatggaggaaagcgggggatcgaaagacctcgcgctataggggtggccgatggcggattagctagttggtggggtaaaggcctaccaaggcgacgatccgtagctggtctgagaggacgaccagccacactgggactgagacacggcccagactcctacgggaggcagcagtggggaattttggacaatgggggcaaccctgatccagcaatgccgcgtgtgtgaagaaggccttcgggttgtaaagcactttgtccggaaagaaatccctggtcctaatatggccgggggatgacggtaccggaagaataagcaccggctaactacgtgccagcagccgcggtaatacgtagggtgcaagcgttaatcggaattactgggcgtaaagcgtgcgcaggcggtgatgcaagaccgatgtgaaatccccgggtcaacctgggaactgcattggtgactgcatcgctagagtatggcagaggggggtagaattccacgtgtagcagtgaaatgcgtagagatgtggaggaataccgatggcgaaggcagccccctgggtcaatactgacgctcatgcacgaaagcgtggggagcaaacaggattagataccctggtagtccacgccctaaacgatgtcaactggttgtcgggtcttcattgacttggtaacgtagctaacgcgtgaagttgaccgcctggggagtacggtcgcaagattaaaactcaaaggaattgacggggacccgcacaagcggtggatgatgtggattaattcgatgcaacgcgaaaaaccttacctacccttgacatggatggaagtctgctgagaggcggatgtgcccgaaagggagccatcacacaggtgctgcatggctgtcgtcagctcgtgtcgtgagatgttgggttaagtcccgcaacgagcgcaacccttgtccctagttgctacgcaagagcactccagggagactgccggtgacaaaccggaggaaggtggggatgacgtcaagtcctcatggcccttatgggtagggcttcacacgtcatacaatggtcggaacagagggttgccaagccgcgaggtggagccaatcccagaaaaccgatcgtagtccggatcgcagtctgcaactcgactgcgtgaagctggaatcgctagtaatcgcggatcagcatgccgcggtgaatacgttcccgggtcttgtacacaccgcccgtcacaccatgggagtgggttttgccagaagtggctagtctaaccgcaaggaggacggtcacca

SEQ ID NO: 2425 - DNA, 1455 bp, unidentified
  source 1..1455: mol_type = unassigned DNA; note = Paraburkholderia endofungorum
attgaacgctggcggcatgccttacacatgcaagtcggacggcagcgcgggcttcggcctggcggcgagtggcgaacgggtgagtaatacatcggaacgtgtcctagagtgggggatagcccggcgaaagccggattaataccgcatacgctctgaggaggaaagcgggggactcgcaagggcctcgcgctcaaggggcggccgatggcagattagctagttggtagggtaaaggcctaccaaggcgacgatctgtagctggtctgagaggacgaccagccacactgggactgagacacggcccagactcctacgggaggcagcagtggggaattttggacaatgggggcaaccctgatccagcaatgccgcgtgtgtgaagaaggccttcgggttgtaaagcacttttgtccggaaagaaaacggcctggcgaataactgggttggatgacggtaccggaagaataagcaccggctaactacgtgccagcagccgcggtaatacgtagggtgcgagcgttaatcggaattactgggcgtaaagcgtgcgcaggcggtttgctaagaccgatgtgaaatccccgggctcaacctgggaactgcattggtgactggcaggctagagtatggcagagggaggtagaattccacgtgtagcagtgaaatgcgtagagatgtggaggaataccgatggcgaaggcagcctcctgggccaatactgacgctcatgcacgaaagcgtggggagcaaacaggattagataccctggtagtccacgccctaaacgatgtcaactagttgttggggattcatttccttagtaacgtagctaacgcgtgaagttgaccgcctggggagtacggtcgcaagattaaaactcaaaggaattgacggggacccgcacaagcggtggatgatgtggattaattcgatgcaacgcgaaaaaccttacctacccttgacatggtcggaaccctgctgagaggtgggggtgctcgaaagagaaccggcgcacaggtgctgcatggctgtcgtcagctcgtgtcgtgagatgttgggttaagtcccgcaacgagcgcaacccttgtccctagttgctacgcaagagcactctagggagactgccggtgacaaaccgaaggaaggtggggatgacgtcaagtcctcatggcccttatgggtagggcttcacacgtcatacaatggtcggaacaaagggttgccaacccgcgagggggagctaatcccagaaaaccgatcgtagtccggattgcagtctgcaactcgactgcatgaagctggaatcgctagtaatcgcggatcagcatgtcgcggtgaatacgttcccgggtcttgtacacaccgcccgtcacaccatgggagtgggttttaccagaagtggctagtctaaccgcaaggaggacggtcaccacggtaggattcatgactggggtg

SEQ ID NO: 2426 - DNA, 1453 bp, unidentified
  source 1..1453: mol_type = unassigned DNA; note = Paraburkholderia fungorum
attgaacgctggcggcatgccttacacatgcaagtcgaacggcagcacgggggcaaccctggtggcgagtggcgaacgggtgagtaatacatcggaacgtgtcctgtagtgggggatagcccggcgaaagccggattaataccgcatacgctctacggaggaaagggggggatcttaggacctcccgctacaggggcggccgatggcagattagctagttggtggggtaaaggcctaccaaggcgacgatctgtagctggtctgagaggacgaccagccacactgggactgagacacggcccagactcctacgggaggcagcagtggggaattttggacaatgggggcaaccctgatccagcaatgccgcgtgtgtgaagaaggccttcgggttgtaaagcacttttgtccggaaagaaaacgccgtggttaatacccgtggcggatgacggtaccggaagaataagcaccggctaactacgtgccagcagccgcggtaatacgtagggtgcaagcgttaatcggaattactgggcgtaaagcgtgcgcaggcggtccgctaagacagatgtgaaatccccgggcttaacctgggaactgcatttgtgactggcgggctagagtatggcagaggggggtagaattccacgtgtagcagtgaaatgcgtagagatgtggaggaataccgatggcgaaggcagccccctgggccaatactgacgctcatgcacgaaagcgtggggagcaaacaggattagataccctggtagtccacgccctaaacgatgtcaactagttgtcgggtcttcattgacttggtaacgtagctaacgcgtgaagttgaccgcctggggagtacggtcgcaagattaaaactcaaaggaattgacggggacccgcacaagcggtggatgatgtggattaattcgatgcaacgcgaaaaaccttacctacccttgacatgtatggaatcctgctgagaggtgggagtgcccgaaagggagccataacacaggtgctgcatggctgtcgtcagctcgtgtcgtgagatgttgggttaagtcccgcaacgagcgcaacccttgtccctagttgctacgcaagagcactctagggagactgccggtgacaaaccggaggaaggtggggatgacgtcaagtcctcatggcccttatgggtagggcttcacacgtcatacaatggtcggaacagagggtcgccaacccgcgagggggagccaatcccagaaaaccgatcgtagtccggatcgcactctgcaactcgagtgcgtgaagctggaatcgctagtaatcgcggatcagcatgccgcggtgaatacgttcccgggtcttgtacacaccgcccgtcacaccatgggagtgggttttaccagaagtggctagtctaaccgcaaggaggacggtcaccacggtaggattcatgactggggtg

SEQ ID NO: 2427 - DNA, 1453 bp, unidentified
  source 1..1453: mol_type = unassigned DNA; note = Paraburkholderia ginsengiterrae
attgaacgctggcggcatgccttacacatgcaagtcgaacggcagcacgggagcaatcctggtggcgagtggcgaacgggtgagtaatacatcggaacgtgtcctggagtgggggatagcccggcgaaagccggattaataccgcatacgctctgaggaggaaagggggggatcgcaagacctctcgctcaaggggcggccgatggcagattagctagttggtggggtaaaggcctaccaaggcgacgatctgtagctggtctgagaggacgaccagccacactgggactgagacacggcccagactcctacgggaggcagcagtggggaattttggacaatgggggcaaccctgatccagcaatgccgcgtgtgtgaagaaggccttcgggttgtaaagcacttttgtccggaaagaaaacttcggggttaatacccctggaggatgacggtaccggaagaataagcaccggctaactacgtgccagcagccgcggtaatacgtagggtgcgagcgttaatcggaattactgggcgtaaagcgtgcgcaggcggtccgctaagaccgatgtgaaatccccgggcttaacctgggaactgcattggtgactggcgggctagagtatggcagaggggggtagaattccacgtgtagcagtgaaatgcgtagagatgtggaggaataccgatggcgaaggcagccccctgggccaatactgacgctcatgcacgaaagcgtggggagcaaacaggattagataccctggtagtccacgccctaaacgatgtcaactagttgtcgggtcttcattgacttggtaacgtagctaacgcgtgaagttgaccgcctggggagtacggtcgcaagattaaaactcaaaggaattgacggggacccgcacaagcggtggatgatgtggattaattcgatgcaacgcgaaaaaccttacctacccttgacatgtatggaatcctgctgagaggtgggagtgcccgaaagggagccataacacaggtgctgcatggctgtcgtcagctcgtgtcgtgagatgttgggttaagtcccgcaacgagcgcaacccttgtccctagttgctacgcaagagcactccagggagactgccggtgacaaaccggaggaaggtggggatgacgtcaagtcctcatggcccttatgggtagggcttcacacgtcatacaatggtcggaacagagggtcgccaagccgcgaggtggagccaatcccagaaaaccgatcgtagtccggatcgcactctgcaactcgagtgcgtgaagctggaatcgctagtaatcgcggatcagcatgccgcggtgaatacgttcccgggtcttgtacacaccgcccgtcacaccatgggagtgggttttaccagaagtggctagtctaaccgcaaggaggacggtcaccacggtaggattcatgactggggtg

SEQ ID NO: 2428 - DNA, 1435 bp, unidentified
  source 1..1435: mol_type = unassigned DNA; note = Paraburkholderia graminis
cttacgcatgcaattcgaacggcagcacgggagcaatcctggtggcgattggcgaacgggtgagtaatacatcggaacgtgtcctgtagtgggggatagcccggcgaaagccggattaataccgcatacgctctgcggaggaaagcgggggatccttcgggacctcgcgctacaggggcggccgatggcagattagctagttggtggggtaaaggcctaccaaggcgacgatctgtagctggtctgagaggacgaccagccacactgggactgagacacggcccagactcctacgggaggcagcagtggggaattttggacaatgggcgcaagcctgatccagcaatgccgcgtgtgtgaagaaggccttcgggttgtaaagcacttttgtccggaaagaaaactgcctggctaatatccgggcgggatgacggtaccggaagaataagcaccggctaactacgtgccagcagccgcggtaatacgtagggtgcaagcgttaatcggaattactgggcgtaaagcgtgcgcaggcggttcgctaagacagatgtgaaatccccgggcttaacctgggaactgcatttgtgactggcgggctagagtatggcagaggggggtagaattccacgtgtagcagtgaaatgcgtagagatgtggaggaataccgatggcgaaggcagccccctgggccaatactgacgctcatgcacgaaagcgtggggagcaaacaggattagataccctggtagtccacgccctaaacgatgtcaactggttgtcgggccttcattggcttggtaacgtagctaacgcgtgaagttgaccgcctggggagtacggtcgcaagattaaaactcaaaggaattgacggggacccgcacaagcggtggatgatgtggattaattcgatgcaacgcgaaaaaccttacctacccttgacatgtacggaagtccgctgagaggtggatgtgcccgaaagggagccgtaacacaggtgctgcatggctgtcgtcagctcgtgtcgtgagatgttgggttaagtcccgcaacgagcgcaacccttgtccctagttgctacgcaagagcactccagggagactgccggtgacaaaccggaggaaggtggggatgacgtcaagtcctcatggcccttatgggtagggcttcacacgtcatacaatggtcggaacagagggtcgccaagccgcgaggtggagccaatcccagaaaaccgatcgtagtccggatcgcactctgcaactcgagtgcgtgaagctggaatcgctagtaatcgcggatcagcatgccgcggtgaatacgttcccgggtcttgtacacaccgcccgtcacaccatgggagtgggttttaccagaagtggctagtctaaccgcaaggaggacggtcaccacggtaggattcatgactggggtg

SEQ ID NO: 2429 - DNA, 1453 bp, unidentified
  source 1..1453: mol_type = unassigned DNA; note = Paraburkholderia hospita
attgaacgctggcggcatgccttacacatgcaagtcgaacggcagcacgggggcaaccctggtggcgagtggcgaacgggtgagtaatacatcggaacgtgtcctggagtgggggatagcccggcgaaagccggattaataccgcatacgatctctggatgaaagcgggggaccgaaaggcctcgcgctcaaggggcggccgatggcagattagctagttggtggggtaaaggcctaccaaggcgacgatctgtagctggtctgagaggacgaccagccacactgggactgagacacggcccagactcctacgggaggcagcagtggggaattttggacaatgggggcaaccctgatccagcaatgccgcgtgtgtgaagaaggccttcgggttgtaaagcacttttgtccggaaagaaaaccgcytskctaatacaggggkgggatgacggtaccggaagaataagcaccggctaactacgtgccagcagccgcggtaatacgtagggtgcgagcgttaatcggaattactgggcgtaaagcgtgcgcaggcggttcgctaagaccgatgtgaaatccccgggcttaacctgggaactgcattggtgactggcgggctagagtatggcagaggggggtagaattccacgtgtagcagtgaaatgcgtagagatgtggaggaataccgatggcgaaggcagccccctgggccaatactgacgctcatgcacgaaagcgtggggagcaaacaggattagataccctggtagtccacgccctaaacgatgtcaactagttgtcgggtcttcattgacttggtaacgaagctaacgcgtgaagttgaccgcctggggagtacggtcgcaagattaaaactcaaaggaattgacggggacccgcacaagcggtggatgatgtggattaattcgatgcaacgcgaaaaaccttacctacccttgacatgtacggaaccttgccgagaggtgagggtgcccgaaagggagccgtaacacaggtgctgcatggctgtcgtcagctcgtgtcgtgagatgttgggttaagtcccgcaacgagcgcaacccttgtccctagttgctacgcaagagcactctagggagactgccggtgacaaaccggaggaaggtggggatgacgtcaagtcctcatggcccttatgggtagggcttcacacgtcatacaatggtcggaayagagggttgccaagccgcgaggtggagccaatcccagaaaaccgatcgtagtccggatcgcagtctgcaactcgactgcgtgaagctggaatcgctagtaatcgcggatcagcatgccgcggtgaatacgttcccgggtcttgtacacaccgcccgtcacaccatgggagtgggttttaccagaagtggctagtctaaccgcaaggaggacggtcaccacggtaggattcatgactggggtg

SEQ ID NO: 2430 - DNA, 1414 bp, unidentified
  source 1..1414: mol_type = unassigned DNA; note = Paraburkholderia insulsa
agtcgaacggcagcacgggggcaaccctggtggcgagtggcgaacgggtgagtaatacatcggaacgtgtcctgtagtgggggatagcccggcgaaagccggattaataccgcatacgctctacggaggaaagggggggatcttaggacctcccgctacaggggcggccgatggcagattagctagttggtggggtaaaggcctaccaaggcgacgatctgtagctggtctgagaggacgaccagccacactgggactgagacacggcccagactcctacgggaggcagcagtggggaattttggacaatgggcgaaagcctgatccagcaatgccgcgtgtgtgaagaaggccttcgggttgtaaagcacttttgtccggaaagaaaacgccgtggttaatacccgtggcggatgacggtaccggaagaataagcaccggctaactacgtgccagcagccgcggtaatacgtagggtgcaagcgttaatcggaattactgggcgtaaagcgtgcgcaggcggtccgctaagacagatgtgaaatccccgggcttaacctgggaactgcatttgtgactggcgggctagagtatggcagaggggggtagaattccacgtgtagcagtgaaatgcgtagagatgtggaggaataccgatggcgaaggcagccccctgggccaatactgacgctcatgcacgaaagcgtggggagcaaacaggattagataccctggtagtccacgccctaaacgatgtcaactagttgtcgggtcttcattgacttggtaacgtagctaacgcgtgaagttgaccgcctggggagtacggtcgcaagattaaaactcaaaggaattgacggggacccgcacaagcggtggatgatgtggattaattcgatgcaacgcgaaaaaccttacctacccttgacatgtatggaatcctgctgagaggtgggagtgcccgaaagggagccataacacaggtgctgcatggctgtcgtcagctcgtgtcgtgagatgttgggttaagtcccgcaacgagcgcaacccttgtccctagttgctacgcaagagcactctagggagactgccggtgacaaaccggaggaaggtggggatgacgtcaagtcctcatggcccttatgggtagggcttcacacgtcatacaatggtcggaacagagggtcgccaacccgcgagggggagccaatcccagaaaaccgatcgtagtccggatcgcactctgcaactcgagtgcgtgaagctggaatcgctagtaatcgcggatcagcatgccgcggtgaatacgttcccgggtcttgtacacaccgcccgtcacaccatgggagtgggttttaccagaagtggctagtctaaccgcaaggaggacggtcaccacggtaggattcatgac

SEQ ID NO: 2431 - DNA, 1453 bp, unidentified
  source 1..1453: mol_type = unassigned DNA; note = Paraburkholderia megapolitana
attgaacgctggcggcatgccttacacatgcaagtcgaacggcagcgcgggagcaatcctggcggcgagtggcgaacgggtgagtaatacatcggaacgtgtcctgtagtgggggatagcccggcgaaagccggattaataccgcatacgctctacggaggaaagggggggatcttaggacctctcgctacaggggcggccgatggcggattagctagttggtggggtaaaggcctaccaaggcgacgatccgtagctggtctgagaggacgaccagccacactgggactgagacacggcccagactcctacgggaggcagcagtggggaattttggacaatgggggcaaccctgatccagcaatgccgcgtgtgtgaagaaggccttcgggttgtaaagcacttttgtccggaaagaaatcatcctggttaatacctggggtggatgacggtaccggaagaataagcaccggctaactacgtgccagcagccgcggtaatacgtagggtgcaagcgttaatcggaattactgggcgtaaagcgtgcgcaggcggttcgctaagacagatgtgaaatccccgggcttaacctgggaactgcatttgtgactggcgggctagagtatggcagaggggggtagaattccacgtgtagcagtgaaatgcgtagagatgtggaggaataccgatggcgaaggcagccccctgggccaatactgacgctcatgcacgaaagcgtggggagcaaacaggattagataccctggtagtccacgccctaaacgatgtcaactagttgtcgggtcttcattgacttggtaacgtagctaacgcgtgaagttgaccgcctggggagtacggtcgcaagattaaaactcaaaggaattgacggggacccgcacaagcggtggatgatgtggattaattcgatgcaacgcgaaaaaccttacctacccttgacatgtacggaatcctgctgagaggtgggagtgcccgaaagggagccgtaacacaggtgctgcatggctgtcgtcagctcgtgtcgtgagatgttgggttaagtcccgcaacgagcgcaacccttgtccctagttgctacgcaagagcactccagggagactgccggtgacaaaccggaggaaggtggggatgacgtcaagtcctcatggcccttatgggtagggcttcacacgtcatacaatggtcggaacagagggtcgccaacccgcaagggggagccaatcccagaaaaccgatcgtagtccggatcgcagtctgcaactcgactgcgtgaagctggaatcgctagtaatcgcggatcagcatgccgcggtgaatacgttcccgggtcttgtacacaccgcccgtcacaccatgggagtgggttttaccagaagtggctagtctaaccgcaaggaggacggtcaccacggtaggattcatgactggggtg

SEQ ID NO: 2432 - DNA, 1453 bp, unidentified
  source 1..1453: mol_type = unassigned DNA; note = Paraburkholderia monticola
attgaacgctggcggcatgccttacacatgcaagtcgaacggcagcacgggagcaatcctggtggcgagtggcgaacgggtgagtaatacatcggaacgtgtcctggagtgggggatagcccggcgaaagccggattaataccgcatacgctctatggaggaaagcgggggatcttcggacctcgcgctcaaggggcggccgatggcagattaggtagttggtggggtaaaggcctaccaagccgacgatctgtagctggtctgagaggacgaccagccacactgggactgagacacggcccagactcctacgggaggcagcagtggggaattttggacaatgggcgcaagcctgatccagcaatgccgcgtgtgtgaagaaggccttcgggttgtaaagcacttttgtccgggaagaaatccctggtcctaatatggccgggggatgacggtactggaagaataagcaccggctaactacgtgccagcagccgcggtaatacgtagggtgcgagcgttaatcggaattactgggcgtaaagcgtgcgcaggcggtgatgtaagaccgatgtgaaatccccgggcttaacctgggaactgcattggtgactgcatcgctcgagtatggcagaggggggtagaattccacgtgtagcagtgaaatgcgtagagatgtggaggaataccgatggcgaaggcagccccctgggtcaatactgacgctcatgcacgaaagcgtggggagcaaacaggattagataccctggtagtccacgccctaaacgatgtcaactggttgtcgggccttcattggcttggtaacgtagctaacgcgtgaagttgaccgcctggggagtacggtcgcaagattaaaactcaaaggaattgacggggacccgcacaagcggtggatgatgtggattaattcgatgcaacgcgaaaaaccttacctacccttgacatgtatggaaccctgctgagaggtgggggtgcccgaaagggagccataacacaggtgctgcatggctgtcgtcagctcgtgtcgtgagatgttgggttaagtcccgcaacgagcgcaacccttgtccctagttgctacgcaagagcactccagggagactgccggtgacaaaccggaggaaggtggggatgacgtcaagtcctcatggcccttatgggtagggcttcacacgtcatacaatggtcggaacagagggttgccaagccgcgaggtggagccaatcccagaaaaccgatcgtagtccggatcgcactctgcaactcgagtgcgtgaagctggaatcgctagtaatcgcggatcagcatgccgcggtgaatacgttcccgggtcttgtacacaccgcccgtcacaccatgggagtgggttttaccagaagtggctagtctaaccgcaaggaggacggtcaccacggtaggattcatgactggggtg

SEQ ID NO: 2433 - DNA, 1421 bp, unidentified
  source 1..1421: mol_type = unassigned DNA; note = Paraburkholderia phenazinium
agtcgaacggcagcacgggggcaaccctggtggcgagtggcgaacgggtgagtaatacatcggaacgtgtcctgtagtgggggatagcccggcgaaagccggattaataccgcatacgctctacggaggaaagggggggatcttaggacctctcgctacaggggcggccgatggcagattagctagttggtggggtaaaggcctaccaaggcgacgatctgtagctggtctgagaggacgaccagccacactgggactgagacacggcccagactcctacgggaggcagcagtggggaattttggacaatgggggcaaccctgatccagcaatgccgcgtgtgtgaagaaggccttcgggttgtaaagcacttttgtccggaaagaaatcctctgggttaataccccggggggatgacggtaccggaagaataagcaccggctaactacgtgccagcagccgcggtaatacgtagggtgcaagcgttaatcggaattactgggcgtaaagcgtgcgcaggcggtccgctaagacagatgtgaaatccccgggcttaacctgggaactgcatttgtgactggcgggctagagtatggcagaggggggtagaattccacgtgtagcagtgaaatgcgtagagatgtggaggaataccgatggcgaaggcagccccctgggccaatactgacgctcatgcacgaaagcgtggggagcaaacaggattagataccctggtagtccacgccctaaacgatgtcaactagttgtcgggtcttcattgacttggtaacgtagctaacgcgtgaagttgaccgcctggggagtacggtcgcaagattaaaactcaaaggaattgacggggacccgcacaagcggtggatgatgtggattaattcgatgcaacgcgaaaaaccttacctacccttgacatggtcggaaccctgctgaaaggtgggggtgctcgaaagagaaccgatacacaggtgctgcatggctgtcgtcagctcgtgtcgtgagatgttgggttaagtcccgcaacgagcgcaacccttgtccctagttgctacgcaagagcactctagggagactgccggtgacaaaccggaggaaggtggggatgacgtcaagtcctcatggcccttatgggtagggcttcacacgtcatacaatggtcggaacagagggtcgccaacccgcgagggggagccaatcccagaaaaccgatcgtagtccggatcgcactctgcaactcgagtgcgtgaagctggaatcgctagtaatcgcggatcagcatgccgcggtgaatacgttcccgggtcttgtacacaccgcccgtcacaccatgggagtgggttttaccagaagtggctagtctaaccgcaaggaggacggtcaccacggtaggattcatgactggggtg

SEQ ID NO: 2434 - DNA, 1453 bp, unidentified
  source 1..1453: mol_type = unassigned DNA; note = Paraburkholderia phenoliruptrix
attgaacgctggcggcatgccttacacatgcaagtcggacggcagcgcgggcttcggcctggcggcgagtggcgaacgggtgagtaatacatcggaacgtgtcctgtagtgggggatagcccggcgaaagccggattaataccgcatacgctctgcggaggaaagcgggggatccttcgggacctcgcgctacaggggcggccgatggcagattagctagttggtggggtaaaggcctaccaaggcgacgatctgtagctggtctgagaggacgaccagccacactgggactgagacacggcccagactcctacgggaggcagcagtggggaattttggacaatgggggcaaccctgatccagcaatgccgcgtgtgtgaagaaggccttcgggttgtaaagcacttttgtccggaaagaaaacgtcgtggctaatacccgtggcggatgacggtaccggaagaataagcaccggctaactacgtgccagcagccgcggtaatacgtagggtgcaagcgttaatcggaattactgggcgtaaagcgtgcgcaggcggttcgctaagacagatgtgaaatccccgggcttaacctgggaactgcatttgtgactggcgggctagagtatggcagaggggggtagaattccacgtgtagcagtgaaatgcgtagagatgtggaggaataccgatggcgaaggcagccccctgggccaatactgacgctcatgcacgaaagcgtggggagcaaacaggattagataccctggtagtccacgccctaaacgatgtcaactggttgtcgggccttcattggcttggtaacgtagctaacgcgtgaagttgaccgcctggggagtacggtcgcaagattaaaactcaaaggaattgacggggacccgcacaagcggtggatgatgtggattaattcgatgcaacgcgaaaaaccttacctacccttgacatggatggaatcccgctgagaggtgggagtgcccgaaagggagccatcacacaggtgctgcatggctgtcgtcagctcgtgtcgtgagatgttgggttaagtcccgcaacgagcgcaacccttgtccctagttgctacgcaagagcactccagggagactgccggtgacaaaccggaggaaggtggggatgacgtcaagtcctcatggcccttatgggtagggcttcacacgtcatacaatggtcggaacagagggtcgccaagccgcgaggtggagccaatcccagaaaaccgatcgtagtccggatcgcactctgcaactcgagtgcgtgaagctggaatcgctagtaatcgcggatcagcatgccgcggtgaatacgttcccgggtcttgtacacaccgcccgtcacaccatgggagtgggttttaccagaagtggctagtctaaccgcaaggaggacggtcaccacggtaggattcatgactgggg

SEQ ID NO: 2435 - DNA, 1453 bp, unidentified
  source 1..1453: mol_type = unassigned DNA; note = Paraburkholderia phymatum
attgaacgctggcggcatgccttacacatgcaagtcggacggcagcgcgggcttcggcctggcggcgagtggcgaacgggtgagtaatacatcggaacgtgtcctggagtgggggatagcccggcgaaagccggattaataccgcatacgctctgaggaggaaagcgggggatcttcggacctcgcgctcaaggggcggccgatggcagattagctagttggtggggtaaaggcctaccaaggcgacgatctgtagctggtctgagaggacgaccagccacactgggactgagacacggcccagactcctacgggaggcagcagtggggaattttggacaatgggggcaaccctgatccagcaatgccgcgtgtgtgaagaaggccttcgggttgtaaagcacttttgtccggaaagaaaacttcgccgccaatagcggtggaggatgacggtaccggaagaataagcaccggctaactacgtgccagcagccgcggtaatacgtagggtgcgagcgttaatcggaattactgggcgtaaagcgtgcgcaggcggttcgctaagaccgatgtgaaatccccgggcttaacctgggaactgcattggtgactggcgggctagagtatggcagaggggggtagaattccacgtgtagcagtgaaatgcgtagagatgtggaggaataccgatggcgaaggcagccccctgggccaatactgacgctcatgcacgaaagcgtggggagcaaacaggattagataccctggtagtccacgccctaaacgatgtcaactagttgtcgggtcttcattgacttggtaacgtagctaacgcgtgaagttgaccgcctggggagtacggtcgcaagattaaaactcaaaggaattgacggggacccgcacaagcggtggatgatgtggattaattcgatgcaacgcgaaaaaccttacctacccttgacatgtacggaaccttgccgagaggtgagggtgcccgaaagggagccgtaacacaggtgctgcatggctgtcgtcagctcgtgtcgtgagatgttgggttaagtcccgcaacgagcgcaacccttgtccctagttgctacgcaagagcactctagggagactgccggtgacaaaccggaggaaggtggggatgacgtcaagtcctcatggcccttatgggtagggcttcacacgtcatacaatggtcggaacagagggttgccaagccgcgaggtggagccaatcccagaaaaccgatcgtagtccggatcgcagtctgcaactcgactgcgtgaagctggaatcgctagtaatcgcggatcagcatgccgcggtgaatacgttcccgggtcttgtacacaccgcccgtcacaccatgggagtgggttttaccagaagtggctagtctaaccgcaaggaggacggtcaccacggtaggattcatgactggggtg

SEQ ID NO: 2436 - DNA, 1455 bp, unidentified
  source 1..1455: mol_type = unassigned DNA; note = Paraburkholderia phytofirmans
attgaacgctggcggcatgccttacacatgcaagtcgaacggcagcacgggggcaaccctggtggcgagtggcgaacgggtgagtaatacatcggaacgtgtcctgtagtgggggatagcccggcgaaagccggattaataccgcatacgatctgtggatgaaagcgggggatccttcgggacctcgcgctacaggggcggccgatggcagattagctagttggtggggtaaaggcctaccaaggcgacgatctgtagctggtctgagaggacgaccagccacactgggactgagacacggcccagactcctacgggaggcagcagtggggaattttggacaatgggcgcaagcctgatccagcaatgccgcgtgtgtgaagaaggccttcgggttgtaaagcacttttgtccggaaagaaaacctctgggttaataccctggggggatgacggtaccggaagaataagcaccggctaactacgtgccagcagccgcggtaatacgtagggtgcaagcgttaatcggaattactgggcgtaaagcgtgcgcaggcggttcgctaagacagatgtgaaatccccgggcttaacctgggaactgcatttgtgactggcgggctagagtatggcagaggggggtagaattccacgtgtagcagtgaaatgcgtagagatgtggaggaataccgatggcgaaggcagccccctgggccaatactgacgctcatgcacgaaagcgtggggagcaaacaggattagataccctggtagtccacgccctaaacgatgtcaactagttgtcgggtcttcattgacttggtaacgtagctaacgcgtgaagttgaccgcctggggagtacggtcgcaagattaaaactcaaaggaattgacggggacccgcacaagcggtggatgatgtggattaattcgatgcaacgcgaaaaaccttacctacccttgacatgtatggaatcctgctgagaggtgggagtgcccgaaagggagccataacacaggtgctgcatggctgtcgtcagctcgtgtcgtgagatgttgggttaagtcccgcaacgagcgcaacccttgtccctagttgctacgcaagagcactctagggagactgccggtgacaaaccggaggaaggtggggatgacgtcaagtcctcatggcccttatgggtagggcttcacacgtcatacaatggtcggaacagagggtcgccaacccgcgagggggagccaatcccagaaaaccgatcgtagtccggatcgcactctgcaactcgagtgcgtgaagctggaatcgctagtaatcgcggatcagcatgccgcggtgaatacgttcccgggtcttgtacacaccgcccgtcacaccatgggagtgggttttaccagaagtggctagtctaaccgcaaggaggacggtcaccacggtaggattcatgactggggtg

SEQ ID NO: 2437 - DNA, 1453 bp, unidentified
  source 1..1453: mol_type = unassigned DNA; note = Paraburkholderia piptadeniae
attgaacgctggcggcatgccttacacatgcaagtcggacggcagcgcgggcttcggcctggcggcgagtggcgaacgggtgagtaagacatcggaacgtgtcctggagtgggggatagcccggcgaaagccggattaataccgcatacgctctgtggaggaaagcgggggaccgaaaggcctcgcgctcaaggggcggccgatggcagattagctggttggtggggtaaaggcctaccaaggcgacgatctgtagctggtctgagaggacgaccagccacactgggactgagacacggcccagactcctacgggaggcagcagtggggaattttggacaatgggggcaaccctgatccagcaatgccgcgtgtgtgaagaaggccttcgggttgtaaagcacttttgtccggaaagaaaacctcccggttaatacctgggggggatgacggtaccggaagaataagcaccggctaactacgtgccagcagccgcggtaatacgtagggtgcgagcgttaatcggaattactgggcgtaaagcgtgcgcaggcggtgctgtaagaccgatgtgaaatccccgggcttaacctgggaactgcattggtgactgcagcgctggagtatggcagaggggggtggaattccacgtgtagcagtgaaatgcgtagagatgtggaggaacaccgatggcgaaggcagccccctgggccaatactgacgctcatgcacgaaagcgtggggagcaaacaggattagataccctggtagtccacgccctaaacgatgtcaactggttgtcgggccttcattggcttggtaacgtagctaacgcgtgaagttgaccgcctggggagtacggtcgcaagattaaaactcaaaggaattgacggggacccgcacaagcggtggatgatgtggattaattcgatgcaacgcgaaaaaccttacctacccttgacatgtacggaagactgccgagaggtggttgtgcccgaaagggagccgtaacacaggtgctgcatggctgtcgtcagctcgtgtcgtgagatgttgggttaagtcccgcaacgagcgcaacccttgtccctggttgctacgcaagagcactccagggagactgccggtgacaaaccggaggaaggtggggatgacgtcaagtcctcatggcccttatgggtagggcttcacacgtcatacaatggtcggaacagagggtcgcgaagccgcgaggtggagccaatcccagaaaaccgatcgtagtccggatcgcagtctgcaactcgactgcgtgaagctggaatcgctagtaatcgcggatcagcatgccgcggtgaatacgttcccgggtcttgtacacaccgcccgtcacaccatgggagtgggttttaccagaagtggctagtctaaccgcaaggaggacggtcaccacggtaggattcatgactggggtg

SEQ ID NO: 2438 - DNA, 1435 bp, unidentified
  source 1..1435: mol_type = unassigned DNA; note = Paraburkholderia rhizosphaerae
tgccttacacatgcagtcgaacggcagcgcgggggcaaccctggcggcgagtggcgaacgggtgagtaagacatcggaacgtgtcctggagtgggggatagcccggcgaaagccggattaataccgcatacgatccacggatgaaagcgggggaccgaaaggcctcgcgctcaaggagcggccgatggcggattagctagttggtggggtaaaggctcaccaaggcgacgatccgtagctggtctgagaggacgaccagccacactgggactgagacacggcccagactcctacgggaggcagcagtggggaattttggacaatgggcgaaagcctgatccagcaatgccgcgtgtgtgaagaaggccttcgggttgtaaagcacttttgtccggaaagaaaactctgttcctaatatggatggaggatgacggtaccggaagaataagcaccggctaactacgtgccagcagccgcggtaatacgtagggtgcgagcgttaatcggaattactgggcgtaaagcgtgcgcaggcggtgatgtaagaccgatgtgaaatccccgggcttaacctgggaactgcattggtgactgcattgctggagtatggcagaggggggtggaattccacgtgtagcagtgaaatgcgtagagatgtggaggaacaccgatggcgaaggcagccccctgggccaatactgacgctcatgcacgaaagcgtggggagcaaacaggattagataccctggtagtccacgccctaaacgatgtcaactggttgtcgggccttcattggcttggtaacgtagctaacgcgtgaagttgaccgcctggggagtacggtcgcaagattaaaactcaaaggaattgacggggacccgcacaagcggtggatgatgtggattaattcgatgcaacgcgaaaaaccttacctacccttgacatggatggaagtctgccgagaggtggatgtgcccgaaagggagccatcacacaggtgctgcatggctgtcgtcagctcgtgtcgtgagatgttgggttaagtcccgcaacgagcgcaacccttgtccctagttgctacgcaagagcactccagggagactgccggtgacaaaccggaggaaggtggggatgacgtcaagtcctcatggcccttatgggtagggcttcacacgtcatacaatggtcggaacagagggttgccaagccgcgaggtggagccaatcccagaaaaccgatcgtagtccggatcgcagtctgcaactcgactgcgtgaagctggaatcgctagtaatcgcggatcagcatgccgcggtgaatacgttcccgggtcttgtacacaccgcccgtcacaccatgggagtgggttttaccagaagtggctagtctaaccgcaaggaggacggtcaccacggtaggattcatgacgggggtg

SEQ ID NO: 2439 - DNA, 1453 bp, unidentified
  source 1..1453: mol_type = unassigned DNA; note = Paraburkholderia rhizoxinica
attgaacgctggcggcatgccttacacatgcaagtcggacggcagcgcgggtttcggcctggcggcgagtggcgaacgggtgagtaagacatcggaacgtgtcctggagtgggggatagcccggcgaaagccggattaataccgcatacgctctgaggaggaaagcgggggaccttagggcctcgcgctcaaggggcggccgatggcagattagctagttggtagggtaaaggcctaccaaggcgacgatctgtagctggtctgagaggacgaccagccacactgggactgagacacggcccagactcctacgggaggcagcagtggggaattttggacaatgggggcaaccctgatccagcaatgccgcgtgtgtgaagaaggccttcgggttgtaaagcacttttgtccggaaagaaaacggcctggttaatacctgggctggatgacggtaccggaagaataagcaccggctaactacgtgccagcagccgcggtaatacgtagggtgcgagcgttaatcggaattactgggcgtaaagcgtgcgcaggcggtttgctaagaccgatgtgaaatccccgggcttaacctgggaactgcattggtgactggcaggctagagtatggcagagggaggtagaattccacgtgtagcagtgaaatgcgtagagatgtggaggaataccgatggcgaaggcagcctcctgggccaatactgacgctcatgcacgaaagcgtggggagcaaacaggattagataccctggtagtccacgccctaaacgatgtcaactagttgttggggattcatttccttagtaacgtagctaacgcgtgaagttgaccgcctggggagtacggtcgcaagattaaaactcaaaggaattgacggggacccgcacaagcggtggatgatgtggattaattcgatgcaacgcgaaaaaccttacctacccttgacatggtcggaaccctgctgagaggtgggggtgctcgaaagagaaccggcgcacaggtgctgcatggctgtcgtcagctcgtgtcgtgagatgttgggttaagtcccgcaacgagcgcaacccttgtccttagttgctacgcaagagcactctagggagactgccggtgacaaaccggaggaaggtggggatgacgtcaagtcctcatggcccttatgggtagggcttcacacgtcatacaatggtcggaacagagggttgccaacccgcgagggggagctaatcccaaaaaaccgatcgtagtccggattgcagtctgcaactcgactgcatgaagctggaatcgctagtaatcgcggatcagcatgtcgcggtgaatacgttcccgggtcttgtacacaccgcccgtcacaccatgggagtgggttttaccagaagtggctagtctaaccgcaaggaggacggtcaccacggtaggattcatgactggggtg

SEQ ID NO: 2440 - DNA, 1455 bp, unidentified
  source 1..1455: mol_type = unassigned DNA; note = Paraburkholderia rhynchosiae
attgaacgctggcggcatgccttacacatgcaagtcgaacggcagcacgggggcaaccctggtggcgagtggcgaacgggtgagtaatacatcggaacgtgtcctgtagtgggggatagcccggcgaaagccggattaataccgcatacgctctgcggaggaaagcgggggatccttcgggacctcgcgctacaggggcggccgatggcagattagctagttggtggggtaaaggcctaccaaggcgacgatctgtagctggtctgagaggacgaccagccacactgggactgagacacggcccagactcctacgggaggcagcagtggggaattttggacaatgggggcaaccctgatccagcaatgccgcgtgtgtgaagaaggccttcgggttgtaaagcacttttgtccggaaagaaaacttcggggctaatacctctgggggatgacggtaccggaagaataagcaccggctaactacgtgccagcagccgcggtaatacgtagggtgcaagcgttaatcggaattactgggcgtaaagcgtgcgcaggcggtccgctaagacagatgtgaaatccccgggcttaacctgggaactgcatttgtgactggcgggctagagtatggcagaggggggtagaattccacgtgtagcagtgaaatgcgtagagatgtggaggaataccgatggcgaaggcagccccctgggccaatactgacgctcatgcacgaaagcgtggggagcaaacaggattagataccctggtagtccacgccctaaacgatgtcaactagttgtcgggccttcattggcttggtaacgtagctaacgcgtgaagttgaccgcctggggagtacggtcgcaagattaaaactcaaaggaattgacggggacccgcacaagcggtggatgatgtggattaattcgatgcaacgcgaaaaaccttacctacccttgacatgtacggaacctggctgagaggccggggtgcccgaaagggagccgtaacacaggtgctgcatggctgtcgtcagctcgtgtcgtgagatgttgggttaagtcccgcaacgagcgcaacccttgtccctagttgctacgcaagagcactccagggagactgccggtgacaaaccggaggaaggtggggatgacgtcaagtcctcatggcccttatgggtagggcttcacacgtcatacaatggtcggaacagagggtcgccaacccgcgagggggagccaatcccagaaaaccgatcgtagtccggatcgcactctgcaactcgagtgcgtgaagctggaatcgctagtaatcgcggatcagcatgccgcggtgaatacgttcccgggtcttgtacacaccgcccgtcacaccatgggagtgggttttaccagaagtggctagtctaaccgcaaggaggacggtcaccacggtaggattcatgactggggtg

SEQ ID NO: 2441 - DNA, 1455 bp, unidentified
  source 1..1455: mol_type = unassigned DNA; note = Paraburkholderia ribeironis
attgaacgctggcggcatgccttacacatgcaagtcggacggcagcgcgggcttcggcctggcggcgagtggcgaacgggtgagtaatacatcggaacgtgtcctggagtgggggatagcccggcgaaagccggattaataccgcatacgctctgaggaggaaagcgggggatctttcgggacctcgcgctcaaggggcggccgatggcagattagctagttggtggggtaaaggcctaccaaggcgacgatctgtagctggtctgagaggacgaccagccacactgggactgagacacggcccagactcctacgggaggcagcagtggggaattttggacaatgggcgcaagcctgatccagcaatgccgcgtgtgtgaagaaggccttcgggttgtaaagcacttttgtccggaaagaaaacttccgccctaatacggtgggaggatgacggtaccggaagaataagcaccggctaactacgtgccagcagccgcggtaatacgtagggtgcgagcgttaatcggaattactgggcgtaaagcgtgcgcaggcggttcgttaagacagatgtgaaatccccgggcttaacctgggaactgcatttgtgactggcaaactggagtatggcagaggggggtagaattccacgtgtagcagtgaaatgcgtagagatgtggaggaataccgatggcgaaggcagccccctgggccaatactgacgctcatgcacgaaagcgtggggagcaaacaggattagataccctggtagtccacgccctaaacgatgtcaactggttgtcgggccttcattggcttggtaacgtagctaacgcgtgaagttgaccgcctggggagtacggtcgcaagattaaaactcaaaggaattgacggggacccgcacaagcggtggatgatgtggattaattcgatgcaacgcgaaaaaccttacctacccttgacatgtacggaagtctgccgagaggtggatgtgcccgaaagggagccgtaacacaggtgctgcatggctgtcgtcagctcgtgtcgtgagatgttgggttaagtcccgcaacgagcgcaacccttgtccctagttgctacgcaagagcactccagggagactgccggtgacaaaccggaggaaggtggggatgacgtcaagtcctcatggcccttatgggtagggcttcacacgtcatacaatggtcggaacagagggtcgccaacccgcgagggggagccaatcccagaaaaccgatcgtagtccggatcgcactctgcaactcgggtgcgtgaagctggaatcgctagtaatcgcggatcagcatgccgcggtgaatacgttcccgggtcttgtacacaccgcccgtcacaccatgggagtgggttttaccagaagtggctagtctaaccgcaaggaggacggtcaccacggtaggattcatgactggggtg

SEQ ID NO: 2442 - DNA, 1455 bp, unidentified
  source 1..1455: mol_type = unassigned DNA; note = Paraburkholderia sacchari
attgaacgctggcggcatgccttacacatgcaagtcgaacggcagcacgggtgcttgcacctggtggcgagtggcgaacgggtgagtaatacatcggaacatgtccagtagtgggggatagcccggcgaaagccggattaataccgcatacgatctttggatgaaagcgggggaccttcgggcctcgcgctattggggtggccgatggcggattaggtagttggtggggtaaaggcctaccaagccgacgatccgtagctggtctgagaggacgaccagccacactgggactgagacacggcccagactcctacgggaggcagcagtggggaattttggacaatgggggaaaccctgatccagcaatgccgcgtgtgtgaagaaggccttcgggttgtaaagcacttttgtccggaaagaaatcctttgggctaataccccggggggatgacggtaccggaagaataagcaccggctaactacgtgccagcagccgcggtaatacgtagggtgcaagcgttaatcggaattactgggcgtaaagcgtgcgcaggcggtgatgcaagaccgatgtgaaatccccgggcttaacctgggaactgcattggtgactgcatcgctggagtatggcagaggggggtagaattccacgtgtagcagtgaaatgcgtagagatgtggaggaataccgatggcgaaggcagccccctgggccaatactgacgctcatgcacgaaagcgtggggagcaaacaggattagataccctggtagtccacgccctaaacgatgtcaactggttgtcgggccttcattggcttggtaacgtagctaacgcgtgaagttgaccgcctggggagtacggtcgcaagattaaaactcaaaggaattgacggggacccgcacaagcggtggatgatgtggattaattcgatgcaacgcgaaaaaccttacctacccttgacatgtacggaatcctgctgagaggcgggagtgcccgaaagggagccgtaacacaggtgctgcatggctgtcgtcagctcgtgtcgtgagatgttgggttaagtcccgcaacgagcgcaacccttgtccccagttgctacgcaagagcactccggggagactgccggtgacaaaccggaggaaggtggggatgacgtcaagtcctcatggcccttatgggtagggcttcacacgtcatacaatggtcggaacagagggttgcgaagccgcgaggtggagccaatcccagaaaaccgatcgtagtccggatcgcagtctgcaactcgactgcgtgaagctggaatcgctagtaatcgcggatcagcatgccgcggtgaatacgttcccgggtcttgtacacaccgcccgtcacaccatgggagtgggttttgccagaagtggctagtctaaccgcaaggaggacggtcaccacggcaggattcatgactggggtg

SEQ ID NO: 2443 - DNA, 1453 bp, unidentified
  source 1..1453: mol_type = unassigned DNA; note = Paraburkholderia sartisoli
attgaacgctggcggcatgccttacacatgcaagtcgaacggcagcacgggggcaaccctggtggcgagtggcgaacgggtgagtaatacatcggaacgtgtcctggagtgggggatagcccggcgaaagccggattaataccgcatacgctctacggaggaaagggggggatcttaggacctctcgctcaaggggcggccgatggcagattagctagttggtggggtaaaggcctaccaaggcgacgatctgtagctggtctgagaggacgaccagccacactgggactgagacacggcccagactcctacgggaggcagcagtggggaattttggacaatgggcgcaagcctgatccagcaatgccgcgtgtgtgaagaaggccttcgggttgtaaagcacttttgtccggaaagaaaacctcagccctaatacggcggggggatgacggtaccggaagaataagcaccggctaactacgtgccagcagccgcggtaatacgtagggtgcgagcgttaatcggaattactgggcgtaaagcgtgcgcaggcggttcgttaagacagatgtgaaatccccgggcttaacctgggaactgcatttgtgactggcgggctagagtatggcagaggggggtagaattccacgtgtagcagtgaaatgcgtagagatgtggaggaataccgatggcgaaggcagccccctgggccaatactgacgctcatgcacgaaagcgtggggagcaaacaggattagataccctggtagtccacgccctaaacgatgtcaactagttgtcgggtcttcattgacttggtaacgtagctaacgcgtgaagttgaccgcctggggagtacggtcgcaagattaaaactcaaaggaattgacggggacccgcacaagcggtggatgatgtggattaattcgatgcaacgcgaaaaaccttacctacccttgacatggacggagcctggctgaaaggtcggggtgctcgaaagagaaccgtcacacaggtgctgcatggctgtcgtcagctcgtgtcgtgagatgttgggttaagtcccgcaacgagcgcaacccttgtccctagttgctacgcaagagcactctagggagactgccggtgacaaaccggaggaaggtggggatgacgtcaagtcctcatggcccttatgggtagggcttcacacgtcatacaatggtcggaacagagggccgccaacccgtgagggggagccaatcccagaaaaccgatcgtagtccggatcgcactctgcaactcgagtgcgtgaagctggaatcgctagtaatcgcggatcagcatgccgcggtgaatacgttcccgggtcttgtacacaccgcccgtcacaccatgggagtgggttttaccagaagtggctagtctaaccgcaaggaggacggtcaccacggtaggattcatgactggggtg

SEQ ID NO: 2444 - DNA, 1453 bp, unidentified
  source 1..1453: mol_type = unassigned DNA; note = Paraburkholderia sediminicola
attgaacgctggcggcatgccttacacatgcaagtcgaacggcagcacgggagcaatcctggtggcgagtggcgaacgggtgagtaatacatcggaacgtgtcctgtagtgggggatagcccggcgaaagccggattaataccgcatacgctctacggaggaaagggggggatcttaggacctcccgctacaggggcggccgatggcagattagctagttggtggggtaaaggcctaccaaggcgacgatctgtagctggtctgagaggacgaccagccacactgggactgagacacggcccagactcctacgggaggcagcagtggggaattttggacaatgggcgaaagcctgatccagcaatgccgcgtgtgtgaagaaggccttcgggttgtaaagcacttttgtccggaaagaaaacctccgccctaatatggtggggggatgacggtaccggaagaataagcaccggctaactacgtgccagcagccgcggtaatacgtagggtgcaagcgttaatcggaattactgggcgtaaagcgtgcgcaggcggtccgctaagacagatgtgaaatccccgggcttaacctgggaactgcatttgtgactggcgggctagagtatggcagaggggggtagaattccacgtgtagcagtgaaatgcgtagagatgtggaggaataccgatggcgaaggcagccccctgggccaatactgacgctcatgcacgaaagcgtggggagcaaacaggattagataccctggtagtccacgccctaaacgatgtcaactagttgttggggattcatttccttagtaacgtagctaacgcgtgaagttgaccgcctggggagtacggtcgcaagattaaaactcaaaggaattgacggggacccgcacaagcggtggatgatgtggattaattcgatgcaacgcgaaaaaccttacctacccttgacatgtatggaaccctgctgagaggtgggggtgcccgaaagggagccataacacaggtgctgcatggctgtcgtcagctcgtgtcgtgagatgttgggttaagtcccgcaacgagcgcaacccttgtccctagttgctacgcaagagcactctagggagactgccggtgacaaaccggaggaaggtggggatgacgtcaagtcctcatggcccttatgggtagggcttcacacgtcatacaatggtcggaacagagggtcgccaacccgcgagggggagccaatcccagaaaaccgatcgtagtccggatcgcactctgcaactcgagtgcgtgaagctggaatcgctagtaatcgcggatcagcatgccgcggtgaatacgttcccgggtcttgtacacaccgcccgtcacaccatgggagtgggttttaccagaagtggctagtctaaccgcaaggaggacggtcaccacggtaggattcatgactggggtg

SEQ ID NO: 2445 - DNA, 1453 bp, unidentified
  source 1..1453: mol_type = unassigned DNA; note = Paraburkholderia silvatlantica
attgaacgctggcggcatgccttacacatgcaagtcggacggcagcgcgggcttcggcctggcggcgagtggcgaacgggtgagtaatacatcggaacatgtccagtagtgggggatagcccggcgaaagccggattaataccgcatacgctctgtggaggaaagcgggggatcgaaagacctcgcgctattggggtggccgatggcggattagctagatggtggggtaaaggcctaccatggcgacgatccgtagctggtctgagaggacgaccagccacactgggactgagacacggcccagactcctacgggaggcagcagtggggaattttggacaatgggggcaaccctgatccagcaatgccgcgtgtgtgaagaaggccttcgggttgtaaagcacttttgtccggaaagaaatccttttcgataataccggaaggggatgacggtaccggaagaataagcaccggctaactacgtgccagcagccgcggtaatacgtagggtgcgagcgttaatcggaattactgggcgtaaagcgtgcgcaggcggtgatgtaagaccgatgtgaaatccccgggcttaacctgggaactgcattggtgactgcatcgctggagtatggcagaggggggtagaattccacgtgtagcagtgaaatgcgtagagatgtggaggaataccgatggcgaaggcagccccctgggccaatactgacgctcatgcacgaaagcgtggggagcaaacaggattagataccctggtagtccacgccctaaacgatgtcaactggttgtcgggccttcactggcttggtaacgtagctaacgcgtgaagttgaccgcctggggagtacggtcgcaagattaaaactcaaaggaattgacggggacccgcacaagcggtggatgatgtggattaattcgatgcaacgcgaaaaaccttacctacccttgacatggacggaagaccggtgagagctggttgtgcccgaaagggagccgtcacacaggtgctgcatggctgtcgtcagctcgtgtcgtgagatgttgggttaagtcccgcaacgagcgcaacccttgtccctagttgctacgcaagagcactccagggagactgccggtgacaaaccggaggaaggtggggatgacgtcaagtcctcatggcccttatgggtagggcttcacacgtcatacaatggtcggaacagagggtagccaagccgcgaggtggagccaatcccggaaaaccgatcgtagtccggatcgcagtctgcaactcgactgcgtgaagctggaatcgctagtaatcgcggatcagcatgccgcggtgaatacgttcccgggtcttgtacacaccgcccgtcacaccatgggagtgggttttgccagaagtggctagtctaaccgcaaggaggacggtcaccacggcaggattcatgactggggtg

SEQ ID NO: 2446 - DNA, 1455 bp, unidentified
  source 1..1455: mol_type = unassigned DNA; note = Paraburkholderia sprentiae
attgaacgctggcggcatgccttacacatgcaagtcggacggcagcacgggggcaaccctggtggcgagtggcgaacgggtgagtaatacatcggaacgtgtcctggagtgggggatagcccggcgaaagccggattaataccgcatacgctcgggagaggaaagcgggggatctttcgggacctcgcgctcaaggggcggccgatggcagattaggtagttggtggggtaaaggcctaccaagccgacgatctgtagctggtctgagaggacgaccagccacactgggactgagacacggcccagactcctacgggaggcagcagtggggaattttggacaatgggggcaaccctgatccagcaatgccgcgtgtgtgaagaaggccttcgggttgtaaagcacttttgtccggaaagaaagcatccctgttaataccgggggtggatgacggtaccggaagaataagcaccggctaactacgtgccagcagccgcggtaatacgtagggtgcgagcgttaatcggaattactgggcgtaaagcgtgcgcaggcggtgctgtaagaccgatgtgaaatccccgggcttaacctgggaactgcattggtgactgcagcgctggagtatggcagaggggggtggaattccacgtgtagcagtgaaatgcgtagagatgtggaggaacaccgatggcgaaggcagccccctgggccaatactgacgctcatgcacgaaagcgtggggagcaaacaggattagataccctggtagtccacgccctaaacgatgtcaactggttgtcgggccttcattggcttggtaacgaagctaacgcgtgaagttgaccgcctggggagtacggtcgcaagattaaaactcaaaggaattgacggggacccgcacaagcggtggatgatgtggattaattcgatgcaacgcgaaaaaccttacctacccttgacatgtatggaatcctggtgagagccgggagtgcccgaaagggagccataacacaggtgctgcatggctgtcgtcagctcgtgtcgtgagatgttgggttaagtcccgcaacgagcgcaacccttgtccctagttgctacgcaagagcactccagggagactgccggtgacaaaccggaggaaggtggggatgacgtcaagtcctcatggcccttatgggtagggcttcacacgtcatacaatggtcggaacagagggttgccaagccgcgaggtggagccaatcccagaaaaccgatcgtagtccggatcgcactctgcaactcgggtgcgtgaagctggaatcgctagtaatcgcggatcagcatgccgcggtgaatacgttcccgggtcttgtacacaccgcccgtcacaccatgggagtgggttttaccagaagtggctagtctaaccgcaaggaggacggtcaccacggtaggattcatgactggggtg

SEQ ID NO: 2447 - DNA, 1453 bp, unidentified
  source 1..1453: mol_type = unassigned DNA; note = Paraburkholderia susongensis
attgaacgctggcggcatgccttacacatgcaagtcgaacggcagcacgggagcaatcctggtggcgagtggcgaacgggtgagtaatacatcggaacgtgtcctggagtgggggatagcccggcgaaagccggattaataccgcatacgctctatggaggaaagcgggggatcttcggacctcgcgctcaaggggcggccgatggcagattaggtagttggtggggtaaaggcctaccaagccgacgatctgtagctggtctgagaggacgaccagccacactgggactgagacacggcccagactcctacgggaggcagcagtggggaattttggacaatgggggcaaccctgatccagcaatgccgcgtgtgtgaagaaggccttcgggttgtaaagcacttttgtccggaaagaaagcatccctgttaataccgggggtggatgacggtaccggaagaataagcaccggctaactacgtgccagcagccgcggtaatacgtagggtgcgagcgttaatcggaattactgggcgtaaagcgtgcgcaggcggtgatgtaagaccgatgtgaaatccccgggcttaacctgggaactgcattggtgactgcatcgctcgagtatggcagaggggggtagaattccacgtgtagcagtgaaatgcgtagagatgtggaggaataccgatggcgaaggcagccccctgggtcaatactgacgctcatgcacgaaagcgtggggagcaaacaggattagataccctggtagtccacgccctaaacgatgtcaactggttgtcgggccttcattggcttggtaacgtagctaacgcgtgaagttgaccgcctggggagtacggtcgcaagattaaaactcaaaggaattgacggggacccgcacaagcggtggatgatgtggattaattcgatgcaacgcgaaaaaccttacctacccttgacatggatggaagcctgctgagaggtgggcgtgcccgaaagggagccatcacacaggtgctgcatggctgtcgtcagctcgtgtcgtgagatgttgggttaagtcccgcaacgagcgcaacccttgtccctagttgctacgcaagagcactccagggagactgccggtgacaaaccggaggaaggtggggatgacgtcaagtcctcatggcccttatgggtagggcttcacacgtcatacaatggtcggaacagagggttgccaagccgcgaggtggagccaatcccagaaaaccgatcgtagtccggatcgcactctgcaactcgggtgcgtgaagctggaatcgctagtaatcgcggatcagcatgccgcggtgaatacgttcccgggtcttgtacacaccgcccgtcacaccatgggagtgggttttaccagaagtggctagtctaaccgcaaggaggacggtcaccacggtaggattcatgactggggtg

SEQ ID NO: 2448 - DNA, 1453 bp, unidentified
  source 1..1453: mol_type = unassigned DNA; note = Paraburkholderia terrae
attgaacgctggcggcatgccttacacatgcaagtcgaacggcagcgcgggggcaaccctggcggcgagtggcgaacgggtgagtaatacatcggaacgtgtcctggagtgggggatagcccggcgaaagccggattaataccgcatacgatcctgggatgaaagcgggggaccgaaaggcctcgcgctcaaggggcggccgatggcagattagctagttggtggggtaaaggcctaccaaggcgacgatctgtagctggtctgagaggacgaccagccacactgggactgagacacggcccagactcctacgggaggcagcagtggggaattttggacaatgggggcaaccctgatccagcaatgccgcgtgtgtgaagaaggccttcgggttgtaaagcacttttgtccggaaagaaaacctccgtcctaatacggtggggggatgacggtaccggaagaataagcaccggctaactacgtgccagcagccgcggtaatacgtagggtgcaagcgttaatcggaattactgggcgtaaagcgtgcgcaggcggttcgctaagaccgatgtgaaatccccgggcttaacctgggaactgcattggtgactggcgggctagagtatggcagaggggggtagaattccacgtgtagcagtgaaatgcgtagagatgtggaggaataccgatggcgaaggcagccccctgggccaatactgacgctcatgcacgaaagcgtggggagcaaacaggattagataccctggtagtccacgccctaaacgatgtcaactagttgtcgggtcttcattgacttggtaacgaagctaacgcgtgaagttgaccgcctggggagtacggtcgcaagattaaaactcaaaggaattgacggggacccgcacaagcggtggatgatgtggattaattcgatgcaacgcgaaaaaccttacctacccttgacatgtacggaaccttgctgagaggtgagggtgcccgaaagggagccgtaacacaggtgctgcatggctgtcgtcagctcgtgtcgtgagatgttgggttaagtcccgcaacgagcgcaacccttgtccctagttgctacgcaagagcactctagggagactgccggtgacaaaccggaggaaggtggggatgacgtcaagtcctcatggcccttatgggtagggcttcacacgtcatacaatggtcggaacagagggttgccaagccgcgaggtggagccaatcccagaaaaccgatcgtagtccggatcgcagtctgcaactcgactgcgtgaagctggaatcgctagtaatcgcggatcagcatgccgcggtgaatacgttcccgggtcttgtacacaccgcccgtcacaccatgggagtgggttttaccagaagtggctagtctaaccgcaaggaggacggtcaccacggtaggattcatgactggggtg

SEQ ID NO: 2449 - DNA, 1450 bp, unidentified
  source 1..1450: mol_type = unassigned DNA; note = Paraburkholderia terricola
acgctggcggcatgccttacacatgcaagtcgaacggcagcacgggggcaaccctggtggcgagtggcgaacgggtgagtaatacatcggaacgtgtcctgtagtgggggatagcccggcgaaagccggattaataccgcatacgctctgcggaggaaagcgggggctccttcgggacctcgcgctacaggggcggccgatggcagattagctagttggtggggtaaaggcctaccaaggcgacgatctgtagctggtctgagaggacgaccagccacactgggactgagacacggcccagactcctacgggaggcagcagtggggaattttggacaatgggcgcaagcctgatccagcaatgccgcgtgtgtgaagaaggccttcgggttgtaaagcacttttgtccggaaagaaaacctcagccctaatacggcggggggatgacggtaccggaagaataagcaccggctaactacgtgccagcagccgcggtaatacgtagggtgcaagcgttaatcggaattactgggcgtaaagcgtgcgcaggcggtccgctaagacagatgtgaaatccccgggcttaacctgggaactgcatttgtgactggcgggctagagtatggcagaggggggtagaattccacgtgtagcagtgaaatgcgtagagatgtggaggaataccgatggcgaaggcagccccctgggccaatactgacgctcatgcacgaaagcgtggggagcaaacaggattagataccctggtagtccacgccctaaacgatgtcaactagttgtcgggccttcattggcttggtaacgtagctaacgcgtgaagttgaccgcctggggagtacggtcgcaagattaaaactcaaaggaattgacggggacccgcacaagcggtggatgatgtggattaattcgatgcaacgcgaaaaaccttacctacccttgacatgtacggaatcctgctgagaggcgggagtgcccgaaagggagccgtaacacaggtgctgcatggctgtcgtcagctcgtgtcgtgagatgttgggttaagtcccgcaacgagcgcaacccttgtccctagttgctacgcaagagcactccagggagactgccggtgacaaaccggaggaaggtggggatgacgtcaagtcctcatggcccttatgggtagggcttcacacgtcatacaatggtcggaacagagggtcgccaagccgcgaggtggagccaatcccagaaaaccgatcgtagtccggatcgcactctgcaactcgagtgcgtgaagctggaatcgctagtaatcgcggatcagcatgccgcggtgaatacgttcccgggtcttgtacacaccgcccgtcacaccatgggagtgggttttaccagaagtggctagtctaaccgcaaggaggacggtcaccacggtaggattcatgactggggtg

SEQ ID NO: 2450 - DNA, 1455 bp, unidentified
  source 1..1455: mol_type = unassigned DNA; note = Paraburkholderia tropica
attgaacgctggcggcatgccttacacatgcaagtcgaacggcagcacgggtgcttgcacctggtggcgagtggcgaacgggtgagtaatacatcggaacgtgtcctgtagtgggggatagcccggcgaaagccggattaataccgcatacgatctacggatgaaagcgggggatcttcggacctcgcgctataggggcggccgatggcggattagctagttggtgaggtaaaggctcaccaaggcgacgatccgtagctggtctgagaggacgaccagccacactgggactgagacacggcccagactcctacgggaggcagcagtggggaattttggacaatgggcgaaagcctgatccagcaatgccgcgtgtgtgaagaaggccttcgggttgtaaagcacttttgtccggaaagaaatccctggtcctaatatggccgggggatgacggtaccggaagaataagcaccggctaactacgtgccagcagccgcggtaatacgtagggtgcaagcgttaatcggaattactgggcgtaaagcgtgcgcaggcggtgatgtaagaccgatgtgaaatccccgggctcaacctgggaactgcattggtgactgcatcgcttgagtatggcagaggggggtagaattccacgtgtagcagtgaaatgcgtagagatgtggaggaataccgatggcgaaggcagccccctgggtcaatactgacgctcatgcacgaaagcgtggggagcaaacaggattagataccctggtagtccacgccctaaacgatgtcaactggttgtcgggtcttcattgacttggtaacgtagctaacgcgtgaagttgaccgcctggggagtacggtcgcaagattaaaactcaaaggaattgacggggacccgcacaagcggtggatgatgtggattaattcgatgcaacgcgaaaaaccttacctacccttgacatgtacggaattccgctgagaggtggaagtgcccgaaagggagccgtaacacaggtgctgcatggctgtcgtcagctcgtgtcgtgagatgttgggttaagtcccgcaacgagcgcaacccttgtccctagttgctacgcaagagcactccagggagactgccggtgacaaaccggaggaaggtggggatgacgtcaagtcctcatggcccttatgggtagggcttcacacgtcatacaatggtcggaacagagggttgccaagccgcgaggtggagccaatcccagaaaaccgatcgtagtccggatcgcagtctgcaactcgactgcgtgaagctggaatcgctagtaatcgcggatcagcatgccgcggtgaatacgttcccgggtcttgtacacaccgcccgtcacaccatgggagtgggttttgccagaagtggctagtctaaccgcaaggaggacggtcaccacggcaggattcatgactggggtg

SEQ ID NO: 2451 - DNA, 1452 bp, unidentified
  source 1..1452: mol_type = unassigned DNA; note = Paraburkholderia tuberum
gaacgctggcggcatgccttacacatgcaagtcgaacggcagcacggacttcggtctggtggcgagtggcgaacgggtgagtaatacatcggaacgtgtcctggagtgggggatagcccggcgaaagccggattaataccgcatacgctcgggagaggaaagcgggggatctttcgggacctcgcgctcaaggggcggccgatggcagattaggtagttggtggggtaaaggcctaccaagccgacgatctgtagctggtctgagaggacgaccagccacactgggactgagacacggcccagactcctacgggaggcagcagtggggaattttggacaatgggcgcaagcctgatccagcaatgccgcgtgtgtgaagaaggccttcgggttgtaaagcacttttgtccggaaagaaaacctcgtggctaatatccgtgagggatgacggtaccggaagaataagcaccggctaactacgtgccagcagccgcggtaatacgtagggtgcgagcgttaatcggaattactgggcgtaaagcgtgcgcaggcggtgctgtaagaccgatgtgaaatccccgggcttaacctgggaactgcattggtgactgcagcgctggagtatggcagaggggggtggaattccacgtgtagcagtgaaatgcgtagagatgtggaggaacaccgatggcgaaggcagccccctgggccaatactgacgctcatgcacgaaagcgtggggagcaaacaggattagataccctggtagtccacgccctaaacgatgtcaactggttgtcgggccttcattggcttggtaacgtagctaacgcgtgaagttgaccgcctggggagtacggtcgcaagattaaaactcaaaggaattgacggggacccgcacaagcggtggatgatgtggattaattcgatgcaacgcgaaaaaccttacctacccttgacatgtatggaatcctgccgagaggcgggagtgcccgaaagggagccgtaacacaggtgctgcatggctgtcgtcagctcgtgtcgtgagatgttgggttaagtcccgcaacgagcgcaacccttgtccctagttgctacgcaagagcactccagggagactgccggtgacaaaccggaggaaggtggggatgacgtcaagtcctcatggcccttatgggtagggcttcacacgtcatacaatggtcggaacagagggttgccaagccgcgaggtggagccaatcccagaaaaccgatcgtagtccggatcgcactctgcaactcgggtgcgtgaagctggaatcgctagtaatcgcggatcagcatgccgcggtgaatacgttcccgggtcttgtacacaccgcccgtcacaccatgggagtgggttttaccagaagtggctagtctaaccgcaaggaggacggtcaccacggtaggattcatgactggggtg

SEQ ID NO: 2452 - DNA, 1455 bp, unidentified
  source 1..1455: mol_type = unassigned DNA; note = Paraburkholderia unamae
attgaacgctggcggcatgccttacacatgcaagtcgaacggcagcacgggtgcttgcacctggtggcgagtggcgaacgggtgagtaatacatcggaacatgtccagtagtgggggatagcccggcgaaagccggattaataccgcatacgatctacggatgaaagcgggggaccttcgggcctcgcgctattggggtggccgatggcggattagctagttggtggggtaaaggctcaccaaggcgacgatccgtagctggtctgagaggacgaccagccacactgggactgagacacggcccagactcctacgggaggcagcagtggggaattttggacaatgggcgaaagcctgatccagcaatgccgcgtgtgtgaagaaggccttcgggttgtaaagcacttttgtccggaaagaaatcctttgggctaataccctagggggatgacggtaccggaagaataagcaccggctaactacgtgccagcagccgcggtaatacgtagggtgcaagcgttaatcggaattactgggcgtaaagcgtgcgcaggcggtgatgcaagaccgatgtgaaatccccgggctcaacctgggaactgcattggtgactgcatcgctagagtatggcagaggggggtagaattccacgtgtagcagtgaaatgcgtagagatgtggaggaataccgatggcgaaggcagccccctgggtcaatactgacgctcatgcacgaaagcgtggggagcaaacaggattagataccctggtagtccacgccctaaacgatgtcaactggttgtcgggtcttcattgacttggtaacgtagctaacgcgtgaagttgaccgcctggggagtacggtcgcaagattaaaactcaaaggaattgacggggacccgcacaagcggtggatgatgtggattaattcgatgcaacgcgaaaaaccttacctacccttgacatgtatggaatcctgctgagaggtgggagtgcccgaaagggagccataacacaggtgctgcatggctgtcgtcagctcgtgtcgtgagatgttgggttaagtcccgcaacgagcgcaacccttgtccctagttgctacgcaagagcactccagggagactgccggtgacaaaccggaggaaggtggggatgacgtcaagtcctcatggcccttatgggtagggcttcacacgtcatacaatggtcggaacagagggttgccaagccgcgaggtggagccaatcccagaaaaccgatcgtagtccggatcgcagtctgcaactcgactgcgtgaagctggaatcgctagtaatcgcggatcagcatgccgcggtgaatacgttcccgggtcttgtacacaccgcccgtcacaccatgggagtgggttttgccagaagtggctagtctaaccgcaaggaggacggtcaccacggcaggattcatgactggggtg

SEQ ID NO: 2453 - DNA, 1453 bp, unidentified
  source 1..1453: mol_type = unassigned DNA; note = Paraburkholderia xenovorans
attgaacgctggcggcatgccttacacatgcaagtcgaacggcagcacgggggcaaccctggtggcgagtggcgaacgggtgagtaatacatcggaacgtgtcctgtagtgggggatagcccggcgaaagccggattaataccgcatacgctctgcggaggaaagcgggggatcttcggacctcgcgctacaggggcggccgatggcagattagctggttggtggggtaaaggcctaccaaggcgacgatctgtagctggtctgagaggacgaccagccacactgggactgagacacggcccagactcctacgggaggcagcagtggggaattttggacaatgggcgcaagcctgatccagcaatgccgcgtgtgtgaagaaggccttcgggttgtaaagcacttttgtccggaaagaaaacctctgccctaatacggtggggggatgacggtaccggaagaataagcaccggctaactacgtgccagcagccgcggtaatacgtagggtgcaagcgttaatcggaattactgggcgtaaagcgtgcgcaggcggttcgctaagacagatgtgaaatccccgggcttaacctgggaactgcatttgtgactggcgggctagagtatggcagaggggggtagaattccacgtgtagcagtgaaatgcgtagagatgtggaggaataccgatggcgaaggcagccccctgggccaatactgacgctcatgcacgaaagcgtggggagcaaacaggattagataccctggtagtccacgccctaaacgatgtcaactagttgtcgggtcttcattgacttggtaacgtagctaacgcgtgaagttgaccgcctggggagtacggtcgcaagattaaaactcaaaggaattgacggggacccgcacaagcggtggatgatgtggattaattcgatgcaacgcgaaaaaccttacctacccttgacatgtatggaagtctgctgagaggtggatgtgcccgaaagggagccataacacaggtgctgcatggctgtcgtcagctcgtgtcgtgagatgttgggttaagtcccgcaacgagcgcaacccttgtccctagttgctacgcaagagcactccagggagactgccggtgacaaaccggaggaaggtggggatgacgtcaagtcctcatggcccttatgggtagggcttcacacgtcatacaatggtcggaacagagggtcgccaacccgcgagggggagccaatcccagaaaaccgatcgtagtccggatcgcactctgcaactcgggtgcgtgaagctggaatcgctagtaatcgcggatcagcatgccgcggtgaatacgttcccgggtcttgtacacaccgcccgtcacaccatgggagtgggttttaccagaagtggctagtctaaccgcaaggaggacggtcaccacggtaggattcatgactggggtg

SEQ ID NO: 2454 - DNA, 1464 bp, Parachlamydia acanthamoebae
  source 1..1464: mol_type = unassigned DNA
attgaatgctgacggcgtggatgaggcatgcaagtcgaacgaaacgggcaaccgtttagtggcggaagggttagtaatacatggataacttgcctttaactttgggataacgattggaaacgatcgctaataccaaatgtggtggggtaattaatttacctttatcaaagtgggggatcgcaagacctcgcggttaaagagaggtccatgggatatcagctagttggtgtggtaatggcgcaccaaggctaagacgtctaggcggattgagagattgaccgccaacactgggactgagaactgcccagactcctacgggaggctgcagtcgagaatcattcgcaatgggcgaaagcctgacgatgcgacgccgtgtgagcgatgaaggccttagggtcgtaaagctctttcgcctgggagcaagagaagccgactaatattcggctaatttgagagtaccaggtaaagaagcaccggctaactccgtgccagcagctgcggtaatacggagggtgcaagcattaatcggatttattgggcgtaaagggcgcgtaggcgggaacataagtcagatgtgaaatcctggagctcaactccagaacagcatttgaaactatatttcttgagggtaggcggagaaaacggaattccacatgtagcggtgaaatgcgtagatatgtggaagaacatcggtggcgaaggcggttttctagcttattcctgacgctgaggcgcgaaagcaaggggagcaaacaggattagataccctggtagtccttgccgtaaacgatgtatacttggtgtaattggactcaaccccaattgtgccggagctaacgcgttaagtataccgcctggggagtacgctcgcaagggtgaaactcaaaagaattgacggggacccgcacaagcagtggagcatgtggtttaattcgatgcaacgcgaagaaccttacccagacttgacatgcagaagacagctttagagatagagtgttccttagggacttctgcacaggtgctgcatggctgtcgtcagctcgtgccgtgaggtgttgggttaagtcccgcaacgagcgcaacccttatcattagttgccaacacgtaatggtgggaactctaatgagactgcctgggttaaccaggaggaaggtgaggatgacgtcaagtccgcatggcccttatgtctggggctacacacgtgctacaatggtcggtacagaaggcagcgaagccgtgaggtgaagcaaatcccaaaaagccgatcccagttcagattgtagtctgcaactcgactacatgaagatggaattgctagtaatggcgagtcagcaacatcgccgtgaatacgttcccgggtcttgtacacaccgcccgtcacatcatgggagttggttttacccgaagccgctgacttaaccgcaaggagagaagcgtcgaaggtgaggctgatgactgggatg

SEQ ID NO: 2455 - DNA, 1300 bp, Paracoccus aestuarii
  source 1..1300: mol_type = unassigned DNA
cgggtgagtaacgcgtgggaacgtgcccttctctacggaatagccccgggaaactgggagtaataccgtatacgccctttgggggaaagatttatcggagaaggatcggcccgcgttggattaggtagttggtggggtaatggcccaccaagccgacgatccatagctggtttgagaggatgatcagccacactgggactgagacacggcccagactcctacgggaggcagcagtggggaatcttagacaatgggggcaaccctgatctagccatgccgcgtgagtgatgaaggccttagggttgtaaagctctttcagctgggaagataatgacggtaccagcagaagaagccccggctaactccgtgccagcagccgcggtaatacggagggggctagcgttgttcggaattactgggcgtaaagcgcacgtaggcggactggaaagttgggggtgaaatcccggggctcaacctcggaactgccttcaaaactatcagtctggagttcgagagaggtgagtggaattccgagtgtagaggtgaaattcgtagatattcggaggaacaccagtggcgaaggcggctcactggctcgatactgacgctgaggtgcgaaagcgtggggagcaaacaggattagataccctggtagtccacgccgtaaacgatgaatgccagacgtcgggcagcatgctgttcggtgtcacacctaacggattaagcattccgcctggggagtacggtcgcaagattaaaactcaaaggaattgacgggggcccgcacaagcggtggagcatgtggtttaattcgaagcaacgcgcagaaccttaccaacccttgacattacaggaccggtccggagacggatctttcacttcggtgacctgtggacaggtgctgcatggctgtcgtcagctcgtgtcgtgagatgttcggttaagtccggcaacgagcgcaacccacgtccctagttgccagcattcagttgggcactctatggaaactgccgatgataagtcggaggaaggtgtggatgacgtcaagtcctcatggcccttacgggttgggctacacacgtgctacaatggtggtgacagtgggttaatccccaaaagccatctcagttcggattgtcctctgcaactcgagggcatgaagttggaatcgctagtaatcgcggaacagcatgccgcggtgaatacgttcccgggccttgtacacaccgcccgtcacaccatgggagttggttctacccgacgacgctgcgctaaccttcgggaggcaggcgccacgtag

SEQ ID NO: 2456 - DNA, 1385 bp, Paracoccus alcaliphilus
  source 1..1385: mol_type = unassigned DNA
aacgaacgctggcggcaggcctaacacatgcaagtcgagcgaacccttcggggttagcggcggacgggtgagtaacgcgtgggaatatgcccttctctacggaatagtctcgggaaactgggggtaataccgtatacgccctttgggggaaagatttatcggagaaggattagcccgcgttggattaggtagttggtggggtaatggcctaccaagcctacgatccatagctggtttgagaggatgatcagccacactgggactgagacacggcccagactcctacgggaggcagcagtggggaatcttagacaatgggggcaaccctgatctagccatgccgcgtgagtgatgaaggccctagggttgtaaagctctttcagctgggaagataatgacggtaccagcagaagaagccccggctaactccgtgccagcagccgcggtaatacggagggggctagcgttgttcggaattactgggcgtaaagcgcacgtaggcggaccagcaagttaggggtgaaatcccggggctcaaccccggaactgcccttaaaactgttgatcttgagttcgagagaggtgagtggaattccgagtgtagaggtgaaattcgtagatattcggaggaacaccagtggcgaaggcggctcactggctcgatactgacgctgaggtgcgaaagcgtggggagcaaacaggattagataccctggtagtccacgccgtaaacgatgaatgccagtcgtcgggtagcatgctattcggtgacacacctaacggattaagcattccgcctggggagtacggtcgcaagattaaaactcaaaggaattgacgggggcccgcacaagcggtggagcatgtggtttaattcgaagcaacgcgcagaaccttaccaacccttgacatcgcaggaccgccggagagattcggttttctcgtaagagacctgtggacaggtgctgcatggctgtcgtcagctcgtgtcgtgagatgttcggttaagtccggcaacgagcgcaacccacgtccctagttgccagcattcagttgggcactctatggaaactgccgatgataagtcggaggaaggtgtggatgacgtcaagtcctcatggcccttacgggttgggctacacacgtgctacaatggtggtgacagtgggttaatccccaaaagccatctcagttcggattgtcctctgcaactcgagggcatgaagttggaatcgctagtaatcgcggaacagcatgccgcggtgaatacgttcccgggccttgtacacaccgcccgtcacaccatgggagttggttctacccgacggccgtgcgctaaccagcaatgggggcagcggaccacggtaggatcagcgactggggtg

SEQ ID NO: 2457 - DNA, 1333 bp, Paracoccus bengalensis
  source 1..1333: mol_type = unassigned DNA
gtcgagcgcaccttcgggtgagcggcggacgggtgagtaacgcgtgggaatatgccctttggtacggaatagtcctgggaaactgggggtaataccgtatgcgcccttcgggggaaagatttatcgccaaaggattagcccgcgttggattaggtagttggtggggtaatggcctaccaagccgacgatccatagctggtttgagaggatgatcagccacactgggactgagacacggcccagactcctacgggaggcagcagtggggaatcttagacaatgggggcaaccctgatctagccatgccgcgtgagtgatgaaggccctagggttgtaaagctctttcagctgggaagataatgacggtaccagcagaagaagccccggctaactccgtgccagcagccgcggtaatacggagggggctagcgttgttcggaattactgggcgtaaagcgcacgtaggcggaccggaaagttgggggtgaaatcccggggctcaaccccggaactgccttcaaaactatcggtctggagttcgagagaggtgagtggaattccgagtgtagaggtgaaattcgtagatattcggaggaacaccagtggcgaaggcggctcactggctcgatactgacgctgaggtgcgaaagcgtggggagcaaacaggattagataccctggtagtccacgccgtaaacgatgaatgccagtcgtcgggcagcatgctgttcggtgacacacctaacggattaagcattccgctgggagtacggtcgcaagattaaactcaaaggaattgacgggggccgcacaagcggtggagcatgtggtttaattcgaagcaacgcgcagaaccttaccaacccttgacatcccaggaccggcccggagacgggtctttcacttcggtgacctgagacaggtgctgcatggctgtcgtcagctcgtgtcgtgagatgttcggttaagtccggcaacgagcgcaacccacacttccagttgccatcatttggttgggcactctggaagaactgccgatgataagtcggaggaaggtgtggatgacgtcaagtcctcatggcccttacgggttgggctacacacgtgctacaatggtggtgacagtgggttaatccccaaaagccatctcagttcggattggggtctgcaactcgaccccatgaagttggaatcgctagtaatcgcggaacagcatgccgcggtgaatacgttcccgggccttgtacacaccgcccgtcacaccatgggagttgggtctacccgacggccgtgcgctaaccagcaatgggggcagcggaccacggtaggctca

SEQ ID NO: 2458 - DNA, 1385 bp, Paracoccus denitrificans
  source 1..1385: mol_type = unassigned DNA
aacgaacgctggcggcaggcctaacacatgcaagtcgagcgaacccttcggggttagcggcggacgggtgagtaacgcgtgggaatatgccctttgctacggaatagccccgggaaactgggagtaataccgtatacgccctttgggggaaagatttatcggcaaaggattagcccgcgttggattaggtagttggtggggtaatggcctaccaagccgacgatccatagctggtttgagaggatgatcagccacactgggactgagacacggcccagactcctacgggaggcagcagtggggaatcttagacaatgggggcaaccctgatctagccatgccgcgtgagtgatgaaggccctagggttgtaaagctctttcagctgggaagataatgacggtaccagcagaagaagccccggctaactccgtgccagcagccgcggtaatacggagggggctagcgttgttcggaattactgggcgtaaagcgcacgtaggcggaccggaaagttgggggtgaaatcccggggctcaacctcggaactgccttcaaaactatcggtctggagttcgagagaggtgagtggaattccgagtgtagaggtgaaattcgtagatattcggaggaacaccagtggcgaaggcggctcactggctcgatactgacgctgaggtgcgaaagcgtggggagcaaacaggattagataccctggtagtccacgccgtaaacgatgaatgccagtcgtcgggcagcatgctgttcggtgacacacctaacggattaagcattccgcctggggagtacggtcgcaagattaaaactcaaaggaattgacgggggcccgcacaagcggtggagcatgtggtttaattcgaagcaacgcgcagaaccttaccaacccttgacatcgcaggaccgctccagagatggagttttctcgtaagagacctgtggacaggtgctgcatggctgtcgtcagctcgtgtcgtgagatgttcggttaagtccggcaacgagcgcaacccacactcttagttgccagcatttggttgggcactctaagagaactgccgatgataagtcggaggaaggtgtggatgaagtcaagtcctcatggcccttacgggttgggctacacacgtgctacaatggtggtgacagtgggttaatccccaaaagccatctcagttcggattggggtctgcaactcgaccccatgaagttggaatcgctagtaatcgcggaacagcatgccgcggtgaatacgttcccgggccttgtacacaccgcccgtcacaccatgggagttgggtctacccgacggccgtgcgctaaccagcaatggaggcagcggaccacggtaggctcagcgactggggtg

SEQ ID NO: 2459 - DNA, 1383 bp, Paracoccus haeundaensis
  source 1..1383: mol_type = unassigned DNA
aacgaacgctggcggcaggcttaacacatgcaagtcgagcgagaccttcgggtctagcggcggacgggtgagtaacgcgtgggaacgtgcccttctctacggaatagccccgggaaactgggagtaataccgtatacgccctttgggggaaagatttatcggagaaggatcggcccgcgttggattaggtagttggtggggtaatggcccaccaagccgacgatccatagctggtttgagaggatgatcagccacactgggactgagacacggcccagactcctacgggaggcagcagtggggaatcttagacaatgggggcaaccctgatctagccatgccgcgtgagtgatgaaggccttagggttgtaaagctctttcagctgggaagataatgacggtaccagcagaagaagccccggctaactccgtgccagcagccgcggtaatacggagggggctagcgttgttcggaattactgggcgtaaagcgcacgtgggcggactggaaagtcagaggtgaaatcccagggctcaaccttggaactgcctttgaaactatcagtctggagttcgagagaggtgagtggaattccgagtgtagaggtgaaattcgtagatattcggaggaacaccagtggcgaaggcggctcactggctcgatactgacgctgaggtgcgaaagcgtggggagcaaacaggattagataccctggtagtccacgccgtaaacgatgaatgccagacgtcggcaagcatgcttgtcggtgtcacacctaacggattaagcattccgcctggggagtacggtcgcaagattaaaactcaaaggaattgacgggggcccgcacaagcggtggagcatgtggtttaattcgaagcaacgcgcagaaccttaccaacccttgacatggcaggaccgctggagagattcagctttctcgtaagagacctgcacacaggtgctgcatggctgtcgtcagctcgtgtcgtgagatgttcggttaagtccggcaacgagcgcaacccacgtccctagttgccagcattcagttgggcactctatggaaactgccgatgataagtcggaggaaggtgtggatgacgtcaagttctcatggcccttacgggttgggctacacacgtgctacaatggtggtgacagtgggttaatccccaaaagccatctcagttcggattgtcctctgcaactcgagggcatgaagttggaatcgctagtaatcgcggaacagcatgccgcggtgaatacgttcccgggccttgtacacaccgcccgtcacaccatgggagttggttctacccgacgacgctgcgctaaccttcggggggcaggcggccacggtaggatcagcgactggggtg

SEQ ID NO: 2460 - DNA, 1368 bp, unidentified
  source 1..1368: mol_type = unassigned DNA; note = Paracoccus hibiscisoli
aacgaacgctggcggcaggcttaacacatgcaagtcgagcgagaccttcgggtctagcggcggacgggtgagtaacgcgtgggaacgtgcccttctctacggaatagccccgggaaactgggagtaataccgtatacgccctttgggggaaagatttatcggagaaggatcggcccgcgttggattaggtagttggtgaggtaacggctcaccaagccgacgatccatagctggtttgagaggatgatcagccacactgggactgagacacggcccagactcctacgggaggcagcagtggggaatcttagacaatgggggcaaccctgatctagccatgccgcgtgagtgatgaaggccttagggttgtaaagctctttcagctgggaagataatgacggtaccagcagaagaagccccggctaactccgtgccagcagccgcggtaatacggagggggctagcgttgttcggaattactgggcgtaaagcgcacgtaggcggactggaaagtcagaggtgaaatcccagggctcaaccttggaactgcctttgaaactatcagtctggagttcgagagaggtgagtggaattccgagtgtagaggtgaaattcgtagatattcggaggaacaccagtggcgaaggcggctcactggctcgatactgacgctgaggtgcgaaagcgtggggagcaaacaggattagataccctggtagtccacgccgtaaacgatgaatgccagacgtcggcaagcatgcttgtcggtgtcacacctaacggattaagcattccgcctggggagtacggtcgcaagattaaaactcaaaggaattgacgggggcccgcacaagcggtggagcatgtggtttaattcgaagcaacgcgcagaaccttaccaacccttgacatggcaggaccgctggagagattcagttttctcgtaagagacctgcacacaggtgctgcatggctgtcgtcagctcgtgtcgtgagatgttcggttaagtccggcaacgagcgcaacccacgtccctagttgccagcattcagttgggcactctatggaaactgccggtgataagccggaggaaggtgtggatgacgtcaagtcctcatggcccttacgggttgggctacacacgtgctacaatggtggtgacagtgggttaatccccaaaagccatctcagttcggattgtcctctgcaactcgagggcatgaagttggaatcgctagtaatcgcggaacagcatgccgcggtgaatacgttcccgggccttgtacacaccgcccgtcacaccatgggagttggttctacccgacgacgctgcgctaaccttcgggaggcaggcggccacggtagga

SEQ ID NO: 2461 - DNA, 1383 bp, Paracoccus homiensis
  source 1..1383: mol_type = unassigned DNA
aacgaacgctggcggcaggcttaacacatgcaagtcgagcgagatcttcggatctagcggcggacgggtgagtaacgcgtgggaacgtgccctttgctacggaatagtcccgggaaactgggtttaataccgtatgtgcccttcgggggaaagatttatcggcaaaggatcggcccgcgttggattaggtagttggtggggtaatggcctaccaagccgacgatccatagctggtttgagaggatgatcagccacactgggactgagacacggcccagactcctacgggaggcagcagtggggaatcttagacaatgggggcaaccctgatctagccatgccgcgtgagtgatgaaggccttagggttgtaaagctctttcagctgggaagataatgacggtaccagcagaagaagccccggctaactccgtgccagcagccgcggtaatacggagggggctagcgttgttcggaattactgggcgtaaagcgcacgtaggcggactggaaagttgggggtgaaatcccggggctcaacctcggaactgcctccaaaactatcagtctggagttcgagagaggtgagtggaataccgagtgtagaggtgaaattcgtagatattcggtggaacaccagtggcgaaggcggctcactggctcgatactgacgctgaggtgcgaaagcgtggggagcaaacaggattagataccctggtagtccacgccgtaaacgatgaatgccagtcgtcgggttgcatgcaattcggtgacacacctaacggattaagcattccgcctggggagtacggtcgcaagattaaaactcaaaggaattgacgggggcccgcacaagcggtggagcatgtggtttaattcgaagcaacgcgcagaaccttaccaacccttgacatcccaggaccgatccggagatggatctttcacttcggtgacctggagacaggtgctgcatggctgtcgtcagctcgtgtcgtgagatgttcggttaagtccggcaacgagcgcaacccacgtccctagttgccagcattcagttgggcactctatggaaactgccgatgataagtcggaggaaggtgtggatgacgtcaagtcctcatggcccttacgggttgggctacacacgtgctacaatggtggtgacagtgggttaatccccaaaagccatctcagttcggattgtcctctgcaactcgagggcatgaagttggaatcgctagtaatcgcggaacagcatgccgcggtgaatacgttcccgggccttgtacacaccgcccgtcacaccatgggagttggttctacccgacggccgtgcgctaaccttttggaggcagcggaccacggtaggatcagcgactggggtg

SEQ ID NO: 2462 - DNA, 1371 bp, unidentified
  source 1..1371: mol_type = unassigned DNA; note = Paracoccus laeviglucosivorans
aacgaacgctggcggcaggcctaacacatgcaagtcgagcgagaccttcgggtctagcggcggacgggtgagtaacgcgtgggaatatgcccttctctacggaatagcctcgggaaactgggagtaataccgtatacgccctttgggggaaagatttatcggagaaggattagcccgcgttggattaggtagttggtggggtaatggcctaccaagccgacgatccatagctggtttgagaggatgatcagccacactgggactgagacacggcccagactcctacgggaggcagcagtggggaatcttagacaatgggggcaaccctgatctagccatgccgcgtgagtgatgaaggccttagggttgtaaagctctttcagctgggaagataatgacggtaccagcagaagaagccccggctaactccgtgccagcagccgcggtaatacggagggggctagcgttgttcggaattactgggcgtaaagcgcacgtaggcggaccggaaagtcagaggtgaaatcccagggctcaaccttggaactgcctttgaaactatcggtctggagttcgagagaggtgagtggaattccgagtgtagaggtgaaattcgtagatattcggaggaacaccagtggcgaaggcggctcactggctcgatactgacgctgaggtgcgaaagcgtggggagcaaacaggattagataccctggtagtccacgccgtaaacgatgaatgccagtcgtcgggtagcatgctattcggtgacacacctaacggattaagcattccgcctggggagtacggtcgcaagattaaaactcaaaggaattgacgggggcccgcacaagcggtggagcatgtggtttaattcgaagcaacgcgcagaaccttaccaacccttgacattacaggaccggcgcagagatgtgtctttcacttcggtgacctgtggacaggtgctgcatggctgtcgtcagctcgtgtcgtgagatgttcggttaagtccggcaacgagcgcaacccacactcttagttgccagcattcagttgggcactctaagagaactgccgatgataagtcggaggaaggtgtggatgacgtcaagtcctcatggcccttacgggttgggctacacacgtgctacaatggtggtgacagtgggttaatccccaaaagccatctcagttcggattggggtctgcaactcgaccccatgaagttggaatcgctagtaatcgcggaacagcatgccgcggtgaatacgttcccgggccttgtacacaccgcccgtcacaccatgggagttggttctacccgacggccgtgcgctaaccttttggaggcagcggaccacggtaggatca

SEQ ID NO: 2463 - DNA, 1385 bp, Paracoccus pantotrophus
  source 1..1385: mol_type = unassigned DNA
aacgaacgctggcggcaggcctaacacatgcaagtcgagcgcacccttcggggtgagcggcggacgggtgagtaacgcgtgggaatatgccctttggtacggaatagtcctgggaaactgggggtaataccgtatgcgcccttcgggggaaagatttatcgccaaaggattagcccgcgttggattaggtagttggtggggtaatggcctaccaagccgacgatccatagctggtttgagaggatgatcagccacactgggactgagacacggcccagactcctacgggaggcagcagtggggaatcttagacaatgggggcaaccctgatctagccatgccgcgtgagtgatgaaggccctagggttgtaaagctctttcagctgggaagataatgacggtaccagcagaagaagccccggctaactccgtgccagcagccgcggtaatacggagggggctagcgttgttcggaattactgggcgtaaagcgcacgtaggcggaccggaaagttgggggtgaaatcccggggctcaaccccggaactgccttcaaaactatcggtctggagttcgagagaggtgagtggaattccgagtgtagaggtgaaattcgtagatattcggaggaacaccagtggcgaaggcggctcactggctcgatactgacgctgaggtgcgaaagcgtggggagcaaacaggattagataccctggtagtccacgccgtaaacgatgaatgccagtcgtcgggcagcatgctgttcggtgacacacctaacggattaagcattccgcctggggagtacggtcgcaagattaaaactcaaaggaattgacgggggcccgcacaagcggtggagcatgtggtttaattcgaagcaacgcgcagaaccttaccaacccttgacatcccaggaccggcccggagacgggtctttcacttcggtgacctggagacaggtgctgcatggctgtcgtcagctcgtgtcgtgagatgttcggttaagtccggcaacgagcgcaacccacactcttagttgccagcatttggttgggcactctaagagaactgccgatgataagtcggaggaaggtgtggatgacgtcaagtcctcatggcccttacgggttgggctacacacgtgctacaatggtggtgacagtgggttaatccccaaaagccatctcagttcggattggggtctgcaactcgaccccatgaagttggaatcgctagtaatcgcggaacagcatgccgcggtgaatacgttcccgggccttgtacacaccgcccgtcacaccatgggagttgggtctacccgacggccgtgcgctaaccagcaatgggggcagcggaccacggtaggctcagcgactggggtg

SEQ ID NO: 2464 - DNA, 1382 bp, Paracoccus saliphilus
  source 1..1382: mol_type = unassigned DNA
aacgaacgctggcggcaggcttaacacatgcaagtcgagcgaagacttcggtcttagcggcggacgggtgagtaacgcgtgggaacgtgcccttcactacggaatagcccagggaaacttggattaataccgtatacgcccttcgggggaaagaatttcggtgaaggatcggcccgcgttggattaggtagttggtggggtaatggcctaccaagccgacgatccatagctggtttgagaggatgatcagccacactgggactgagacacggcccagactcctacgggaggcagcagtggggaatcttagacaatgggggcaaccctgatctagccatgccgcgtgagtgatgaaggccttagggttgtaaagctctttcagctgggaagataatgacggtaccagcagaagaagccccggctaactccgtgccagcagccgcggtaatacggagggggctagcgttgttcggaattactgggcgtaaagcgcacgtaggcggacaggaaagttgggggtgaaatcccggggctcaaccccggaactgcctccaaaactatctgtctggagttcgagagaggtgagtggaattccgagtgtagaggtgaaattcgtagatattcggaggaacaccagtggcgaaggcggctcactggctcgatactgacgctgaggtgcgaaagcgtggggagcaaacaggattagataccctggtagtccacgccgtaaacgatgaatgccagtcgtcgggtagcatgctattcggtgacacacctaacggattaagcattccgcctggggagtacggtcgcaagattaaaactcaaaggaattgacgggggcccgcacaagcggtggagcatgtggtttaattcgaagcaacgcgcagaaccttaccaacccttgacatccctggaccgatccggagacggatttttctcgtaagagaccaggagacaggtgctgcatggctgtcgtcagctcgtgtcgtgagatgttcggttaagtccggcaacgagcgcaacccacgtccctagttgccagcattcagttgggcactctatggaaactgccgatgataagtcggaggaaggtgtggatgacgtcaagtcctcatggcccttacgggttgggctacacacgtgctacaatggtggtgacagtgggttaatcccaaaaaaccatctcagttcggattgtcctctgcaactcgagggcatgaagttggaatcgctagtaatcgcggaacagcatgccgcggtgaatacgttcccgggccttgtacacaccgcccgtcacaccatgggagttggttctacccgacggccgtgcgctaaccttttggaggcagcggaccacggtaggatcagcgactggggtg

SEQ ID NO: 2465 - DNA, 1385 bp, Paracoccus seriniphilus
  source 1..1385: mol_type = unassigned DNA
aacgaacgctggcggcaggcctaacacatgcaagtcgagcgagatcttcggatctagcggcggacgggtgagtaacgcgtgggaatatgcccttctctacggaatagtcccgggaaactgggtttaataccgtatacgcccttcgggggaaagatttatcggagaaggattagcccgcgttggattaggtagttggtggggtaatggcctaccaagcctacgatccatagctggtttgagaggatgatcagccacactgggactgagacacggcccagactcctacgggaggcagcagtggggaatcttagacaatgggggaaaccctgatctagccatgccgcgtgagtgatgaaggccttagggttgtaaagctctttcagctgggaagataatgacggtaccagcagaagaagccccggctaactccgtgccagcagccgcggtaatacggagggggctagcgttgttcggaattactgggcgtaaagcgcacgtaggcggactggaaagttgggggtgaaatcccggggctcaacctcggaactgcctccaaaactatcagtctggagttcgagagaggtgagtggaataccgagtgtagaggtgaaattcgtagatattcggtggaacaccagtggcgaaggcggctcactggctcgatactgacgctgaggtgcgaaagcgtggggagcaaacaggattagataccctggtagtccacgccgtaaacgatgaatgccagtcgtcgggcagcttgctgttcggtgacacacctaacggattaagcattccgcctggggagtacggtcgcaagattaaaactcaaaggaattgacgggggcccgcacaagcggtggagcatgtggtttaattcgaagcaacgcgcagaaccttaccaacccttgacatggcaggaccgctggagagattcagctttctcgtaagagacctgcacacaggtgctgcatggctgtcgtcagctcgtgtcgtgagatgttcggttaagtccggcaacgagcgcaacccacgtccctagttgccagcattcagttgggcactctatggaaactgccgatgataagtcggaggaaggtgtggatgacgtcaagtcctcatggcccttacgggttgggctacacacgtgctacaatggtggtgacagtgggttaatccccaaaagccatctcagttcggattgtcctctgcaactcgagggcatgaagttggaatcgctagtaatcgcggaacagcatgccgcggtgaatacgttcccgggccttgtacacaccgcccgtcacaccatgggagttggttctacccgacgacgctgcgctaacccttcggggaggcaggcggccacggtaggatcagcgactggggtg

SEQ ID NO: 2466 - DNA, 1383 bp, unidentified
  source 1..1383: mol_type = unassigned DNA; note = Paracoccus siganidrum
aacgaacgctggcggcaggcctaacacatgcaagtcgagcgaacccttcggggttagcggcggacgggtgagtaacgcgtgggaatgtgcccttctctacggaatagtcctgggaaactgggggtaataccgtatacgccctttgggggaaagatttatcggagaaggatcagcccgcgttggattaggtagttggtggggtaatggcctaccaagcctacgatccatagctggtttgagaggatgatcagccacactgggactgagacacggcccagactcctacgggaggcagcagtggggaatcttagacaatgggggcaaccctgatctagccatgccgcgtgagtgatgaaggccttagggttgtaaagctctttcagctgggaagataatgacggtaccagcagaagaagccccggctaactccgtgccagcagccgcggtaatacggagggggctagcgttgttcggaattactgggcgtaaagcgcacgtaggcggactggaaagttgggggtgaaatcccggggctcaaccccggaactgccttcaaaactatcagtcttgagttcgagagaggtgagtggaattccgagtgtagaggtgaaattcgtagatattcggaggaacaccagtggcgaaggcggctcactggctcgatactgacgctgaggtgcgaaagcgtggggagcaaacaggattagataccctggtagtccacgccgtaaacgatgaatgccagtcgtcgggcagcatgctgttcggtgacacacctaacggattaagcattccgcctggggagtacggtcgcaagattaaaactcaaaggaattgacgggggcccgcacaagcggtggagcatgtggtttaattcgaagcaacgcgcagaaccttaccaacccttgacatcgcaggaccgccggagagatccggttttctcgtaagagacctgtggacaggtgctgcatggctgtcgtcagctcgtgtcgtgagatgttcggttaagtccggcaacgagcgcaacccacgtccccagttgccagcattcagttgggcactctgtggaaactgccggtgataagccggaggaaggtgtggatgacgtcaagtcctcatggcccttacgggttgggctacacacgtgctacaatggtggtgacagtgggttaatccccaaaagccatctcagttcggattgtcctctgcaactcgagggcatgaagttggaatcgctagtaatcgcggaacagcatgccgcggtgaatacgttcccgggccttgtacacaccgcccgtcacaccatgggagttggttctacccgacggccgtgcgctaaccttttggaggcagcggaccacggtaggatcagcgactggggtg

SEQ ID NO: 2467 - DNA, 1383 bp, Paracoccus versutus
  source 1..1383: mol_type = unassigned DNA
aacgaacgctggcggcaggcctaacacatgcaagtcgagcgcgccttcgggtgagcggcggacgggtgagtaacgcgtgggaatatgccctttggtacggaatagtcctgggaaactgggggtaataccgtatgcgcccttcgggggaaagatttatcgccaaaggattagcccgcgttggattaggtagttggtggggtaatggcctaccaagccgacgatccatagctggtttgagaggatgatcagccacactgggactgagacacggcccagactcctacgggaggcagcagtggggaatcttagacaatgggggcaaccctgatctagccatgccgcgtgagtgatgaaggccctagggttgtaaagctctttcagctgggaagataatgacggtaccagcagaagaagccccggctaactccgtgccagcagccgcggtaatacggagggggctagcgttgttcggaattactgggcgtaaagcgcacgtaggcggaccggaaagttgggggtgaaatcccggggctcaaccccggaactgccttcaaaactatcggtctggagttcgagagaggtgagtggaattccgagtgtagaggtgaaattcgtagatattcggaggaacaccagtggcgaaggcggctcactggctcgatactgacgctgaggtgcgaaagcgtggggagcaaacaggattagataccctggtagtccacgccgtaaacgatgaatgccagtcgtcgggcagcatgctgttcggtgacacacctaacggattaagcattccgcctggggagtacggtcgcaagattaaaactcaaaggaattgacgggggcccgcacaagcggtggagcatgtggtttaattcgaagcaacgcgcagaaccttaccaacccttgacatcccaggaccggcccggagacgggtctttcacttcggtgacctggagacaggtgctgcatggctgtcgtcagctcgtgtcgtgagatgttcggttaagtccggcaacgagcgcaacccacacttccagttgccatcatttggttgggcactctggaagaactgccgatgataagtcggaggaaggtgtggatgacgtcaagtcctcatggcccttacgggttgggctacacacgtgctacaatggtggtgacagtgggttaatccccaaaagccatctcagttcggattggggtctgcaactcgaccccatgaagttggaatcgctagtaatcgcggaacagcatgccgcggtgaatacgttcccgggccttgtacacaccgcccgtcacaccatgggagttgggtctacccgacggccgtgcgctaaccagcaatgggggcagcggaccacggtaggctcagcgactggggtg

SEQ ID NO: 2468 - DNA, 1516 bp, unidentified
  source 1..1516: mol_type = unassigned DNA; note = Parageobacillus caldoxylosilyticus
  misc_difference 1510: note = n is a, c, g, or t
  misc_difference 1512: note = n is a, c, g, or t
agatcctggctcaggacgaacgtgggcggggtgcctaatacatgcaagtcgagcggaccgaacaggagcttgctcttgttcggttagcggcggacgggtgagtaacacgtgggtaacctacccgtaagaccgggataactccgggaaaccggagctaataccggataacaccaaagaccgcatggtctttggttgaaaggcggcttcggctgtcacttacggatgggcccgcggcgcattagctagttggtgaggtaacggctcaccaaggcgacgatgcgtagccggcctgagagggtgaccggccacactgggactgaaacacggcccagactcctacgggaggcagcagtagggaatcttccgcaatggacgaaagtctgacggagcgacgccgcgtgagcgaagaaggtcttcggatcgtaaagctctgttgttagggaagaagaagtaccgttcgaatagggcggtacggtgacggtacctaacgagaaagccccggctaactacgtgccagcagccgcggtaatacgtagggggcgagcgttgtccggaattattgggcgtaaagcgcgcgcaggcggtcccttaagtctgatgtgaaagcccacggctcaaccgtggagggtcattggaaactgggggacttgagtgcagaagaggagagcggaattccacgtgtagcggtgaaatgcgtagagatgtggaggaacaccagtggcgaaggcggctctctggtctgtaactgacgctgaggcgcgaaagcgtggggagcaaacaggattagataccctggtagtccacgccgtaaacgatgagtgctaagtgttagaggggtcaaaccctttagtgctgtagctaacgcgttaagcactccgcctggggagtacggccgcaaggctgaaactcaaaggaattgacgggggcccgcacaagcggtggagcatgtggtttaattcgaagcaacgcgaagaaccttaccaggtcttgacatcccctgacaaccctggagacagggcgttcccccttcggggggacagggtgacaggtggtgcatggttgtcgtcagctcgtgtcgtgagatgttgggttaattcccgcaacgagcgcaaccctcgcccttagttgccagcattcagttgggcactctagggggactgccggtgacaaaccggaggaaggtggggatgacgtcaaatcatcatgccccttatgacctgggctacacacgtgctacaatgggcggtacaaagggctgcgaacccgcgagggggagccaatcccaaaaagccgctctcagttcggattgcaggctgcaactcgcctgcatgaagccggaatcgctagtaatcgcggatcagcatgccgcggtgaatacgttcccgggccttgtacacaccgcccgtcacaccacgagagcttgcaacacccgaagtcggtgaggtaacccgcaagggagccagccggcgaaggtggggcaagtgattggggtgaagtcgtaacaaggtancngtac

SEQ ID NO: 2469 - DNA, 1550 bp, unidentified
  source 1..1550: mol_type = unassigned DNA; note = Parageobacillus thermantarcticus
agagtttgatcctggctcaggacgaacgctggcggcgtgcctaatacatgcaagtcgagcggaccaaacaggagcttgctcttgtttggttagcggcggacgggtgagtaacacgtgggtaacctgcccgtaagaccgggataactccgggaaaccggagctaataccggataacaccgaagaccgcatggtctttggttgaaaggcggcttcggctgccacttacggatgggcccgcggcgcattagctagttggtgaggtaacggctcaccaaggcgacgatgcgtagccggcctgagagggtgaccggccacactgggactgagacacggcccagactcctacgggaggcagcagtagagaatcttccgcaatggacgaaagtctgacggagcgacgccgcgtgagcgaagaaggtcttcggatcgtaaagctctgttgttagggaagaagaagcgccgttcgaacagggcggcgcggtgacggtacctaacgagaaagccccggctaactacgtgccagcagccgcggtaatacgtagggggcgagcgttgtccggaattattgggcgtaaagcgcgcgcaggcggtcccttaagtctgatgtgaaagcccacggcttaaccgtggagggtcattggaaactgggggacttgagtgcagaagaggagagcggaattccacgtgtagcggtgaaatgcgtagagatgtggaggaacaccagtggcgaaggcggctctctggtctgtaactgacgctgaggcgcgaaagcgtggggagcaaacaggattagataccctggtagtccacgccgtaaacgatgagtgctaagtgttagaggggttttccctttagtgctgtagctaacgcgttaagcactccgcctggggagtacggccgcaaggctgaaactcaaaggaattgacgggggcccgcacaagcggtggagcatgtggtttaattcgaagcaacgcgaagaaccttaccaggtcttgacatcccctgacaaccctggagacagggcgttcccccttcgggggacagggtgacaggtggtgcatggttgtcgtcagctcgtgtcgtgagatgttgggttaagtcccgcaacgagcgcaaccctcgcccctagttgccagcattcagttgggcactctagggggactgccggctaaaagtcggaggaaggtggggatgacgtcaaatcatcatgccccttatgacctgggctacacacgtgctacaatgggcggtacaaagggctgcgaacccgcgagggggagcgaatcccaaaaagccgctctcagttcggattgcaggctgcaactcgcctgcatgaagccggaatcgctagtaatcgcggatcagcatgccgcggtgaatacgttcccgggccttgtacacaccgcccgtcacaccacgagagcttgcaacacccgaagtcggtgaggtaacccttctgggagccagccgccgaaggtggggcaagtgattggggtgaagtcgtaacaaggtagccgtaccggaaggtgcggctggatcacctcctttct

SEQ ID NO: 2470 - DNA, 1559 bp, unidentified
  source 1..1559: mol_type = unassigned DNA; note = Parageobacillus thermoglucosidasius
tctttggagagtttgatcctggctcaggacgaacgctggcggcgtgcctaatacatgcaagtcgagcggaccgggcgggagcttgcttccgcttggttagcggcggacgggtgagtaacacgtgggtaacctgcccgtaagaccgggataactccgggaaaccggggctaataccggataacaccgaagaccgcatggtcttcggttgaaaggcggcttcggctgccacttacggatgggcccgcggcgcattagctagttggtgaggtaacggctcaccaaggcgacgatgcgtagccggcctgagagggtgaccggccacactgggactgagacacggcccagactcctacgggaggcagcagtagggaatcttccgcaatggacgaaagtctgacggagcgacgccgcgtgagcgaagaaggtcttcggatcgtaaagctctgttgttagggaagaagaagtgccgttcgaacagggcggcacggtgacggtacctaacgagaaagccccggctaactacgtgccagcagccgcggtaatacgtagggggcgagcgttgtccggaattattgggcgtaaagcgcgcgcaggcggtcccttaagtctgatgtgaaagcccacggcttaaccgtggagggtcattggaaactgggggacttgagtgcagaagaggagagcggaattccacgtgtagcggtgaaatgcgtagagatgtggaggaacaccagtggcgaaggcggctctctggtctgtaactgacgctgaggcgcgaaagcgtggggagcaaacaggattagataccctggtagtccacgccgtaaacgatgagtgctaagtgttagaggggttattccctttagtgctgtagctaacgcgttaagcactccgcctggggagtacggccgcaaggctgaaactcaaaggaattgacgggggcccgcacaagcggtggagcatgtggtttaattcgaagcaacgcgaagaaccttaccaggtcttgacatcccctgacaaccctggagacagggcgttcctcccttgcgggaggacagggtgacaggtggtgcatggttgtcgtcagctcgtgtcgtgagatgttgggttaagtcccgcaacgagcgcaaccctcgcccctagttgccagcattcagttgggcactctagggggactgccggctaaaagtcggaggaaggtggggatgacgtcaaatcatcatgccccttatgacctgggctacacacgtgctacaatgggcggtacaaagggctgcgaacccgcgagggggagcgaatcccaaaaagccgctctcagttcggattgcaggctgcaactcgcctgcatgaagccggaatcgctagtaatcgcggatcagcatgccgcggtgaatacgttcccgggccttgtacacaccgcccgtcacaccacgagagcttgcaacacccgaagtcggtgaggtaacccgcaagggagccagccgccgaaggtggggcaagtgattggggtgaagtcgtaacaaggtagccgtaccggaaggtgcggctggatcacctccttt

SEQ ID NO: 2471 - DNA, 1504 bp, unidentified
  source 1..1504: mol_type = unassigned DNA; note = Parageobacillus toebii
gacgaacgctggcggcgtgcctaatacatgcaagtcgagcggaccgaacggaagcttgcttctgttcggttagcggcggacgggtgagtaacacgtgggtaacctgcccgtaagaccgggataactccgggaaaccggggctaataccggataacaccgaagaccgcatggtctttggttgaaaggtggcttttgctaccacttacggatgggcccgcggcgcattagctagttggtgaggtaacggctcaccaaggcgacgatgcgtagccggcctgagagggtgaccggccacactgggactgagacacggcccagactcctacgggaggcagcagtagggaatcttccgcaatggrcgaaagyctgacggagcgacgccgcgtgagcgaagaaggtcttcggatcgtaaagctctgttgttagggaagaagaagtaccgttcgaatagggcggtacggtgacggtacctaacgagaaagccccggctaactacgtgccagcagccgcggtaatacgtagggggcgagcgttgtccggaattattgggcgtaaagcgcgcgcaggcggtcccttaagtctgatgtgaaagcccacggctcaaccgtggaggttcattggaaactgggggacttgagtgcagaagaggagagcggaattccacgtgtagcggtgaaatgcgtagagatgtggaggaacaccagtggcgaaggcggctctctggtctgtaactgacgctgaggcgcgaaagcgtggggagcaaacaggattagataccctggtagtccacgccgtaaacgatgagtgctaagtgttagaggggttttccctttagtgctgtagctaacgcgttaagcactccgcctggggagtacggccgcaaggctgaaactcaaaggaattgacgggggcccgcacaagcggtggagcatgtggtttaattcgaagcaacgcgaagaaccttaccaggtcttgacatcccctgacaaccctggagacagggcgttcccccttcggggggacagggtgacaggtggtgcatggttgtcgtcagctcgtgtcgtgagatgttgggttaagtcccgcaacgagcgcaaccctcgcccctagttgccagcattcagttgggcactctagggggactgccggctaaaagtcggaggaaggtggggatgacgtcaaatcatcatgccccttatgacctgggctacacacgtgctacaatgggcggtacaaagggctgcgaacccgcgagggggagcgaatcccaaaaagccgctctcagttcggattgcaggctgcaactcgcctgcatgaagccggaatcgctagtaatcgcggatcagcatgccgcggtgaatacgttcccgggccttgtacacaccgcccgtcacaccacgagagcttgcaacacccgaagtcggtgaggtaacccgtaagggagccagccgccgaaggtggggcaagtgattggggtgaagtcgtaacaaggtagccgtaccgg

SEQ ID NO: 2472 - DNA, 1455 bp, unidentified
  source 1..1455: mol_type = unassigned DNA; note = Paraglaciecola agarilytica
attgaacgctggcggcaggcctaacacatgcaagtcgaacggtaacatttctagcttgctagaagatgacgagtggcggacgggtgagtaatacttaggaatatgcctttgtgtgggggataaccattggaaacgatggctaataccgcataacgtcttcggaccaaagggggccttggctcccgcgcaaagagtagcctaagcgagattagcttgttggtgaggtaaaggctcaccaaggcgacgatctctagctgttctgagaggaagatcagccacactggaactgagacacggtccagactcctacgggaggcagcagtggggaatattgcacaatgggggaaaccctgatgcagccatgccgcgtgtgtgaagaaggccttcgggttgtaaagcactttcagttgtgaggaaaggttaacggttaatacccgttagctgtgacgttagcaacagaagaaggaccggctaactccgtgccagcagccgcggtaatacggagggtccgagcgttaatcggaattactgggcgtaaagcgcacgcaggcggtttgttaagctagatgtgaaagccctgggctcaacctgggaattgcatttagaactggcaggctagagttttggagaggggagtggaattccaggtgtagcggtgaaatgcgtagatatctggaggaacatcagtggcgaaggcgactccctggtcagtaactgacgctcatgtgcgaaagtgtgggtagcgaacaggattagataccctggtagtccacaccgtaaacgctgtctactagctgtttgtggatttaatccgtgagtagcgaagctaacgcgataagtagaccgcctggggagtacggccgcaaggttaaaactcaaatgaattgacgggggcccgcacaagcggtggagcatgtggtttaattcgatgcaacgcgaagaaccttacctactcttgacatactgagaacttagcagagatgctttggtgccttcgggaactcagatacaggtgctgcatggctgtcgtcagctcgtgtcgtgagatgttgggttaagtcccgcaacgagcgcaacccctgtccttagttgccagccttaagttgggcactctaaggagactgccggtgacaaaccggaggaaggtggggacgacgtcaagtcatcatggcccttacgagtagggctacacacgtgctacaatggcgagtacagagggaagcaaacttgcgagagtaagcggatcccttaaagctcgtcgtagtccggattggagtctgcaactcgactccatgaagtcggaatcgctagtaatcgcaaatcagaatgttgcggtgaatacgttcccgggccttgtacacaccgcccgtcacaccatgggagtgggttgcaaaagaagtagctagtttaaccttcgggaggacggttaccactttgtgattcatgactggggtg

SEQ ID NO: 2473 - DNA, 1455 bp, unidentified
  source 1..1455: mol_type = unassigned DNA; note = Paraglaciecola arctica
attgaacgctggcggcaggcctaacacatgcaagtcgaacggaaacatgtctagcttgctagatgatgtcgagtggcggacgggtgagtaatacttaggaacatgcctttgggtgggggataactattggaaacgatagctaataccgcataacgtctacggaccaaagggggcttcggctcccgcccagagagtggcctaagcgagattagcttgttggtgaggtaaaggctcaccaaggcgacgatctctagctgttctgagaggaagatcagccacactggaactgagacacggtccagactcctacgggaggcagcagtggggaatattgcacaatgggggaaaccctgatgcagccatgccgcgtgtgtgaagaaggccttcgggttgtaaagcactttcagttgtgaggaaagtttgatggttaatacccattagatgtgacgttagcaacagaagaaggaccggctaactccgtgccagcagccgcggtaatacggagggtccgagcgttaatcggaattactgggcgtaaagcgcacgcaggcggttaattaagtcagatgtgaaagcccagggctcaaccttggaattgcatttgaaactggttgactagagtcttggagaggggagtggaatttctggtgtagcggtgaaatgcgtagatatcagaaggaacatcagtggcgaaggcgactccctggccaaagactgacgctcatgtgcgaaagtgtgggtagcgaacaggattagataccctggtagtccacaccgtaaacgctgtctactagctgtttgtggatttaatccgtgagtagcgaagctaacgcgataagtagaccgcctggggagtacggccgcaaggttaaaactcaaatgaattgacgggggcccgcacaagcggtggagcatgtggtttaattcgatgcaacgcgaagaaccttacctactcttgacatactagaaacttttcagagatgaattggtgccttcgggaatctagatacaggtgctgcatggctgtcgtcagctcgtgtcgtgagatgttgggttaagtcccgcaacgagcgcaacccttgtccttagttgccagccttaagttgggcactctaaggagactgccggtgacaaaccggaggaaggtggggacgacgtcaagtcatcatggcccttacgagtagggctacacacgtgctacaatggcgagtacagagggaagcgaacctgcgagggtaagcggatcccttaaagctcgtcgtagtccggattggagtctgcaactcgactccatgaagtcggaatcgctagtaatcgcaaatcagaatgttgcggtgaatacgttcccgggccttgtacacaccgcccgtcacaccatgggagtgggttgcaaaagaagtagctagtctaaccttcgggaggacggttaccactttgtgattcatgactggggtg

SEQ ID NO: 2474 - DNA, 1457 bp, unidentified
  source 1..1457: mol_type = unassigned DNA; note = Paraglaciecola hydrolytica
attgaacgctggcggcaggcctaacacatgcaagtcgaacggtagcacagaagagcttgctctttgggtgacgagtggcggacgggtgagtaatgcttaggaacatgcctttgcgtgggggataactattggaaacgatagctaataccgcatgatgtctacggaccaaagtgggcttcggctcacgcgcagagagtggcctaagcgagattagcttgttggtgaggtaaaggctcaccaaggcgacgatctctagctgttctgagaggaagatcagccacactggaactgagacacggtccagactcctacgggaggcagcagtggggaatattgcacaatgggggcaaccctgatgcagccatgccgcgtgtgtgaagaaggccttcgggttgtaaagcactttcagttgtgaggaaagtttggtggttaatacccatcagatgtgacgttagcaacagaagaaggaccggctaactccgtgccagcagccgcggtaatacggagggtccgagcgttaatcggaattactgggcgtaaagcgcacgcaggcggtttgttaagctagatgtgaaagccccgggctcaacctgggaattgcatttagaactggcaggctagagtcttggagaggggagtggaattccaggtgtagcggtgaaatgcgtagatatctggaggaacatcagtggcgaaggcgactccctggccaaagactgacgctcatgtgcgaaagtgtgggtagcgaacaggattagataccctggtagtccacaccgtaaacgatgtctactagctgtttgtgaatttaattcgtgagtagcggagctaacgcgataagtagaccgcctggggagtacggccgcaaggttaaaactcaaatgaattgacgggggcccgcacaagcggtggagcatgtggtttaattcgatgcaacgcgaagaaccttacctactcttgacatactcaaaactttgcagagatgcattggtgccttcgggaattgagatacaggtgctgcatggctgtcgtcagctcgtgtcgtgagatgttgggttaagtcccgcaacgagcgcaacccttgtccttagttgccagccttaagttgggcactctaaggagactgccggtgacaaaccggaggaaggtggggacgacgtcaagtcatcatggcccttacgagtagggctacacacgtgctacaatggcgcgtacagagggaagcgaaacagcgatgtcaagcggatcccttaaagcgcgtcgtagtccggatcggagtctgcaactcgactccgtgaagtcggaatcgctagtaatcgcaaatcagaatgttgcggtgaatacgttcccgggccttgtacacaccgcccgtcacaccatgggagtgggttgcaaaagaagtagctagtctaaccttcgggaggacggttaccactttgtgattcatgactggggtg

SEQ ID NO: 2475 - DNA, 1455 bp, unidentified
  source 1..1455: mol_type = unassigned DNA; note = Paraglaciecola mesophila
attgaacgctggcggcaggcctaacacatgcaagtcgaacggtaacatttctagcttgctagaagatgacgagtggcggacgggtgagtaatacttaggaatatgcctttgtgtgggggataactattggaaacgatagctaataccgcataacgtcttcggaccaaagggggcttcggctcccgcgcaaagagtagcctaagcgagattagcttgttggtgaggtaaaggctcaccaaggcgacgatctctagctgttctgagaggaagatcagccacactggaactgagacacggtccagactcctacgggaggcagcagtggggaatattgcacaatgggggaaaccctgatgcagccatgccgcgtgtgtgaagaaggccttcgggttgtaaagcactttcagttgtgaggaaaggttaacggttaatacccgttagctgtgacgttagcaacagaagaaggaccggctaactccgtgccagcagccgcggtaatacggagggtccgagcgttaatcggaattactgggcgtaaagcgcacgcaggcggtttgttaagctagatgtgaaagccctgggctcaacctgggaattgcatttagaactggcaggctagagttttggagaggggagtggaattccaggtgtagcggtgaaatgcgtagatatctggaggaacatcagtggcgaaggcgactccctggtcagtaactgacgctcatgtgcgaaagtgtgggtagcgaacaggattagataccctggtagtccacaccgtaaacgctgtctactagctgtttgtggatttaatccgtgagtagcgaagctaacgcgataagtagaccgcctggggagtacggccgcaaggttaaaactcaaatgaattgacgggggcccgcacaagcggtggagcatgtggtttaattcgatgcaacgcgaagaaccttacctactcttgacatactagaaacttttcagagatgaattggtgccttcgggaatctagatacaggtgctgcatggctgtcgtcagctcgtgtcgtgagatgttgggttaagtcccgcaacgagcgcaacccctgtccttagttgccagccttaagttgggcactctaaggagactgccggtgacaaaccggaggaaggtggggacgacgtcaagtcatcatggcccttacgagtagggctacacacgtgctacaatggcgagtacagagggaagcaaacttgcgagagtaagcggatcccttaaagctcgtcgtagtccggattggagtctgcaactcgactccatgaagtcggaatcgctagtaatcgcaaatcagaatgttgcggtgaatacgttcccgggccttgtacacaccgcccgtcacaccatgggagtgggttgcaaaagaagtagctagtttaaccttcgggaggacggttaccactttgtgattcatgactggggtg

SEQ ID NO: 2476 - DNA, 1455 bp, unidentified
  source 1..1455: mol_type = unassigned DNA; note = Paraglaciecola polaris
attgaacgctggcggcaggcctaacacatgcaagtcgaacggaaacatgtctagcttgctagatgatgtcgagtggcggacgggtgagtaatacttaggaacatgcctttgggtgggggataactattggaaacgatagctaataccgcataacgtctacggaccaaagggggcttcggctcccgcccagagagtggcctaagcgagattagcttgttggtgaggtaaaggctcaccaaggcgacgatctctagctgttctgagaggaagatcagccacactggaactgagacacggtccagactcctacgggaggcagcagtggggaatattgcacaatgggcgcaagcctgatgcagccatgccgcgtgtgtgaagaaggccttcgggttgtaaagcactttcagttgtgaggaaaggttaacggttaatacccgttagctgtgacgttagcaacagaagaaggaccggctaactccgtgccagcagccgcggtaatacggagggtccgagcgttaatcggaattactgggcgtaaagcgcacgcaggcggtttgttaagctagatgtgaaagccctgggctcaacctgggaattgcatttagaactggcaggctagagttttggagaggggagtggaattccaggtgtagcggtgaaatgcgtagatatctggaggaacatcagtggcgaaggcgactccctggtcagtaactgacgctcatgtgcgaaagtgtgggtagcgaacaggattagataccctggtagtccacaccgtaaacgctgtctactagctgtttgtggatttaatccgtgagtagcgaagctaacgcgataagtagaccgcctggggagtacggccgcaaggttaaaactcaaatgaattgacgggggcccgcacaagcggtggagcatgtggtttaattcgatgcaacgcgaagaaccttacctactcttgacatacttggaatttagcagagatgctttagtgccttcgggaaccaagatacaggtgctgcatggctgtcgtcagctcgtgtcgtgagatgttgggttaagtcccgcaacgagcgcaacccttgtccttagttgccagccttaagttgggcactctaaggagactgccggtgacaaaccggaggaaggtggggacgacgtcaagtcatcatggcccttacgagtagggctacacacgtgctacaatggcgagtacagagggaagcaaacttgcgagagtaagcggatcccttaaagctcgtcgtagtccggattggagtctgcaactcgactccatgaagtcggaatcgctagtaatcgcaaatcagaatgttgcggtgaatacgttcccgggccttgtacacaccgcccgtcacaccatgggagtgggttgcaaaagaagtagctagtttaaccttcgggaggacggttaccactttgtgattcatgactggggtg

SEQ ID NO: 2477 - DNA, 1459 bp, unidentified
  source 1..1459: mol_type = unassigned DNA; note = Paraglaciecola psychrophila
attgaacgctggcggcaggcctaacacatgcaagtcgaacggaaacatgtctagcttgctagatgatgtcgagtggcggacgggtgagtaatacttaggaacatgcctttgggtgggggataactattggaaacgatagctaataccgcataacgtctacggaccaaaggggggagcttgctcctctcgcccaaagagtggcctaagcgagattagcttgttggtgaggtaaaggctcaccaaggcgacgatctctagctgttctgagaggaagatcagccacactgggactgagacacggcccagactcctacgggaggcagcagtggggaatattgcacaatggaggaaactctgatgcagccatgccgcgtgtgtgaagaaggccttcgggttgtaaagcactttcagttgtgaggaaagcttgttggttaatacccagcaggtatgacgttagcaacagaagaaggaccggctaactccgtgccagcagccgcggtaatacggagggtccgagcgttaatcggaattactgggcgtaaagcgcacgcaggcggtttgttaagctagatgtgaaagccccgggctcaacctgggaatagcatttagaactggcagactagagtcttggagaggggagtggaatttctggtgtagcggtgaaatgcgtagatatcagaaggaacatcagtggcgaaggcgactccctggccaaagactgacgctcatgtgcgaaagtgtgggtagcgaacaggattagataccctggtagtccacaccgtaaacgctgtctactagctgtttgtggatttaatccgtgggtagcgaagctaacgcgataagtagaccgcctggggagtacggccgcaaggttaaaactcaaatgaattgacgggggcccgcacaagcggtggagcatgtggtttaattcgatgcaacgcgaagaaccttacctactcttgacatactagaaacttttcagagatgaattggtgccttcgggaatctagatacaggtgctgcatggctgtcgtcagctcgtgtcgtgagatgttgggttaagtcccgcaacgagcgcaacccttgtccttagttgccagccttaagttgggcactctaaggagactgccggtgacaaaccggaggaaggtggggacgacgtcaagtcatcatggcccttacgagtagggctacacacgtgctacaatggcgagtacagagggaagcaaacctgcgagggtaagcggatcccttaaagctcgtcgtagtccggattggagtctgcaactcgactccatgaagtcggaatcgctagtaatcgcaaatcagaatgttgcggtgaatacgttcccgggccttgtacacaccgcccgtcacaccatgggagtgggttgcaaaagaagtaggtagtctaaccttcgggaggacgcttaccactttgtgattcatgactggggtg

SEQ ID NO: 2478 - DNA, 1458 bp, unidentified
  source 1..1458: mol_type = unassigned DNA; note = Parahaliea aestuarii
attgaacgctggcggcaggcctaacacatgcaagtcgagcgcgaaagccctttcgggggtgagtagagcggcggacgggtgagtaacgcgtaggaatctacctggtagtgggggacaacatggggaaactcatgctaataccgcatacgccctacgggggaaagcgggggaccttcgggcctcgcgctatcagatgagcctgcgttggattagcttgtcggtgaggtaaaggctcaccaaggcgacgatccatagctggtctgagaggatgatcagccacaccgggactgagacacggcccggactcctacgggaggcagcagtggggaatattgcgcaatgggcgaaagcctgacgcagccatgccgcgtgtgtgaagaaggccttcgggttgtaaagcactttcacttgggaagaaaggttgtacgttaatagcgtgcagctgtgacattaccttgagaagaagcaccggctaactccgtgccagcagccgcggtaatacggagggtgcgagcgttaatcggaattactgggcgtaaagcgcgcgtaggcggtttgttaagtcggatgtgaaagccctgggctcaacctgggaactgcacccgatactggccgactagagtacgagagagggaggtagaattccacgtgtagcggtgaaatgcgtagatatgtggaggaataccggtggcgaaggcggcctcctggctcgatactgacgctgaggtgcgaaagcgtggggagcaaacaggattagataccctggtagtccacgccgtaaacgatgtctactagccgttggggaacttgagtccttggtggcgcagctaacgcactaagtagaccgcctggggagtacggccgcaaggttaaaactcagatgaattgacgggggcccgcacaagcggtggagcatgtggtttaattcgatgcaacgcgaagaaccttaccaggtcttgacatccagagaactttccagagatggattggtgccttcgggagctctgagacaggtgctgcatggctgtcgtcagctcgtgtcgtgagatgttgggttaagtcccgtaacgagcgcaacccctgtccctagttgctagcaggtaatgctgagaactctagggagactgacggtgacaaaccgtaggaaggtggggacgacgtcaagtcatcatggcccttacgacctgggctacacacgtgctacaatggaacgcacagagggcagcaaacccgcgagggggagcgaatcccacaaaacgtttcgtagtccggattggagtctgcaactcgactccatgaagtcggaatcgctagtaatcgtgaatcagaatgtcacggtgaatacgttcccgggccttgtacacaccgcccgtcacaccatgggagtgggttgctccagaagtggttagcctaaccttcgggggggcgatcaccacggagtgattcatgactggggtg

SEQ ID NO: 2479 - DNA, 1431 bp, Paralcaligenes ureilyticus
  source 1..1431: mol_type = unassigned DNA
attgaacgctagcgggatgctttacacatgcaagtcgaacggcagcgcgaaggaaagcttgcttttctttggcggcgagtggcgaacgggtgagtaatgtatcggaacgtgcccagtagcgggggataactacgcgaaagcgtggctaataccgcatacgccctacgggggaaagggggggatcgcaagacctcccactattggagcggccgatatcggattagctagttggtggggtaaaggcctaccaaggcgacgatccgtagctggtttgagaggacgaccagccacactgggactgagacacggcccagactcctacgggaggcagcagtggggaattttggacaatgggggcaaccctgatccagccatcccgcgtgtgcgatgaaggccttcgggttgtaaagcacttttggcagggaagaaacggcaccttttaatacagggtgtcactgacggtacctgcagaataagcaccggctaactacgtgccagcagccgcggtaatacgtagggtgcaagcgttaatcggaattactgggcgtaaagcgtgcgcaggcggttcggaaagaaagatgtgaaatcccagggctcaaccttggaacggcatttttaactcccgagctagagtatgtcagaggggggtagaattccacgtgtagcagtgaaatgcgtagagatgtggaggaataccgatggcgaaggcagccccctgggacaatactgacgctcaggcacgaaagcgtggggagcaaacaggattagataccctggtagtccacgccctaaacgatgtcaactagctgttggggccttcgggctttagtagcgcagctaacgcgtgaagttgaccgcctggggagtacggtcgcaagattaaaactcaaaggaattgacggggacccgcacaagcggtggatgatgtggattaattcgatgcaacgcgaaaaaccttacctacccttgacatgtctggaatccttaagagattgaggagtgctcgcaagagaaccggaacacaggtgctgcatggctgtcgtcagctcgtgtcgtgagatgttgggttaagtcccgcaacgagcgcaacccttgtcattagttgctacgaaagggcactctaatgagactgccggtgacaaaccggaggaaggtggggatgacgtcaagtcctcatggcccttatgggtagggcttcacacgtcatacaatggtcgggacagagggatgccaacccgcgagggggagccaatctcagaaacccgatcgtagtccggattggagtctgcaactcgactccatgaagtcggaatcgctagtaatcgcggatcagcatgtcgcggtgaatacgttcccgggtcttgtacacaccgcccgtcacaccatgggagtgggttttaccagaagtagttagctaacccgcaagggggg

SEQ ID NO: 2480 - DNA, 1545 bp, unidentified
  source 1..1545: mol_type = unassigned DNA; note = Paramaledivibacter caminithermalis
ctggcggcgtgcttaacacatgcaagtcgagcgagctaatgcttggcactgtgtacttagttgattgatgtggtgtaataattagccagcgtcaagggcgaagcggagcagagtccttcacgcgttctaaagtgataacacatgtgactgagtattgagtgctaagcattagctagcggcggacgggtgagtaacgcgtgggcaacctgccttgtacagagggatagccactggaaacggtgattaatacctcataaaactattttatcgcatgatgagatagtcaaaactcaggtggtacaagatgggcccgcgtctgattagctagttggtggggtaaaggcctaccaaggcgacgatcagtagccgacctgagagggtgatcggccacactggaactgagacacggtccagactcctacgggaggcagcagtggggaatattgcacaatgggcgaaagcctgatgcagcaacgccgcgtgagcgaagaaggccttcgggtcgtaaagctctgtcctaagggaagaaaaatgacggtaccttaggaggaagccccggctaactacgtgccagcagccgcggtaatacgtagggggcaagcgttatccggaatcactgggcgtaaagggtgcgtaggcggccaaataagccaggggtgaaaggctacggcttaaccgtagtaagcccttggaactatttggcttgagtgcaggagaggagagtggaattcctagtgtagcggtgaaatgcgtagatattaggaggaacaccagtggcgaaggcgactctctggactgcaactgacgctgaggcacgaaagcgtggggagcgaacaggattagataccctggtagtccacgccgtaaacgatgagtgctaggtgtcgggggttcacaccctcggtgccggagttaacgcattaagcactccgcctggggagtacggtcgcaagactgaaactcaaaggaattgacggggacccgcacaagcagcggagcatgtggtttaattcgaagcaacgcgaagaaccttaccaggacttgacatccctttgacaggtttgtaatgggacccttcccttttgggacaaaggagacaggtggtgcatggttgtcgtcagctcgtgtcgtgagatgttgggttaagtcccgcaacgagcgcaacccttgtctttagttgccagcactaagggtgggcactctagagagactgccggtgacaaaccggaggaaggtggggatgacgtcaaatcatcatgccccttatgttctgggctacacacgtgctacaatggctggtacaacgggcagctaaggagcaatctggagctaatcccaaaaagccagtcccagttcggattgtgggctgcaactcgcccacatgaagtcggagttgctagtaatcgtgaatcagaatgtcgcggtgaatgcgttcccgggtcttgtacacaccgcccgtcacaccatggaagcctaaggcacccgaagtcagcgagttaacccttgtgggaacagctgccgaaggtgaaataggtgactggggtg

SEQ ID NO: 2481 - DNA, 1409 bp, unidentified
  source 1..1409: mol_type = unassigned DNA; note = Paramesorhizobium deserti
aacgaacgctggcggcaggcttaacacatgcaagtcgaacgccctcttcggagggagtggcagacgggtgagtaacgcgtgggaatctacccatctctacggaacaactccgggaaactggagctaataccgtatacgtccttttggagaaagatttatcggagatggatgagcccgcgttggattagctagttggtggggtaaaggcctaccaaggcgacgatccatagctggtctgagaggatgatcagccacactgggactgagacacggcccagactcctacgggaggcagcagtggggaatattggacaatgggcgcaagcctgatccagccatgccgcgtgagtgatgaaggccctagggttgtaaagctctttcaccggtgaagataatgacggtaaccggagaagaagccccggctaacttcgtgccagcagccgcggtaatacgaagggggctagcgttgttcggatttactgggcgtaaagcgcacgtaggcggacttttaagtcaggggtgaaatcccggggctcaaccccggaactgcctttgatactggaagtcttgagtatggaagaggtgagtggaattccgagtgtagaggtgaaattcgtagatattcggaggaacaccagtggcgaaggcggctcactggtccattactgacgctgaggtgcgaaagcgtggggagcaaacaggattagataccctggtagtccacgccgtaaacgatgaatgttagccgtcggcaagtttacttgtcggtggcgcagctaacgcattaaacattccgcctggggagtacggtcgcaagattaaaactcaaaggaattgacgggggcccgcacaagcggtggagcatgtggtttaattcgaagcaacgcgcagaaccttaccagcccttgacatcccggtcgcgggtaggagagatcctatccttcagttcggctggaccggtgacaggtgctgcatggctgtcgtcagctcgtgtcgtgagatgttgggttaagtcccgcaacgagcgcaaccctcgcccttagttgccagcattcagttgggcactctaaggggactgccggtgataagccgagaggaaggtggggatgacgtcaagtcctcatggcccttacgggctgggctacacacgtgctacaatggtggtgacagtgggcagcgagaccgcgaggtcgagctaatctccaaaaaccatctcagttcggattgcactctgcaactcgggtgcatgaagttggaatcgctagtaatcgtggatcagcatgccacggtgaatacgttcccgggccttgtacacaccgcccgtcacaccatgggagttggctttacccgaaggtgctgtgctaaccgcaaggaggcaggcaaccacggtagggtcagcgactggggtg

SEQ ID NO: 2482 - DNA, 1459 bp, Paraperlucidibaca baekdonensis
  source 1..1459: mol_type = unassigned DNA
attgaacgctggcggcaggcttaacacatgcaagtcgaacgaggtgttggtgcttgcactaacacctagtggcgaacgggtgagtaatacttgggaatctgccttgtagcgggggataacgtttcgaaaggaacgctaataccgcatacgtcctacgggagaaaggaggggatcttcggaccttccactataagatgagcccaagcgagattagctagttggtgaggtaaaggctcaccaaggcgacgatctctagctggtctgagaggatgatcagccacactgggactgagacacggcccagactcctacgggaggcagcagtggggaatattggacaatgggcgaaagcctgatccagccatgccgcgtgtgtgaagaaggccttcgggttgtaaagcactttaagcgaggaggaaatgttctgggttaatacccttgagcagtgacgttactcgcagaataagcaccggctaactctgtgccagcagccgcggtaatacagagggtgcaagcgttaatcggaattactgggcgtaaagcgcgcgtaggcggttacgtaagttggaggtgaaatccccgagctcaacttgggaattgccttcaaaactgcgtggctagagtgtgggagaggaaggtagaattccaggtgtagcggtgaaatgcgtagatatctggaggaataccgatggcgaaggcagccttctggcctaacactgacgctgaggtgcgaaagcatggggagcaaacaggattagataccctggtagtccatgccgtaaacgatgtctactagccgttgggggacttgatcctttagtggcgcagctaacgcattaagtagaccgcctggggagtacggtcgcaagactaaaactcaaatgaattgacgggggcccgcacaagcggtggagcatgtggtttaattcgatgcaacgcgaagaaccttacctagccttgacatgtccggaatcttgcagagatgcgagagtgccttcgggaatcggaacacaggtgctgcatggctgtcgtcagctcgtgtcgtgagatgttgggttaagtcccgcaacgagcgcaacccttgtccttagttgccagcacgtaatggtgggaactctagggagactgccggtgacaaaccggaggaaggcggggacgacgtcaagtcatcatggcccttacggctagggctacacacgtgctacaatggtcggtacaaagggttgccaactcgcgagagtgcgctaatctcaaaaagccgatcgtagtccggattggagtctgcaactcgactccatgaagtcggaatcgctagtaatcgcggatcagaatgccgcggtgaatacgttcccgggccttgtacacaccgcccgtcacaccatgggagtttactgcaccagaagtaggtagcctaaccgcaaggggggcgcttaccacggtgtggtcaatgactggggtg

SEQ ID NO: 2483 - DNA, 1488 bp, unidentified
  source 1..1488: mol_type = unassigned DNA; note = Pararheinheimera mesophila
agatttgatcctggctcagattgaacgctggcggcaggcctaacacatgcaagtcgagcggggttttcggacctagcggcggacgggtgagtaatgcgtaggaagctgcccgatagagggggataccagttggaaacgactgttaataccgcataatgtctacggaccaaagtgtgggaccttcgggccacatgctatcggatgcgcctacgtgggattagctagttggtgaggtaatggctcaccaaggcgacgatctctagctggtttgagaggatgatcagccacactggaactgagacacggtccagactcctacgggaggcagcagtggggaatattggacaatgggcgcaagcctgatccagccatgccgcgtgtgtgaagaaggccttcgggttgtaaagcactttcagcgaggaggaagggtggtgtgttaatagcacatcattttgacgttactcgcagaagaagcaccggctaactctgtgccagcagccgcggtaatacagagggtgcaagcgttaatcggaattactgggcgtaaagcgcacgtaggcggttttttaagtcagatgtgaaagccccgggctcaacctgggaattgcatttgaaactgggaaactagagtgtgtgagagggggggtagaattccaagtgtagcggtgaaatgcgtagagatttggaggaataccagtggcgaaggcggccccctggcacaacactgacgctcaggtgcgaaagcgtggggagcaaacaggattagataccctggtagtccacgccgtaaacgatgtctactagctgttcgtgaccttgtgttgtgagtagcgcagctaacgcactaagtagaccgcctggggagtacggtcgcaagattaaaactcaaatgaattgacgggggcccgcacaagcggtggagcatgtggtttaattcgacgcaacgcgaagaaccttacctactcttgacatctacggaagactgcagagatgcggttgtgccttcgggaaccgtaagacaggtgctgcatggctgtcgtcagctcgtgttgtgaaatgttgggttaagtcccgcaacgagcgcaacccctatccttagttgccagcgattcggtcgggaactctagggagactgccggtgataaaccggaggaaggtggggacgacgtcaagtcatcatggcccttacgagtagggctacacacgtgctacaatggtacgtacagagggaggcaagctggcgacagtgagcggatctcttaaagcgtatcgtagtccggatcgcagtctgcaactcgactgcgtgaagtcggaatcgctagtaatcgcaaatcagaatgttgcggtgaatacgttcccgggccttgtacacaccgcccgtcacaccatgagagtgggttgcaaaagaagtaggtagcttaaccgcaaggagggcgcttaccactttgtgattcatgactggggtgaagtcgtaacaaggtaaccgta

SEQ ID NO: 2484 - DNA, 1390 bp, unidentified
  source 1..1390: mol_type = unassigned DNA; note = Pararheinheimera tangshanensis
agtcgagcggggttttcggacctagcggcggacgggtgagtaatgcgtaggaagctgcccgatagagggggataccagttggaaacgactgttaataccgcataatgtctacggaccaaagtgtgggaccttcgggccacatgctatcggatgcgcctacgtgggattagctagttggtgaggtaatggctcaccaaggcgacgatctctagctggtttgagaggatgatcagccacactggaactgagacacggtccagactcctacgggaggcagcagtggggaatattggacaatgggcgcaagcctgatccagccatgccgcgtgtgtgaagaaggccttcgggttgtaaagcactttcagcgaggaggaagggatgtatgttaatagcatgcatttttgacgttactcgcagaagaagcaccggctaactctgtgccagcagccgcggtaatacagagggtgcaagcgttaatcggaattactgggcgtaaagcgcacgtaggcggttttttaagtcagatgtgaaagccccgggctcaacctgggaattgcatttgaaactggggaactagagtgtgtgagaggggggtagaattccaagtgtagcggtgaaatgcgtagagatttggaggaataccagtggcgaaggcggccccctggcacaacactgacgctcaggtgcgaaagcgtggggagcaaacaggattagataccctggtagtccacgccgtaaacgatgtctactagctgttcgtgtccttgtgatgtgagtagcgcagctaacgcactaagtagaccgcctggggagtacggtcgcaagattaaaactcaaatgaattgacgggggcccgcacaagcggtggagcatgtggtttaattcgacgcaacgcgaagaaccttacctactcttgacatctacggaagactgcagagatgcggttgtgccttcgggaaccgtaagacaggtgctgcatggctgtcgtcagctcgtgttgtgaaatgttgggttaagtcccgcaacgagcgcaacccctatccttagttgccagcgagttaagtcgggaactctagggagactgccggtgataaaccggaggaaggtggggacgacgtcaagtcatcatggcccttacgagtagggctacacacgtgctacaatggtacgtacagagggaggcaagctggcgacagtgagcggatctcttaaagcgtatcgtagtccggatcgcagtctgcaactcgactgcgtgaagtcggaatcgctagtaatcgcaaatcagaatgttgcggtgaatacgttcccgggccttgtacacaccgcccgtcacaccatgggagtgggttgcaaaagaagtaggtagcttaaccttcgggagggcgctacc

SEQ ID NO: 2485 - DNA, 1409 bp, unidentified
  source 1..1409: mol_type = unassigned DNA; note = Pararhizobium polonicum
aacgaacgctggcggcaggcttaacacatgcaagtcgaacgctgtagcaatacagagtggcagacgggtgagtaacgcgtgggaatctacccaactctacggaataacgcatggaaacgtgtgctaataccgtatacgcccttcgggggaaagatttatcggagttggatgagcccgcgttggattagctagttggtggggtaaaggcctaccaaggcgacgatccatagctggtctgagaggatgatcagccacattgggactgagacacggcccaaactcctacgggaggcagcagtggggaatattggacaatgggcgcaagcctgatccagccatgccgcgtgtgtgatgaaggccttagggttgtaaagcactttcaccggagaagataatgacggtatccggagaagaagccccggctaacttcgtgccagcagccgcggtaatacgaagggggctagcgttgttcggaattactgggcgtaaagcgcacgtaggcggatcgatcagtcaggggtgaaatcccagagctcaactctggaactgcctttgatactgtcggtctagagtatggaagaggtgagtggaattccgagtgtagaggtgaaattcgtagatattcggaggaacaccagtggcgaaggcggctcactggtccattactgacgctgaggtgcgaaagcgtggggagcaaacaggattagataccctggtagtccacgccgtaaacgatgaatgttagccgtcggcaagtttacttgtcggtggcgcagctaacgcattaaacattccgcctggggagtacggtcgcaagattaaaactcaaaggaattgacgggggcccgcacaagcggtggagcatgtggtttaattcgaagcaacgcgcagaaccttaccagctcttgacatcccgatcgcggacagtggagacattgtccttcagttaggctggatcggtgacaggtgctgcatggctgtcgtcagctcgtgtcgtgagatgttgggttaagtcccgcaacgagcgcaaccctcgcccttagttgccagcattcagttgggcactctaaggggactgccggtgataagccgagaggaaggtggggatgacgtcaagtcctcatggcccttacgggctgggctacacacgtgctacaatggtggtgacagtgggcagcgagaccgcgaggtcgagctaatctccaaaagccatctcagttcggattgcactctgcaactcgagtgcatgaagttggaatcgctagtaatcgcagatcagcatgctgcggtgaatacgttcccgggccttgtacacaccgcccgtcacaccatgggagttggttttacccgaaggtagtgcgctaaccgcaaggaggcagctaaccacggtagggtcagcgactggggtg

SEQ ID NO: 2486 - DNA, 1406 bp, unidentified
  source 1..1406: mol_type = unassigned DNA; note = Parasaccharibacter apium
agcgaacgctggcggcatgcttaacacatgcaagtcgcacggacctttcggggttagtggcggacgggtgagtaacgcgtaggaacctatccagaggtgggggataacattgggaaactggtgctaataccgcatgaagcctgagggccaaaggagagatctgccattggaggggcctgcgttcgattagctagttggttaggtaaaggctgaccaaggcgatgatcgatagctggtttgagaggatgatcagccacactgggactgagacacggcccagactcctacgggaggcagcagtggggaatattggacaatggggggaaccctgatccagcaatgccgcgtgtgtgaagaaggtcttcggattgtaaagcactttcactagggaagatgatgacggtacctagagaagaagccccggctaacttcgtgccagcagccgcggtaatacgaagggggctagcgttgctcggaatgactgggcgtaaagggcgcgtaggctgtttgtacagtcagatgtgaaatccccgggcttaacctgggaactgcatttgatacgtgcagactagagtccgagagagggttgtggaattcccagtgtagaggtgaaattcgtagatattgggaagaacaccggttgcgaaggcggcaacctggctcggaactgacgctgaggcgcgaaagcgtggggagcgaacaggattagataccctggtagtccacgctgtaaacgatgtgtgctggatgttgggtgattttatcattcagtgtcggagctaacgcgttaagcacaccgcctggggagtacggccgcaaggttgaaactcaaaggaattgacgggggcccgcacaagcggtggagcatgtggtttaattcgaagcaacgcgcagaaccttaccagggcttgcatggggaggctgtagtcagagatggctatttcttcggacctcccacacaggtgctgcatggctgtcgtcagctcgtgtcgtgagatgttgggttaagtcccgcaacgagcgcaacccttgtctttagttgccagcatgtttgggtgggcactctagagagactgccggtgacaagccggaggaaggtggggatgacgtcaagtcctcatggcccttatgtcctgggctacacacgtgctacaatggcggtgacagagggaagctagatggtgacattgtgctgatctccaaaagccgtctcagttcggattgtactctgcaactcgagtgcatgaaggtggaatcgctagtaatcgcggatcagcatgccgcggtgaatacgttcccgggccttgtacacaccgcccgtcacaccatgggagttggtttgaccttaagccggtgagcgaaccgcaaggacgcagccgaccacggtcgggtcagcgactggggtg

SEQ ID NO: 2487 - DNA, 1413 bp, unidentified
  source 1..1413: mol_type = unassigned DNA; note = Parasphingopyxis lamellibrachiae
aacgaacgctggcggcaggcctaacacatgcaagtcgaacgaagtcttcggacttagtggcgcacgggtgcgtaacgcgtgggaatctacccttaggtgcggaataacagttagaaatgactgctaataccgcataatgactccggtccaaagatttatcgcctaaggatgagcccgcgtaagattagctagttggtgaggtaaaagctcaccaaggcgacgatctttagctggtctgagaggatgatcagccacactgggactgagacacggcccagactcctacgggaggcagcagtggggaatattggacaatgggcgaaagcctgatccagccatgccgcgtgagtgatgaaggccttagggttgtaaagctcttttaccagggatgataatgacagtacctggagaataagctccggctaactccgtgccagcagccgcggtaatacggagggagctagcgttgttcggaattactgggcgtaaagcgcgcgtaggcggctattcaagtcagaggtgaaagcccggggctcaaccccggaactgcctttgaaactagatagctagaatatgggagaggtgagtggaattccgagtgtagaggtgaaattcgtagatattcggaagaacaccagtggcgaaggcgactcactggaccattattgacgctgaggtgcgaaagcgtggggagcaaacaggattagataccctggtagtccacgccgtaaacgatgagaactagctgttggggcccatagggtttcagtggcgcagttaacgcattaagttctccgcctggggagtacggtcgcaagattaaaactcaaaggaattgacgggggcctgcacaagcggtggagcatgtggtttaattcgaagcaacgcgcagaaccttaccagcgtttgacatcccgatcgcggtttccagagatggattccttcagttaggctggatcggtgacaggtgctgcatggctgtcgtcagctcgtgtcgtgagatgttgggttaagtcccgcaacgagcgcaaccctcatccttagttgccagcatttagttgggcactctaaggaaactgccggtgataagccggaggaaggtggggatgacgtcaagtcctcatggcccttacacgctgggctacacacgtgctacaatggcggtgacagtgggcagctagatcgcaagatcatgctaatctcaaaaaaccgtctcagttcggattgttctctgcaactcgagagcatgaaggcggaatcgctagtaatcgcggatcagcatgccgcggtgaatacgttcccaggccttgtacacaccgcccgtcacaccatgggagttggattgacccgaaggtggtgagctaacctgcttgcaggaggcagccaaccacggtcggttcagcgactggggtg

SEQ ID NO: 2488 - DNA, 1436 bp, unidentified
  source 1..1436: mol_type = unassigned DNA; note = Parendozoicomonas haliclonae
tgcaagtcgagcggtaacagatctagcttgctagatgctgacgagcggcggacgggtgagtaatgcatagaaatctgcctggtagtgggggatagcccagagaaatttggattaataccgcatacgccctacgggggaaagcaggggaccttcgggccttgcgctatcagatgagtctatgtcggattagcttgttggtgaggtaatggctcaccaaggcgacgatccgtagctggtctgagaggatgatcagccacactgggactgagacacggcccagactcctacgggaggcagcagtggggaatattggacaatgggcgaaagcctgatccagccatgccgcgtgtgtgaagaaggccttagggttgtaaagcactttcagcgaggaggaaaggatgttggttaatacccagcgtctgtgacgttactcgcagaagaagcaccggctaactccgtgccagcagccgcggtaatacggagggtgcaagcgttaatcggaattactgggcgtaaagcgtgcgtaggcggccatttaagttggatgtgaaagccccgggctcaacctgggaacggcatccaaaactgagtggcttgagtgcggaagaggagtgtggaatttcctgtgtagcggtgaaatgcgtagatataggaaggaacaccagtggcgaaggcgacactctggtctgacactgacgctgaggtacgaaagcgtggggagcaaacaggattagataccctggtagtccacgccgtaaacgatgtctactagttgtcgggttccttgcgaacttggtaacgcagctaacgcgataagtagaccgcctggggagtacggccgcaaggttaaaactcaaatgaattgacgggggcccgcacaagcggtggagcatgtggtttaattcgaagcaacgcgaagaaccttacctggccttgacatactgtgaacttactagagatagtttggtgccttcgggaacacagatacaggtgctgcatggctgtcgtcagctcgtgtcgtgagatgttgggttaagtcccgtaacgagcgcaacccctgtccttagttaccagcacgttatggtgggcactctagggagactgccggtgacaaaccggaggaaggtggggatgacgtcaagtcatcatggcccttacggccagggctacacacgtgctacaatggtacatacaaacggtcgcgaagcagcaatgtggagctaatctgagaaaatgtatcgtagtccggattggggtctgcaactcgaccccatgaagtcggaatcgctagtaatcgcaaatcagaatgttgcggtgaatacgttcccgggccttgtacacaccgcccgtcacaccatgggagtgggttgctccagaagtagctagcttaaccttcgggagagcggttaccacggagtgattcatgactggggtga

SEQ ID NO: 2489 - DNA, 1430 bp, unidentified
  source 1..1430: mol_type = unassigned DNA; note = Parvibacter caecicola
gatgaacgctggcggcgtgcttaacacatgcaagtcgaacgattaaaccgccctcgggcggaaatagagtggcgaacgggtgagtaacacgtgaccaacctgccccgcgctccgggacaaccgctggaaacggcggctaataccggatactccggccagcccgcatgggccggccgggaaagccttcacggcgcgggatggggtcgcggcccattaggtagtaggcggggtaacggcccacctagcccgcgatgggtagccggactgagaggtcgaccggccacattgggactgagatacggcccagactcctacgggaggcagcagtggggaattttgcgcaatgggggaaaccctgacgcagcaacgccgcgtgcgggacgacggccctcgggttgtaaaccgctttcagtggggacgatggtgacggtacccacagaagaagctccggctaactacgtgccagcagccgcggtaatacgtagggagcgagcgttatccggattcattgggcgtaaagcgcgcgtaggcggctgcctaagcggaacctctaatcccggggctcaacctcgggccgggttccgaactgggcggctcgagtgcggtagaggcaggcggaattcccggtgtagcggtggaatgcgcagatatcgggaagaacaccgatggcgaaggcagcctgctgggccgtcactgacgctgaggcgcgaaagctgggggagcgaacaggattagataccctggtagtcccagccgtaaacgatgggcgctaggtgtggggggaccatccctccgtgccgcagccaacgcattaagcgccccgcctggggagtacggccgcaaggctaaaactcaaaggaattgacgggggcccgcacaagcagcggagcatgtggcttaattcgaagcaacgcgaagaaccttaccagggcttgacatgcgagtgaagccggggaaacccggtggccgagaggagctcgcgcaggtggtgcatggctgtcgtcagctcgtgtcgtgagatgttgggttaagtcccgcaacgagcgcaacccctgtcccgtgttgccagcattcagttggggactcgcgggagactgccggcgttaagccggaggaaggtggggacgacgtcaagtcatcatgccccttatgccctgggctgcacacgtgctacaatggccggtacagagggctgcgacgccgcgaggcggagcgaatcccaaaaagccggccccagttcggatcgcaggctgcaacccgcctgcgtgaagtcggagttgctagtaatcgcggatcagcatgccgcggtgaatacgttcccgggccttgtacacaccgcccgtcacaccacccgagtcgtctgcacccgaagccgccggccgaacccgaaaggggcggaggtgtcgaaggtgtggagggtaaggggggtg

SEQ ID NO: 2490 - DNA, 1408 bp, Parvibaculum lavamentivorans
  source 1..1408: mol_type = unassigned DNA
aacgaacgctggcggcaggcttaacacatgcaagtcgaacgccctcttcggagggagtggcagacgggtgagtaacacgtgggaacctacctaggggtacggaataactcggggaaactcgtgctaataccgtatacgaccttcgggtgaaagatttatcgcccctagatgggcccgcgctggattagctagttggtggggtaaaagcctaccaaggcgacgatccatagctggtctgagaggatgatcagccacactgggactgagacacggcccagactcctacgggaggcagcagtggggaatcttggacaatgggggaaaccctgatccagccatgccgcgtgagtgatgaaggccttagggttgtaaagctctttcgccagggaagataatgacggtacctggataagaagccccggctaactccgtgccagcagccgcggtaatacggagggggctagcgttgttcggaattactgggcgtaaagcgcacgtaggcggctatccaagttgggggtgaaatccctgggcttaacccaggaactgccttcaaaactggatggctagagtccgagagaggtgagtggaatttccagtgtagaggtgaaattcgtagatattggaaagaacaccagtggcgaaggcggctcactggctcggtactgacgctgaggtgcgacagcgtggggagcaaacaggattagataccctggtagtccacgccgtaaacgatgggtgctagttgtcaggcagcttgctgcttggtgacgcagctaacgcattaagcaccccgcctggggagtacggtcgcaagattaaaactcaaaggaattgacgggggcccgcacaagcggtggagcatgtggtttaattcgaagcaacgcgcagaaccttaccaacccttgacatcccggtcgcggttaccagagatggtttccttcagttcggctggaccggagacaggtgttgcatggctgtcgtcagctcgtgtcgtgagatgttgggttaagtcccgcaacgagcgcaaccctcgcctttagttgccatcattaagttgggcactctagagggactgccgatgataagtcggaggaaggtggggatgacgtcaagtcctcatggcccttacgggttgggctacacacgtgctacaatggcggcgacaatgggcagcgaaggggcgacccggtgcaaatcccaaaaagccgtctcagttcggattgtactctgcaactcgagtgcatgaaggtggaatcgctagtaatcgcgtaacagcatgacgcggtgaatacgttcccgggccttgtacacaccgcccgtcacaccatgggagttggttttacccgaagccggtgcgctaaccgcaaggaggcagccgaccacggtaaggtcagcgactggggtg

SEQ ID NO: 2491 - DNA, 1414 bp, unidentified
  source 1..1414: mol_type = unassigned DNA; note = Parvibium lacunae
ccatgcagtcgaacgggggtagcaatactctagtggcgaacgggtgagtaatatatcggaacgtacccagtagtgggggataactagtcgaaagattagctaataccgcatacgacctacgggtgaaagcgggggaccgtaaggcctcgcgctattggagcggccgatatcagattagctagttggtggggtaaaagctcaccaaggcgacgatctgtagctggtctgagaggacgaccagccacactgggactgagacacggcccagactcctacgggaggcagcagtggggaattttggacaatgggggcaaccctgatccagcaatgccgcgtgtgtgaagaaggccttcgggttgtaaagcacttttgtcagggaagaaaactgttgcgctaatatcgcgacgggatgacggtacctgaagaataaggaccggctaactacgtgccagcagccgcggtaatacgtagggtccaagcgttaatcggaattactgggcgtaaagcgtgcgcaggcggttatgtaagacaggtgtgaaatccccgggcttaacctgggaactgcacttgtgactgcatggctagagtgtgatagaggggggtagaattccacgtgtagcagtgaaatgcgtagagatgtggaggaataccgatggcgaaggcagccccctgggtcaatacgacgctcatgcacgaaagcgtggggagcaaacaggattagataccctggtagtccacgccctaaacgatgcctactagttgttgggtcttcattgactcagtaacgcagctaacgcgtgaagtaggccgcctggggagtacggtcgcaagattaaaactcaaaggaattgacggggacccgcacaagcggtggatgatgtggattaattcgatgcaacgcgaaaaaccttacctacgcttgacatgtctgaaagtttccagagatggattcgtgctcgaaagagaatcagaacacaggtgctgcatggctgtcgtcagctcgtgtcgtgagatgttgggttaagtcccgcaacgagcgcaacccttgtcattagttgctacgaaagggcactctaatgagactgccggtgacaaaccggaggaaggtggggatgacgtcaagtcctcatggcccttatgcgtagggcttcacacgtcatacaatggtcggtacagagggttgccaacccgcgagggggagctaatctcataaaaccgatcgtagtccggattgcactctgcaactcgagtgcatgaagtcggaatcgctagtaatcgcggatcagcatgtcgcggtgaatacgttcccgggtcttgtacacaccgcccgtcacaccatgggagtggcttttgccagaagtagttagcctaaccgcaaggagggcgattaccacggcaggggtcatgactgggg

SEQ ID NO: 2492 - DNA, 1383 bp, Parvularcula bermudensis
  source 1..1383: mol_type = unassigned DNA
gacgaacgctggcggcaggcttaacacatgcaagtcgaacgatccttcgggatagtggcagacgggtgcgtaacacgtgggaacctacctcagggtacggaataactcggggaaactcgtgctaataccgtatatgcctttgggtgaaagatttatcgccctgagatgggcccgcggctgattaggtagttggtggggtaaaagcctaccaagccgacgatcagtagctggtctgagaggatgatcagccacactgggactgagacacggcccagactcctacgggaggcagcagtgaggaatattggacaatgggggcaaccctgatccagccatgccgcgtgagtgatgaaggccttagggttgtaaaactctttcgccggtgaagataatgacggtaaccggtaaagaagccccggctaatttcgtgccagcagccgcggtaatacgaaaggggctagcgttgttcggaattactgggcgtaaagcgcgcgtaggcgggatgccaagttgggggtgaaatcccggagctcaactccggaactgcctccaaaactggcaacctagaggatgtgagaggatagtggaattccgagtgtagaggtgaaattcgtagatattcggaagaacaccggtggcgaaggcgactgtctggcacatttctgacgctgaggtgcgaaagcgtggggagcaaacaggattagataccctggtagtccacgccgtaaacgatgagggctagttgtcggcttgcatgcaagtcggtgacgcagctaacgcattaagccctccgcctggggagtacggtcgcaagattaaaactcaaaggaattgacgggggcccgcacaagcggtggagcatgtggtttaattcgaagcaacgcgaagaaccttaccaacccttgacatcccgattgcggtttccagagatggataccttcatttagttggatcggtgacaggtgttgcatggctgtcgtcagctcgtgtcgtgagatgttgggttaagtcccgcaacgagcgcaaccctcgctgttagttgccagcatttagttgggcactctaacgggaccgccggtgataagccggaggaaggtggggacgacgtcaagtcatcatggcccttacgggttgggctacacacgtgctacaatggcgctcatagtgggataatccccaaaaggcgtctcagttcggattgtcttctgcaactcgaaggcatgaagtcggaatcgctagtaatcgcggatcagcatgccgcggtgaatacgttcccgggccttgtacacaccgcccgtcacaccatgggagttggttttacccgacgacgctgcgctaaccttcgggaggcaggcggccacggtaagatcagcgactggggtg

SEQ ID NO: 2493 - DNA, 1385 bp, Pasteurella aerogenes
  source 1..1385: mol_type = unassigned DNA
attgaacgctggcggcaggcttaacacatgcaagtcgaacggtaacagggagaaagcttgctttctttgctgacgagtggcggacgggtgagtaatgcttgggaatctggcttatggagggggataacgacgggaaactgtcgctaataccgcgtagtgtcgagagacgaaagaccgggaccgcaaggccggttaccataagatgagcccaagtgggattaggtagttggtggggtaaaggcctaccaagcctgcgatctctagctggtctgagaggatggccagccacactggaactgagacacggtccagactcctacgggaggcagcagtggggaatattgcgcaatgggggcaaccctgacgcagccatgccgcgtgaatgaagaaggccttcgggttgtaaagttctttcggtgatgaggaaggcggttagtttaataggctaatcgattgacgttaatcacagaagaagcaccggctaactccgtgccagcagccgcggtaatacggagggtgcgagcgttaatcggaataactgggcgtaaagggcacgcaggcggttgcttaagtgaggtgtgaaatccccgggcttaacctgggaattgcatttcagactgggcagctagagtattttagggaggggtagaattccacgtgtagcggtgaaatgcgtagagatgtggaggaataccgaaggcgaaggcagccccttggggaaatactgacgctcatgtgcgaaagcgtggggagcaaacaggattagataccctggtagtccacgctgtaaacgctgtcgatttggggattgggctttaagcttggtgcccgtagctaacgtgataaatcgaccgcctggggagtacggccgcaaggttaaaactcaaatgaattgacgggggcccgcacaagcggtggagcatgtggtttaattcgatgcaacgcgaagaaccttacctactcttgacatccagagaagagcgcagagatgtgcttgtgccttcgggagctctgagacaggtgctgcatggctgtcgtcagctcgtgttgtgaaatgttgggttaagtcccgcaacgagcgcaacccttatcctttgttgccagcacgttatggtgggaactcaaaggagactgccggtgataaaccggaggaaggtggggatgacgtcaagtcatcatggcccttacgagtagggctacacacgtgctacaatggtgcatacagagagcgacgagaccgcgaggtggagtgaatctcagaaagtgcatctaagtccggattggagtctgcaactcgactccatgaagtcggaatcgctagtaatcgcgaatcagaatgtcgcggtgaatacgttcccgggccttgtacacaccgcccgtcacac

SEQ ID NO: 2494 - DNA, 1462 bp, Pasteurella bettyae
  source 1..1462: mol_type = unassigned DNA
attgaacgctggcggcaggcttaacacatgcaagtcgaacggtagcacaggggagcttgctccctgggtgacgagtggcggacgggtgagtaatgcttgggaatttggcttatggagggggataactacgggaaactgtagctaataccgcgtaatgtctacggactaaagggtgggactatttggccacctgccatgagatgagcccaagtgggattaggtagttggtggggtaaaggcctaccaagccgacgatctctagctggtctgagaggatgaccagccacactggaactgagacacggtccagactcctacgggaggcagcagtggggaatattgcacaatggggggaaccctgatgcagccatgccgcgtgaatgaagaaggccttcgggttgtaaagttctttcggtgatgaggaaggcaggtattttaatagaatacttgattgacgttaatcacagaagaagcaccggctaactccgtgccagcagccgcggtaatacggagggtgcgagcgttaatcggaataactgggcgtaaagggcatgcaggcggttgtttaagtgagatgtgaaagccccgggcttaacctgggaattgcatttcagactggacagctagagtactttagggaggggtagaattccacgtgtagcggtgaaatgcgtagagatgtggaggaataccgaaggcgaaggcagccccttgggaatgtactgacgctcatatgcgaaagcgtggggagcaaacaggattagataccctggtagtccacgctgtaaacgatgtcgatttggggattgagcaataagcttggtgctcgaagctaacgtgataaatcgaccgcctggggagtacggccgcaaggttaaaactcaaatgaattgacgggggcccgcacaagcggtggagcatgtggtttaattcgatgcaacgcgaagaaccttacctactcttgacatccatagaagaactcagagatgagtttgtgccttcgggagctatgagacaggtgctgcatggctgtcgtcagctcgtgttgtgaaatgttgggttaagtcccgcaacgagcgcaacccttatcctttgttgccagcgacatggtcgggaactcaaaggagactgccagtgataaactggaggaaggtggggatgacgtcaagtcatcatggcccttacgagtagggctacacacgtgctacaatggtgcatacagagggaagcgagcctgcgagggggagcgaatctcagaaagtgcatctaagtccggattggagtctgcaactcgactccatgaagtcggaatcgctagtaatcgcaaatcagaatgttgcggtgaatacgttcccgggccttgtacacaccgcccgtcacaccatgggagtgggttgtaccagaagtagatagcttaacggaaacgggggcgtttaccacggtatgattcatgactggggtg

SEQ ID NO: 2495 - DNA, 1414 bp, unidentified
  source 1..1414: mol_type = unassigned DNA; note = Pasteurella caecimuris
attgaacgctggcggcaggcttaacacatgcaagtcgaacggtagcaggaaggaagcttgctttctttgctgacgagtggcggacgggtgagtaatgcttgggaatctggcttatggagggggataactgcgggaaactgcagctaataccgcgtaaagtctttggactaaagggggcgtttgctcttgccataagatgagcccaagtgggattaggtagttggtggggtaatggctcaccaagccgtcgatctctagctggtctgagaggatgaccagccacaccgggactgagacacggcccggactcctacgggaggcagcagtggggaatattgcgcaatggggggaaccctgacgcagccatgccgcgtgaatgaagaaggccttcgggttgtaaagttctttcggtgatgaggaaggcagtttggttaatagccaagctgattgacgttagtcacagaagaagcaccggctaactccgtgccagcagccgcggtaatacggagggtgcgagcgttaatcggaataactgggcgtaaagggcacgcaggcggatttttaagtgaggtgtgaaagccccgggcttaacctgggaattgcatttcagactgggaatctagagtactttagggaggggtagaattccacgtgtagcggtgaaatgcgtagagatgtggaggaataccgaaggcgaaggcagccccttgggaatgtactgacgctcatgtgcgaaagcgtggggagcaaacaggattagataccctggtagtccacgctgtaaacgctgtcgatttgggggttggggtttaactctgacgcccgtagctaacgtgataaatcgaccgcctggggagtacggccgcaaggttaaaactcaaatgaattgacgggggcccgcacaagcggtggagcatgtggtttaattcgatgcaacgcgaagaaccttacctactcttgacatccagagaatcctgtagagatacgggagtgccttcgggagctttgagacaggtgctgcatggctgtcgtcagctcgtgttgtgaaatgttgggttaagtcccgcaacgagcgcaacccttatcctttgttgccagcgatacggtcgggaactcaaaggagactgccggtgataaaccggaggaaggtggggatgacgtcaagtcatcatggcccttacgagtagggctacacacgtgctacaatggcgtatacagagggaggcgaagcagcgatgtggagcgaatctcacaaagtacgtctaagtccggattggagtctgcaactcgactccatgaagtcggaatcgctagtaatcgcgaatcagaatgtcgcggtgaatacgttcccgggccttgtacacaccgcccgtcacaccatgggagtgggttgtaccagaagtagatagctaac

SEQ ID NO: 2496 - DNA, 1364 bp, Pasteurella canis
  source 1..1364: mol_type = unassigned DNA
attgaacgctggcggcaggcttaacacatgcaagtcgaacggtagcaggaagaaagcttgctttttttgctgacgagtggcggacgggtgagtaatgcttgggaatctggcttatggagggggataactgtgggaaactgcagctaataccgcgtataatcgagagatgaaagggtgggaccgtaaggccacttgccataagatgagcccaagtgggattaggtagttggtggggtaaaggcctaccaagcctgcgatctctagctggtctgagaggatggccagccacactgggactgagacacggcccagactcctacgggaggcagcagtggggaatattgcgcaatggggggaaccctgacgcagccatgccgcgtgaatgaagaaggccttcgggttgtaaagttctttcggtgatgaggaaggggtattattgaatagataatatcattgacgttaattacagaagaagcaccggctaactccgtgccagcagccgcggtaatacggagggtgcgagcgttaatcggaataactgggcgtaaagggcacgcaggcggacttttaagtgagatgtgaaatccccgagcttaacttgggaactgcatttcagactgggagtctagagtactttagggaggggtagaattccacgtgtagcggtgaaatgcgtagagatgtggaggaataccgaaggcgaaggcagccccttgggaatgtactgacgctcatgtgcgaaagcgtggggagcaaacaggattagataccctggtagtccacgctgtaaacgctgtcgatttggggattggactttatgtttggtgcccgaagctaacgtgataaatcgaccgcctggggagtacggccgcaaggttaaaactcaaatgaattgacgggggcccgcacaagcggtggagcatgtggtttaattcgatgcaacgcgaagaaccttacctactcttgacatcctaagaagagctcagagatgagcttgtgccttcgggaacttagagacaggtgctgcatggctgtcgtcagctcgtgttgtgaaatgttgggttaagtcccgcaacgagcgcaacccttatcctttgttgccagcgatttggtcgggaactcaaaggagactgccagtgacaaactggaggaaggtggggatgacgtcaagtcatcatggcccttacgagtagggctacacacgtgctacaatggtgcatacagagggcggcgagacggcgacgttgagcgaatctcagaaagtgcatctaagtccggattggagtctgcaactcgactccatgaagtcggaatcgctagtaatcgcaaatcagaatgttgcggtgaatacgttcccgggcctt

SEQ ID NO: 2497 - DNA, 1464 bp, Pasteurella dagmatis
  source 1..1464: mol_type = unassigned DNA
attgaacgctggcggcaggcttaacacatgcaagtcgaacggtagcaggaagaaagcttgctttctttgctgacgagtggcggacgggtgagtaatgcttgggaatctggcttatggagggggataactgtgggaaactgcagctaataccgcgtagtatcgagagatgaaagggtgggaccttcgggccacctgccataagatgagcccaagtgggattaggtagttggtggggtaaaggcctaccaagccgacgatctctagctggtctgagaggatgaccagccacactgggactgagacacggcccagactcctacgggaggcagcagtggggaatattgcgcaatggggggaaccctgacgcagccatgccgcgtgaatgaagaaggccttcgggttgtaaagttctttcggtaatgaggaaggggtattattgaatagataatatcattgacgttaattacagaagaagcaccggctaactccgtgccagcagccgcggtaatacggagggtgcgagcgttaatcggaataactgggcgtaaagggcacgcaggcggacttttaagtgagatgtgaaatccccgagcttaacttgggaactgcatttcagactgggagtctagagtactttagggaggggtagaattccacgtgtagcggtgaaatgcgtagagatgtggaggaataccgaaggcgaaggcagccccttgggaatgtactgacgctcatgtgcgaaagcgtggggagcaaacaggattagataccctggtagtccacgctgtaaacgctgtcgatttggggattgtgctttatgcatggtgcccgaagctaacgtgataaatcgaccgcctggggagtacggccgcaaggttaaaactcaaatgaattgacgggggcccgcacaagcggtggagcatgtggtttaattcgatgcaacgcgaagaaccttacctactcttgacatccaaagaaggccgtagagatatggctgtgccttcgggaactttgagacaggtgctgcatggctgtcgtcagctcgtgttgtgaaatgttgggttaagtcccgcaacgagcgcaacccttatcctttgttgccagcgatttggtcgggaactcaaaggagactgccagtgacaaactggaggaaggtggggatgacgtcaagtcatcatggcccttacgagtagggctacacacgtgctacaatggtgcatacagagggcggcgagacggcgacgttgagcgaatctcagaaagtgcatctaagtccggattggagtctgcaactcgactccatgaagtcggaatcgctagtaatcgcaaatcagaatgttgcggtgaatacgttcccgggccttgtacacaccgcccgtcacaccatgggagtgggttgtaccagaagtagatagcttaaccttcgggagggcgtttaccacggtatgattcatgactggggtg

SEQ ID NO: 2498 - DNA, 1363 bp, Pasteurella langaaensis
  source 1..1363: mol_type = unassigned DNA
attgaacgctggcggcaggcttaacacatgcaagtcgaacggtaacaggtgagtacttgtacttacgctgacgagtggcggacgggtgagtaatgcttgggaatctagcttatggagggggataactacgggaaactgtagctaataccgcgtagtatcggaagatgaaaggctgggaccgaaaggccagttgccataggatgagcccaagtgggattaggtagttggtagggtaaaggcctaccaagccgacgatctctagctggtctgagaggatgaccagccacactggaactgagacacggtccagactcctacgggaggcagcagtggggaatattgcacaatgggggaaaccctgatgcagccatgccgcgtgaatgaagaaggccttagggttgtaaagttctttcggtagagaggaaggcgaacttgtgaatagcaagtttgattgacgttacctacagaagaagcaccggctaactccgtgccagcagccgcggtaatacggagggtgcgagcgttaatcggaataactgggcgtaaagggcacgcaggcggttgattaagtgagatgtgaaagccccgagctcaacttgggaatagcatttcatactggtcaactagagtactttagggaggggtagaattccacgtgtagcggtgaaatgcgtagagatgtggaggaataccgaaggcgaaggcagccccttgggaatgtactgacgctcatgtgcgaaagcgtggggagcaaacaggattagataccctggtagtccacgctgtaaacgatgtcgatttgggggttgagcttaaagcttggcgcccgtagctaacgtgataaatcgaccgcctggggagtacggccgcaaggttaaaactcaaatgaattgacgggggcccgcacaagcggtggagcatgtggtttaattcgatgcaacgcgaagaaccttacctactcttgacatccagagaagacactagagatagtgttrtgccttcgggagctctgagacaggtgctgcatggctgtcgtcagctcgtgttgtgaaatgttgggttaagtcccgcaacgagcgcaacccttatcctttgttgccagcatgtaaagatgggaactcaaaggagactgccagtgataaactggaggaaggtggggatgacgtcaagtcatcatggcccttacgagtagggctacacacgtgctacaatggtgcatacagagggcggcgaacctgcgagggtgagcgaatctcagaaagtgcatcgtagtccggattggagtctgcaactcgactccatgaagtcggaatcgctagtaatcgcaaatcagaatgttgcggtgaatacgttcccgggcctt

SEQ ID NO: 2499 - DNA, 1460 bp, Pasteurella mairii
  source 1..1460: mol_type = unassigned DNA
  misc_difference 102: note = n is a, c, g, or t
  misc_difference 432: note = n is a, c, g, or t
  misc_difference 450: note = n is a, c, g, or t
  misc_difference 602: note = n is a, c, g, or t
  misc_difference 1063: note = n is a, c, g, or t
attgaacgctggcggcaggcttaacacatgcaagtcgaacggtagcagggaagtgcttgcacttttgctgacgagtggcggacgggtgagtaatgcttgggnatctggcttatggagggggataacgacgggaaactgtcgctaataccgcgtagaatcgggagatgaaagtgtgggaccgtaaggccacatgccataagatgagcccaagtgggattaggtagttggtggggtaaaggcctaccaagcctgcgatctctagctggtctgagaggatggccagccacactggaactgagacacggtccagactcctacgggaggcagcagtggggaatattgcgcaatggggggaaccctgacgcagccatgccgcgtgaatgaagaaggccttcgggttgtaaagttctttcggtgatgaggaaggtggtngatttaatagattcactnattgacgttaatcacagaagaagcaccggctaactccgtgccagcagccgcggtaatacggggggtgcaagcgttaatcggaataactgggcgtaaagggcacgcaggcggacttttaagtgaggtgtgaaatccccgggcttaacctgggnatggcatttcagactgggggtctagagtattttagggaggggtagaattccacgtgtagcggtgaaatgcgtagagatgtggaggaataccgaaggcgaaggcagccccttggggggatactgacgctcaagtgcgaaagcgtggggagcaaacaggattagataccctggtagtccacgctgtaaacgatgtcgatttggggattgggctttaagtttggtgcccgtagctaacgtgataaatcgaccgcctggggagtacggccgcaaggttaaaactcaaatgaattgacgggggcccgcacaagcggtggagcatgtggtttaattcgatgcaacgcgaagaaccttacctactcttgacatccatagaagagctcagagatgagtttgtgccttcgggagctatgagacaggtgctgcatggctgtcgtcagctcgtgttgtgaaatgttgggttnagtcccgcaacgagcgcaacccttatcctttgttgccagcgattaggtcgggaactcaaaggagactgccggtgataaaccggaggaaggtggggatgacgtcaagtcatcatggcccttacgagtagggctacacacgtgctacaatggtgcatacagagagcgacgaggccgcgaggtggagtgaatctcagaaagtgcatctaagtccggattggagtctgcaactcgactccatgaagtcggaatcgctagtaatcgcggatcagaatgtcgcggtgaatacgttcccgggccttgtacacaccgcccgtcacaccrtgggagtgggttgtaccagaagtagatagcttaaccgtaaggatggcgtttaccacggtatgattcatgactgggg

SEQ ID NO: 2500 - DNA, 1464 bp, Pasteurella multocida
  source 1..1464: mol_type = unassigned DNA
attgaacgctggcggcaggcttaacacatgcaagtcgaacggtagcaggaagaaagcttgctttctttgctgacgagtggcggacgggtgagtaatgcttgggaatctggcttatggagggggataactgtgggaaactgcagctaataccgcgtattctctgaggaggaaagggtgggaccttagggccacctgccataagatgagcccaagtgggattaggtagttggtggggtaaaggcctaccaagcctgcgatctctagctggtctgagaggatgaccagccacactggaactgagacacggtccagactcctacgggaggcagcagtggggaatattgcgcaatggggggaaccctgacgcagccatgccgcgtgaatgaagaaggccttcgggttgtaaagttctttcggtaatgaggaagggatgttgttaaatagatagcatcattgacgttaattacagaagaagcaccggctaactccgtgccagcagccgcggtaatacggagggtgcgagcgttaatcggaataactgggcgtaaagggcacgcaggcggacttttaagtgagatgtgaaatccccgagcttaacttgggaactgcatttcagactgggagtctagagtactttagggaggggtagaattccacgtgtagcggtgaaatgcgtagagatgtggaggaataccgaaggcgaaggcagccccttgggaatgtactgacgctcatgtgcgaaagcgtggggagcaaacaggattagataccctggtagtccacgctgtaaacgctgtcgatttggggattgggctatatgcttggtgcccgaagctaacgtgataaatcgaccgcctggggagtacggccgcaaggttaaaactcaaatgaattgacgggggcccgcacaagcggtggagcatgtggtttaattcgatgcaacgcgaagaaccttacctactcttgacatcctaagaagagctcagagatgagtttgtgccttcgggaacttagagacaggtgctgcatggctgtcgtcagctcgtgttgtgaaatgttgggttaagtcccgcaacgagcgcaacccttatcctttgttgccagcgattcggtcgggaactcaaaggagactgccagtgacaaactggaggaaggtggggatgacgtcaagtcatcatggcccttacgagtagggctacacacgtgctacaatggtgcatacagagggcagcgagagtgcgagcttgagcgaatctcagaaagtgcatctaagtccggattggagtctgcaactcgactccatgaagtcggaatcgctagtaatcgcaaatcagaatgttgcggtgaatacgttcccgggccttgtacacaccgcccgtcacaccatgggagtgggttgtaccagaagtagatagcttaaccttcgggggggcgtttaccacggtatgattcatgactggggtg

SEQ ID NO: 2501 - DNA, 1470 bp, Pasteurella testudinis
  source 1..1470: mol_type = unassigned DNA
  misc_difference 7: note = n is a, c, g, or t
  misc_difference 57..58: note = n is a, c, g, or t
  misc_difference 321: note = n is a, c, g, or t
  misc_difference 530: note = n is a, c, g, or t
  misc_difference 949: note = n is a, c, g, or t
  misc_difference 1189: note = n is a, c, g, or t
attgaangctggcggcaggcttaacacatgcaagtcgagcggtaacggggggtagcnngctactctgccgacgagcggcggacgggtgagtaatgcttgggaatctgccttatggcgggggataactacgggaaactgtagctaataccgcgtaacatctttactttagggtagggattaaagtgtgggactttcgggccacacgccatgagatgagcccaagtgagattaggtagttggtgaggtaatggctcaccaagccgtcgatctctaactggtctgagaggatgaccagtcacactgggactgagacacggcccngactcctacgggaggcagcagtggggaatattgcgcaatgggggcaaccctgacgcagctatgccgcgtgaatgaagaaggccttcgggttgtaaagttctttcggtgatgaggaaggtgttgaagttaatagctttaacaattgacgttagtcacagaagaagcaccggctaactccgtgccagcagccgcggtaatacggagggtgngagcgttaatcggaataactgggcgtaaagggcacgcaggcggatagataagtgagatgtgaaatccccgagcttaacttgggaactgcatttcatactgtttatctagagttttgtagagaggggtagaattccacgtgtagcggtgaaatgcgtagagatgtggaggaataccggaggcgaaggcggccccttggacaaagactgacgctcatgtgcgaaagcgtggggagcaaacaggattagataccctggtagtccacgctgtaaacgatgtcgatttgggggttgggtgtatacctggctcycgtagctaacgcgttaaatcgaccgcctggggagtacggccgcaaggttaaaactcaaatgaattgacgggggcccgcacaagcggtggagcatgtggtttaattcgatgnaacgcgaagaaccttacctactcttgacatcctaagaagagctcagagatgagcttgtgccttcgggaacttagagacaggtgctgcatggctgtcgtcagctcgtgttgtgaaatgttgggttaagtcccgcaacgagcgcaacccctatcctttgttgccatcattaagttgggaactcaaaggagactgccggtgacaaaccggaggaaggtggggatgacgtcaagtcatcatggnccttacgagtagggctacacacgtgctacaatggcgtatacagagggaagcgagagtgcgagcttaagcaaatctcttaaagtgcgtcgtagtccggattggagtctgcaactcgactccatgaagtcggaatcgctagtaatcgcaaatcagaatgttgcggtgaatacgttcccgggccttgtacacaccgcccgtcacaccatgggagtgggttgtaccagaagtagatagcttaaccgagaggggggcgtttaccacggtatgattcatgactgggg

SEQ ID NO: 2502 - DNA, 1429 bp, Paucibacter toxinivorans
  source 1..1429: mol_type = unassigned DNA
aacgctggcggcatgccttacacatgcaagtcgaacggcagcacgggagcatcctggtggcgagtggcgaacgggtgagtaatgtatcggaacgtgcccagttgtgggggataactacttgaaagagtggctaataccgcatacgacctgagggtgaaagcgggggatgcaaacctcgcgcaattggagcggccgatatcagattagctagttggcggggtaaaagcccaccaaggcgacgatctgtagctggtctgagaggacgaccagccacactgggactgagacacggcccagactcctacgggaggcagcagtggggaattttggacaatggacgcaagtctgatccagccatgccgcgtgcgggaagaaggccttcgggttgtaaaccgcttttgtcagggaagaaacggcctgggataataccttgggctaatgacggtacctgaagaataagcaccggctaactacgtgccagcagccgcggtaatacgtagggtgcaagcgttaatcggaattactgggcgtaaagcgtgcgcaggcggttatgcaagacagatgtgaaatccccgggctcaacctgggaactgcatttgtgactgcatagctagagtacggtagagggggatggaattccgcgtgtagcagtgaaatgcgtagatatgcggaggaacaccgatggcgaaggcaatcccctggacctgtactgacgctcatgcacgaaagcgtggggagcaaacaggattagataccctggtagtccacgccctaaacgatgtcaactggttgttgggagggtttcttctcagtaacgtagctaacgcgtgaagttgaccgcctggggagtacggccgcaaggttgaaactcaaaggaattgacggggacccgcacaagcggtggatgatgtggtttaattcgatgcaacgcgaaaaaccttacctacccttgacatgtcagagatcccgaagagatttgggagtgtcgaaagaaatctgaacacaggtgctgcatggccgtcgtcagctcgtgtcgtgagatgttgggttaagtcccgcaacgagcgcaacccttgtcattagttgctactagtgggcactctaatgagactgccggtgacaaaccggaggaaggtggggatgacgtcaggtcatcatggcccttatgggtagggctacacacgtcatacaatggccggtacagagggctgccaacccgcgagggggagctaatcccagaaaaccggtcgtagtccggatcgcagtctgcaactcgactgcgtgaagtcggaatcgctagtaatcgcggatcagttgccgcggtgaatacgttcccgggtcttgtacacaccgcccgtcacaccatgggagcgggttctgccagaagtagttagcctaaccgcaaggagggcgattaccacggcagggt

SEQ ID NO: 2503 - DNA, 1455 bp, Paucimonas lemoignei
  source 1..1455: mol_type = unassigned DNA
attgaacgctggcggcatgcctwacacatgcaagtcgaacggcagcacgggtrcttgcacctggtggcgagtggcgaacgggtgagtaatatatcggaacgtgcccaatagtgggggataacgtagcgaaagttacgctaataccgcatacgctctacggaggaaagtgggggatcgcaagacctcatgctattggagcggccgatatctgattagctagttggtggggtaatggcccaccaaggcgacgatcagtagctggtctgagaggacgaccarccacactgggactgagacacggcccagactcctacgggaggcagcagtggggaattttggacaatgggggcaaccctgatccagcaatgccgcgtgtgtgaagaaggccttcgggttgtaaagcacttttgtcaggaacgaaacggagctggctaatacctggctctaatgacggtacctgaagaataagcaccggctaactacgtgccagcagccgcggtaatacgtagggtgcgagcgttaatcggaattactgggcgtaaagcgtgcgcaggcggttgtgcaagacagaggtgaaatccccgagcttaacttgggaactgcctttgtgactgcatggctagagtgtgtcagaggggggtagaattccacgtgtagcagtgaaatgcgtagatatgtggaggaataccgatggcgaaggcagccccctgggataacactgacgctcatgcacgaaagcgtggggagcaaacaggattagataccctggtagtccacgccctaaacgatgtcaactagttgtcgggtcttaattgacttggtaacgcagctaacgcgtgaagttgaccgcctggggagtacggtcgcaagattaaaactcaaaggaattgacggggacccgcacaagcggtggatgatgtggattaattcgatgcaacgcgaaaaaccttacctacccttgacatgtacggaatccttcagagatggaggagtgctcgaaagagagccgtaacacaggtgctgcatggctgtcgtcagctcgtgtcgtgagatgttgggttaagtcccgcaacgagcgcaacccttgtcattagttgctacgaaagggcactctaatgagactgccggtgacaaaccggaggaaggtggggatgacgtcaagtcctcatggcccttatgggtagggcttcacacgtcatacaatggtacatacagagggctgccaacccgcgagggggagctaatcccagaaagtgtatcgtagtccggattgtagtctgcaactcgactacatgaagttggaatcgctagtaatcgcggatcagcatgtcgcggtgaatacgttcccgggtcttgtacacaccgcccgtcacaccatgggagcgggttttaccagaagtaggtagcttaaccgcaaggagggcgcttaccacggtaggattcgtgactggggtg

SEQ ID NO: 2504 - DNA, 1380 bp, Pectinatus cerevisiiphilus
  source 1..1380: mol_type = unassigned DNA
  misc_difference 696: note = n is a, c, g, or t
  misc_difference 738: note = n is a, c, g, or t
  misc_difference 853..854: note = n is a, c, g, or t
  misc_difference 1364: note = n is a, c, g, or t
taggcaacctgcctccaagatggggacaacatctcgaaaggggtgctaataccgaatgttgtaaagcgattgcataatggctttaccaaaggcggcttttagctgtcgcttggagatgggcctacgtctgattagctagttggtgcggtaacggcgcaccaaggcaacgatcagtagccggtctgagaggatggacggccacattgggactgagacacggcccaaactcctacgggaggcagcagtggggaatcttccgcaatgggcgaaagcctgacggagcaacgccgcgtgaacgaggaaggtcttcggatcgtaaagttctgttgcaggggacgaatggcagtagtgttaataccactattgaatgacggtaccctgttagaaagccacggctaactacgtgccagcagccgcggtaatacgtaggcggcaagcgttgtccggaattattgggcgtaaagggagcgcaggcggatgactaagcggatcttaaaagtgcggggctcaaccccgtgatgggattcgaactggtcatcttgagtgcaggagaggaaagcggaattcccagtgtagcggtgaaatgcgtagatattgggaagaacaccagtggcgaaggcggctttctggactgtaactgacgctgaggctcgaaagccagggtagcgaacgggattagataccccggtagtcctngccgtaaacgatggatactaggtgtagggggtattgaccctncctgtgccggagttaacgcaataagtatcccgcctggggagtacggccgcaaggctgaaactcaaaggaattgacgggggcccgcacaagcggtggagtatgtggtttaattcgnngcaacgcgaagaaccttaccagggcttgacattgattgacgtatgcagagatgcatattttctcttcggaggacaagaaaacaggtggtgcatggctgtcgtcagctcgtgtcgtgagatgttgggttaagtcccgcaacgagcgcaacccctatcatttgttgccagcacgtcaaggtgggaactcaaatgagactgccgcggataacgcggaggaaggcggggatgacgtcaagtcatcatgccccttacgtcctgggctacacacgtactacaatgggatacacagagggaagcgaaggagtgatctggagcggaacccaaaaaatatcccccagttcggattgcaggctgcaactcgcctgcatgaagtcggaatcgctagtaatcgcaggtcagcatactgcggtgaatacgttcccgggccttgtacacaccgcccgtcacaccacgaaagtcatccacacccgaagccggctaagggccgcaaggaaccgaccgtctaaggtnggggcgatgaccgggg

SEQ ID NO: 2505 - DNA, 1444 bp, Pedobacter africanus
  source 1..1444: mol_type = unassigned DNA
gatgaacgctagcggcaggcctaatacatgcaagtcgaacgagattaaggtgcttgcaccttatgaaagtggcgcacgggtgcgtaacgcgtatgcaacctaccttaatcagggggatagcccgaagaaattcggattaacaccgcataaaatcacagtacagcattgtacaatgatcaaatatttataggattaagatgggcatgcgtgtcattagctagttggcggggtaacggcccaccaaggcgacgatgactaggggatctgagaggatggccccccacactggtactgagacacggaccagactcctacgggaggcagcagtaaggaatattggtcaatggagggaactctgaaccagccatgccgcgtgcaggaagacagccctctgggtcgtaaactgcttttattcgggaataaaccttgctacgtgtagcaagctgaatgtaccgaaggaataaggatcggctaactccgtgccagcagccgcggtaatacggaggatccaagcgttatccggatttattgggtttaaagggtgcgtaggcggcttattaagtcaggggtgaaagacggtggctcaaccatcgcagtgcccttgatactgatgagcttgaatacactagaggtaggcggaatgtgacaagtagcggtgaaatgcatagatatgtcacagaacaccgattgcgaaggcagcttactatggtgtgattgacgctgaggcacgaaagcgtggggatcaaacaggattagataccctggtagtccacgccctaaacgatgaatactcgctgttagcgatatacagttagcggctaagcgaaagcgttaagtattccacctggggagtacgcccgcaagggtgaaactcaaaggaattgacgggggcccgcacaagcggaggagcatgtggtttaattcgatgatacgcgaggaaccttacccgggcttgaaagttagtgaataatcaagagattgattagtgagcaatcacacgaaactaggtgctgcatggctgtcgtcagctcgtgccgtgaggtgttgggttaagtcccgcaacgagcgcaacccctatgtttagttgccagcacgttaaggtggggactctaaacagactgcctgtgcaaacagagaggaaggaggggacgacgtcaagtcatcatggcccttacgtccggggctacacacgtgctacaatggatggtacagagggcagcaagctggcaacagcaagcgaatctcaaaaagccattcacagttcggatagaggtctgcaactcgacctcttgaagttggattcgctagtaatcgcgtatcagcaatgacgcggtgaatacgttcccgggccttgtacacaccgcccgtcaagccatggaagttgggggtacctaaagtatgtaaccgcaaggagcgtcctagggtaaaaccgataactggggct

SEQ ID NO: 2506 - DNA, 1444 bp, unidentified
  source 1..1444: mol_type = unassigned DNA; note = Pedobacter luteus
gatgaacgctagcggcaggcctaatacatgcaagtcgaacgagattgaggagcttgctcttcatgaaagtggcgcacgggtgcgtaacgcgtatgcaacctaccttaatcagggggatagcctctcgaaagagagattaacaccgcataaaatcacaagctggcatcagcaaatgatcaaatatttataggattaagatgggcatgcgtgacattagctagttggtaaggtaacggcttaccaaggctacgatgtctaggggatctgagaggatgaccccccacactggtactgagacacggaccagactcctacgggaggcagcagtaaggaatattggtcaatggaggcaactctgaaccagccatgccgcgtgcaggaagacggccctacgggttgtaaactgcttttatacgggaataaacctctttacgtgtaaagagttgaatgtactgtaagaataaggatcggctaactccgtgccagcagccgcggtaatacggaggatccaagcgttatccggatttattgggtttaaagggtgcgtaggcggcctattaagtcaggggtgaaagacggtggctcaaccatcgcagtgcccttgatactgatgggcttgattacacttgaggtaggcggaatgtgacaagtagcggtgaaatgcatagatatgtcacagaacaccaattgcgaaggcagcttactaaggtgttaatgacgctgaggcacgaaagcgtggggatcaaacaggattagataccctggtagtccacgccctaaacgatgaatactcgatgttagcgatatacagttagcgtcaaagcgaaagcgttaagtattccacctggggagtacgcccgcaagggtgaaactcaaaggaattgacgggggcccgcacaagcggaggagcatgtggtttaattcgatgatacgcgaggaaccttacccgggcttgaaagttactgaagtatccagagatggatgcgtccgcaaggacaggaaactaggtgctgcatggctgtcgtcagctcgtgccgtgaggtgttgggttaagtcccgcaacgagcgcaacccctatgtttagttgccagcatgttatggtggggactctaaacagactgcctgtgcaaacagagaggaaggaggggacgacgtcaagtcatcatggcccttacgtccggggctacacacgtgctacaatggatggtacagagggccgctacctggtaacaggatgccaatctcaaaaagccattcacagttcggatagaggtctgcaactcgacctcttgaagttggattcgctagtaatcgcatatcagcaatgatgcggtgaatacgttcccgggccttgtacacaccgcccgtcaagccatggaagttgggggtacctgaagtacgtaaccgcaaggagcgtcctagggtaaaaccgataactggggct

SEQ ID NO: 2507 - DNA, 1444 bp, unidentified
  source 1..1444: mol_type = unassigned DNA; note = Pedobacter nutrimenti
gatgaacgctagcggcaggcctaatacatgcaagtcgaacgagattaagaggcttgcttcttatgaaagtggcgcacgggtgcgtaacgcgtatgcaacctaccttaatcagggggatagcccgaagaaattcggattaagaccgcataaaaacacaggatagcattatccaatgttcaaatatttataggattaagatgggcatgcgtgtcattagctagttggcggggtaacggcccaccaaggcgacgatgactaggggatctgagaggatgaccccccacactggtactgagacacggaccagactcctacgggaggcagcagtaaggaatattggtcaatggagggaactctgaaccagccatgccgcgtgcaggaagacagccctctgggtcgtaaactgcttttattcgggaataaacctttctacgtgtaggaagctgaatgtaccgaaggaataaggatcggctaactccgtgccagcagccgcggtaatacggaggatccaagcgttatccggatttattgggtttaaagggtgcgtaggcggcttattaagtcaggggtgaaagacggtggctcaaccatcgcagtgcccttgatactgatgagcttgaatacactagaggtaggcggaatgtgacaagtagcggtgaaatgcatagatatgtcacagaacaccgattgcgaaggcagcttactatggtgttattgacgctgaggcacgaaagcgtggggatcaaacaggattagataccctggtagtccacgccctaaacgatgaatactcgctgttagcgatatacagttagcggctaagcgaaagcgttaagtattccacctggggagtacgcccgcaagggtgaaactcaaaggaattgacgggggcccgcacaagcggaggagcatgtggtttaattcgatgatacgcgaggaaccttacccgggcttgaaagttagtgaatgatctagagatagatcagtgagcaatcacacgaaactaggtgctgcatggctgtcgtcagctcgtgccgtgaggtgttgggttaagtcccgcaacgagcgcaacccctatgtttagttgccagcacgttaaggtggggactctaaacagactgcctgtgcaaacagagaggaaggaggggacgacgtcaagtcatcatggcccttacgtccggggctacacacgtgctacaatggatggtacagagggcagcaagctggcaacagcaagcgaatctcaaaaagccattcacagttcggatagaggtctgcaactcgacctcttgaagttggattcgctagtaatcgcgtatcagcaatgacgcggtgaatacgttcccgggccttgtacacaccgcccgtcaagccatggaagttgggggtacctaaagtatgtaaccgtaaggagcgtcctagggtaaaaccgataactggggct

SEQ ID NO: 2508 - DNA, 1435 bp, Pedobacter suwonensis
  source 1..1435: mol_type = unassigned DNA
tagcggcaggcctaatacatgcaagtcgaacgatactttccagcttgctggagaggaaagtggcgcacgggtgcgtaacgcgtatgcaacctaccttcatcagggggatagcccggagaaatccggattaataccgcataaaatcacaggatggcattatccaatgatcaaacatttatgggatggagatgggcatgcgtgtcattagctagttggcggggtaacggcccaccaaggcgacgatgactaggggatctgagaggatggccccccacactggtactgagacacggaccagactcctacgggaggcagcagtaaggaatattggtcaatggaggcaactctgaaccagccatgccgcgtgcaggaagactgccctatgggttgtaaactgcttttatccgggaataaacctaaatacgtgtatttagctgaatgtaccggaagaataaggatcggctaactccgtgccagcagccgcggtaatacggaggatccaagcgttatccggatttattgggtttaaagggtgcgtaggcggcctgttaagtcaggggtgaaagacggtagctcaactatcgcagtgcccttgatactgatgggcttgaatggactagaggtaggcggaatgagacaagtagcggtgaaatgcatagatatgtctcagaacaccgattgcgaaggcagcttactatggtcttattgacgctgaggcacgaaagcgtggggatcaaacaggattagataccctggtagtccacgccctaaacgatgaacactcgctgttggcgatacacagtcagcggctaagcgaaagcgttaagtgttccacctggggagtacgcccgcaagggtgaaactcaaaggaattgacgggggcccgcacaagcggaggagcatgtggtttaattcgatgatacgcgaggaaccttacccgggcttgaaagttagtgaagtgatcagagatggatcagtgagcaatcacacgaaactaggtgctgcatggctgtcgtcagctcgtgccgtgaggtgttgggttaagtcccgcaacgagcgcaacccctatgtttagttgccagcatgtcatggtggggactctaaacagactgcctgtgcaaacagagaggaaggaggggacgacgtcaagtcatcatggcccttacgtccggggctacacacgtgctacaatggacggtacagagggcagctacatagcaatatgatgcgaatctcacaaagccgttcacagttcggattggggtctgcaactcgaccccatgaagttggattcgctagtaatcgcgtatcagcaatgacgcggtgaatacgttcccgggccttgtacacaccgcccgtcaagccatggaagctgggggtacctaaagtatgtaaccgcaaggagcgtcctagggtaaaaccggtaactggggct

SEQ ID NO: 2509 - DNA, 1390 bp, unidentified
  source 1..1390: mol_type = unassigned DNA; note = Pelagicola litorisediminis
aacgaacgctggcggcaggcctaacacatgcaagtcgagcgcaccttcgggtgagcggcggacgggttagtaacgcgtgggaacgtgcccttctctaaggaatagccactggaaacggtgagtaataccttatacgcccttcgggggaaagatttatcggagaaggatcggcccgcgttagattagatagttggtggggtaatggcctaccaagtctacgatctatagctggttttagaggatgatcagcaacactgggactgagacacggcccagactcctacgggaggcagcagtggggaatcttagacaatgggcgaaagcctgatctagccatgccgcgtgagtgacgaaggccttagggtcgtaaagctctttcgccagggatgataatgacagtacctggtaaagaaaccccggctaactccgtgccagcagccgcggtaatacggagggggttagcgttgttcggaattactgggcgtaaagcgtacgtaggcggattggaaagtatggggtgaaatcccagggctcaaccctggaactgcctcataaactatcagtctagagttcgagagaggtgagtggaattccgagtgtagaggtgaaattcgtagatattcggaggaacaccagtggcgaaggcggctcactggctcgatactgacgctgaggtacgaaagtgtggggagcaaacaggattagataccctggtagtccacaccgtaaacgatgaatgccagtcgtcgggttgcatgcaattcggtgacacacctaacggattaagcattccgcctggggagtacggtcgcaagattaaaactcaaaggaattgacgggggcccgcacaagcggtggagcatgtggtttaattcgaagcaacgcgcagaaccttaccaacccttgacatactcgtcgtagtttccagagatggattcgtcagttcggctggacgagatacaggtgctgcatggctgtcgtcagctcgtgtcgtgagatgttcggttaagtccggcaacgagcgcaacccacatccctagttgccagcaggttaagctgggcactctatggaaactgcccgtgataagcgggaggaaggtgtggatgacgtcaagtcctcatggcccttacgggttgggctacacacgtgctacaatggcagtgacaatgggttaatcccaaaaaactgtctcagttcggattggggtctgcaactcgaccccatgaagtcggaatcgctagtaatcgcgtaacagcatgacgcggtgaatacgttcccgggccttgtacacaccgcccgtcacaccatgggagttgggtttacccgaaggccgtgcgccaaccttttaggagggggcagcggaccacggtgagctcagcgactggggtg

SEQ ID NO: 2510 - DNA, 1478 bp, Pelobacter acetylenicus
  source 1..1478: mol_type = unassigned DNA
aacgaacgctggcggcgtgcttaacacatgcaagtcgaacgcgaaagggacttcggtcctgagtaaagtggcgcacgggtgagtaacacgtggataatctacccgatggaccgggataacacttcgaaaggggtgctaataccggataagcccacaggctccctggagcttgcgggaaaaggtggggaccttcgggcctgccgtcatcggatgagtccgcggcccattagctagttggtggggtaacggcccaccaaggcgacgatgggtagctggtctgagaggatgatcagccacactggaactgagacacggtccagactcctacgggaggcagcagtggggaattttgcgcaatgggggaaaccctgacgcagcaacgccgcgtgagtgatgaaggctttcgggtcgtaaagctctgtcagaggggaagaaactgttgtggtcgaacaggccgcaagactgacggtaccctcaaaggaagcaccggctaactccgtgccagcagccgcggtaatacggagggtgcaagcgttgttcggaattattgggcgtaaagcgcgtgtaggcggttcgttaagtctgatgtgaaagcccggggctcaaccccggaagtgcattggatactggcggacttgagtacgggagagggaagtggaattccgagtgtaggggtgaaatccgtagatattcggaggaacaccggtggcgaaggcggcttcctggaccgatactgacgctgagacgcgaaagcgtggggagcaaacaggattagataccctggtagtccacgccgtaaacgatgggtactaggtgtcgcgggtattgacccctgcggtgccgaagctaacgcattaagtaccccgcctggggagtacggccgcaaggctaaaactcaaaggaattgacgggggcccgcacaagcggtggagcatgtggtttaattcgacgcaacgcgcagaaccttacctgggcttgacatcccgatcgtactttctggaaacagagaggtcagttcggctggatcggtgacaggtgctgcatggctgtcgtcagctcgtgtcgtgagatgttgggttaagtcccgcaacgagcgcaacccttgtccttagttgccagcattgagttgggcactctaaggagactgccggtgttaaaccggaggaaggtggggatgacgtcaagtcctcatggcccttatgtccagggctacacacgtgctacaatggccggtacaaagggcagcaataccgaaaggtggagcgaatcccagaaagccggtctcagttcggattggagtctgcaactcgactccatgaagttggaatcgctagtaatcgcggatcagcatgccgcggtgaatacgttcccgggccttgtacacaccgcccgtcacaccacgggagttgattgtacctgaaatcggtgggctaaccttcggggggcagccgcttatggtatggtcggtaactggggtg

SEQ ID NO: 2511 - DNA, 1480 bp, Pelobacter carbinolicus
  source 1..1480: mol_type = unassigned DNA
aacgaacgctggcggcgtgcttaacacatgcaagtcgaacgcgaaagtttccttcgggaagcgagtagagtggcgcacgggtgagtaacacgtggataatctgcccgatgacctgggataacacttcgaaagaggtgctaataccggataagcccacaggctcttcggagcatgcgggaaaaggtggggaccttcgggcctaccgtcatcggatgagtccgcggcccattagctagttggtggggtaacggcccaccaaggcgacgatgggtagctggtctgagaggatgatcagccacactggaactgagacacggtccagactcctacgggaggcagcagtggggaattttgcgcaatgggggaaaccctgacgcagcaacgccgcgtgagtgatgaaggctttcgggtcgtaaagctctgtcagaggggaagaaactatcgtggtcgaataggccccggtactgacggtaccctcaaaggaagcaccggctaactccgtgccagcagccgcggtaatacggagggtgcaagcgttgttcggaattattgggcgtaaagcgcgtgtaggcggtctgttaagtctgatgtgaaagccccgggctcaacccgggaagtgcattggatactggcagacttgagtacgggagaggaaagtggaattccgagtgtaggggtgaaatccgtagatattcggaggaacaccggtggcgaaggcggctttctggaccgatactgacgctgagacgcgaaagcgtggggagcaaacaggattagataccctggtagtccacgccgtaaacgatgggtactaggtgtcgcgggtattgacccctgcggtgccgaagctaacgcattaagtaccccgcctggggagtacggccgcaaggctaaaactcaaaggaattgacgggggcccgcacaagcggtggagcatgtggtttaattcgacgcaacgcgcagaaccttacctgggcttgacatcccgatcgtactttctggaaacagttaggtcagtacggctggatcggtgacaggtgctgcatggctgtcgtcagctcgtgtcgtgagatgttgggttaagtcccgcaacgagcgcaacccttgtccttagttgccagcattcagttgggcactctaaggagactgccggtgttaaaccggaggaaggtggggatgacgtcaagtcctcatggcccttatgtccagggctacacacgtgctacaatggccggtacaaagggcagcgaaaccgcaaggtttagcgaatcccaaaaagccggtctcagttcggattggagtctgcaactcgactccatgaagttggaatcgctagtaatcgcggatcagcatgccgcggtgaatacgttcccgggccttgtacacaccgcccgtcacaccacgggagttgattgtacctgaaatcggtgggctaaccttcgggaggcagccgcttatggtatggtcggtaactggggtg

SEQ ID NO: 2512 - DNA, 1480 bp, Pelobacter propionicus
  source 1..1480: mol_type = unassigned DNA
aacgaacgctggcggcgtgcctaacacatgcaagtcgaacgggattaaggggcttgctccttaatctagtggcgcacgggtgagtaacgcgtagataatctgcctgatgatcaggaataacacttcgaaagaggtgctaatacctgataagcccacgacggctttggtcgttgcgggaaaagggggggaccatttggccttctgtcatcagatgagtctgcgtaccattagctagttggtagggtaaaggcctaccaaggcgacgatggttagctggtctgagaggatgatcagccacactggaactgagacacggtccagactcctacgggaggcagcagtggggaattttgcgcaatgggcgaaagcctgacgcagcaacgccgcgtgagtgatgaaggctttcgggtcgtaaagctctgtcaaggggaaagaagtgtattgtggttaatacccatggtacttgacggtacccctgaaggaagcaccggctaactccgtgccagcagccgcggtaatacggggggtgcaagcgttgttcggaattattgggcgtaaagcgcgtgtaggcggtttgttaagtctgatgtgaaagccctgggctcaacccaggaagtgcattggatactggcagacttgaatacgggagagggtagtggaattcctggtgtaggagtgaaatccgtagatatcaggaggaacaccggtggcgaaggcggctacctggaccgatattgacgctgagacgcgaaagcgtgggtagcaaacaggattagataccctggtagtccacgccgtaaacgatgagtactaggtgttgcgggtattgacccctgcagtgccgcagctaacgcattaagtactccgcctgggaagtacggtcgcaagactaaaactcaaaggaattgacgggggcccgcacaagcggtggagcatgtggtttaattcgacgcaacgcgcagaaccttacctgggcttgacatccacggaaccctcccgaaacggaggggtgcccttcggggagccgtgagacaggtgctgcatggctgtcgtcagctcgtgtcgtgagatgttgggttaagtcccgcaacgagcgcaacccctatcctcagttgccatcattaagttgggcactctgtggagactgccggtgtcaaaccggaggaaggtggggatgacgtcaagtcctcatggcccttatgtccagggctacacacgtgctacaatggccggtacaaagagtagcgaagccgcgaggttgagccaatctcataaagccggtctcagttcggattggagtctgcaactcgactccatgaagttggaatcgctagtaatcgcggatcagcatgccgcggtgaatacgttcccgggccttgtacacaccgcccgtcacaccacgggagtcgattggtcccgaagtgcgtgagctaacccgcaagggaggcagcgtcctaaggaatggtcggtgactggggtg

SEQ ID NO: 2513 - DNA, 1494 bp, unidentified
  source 1..1494: mol_type = unassigned DNA; note = Pelodictyon luteolum
agagtttgatcctggctcaggacgaacgctggcggcgtgcctaacacatgcaagtcaaaggaaagcggcttcggccgggagtacttggcgcaagggtgagtaaggcataggtaatctgccctttggactgggataacctcgagaaatcgaggacaataccagatgatgcagcgggaccgcatggtcatgttgttaaagatttatcgccaagggatgagcctatgttccatcaggtagttggtagggtaacggcctaccaagcctacgacggatagctggtctgagaggatgatcagccacattggaactgagacacggtccagactcctacgggaggcagcagtgaggaatattgcgcaatgggcgaaagcctgacgcagcaacgccgcgtggatgatgaagttcttcggaatgtaaagtccttttgcaggggacgaacatgtcggtataccgacactgacggtaccttgcgaataagccacggctaactctgtgccagcagccgcggtgatacaggggtggcaagcgttgtccggatttactgggtgtaaagggtgcgcaggcggacttataagtcgggggttaaatccatgtgcttaacacatgcatggcttccgatactgtaagtctagagtctcggagaggaagatggaatttccggtgtaacggtggaatgtgtagatatcggaaagaacaccagtggcgaaggcagtcttctggccgagtactgacgctcaggcacgaaagcgtggggagcaaacaggattagataccctggtagtccacgccgtaaacgatgaatactagatgttggtcatattgatcagtgtcgcagctaacgcgttaagtattccacctgggaagtacgctcgcaagagtgaaactcaaaggaattgacgggggcccgcacaagcggtggatcatgtggtttaattcgatgcaacgcgaagaaccttacctaggcttgatattgcgactaaacctcctgaaagggagggtccttcggggagtcgtaacaggtgctgcatggctgtcgtcagctcgtgtcgtgagatgttgggttaagtcccgcaacgagcgcaacccctacaattagttactaacaggttaagctgaggactctaattgaactgcctacgcaagtagtgaggaaggaggggatgacgtcaagtcctcatggcccttacgcctagggccacacacgtgatacaatggcagctacagagggcaaagccgcgaggtggaggaaatcccttaaaagctgtctcagtccggatcggagtctgcaactcgactccgtgaagttggaatcgctagtaatcgcagatcagcatgctgcggtgaatgtgttcccgggccttgtacacaccgcccgtcaagtcatggaagtcaggagtacccaaagacgctcgcgcgtttaaggtaagactggtaactgggactaagtcgtaacaaggtagccgtaccggaaggtgcggctggatcacctccttt

SEQ ID NO: 2514 - DNA, 1495 bp, unidentified
  source 1..1495: mol_type = unassigned DNA; note = Pelodictyon phaeoclathratiforme
agagtttgatcctggctcaggacgaacgctggcggcgtgcctaacacatgcaagtcaaaggaaagcagcttcggctgggagtacttggcgcaagggtgagtaacgtataggtaatctgccctttggactggaataaccccgagaaatcggggacaataccagatgaagcagcgacaatcgcatggttgttctgccaaagatttatcgccaaaggatgaacctatatcccatcaggtagttggtaaggtaacggcttaccaagcctacgacgggtagctggtctgagaggatgatcagccacattggaactgagacacggtccagactcctacgggaggcagcagtgaggaatattgcgcaatgggcgaaagcctgacgcagcaacgccgcgtggatgatgaagttcttcggaatgtaaagtccttttgtagaggaagaatatcccggtttaccgggactgacggtactctgcgaataagccacggctaactctgtgccagcagccgcggtgatacaggggtggcaagcgttgtccggatttactgggtgtaaagggtgcgcaggcgggccgataagtcgggggttaaatccatgtgcttaacacatgcatggcttccgatactgtcggcctagagtctcgaagaggaagatggaatttccggtgtaacggtggaatgtgtagatatcggaaagaacaccagtggcgaaggcagtcttctggtcgagcactgacgctcaggcacgaaagcgtggggagcaaacaggattagataccctggtagtccacgccgtaaacgatgaatactagatgttggtcatattgatcagtgtcgcagctaacgcgttaagtattccacctgggaagtacgcccgcaagggtgaaactcaaaggaattgacgggggcccgcacaagcggtggatcatgtggtttaattcgatgcaacgcgaagaaccttacctgggcttgatatggcgactaaactcattgaaagatgaggtgcttcggcgagtcgtcacaggtgctgcatggctgtcgtcagctcgtgtcgtgagatgttgggttaagtcccgcaacgagcgcaacccctacaattagttactaacaggttaagctgaggactctaattgaactgcctacgcaagtagtgaggaaggaggggatgacgtcaagtcctcatggcccttacgcccagggccacacacgtgatacaatggtagctacagagggcaaagccgcgaggcagagttaatcccttaaaagctatctcagtccggatcggagtctgcaactcgactccgtgaagttggaatcgctagtaatcgcagatcagcatgctgcggtgaatgtgttcccgggccttgtacacaccgcccgtcaagtcatggaagtcaggagtacccaaagacactcgcgtgtttaaggtaagactggtaactgggactaagtcgtaacaaggtagccgtaccggaaggtgcggctggatcacctccttt

SEQ ID NO: 2515 - DNA, 1446 bp, Pelomonas puraquae
  source 1..1446: mol_type = unassigned DNA
attgaacgctggcggcatgccttacacatgcaagtcgaacggtaacaggttaagctgacgagtggcgaacgggtgagtaatgtatcggaacgtgcccagtcgtgggggataactgctcgaaagagcagctaataccgcatacgacctgagggtgaaagcgggggatcgcaagacctcgcgcgattggagcggccgatatcagattaggtagttggtggggtaaaggctcaccaagccaacgatctgtagctggtctgagaggacgaccagccacactgggactgagacacggcccagactcctacgggaggcagcagtggggaattttggacaatgggcgcaagcctgatccagccatgccgcgtgcgggaagaaggccttcgggttgtaaaccgcttttgtcagggaagaaaaggttctggctaatacctgggactcatgacggtacctgaagaataagcaccggctaactacgtgccagcagccgcggtaatacgtagggtgcaagcgttaatcggaattactgggcgtaaagcgtgcgcaggcggttatgcaagacagaggtgaaatccccgggctcaacctgggaactgcctttgtgactgcatagctagagtgcggcagagggggatggaattccgcgtgtagcagtgaaatgcgtagatatgcggaggaacaccgatggcgaaggcaatcccctgggcctgcactgacgctcatgcacgaaagcgtggggagcaaacaggattagataccctggtagtccacgccctaaacgatgtcaactggttgttgggagggtttcttctcagtaacgtagctaacgcgtgaagttgaccgcctggggagtacggccgcaaggttgaaactcaaaggaattgacggggacccgcacaagcggtggatgatgtggtttaattcgatgcaacgcgaaaaaccttacctacccttgacatgtctggaatcctgaagagatttgggagtgctcgaaagagagccagaacacaggtgctgcatggccgtcgtcagctcgtgtcgtgagatgttgggttaagtcccgcaacgagcgcaacccttgtcattagttgctacgaaagggcactctaatgagactgccggtgacaaaccggaggaaggtggggatgacgtcaggtcatcatggcccttatgggtagggctacacacgtcatacaatggccgggacagagggctgccaacccgcgagggggagctaatcccagaaacccggtcgtagtccggatcgtagtctgcaactcgactgcgtgaagtcggaatcgctagtaatcgcggatcagcttgccgcggtgaatacgttcccgggtcttgtacacaccgcccgtcacaccatgggagcgggttctgccagaagtagttagcctaaccgcaaggagggcgattaccacggcagggttcgtgactggggtg

SEQ ID NO: 2516 - DNA, 1446 bp, Pelomonas saccharophila
  source 1..1446: mol_type = unassigned DNA
  misc_difference 180..181: note = n is a, c, g, or t
attgaacgctggcggcatgccttacacatgcaagtcgaacggtaacaggttaagctgacgagtggcgaacgggtgagtaatatatcggaacgtgcccagtcgtgggggataactgctcgaaagagcagctaataccgcatacgacctgagggtgaaagcgggggatcgcaagacctcgcnngattggagcggccgatatcagattaggtagttggtggggtaaaggcccaccaagccaacgatctgtagctggtctgagaggacgaccagccacactgggactgagacacggcccagactcctacgggaggcagcagtggggaattttggacaatgggcgcaagcctgatccagccatgccgcgtgcgggaagaaggccttcgggttgtaaaccgcttttgtcagggaagaaaaggttctggttaatacctgggactcatgacggtacctgaagaataagcaccggctaactacgtgccagcagccgcggtaatacgtagggtgcaagcgttaatcggaattactgggcgtaaagcgtgcgcaggcggttatgcaagacagaggtgaaatccccgggctcaacctgggaactgcctttgtgactgcatagctagagtacggtagagggggatggaattccgcgtgtagcagtgaaatgcgtagatatgcggaggaacaccgatggcgaaggcaatcccctggacctgtactgacgctcatgcacgaaagcgtggggagcaaacaggattagataccctggtagtccacgccctaaacgatgtcaactggttgttgggagggtttcttctcagtaacgtagctaacgcgtgaagttgaccgcctggggagtacggccgcaaggttgaaactcaaaggaattgacggggacccgcacaagcggtggatgatgtggtttaattcgatgcaacgcgaaaaaccttacctacccttgacatgccaggaatcctgaagagatttgggagtgctcgaaagagaacctggacacaggtgctgcatggccgtcgtcagctcgtgtcgtgagatgttgggttaagtcccgcaacgagcgcaacccttgtcattagttgctacgaaagggcactctaatgagactgccggtgacaaaccggaggaaggtggggatgacgtcaggtcatcatggcccttatgggtagggctacacacgtcatacaatggccgggacagagggctgccaacccgcgagggggagctaatcccagaaacccggtcgtagtccggatcgtagtctgcaactcgactgcgtgaagtcggaatcgctagtaatcgcggatcagcttgccgcggtgaatacgttcccgggtcttgtacacaccgcccgtcacaccatgggagcgggttctgccagaagtagttagcctaaccgcaaggagggcgattaccacggcagggttcgtgactggggtg

SEQ ID NO: 2517 - DNA, 1417 bp, Pelosinus fermentans
  source 1..1417: mol_type = unassigned DNA
agtggcgaacgggtgagtaacgcgtagacaacctaccttctagctggggacaacactgcgaaagtggtgctaataccgaatgttgtattttgagtgcatacttaaaatactaaaggtggcctctatttataagctatcactagaagatgggtctgcgtctgattagctagttggtgaggtaatggctcaccaaggcgacgatcagtagccggtctgagaggatgaacggccacactgggactgagacacggcccagactcctacgggaggcagcagtggggaatcttccgcaatggacgaaagtctgacggagcaacgccgcgtgagtgaagaaggttttcggatcgtaaaactctgttttcagggacgaatgtgtggattgtaaataatggttcataatgacggtacctgacaagaaagccacggctaactacgtgccagcagccgcggtaatacgtaggtggcaagcgttgtccggaattattgggcgtaaagcgcgcgcaggtgggataatcagtctgatgttaaagttcggggcttaaccccgtgaagcattggatactgttattcttgagtgcaggagaggaaagtggaattcctagtgtagcggtgaaatgcgtagatattaggaggaacaccagtggcgaaggcgactttctggactgtgtctgacactgaggcgcgaaagccagggtagtgaacgggattagataccccggtaatcctggccgtaaacgatgggtactaggtgttgggggtatcgacccctccagtgccggagttaacgcaataagtaccccgcctggggagtacggccgcaaggttgaaactcaaaggaattgacgggggcccgcacaagcggtggagtatgtggtttaattcgacgcaacgcgaagaaccttaccaaggcttgacatcgtctgatgatcctagagataggaagttcttcttcggaagacagatagacaggtggtgcatggctgtcgtcagctcgtgtcgtgagatgttgggttaagtcccgcaacgagcgcaacccttatcctatgttgccagcacgtaaaggtgggaactcatgggagactgccgtggataacacggaggaaggtggggatgacgtcaagtcatcatgccccttatgtcttgggctacacacgtactacaatgggcttaaatagagggtagcgaagccgcgaggtgaagccaaacccaaaaacaagctctcagttcggattgcaggctgcaactcgcctgcatgaagtcggaatcgctagtaatcgcagatcagcatgctgcggtgaatacgttcccgggccttgtacacaccgcccgtcacaccacgaaagttgagagcacccgaagccggtgaggtaaccagcaatggaaccagccgtcgaaggtgagatcagtgattggggtg

SEQ ID NO: 2518 - DNA, 1479 bp, Pelosinus propionicus
  source 1..1479: mol_type = unassigned DNA
gacgaacgctggcggcgtgcctaacacatgcaagtcgaacggagattttagcaataaaatcttagtggcgaacgggtgagtaacgcgtagacaacctgccttctagctggggacaacaccgcgaaagtggtgctaataccgaatgttgtattttgagtgcatgcttgaaatactaaaggtggcctctatttataagctatcactagaagatgggtctgcgtctgattagctagttggtgaggtaatggctcaccaaggcgacgatcagtagccggtctgagaggatgaacggccacactgggactgagacacggcccagactcctacgggaggcagcagtggggaatcttccgcaatggacgaaagtctgacggagcaacgccgcgtgagtgaagaaggttttcggatcgtaaaactctgttttcagggacgaatgtgtggattgtaaataatgattcataatgacggtacctgacaagaaagccacggctaactacgtgccagcagccgcggtaatacgtaggtggcaagcgttgtccggaattattgggcgtaaagcgcgcgcaggtgggataatcagtctgatgttaaagttcggggcttaaccccgtgaagcattggatactgttattcttgagtgcaggagaggaaagtggaattcctagtgtagcggtgaaatgcgtagatattaggaggaacaccagtggcgaaggcgactttctggactgtgtctgacactgaggcgcgaaagccagggtagtgaacgggattagataccccggtaatcctggccgtaaacgatgggtactaggtgttgggggtatcgacccctccagtgccggagttaacgcaataagtaccccgcctggggagtacggccgcaaggttgaaactcaaaggaattgacgggggcccgcacaagcggtggagtatgtggtttaattcgacgcaacgcgaagaaccttaccaaggcttgacatcgtctgatgactctagagatagagagttctccttcgggagacagatagacaggtggtgcatggctgtcgtcagctcgtgtcgtgagatgttgggttaagtcccgcaacgagcgcaacccttatcctatgttgccagcacgtaatggtgggaactcatgggagactgccgtggataacacggagaaggtggggatgacgtcaagtcatcatgccccttatgtcttgggctacacacgtactacaatgggcttaaatagagggtagcgaagccgcgaggtgaagccaaacccaaaaacaagctctcagttcggattgcaggctgcaactcgcctgcatgaagtcggaatcgctagtaatcgcagatcagcatgctgcggtgaatacgttcccgggccttgtacacaccgcccgtcacaccacgaaagttgagagcacccgaagccggtgaggtaaccagcaatggaaccagccgtcgaaggtgagatcagtgattggggtg

SEQ ID NO: 2519 - DNA, 1467 bp, Pelotomaculum propionicicum
  source 1..1467: mol_type = unassigned DNA
gacgaacgctggcggcgtgcttaacacatgcaagtcgaacggtccagcactcaacttagtgctcataagatatagagttttaattagaggaagcgatatatctggtgagtagcaagttgagtgctggatagtggcggacgggtgagtaacgcgtggataacctgcctatatgaccgggacaacaccgggaaactggtgctaataccggatacgctcgcggaggcacatgcttttgtgaggaaaggagcaatccgcatatagatgggtccgcgtcccattagctagttggcggtgtaaaagaccaccaaggcgacgatgggtagccggcctgagagggtggacggccacactggaactgagacacggtccagactcctacgggaggcagcagtggggaatcttccgcaatgggcgcaagcctgacggagcaacgccgcgtgagtgaagaaggctttcgggttgtaaaactctgtcttcagggaagaagaaagtgacggtacctgaggaggaagccccggctaactacgtgccagcagccgcggtaaaacgtagggggcgagcgttgtccggaattactgggcgtaaagggcgcgtaggcggtttcttaagtcagaggtgaaaactaccggcttaaccggtagcctgcctttgaaactggggaacttgagggcaggagaggggagtggaattcccagtgtagcggtgaaatgcgtagatattgggaggaacaccagtggcgaaggcggctctctggcctgtttctgacgctgaggcgcgaaagcgtggggagcaaacgggattagataccccggtagtccacgccgtaaacgatgggtgctaggtgtaggaggtatcgaccccttctgtgccgtagttaacacaataagcaccccgcctggggagtacggccgcaaggttgaaactcaaaggaattgacgggggcccgcacaagcggtggagcatgtggttaattcgacgcaacgcgaagaaccttaccagggcttgacatcccctgacagtcattgaaagatggttttccagcttcggttggacagggagacaggtggtgcatggttgtcgtcagctcgtgtcgtgagatgttgggttaagtcccgcaacgagcgcaacccttacgtttagttgctaacgtgtaaagatgagcactctagacgaactgccgttgacaaaacggaggaaggtggggatgacgtcaaatcatcatgccccttatgtcctgggctacacacgtgctacaatggccggtacaaagggaagcgaagccgcgaggcggagcaaatccgataaaagccggtctcagttcggattgcaggctgcaattcgcctgcatgaagtcggaatcgctagtaatcgcaggtcagcatactgcggtgaatacgttcccgggccttgtacacaccgcccgtcacaccacgaaagctgacaacacccgaagccggtgagctaacc

SEQ ID NO: 2520 - DNA, 1358 bp, Pelotomaculum schinkii
  source 1..1358: mol_type = unassigned DNA
  misc_difference 173: note = n is a, c, g, or t
  misc_difference 1065: note = n is a, c, g, or t
  misc_difference 1142: note = n is a, c, g, or t
  misc_difference 1204: note = n is a, c, g, or t
  misc_difference 1317: note = n is a, c, g, or t
  misc_difference 1327: note = n is a, c, g, or t
tggataacctgccttaacgaccgggataacgccgggaaactggcgctaataccggatacgctcaagggaacacatgtttttttaaggaaaggagcaatccgcattaagatgggtccgcgtcccattagctggttggaggtgtaagagacccccaaggcgacgatgggtagccnggctgagagggtggacggccacactggaactgagacacggtccagactcctacgggaggcagcagtggggaatcttccgcaatgggcgaaagcctgacggagcaacgccgcgtggatgaagaaggccttcgggttgtaaaattctgtcttcagggaagaaaaaaatgacggtacctgaggaggaagccccggctaactacgtgccagcagccgcggtaaaacgtagggggcgagcgttgtccggaattactgggcgtaaagggcgcgtaggcggtttcttaagtctcaggtgaaaactatcggctcaaccggtagcgtgcctgagaaactgggggacttgagggcaggagaggggagtggaattcccagtgtagcggtgaaatgcgtagatattgggaggaacaccagtggcgaaggcggctctctggcctgttgctgacgctgaggcgcgaaagcgtggggagcgaacgggattagataccccggtagtccacgccgtaaacgatgggtgctaggtgtaggaggtatcgaccccttctgtgccgtagttaacacaataagcaccccgcctggggagtacggccgcaaggttgaaactcaaaggaattgacgggggcccgcacaagcggtggagcatgtggtttaattcgacgcaacgcgaagaaccttaccagggtttgacatcccctgatgactgtggaaacacagagttttgccttcgggtaaacagggagacaggtggtgcatggttgtcgtcagctcgtgtcgtgagatgttgggttaagtcccgcaacgagcgcaacccctacgtttagttgctaacgcgtgaaggcgagcactctagaggaactgccgttgacaaaacggaggaaggtggggatgacgtcaaatnatcatgccccttatgtcctgggctacacacgtgctacaatggccggtacaaagggaagcgaagccgcgaggcggagnaaatcccaaaaagccggtctcagttcggattgcaggctgcaattcgcctgcatgaagtcggnatcgctagtaatcgcaggtcagcatactgcggtgaatacgttcccgggccttgtacacaccgcccgtcacaccacgaaagctgacaacacccgaagccggtgagctaaccttnaacaggagcngccgtcgaaggtggggttggtgattggggtg

SEQ ID NO: 2521 - DNA, 1523 bp, Pelotomaculum thermopropionicum
  source 1..1523: mol_type = unassigned DNA
gacgaacgctggcggcgtgcctaacacatgcaagtcgagcggttcggcactcagccactagtggtcagtagttgctatgagttttggcaatagctgaggcaagggagcagcaactggccagtagggctgagtgccggatagcggcggacgggtgagtaacgcgtggataacctgcctgtcagaccgggataacaccgggaaactggtgctaataccggatacgttcaccggggcgcatgctttggtgaagaaaggggcaacccactgacagatgggtccgcgtcccattagctagttggcggtgtaacggaccaccaaggcgacgatgggtagccggcctgagagggtggacggccacactggaactgagacacggtccagactcctacgggaggcagcagtggggaatcttccgcaatgggcgaaagcctgacggagcaacgccgcgtgagcgaagaaggccttcgggttgtaaagctctgtcttcagggacgaaggaagtgacggtacctgaggaggaagccccggctaactacgtgccagcagccgcggtaaaacgtagggggcgagcgttgtccggaattactgggcgtaaagggcgcgtaggcggttccttaagtcaggggtgaaaactgtcggcttaaccggcagcctgcctttgaaactgagggacttgagggcaggagaggggagtggaattcccggtgtagcggtgaaatgcgtagatatcgggaggaacaccagtggcgaaggcggctctctggcctgtttctgacgctgaggcgcgaaagcgtggggagcgaacgggattagataccccggtagtccacgccgtaaacgatgggtgctaggtgtaggaggtatcgaccccttctgtgccgtagttaacacaataagcaccccgcctggggagtacggccgcaaggttgaaactcaaaggaattgacgggggcccgcacaagcggtggagcatgtggtttaattcgacgcaacgcgaagaaccttaccagggcttgacatcccctgaccgctgtggaaacacagttttctgctttcgggcagacagggagacaggtggtgcatggttgtcgtcagctcgtgtcgtgagatgttgggttaagtcccgcaacgagcgcaaccctcacgtttagttgccagcgggtagagccgggcactctaaacgaactgccgttgacaaaacggaggaaggtggggatgacgtcaaatcatcatgccccttatgtcctgggccacacacgtgctacaatggccggtacagagggaggcgaagccgtgaggcggagcaaatcccaaaaagccggtctcagttcggattgcaggctgaaattcgcctgcatgaagtcggaatcgctagtaatcgcaggtcagcatactgcggtgaatacgttcccgggccttgtacacaccgcccgtcacaccacgaaagctgacaacacccgaagccggtgagctaaccgcgaaagcggaggcagccgtcgaaggtggggttggtgattggggtg

SEQ ID NO: 2522 - DNA, 1450 bp, unidentified
  source 1..1450: mol_type = unassigned DNA; note = Peptoclostridium acidaminophilum
gatgaacgctggcggcgtgcttaacacatgcaagtcgagcgaacaaagcgggagggagtcttcggacgaagccccgctgcgtgagcggcggacgggtgagtaacacgtgggcaacctgccctatgcacagggataacgcaccgaaaggtgtgctaataccggataaagcgagatgtccgcatggacgactcgccaaagcttttgcggcataggatgggcccgcgtcccattagctagttggtgaggtaacggctcaccaaggctgcgatgggtagccgacctgagagggtgatcggccacactggaactgagacacggtccagactcctacgggaggcagcagtggggaatattgcacaatgggcgaaagcctgatgcagcaacgccgcgtgagcgatgaaggccttcgggtcgtaaagctctgtcccaagggaagataatgacggtaccttgggaggaagccccggctaactacgtgccagcagccgcggtaatacgtagggggcaagcgttatccggaatcactgggcgtaaagggtgcgtaggcggtcttgcaagccagaggtgaaaggctatggctcaaccatagtgagcctttggaactgccggacttgagtacaggagaggaaagtggaattcctagtgtagcggtgaaatgcgtagatattaggaggaacaccagtggcgaaggcgactttctggactgttactgacgctgaggcacgaaagcgtggggagcgaacaggattagataccctggtagtccacgccgtaaacgatgagtgctaggtgtcgggggtcaaacctcggtgccgcagctaacgcattaagcactccgcctggggagtacgctcgcaagagtaaaactcaaaggaattgacggggacccgcacaagcagcggagcatgtggtttaattcgaagcaacgcgaagaaccttacctggacttgacatccctttgaccgcttcgtaacggaagctttctcttcggagacaaaggtgacaggtggtgcatggttgtcgtcagctcgtgtcgtgagatgttgggttaagtcccgcaacgagcgcaacccctatctttagttgccagcacctagggtgggcactctagagagactgccgaggacaactcggaggaaggtggggatgacgtcaaatcatcatgccccttatgttcagggctacacacgtgctacaatgggcggtacaacgggttgcgagctcgcgagagcaagccaatcccttaaagccgttctcagttcggattgcaggctgaaactcgcctgcatgaagtcggagttgctagtaatcgcggatcagaatgccgcggtgaatgcgttcccgggtcttgtacacaccgcccgtcacaccatgggagtcgggggcgcccgaagtcagctgtccaaccgcaagggggaggctgccgaaggtgaaactgatgactggggtg

SEQ ID NO: 2523 - DNA, 1449 bp, unidentified
  source 1..1449: mol_type = unassigned DNA; note = Peptoclostridium litorale
gatgaacgctggcggcgtgcttaacacatgcaagtcgagcgaacaaagcgatgtgaagccttcgggtggatcatcgcggcgtgagcggcggacgggtgagtaacacgtgggtaacctgccctgtacactgggataacgcaccgaaaggtgtgctaataccggataaagtgaacctttcgcatggaaggatcaccaaagctccggcggtacaggatggacccgcgtcccattagctagttggtgaggtaacggctcaccaaggcgacgatgggtagccgacctgagagggtgatcggccacactggaactgagacacggtccagactcctacgggaggcagcagtggggaatattgcacaatgggcgaaagcctgatgcagcaacgccgcgtgagcgatgaaggccttcgggtcgtaaagctctgtcctaagggaagataatgacggtaccttaggaggaagccccggctaactacgtgccagcagccgcggtaatacgtagggggcaagcgttatccggaatcactgggcgtaaagggtgcgtaggcggctgataaagtccgaggtgaaaggctacggcttaaccgtagtaagccttggaaacttatcagcttgagtacaggagaggaaagtggaattcctagtgtagcggtgaaatgcgtagatattaggaggaacaccagtggcgaaggcgactttctggactgttactgacgctgaggcacgaaagcgtggggagcgaacaggattagataccctggtagtccacgccgtaaacgatgagtgctaggtgtcgggggtcgaacctcggtgccgcagctaacgcattaagcactccgcctggggagtacgttcgcaagaataaaactcaaaggaattgacggggacccgcacaagcagcggagcatgtggtttaattcgaagcaacgcgaagaaccttacctggacttgacatccctttgaccgcttcttaaccgaagctttcccttcggggacaaaggtgacaggtggtgcatggttgtcgtcagctcgtgtcgtgagatgttgggttaagtcccgcaacgagcgcaacccctgtctttagttgccagcattaagttgggcactctagagagactgccgaggataactcggaggaaggtggggatgacgtcaaatcatcatgccccttatgttcagggctacacacgtgctacaatgggcggtacaacgggcagcaagctcgcgagagcaagccaatcccttaaagccgttctcagttcggattgtaggctgaaactcgcctacatgaagctggagttgctagtaatcgcggatcagaatgccgcggtgaatgcgttcccgggtcttgtacacaccgcccgtcacaccatggaagttgggggcgcccgaagtcagttatccaaccgcaagggggaggctgccgaaggtgaaatcaatgactggggtg

SEQ ID NO: 2524 - DNA, 1423 bp, unidentified
  source 1..1423: mol_type = unassigned DNA; note = Permianibacter aggregans
ggggcagcttacacatgcagtcgagcggggacttcggtcctagcggcggacgggtgaggaatgcatcggaacgtgcccagtgatgggggataacacaccgaaaggtgtgctaataccgcatacgccctgagggggaaagtgggggaccgcaaggcctcacgtcattggagcggccgatgcccgattagctagttggtgaggtaaaggctcaccaaggcgacgatcggtagctggtctgagaggatgatcagccacactggaactgagacacggtccagactcctacgggaggcagcagtggggaatattggacaatgggcgcaagcctgatccagccatgccgcgtgagtgaagaaggccttcgggttgtaaagctctttaagcggggaggaaggtcagccacttaatacgtggttgaattgacgttacctgcagaataagcaccggctaactctgtgccagcagccgcggtaatacagagggtgcaagcgttaatcggaattactgggcgtaaagcgtgcgtaggcggtcttttaagttggatgtgaaatccccgggcttaacctgggaactgcattcaagactgggagactggagtctgggagaggatggtggaatttccggtgtagcggtgaaatgcgtagatatcggaaggaacatcagtggcgaaggcgaccatctggcctaagactgacgctgaggcacgaaagcgtggggagcaaacaggattagataccctggtagtccacgccgtaaacgatgagaactagccgttggagacccttgaggtttttagtggcgcagctaacgcgataagttctccgcctgggaagtacggccgcaaggttgaaactcaaatgaattgacgggggcccgcacaagcggtggagcatgtggtttaattcgatgcaacgcgaagaaccttacctactcttgacatccagagaatcctgtagagatacgggagtgccttcgggaattctgagacaggtgctgcatggctgtcgtcagctcgtgtcgtgagatgttgggttaagtcccgcaacgagcgcaacccttgtccttagttgccaacacgtaatggtgggaactctaaggagactgccggtgacaaaccggaggaaggtggggatgacgtcaagtcatcatggcccttacgagtagggctacacacgtgctacaatggtcggtacaaacggttgcgatatcgcgagatggagccaatccgaaaaagccgatcgtagtccggatcggagtctgcaactcgactccgtgaagtcggaatcgctagtaatcgcagatcagcattgctgcggtgaatacgttcccgggccttgtacacaccgcccgtcacaccatggaagtttactgcaccagaagccggtagcttaaccgcaaggggagcgcctccacggtttcgtgg

SEQ ID NO: 2525 - DNA, 1464 bp, Persephonella hydrogeniphila
  source 1..1464: mol_type = unassigned DNA
cgcgaacgttggcggcgtgcctaacacatgcaagtcgaggggcagcaggccttttcttcggaaaaggtgctggcgaccggcgaacgggtgagtaacacgtagctaacctaccccgaggatggggataaccctccgaaaggggggctaatacccaataaagagtcctgtgtaatgatgggactccaaaggccttcgggcgcctcgggatggggctgcgtcccatcagctagttggtgaggtaatggctcaccaaggctacgacgggtagccggcctgagagggtggccggccacagtgggactgagacacggcccgcacccctacggggggcagcagtggggaatattgggcaatggccggaaggctgacccagcgacgccgcgtggtggaagaagcccttcggggtgtaaacacctgtcaggggggaagataatgacggtacccccagaggaagggacggctaactacgtgccagcagccgcggtaatacgtaggtcccgaacgttgcgcgaaattactgggcgtaaagggtccgtaggcggtctggtaagtggaaggtgaaagcccggggctcaactccggaattgccttccaaactgccggacttgaggcagggagaggtcggcggaattcccggtgtagcggtgaaatgcgtagatatcgggaggaacaccagtggcgaaggcggccgactggaactgacctgacgctgagggacgaaagccaggggagcgaaccggattagatacccgggtagtcctggccgtaaacgatgggtgctagatgtgggtgccgataggcatccgtgtcgcaagctaacgcgttaagcaccccgcctggggagtacggtcgcaaggctgaaactcaaaggaattgacggggacccgcacaaccggtggagcgtctggtttaattcgatgctaaccgaaaaacctcaccagggcttgacatgcggtgtgtcgtggccgaaaggtcactaggtcaccctttagggtgaccgcgccgcacaggtggtgcatggtcgtcgtcagctcgtgtcgtgagatgttgggttaagtcccgcaacgagcgcaacccctgccctgtgttaccagcgggtgaagccgggtactcacaggggactgccggcgataagtcggaggaaggaggggatgacgtcagatcagtatgccctttatgccctgggctacacaggcgctacagtggcagggacaaagggaggcgaagccgcgaggtggagcaaatcccaaaaaccctgtcgtggtgcggattgggggttgcaactcacccccatgaaggcggaatcggtagtaatggcggatcagcaatgccgccgtgaatacgttcccgggtcttgtacacaccgcccgtcacgccacgggagtcgggtctgtcggaagtccccgggctaaccagccttcgggctgggggcaggggccgatgacaggcctggcgactggggcg

SEQ ID NO: 2526 - DNA, 1462 bp, Persephonella marina
  source 1..1462: mol_type = unassigned DNA
cgcgaacgttggcggcgcgcctaacacatgcaagtcgtggggcagcaggccacttcttcgggagtggtgctgcgaccggcgaacgggtgagtaacacgtagctgacctaccccagggatggggataaccctccgaaaggggggctaatacccaataacgagccctgtataatgatggggttccaaaggcctacgggcgccctgggatggggctgcgtcccatcagctagttggtgaggtaacggctcaccaaggctacgacgggtagccggcctgagagggtggccggccacagtgggactgagacacggcccgcacccctacggggggcagcagtggggaatattgggcaatggccgaaaggctgacccagcgacgccgcgtggtggaagaagcccttcggggtgtaaacacctgtcaggggggaagatgatgacggtacccccagaggaagggacggctaactacgtgccagcagccgcggtaatacgtaggtcccgaacgttgcgcgaaattactgggcgtaaagggtccgtaggcggtctggtaagtggaaggtgaaagcccacggctcaaccgtggaattgccttccaaactgctggacttgagggcggaagaggtcggcggaattcccggtgtagcggtgaaatgcgtagatatcgggaggaacaccggtggcgaaggcggccgactgggacgcacctgacgctgagggacgaaagccaggggagcgaaccggattagatacccgggtagtcctggccgtaaacgatgggtgctagatgtgggcggggatatcccgtccgtgtcgtaagctaacgcgttaagcaccccgcctggggagtacgggcgcaagcctgaaactcaaaggaattgacggggacccgcacaaccggtggagcgtctggtttaattcgatgctaaccgaaaaacctcaccagggcttgacatgcggtgtgtcgtgcccgaaagggtgctaggttactcttcggagtaaccgcgccgcacaggtggtgcatggccgtcgtcagctcgtgtcgtgagatgttgggttaagtcccgcaacgagcgcaacccttgccctgtgttaccagcgggtgaagccgggtactcacaggggactgccggcgataagtcggaggaaggaggggatgacgtcaggtcagtatgccctttatgccctgggctacacaggcgctacagtggcagggacaaagggaagcgaagccgcaaggtggagcaaatcccaaaaaccctgtcgtggtgcggattgggggttgcaactcacccccatgaaggcggaatcggtagtaatggcgaatcagcaatgtcgccgtgaatacgttcccgggtcttgtacacaccgcccgtcacgccacgggagttgggtccatcggaagtccccgggctaaccgtcttcggacggaggcaggggccgatgatgggcctggcgactggggcg

SEQ ID NO: 2527 - DNA, 1451 bp, unidentified
  source 1..1451: mol_type = unassigned DNA; note = Petrimonas mucosa
gatgaacgctagcgataggcctaacacatgcaagtcgaggggcagcacatgagtagcaatacgatggtggcgaccggcgcacgggtgagtaacacgtatgcaacctacctctaacagggggataacccgttgaaagacggactaataccccataatacaggggctccgcatggagatatttgttaaagattttatcggttagagatgggcatgcgttccattagctagttggtgaggtaacggctcaccaaggcgacgatggataggggaactgagaggtttatcccccacactggaactgagacacggtccagactcctacgggaggcagcagtgaggaatattggtcaatggaggcaactctgaaccagccaagtcgcgtgaaggatgaaggtcttatggattgtaaacttcttttgcaggggaataaatagcggtacgtgtaccgttttgcatgtaccctgcgaataaggatcggctaactccgtgccagcagccgcggtaatacggaggatccgagcgttatccggatttattgggtttaaagggtgcgcaggcgggagattaagtcggcggtgaaattttgcagctcaactgtaaaagtgccttcgatactggtttccttgagtgtggatgaagtaggcggaatttgtggtgtagcggtgaaatgcttagatatcacgaggaactccgattgcgcaggcagcttactaaaccactactgacgctcaggcacgaaggcgtggggatcaaacaggattagataccctggtagtccacgcagtaaacgatgattactggctgtttgcgatacaatgtaagcggctgagcgaaagcgttaagtaatccacctggggagtacgttcgcaagaatgaaactcaaaggaattgacgggggcccgcacaagcggaggaacatgtggtttaattcgatgatacgcgaggaaccttacccgggcttgaaatgcggtggaccggcggagagatccgccttcccttcggggccaccgtgtaggtgctgcatggttgtcgtcagctcgtgccgtgaggtgtcggcttaagtgccataacgagcgcaaccctcatcattagttactaacaggtaaagctgaggactctagtgagactgccatcgtaagatgcgaggaaggtggggatgacgtcaaatcagcacggcccttacgtccggggcgacacacgtgttacaatgggtggtacaaagggcagctacctggcgacaggatgccaatccccaaaaccactctcagttcggatcggagtctgcaactcgactccgtgaagctggattcgctagtaatcgcgcatcagccacggcgcggtgaatacgttcccgggccttgtacacaccgcccgtcaagccatggaagccgggggtacctgaagtccgtaaccgcaaggagcggcctagggtaaaactggtgactggggct

SEQ ID NO: 2528 - DNA, 1386 bp, Phaeobacter gallaeciensis
  source 1..1386: mol_type = unassigned DNA
aacgaacgctggcggcaggcctaacacatgcaagtcgagcgcactcttcggagtgagcggcggacgggttagtaacgcgtgggaacgtgcccttctctaaggaatagccactggaaacggtgagtaataccttatacgcccttcgggggaaagatttatcggagaaggatcggcccgcgttagattagatagttggtggggtaacggcctaccaagtctacgatctatagctggttttagaggatgatcagcaacactgggactgagacacggcccagactcctacgggaggcagcagtggggaatcttggacaatgggcgcaagcctgatccagccatgccgcgtgagtgatgaaggccttagggtcgtaaagctctttcgccagagatgataatgacagtatctggtaaagaaaccccggctaactccgtgccagcagccgcggtaatacggagggggttagcgttgttcggaattactgggcgtaaagcgcacgtaggcggatcagaaagttgggggtgaaatcccggggctcaaccccggaactgcctccaaaactcctggtcttgagttcgagagaggtgagtggaattccgagtgtagaggtgaaattcgtagatattcggaggaacaccagtggcgaaggcggctcactggctcgatactgacgctgaggtgcgaaagtgtggggagcaaacaggattagataccctggtagtccacaccgtaaacgatgaatgccagtcgtcggcaagcatgcttgtcggtgacacacctaacggattaagcattccgcctggggagtacggtcgcaagattaaaactcaaaggaattgacgggggcccgcacaagcggtggagcatgtggtttaattcgaagcaacgcgcagaaccttaccaacccttgacatcctaggaccgccagagagatttggctttcacttcggtgacctagtgacaggtgctgcatggctgtcgtcagctcgtgtcgtgagatgttcggttaagtccggcaacgagcgcaacccacatccttagttgccagcagttcggctgggcactctagggaaactgcccgtgataagcgggaggaaggtgtggatgacgtcaagtcctcatggcccttacgggttgggctacacacgtgctacaatggcagtgacaatgggttaatcccaaaaaactgtctcagttcggattggggtctgcaactcgaccccatgaagtcggaatcgctagtaatcgcgtaacagcatgacgcggtgaatacgttcccgggccttgtacacaccgcccgtcacaccatgggagttgggtttacccgaaggccgtgcgccaacctttcgagggggcagcggaccacggtgagctcagcgactggggtg

SEQ ID NO: 2529 - DNA, 1386 bp, Phaeobacter inhibens
  source 1..1386: mol_type = unassigned DNA
aacgaacgctggcggcaggcctaacacatgcaagtcgagcgcactcttcggagtgagcggcggacgggttagtaacgcgtgggaacgtgcccttctctaaggaatagccactggaaacggtgagtaataccttatacgcccttcgggggaaagatttatcggagaaggatcggcccgcgttagattagatagttggtggggtaacggcctaccaagtctacgatctatagctggttttagaggatgatcagcaacactgggactgagacacggcccagactcctacgggaggcagcagtggggaatcttggacaatgggcgcaagcctgatccagccatgccgcgtgagtgatgaaggccttagggtcgtaaagctctttcgccagagatgataatgacagtatctggtaaagaaaccccggctaactccgtgccagcagccgcggtaatacggagggggttagcgttgttcggaattactgggcgtaaagcgcacgtaggcggatcagaaagttgggggtgaaatcccagggctcaaccctggaactgcctccaaaactcctggtcttgagttcgagagaggtgagtggaattccgagtgtagaggtgaaattcgtagatattcggaggaacaccagtggcgaaggcggctcactggctcgatactgacgctgaggtgcgaaagtgtggggagcaaacaggattagataccctggtagtccacaccgtaaacgatgaatgccagtcgtcagcaagcatgcttgttggtgacacacctaacggattaagcattccgcctggggagtacggtcgcaagattaaaactcaaaggaattgacgggggcccgcacaagcggtggagcatgtggtttaattcgaagcaacgcgcagaaccttaccaacccttgacatcctaggaccgccagagagatttggctttcacttcggtgacctagtgacaggtgctgcatggctgtcgtcagctcgtgtcgtgagatgttcggttaagtccggcaacgagcgcaacccacatccttagttgccagcagttcggctgggcactctagggaaactgcccgtgataagcgggaggaaggtgtggatgacgtcaagtcctcatggcccttacgggttgggctacacacgtgctacaatggcagtgacaatgggttaatcccaaaaaactgtctcagttcggattggggtctgcaactcgaccccatgaagtcggaatcgctagtaatcgcgtaacagcatgacgcggtgaatacgttcccgggccttgtacacaccgcccgtcacaccatgggagttgggtttacccgaaggccgtgcgccaacctttcgagggggcagcggaccacggtgagctcagcgactggggtg

SEQ ID NO: 2530 - DNA, 1426 bp, unidentified
  source 1..1426: mol_type = unassigned DNA; note = Phaeobacter italicus
acgctggcggcaggcctaacacatgcaagtcgagcgcgcccttcggggtgagcggcggacgggttagtaacgcgtgggaacgtgcccagatctaaggaatagccactggaaacggtgagtaataccttatacgcccttcgggggaaagatttatcggatttggatcggcccgcgttagattaggtagttggtggggtaatggcctaccaagcctacgatctatagctggttttagaggatgatcagcaacactgggactgagacacggcccagactcctacgggaggcagcagtggggaatcttggacaatgggggcaaccctgatccagccatgccgcgtgagtgatgaaggccttagggtcgtaaagctctttcgcctgtgatgataatgacagtagcaggtaaagaaaccccggctaactccgtgccagcagccgcggtaatacggagggggttagcgttgttcggaattactgggcgtaaagcgcgcgtaggcggattagtcagttagaggtgaaatcccagggctcaaccctggaactgcctttaatactgctagtcttgagttcgagagaggtgagtggaattccgagtgtagaggtgaaattcgtagatattcggaggaacaccagtggcgaaggcggctcactggctcgatactgacgctgaggtgcgaaagtgtggggagcaaacaggattagataccctggtagtccacaccgtaaacgatgaatgccagtcgtcggcaagcatgcttgtcggtgacacacctaacggattaagcattccgcctggggagtacggtcgcaagattaaaactcaaaggaattgacgggggcccgcacaagcggtggagcatgtggtttaattcgaagcaacgcgcagaaccttaccaacccttgacatcctcggaccgccagagagatctggctttcacttcggtgaccgagtgacaggtgctgcatggctgtcgtcagctcgtgtcgtgagatgttcggttaagtccggcaacgagcgcaacccacatccttagttgccagcagttcggctgggcactctagggaaactgcccgtgataagcgggaggaaggtgtggatgacgtcaagtcctcatggcccttacgggttgggctacacacgtgctacaatggcagtgacaatgggttaatcccaaaaaactgtctcagttcggattggggtctgcaactcgaccccatgaagtcggaatcgctagtaatcgcgtaacagcatgacgcggtgaatacgttcccgggccttgtacacaccgcccgtcacaccatgggagttgggtttacccgaaggccgtgcgctaacttttgaggcagcggaccacggtgagctcagcgactggggtgaagtcgtaacaaggtagccgtaggggaacctgcggctggatcacctcct

SEQ ID NO: 2531 - DNA, 1386 bp, unidentified
  source 1..1386: mol_type = unassigned DNA; note = Phaeobacter piscinae
aacgaacgctggcggcaggcctaacacatgcaagtcgagcgcactcttcggagtgagcggcggacgggttagtaacgcgtgggaacgtgcccttctctaaggaatagccactggaaacggtgagtaataccttatacgcccttcgggggaaagatttatcggagaaggatcggcccgcgttagattagatagttggtggggtaacggcctaccaagtctacgatctatagctggttttagaggatgatcagcaacactgggactgagacacggcccagactcctacgggaggcagcagtggggaatcttggacaatgggcgcaagcctgatccagccatgccgcgtgagtgatgaaggccttagggtcgtaaagctctttcgccagagatgataatgacagtatctggtaaagaaaccccggctaactccgtgccagcagccgcggtaatacggagggggttagcgttgttcggaattactgggcgtaaagcgcacgtaggcggatcagaaagttgggggtgaaatcccggggctcaaccccggaactgcctccaaaactcctggtcttgagttcgagagaggtgagtggaattccgagtgtagaggtgaaattcgtagatattcggaggaacaccagtggcgaaggcggctcactggctcgatactgacgctgaggtgcgaaagtgtggggagcaaacaggattagataccctggtagtccacaccgtaaacgatgaatgccagtcgtcagcaagcatgcttgttggtgacacacctaacggattaagcattccgcctggggagtacggtcgcaagattaaaactcaaaggaattgacgggggcccgcacaagcggtggagcatgtggtttaattcgaagcaacgcgcagaaccttaccaacccttgacatcctcggaccgccagagagatctggctttcacttcggtgaccgagtgacaggtgctgcatggctgtcgtcagctcgtgtcgtgagatgttcggttaagtccggcaacgagcgcaacccacatccttagttgccagcagttcggctgggcactctagggaaactgcccgtgataagcgggaggaaggtgtggatgacgtcaagtcctcatggcccttacgggttgggctacacacgtgctacaatggcagtgacaatgggttaatcccaaaaaactgtctcagttcggattggggtctgcaactcgaccccatgaagtcggaatcgctagtaatcgcgtaacagcatgacgcggtgaatacgttcccgggccttgtacacaccgcccgtcacaccatgggagttgggtttacccgaaggccgtgcgccaacctttcgagggggcagcggaccacggtgagctcagcgactggggtg

SEQ ID NO: 2532 - DNA, 1388 bp, unidentified
  source 1..1388: mol_type = unassigned DNA; note = Phaeobacter porticola
aacgaacgctggcggcaggcctaacacatgcaagtcgagcgcactcttcggagtgagcggcggacgggttagtaacgcgtgggaacgtgcccttctctaaggaatagccactggaaacggtgagtaataccttatacgcccttcgggggaaagatttatcggagaaggatcggcccgcgttagattagatagttggtggggtaacggcctaccaagtctacgatctatagctggttttagaggatgatcagcaacactgggactgagacacggcccagactcctacgggaggcagcagtggggaatcttggacaatgggcgcaagcctgatccagccatgccgcgtgagtgatgaaggccttagggtcgtaaagctctttcgccagagatgataatgacagtatctggtaaagaaaccccggctaactccgtgccagcagccgcggtaatacggagggggttagcgttgttcggaattactgggcgtaaagcgcacgtaggcggatcagaaagtatagggtgaaatcccagggctcaaccctggaactgccttgtaaactcctggtcttgagttcgagagaggtgagtggaattccgagtgtagaggtgaaattcgtagatattcggaggaacaccagtggcgaaggcggctcactggctcgatactgacgctgaggtgcgaaagtgtggggagcaaacaggattagataccctggtagtccacaccgtaaacgatgaatgccagtcgtcggcaagcatgcttgtcggtgacacacctaacggattaagcattccgcctggggagtacggtcgcaagattaaaactcaaaggaattgacgggggcccgcacaagcggtggagcatgtggtttaattcgaagcaacgcgcagaaccttaccaacccttgacatcctaggaccgccagagagatttggctttcacttcggtgacctagtgacaggtgctgcatggctgtcgtcagctcgtgtcgtgagatgttcggttaagtccggcaacgagcgcaacccacatccttagttgccagcagttcggctgggcactctagggaaactgcccgtgataagcgggaggaaggtgtggatgacgtcaagtcctcatggcccttacgggttgggctacacacgtgctacaatggcagtgacaatgggttaatcccaaaaaactgtctcagttcggattggggtctgcaactcgaccccatgaagtcggaatcgctagtaatcgcgtaacagcatgacgcggtgaatacgttcccgggccttgtacacaccgcccgtcacaccatgggagttgggtttacccgaaggccgtgcgccaaccttttcggagggggcagcggaccacggtgagctcagcgactggggtg

SEQ ID NO: 2533 - DNA, 1400 bp, Phaeospirillum fulvum
  source 1..1400: mol_type = unassigned DNA
  misc_difference 635: note = n is a, c, g, or t
  misc_difference 954: note = n is a, c, g, or t
acgctggcggcaggcttaacacatgcaagtcgaacgaaggcttcggccttagtggcgcacgggtgagtaacacgtgggaatatacctctcggtggggaataacgtcgggaaactgacgctaataccgcatacgcccttagggggaaagatttatcgccgagagattagcccgcgtccgattagctagttggtgaggtaaaagctcaccaaggcgacgatcggtagctggtctgagaggatgatcagccacactgggactgagacacggcccagactcctacgggaggcagcagtggggaatattggacaatgggcgcaagcctgatccagccatgccgcgtgagtgatgaaggccttagggttgtaaagctctttcgacggggacgatgatgacggtacccgtagaagaagccccggctaacttcgtgccagcagccgcggtaatacgaagggggcaagcgttgttcggaattactgggcgtaaagcgcacgtaggcggcgatccaagtcagaagtgaaagccctgggctcaacccgggaactgcttttgatactgggttgctagaatcacggagagggtaggggaattccgagtgtagaggtgaaattcgtagatattcggaagaacaccagtngcgaaggcgcctacctggccgtcgattgacgctcatgtgcgaaagcgtggggagcaaacaggattagataccctggtagtccacgccgtaaacgatgagtgctagatgttggggtgcatgcacctcagtgtcgaacgtaacgcgataagcactccgcctggggagtacggccgcaaggttaaaactcaaaggaattgacgggggcccgcacaagcggtggagcatgtggtttaattcgaagcaacgcgcagaaccttaccagcccttgacatgggggataccggccagagagatttggccttcagttcggctgatccgnccacaggtgctgcatggctgtcgtcagctcgtgtcgtgagatgttgggttaagtcccgcaacgagcgcaaccctcatcttcagttgccatcatttagttgggcactctgaagaaactgccggtgacaagccggaggaaggtggggatgacgtcaagtcctcatggcccttacgggctgggctacacacgtgctacaatggtggtgacagtgggcagccaactcgcgagagtgagctaatccccaaaagccatctcagttcggattgcactctgcaactcgagtgcatgaagtcggaatcgctagtaatcgtggatcagcatgccacggtgaatacgttcccgggccttgtacacaccgcccgtcacaccatgggagttggctttacccgaagccggtgcgctaaccgcaaggaggcagccgaccacggtaaggtcagcgactgggg

SEQ ID NO: 2534 - DNA, 1407 bp, Phaeospirillum molischianum
  source 1..1407: mol_type = unassigned DNA
aacgaacgctggcggcaggcttaacacatgcaagtcgaacgaaggcttcggccttagtggcgcacgggtgagtaacacgtgggaatatacctctcggtggggaataacgtcgggaaactgacgctaataccgcatacgcccttagggggaaagatttatcgccgagagattagcccgcgtccgattagctagttggtgaggtaaaagctcaccaaggcgacgatcggtagctggtctgagaggatgatcagccacactgggactgagacacggcccagactcctacgggaggcagcagtggggaatattggacaatgggcgcaagcctgatccagccatgccgcgtgagtgatgaaggccttagggttgtaaagctctttcgacggggacgatgatgacggtacccgtagaagaagccccggctaacttcgtgccagcagccgcggtaatacgaagggggcaagcgttgttcggaattactgggcgtaaagcgcacgcaggcggcgatccaagtcagaagtgaaagccctgggctcaacccgggaactgcttttgatactgggttgctagaatcacggagagggtaggggaattccgagtgtagaggtgaaattcgtagatattcggaagaacaccagtggcgaaggcgcctacctggccgtcgattgacgctcatgtgcgaaagcgtggggagcaaacaggattagataccctggtagtccacgccgtaaacgatgagtgctagatgttggggtgcatgcacctcagtgtcgaagctaacgcgataagcactccgcctggggagtacggccgcaaggttaaaactcaaaggaattgacgggggcccgcacaagcggtggagcatgtggtttaattcgaagcaacgcgcagaaccttaccagcccttgacatgggggacatcgaccagagagatttggtcttcagttcggctggtccccgcacaggtgctgcatggctgtcgtcagctcgtgtcgtgagatgttgggttaagtcccgcaacgagcgcaaccctcatcttcagttgccatcatttagttgggcactctgaagaaactgccggtgacaagccggaggaaggtggggatgacgtcaagtcctcatggcccttacgggctgggctacacacgtgctacaatggtggtgacagtgggcagccaactcgcgagagtgagctaatcccaaaaagccatctcagttcggattgcactctgcaactcgagtgcatgaagtcggaatcgctagtaatcgtggatcagcatgccacggtgaatacgttcccgggccttgtacacaccgcccgtcacaccatgggagttggctttacccgaagccggtgcgctaaccgcaaggaggcagccgaccacggtaaggtcagcgactggggtg

SEQ ID NO: 2535 - DNA, 1348 bp, unidentified
  source 1..1348: mol_type = unassigned DNA; note = Phorcysia thermohydrogeniphila
ggagagtaacgcgtgagcaacctaccccgaggaggggggataacccggggaaacccgggctaataccccataagcgcacggcccgcatgggctgtgtgaaaaggtggcctctgggctctgcccatgctgccgcctcgggatgggctcgcgtcccatcaggtagttggtggggtaacggcccaccaagcctacgacgggtagccggcctgagagggtggtcggccacaccgggactgtatacacggcccggactcctacgggaggcagcagtggggaatcttgggcaatgggcgaaagcctgacccagcgacgccgagtgggggaagaagcccttcggggtgtaaacccctgtcgccggggacgatgcggagttgggttaagagctcaactccgtgacggtacccggagaggaagggacggctaactacgtgccagcagccgcggtaatacgtaggtcccgagcgttgcgcgaaattactgggcgtaaaaagcgcgtaggcgggccagtaagtcagaggtgaaagcccccggctcaaccggggaattgcctctgatactgctggcctagggtccggaagaggccggcggaattcccggtgtagcgggtgaaatgcgtagatatcgggaggaacaccggtggcgaaggcggccggctaggacggtaccgacgctgaggcgcgaaagcgtggggagcgaaccggattagatacccgggtagtccacgctgtaaacgatgggtgctgggcgttggcacctaagggtgtcagtgccgaagctaacgcgttaagcaccccgcctggggagtacggccgcaaggctgaaactcaaaggaatagacgggggcccgcacaagcggtggagcatgtggtttaattcaatgctacgcgaagaaccttaccagggcttgacatgctgggggtagccccgccgaaaggcgtgggtcgcggcaggccttttggcctgcccacccagcacaggtggtacatggccgtcgtcagctcgtgccgtgaggtgttgggttaagtcccgcaacgagtgcaacccctgcccctagttgccagcgggttaggccgggcacactagggggactgccggcgataagccggaggaaggaggggatgacgtcaggtcagtatgccccttaagccctgggctacacacgtgctacaatggccgggacagagggaagcgaagccgcgaggcggagcaaatcccagaaacccggtcccagttcggattgcaggctgcaactcgcctgcatgaagccggaatcgctagtaacggccggtcatccacacggccgtgaagacgttaaccgggccttgtactcaccgcccgtcacacccct

SEQ ID NO: 2536 - DNA, 1413 bp, unidentified
  source 1..1413: mol_type = unassigned DNA; note = Phormidesmis priestleyi
gatgaacgctggcggtatgcttaacacatgcaagtcgaacggtcctttcggggatagtggcggacgggtgagtaacgcgtgagaatctgcctttaggacggggacaacagttggaaacggctgctaaaacccgatgtgcccttcggggtgaaatatttatagcctgaagatgagctcgcgtctgattagctagtaggtgaggtaaaggctcacctaggcgacgatcagtaactggtctgagaggatgaccagtcacactgggactgagacacggcccagactcctacgggaggcagcagtggggaattttccgcaatgggcgcaagcctgacggagcaataccgcgtgagggaggaaggctcttgggtcgtaaacctcttttatcagggaagaacacaatgacggtacctgatgaatcagcatcggctaactctgtgccagcagccgcggtaatacagaggatgcaagcgttatccggaattattgggcgtaaagcgtccgcaggtggttttggtagtctgctgtcaaagcgcgaggctcaacttcgtatcggcggtggaaactccaagactagagctaggtaggggtcacgggaattcccagtgtagcggtgaaatgcgtagatattgggaagaacaccagcggcgaaagcgcgtgactgggcctgagctgacactcatggacgaaagctaggggagcgaaagggattagatacccctgtagtcctagccgtaaacgatgacaactaggtgttgcccgtatcgacccgggcagtgccgtagccaacgcgttaagttgtccgcctggggagtacgcacgcaagtgtgaaactcaaaggaattgacgggggcccgcacaagcggtggagtatgtggtttaattcgatgcaacgcgaagaaccttaccaaggcttgacatgtcgcgaaccttcttgaaagggaagggtgccttcgggagcgcgaacacaggtggtgcatggctgtcgtcagctcgtgtcgtgagatgttgggttaagtcccgcaacgagcgcaaccctcgtttctagttgccatcattcagttgggcactttagagagactgccggtgacaaaccggaggaaggtggggatgacgtcaagtcagcatgccccttacgccttgggctacacacgtactacaatgctacggacaaagagccgcaagttcgcgaggacaagcaaatctcataaaccgtggctcagttcagattgcaggctgcaactcgcctgcatgaaggcggaatcgctagtaatcgcaggtcagcatactgcggtgaatacgttcccgggccttgtacacaccgcccgtcacaccatgggagttggccacgcccgaagtcgttactccaaccgttcgcggaggaggatgccgaaggcagggctgatgactggggtg

SEQ ID NO: 2537 - DNA, 1409 bp, Phormidium ambiguum
  source 1..1409: mol_type = unassigned DNA
gatgaacgctggcggtctgcttaacacatgcaagtcgaacgaactcttcggagttagtggcggacgggtgagtaacgcgtgagagtctagcttcagaacggggacaacagagggaaaccactgctaatacccgatgtgccgagaggtgaaagatttatcatctgaagatgagctcgcgtccgattagctagttggtaaggtaagagcttaccaaggcgacgatcggtagctggtctgagaggatgaccagccacactgggactgagacacggcccagactcctacgggaggcagcagtggggaattttccgcaatgggcgaaagctgacggagcaagaccgcgtgagggaggaaggctcttgggttgtaaacctcttttctctgggaagaagatctgacggtaccagaggaatcagcatcggctaactccgtgccagcagccgcggtaatacggaggatgcaagcgttatccggaattattgggcgtaaagcgtccgtaggtggcggttcaagtctgccgttaaaaccagtagcttaactactgacaggcggtggaaactgaacagctagagtgtggtaggggtagagggaattcccagtgtagcggtgaaatgcgtagagattgggaagaacaccggtggcgaaagcgctctgctggaccacaactgacactcacggacgaaagctaggggagcgaaagggattagataccccagtagtcctagccgtaaacgatggatactaggtgtagtaggtatcgacccctactgtgccgtagctaacgcgttaagtatcccgcctggggagtacggtcgcaagattgaaactcaaaggaattgacgggggcccgcacaagcggtggagtatgtggtttaattcgatgcaacgcgaagaaccttaccaggacttgacatgtcgcgaatctctctgaaaggagagagtgccttcgggagcgcgaacacaggtggtgcatggctgtcgtcagctcgtgtcgtgagatgttgggttaagtcccgcaacgagcgcaacccacgtttttagttgccatcattaagttgggcactctagagagactgccggtgacaaaccggaggaaggtgtggatgacgtcaagtcagcatgccccttacgtcctgggctacacacgtactacaatggctgggacaaagagctgcaagcgagcgatcgcaagccaatctcataaacccagtcttagttcagatcgcaggctgcaactcgcctgcgtgaaggcggaatcgctagtaatcgcagatcagaatgctgcggtgaatacgttcccgggccttgtacacaccgcccgtcacaccatggaagctggtcacgcccgaagtcgttatcctaaccgttcgcggagggagatgcctaaggcagggctggtgactggggtg

SEQ ID NO: 2538 - DNA, 1411 bp, unidentified
  source 1..1411: mol_type = unassigned DNA; note = Phormidium tenue
gatgaacgctggcggcgtgcttaacacatgcaagtcgaacggacccttcggggttagtggcggacgggtgagtaacgcgtgaggatctgcccttaggaggggaacaacagttggaaacgactgctaatgccccatatgccgagaggtgaaatgttatatcgcctagggatgaactcgcgtctgattagctagttggtggggtaaaggctcaccaaggcgacgatcagtagctggtctaagaggatgatcagccacactgggactgagacacggcccagactcctacgggaggcagcagtggggaattttccgcaatgggcgaaagcctgacggagcaacgccgcgtgagggacgaaggccttagggttgtaaacctcttttctctgggaagaagaactgacggtaccagaggaataagcctcggctaactccgtgccagcagccgcggtaagacggaggaggcaagcgttatccggaattattgggcgtaaagcgtccgcaggcggctaattaagtctgttgtcaaagcccacagctcaactgtggatcggcaatggaaactggttggctagagtgtggtaggggtagagggaattcccggtgtagcggtgaaatgcgtagatatcgggaagaacaccagtggcgaaggcgctctactgggccacaactgacgctgagggacgaaagctaggggagcgaaagggattagatacccctgtagtcctagctgtaaacgatggatactaggtgttggacgtatcgacccgtgcagtaccgtagctaacgcgttaagtatcccgcctggggagtacgcacgcaagtgtgaaactcaaaggaattgacgggggcccgcacaagcggtggaggatgtggtttaattcgatgcaacgcgaagaaccttaccaaggcttgacatgtcacgaatctttgcgagagcagagagtgccttcgggagcgtgaacacaggtggtgcatggctgtcgtcagctcgtgtcgtgagatgttgggttaagtcccgcaacgagcgcaacccacgtttttagttgccatcattaagttgggcactctaaagagactgccgtggacaacacggaggaaggtgtggacgacgtcaagtcatcatgccccttacgtcttgggctacacacgtcctacaatgctacagacagagggcagcgagcgcgcgagtgcaagcaaatcccataaactgtggctcagttcagattgcaggctgcaactcgcctgcatgaaggcggaatcgctagtaatcgcaggtcagcatactgcggtgaatacgttcccgggccttgtacacaccgcccgtcacaccatgggagttggccacgcccgaagtcgttactctaaccgttcgcggaggagggcgccgaaggcagggctgatgactggggtg

SEQ ID NO: 2539 - DNA, 1428 bp, Photorhabdus asymbiotica
  source 1..1428: mol_type = unassigned DNA
acatgcaagtcgagcggtaacaggaaagtgcttgcacttttgctgacgagcggcggacgggtgagtaatgtctggggatctgcccgagggcgggggataaccactggaaacggtggctaataccgcatgatgtcgcgagaccaaagtgggggacctgaaagggcctcacgccctcggatgaacccagatgggattagctagtaggtagggtaatggcctacctaggcgacgatccctagctggtctgagaggatgaccagccacactgggactgagacacggcccagactcctacgggaggcagcagtggggaatattgcacaatgggcgcaagcctgatgcagccatgccgcgtgtatgaagcaggccttcgggttgtaaagtactttcagcggggaggaagggtttggcctgaagagggttaaattttgacgttacccgcagaagaagcaccggctaactccgtgccagcagccgcggtaatacggagggtgcaagcgttaatcggaatgactgggcgtaaagcgcacgcaggcggtcaattaagttagatgtgaaatccccgggctcaacctgggaatggcatctaagactggttggctagagtctcgtagaggggggtagaattccatgtgtagcggtgaaatgcgtagagatgtggaggaataccggtggcgaaggcggccccctggacgaagactgacgctcatgtgcgaaagcgtggggagcaaacaggattagataccctggtagtccacgctgtaaacgatgtcgatttggaggttgtggtctagagctgtggcttccggagctaacgcgttaaatcgaccgcctggggagtacggccgcaaggttaaaactcaaatgaattgacgggggcccgcacaagcggtggagcatgtggtttaattcgatgcaacgcgaagaaccttacctactcttgacatccagagaagacctcagagatgaggttgtgccttcgggagctctgagacaggtgctgcatggctgtcgtcagctcgtgttgtgaaatgttgggttaagtcccgcaacgagcgcaacccttatcctttgttgccagcacgttgaggtgggaactcaaaggagactgccggtgataaaccggaggaaggtggggatgacgtcaagtcatcatggccctgacgagtagggctacacacgtgctacaatggcggatacaaagtgaagcgacctcgcgagagcaagcggaacacacaaagtctgtcgtagtccggattggagtctgcaactcgactccatgaagtcggaatcgctagtaatcgtagatcagcatgctacggtgaatacgttcccgggccttgtacacaccgcccgtcacaccatgggagtgggtggcaaaagaagtcggtagcctaaccgcgaggggggcgctgaccactttgtgat

SEQ ID NO: 2540 - DNA, 1441 bp, unidentified
  source 1..1441: mol_type = unassigned DNA; note = Photorhabdus heterorhabditis
cacatgcaagtcgggcggtaacaggaaagcgcgtgcgcttttgctgacgagcggcggacgggtgagtaaagtctggggatctgcctgatggagggggataaccactggaaacggtggctaataccgcatgaagtcgcaagaccaaagtgggggacctgcgggcctcacgccatcggatgaacccagatgggattagctagtaggtagggtaatggcctacctaggcgacgatccctagctggtctgagaggatgaccagccacactgggactgagacacggcccagactcctacgggaggcagcagtggggaatattgcacaatgggcgcaagcctgatgcagccatgccgcgtgtatgaagaaggctttcgggttgtaaagtactttcagcggggaggaagggtttagcctgaataaggctggactttgacgttacccgcagargaagcaccggctaactccgtgccagcagccgcggtaatacggagggtgcaagcgttaatcggaatgactgggcgtaaagcgcacgcaggcggtcaattaagttagatgtgaaatccccgggcttaacctgggaacggcatctaagactggttggctagagtctcgtagaggggggtagaattccatgtgtagcggtgaaatgcgtagagatgtggaggaataccggtggcgaaggcggccccctggacgaagactgacgctcaggtgcgaaagcgtggggagcaaacaggattagataccctggtagtccacgctgtaaacgatgtcgatttggaggttgttccctggaggagtggcttccggagctaacgcgttaaatcgaccgcctggggagtacggccgcaaggttaaaactcaaatgaattgacgggggcccgcacaagcggtggagcatgtggtttaattcgatgcaacgcgaagaaccttacctactcttgacatccagagaagacctcagagatggggttgtgccttagggagctctgagacaggtgctgcatggctgtcgtcagctcgtgttgtgaaatgttgggttaagtcccgcaacgagcgcaacccttatcctttgttgccagcacgtaaaggtgggaactcaagggagactgccggtgataaaccggaggaaggtggggatgacgtcaagtcatcatggcccttacgagtagggctacacacgtgctacaatggcggatacaaagtgaagcgacctcgcgagagcaagcggaacacacaaagtctgtcgtagtccggattggagtctgcaactcgactccatgaagtcggaatcgctagtaatcgtagatcagcatgctacggtgaatacgttcccgggccttgtacacaccgcccgtcacaccatgggagtgggtggcaaaagaagtcggtagcttaaccgaaaggagggcgctgaccactttgtgattcatgactggggtg

SEQ ID NO: 2541 - DNA, 1499 bp, unidentified
  source 1..1499: mol_type = unassigned DNA; note = Photorhabdus khanii
agattgaacgctggcggcaggcctaacacatgcaagtcgagcggtaacaggaaagcgcttgcgcttttgctgacgagcggcggacgggtgagtaatgtctggggatctgcccgagggcgggggataaccactggaaacggtggctaataccgcataatgtcgcaagaccaaagtgggggacctgaaagggcctcacgcccgtggatgaacccagatgggattagctagtaggtagggtaatggcctacctaggcgacgatccctagctggtctgagaggatgaccagccacactgggactgagacacggcccagactcctacgggaggcagcagtggggaatattgcacaatgggcgcaagcctgatgcagccatgccgcgtgtatgaagaaggccttcgggttgtaaagtactttcagcggggaggaagggtatggcctgaagagggcgatagcttgacgttacccgcagaagaagcaccggctaactccgtgccagcagccgcggtaatacggagggtgcaagcgttaatcggaatgactgggcgtaaagcgcacgcaggcggtcaattaagttggatgtgaaatccccgggcttaacctgggaacggcatccaagactggttggctagagtctcgtagaggggggtagaattccatgtgtagcggtgaaatgcgtagagatgtggaggaataccggtggcgaaggcggccccctggacgaagactgacgctcaggtgcgaaagcgtggggagcaaacaggattagataccctggtagtccacgcggtaaacgatgtcgatttggaggttgttccctggaggagtggcttccggagctaacgcgttaaatcgaccgcctggggagtacggccgcaaggttaaaactcaaatgaattgacgggggcccgcacaagcggtggagcatgtggtttaattcgatgcaacgcgaagaaccttacctactcttgacatccagagaagacctcagagatggggttgtgccttcgggagctctgagacaggtgctgcatggctgtcgtcagctcgtgttgtgaaatgttgggttaagtcccgcaacgagcgcaacccttatcctttgttgccagcacgtgatggtgggaactcaaaggagactgccggtgataaaccggaggaaggtggggatgacgtcaagtcatcatggccctaacgagtagggctacacacgtgctacaatggcggatacaaagtgaagcgacctcgcgagagcaagcggaacacataaagtctgtcgtagtccggattggagtctgcaactcgactccatgaagtcggaatcgctagtaatcgtagatcagaacgctacggtgaatacgttcccgggccttgtacacaccgcccgtcacaccatgggagtgggttgcaaaagaagtcggtagcttaacctgcgggagggcgctgaccactttgtgattcatgactggggtgaagtcgtaacaaggtaaccgtaggggaacc

SEQ ID NO: 2542 - DNA, 1499 bp, unidentified
  source 1..1499: mol_type = unassigned DNA; note = Photorhabdus laumondii
agattgaacgctggcggcaggcctaacacatgcaagtcgggcggtaacaggaaagtgcctgcacttttgctgacgagcggcggacgggtgagtaatgtctggggatctgcccgagggcgggggataaccactggaaacggtggctaataccgcataatgtcgcgagaccaaagtgggggacctgaaagggcctcacgccgtcggatgaacccagatgggattagctggtaggtagggtaatggcctacctaggcgacgatctctagctggtctgagaggatgaccagccacactgggactgagacacggcccagactcctacgggaggcagcagtggggaatattgcacaatgggcgcaagcctgatgcagccatgccgcgtgtatgaagaaggccttcgggttgtaaagtactttcagcggggaggaagggtttagcctgaagagggttggactttgacgttacccgcagaagaagcaccggctaactccgtgccagcagccgcggtaatacggagggtgcaagcgttaatcggaatgactgggcgtaaagcgcacgcaggcggtcaattaagttagatgtgaaatccccgggctcaacctgggaatggcatctaagactggttgactggagtctcgtagaggggggtagaattccatgtgtagcggtgaaatgcgtagagatgtggaggaataccggtggcgaaggcggccccctggacgaagactgacgctcaggtgcgaaagcgtggggagcaaacaggattagataccctggtagtccacgctgtaaacgatgtcgatttggaggttgcggtcttgaacggtggcttccgaagctaacgcgttaaatcgaccgcctggggagtacggccgcaaggttaaaactcaaatgaattgacgggggcccgcacaagcggtggagcatgtggtttaattcgatgcaacgcgaagaaccttacctactcttgacatcctcagaatttgctggagacagcgaagtgccttagggaactgagagacaggtgctgcatggctgtcgtcagctcgtgttgtgaaatgttgggttaagtcccgcaacgagcgcaacccttatcctttgttgccagcacgtgaaggtgggaactcaaaggagactgccggtgataaaccggaggaaggtggggatgacgtcaagtcatcatggcccttacgagtagggctacacacgtgctacaatggcggatacaaagtgaagcgacctcgcgagagcaagcggaacacacaaagtctgtcgtagtccggattggagtctgcaactcgactccatgaagtcggaatcgctagtaatcgtagatcagcatgctacggtgaatacgttcccgggccttgtacacaccgcccgtcacaccatgggagtgggttgcaaaagaagtcggtagcttaaccgaaaggggggcgctgaccactttgtggctcatgactggggtgaagtcgtaacaaggtaaccgtaggggaacc

SEQ ID NO: 2543 - DNA, 1426 bp, Photorhabdus luminescens
  source 1..1426: mol_type = unassigned DNA
attgaacgctggcggcaggcctaacacatgcaagtcgggcggtaacaggaaagcgcctgcgcttttgctgacgagcggcggacgggtgagtaatgtctggggatctgcccgagggtgggggataaccactggaaacggtggctaataccgcataatgtcgcaagaccaaagtgggggacctgaaagggcctcacgccgtcggatgaacccagatgggattagctggtaggtagggtaatggcctacctaggcgacgatccctagctggtctgagaggatgaccagccacactgggactgagacacggcccagactcctacgggaggcagcagtggggaatattgcacaatgggcgcaagcctgatgcagccatgccgcgtgtatgaagaaggccttcgggttgtaaagtactttcagcggggaggaaggatgtaacttgaatagagttggattttgacgttacccgcagaagaagcaccggctaactccgtgccagcagccgcggtaatacggagggtgcaagcgttaatcggaatgactgggcgtaaagcgcacgcaggcggtcaattaagttagatgtgaaatccccgggctcaacctgggaatggcatctaagactggttgactggagtctcgtagaggggggtagaattccatgtgtagcggtgaaatgcgtagagatgtggaggaataccggtggcgaaggcggccccctggacgaagactgacgctcaggtgcgaaagcgtggggagcaaacaggattagataccctggtagtccacgctgtaaacgatgtcgatttggaggttgtggccttgagctgtggcttccgaagctaacgcgttaaatcgaccgcctggggagtacggccgcaaggttaaaactcaaatgaattgacgggggcccgcacaagcggtggagcatgtggtttaattcgatgcaacgcgaagaaccttacctactcttgacatccgagacaggtgctgcatggctgtcgtcagctcgtgttgtgaaatgttgggttaagtcccgcaacgagcgcaacccttatcctttgttgccagcgcgtcgaggtgggaactcaaaggagactgccggtgataaaccggaggaaggtggggatgacgtcaagtcatcatggcccttacgagtagggctacacacgtgctacaatggcggatacaaagtgaagcgacctcgcgagagcaagcggaacacacaaagtctgtcgtagtccggattggagtctgcaactcgactccatgaagtcggaatcgctagtaatcgtagatcagcatgctacggtgaatacgttcccgggccttgtacacaccgcccgtcacaccatgggagtgggttgcaaaagaagtcggtagcttaaccgagaggagggcgctgaccactttgtggctcatgactggggtg

SEQ ID NO: 2544 - DNA, 1378 bp, Photorhabdus temperata
  source 1..1378: mol_type = unassigned DNA
gacgagcggcggacgggtgagtaatgtctggggatctgcccgagggcgggggataaccactggaaacggtggctaataccgcataatgtcgcaagaccaaagtgggggacctgaaagggcctcacgcccgtggatgaacccagatgggattagctggtaggtggggtaatggctcacctaggcgacgatccctagctggtctgagaggatgaccagccacactgggactgagacacggcccagactcctacgggaggcagcagtggggaatattgcacaatgggcgcaagcctgatgcagccatgccgcgtgtatgaagaaggccttcgggttgtaaagtactttcagcggggaggaaggggttgatttgaacagagtcaattcttgacgttacccgcagaagaagcaccggctaactccgtgccagcagccgcggtaatacggagggtgcaagcgttaatcggaatgactgggcgtaaagcgcacgcaggcggtcaattaagttggatgtgaaatccccgggcttaacctgggaacggcatccaagactggttggctagagtctcgtagaggggggtagaattccatgtgtagcggtgaaatgcgtagagatgtggaggaataccggtggcgaaggcggccccctggacgaagactgacgctcaggtgcgaaagcgtggggagcaaacaggattagataccctggtagtccacgcggtaaacgatgtcgatttggaggttgttcccttgaggagtggcttccggagctaacgcgttaaatcgaccgcctggggagtacggccgcaaggttaaaactcaaatgaattgacgggggcccgcacaagcggtggagcatgtggtttaattcgatgcaacgcgaagaaccttacctactcttgacatccagagaagacctcagagatggggttgtgcctaagggagctctgagacaggtgctgcatggctgtcgtcagctcgtgttgtgaaatgttgggttaagtcccgcaacgagcgcaacccttatcctttgttgccagcacgtgatggtgggaactcaagggagactgccggtgataaaccggaggaaggtggggatgacgtcaagtcatcatggcccttacgagtagggctacacacgtgctacaatggcggatacaaagtgaagcgaacttgcgagagtaagcggaacacataaagtctgtcgtagtccggattggagtctgcaactcgactccatgaagtcggaatcgctagtaatcgtagatcagaatgctacggtgaatacgttcccgggccttgtacacaccgcccgtcacaccatgggagtgggttgcaaaagaagtcggtagcttaaccttcgggagggcgctgaccactt

SEQ ID NO: 2545 - DNA, 1516 bp, unidentified
  source 1..1516: mol_type = unassigned DNA; note = Photorhabdus thracensis
cctggctcagattgaacgctggcggcaggcctaacacatgcaagtcgagcggtaacaggaaaatgcttgcatttttgctgacgagcggcggacgggtgagtaatgtctggggatctgcccgagggcgggggataaccactggaaacggtggctaataccgcataatgtcgcaagaccaaagtgggggacctgaaagggcctcacgcccgcggatgaacccagatgggattagctggtaggtagggtaatggcctacctaggcgacgatccctagctggtctgagaggatgaccagccacactgggactgagacacggcccagactcctacgggaggcagcagtggggaatattgcacaatgggcgcaagcctgatgcagccatgccgcgtgtatgaagaaggccttcgggttgtaaagtactttcagcggggaggaaggatatcgcttgaacagagcggtatgttgacgttacccgcagaagaagcaccggctaactccgtgccagcagccgcggtaatacggagggtgcaagcgttaatcggaatgactgggcgtaaagcgcacgcaggcggtcaattaagttagatgtgaaatccccgggcttaacctgggaacggcatctaagactggttggctagagtctcgtagaggggggtagaattccatgtgtagcggtgaaatgcgtagagatgtggaggaataccggtggcgaaggcggccccctggacgaagactgacgctcaggtgcgaaagcgtggggagcaaacaggattagataccctggtagtccacgcggtaaacgatgtcgatttggaggttgttccctaagaggagtggcttccggagctaacgcgttaaatcgaccgcctggggagtacggccgcaaggttaaaactcaaatgaattgacgggggcccgcacaagcggtggagcatgtggtttaattcgatgcaacgcgaagaaccttacctactcttgacatcctcagaatttgctggagacagcgaagtgccttcgggaactgagagacaggtgctgcatggctgtcgtcagctcgtgttgtgaaatgttgggttaagtcccgcaacgagcgcaacccttatcctttgttgccagcacgtaatggtgggaactcaaaggagactgccggtgataaaccggaggaaggtggggatgacgtcaagtcatcatggcccttacgagtagggctacacacgtgctacaatggcggatacaaagtgaagcgacctcgcgagagcaagcggaacacataaagtctgtcgtagtccggattggagtctgcaactcgactccatgaagtcggaatcgctagtaatcgtagatcagaatgctacggtgaatacgttcccgggccttgtacacaccgcccgtcacaccatgggagtgggttgcaaaagaagtcggtagcttaaccgtttggagggcgctgaccactttgtgattcatgactggggtgaagtcgtaacaaggtaaccgtaggggaacctgcggctg

SEQ ID NO: 2546 - DNA, 1402 bp, unidentified
  source 1..1402: mol_type = unassigned DNA; note = Phreatobacter oligotrophus
aacgaacgctggcggcaggcttaacacatgcaagtcgagcgccccgcaaggggagcggcagacgggtgagtaacgcgtgggaacgtaccttttggttcggaacaactccgggaaactggagctaataccggataagcccttcgggggaaagatttatcgccgaaagatcggcccgcgtctgattagctagttggtgaggtaacggctcaccaaggcgacgatcagtagctggtctgagaggatgatcagccacactgggactgagacacggcccagactcctacgggaggcagcagtggggaatattggacaatgggcgcaagcctgatccagccatgccgcgtgagtgatgaaggccttagggttgtaaagctcttttgtccgggaagataatgactgtaccggaagaataagccccggctaacttcgtgccagcagccgcggtaatacgaagggggctagcgttgttcggaatcactgggcgtaaagcgcacgtaggcggaccattaagtcaggggtgaaagcctggagctcaactccagaactgcctttgatactgatggtctcgagttcggaagaggttggtggaactgcgagtgtagaggtgaaattcgtagatattcgcaagaacaccagtggcgaaggcggccaactggtccgatactgacgctgaggtgcgaaagcgtggggagcaaacaggattagataccctggtagtccacgccgtaaacgatgaatgccagccgttggggagcttgctcctcagtggcgcagctaacgctttaagcattccgcctggggagtacggtcgcaagattaaaactcaaaggaattgacgggggcccgcacaagcggtggagcatgtggtttaattcgaagcaacgcgcagaaccttaccagctcttgacatcccgtgccacgcccagagatgggcggtcctcttcggaggcgcggagacaggtgctgcatggctgtcgtcagctcgtgtcgtgagatgttgggttaagtcccgcaacgagcgcaaccctcgcctttagttgccagcattcagttgggcactctagagggactgccggtgataagccggaggaaggtggggatgacgtcaagtcctcatggcccttacgggctgggctacacacgtgctacaatggcggtgacagtgggcagcaaagccgcaaggccaagctaatctccaaaagccgtctcagttcggattgcactctgcaactcgagtgcatgaagttggaatcgctagtaatcgcagatcagaatgctgcggtgaatacgttcccgggccttgtacacaccgcccgtcacaccatgggagttgggtttacccgaaggcagtgcgctaaccgcaagggggcagctgaccacggtaggctcagcgactggggtg

SEQ ID NO: 2547 - DNA, 1402 bp, unidentified
  source 1..1402: mol_type = unassigned DNA; note = Phreatobacter stygius
aacgaacgctggcggcaggcttaacacatgcaagtcgagcgccccgcaaggggagcggcagacgggtgagtaacacgtgggaacgtaccttttggttcggaacaactccgggaaactggagctaataccggataagccctaacggggaaagatttatcgccaaaagatcggcccgcgtctgattagctagttggtggggtaacggcccaccaaggcgacgatcagtagctggtctgagaggatgatcagccacactgggactgagacacggcccagactcctacgggaggcagcagtggggaatattggacaatgggcgcaagcctgatccagccatgccgcgtgagtgatgaaggccttagggttgtaaagctcttttgtccgggaagataatgactgtaccggaagaataagccccggctaacttcgtgccagcagccgcggtaatacgaagggggctagcgttgttcggaatcactgggcgtaaagcgcacgtaggcggattattaagtcaggggtgaaagcctggagctcaactccagaactgcctttgatactgatagtctcgagttcggaagaggttggtggaactgcgagtgtagaggtgaaattcgtagatattcgcaagaacaccagtggcgaaggcggccaactggtccgatactgacgctgaggtgcgaaagcgtggggagcaaacaggattagataccctggtagtccacgccgtaaacgatgaatgccagccgttggggagcttgctcttcagtggcgcagctaacgctttaagcattccgcctggggagtacggtcgcaagattaaaactcaaaggaattgacgggggcccgcacaagcggtggagcatgtggtttaattcgaagcaacgcgcagaaccttaccagctcttgacatcccgtgttacatcgagagatcgatggtcctcttcggaggcgcggagacaggtgctgcatggctgtcgtcagctcgtgtcgtgagatgttgggttaagtcccgcaacgagcgcaaccctcgcctttagttgccagcatttagttgggcactctagagggactgccggtgataagccggaggaaggtggggatgacgtcaagtcctcatggcccttacgggctgggctacacacgtgctacaatggtggtgacagtgggcagcgaaaccgcgaggtctagctaatctccaaaagccatctcagttcggattgcactctgcaactcgagtgcatgaagttggaatcgctagtaatcgcagatcagaatgctgcggtgaatacgttcccgggccttgtacacaccgcccgtcacaccatgggagttgggtttacccgaaggcagtgcgctaaccgcaagggggcagctgaccacggtaggctcagcgactggggtg

SEQ ID NO: 2548 - DNA, 1428 bp, Phycisphaera mikurensis
  source 1..1428: mol_type = unassigned DNA
atcgaacgctggcggcatggctaaaacatgcaagtcgaacgagaagccacttcggtggcggacagtggcgaaagggcgagtaacgtgtatctaatgtacccccgagtcctggatagcagtgggaaaccgctggtaacacaggatgacatcggtagtccgcatggccggccgatcaaagtttacgctcggggagcaggatacatcctatcagcttgttggtgaggtaacggcttaccaaggcgaagacgggtagcgggtgtgagagcatgacccgccgcatcgggactgagacactgcccggactcctacgggaggctgcagtaacgaatattccgcaatgcgcgaaagcgtgacggagcaatgccgcgtgcgggatgaagccccttggggtgtaaaccgctgtcagggtttaggaatcaatgaccagacccaaaggaaggaccggctaactctgtgccagcagccgcggtaatacagagggtccaagcgttgatcggaatcactgggtttaaagggtccgcaggcggattggcaagtgcgttgtgaaatcccacggcttaaccgtggaactgcttcgcagactgccaatcttgagcgtgtcaggggtcgtcggaactctaggtggagcggtgaaatgcgtagatatctagaggaacgccaaaagggaagccagacgactgggacattgctgacgctcagggacgaaagcgtgggtagcgaacgggattagataccccggtagtccacgccctaaacgatgtgtactaggtagcggaggttttgacgccatcgctgccgaagccaaagtgttaagtacaccacctggggagtacggtcgcaaggctaaaactcaaaggaattgacgggggctcacacaagcggtggagcatgtggcttaattcgaagcaacgcgaagaaccttatccagggtttgacattcacggattagcttcctgaaagggaagtgacgcgcttgcgtggaacgtgaacaggtgctgcatggctgtcgtcagctcgtgctgtgaagtgtcgggttaagtcccttaacgagcgaaacccctatcattagttgccatcaggtcatgctggggactctagtgagactgccggcgtcaagccggaggaaggtggggatgacgtcaagtcctcatggcctttatgccctgggctgcacacgtgctacaatgcggtagacagagcgaagcgatacggtaacgtggagcaaatcgcacaaactaccgctcagttcggattgtgggctgcaactcgcccacatgaagttggaatcgctagtaatcgcgtatcatcaacgacgcggtgaataagttcctgagccttgtacacaccgcccgtcacgtcatgggagccgggagcgcccgaagtggtcacgattcagtgatccctacggtgagctcggtgactgggacg

SEQ ID NO: 2549 - DNA, 1435 bp, unidentified
  source 1..1435: mol_type = unassigned DNA; note = Phytobacter diazotrophicus
attgaacgctggcggcaggcctaacacatgcaagtcgagcggtagcacagggagcttgctctcgggtgacgagtgggggacgggtgagtaatgtctgggaaactgcccgatggagggggataactactggaaacggtagctaataccgcataatgtggcaagaccaaagagggggaccttcgggcctcttgccatcggatgtgcccagatgggattagcttgttggtgaggtaatggctcaccaaggcgacaatccctagctggtctgagaggatgaccagccacactggaactgagacacggtccagactcctacgggaggcagcagtggggaatattgcacaatgggcgcaagcctgatgcagccatgccgcgtgtgtgaagaaggccttcgggttgtaaagcactttcagcggggaggaaggcaatgcggttaataaccgtgttgattgacgttacccgcagaagaagcaccggctaactccgtgccagcagccgcggtaatacggagggtgcaagcgttaatcggaattactgggcgtaaagcgcacgcaggcggtctgtcaagtcggatgtgaaatccccgggctcaacctgggaactgcattcgaaactggcaggcttgagtcttgtagaggggggtagaattccaggtgtagcggtgaaatgcgtaaagatctggaggaataccggtggcgaaggcggccccctggacaaagactgacgctcaggtgcgaaagcgtggggagcaaacaggattagataccctggtagtccacgccgtaaacgatgtcgacttggaggttgtgcccttgaggcgtggcttccggagctaacgcgttaagtcgaccgcctggggagtacggccgcaaggttaaaactcaaatgaattgacgggggcccgcacaagcggtggagcatgtggtttaattcgatgcaacgcgaagaaccttacctggtcttgacatccacggaatttggcagagatgccttagtgccttcgggaaccgtgagacaggtgctgcatggctgtcgtcagctcgtgttgtgaaatgttgggttaagtcccgcaacgagcgcaacccttatcctttgttgccagcggtccggccgggaactcaaaggasactgccagtgataaactggaggaaggtggggatgacgtcaagtcatcatggcccttacgaccagggctacacacgtgctacaatggcatatacaaagagaagcgacctcgcgagagcaagcggacctcataaagtatgtcgtagtccggattggagtctgcaactcgactccatgaagtcggaatcgctagtaatcgtggatcagaatgccacggtgaatacgttcccgggccttgtacacaccgcccgtcacaccatgggagtgggttgcaaaagaagtaggtagcttaaccttcgggagggcgctt

SEQ ID NO: 2550 - DNA, 1363 bp, unidentified
  source 1..1363: mol_type = unassigned DNA; note = Phytobacter ursingii
cggacgggtgagtaatgtctgggaaactgcccgatggagggggataactactggaaacggtagctaataccgcataacgtcgcaagaccaaagagggggaccttcgggcctcttgccatcggatgtgcccagatgggattagctagtaggtggggtaatggctcacctaggcgacgatccctagctggtctgagaggatgaccagccacactggaactgagacacggtccagactcctacgggaggcagcagtggggaatattgcacaatgggcgcaagcctgatgcagccatgccgcgtgtgtgaagaaggccttcgggttgtaaagcactttcagcggggaggaaggcrrtacggttaataaccgtgttgattgacgttacccgcagaagaagcaccggctaactccgtgccagcagccgcggtaatacggagggtgcaagcgttaatcggaattactgggcgtaaagcgcacgcaggcggtctgtcaagtcggatgtgaaatccccgggctcaacctgggaactgcattcgaaactggcaggcttgagtcttgtagaggggggtagaattccaggtgtagcggtgaaatgcgtagagatctggaggaataccggtggcgaaggcggccccctggacaaagactgacgctcaggtggaaaagcgtggggagcaaacaggattagataccctggtagtccacgccgtaaacgatgtcgacttggaggttgtgcccttgaggcgtggcttccggagctaacgcgttaagtcgaccgcctggggagtacggccgcaaggttaaaactcaaatgaattgacgggggcccgcacaagcggtggagcatgtggtttaattcgatgcaacgcgaagaaccttacctggtcttgacatccacggaattcggcagagatgccttagtgccttcgggaaccgtgagacaggtgctgcatggctgtcgtcagctcgtgttgtgaaatgttgggttaagtcccgcaacgagcgcaacccttatcctttgttgccagcggtymggccgggaactcaaaggagactgccagtgataaactggaggaaggtggggatgacgtcaagtcatcatggcccttacgaccagggctacacacgtgctacaatggcgcatacaaagagaagcgacctcgcgagagcaagcggacctcataaagtgcgtcgtagtccggattggagtctgcaactcgactccatgaagtcggaatcgctagtaatcgtggatcagaatgccacggtgaatacgttcccgggccttgtacacaccgcccgtcacaccatgggagtgggttgcaaaagaagtaggtagcttaaccttcgggagggcgcttacca

SEQ ID NO: 2551 - DNA, 1439 bp, unidentified
  source 1..1439: mol_type = unassigned DNA; note = Pigmentiphaga aceris
aacgctagcggaatgccttacacatgcaagtcgaacggcagcacggacttcggtctggtggcgagtggcgaacgggtgagtaatgtatcggaacgtacccagtagcgggggataactactcgaaagagtagctaataccgcatacgccctacgggggaaagggggggatcttcggacctcccactattggagcggctgatatcggattagctagttggtgaggtaaaggctcaccaaggcgacgatccgtagctggtttgagaggacgaccagccacactgggactgagacacggcccagactcctacgggaggcagcagtggggaattttggacaatgggggaaaccctgatccagccattccgcgtgtgtgaagaaggccttcgggttgtaaagcacttttggcgggaaagaaacggcgtcgactaatactcggcgtaactgacggtacccgcagaataagcaccggctaactacgtgccagcagccgcggtaatacgtagggtgcaagcgttaatcggaattactgggcgtaaagcgtgcgcaggcggttcggaaagaaagatgtgaaatcccagggctcaaccttggaactgcatttttaactaccggactagagtatgtcagaggggggtggaattccacgtgtagcagtgaaatgcgtagatatgtggaggaacaccgatggcgaaggcagccccctgggataatactgacgctcatgcacgaaagcgtggggagcaaacaggattagataccctggtagtccacgccctaaacgatgtcaactagctgtcgggaccttcgggttttggtagcgcagctaacgcgtgaagttgaccgcctggggagtacggtcgcaagattaaaactcaaaggaattgacggggacccgcacaagcggtggatgatgtggattaattcgatgcaacgcgaaaaaccttacctacccttgacatgtctagaatcccgaagagatttgggagtgctcgaaagagaactggaacacaggtgctgcatggccgtcgtcagctcgtgtcgtgagatgttgggttaagtcccgcaacgagcgcaacccttgtcattagttgctacgaaagggcactctaatgagactgccggtgacaaaccggaggaaggtggggatgacgtcaggtcctcatggcccttatgggtagggcttcacacgtcatacaatggtcgggacagagggctgccaacccgcgagggggagccaatcccagaaacccgatcgtagtccggattgtagtctgcaactcgactgcatgaagtcggaatcgctagtaatcgcggatcagcatgtcgcggtgaatacgttcccgggtcttgtacacaccgcccgtcacaccatgggagtgggttctaccagaagtaggtagcctaaccgtaaggagggcgcttaccacggtaggattcat

SEQ ID NO: 2552 - DNA, 1444 bp, Pirellula staleyi
  source 1..1444: mol_type = unassigned DNA
aatgaacgttggcggcatggattaggcatgcaagtcgtgcgcgatatgtagcaatacatggagagcggcgaaagggagagtaatacgtaggaacctaccttcgggtctgggatagcggcgggaaactgccggtaataccagatgatgtttccgaaccaaaggtgtgattccgcctgaagaggggcctacgtcgtattagctagttggtagggtaatggcctaccaaggcaaagatgcgtatggggtgtgagagcatgcccccactcactgggactgagacactgcccagacacctacgggtggctgcagtcgagaatcttcggcaatgggcgaaagcctgaccgagcgatgccgcgtgcgggatgaaggccttcgggttgtaaaccgctgtcgtaggggatgaagtgctagggggttctccctctagtttgactgaacctaggaggaagggccggctaatctcgtgccagcagccgcggtaatacgagaggcccaaacgttattcggatttactgggcttaaagagttcgtaggcggtcttgtaagtggggtgtgaaatccctcggctcaaccgaggaactgcgctccaaactacaagacttgagggggatagaggtaagcggaactgatggtggagcggtgaaatgcgttgatatcatcaggaacaccggaggcgaaggcggcttactgggtcctttctgacgctgaggaacgaaagctaggggagcaaacgggattagataccccggtagtcctagccgtaaacgatgagcactggaccggagctctgcacagggtttcggtcgtagcgaaagtgttaagtgctccgcctggggagtatggtcgcaaggctgaaactcaaaggaattgacgggggctcacacaagcggtggaggatgtggcttaattcgaggctacgcgaagaaccttatcctagtcttgacatgcttaggaatcttcctgaaagggaggagtgctcgcaagagagcctttgcacaggtgctgcatggctgtcgtcagctcgtgtcgtgagatgtcgggttaagtcccttaacgagcgaaacccttgtccttagttaccagcgcgtcatggcggggactctaaggagactgccggtgttaaaccggaggaaggtggggatgacgtcaagtcctcatggcctttatgattagggctgcacacgtcctacaatggtgcacacaaagcgacgcaaactcgtgagagccagctaatcgcaaaaaatgtacctcagttcggattgcaggctgcaactcgcctgcatgaagctggaatcgctagtaatcgcgggtcagcataccgcggtgaatgtgttcctgagccttgtacacaccgcccgtcaagccacgaaagtgggggggacccaacagcgctgccgtaaccgcaaggaacaaggcgcctaaggtcaactccgtgattgggact

SEQ ID NO: 2553 - DNA, 1467 bp, Piscirickettsia salmonis
  source 1..1467: mol_type = unassigned DNA
attgaacgctggtggcatgcttaacacatgcaagtcgaacggtagcagatctagcttgctagatgctgacgagtggcggacgggtgagtaacgcgtgggaatttaccttttagtgggggataactttaggaaactgaagctaataccgcataagacctgagggttaaagagggcctctatttataagctcttgctaggagatgagcccgcgttggattagctagttggtagggtaaaggcttaccaaggcgacgatccatagctggtttgagagaatggccagccacactgggactgagacacggcccagactcctacgggaggcagcagtggggaatattggacaatggggggaaccctgatccagcaatgccacgtgtgtgaagaaggccttagggttgtaaagcactttcagcggggaggaaggtaagctaattaatacttggcttaattgacgttacctgcagaagaagcaccggctaactccgtgccagcagccgcggtaatacggagggtgcgagcgttaatcggaattactgggcgtaaagggcgcgtaggcggaagattaagttggatgtgaaatcccagggctcaaccttggaactgcatccgaaactggtattctagagtatggtagaggaaagtggaatttcaggtgtagcggtgaaatgcgtagatatctgaaggaacaccggtggcgaaggcgactttctggatcaatactgacgctgaggcgcgaaagcatgggtagcgaacaggattagataccctggtagtccatgctgtaaacgatgtcaactagccgttggattcccttgaggagtttagtggcgtagctaacgcgataagttgaccgcctggggagtacggccgcaaggttaaaactcaaaggaattgacgggggcccgcacaagcggtggagcatgtggtttaattcgatgcaacgcgaagaaccttacctggtcttgacatcctaagaattctgcagagatgcggaagtgccttcgggagcttagagacaggtgctgcatggctgtcgtcagctcgtgtcgtgagatgttgggttaagtcccgcaacgagcgcaacccttatccttagttgccagcacgtgatggtgggaactctagggagactgccggtgataaaccggaggaaggtggggacgacgtcaagtcatcatggcccttacgaccagggctacacacgtgctacaatggggcgtacagacggaggcgaagcagcgatgtggagcgaacctgagaaagcgcctcgtagtccggattggagtctgcaactcgactccatgaagtcggaatcgctagtaatcgcgaatcagcatgtcgcggtgaatacgttcccgggccttgtacacaccgcccgtcacaccatgggagtgaattgcaccagaaggggctaggctaactttagggaggccggtcaccacggtgtggttcatgactggggtg

SEQ ID NO: 2554 - DNA, 1429 bp, unidentified
  source 1..1429: mol_type = unassigned DNA; note = Planctomicrobium piriforme
aatgaacgttggtagcatggattaggcatgcaagtcgagcgacaaggtaccttcgggtactggaggagcggcaaacggggtagtaaggcatcggaacgtaccctcttgtccgggatagccgcgggaaactgcggttaataccggataatcccgaaagggcaaaggtccgccgcgggaggagcggccgatgtgatatcaggtagttggcggggtaacggcccaccaagccatagacgtctaggggatgtgagagcatgatccccaccactgggactgagatactgcccagacacctacgggtggctgcagtcgagaatcttcggcaatgggcgcaagcctgaccgagcgatgctacgtgtgggatgaaggcccttgggttgtaaaccactgtcagaggggatgaaagcgtaagcttgacagagcctcagaggaagcgcgggctaagttcgtgccagcagccgcggtaatacgaactgcgcaaacgttattcggaatcactgggcttacagggtgcgtaggctgccattcaggtccgatgtgaaatcccacagctcaactgtggaatggcattggaaaccgattggcttgagtgagctagagatgcacggaacttccggtggagcggtgaaatgtgttgagatcggaaggaacaccagaggcgaaggcggtgcattggggcttgtctgacgctgaggcacgaaagccaggggagcgaacgggattagataccccggtagtcctggctgtaaacgatcagtactagacggaggggggcttgcccttctcggtcgtagcgaaagcgataagtactgcgcctggggagtatggtcgcaaggctgaaactcaaaggaattgacgggggctcacacaagcggtggagcatgtggcttaattcgaggcaacgcgaagaaccttatcctaggcttgacatgctggaattagttggctgaaaggtcaatgacgccttcgggtggaatcagcacaggtgctgcatggctgtcgtcagctcgtgccgtgaggtgtcgggttaagtccttaaacgagcgaaacccctgtcgtcagttgccagcattcagttggggactctgacgagaccgccggtgtcaaaccggaggaaggcggggacgacgtcaagtcatcatggcctttatgtctagggctgcacacgtgctacaatgcggcgtacaaagggaagccaacccgcgagggggagccaatcccaaaaagcgtcgctcagttcggattgcaggctgcaactcgcctgcatgaagctggaatcgctagtaatcgcaggtcagctatactgcggtgaatgtgttcctgagccttgtacacaccgcccgtcaagccacgaaaggggggggcatcccaagtcgccgagcgaaccgcaaggacgcaggcgcctaagatgaactccctgattgggact

SEQ ID NO: 2555 - DNA, 1394 bp, unidentified
  source 1..1394: mol_type = unassigned DNA; note = Planctopirus hydrillae
gtcgagggagacccgcaagggggacaccggcgaacggggtaggaatacataggtaacgtaccctcaggacggggatagccaagggaaactttgggtaatacccgatgtgatgtcaggatgtgaatgcctgccatcaaaggtgagattccacctggggagcggcttatgcatcattagcttgttggcggggtaacggcccaccaaggctgcgatgattagggggtgtgagagcatggcccccaccactggcactgagacactggccagacacctacgggtggctgcagtcgagaatcttcggcaatgggcgaaagcctgaccgagcgatgccgcgtgcgggatgaaggtcttcggattgtaaaccgctgtcggaggggatgaagtgtatgggagcaatctcctgtatttgacagagcctcggaggaagcacgggctaagttcgtgccagcagccgcggtaatacgaactgtgcaaacgttattcggaatcactgggcttacagggtgcgtaggcggcattttaagtcaggtgtgaaatcccccggctcaaccggggaactgcgcctgagactggattgctcgagtgaggcaggggtgtacggaacttccggtggagcggtgaaatgtgtagatatcggaaggaacgccagcagcgaaagcggtacactgggccttgtctgacgctgaggcacgaaagccagggtagcgaacgggattagataccccggtagtcctggccgtaaacaatgagcactgggggagggacgggtcaccgttctttcccgtagcgaaagcgttaagtgctccgcctggggagtatggtcgcaaggctgaaactcaaaggaattgacgggggctcacacaagcggtggagcatgtggcttaattcgaggcaacgcgaagaaccttatcctagacttgacatggtgggattagttggctgaaaggtcaatgacgccttcgggtggaaccatcacaggtgctgcatggctgtcgtcagctcgtgtcgtgagatgtcgcgttaagtcgctaaacgagcgaaacccctgttcttagttgccaacacgtcatggtggggactctaagaagaccgccggcgtcaagccggaggaaggcggggatgacgtcaagtcctcatggcctttatgtctagggctgcacacgtgctacaatgggatgtacagagggacgccaagctgcgaagccgagcaaaccccaaaaagcatccctcagttcggattgcaggctgcaactcgcctgcatgaagccggaatcgctagtaatcgccggtcagcaatacggcggtgaatgtgttcctgagccttgtacacaccgcccgtcaagccacgaaagcggggggcgcctaaagacacttgtctaaccgcaaggaggacg

SEQ ID NO: 2556 - DNA, 1458 bp, unidentified
  source 1..1458: mol_type = unassigned DNA; note = Planctopirus limnophila
aatgaacgttggcggcatggattaggcatgcaagtcgagggagaacccgcaagggggacaccggcgaacggggtaggaatacataggtaacgtaccctcaggacggggatagccaagggaaactttgggtaatacccgatgtgatgtcaggatgtgaatgcctgccatcaaaggtgagattccacctgaggagcggcttatgcatcattagcttgttggcggggtaacggcccaccaaggctgcgatgattagggggtgtgagagcatggcccccaccactggcactgagacactggccagacacctacgggtggctgcagtcgagaatcttcggcaatgggcgaaagcctgaccgagcgatgccgcgtgcgggatgaaggccttcgggttgtaaaccgctgtcggaggggatgaagtgtatgggagcaatctcctgtatttgacagagcctcggaggaagcacgggctaagttcgtgccagcagccgcggtaatacgaactgtgcaaacgttattcggaatcactgggcttacagggtgcgtaggcggcattttaagtcaggtgtgaaatcccccggctcaaccggggaactgcgcctgagactggattgctcgagtgaggcaggggtgtacggaacttccggtggagcggtgaaatgtgtagatatcggaaggaacgccagcagcgaaagcggtacactgggccttgtctgacgctgaggcacgaaagccagggtagcgaacgggattagataccccggtagtcctggccgtaaacaatgagcactgggggagggacgggtcaccgttctttcccgtagcgaaagcgttaagtgctccgcctggggagtatggtcgcaaggctgaaactcaaaggaattgacgggggctcacacaagcggtggagcatgtggcttaattcgaggcaacgcgaagaaccttatcctagacttgacatggtgggattagttggctgaaaggtcaatgacgccttcgggtggaaccatcacaggtgctgcatggctgtcgtcagctcgtgtcgtgagatgtcgcgttaagtcgctaaacgagcgaaacccctgttcttagttgccaacacgtcatggtggggactctaagaagaccgccggcgtcaagccggaggaaggcggggatgacgtcaagtcctcatggcctttatgtctagggctgcacacgtgctacaatgggatgtacagagggacgccaagctgcgaagccgagcaaaccccaaaaagcatccctcagttcggattgcaggctgcaactcgcctgcatgaagccggaatcgctagtaatcgccggtcagcaatacggcggtgaatgtgttcctgagccttgtacacaccgcccgtcaagccacgaaagcggggggcgcctaaagacacttgtctaaccgtaaggaggacggtgtttagggcgaaactcgtgattgggact

SEQ ID NO: 2557 - DNA, 1472 bp, Planifilum fimeticola
  source 1..1472: mol_type = unassigned DNA
gacgaacgctggcggcgtgcctaatacatgcaagtcgggcggggttttgaggggcttgcccttcaagacccagcggcgaacgggtgagtaacacgtgggcaacctgcccgcaagaccgggataacttcgggaaaccggagctaataccggataggaccccggatcgcatgatccggggtggaaaggcggcctcggctgccacttgcggatgggcccgcggcgcattagctagttggtgaggtaacggctcaccaaggtgacgatgcgtagccgacctgagagggtgaccggccacactgggactgagacacggcccagactcctacgggaggcagcagtagggaattttccgcaatgggcgcaagcctgacggagcaacgccgcgtgagcgaggacggccttcgggttgtaaagctctgttcttcgggaagaatggcgggagggcgaacaactctcccgcatgacggtaccgaaggagaaagccccggctaactacgtgccagcagccgcggtaatacgtagggggcgagcgttgtccggaattattgggcgtaaagcgcgcgtaggcggccggttaagtcctgtgtgaaagaccacggctcaaccgtgggggtgcatgggaaactggccggcttgagtgcaggagaggggagcggaattcccggtgtagcggtggaatgcgtagagatcgggaggaacaccagtggcgaaggcggctctctggcctgtaactgacgctgaggcgcgaaagcgtggggagcgaacaggattagataccctggtagtccacgccgtaaacgatgagtgctaggtgttgggggcatcaggccctctgtgccgaaggaaacccaataagcactccgcctggggagtacggccgcaaggctcaaactaaaggaattgacgggggcccgcacaagcggtggagcatgtggtttaattcgaagcaacgcgaagaaccttaccagggcttgacatcccgctgaccggtgcagagatgcgccttcccttcggggcagcggtgacaggtggtgcatggttgtcgtcagctcgtgtcgtgagatgttgggttcagtcccgcaacgagcgcaacccttgcccttagttgccagcgggtaaagccgggcactctaaggggacagccggtgaaagccggaggaaggtggggatgacgtcaaatcatcatgccccttatgtcctgggctacacacgtgctacaatggccggtacaaagggcagcgaacccgcgagggggagccaatcccaaaaagccggtctcagttcggatcgcaggctgcaactcgcctgcgtgaaggcggaatcgctagtaatcgcggatcagcatgccgcggtgaatacgttcccgggccttgtacacaccgcccgtcacacacgagagtctgcaacacccgaagtcggtgagccaacccgcaagggggcagccgccgaaggtggggcagatgattggggtg

SEQ ID NO: 2558 - DNA, 1478 bp, Planifilum fulgidum
  source 1..1478: mol_type = unassigned DNA
gacgaacgctggcggcgtgcctaatacatgcaagtcgtgcggggtcttgaagggcttgccctttaagacccagcggcgaacgggtgagtaacacgtgggtaacctgcccgcaagaccgggataactccgggaaaccggggctaataccggataagactccggatcgcatgatccggagtggaaaggcggcgtcaagctgccacttgcggatgggcccgcggcgcattagctggttggtgaggtaacggctcaccaaggcgacgatgcgtagccgacctgagagggtgatcggccacactgggactgagacacggcccagactcctacgggaggcagcagtagggaatcttccgcaatgggcgcaagcctgacggagcaacgccgcgtgagcgaggacggccttcgggttgtaaagctctgttcttcgggaagaagggcgggagggcgaacaactcttccgcttgacggtaccgaaggagaaagccccggctaactacgtgccagcagccgcggtaatacgtagggggcgagcgttgtccggaattattgggcgtaaagcgcgcgtaggcggctggttaagtcctgtgtgaaagaccacggctcaaccgtgggggtgcacgggaaactggccggcttgagtgcaggagaggggagcggaattcccggtgtagcggtggaatgcgtagagatcgggaggaacaccagtggcgaaggcggctccctggcctgtaactgacgctgaggcgcgaaagcgtggggagcgaacaggattagataccctggtagtccacgccgtaaacgatgagtgctaggtgttgggggcgtcaggccctctgtgccgaaggtaacccaataagcactccgcctggggagtacggccgcaaggctgaaactcaaaggaattgacgggggcccgcacaagcggtggagcatgtggtttaattcgaagcaacgcgaagaaccttaccagggcttgacatcccgctgaccggtgcagagatgtgcccttcccttcggggacagcggtgacaggtggtgcatggttgtcgtcagctcgtgtcgtgagatgttgggttcagtcccgcaacgagcgcaacccttgcccttagttgccagcgggttaggccgggcactctaaggggacagccggtgaaagccggaggaaggtggggatgacgtcaaatcatcatgccccttatgccctgggctacacacgtgctacaatggccggtacaatgggctgcgaacccgcgagggggagccaatcccaaaaagccggtctcagttcggatcgcaggctgcaactcgcctgcgtgaagccggaatcgctagtaatcgcggatcagcatgccgcggtgaatacgttcccgggccttgtacacaccgcccgtcacaccacgagagtctgcaacacccgaagtcggtgagctaacccgcaagggaggcagccgccgaaggtggggcagatgattggggtg

SEQ ID NO: 2559 - DNA, 1412 bp, Planktothrix agardhii
  source 1..1412: mol_type = unassigned DNA
gatgaacgctggcggtctgcttaacacatgcaagtcgaacggaatccttcgggatttagtggcggacgggtgagtaacacgtaagaacctgcctctaggacggggacaacagttggaaacgactgctaaacccggatgagccgaaaggtaaaagattaatcgcctagagaggggcttgcgtctgattagctagttggtgaggtaagagcccaccaaggcgacgatcagtagctggtctgagaggatgatcagccacactgggactgagacacggcccagactcctacgggaggcagcagtggggaattttccgcaatgggcgaaagctgacggagcaagaccgcgtgggggaggaaggttcttggattgtcaaccccttttctcagggaagaacacaatgacggtacctgaggaaaaagcatcggctaactccgtgccagcagccgcggtaatacgggggatgcaagcgttatccggaatgattgggcgtaaagagtccgtaggtagtcatccaagtctgctgttaaagagcgaggcttaacctcgtaaaggcagtggaaactggaagactagagtgtagtaggggcagagggaattcctggtgtagcggtgaaatgcgtagagatcaggaagaacaccggtggcgaaggcgctctgctgggctataactgacactgagggacgaaagctaggggagcgaatgggattagataccccagtagtcctagcggtaaacgatggaaactaggtgtggcctgtatcgacccgggccgtgccgaagcaaacgcgttaagtttcccgcctggggagtacgcacgcaagtgtgaaactcaaaggaattgacgggggcccgcacaagcggtggagtatgtggtttaattcgatgcaacgcgaagaaccttaccaggacttgacatctctggaatctccttgaaaggggagagtgccgtaaggaaccagaagacaggtgctgcatggctgtcgtcagctcgtgtcgtgagatgttgggttaagtcccgcaacgagcgcaaccctcgtcgttagttgccatcattaagttgggaactctagcgagactgccggtgacaaaccggaggaaggtgaggatgacgtcaagtcagcatggcccttacgtcctgggcgacacacgtactacaatgcgagggacagagagcagccaacccgcgagggagagcgaatctcataaaccctggcacagttcagattgcaggctgcaactcgcctgcatgaaggaggaatcgctagtaatcggaggtcagcatactgcggtgaatccgttcccgggccttgtacacaccgcccgtcacaccatggaagtgagccacgcccgaagtcattactctaacccgaaagggaggagggtgccgaaggcggggttgatgactggggtg

SEQ ID NO: 2560 - DNA, 1413 bp, unidentified
  source 1..1413: mol_type = unassigned DNA; note = Planktothrix rubescens
gatgaacgctggcggtctgcttaacacatgcaagtcgaacggaatccttcgggatttagtggcggacgggtgagtaacacgtaagaacctgcctctaggacggggacaacagttggaaacgactgctaaacccggatgagccgaaaggtaaaagattaatcgcctagagaggggcttgcgtctgattagctagttggtgaggtaagagcccaccaaggcgacgatcagtagctggtctgagaggatgatcagccacactgggactgagacacggcccagactcctacgggaggcagcagtggggaattttccgcaatgggcgaaagcctgacggagcaagaccgcgtgggggaggaaggttcttggattgtcaaccccttttctcagggaagaacacaatgacggtacctgaggaaaaagcatcggctaactccgtgccagcagccgcggtaatacgggggatgcaagcgttatccggaatgattgggcgtaaagagtccgtaggtagtcatccaagtctgctgttaaagagcgaggcttaacctcgtaaaggcagtggaaactggaagactagagtgtagtaggggcagagggaattcctggtgtagcggtgaaatgcgtagagatcaggaagaacaccggtggcgaaggcgctctgctgggctataactgacactgagggacgaaagctaggggagcgaatgggattagataccccagtagtcctagcggtaaacgatggaaactaggtgtggcctgtatcgacccgggccgtgccgaagcaaacgcgttaagtttcccgcctggggagtacgcacgcaagtgtgaaactcaaaggaattgacgggggcccgcacaagcggtggagtatgtggtttaattcgatgcaacgcgaagaaccttaccaggacttgacatctctggaatctccttgaaaggggagagtgccgtaaggaaccagaagacaggtgctgcatggctgtcgtcagctcgtgtcgtgagatgttgggttaagtcccgcaacgagcgcaaccctcgtcgttagttgccatcattaagttgggaactctagcgagactgccggtgacaaaccggaggaaggtgaggatgacgtcaagtcagcatggcccttacgtcctgggcgacacacgtactacaatgcgagggacagagagcagccaacccgcgagggagagcgaatctcataaaccctggcacagttcagattgcaggctgcaactcgcctgcatgaaggaggaatcgctagtaatcgcaggtcagcatactgcggtgaatccgttcccgggccttgtacacaccgcccgtcacaccatggaagtgagccacgcccgaagtcattactctaacccgaaagggaggagggtgccgaaggcggggttgatgactggggtg

SEQ ID NO: 2561 - DNA, 1474 bp, Planococcus antarcticus
  source 1..1474: mol_type = unassigned DNA
gacgaacgctggcggcgtgcctaatacatgcaagtcgagcggaaccagaggagcttgctccttctggtttagcggcggacgggtgagtaacacgtgggcaacctgccctgcagatcgggataactccgggaaaccggtgctaataccgaatagtttgtcgcctctcctgaggcggcacggaaagacggcatctcgctgtcactgcaggatgggcccgcggcgcattagctagttggtggggtaatggcctaccaaggcgacgatgcgtagccgacctgagagggtgatcggccacactgggactgagacacggcccagactcctacgggaggcagcagtagggaatcttccgcaatggacgaaagtctgacggagcaacgccgcgtgagtgacgaaggttttcggatcgtaaaactctgttgtgagggaagaacaagtaccaactaactactggtaccttgacggtacctcaccagaaagccacggctaactacgtgccagcagccgcggtaatacgtaggtggcaagcgttgtccggaattattgggcgtaaagcgcgcgcaggcggttctttaagtctgatgtgaaagcccacggctcaaccgtggagggtcattggaaactggagaacttgagtgcagaagaggaaagtggaattccatgtgtagcggtgaaatgcgtagagatgtggaggaacaccagtggcgaaggcgactttctggtctgtaactgacgctgaggcgcgaaagcgtggggagcaaacaggattagataccctggtagtccacgccgtaaacgatgagtgctaagtgttagggggtttccgccccttagtgctgcagctaacgcattaagcactccgcctggggagtacggccgcaaggctgaaactcaaaggaattgacgggggcccgcacaagcggtggagcatgtggtttaattcgaagcaacgcgaagaaccttaccaggtcttgacatcccgctgcccggtgtagagatacgcctttcccttcggggacagcggtgacaggtggtgcatggttgtcgtcagctcgtgtcgtgagatgttgggttaagtcccgcaacgagcgcaacccttgatcttagttgccagcattcagttgggcactctaaggtgactgccggtgacaaaccggaggaaggtggggatgacgtcaaatcatcatgccccttatgacctgggctacacacgtgctacaatggacggtacaaagggctgcaaccccgcgagggcaagccaatcccagaaaaccgttctcagttcggattgcaggctgcaactcgcctgcatgaagccggaatcgctagtaatcgtggatcagcatgccacggtgaatacgttcccgggccttgtacacaccgcccgtcacaccacgagagtttgtaacacccgaagtcggtgaggtaacccttgtggagccagccgccgaaggtgggacggatgattggggtg

SEQ ID NO: 2562 - DNA, 1411 bp, Planococcus citreus
  source 1..1411: mol_type = unassigned DNA
  misc_difference 149: note = n is a, c, g, or t
  misc_difference 197: note = n is a, c, g, or t
  misc_difference 203: note = n is a, c, g, or t
  misc_difference 773: note = n is a, c, g, or t
  misc_difference 841: note = n is a, c, g, or t
gacgaacgctggcggcgtgcctaatacatgcaagtcgagcggagatagtggagcttgctccattatcttcagcggcggacgggtgagtaacacgtgggcaacctgccctgcagatcgggataactccgggaaaccggtgctaataccgnatagtttgcggcctctcatgaggctgcacggaaagacggtttcggctntcactnacagaatggcccgcggcgcattagctagttggtgaggtaacggctcaccaaggccacgatgcgtagccgacctgagagggtgatcggccacactgggactgagacacggcccagactcctacgggaggcagcagtagggaatcttccgcaatggacgaaagtctgacggagcaacgccgcgtgagtgaagaaggttttcggatcgtaaaactctgttgtgagggaagaacaagtaccaagtaactactggtaccttgacggtacctcaccagaaagccacggctaactacgtgccagcagccgcggtaatacgtaggtggcaagcgttgtccggaattattgggcgtaaagcgcgcgcaggcggtcctttaagtctgatgtgaaagcccacggctcaaccgtggagggtcattggaaactgggggacttgagtgcagaagaggaaagtggaattccacgtgtagcggtgaaatgcgtagagatgtggaggaacaccagtggcgaaggcgactttctggtctgtaactgacgctgaggcgcgaaagcgtggggagcaaacaggattagatnccctggtagtccacgccgtaaacgatgagtgctaagtgttagggggtttccgccccttagtgctgcantaacgcattaagcactccgcctggggagtacggccgcaaggctgaaactcaaaggaattgacgggggcccgcacaagcggtggagcatgtggtttaattcgaagcaacgcgaagaaccttaccaggtcttgacatcccgctgaccgcctaggagactaggcttttccttcggggacagcggtgacaggtggtgcatggttgtcgtcagctcgtgtcgtgagatgttgggttaagtcccgcaacgagcgcaacccttgatcttagttgccagcattcagttgggcactctaaggtgactgccggtgacaaaccggaggaaggtggggatgacgtcaaatcatcatgccccttatgacctgggctacacacgtgctacaatggacggtacaaagggctgcaaacccgcgagggggagccaatcccagaaaaccgttctcagttcggattgcaggctgcaactcgcctgcatgaagccggaatcgctagtaatcgcggatcagcatgccgcggtgaatacgttcccgggccttgtacacaccgcccgtcacaccacgagagtttgtaacaccc

SEQ ID NO: 2563 - DNA, 1469 bp, Planococcus donghaensis
  source 1..1469: mol_type = unassigned DNA
gacgaacgctggcggcgtgcctaatacatgcaagtcgagcggaaccagaggagcttgctccttctggtttagcggcggacgggtgagtaacacgtgggcaacctgccctgcagatcgggataactccgggaaaccggtgctaataccgaatagtttgcggcctctcctgaggctgcacggaaagacggtttcggctgtcactgcaggatgggcccgcggcgcattagctagttggtggggtaatggcctaccaaggcgacgatgcgtagccgacctgagagtgatcggccacactgggactgagacacggcccagactcctacgggaggcagcagtagggaatcttccgcaatggacgaaagtctgacggagcaacgccgcgtgagtgacgaaggttttcggatcgtaaaactctgttgtgagggaagaacaagtaccaactaactactggtaccttgacggtacctcaccagaaagccacggctaactacgtgccagcagccgcggtaatacgtaggtggcaagcgttgtccggaattattgggcgtaaagcgcgcgcaggcggtcctttaagtctgatgtgaaagcccacggctcaaccgtggagggtcattggaaactggggacttgagtgcagaagaggaaagtggaattccatgtgtagcggtgaaatgcgtagagatgtgaggaacaccagtggcgaaggcgactttctggtctgtaactgacgctgaggcgcgaaagcgtggggagcaaacaggattagataccctggtagtccacgccgtaaacgatgagtgctaagtgttagggggtttccgccccttagtgctgcagctaacgcattaagcactccgcctggggagtacggccgcaaggctgaaactcaaaggaattgacgggggcccgcacaagcggtggagcatgtggtttaattcgaagcaacgcgaagaaccttaccaggtcttgacatcccactgcccggtgtagagatacgcttttcccttcggggacagtggtgacaggtggtgcatggttgtcgtcagctcgtgtcgtgagatgttgggttaagtcccgcaacgagcgcaacccttgatcttagttgccagcatttagttgggcactctaaggtgactgccggtgacaaaccggaggaaggtggggatgacgtcaaatcatcatgccccttatgacctgggctacacacgtgctacaatggacggtacaaagggttgccaacccgcgagggggagccaatcccataaaaccgttctcagttcggattgtaggctgcaactcgcctgcatgaagccggaatcgctagtaatcgtggatcagcatgccacggtgaatacgttcccgggccttgtacacaccgcccgtcacaccacgagagtttgtaacacccgaagtcggtgaggtaacccttgtggagccagccgccgaaggtgggacagatgattggggtg

SEQ ID NO: 2564 - DNA, 1473 bp, unidentified
  source 1..1473: mol_type = unassigned DNA; note = Planococcus halocryophilus
gacgaacgctggcggcgtgcctaatacatgcaagtcgagcggaaccagaggagcttgctccttctggtttagcggcggacgggtgagtaacacgtgggcaacctgccctgcagatcgggataactccgggaaaccggtgctaataccgaatagtttgcggcctctcctgaggctgcacggaaagacggtttcggctgtcactgcaggatgggcccgcggcgcattagctagttggtggggtaatggcctaccaaggcgacgatgcgtagccgacctgagagggtgatcggccacactgggactgagacacggcccagactcctacgggaggcagcagtagggaatcttccgcaatggacgaaagtctgacggagcaacgccgcgtgagtgacgaaggttttcggatcgtaaaactctgttgtgagggaagaacaagtaccaactaactactggtaccttgacggtacctcaccagaaagccacggctaactacgtgccagcagccgcggtaatacgtaggtggcaagcgttgtccggaattattgggcgtaaagcgcgcgcaggcggttctttaagtctgatgtgaaagcccacggctcaaccgtggagggtcattggaaactggagaacttgagtgcagaagaggaaagtggaattccatgtgtagcggtgaaatgcgtagagatgtggaggaacaccagtggcgaaggcgactttctggtctgtaactgacgctgaggcgcgaaagcgtggggagcaaacaggattagataccctggtagtccacgccgtaaacgatgagtgctaagtgttagggggtttccgccccttagtgctgcagctaacgcattaagcactccgcctggggagtacggccgcaaggctgaaactcaaaggaattgacgggggcccgcacaagcggtggagcatgtggtttaattcgaagcaacgcgaagaaccttaccaggtcttgacatcccactgaccggtgtagagatacacttttcccttcggggacagtggtgacaggtggtgcatggttgtcgtcagctcgtgtcgtgagatgttgggttaagtcccgcaacgagcgcaacccttgatcttagttgccagcattcagttgggcactctaaggtgactgccggtgacaaaccggaggaaggtggggatgacgtcaaatcatcatgccccttatgacctgggctacacacgtgctacaatggacggtacaaagggttgccaacccgcgagggggagccaatcccataaaaccgttctcagttcggattgtaggctgcaactcgcctgcatgaagccggaatcgctagtaatcgtggatcagcatgccacggtgaatacgttcccgggccttgtacacaccgcccgtcacaccacgagagtttgtaacacccgaagtcggtgaggtaacccttgtggagccagccgccgaaggtgggacggatgattggggtg

SEQ ID NO: 2565 - DNA, 1472 bp, Planococcus kocurii
  source 1..1472: mol_type = unassigned DNA
gacgaacgctggcggcgtgcctaatacatgcaagtcgagcggaactttgggagcttgctcccattgtttagcggcggacgggtgagtaacacgtgggcaacctgccctgcagatcgggataactccgggaaaccggtgctaataccgaatagtttgcggcctctcctgaggctgcacggaaagacggtttcggctgtcactgcaggatgggcccgcggcgcattagctagttggtggggtaatggcctaccaaggcgacgatgcgtagccgacctgagagggtgatcggccacactgggactgagacacggcccagactcctacgggaggcagcagtagggaatcttccgcaatggacgaaagtctgacggagcaacgccgcgtgagtgacgaaggttttcggatcgtaaaactctgttgtgagggaagaacaagtaccaagtaactactggtaccttgacggtacctcaccagaaagccacggctaactacgtgccagcagccgcggtaatacgtaggtggcaagcgttgtccggaattattgggcgtaaagcgcgcgcaggcggttccttaagtccgatgtgaaagcccacggctcaaccgtggagggtcattggaaactggggaacttgagtgcagaagaggaaagtggaattccatgtgtagcggtgaaatgcgtagagatgtggaggaacaccagtggcgaaggcgactttctggtctgtaactgacgctgaggcgcgaaagcgtggggagcaaacaggattagataccctggtagtccacgccgtaaacgatgagtgctaagtgttagggggtttccgccccttagtgctgcagctaacgcattaagcactccgcctggggagtacggccgcaaggctgaaactcaaaggaattgacgggggcccgcacaagcggtggagcatgtggtttaattcgaagcaacgcgaagaaccttaccaggtcttgacatcccactgaccggtgtagagatacacttttcccttcggggacagtggtgacaggtggtgcatggttgtcgtcagctcgtgtcgtgagatgttgggttaagtcccgcaacgagcgcaacccttgatcttagttgccagcattcagttgggcactctaaggtgactgccggtgacaaaccggaggaaggtggggatgacgtcaaatcatcatgccccttatgacctgggctacacacgtgctacaatggacggtacaaagggctgcaaccccgcgagggcaagccaatcccagaaaaccgttctcagttcggattgcaggctgcaactcgcctgcatgaagccggaatcgctagtaatcgtggatcagcatgccacggtgaatacgttcccgggccttgtacacaccgcccgtcacaccacgagagtttgtaacacccgaagtcggtgaggtaacccttgtggagccagccgccgaaggtgggacagatgattggggtg

SEQ ID NO: 2566 - DNA, 1411 bp, Planococcus maitriensis
  source 1..1411: mol_type = unassigned DNA
gacgaacgctggcggcgtgcctaatacatgcaagtcgagcggagatcttggagcttgctccaggatcttagcggcggacgggtgagtaacacgtgggcaacctgccctgcagatcgggataactccgggaaaccggtgctaataccgaatagtttgcggcctctcatgaggccacacggaaagacggtttcggctgtcactgcaggatgggcccgcggcgcattagctagttggtggggtaacggcctaccaaggcaacgatgcgtagccgacctgagagggtgatcggccacactgggactgagacacggcccagactcctacgggaggcagcagtagggaatcttccgcaatggacgaaagtctgacggagcaacgccgcgtgagtgaagaaggttttcggatcgtaaaactctgttgtgagggaagaacaagtaccaactaactattggtaccttgacggtacctcaccagaaagccacggctaactacgtgccagcagccgcggtaatacgtaggtggcaagcgttgtccggaattattgggcgtaaagcgcgcgcaggcggtcctttaagtctgatgtgaaagcccacggctcaaccgtggagggtcattggaaactgggggacttgagtgcagaagaggaaagtggaattccacgtgtagcggtgaaatgcgtagagatgtggaggaacaccagtggcgaaggcgactttctggtctgtaactgacgctgaggcgcgaaagcgtggggagcaaacaggattagataccctggtagtccacgccgtaaacgatgagtgctaagtgttagggggtttccgccccttagtgctgcagctaacgcattaagcactccgcctggggagtacggccgcaaggctgaaactcaaaggaattgacgggggcccgcacaagcggtggagcatgtggtttaattcgaagcaacgcgaagaaccttaccaggtcttgacatcccgctgaccgccttggagacaaggctttcccttcggggacagcggtgacaggtggtgcatggttgtcgtcagctcgtgtcgtgagatgttgggttaagtcccgcaacgagcgcaacccttgatcttagttgccagcattcagttgggcactctaaggtgactgccggtgacaaaccggaggaaggtggggatgacgtcaaatcatcatgccccttatgacctgggctacacacgtgctacaatggacggtacaaagggtcgcgaacccgcgagggggagccaatcccagaaaaccgttctcagttcggattgcaggctgcaactcgcctgcatgaagccggaatcgctagtaatcgcggatcagcatgccgcggtgaatacgttcccgggccttgtacacaccgcccgtcacaccacgagagtttgtaacaccc

SEQ ID NO: 2567 - DNA, 1473 bp, Planococcus maritimus
  source 1..1473: mol_type = unassigned DNA
gacgaacgctggcggcgtgcctaatacatgcaagtcgagcggaaccattggagcttgctcctttggtttagcggcggacgggtgagtaacacgtgggcaacctgccctgcagatcgggataactccgggaaaccggtgctaataccgaatagtttgcggcctctcatgaggctgtacggaaagacggtttcggctgtcactgcaggatgggcccgcggcgcattagctagttggtggggtaatggcctaccaaggcgacgatgcgtagccgacctgagagggtgatcggccacactgggactgagacacggcccagactcctacgggaggcagcagtagggaatcttccgcaatggacgaaagtctgacggagcaacgccgcgtgagtgaagaaggttttcggatcgtaaaactctgttgtgagggaagaacaagtaccaactaactattggtaccttgacggtacctcaccagaaagccacggctaactacgtgccagcagccgcggtaatacgtaggtggcaagcgttgtccggaattattgggcgtaaagcgcgcgcaggcggtcctttaagtctgatgtgaaagcccacggctcaaccgtggagggtcattggaaactgggggacttgagtgcagaagaggaaagtggaattccacgtgtagcggtgaaatgcgtagagatgtggaggaacaccagtggcgaaggcgactttctggtctgtaactgacgctgaggcgcgaaagcgtggggagcaaacaggattagataccctggtagtccacgccgtaaacgatgagtgctaagtgttagggggtttccgccccttagtgctgcagctaacgcattaagcactccgcctggggagtacggccgcaaggctgaaactcaaaggaattgacgggggcccgcacaagcggtggagcatgtggtttaattcgaagcaacgcgaagaaccttaccaggtcttgacatcccgctgaccgcctaggagactaggctttcccttcggggacagcggtgacaggtggtgcatggttgtcgtcagctcgtgtcgtgagatgttgggttaagtcccgcaacgagcgcaacccttgatcttagttgccagcattcagttgggcactctaaggtgactgccggtgacaaaccggaggaaggtggggatgacgtcaaatcatcatgccccttatgacctgggctacacacgtgctacaatggacggtacaaagggctgcaaacccgcgagggggagccaatcccagaaaaccgttctcagttcggattgtaggctgcaactcgcctgcatgaagccggaatcgctagtaatcgcggatcagcatgccgcggtgaatacgttcccgggccttgtacacaccgcccgtcacaccacgagagtttgtaacacccgaagtcggtggggtaacccttacgggagccagccgccgaaggtgggacagatgattggggtg

SEQ ID NO: 2568 - DNA, 1473 bp, Planococcus plakortidis
  source 1..1473: mol_type = unassigned DNA
gacgaacgctggcggcgtgcctaatacatgcaagtcgagcggaaccattggagcttgctcctttggtttagcggcggacgggtgagtaacacgtgggcaacctgccctgcagatcgggataactccgggaaaccggtgctaataccgaatagtttgtggcctctcatgaggctgcacggaaagacggtttcggctgtcactgcaggatgggcccgcggcgcattagctagttggtggggtaacggcccaccaaggcgacgatgcgtagccgacctgagagggtgatcggccacactgggactgagacacggcccagactcctacgggaggcagcagtagggaatcttccgcaatggacgaaagtctgacggagcaacgccgcgtgagtgaagaaggttttcggatcgtaaaactctgttgtgagggaagaacaagtaccaagtaactactggtaccttgacggtacctcaccagaaagccacggctaactacgtgccagcagccgcggtaatacgtaggtggcaagcgttgtccggaattattgggcgtaaagcgcgcgcaggcggtcctttaagtctgatgtgaaagcccacggctcaaccgtggagggtcattggaaactgggggacttgagtgcagaagaggaaagtggaattccacgtgtagcggtgaaatgcgtagagatgtggaggaacaccagtggcgaaggcgactttctggtctgtaactgacgctgaggcgcgaaagcgtggggagcaaacaggattagataccctggtagtccacgccgtaaacgatgagtgctaagtgttagggggtttccgccccttagtgctgcagctaacgcattaagcactccgcctggggagtacggccgcaaggctgaaactcaaaggaattgacgggggcccgcacaagcggtggagcatgtggtttaattcgaagcaacgcgaagaaccttaccaggtcttgacatcccgctgaccgccttggagacaaggctttcccttcggggacagcggtgacaggtggtgcatggttgtcgtcagctcgtgtcgtgagatgttgggttaagtcccgcaacgagcgcaacccttgatcttagttgccagcattcagttgggcactctaaggtgactgccggtgacaaaccggaggaaggtggggatgacgtcaaatcatcatgccccttatgacctgggctacacacgtgctacaatggacggtacaaagggtcgcgaacccgcgagggggagccaatcccagaaaaccgttctcagttcggattgcaggctgcaactcgcctgcatgaagccggaatcgctagtaatcgcggatcagcatgccgcggtgaatacgttcccgggccttgtacacaccgcccgtcacaccacgagagtttgtaacacccgaagtcggtggggtaacccttatgggagccagccgccgaaggtgggacagatgattggggtg

SEQ ID NO: 2569 - DNA, 1478 bp, unidentified
  source 1..1478: mol_type = unassigned DNA; note = Planococcus salinus
gacgaacgctggcggcgtgcctaatacatgcaagtcgagcggaaaccgggggagcttgctcccttcggtttcagcggcggacgggtgagtaacacgtgggcaacctgccctgcagatcgggataactccgggaaaccggagctaataccggatagcttgcggcctctcatgaggctgcacggaaaggcggcttttggctgccactgcaggatgggcccgcggcgcattagctggttggtggggtaacggcccaccaaggcgacgatgcgtagccgacctgagagggtgatcggccacactgggactgagacacggcccagactcctacgggaggcagcagtagggaatcttccgcaatggacgcaagtctgacggagcaacgccgcgtgagtgaagaaggttttcggatcgtaaaactctgttgtgagggaagaacaagtgccagagtaactgctggcaccttgacggtacctcaccagaaagccacggctaactacgtgccagcagccgcggtaatacgtaggtggcaagcgttgtccggaattattgggcgtaaagcgcgcgcaggcggtcttttaagtctgatgtgaaagcccacggctcaaccgtggagggtcattggaaactggaggacttgagtgcagaagaggaaagtggaattccacgtgtagcggtgaaatgcgtagagatgtggaggaacaccagtggcgaaggcgactttctggtctgtaactgacgctgaggcgcgaaagcgtggggagcaaacaggattagataccctggtagtccacgccgtaaacgatgagtgctaagtgttagggggtttccgccccttagtgctgcagctaacgcattaagcactccgcctggggagtacggccgcaaggctgaaactcaaaggaattgacgggggcccgcacaagcggtggagcatgtggtttaattcgaagcaacgcgaagaaccttaccaggtcttgacatcccgctgaccgccctggagacagggctttcccttcggggacagcggtgacaggtggtgcatggttgtcgtcagctcgtgtcgtgagatgttgggttaagtcccgcaacgagcgcaacccttgatcttagttgccagcattcagttgggcactctaaggtgactgccggtgacaaaccggaggaaggtggggatgacgtcaaatcatcatgccccttatgacctgggctacacacgtgctacaatggacggtacaaagggtcgcgaacccgcgaggggaagccaatcccagaaaaccgttctcagttcggattgcaggctgcaactcgcctgcatgaagccggaatcgctagtaatcgtggatcagcatgccacggtgaatacgttcccgggccttgtacacaccgcccgtcacaccacgagagtttgtaacacccgaagtcggtggggtaacccgcatgggagccagccgccgaaggtgggacagatgattggggtg

SEQ ID NO: 2570 - DNA, 1453 bp, Planomicrobium glaciei
  source 1..1453: mol_type = unassigned DNA
tgctatacatgcaagtcgagcggaagttgaagagcttgctcttcaactttagcggcggacgggtgagtaacacgtgggcaacctgccctgcagatcgggataactccgggaaaccggtgctaataccgaatagttttgggtccctcctgggacccaacggaaagacggtttcggctgtcactgcaggatgggcccgcggcgcattagctagttggtggggtaacggcccaccaaggccacgatgcgtagccgacctgagagggtgatcggccacactgggactgagacacggcccagactcctacgggaggcagcagtagggaatcttccgcaatggacgcaagtctgacggagcaacgccgcgtgagtgatgaaggttttcggatcgtaaaactctgttgcgagggaagaaaccgtgccagctaactactggcaccttgacggtacctcgccagaaagccacggctaactacgtgccagcagccgcggtaatacgtaggtggcaagcgttgtccggaattattgggcgtaaagcgcgcgcaggcggtcccttaagtctgatgtgaaagcccacggctcaaccgtggagggtcattggaaactgggggacttgagtgcagaagaggaaagtggaattccatgtgtagcggtgaaatgcgtagagatgtggaggaacaccagtggcgaaggcgactttctggtctgtaactgacgctgaggcgcgaaagcgtggggagcaaacaggattagataccctggtagtccacgccgtaaacgatgagtgctaagtgttagggggtttccgccccttagtgctgcagctaacgcattaagcactccgcctggggagtacggccgcaaggctgaaactcaaaggaattgacgggggcccgcacaagcggtggagcatgtggtttaattcgaagcaacgcgaagaaccttaccaggtcttgacatcccgctgaccgccttggagacaaggctttcccttcggggacagcggtgacaggtggtgcatggttgtcgtcagctcgtgtcgtgagatgttgggttaagtcccgcaacgagcgcaacccttgatcttagttgccagcattcagttgggcactctaaggtgactgccggtgacaaaccggaggaaggtggggatgacgtcaaatcatcatgccccttatgacctgggctacacacgtgctacaatggacggtacaaagggttgccaacccgcgagggggagccaatcccagaaaaccgttctcagttcggattgcaggctgcaactcgcctgcatgaagccggaatcgctagtaatcgtggatcagcatgccacggtgaatacgttcccgggccttgtacacaccgcccgtcacaccacgagagtttgtaacacccgaagtcggtgaggtaacccttgtggagccagccgccgaaggtgggacagatgattggggtg

SEQ ID NO: 2571 - DNA, 1454 bp, unidentified
  source 1..1454: mol_type = unassigned DNA; note = Planomicrobium soli
gcctaatacatgcaagtcgagcggaaccggaagagcttgctcttccggtttagcggcggacgggtgagtaacacgtgggcaacctgccctgcagatcgggataactccgggaaaccggtgctaataccgaatagtttggaacctctcctgaggttccacggaaagacggtttcgactgtcactgcaggatgggcccgcggcgcattagctagttggtggggtaacggcccaccaaggcgacgatgcgtagccgacctgagagggtgatcggccacactgggactgagacacggcccagactcctacgggaggcagcagtagggaatcttccgcaatggacgcaagtctgacggagcaatgccgcgtgagtgacgaaggttttcggatcgtaaaactctgttgtgagggaagaaaccgtaccaagtaactactggtaccttgacggtacctcaccagaaagccacggctaactacgtgccagcagccgcggtaatacgtaggtggcaagcgttgtccggaattattgggcgtaaagcgcgcgcaggcggtcctttaagtctgatgtgaaagcccacggctcaaccgtggagggtcattggaaactggaggacttgagtgcagaagaggaaagtggaattccacgtgtagcggtgaaatgcgtagagatgtggaggaacaccagtggcgaaggcgactttctggtctgtaactgacgctgaggcgcgaaagcgtggggagcaaacaggattagataccctggtagtccacgccgtaaacgatgagtgctaagtgttagggggtttccgccccttagtgctgcagctaacgcattaagcactccgcctggggagtacggccgcaaggctgaaactcaaaggaattgacgggggcccgcacaagcggtggagcatgtggtttaattcgaagcaacgcgaagaaccttaccaggtcttgacatcccgctgaccgccttggagacaaggctttcccttcggggacagcggtgacaggtggtgcatggttgtcgtcagctcgtgtcgtgagatgttgggttaagtcccgcaacgagcgcaacccttgatcttagttgccagcattcagttgggcactctaaggtgactgccggtgacaaaccggaggaaggtggggatgacgtcaaatcatcatgccccttatgacctgggctacacacgtgctacaatggacggtacaaagggcagccaacccgcgagggggagccaatcccagaaaaccgttctcagttcggattgcaggctgcaactcgcctgcatgaagccggaatcgctagtaatcgtggatcagcatgccacggtgaatacgttcccgggccttgtacacaccgcccgtcacaccacgagagtttgtaacacccgaagtcggtgaggtaacccttgtggagccagccgccgaaggtgggacagatgattggggtg

SEQ ID NO: 2572 - DNA, 1457 bp, Plasticicumulans acidivorans
  source 1..1457: mol_type = unassigned DNA
attgaacgctggcggcatgcttaacacatgcaagtcgaacgggatcctggtttcggccgggtgagagtggcggacgggtgagtaatacgtaggaatctgcccacgggtgggggacaacatggggaaactcatgctaataccgcataagccctaagggggaaagcgggggaccttcgggcctcgcgccggtggatgagcctacgtcggattagctagttggtagggtaagagcctaccaaggcgacgatccgtagctggtctgagaggatgatcagccacactgggactgagacacggcccagactcctacgggaggcagcagtggggaatattggacaatgggcgcaagcctgatccagcaatgccgcgtgtgtgaagaaggcctgcgggttgtaaagcactttaagcagggaggaggggtactggcgtgaatagcgttggtatctgacgttacctgcagaataagcaccggctaacttcgtgccagcagccgcggtaatacgaagggtgcaagcgttaatcggaattactgggcgtaaagcgcgtgtaggcggttatttaagtcagatgtgaaagccccgggctcaacctgggaatggcatttgatactgggtaactggaatgtggtagagggaggcggaatttccggtgtagcggtgaaatgcgtagatatcggaaagaacaccaatggcgaaggcagcctcctgggccaacattgacgctgagacgcgaaagcgtggggagcaaacaggattagataccctggtagtccacgccctaaacgatgagaactggacggtggggaggtcactcttcgctgttgaagctaacgcgttaagttctccgcctggggagtacggccgcaaggttgaaactcaaaggaattgacgggggcccgcacaagcggtggagcatgtggtttaattcgatgcaacgcgaagaaccttacctggccttgacatctgtcgaattctgcagagatgcggaagtgccttcgggagcgacaagacaggtgctgcatggctgtcgtcagctcgtgtcgtgagatgttgggttaagtcccgcaacgagcgcaacccttgtccttagttgccagcacttcgggtgggaactctaaggagactgccggtgataaaccggaggaaggtggggatgacgtcaagtcatcatggcccttatggccagggctacacacgtgctacaatggtcggtacaaagggttgccaagtcgcgaggcggagctaatcccataaagccggtcgtagtccggattggagtctgcaactcgactccatgaagtcggaatcgctagtaatcgcagatcagcactgctgcggtgaatacgttcccgggccttgtacacaccgcccgtcacaccatgggagttggttgcaccagaagcaggtagcttaaccttcgggagggcgcttgccacggtgtggtcaatgactggggtg

SEQ ID NO: 2573 - DNA, 1451 bp, unidentified
  source 1..1451: mol_type = unassigned DNA; note = Plasticicumulans lactativorans
acgctggcggcatgcttaacacatgcaagtcgaacgggattcgggcttcggcctgatgagagtggcggacgggtgagtaacgcgtaggaatctgcccacgggtgggggacaacatggggaaactcatgctaataccgcatacgccctgagggggaaagcgggggaccttcgggcctcgcgccggtggatgagcctacgtcggattagctagttggtagggtaaaggcctaccaaggcgacgatccgtagctggtctgagaggatgatcagccacactgggactgagacacggcccagactcctacgggaggcagcagtggggaatattggacaatgggggcaaccctgatccagcaatgccgcgtgtgtgaagaaggcctgcgggttgtaaagcactttaagtggggaggaaaggcgtcgggcgaataccctggcgatttgacgttacccacagaataagcaccggctaacttcgtgccagcagccgcggtaatacgaagggtgcaagcgttaatcggaattactgggcgtaaagcgtgcgtaggcggttgcctaagtcagatgtgaaagccccgggctcaacctgggaatggcatttgatactgggcggctagaatgtggtagaggaagacggaattcccggtgtagcggtgaaatgcgtagatatcgggaagaacaccaatggcgaaggcagtcttctgggccgacattgacgctgaggcacgaaagcgtggggagcaaacaggattagataccctggtagtccacgccctaaacgatgagaactagacggtgggagggtaacctttcgctgtcgcagctaacgcgttaagttctccgcctggggagtacggccgcaaggttgaaactcaaaggaattgacgggggcccgcacaagcggtggagcatgtggtttaattcgatgcaacgcgaagaaccttacctggccttgacatgtcaggaaccctgcagagatgtgggggtgccttcgggagcctgaacacaggtgctgcatggctgtcgtcagctcgtgtcgtgagatgttgggttaagtcccgcaacgagcgcaacccttgtccttagttgccagcacttcgggtgggaactctaaggagactgccggtgataaaccggaggaaggtggggatgacgtcaagtcatcatggcccttatggccagggctacacacgtgctacaatggtcggtacagagggttgccaagccgcgaggtggagccaatcccaaaaagccgatcgtagtccggattggagtctgcaactcgactccatgaagtcggaatcgctagtaatcgcagatcagcactgctgcggtgaatacgttcccgggccttgtacacaccgcccgtcacaccatgggagttggctgcaccagaagtaggtagcttaaccgcaaggagggcgcttaccacggtgtggtcaatgactggggtg

SEQ ID NO: 2574 - DNA, 1465 bp, unidentified
  source 1..1465: mol_type = unassigned DNA; note = Pleionea mediterranea
attgaacgctggcggcaggcctaacacatgcaagtcggacggtaacagcaagagcttgctcttgtctgacgagtggcggacgggtgagtaacgcgtaggaatctaccattcagtgggggatagcccggagaaatccggattaataccgcatacgctctacggaggaaaaggggcctcttcttgaaagctcctgctgattgatgagcctgcgttggattagctagttggtaaggtaagagcttaccaaggcgacgatctatagctggtctgagaggatgatcagccacactgggactgagacacggcccagactcctacgggaggcagcagtggggaatattggacaatgggggcaaccctgatccagccatgccgcgtgtgtgaagaaggccttcgggttgtaaagcactttcaatagggaggaattgcagtgtgttaatagcgcattgtttgacgttacctacagaagaagcaccggctaactccgtgccagcagccgcggtaatacggagggtgcaagcgttaatcggaatcactgggcgtaaagcgcgcgtaggcggagtcttaagtcagttgtgaaagcccagggcttaaccttggaattgcagctgatactggggctctagagtacagaagaggaaggtggaatttcaggtgtagcggtgaaatgcgtagagatctgaaggaacatcagtggcgaaggcggccttctggactgatactgacgctgaggtgcgaaagcgtggggagcaaacaggattagataccctggtagtccacgccgtaaacgatgtcaactagccgttggtcttattaaaaagattagtggcgcagctaacgcgataagttgaccgcctggggagtacggccgcaaggctaaaactcaaatgaattgacgggggcccgcacaagcggtggagcatgtggtttaattcgatgcaacgcgaagaaccttaccatcccttgacatcctcagaacttgtaagaaattacttggtgccttcgggaactgagtgacaggtgctgcatggctgtcgtcagctcgtgtcgtgagatgttgggttaagtcccgcaacgagcgcaacccttatccttagttgccagcacgtaatggtgggaactctaaggagactgccggtgacaaaccggaggaaggtggggacgacgtcaagtcatcatggcccttacgggatgggctacacacgtgctacaatgggcaatacagagggttgcgaacttgcgaaagtaagcgaatcccttaaagttgttcgtagtccggattggagtctgcaactcgactccatgaagtcggaatcgctagtaatcgcaggtcagcatactgcggtgaatacgttcccgggccttgtacacaccgcccgtcacaccatgggagtgaattgcaccagaagtggttagtctaaccttcgggaggacgacccccacggtgtggttcgtgactggggtg

SEQ ID NO: 2575 - DNA, 1454 bp, Plesiocystis pacifica
  source 1..1454: mol_type = unassigned DNA
agcgaacgtttgcggcgggcctaacacatgcaagtcgaacgagaagcccttcggggtggaaagtggcgcacgggtgcgtaacacgtggataaccaaccccccagtttgggacaacaccgggaaactggtgctaataccagatgtgtcgcgggagtcgtcaggctccctcgagaaaggcacgcaagggtcgctgggggacgggtccgcgtcccatcagctagttggtgaggtaatggctcaccaaggctaagacgggtagctggtctgagaggatgatcagccacactggaactgagacacggtccagactcctacgggaggcagcagtggggaatattgcgcaatgggcgaaagcctgacgcagccacgccgcgtgagcgatgaaggttttcggatcgtaaagctctgtggagggagaagaataagtcagtgaagagctggccttgacggtatccctttagcaagcaccggctaactccgtgccagcagccgcggtaatacggagggtgcaaacgttgctcggaatcattgggcgtaaagcgcgcgtaggcggcttggcaagttggatgtgaaagccctgggctcaacccaggaagtgcatccaaaactgcctggcttgaatctcggagggggtcagggaattctcggtgtagaggtgaaattcgtagatatcgggaggaacaccagtggcgaaggcgctgacctggacgatgattgacgctgaggtgcgaaagcatggggagcgaacaggattagataccctggtagtccatgccgtaaacgatgagtgctaggcgccggcggatgaccccgtcggtgccgaagctaacgcgttaagcactccgcctggggagtacggtcgcaagactaaaactcaaaggaattgacgggggcccgcacaagcggtggagcatgtggtttaattcgacgcaacgcgcagaaccttacctgggttaagtccacgagaatccggcccaaaagctggagtgcccttcggggaattcgtgcgaaggtgctgcatggctgtcgtcagctcgtgtcgtgagatgttgggttaagtcccgcaacgagcgcaacccctgccgtctgttgccatcatttagttgggaactcagacggtactgccggcctaaaccggaggaaggtggggatgacgtcaagtcctcatggccctcatgcccagggctacacacgtgctacaatggttggtacaaagagtcgctagcccgcgaggggacgctaacctcaaaaaaccaatctcagttcggattggagtctgcaactcgactccatgaagctggaatcgctagtaatcggagatcagcacgctccggtgaatacgttcccgggccttgtacacaccgcccgtcacaccatgggagtcgattgctccagaagtgggtagcctaaccttcgggagggcgcttaccaaggagtgatcggtgactggggtg

SEQ ID NO: 2576 - DNA, 1464 bp, Plesiomonas shigelloides
  source 1..1464: mol_type = unassigned DNA
attgaacgctggcggcaggcctaacacatgcaagtcgagcggtaacacagaggagcttgctccttgggtgacgagcggcggacgggtgagtaatgcctggggatctgcccgatagagggggataactacgggaaactgtagctaataccgcataatgtctacggaccaaagtgggggctcttcggacctcatgctatcggatgaacccaggtgggattagctagttggtgaggtaatggctcaccaaggcgacgatctctaactggtttgagagaatgaccagtcacactggaactgagacacggtccagactcctacgggaggcagcagtggggaatattgcacaatgggcgcaagcctgatgcagccatgccgcgtgtgtgaagaaggccttcgggttgtaaagcactttcagcggggaggaagggtcactagttaatacctagtggcattgacgttactcgcagaagaagcaccggctaactccgtgccagcagccgcggtaatacggagggtgcaagcgttaatcggaattactgggcgtaaagcgcacgcaggcggtttgttaagtcagatgtgaaatccccgagctcaacttgggaactgcatttgaaactggcaagctagagtcttgtagaggggggtagaattccaggtgtagcggtgaaatgcgtagagatctggaggaataccggtggcgaaggcggccccctggacaaagactgacgctcaggtgcgaaagcgtggggagcaaacaggattagataccctggtagtccacgctgtaaacgatgtcgatttggaggttgtgcccttgaggtgtggcttccggagctaacgcgttaaatcgaccgcctggggagtacggccgcaaggttaaaactcaaatgaattgacgggggcccgcacaagcggtggagcatgtggtttaattcgatgcaacgcgaagaaccttacctactcttgacatccagagaactttccagagatggattggtgccttcgggaactctgagacaggtgctgcatggctgtcgtcagctcgtgttgtgaaatgttgggttaagtcccgcaacgagcgcaacccttatcctttgttgccagcgattcggtcgggaactcaaaggagactgccggtgataaaccggaggaaggtggggatgacgtcaagtcatcatggcccttacgagtagggctacacacgtgctacaatggcatatacaaagggcggcaagctagcgatagtgagcgaatcccataaagtatgtcgtagtccggattggagtctgcaactcgactccatgaagtcggaatcgctagtaatcgcggatcagaatgccgcggtgaatacgttcccgggccttgtacacaccgcccgtcacaccatgggagtgggttgcaaaagaagtaggtagcttaaccttcgggagggcgcttaccactttgtgattcatgactggggtg

SEQ ID NO: 2577 - DNA, 1450 bp, unidentified
  source 1..1450: mol_type = unassigned DNA; note = Pluralibacter gergoviae
  misc_difference 443: note = n is a, c, g, or t
acgctggcggcaggcctaacacatgcaagtcgaacggtagcagaaagaagcttgcttctttgctgacgagtggcggacgggtgagtaatgtctgggaaactgcccgatggagggggataactactggaaacggtagctaataccgcataacgtcttcggaccaaagagggggaccttcgggcctcttgccatcggatgtgcccagatgggattagctagtaggtggggtaacggctcacctaggcgacgatccctagctggtctgagaggatgaccagccacactggaactgagacacggtccagactcctacgggaggcagcagtggggaatattgcacaatgggcgcaagcctgatgcagccatgccgcgtgtatgaagaaggccttcgggttgtaaagtactttcagcggggaggaagggagtgaggttaataacctcantcattgacgttacccgcagaagaagcaccggctaactccgtgccagcagccgcggtaatacggagggtgcaagcgttaatcggaattactgggcgtaaagcgcacgcaggcggtctgtcaagtcggatgtgaaatccccgggctcaacctgggaactgcattcgaaactggcaggcttgagtctcgtagaggggggtagaattccaggtgtagcggtgaaatgcgtagagatctggaggaataccggtggcgaaggcggccccctggacgaagactgacgctcaggtgcgaaagcgtggggagcaaacaggattagataccctggtagtccacgccgtaaacgatgtctacttggaggctgtggtcttgaaccgtggcttccggagctaacgcgttaagtagaccgcctggggagtacggccgcaaggttaaaactcaaatgaattgacgggggcccgcacaagcggtggagcatgtggtttaattcgatgcaacgcgaagaaccttacctactcttgacatccagagaacttagcagagatgctttggtgccttcgggaactctgagacaggtgctgcatggctgtcgtcagctcgtgttgtgaaatgttgggttaagtcccgcaacgagcgcaacccttatcctttgttgccagcggtccggccgggaactcaaaggagactgccagtgataaactggaggaaggtggggatgacgtcaagtcatcatggcccttacgagtagggctacacacgtgctacaatggcgcatacaaagagaagcgacctcgcgagagcaagcggacctcataaagtgcgtcgtagtccggattggagtctgcaactcgactccatgaagtcggaatcgctagtaatcgtggatcagaatgccacggtgaatacgttcccgggccttgtacacaccgcccgtcacaccatgggagtgggttgcaaaagaagtaggtagcttaaccttcgggagggcgcttaccactttgtgattcatg

SEQ ID NO: 2578 - DNA, 1442 bp, Polaribacter dokdonensis
  source 1..1442: mol_type = unassigned DNA
gatgaacgctagcggcaggcttaacacatgcaagtcgaggggtaacattagtgcttgcactagatgacgaccggcgcacgggtgcgtaacgcgtatagaatctaccttttacagggggatagcctttagaaatgaagattaatatcccatagtattgcgaagtggcatcactttgtaattaaagatttatcggtaaaagatgactatgcgtcctattagttagttggtaaggtaacggcttaccaagacttcgataggtaggggtcctgagagggagatcccccacactggtactgagacacggaccagactcctacgggaggcagcagtgaggaatattgggcaatggaggtaactctgacccagccatgccgcgtgcaggaagactgccctatgggttgtaaactgcttttatacaggaagaaacactgctacgtgtagcagcttgacggtactgtaagaataaggaccggctaactccgtgccagcagccgcggtaatacggagggtccgagcgttatccggaatcattgggtttaaagggtccgcaggcggtcaattaagtcagaggtgaaatcccatagcttaactatggaactgcctttgatactggttgacttgagtcatatggaagtagatagaatgtgtagtgtagcggtgaaatgcatagatattacacagaataccgattgcgaaggcagtctactacgtatgtactgacgctcatggacgaaagcgtggggagcgaacaggattagataccctggtagtccacgccgtaaacgatggacactagttgttgggcattagctcagtgactaagcgaaagtgataagtgtcccacctggggagtacgatcgcaagattgaaactcaaaggaattgacgggggcccgcacaagcggtggagcatgtggtttaattcgatgatacgcgaggaaccttaccagggcttaaatgtagtctgacagctttagagatagagttttcttcggacagattacaaggtgctgcatggttgtcgtcagctcgtgccgtgaggtgtcaggttaagtcctataacgagcgcaacccttgtcgttagttgccagcatgtaaagatggggactctaacgagactgccggtgcaaaccgagaggaaggtggggatgacgtcaaatcatcacggcccttacgtcctgggccacacacgtgctacaatggtatggacaatgagcagccatctggcaacagagagcgaatctataaaccatatcacagttcggatcggagtctgcaactcgactccgtgaagctggaatcgctagtaatcggatatcagccatgatccggtgaatacgttcccgggccttgtacacaccgcccgtcaagccatggaagctgggggtgcctgaagtcggtcaccgtaaggagccgcctagggtaaaactggtaactagggct

SEQ ID NO: 2579 - DNA, 1440 bp, Polaribacter filamentus
  source 1..1440: mol_type = unassigned DNA
gatgaacgctagcggcaggcctaactcatgcaagtcgaggggtaacagggagcttgcttcgctgacgaccggcgcacgggtgcgtaacgcgtatagaacctaccttttacaggggaatagcctttagaaatgaagattaatgccccatagtattgtagactggcatcagtttacaattaaagatttatcggtaaaagatggctatgcgtcctattagttagttggtaaggtaacggcttaccaagacatcgataggtaggggtcctgagagggagatcccccgcactggtactgagacacggaccagactcctacgggaggcagcagtgaggaatattgggcaatggaggagactctgacccagccatgccgcgtgtaggaagaatgccctatgggttgtaaactacttttatacaggaagaaacactggtatgtataccagcttgacggtactgtaagaataaggaccggctaactccgtgccagcagccgcggtaatacggagggtccaagcgttatccggaatcattgggtttaaagggtccgcaggcggtcaattaagtcagaggtgaaatcccgtcgctcaacgacggaactgcctttgatactggttgacttgagtcatatggaagtagatagaatgtgtagtgtagcggtgawatgcatagagattacacagaataccgattgcgaaggcagtctactacgtatgtactgacgctgagggacgaaagcgtggggagcgaacaggattagataccctggtagtccacgccgtaaacgatggatactagttgttgggcaatagctcagtgactaagcgaaagtgataagtatcccacctggggagtacggtcgcaagactgaaactcaaaggaattgacgggggcccgcacaagcggtggagcatgtggtttaattcgatgatacgcgaggaaccttaccagggcttaaatgtagtctgacagctttagagatagagttttcttcggacagattacaaggtgctgcatggttgtcgtcagctcgtgccgtgaggtgtcaggttaagtcctataacgagcgcaacccctgtcgttagttgccagcatgttatgatggggactctaacgaaactgccggtgcacyccgcgaggaaggtggggatgacgtcaaatcatcacggcccttacgtcctgggccacacacgtgctacaatggtatggacaatgagcagccatctggcaacagagagcaaatctataaaccatatcacagttcggatcggagtctgcaactcgactccgtgaagctggaatcgctagtaatcggatatcagccatgatccggtgaatacgttcccgggccttgtacacaccgcccgtcaagccatggaagctgggggtgcctgaagtcggtcaccgcaaggagccgcctagggtaaaactggtaactggggct

SEQ ID NO: 2580 - DNA, 1450 bp, Polaromonas naphthalenivorans
  source 1..1450: mol_type = unassigned DNA
attgaacgctggcggcatgccttacacatgcaagtcgaacggtcgggttaagccgacgagtggcgaacgggtgagtaatatatcggaacgtgcccagtcgtgggggataacgtagagaaatttacgctaataccgcatacgatctaaggatgaaagcgggggaccttcgggcctcgcgcgattggagcggctgatatcagattaggttgttggtgaggtaaaagctcaccaagccgacgatctgtagctggtttgagagaacgaccagccacactgggactgagacacggcccagactcctacgggaggcagcagtggggaattttggacaatgggcgaaagcctgatccagcaatgccgcgtgcaggaagaaggccttcgggttgtaaactgcttttgtacggaacgaaaaggccagccctaatacggcaggcccatgacggtaccgtaagaataagcaccggctaactacgtgccagcagccgcggtaatacgtagggtgcgagcgttaatcggaattactgggcgtaaagcgtgcgcaggcggtgatgtaagacagttgtgaaatccccgggctcaacctgggaattgcatctgtgactgcatcgctagagtacggtagagggggatggaattccgcgtgtagcagtgaaatgcgtagatatgcggaggaacaccgatggcgaaggcaatcccctggacctgtactgacgctcatgcacgaaagcgtggggagcaaacaggattagataccctggtagtccacgccctaaacgatgtcaactggttgttgggtgcattagtactcagtaacgaagctaacgcgtgaagttgaccgcctggggagtacggccgcaaggttgaaactcaaaggaattgacggggacccgcacaagcggtggatgatgtggtttaattcgatgcaacgcgaaaaaccttacctacctttgacatgtacggaactcgccagagatggcttggtgctcgaaagagagccgtaacacaggtgctgcatggctgtcgtcagctcgtgtcgtgagatgttgggttaagtcccgcaacgagcgcaacccttgtcattagttgctacatttagttgggcactctaatgagactgccggtgacaaaccggaggaaggtggggatgacgtcaagtcctcatggcccttataggtagggctacacacgtcatacaatggatggtacaaagggtcgccaacccgcgagggggagccaatcccataaagccattcgtagtccggatcgcagtctgcaactcgactgcgtgaagtcggaatcgctagtaatcgtggatcagaatgtcacggtgaatacgttcccgggtcttgtacacaccgcccgtcacaccatgggagcgggttctgccagaagtagttagcctaacctgcaaaggagggcgattaccacggcagggttcgtgactggggtg

SEQ ID NO: 2581 - DNA, 1453 bp, unidentified
  source 1..1453: mol_type = unassigned DNA; note = Polyangium brachysporum
attgaacgctggcggcatgccttacacatgcaagtcgaacggcagcacgggagcaatcctggtggcgagtggcgaacgggtgagtaatacatcggaacgtgcccagtagtgggggatagcccggcgaaagccggattaataccgcatacgacctgagggtgaaagcgggggatcgcaagacctcgcgctattggagcggccgatgtcagattagctagttggtggggtaaaggcctaccaaggcgacgatctgtagctggtctgagaggacgaccagccacactgggactgagacacggcccagactcctacgggaggcagcagtggggaattttggacaatgggcgcaagcctgatccagccatgccgcgtgcgggaagaaggccttcgggttgtaaaccgcttttgtcagggaagaaaagttctgggctaataccccggagcgatgacggtacctgaagaataagcaccggctaactacgtgccagcagccgcggtaatacgtagggtgcgagcgttaatcggaattactgggcgtaaagcgtgcgcaggcggttgtgcaagacagatgtgaaatccccgggctcaacctgggaactgcatttgtgactgcacggctagagtgcggcagagggagatggaattccgcgtgtagcagtgaaatgcgtagatatgcggaggaacaccgatggcgaaggcaatctcctgggcctgcactgacgctcatgcacgaaagcgtggggagcaaacaggattagataccctggtagtccacgccctaaacgatgtcaactagttgttggacggcttgctgttcagtaacgaagctaacgcgtgaagttgaccgcctggggagtacggccgcaaggttgaaactcaaaggaattgacggggacccgcacaagcggtggatgatgtggtttaattcgatgcaacgcgaaaaaccttacctacccttgacatgccaggaatcctgcagagatgtgggagtgctcgaaagagaacctggacacaggtgctgcatggccgtcgtcagctcgtgtcgtgagatgttgggttaagtcccgcaacgagcgcaacccttgtcattagttgctacgaaagggcactctaatgagactgccggtgacaaaccggaggaaggtggggatgacgtcaggtcatcatggcccttatgggtagggctacacacgtcatacaatggccggtacagagggctgccaacccgcgagggggagctaatcccagaaaaccggtcgtagtccggatcgcagtctgcaactcgactgcgtgaagtcggaatcgctagtaatcgcggatcagcatgccgcggtgaatacgttcccgggtcttgtacacaccgcccgtcacaccatgggagcgggttctgccagaagtggttagcctaaccgcaaggagggcgatcaccacggcagggttcgtgactggggtg

SEQ ID NO: 2582 - DNA, 1455 bp, unidentified
  source 1..1455: mol_type = unassigned DNA; note = Polynucleobacter aenigmaticus
attgaacgctggcggcatgccttacacatgcaagtcgaacggcagcacgggtacttgtacctggtggcgagtggcgaacgggtgagtaatacatcggaacgtaccttatcgtgggggataacgcagcgaaagctgtgctaataccgcatacgccctgagggggaaagcgggggatcgaaagacctcgcgcgattagagcggccgatgcctgattagcttgttggtggggtaaaagcccaccaaggcgacgatcagtagctggtctgagaggacgatcagccacactgggactgagacacggcccagactcctacgggaggcagcagtggggaattttggacaatgggggaaaccctgatccagcaatgccgcgtgagtgaagaaggccttcgggttgtaaagctcttttgtcagggaagaaacaccggctctaacacagtccgggaatgacggtacctgaagaataagcaccggctaactacgtgccagcagccgcggtaatacgtagggtgcaagcgttaatcggaattactgggcgtaaagcgtgcgcaggcggttatacaagacaggcgtgaaatccccgggcttaacctgggaatggcgcctgtgactgtatagctagagtgtgtcagaggggggtagaattccacgtgtagcagtgaaatgcgtagatatgtggaggaataccaatggcgaaggcagccccctgggataacactgacgctcatgcacgaaagcgtggggagcaaacaggattagataccctggtagtccacgccctaaacgatgctgactagttgttcgggattttcatcctgagtaacgtagctaacgcgtgaagtcagccgcctggggagtacggtcgcaagattaaaactcaaaggaattgacggggacccgcacaagcggtggatgatgtggattaattcgatgcaacgcgaaaaaccttacctacccttgacatgtcactaacgaagtagagatacattaggtgcccgtaagggaaagtgaacacaggtgctgcatggctgtcgtcagctcgtgtcgtgagatgttgggttaagtcccgcaacgagcgcaacccttgtctttagttgctacgcaagagcactctaaagagactgccggtgacaaaccggaggaaggtggggatgacgtcaagtcctcatggcccttatgggtagggcttcacacgtcatacaatggtgcatacagagggttgccaacccgcgagggggagctaatctcagaaaatgcatcgtagtccggatcgtagtctgcaactcgactacgtgaagctggaatcgctagtaatcgcggatcagaatgtcgcggtgaatacgttcccgggtcttgtacacaccgcccgtcataccatgggagtgggttttgccagaagccgttagcctaaccgcaaggagggcgactgccacggcagggttcatgactggggta

SEQ ID NO: 2583 - DNA, 1454 bp, unidentified
  source 1..1454: mol_type = unassigned DNA; note = Polynucleobacter asymbioticus
attgaacgctggcggcatgccttacacatgcaagtcgaacggcagcacggtgcttgcacctggtggcgagtggcgaacgggtgagtaatacatcggaacgtaccttatcgtgggggataacgcagcgaaagctgtgctaataccgcatacgccctgagggggaaagcgggggatcgaaagacctcgcgcgattagagcggccgatgcctgattagcttgttggtggggtaaaagcccaccaaggcgacgatcagtagctggtctgagaggacgatcagccacactgggactgagacacggcccagactcctacgggaggcagcagtggggaattttggacaatgggggaaaccctgatccagcaatgccgcgtgagtgaagaaggccttcgggttgtaaagctcttttgtcagggaagaaaatccggctctaacacagtccgggaatgacggtacctgaagaataagcaccggctaactacgtgccagcagccgcggtaatacgtagggtgcgagcgttaatcggaattactgggcgtaaagcgtgcgcaggcggttatacaagacaggcgtgaaatccccgggcttaacctgggaatggcgcctgtgactgtatagctagagtgtgtcagaggggggtagaattccacgtgtagcagtgaaatgcgtagatatgtggaggaataccaatggcgaaggcagccccctgggataacactgacgctcatgcacgaaagcgtggggagcaaacaggattagataccctggtagtccacgccctaaacgatgctgactagttgttcgggatttacatcctgagtaacgtagctaacgcgtgaagtcagccgcctggggagtacggtcgcaagattaaaactcaaaggaattgacggggacccgcacaagcggtggatgatgtggattaattcgatgcaacgcgaaaaaccttacctacccttgacatgtcactaacgaagtagagatacattaggtgctcgtaagagaaagtgaacacaggtgctgcatggctgtcgtcagctcgtgtcgtgagatgttgggttaagtcccgcaacgagcgcaacccttgtctttagttgctacgcaagagcactctaaagagactgccggtgacaaaccggaggaaggtggggatgacgtcaagtcctcatggcccttatgggtagggcttcacacgtcatacaatggtgcatacagagggttgccaacccgcgagggggagctaatctcagaaaatgcatcgtagtccggatcgtagtctgcaactcgactacgtgaagctggaatcgctagtaatcgcggatcagaatgtcgcggtgaatacgttcccgggtcttgtacacaccgcccgtcataccatgggagtgggttttgccagaagccgttagcctaaccgcaaggagggcgactgccacggcagggttcatgactggggta

SEQ ID NO: 2584 - DNA, 1455 bp, Polynucleobacter cosmopolitanus
  source 1..1455: mol_type = unassigned DNA
attgaacgctggcggcatgccttacacatgcaagtcgaacggcagcacgggtgcttgcacctggtggcgagtggcgaacgggtgagtaatatatcggaacgtaccttattgtgggggataacgcagcgaaagctgtgctaataccgcataatcccttagggggaaagcgggggaccgtaaggcctcgcgcaattagagcggccgatacctgattagctagttggtgaggtaaaggctcaccaaggcaacgatcagtagctggtctgagaggacgatcagccacactgggactgagacacggcccagactcctacgggaggcagcagtggggaattttggacaatgggggcaaccctgatccagcaatgccgcgtgagtgaagaaggccttcgggttgtaaagctcttttgtcagggaagaaacagcagctctaacacagtctgcgaatgacggtacctgaagaataagcaccggctaactacgtgccagcagccgcggtaatacgtagggtgcaagcgttaatcggaattactgggcgtaaagcgtgcgcaggcggttatgtaagacaggcgtgaaatccccgggcttaacctgggaattgcgcttgtgactgcatagctagagtatgtcagaggggggtagaattccacgtgtagcagtgaaatgcgtagagatgtggaggaataccaatggcgaaggcagccccctgggataatactgacgctcatgcacgaaagcgtggggagcaaacaggattagataccctggtagtccacgccctaaacgatgctgactagttgttcgggaatttattcctgagtaacgtagctaacgcgtgaagtcagccgcctggggagtacggtcgcaagattaaaactcaaaggaattgacggggacccgcacaagcggtggatgatgtggattaattcgatgcaacgcgaaaaaccttacctacccttgacatgccactaacgaagtagagatacattaggtgcccgtaagggaaagtggacacaggtgctgcatggctgtcgtcagctcgtgtcgtgagatgttgggttaagtcccgcaacgagcgcaacccttgtctttagttgctacgcaagagcactctaaagagactgccggtgacaaaccggaggaaggtggggatgacgtcaagtcctcatggcccttatgggtagggcttcacacgtcatacaatggtgcatacagagggttgccaacccgcgagggggagctaatctcagaaaatgcatcgtagtccggatcgtagtctgcaactcgactacgtgaagctggaatcgctagtaatcgcggatcagaatgtcgcggtgaatacgttcccgggtcttgtacacaccgcccgtcacaccatgggagtgggttttgccagaagccgttagcctaaccgcaaggagggcgacgaccacggcagggttcatgactggggtg

SEQ ID NO: 2585 - DNA, 1455 bp, unidentified
  source 1..1455: mol_type = unassigned DNA; note = Polynucleobacter duraquae
attgaacgctggcggcatgccttacacatgcaagtcgaacggcagcacgggtacttgtacctggtggcgagtggcgaacgggtgagtaatacatcggaacgtaccttatcgtgggggataacgcagcgaaagctgtgctaataccgcatacgccctgagggggaaagcgggggatcgaaagacctcgcgcgattagagcggccgatgcctgattagcttgttggtggggtaaaagcccaccaaggcgacgatcagtagctggtctgagaggacgatcagccacactgggactgagacacggcccagactcctacgggaggcagcagtggggaattttggacaatgggggaaaccctgatccagcaatgccgcgtgagtgaagaaggccttcgggttgtaaagctcttttgtcagggaagaaacaccggctctaacacagtccgggaatgacggtacctgaagaataagcaccggctaactacgtgccagcagccgcggtaatacgtagggtgcaagcgttaatcggaattactgggcgtaaagcgtgcgcaggcggttatacaagacaggcgtgaaatccccgggcttaacctgggaatggcgcctgtgactgtatagctagagtgtgtcagaggggggtagaattccacgtgtagcagtgaaatgcgtagatatgtggaggaataccaatggcgaaggcagccccctgggataacactgacgctcatgcacgaaagcgtggggagcaaacaggattagataccctggtagtccacgccctaaacgatgctgactagttgttcgggatttacatcctgagtaacgtagctaacgcgtgaagtcagccgcctggggagtacggtcgcaagattaaaactcaaaggaattgacggggacccgcacaagcggtggatgatgtggattaattcgatgcaacgcgaaaaaccttacctacccttgacatgtcactaacgaagtagagatacattaggtgcccgtaagggaaagtgaacacaggtgctgcatggctgtcgtcagctcgtgtcgtgagatgttgggttaagtcccgcaacgagcgcaacccttgtctttagttgctacgcaagagcactctaaagagactgccggtgacaaaccggaggaaggtggggatgacgtcaagtcctcatggcccttatgggtagggcttcacacgtcatacaatggtgcatacagagggttgccaacccgcgagggggagctaatctcagaaaatgcatcgtagtccggatcgtagtctgcaactcgactacgtgaagctggaatcgctagtaatcgcggatcagaatgtcgcggtgaatacgttcccgggtcttgtacacaccgcccgtcataccatgggagtgggttttgccagaagccgttagcctaaccgcaaggagggcgactgccacggcagggttcatgactggggta

SEQ ID NO: 2586 - DNA, 1448 bp, Polynucleobacter necessarius
  source 1..1448: mol_type = unassigned DNA
gctggcggcatgccttacacatgcaagtcgaacggcagcacgggtgcttgcacctggtggcgagtggcgaacgggtgagtaatacatcggaacgtaccttatcgtgggggataacgcagcgaaagctgtgctaataccgcatacgccctgagggggaaagcgggggatcgaaagacctcgcgcgattagagcggccgatgcctgattagcttgttggtggggtaaaagcccaccaaggcgacgatcagtagctggtctgagaggacgatcagccacactgggactgagacacggcccagactcctacgggaggcagcagtgaggaattttggacaatgggggcaaccctgatccagcaatgccgcgtgagtgaagaaggcctttgggttgtaaagctcttttgtcagggaagaaacaccggctctaacacagtccgggaatgacggtacctgaagaataagcaccggctaactacgtgccagcagccgcggtaatacgtagggtgcgagcgttaatcggaattactgggcgtaaagcgtgcgcaggcggttatacaagataggcgtgaaatccccgggcttaacctgggaatggcgcctgtgactgtatggctagagtgtgtcagaggggggtagaattccacgtgtagcagtgaaatgcgtagatatgtggaggaataccaatggcgaaggcagccccctgggataacactgacgctcatgcacgaaagcgtggggagcaaacaggattagataccctggtagtccacgccctaaacgatgctgactagttgttcgggatttacatcctgagtaacgtagctaacgcgtgaagtcagccgcctggggagtacggtcgcaagattaaaactcaaaggaattgacggggacccgcacaagcggtggatgatgtggattaattcgatgcaacgcgaaaaaccttacctacccttgacatgtcactaacgaagtagagatacattaggtgctcgtaggagaaagtgaacacaggtgctgcatggctgtcgtcagctcgtgtcgtgagatgttgggttaagtcccgcaacgagcgcaacccttgtctttagttgctacgcaagagcactctaaagagactgccggtgacaaaccggaggaaggtggggatgacgtcaagtcctcatggcccttatgggtagggcttcacacgtcatacaatggtgcatacagagggttgccaacccgcgagggggagctaatctcagaaaatgcatcgtagtccgaatcgtagtctgcaactcgactacgtgaagctggaatcgctagtaatcgcggatcagaatgtcgcggtgaatacgttcccgggtcttgtacacaccgcccgtcataccatgggagtgggttttgccagaagctgttagcctaaccgcaaggggggcgactgccacggcagggttcatgactggggta

SEQ ID NO: 2587 - DNA, 1455 bp, unidentified
  source 1..1455: mol_type = unassigned DNA; note = Polynucleobacter sphagniphilus
attgaacgctggcggcatgccttacacatgcaagtcgaacggcagcacgggtgcttgcacctggtggcgagtggcgaacgggtgagtaatacatcggaacgtaccttatcgtgggggataacgcagcgaaagctgtgctaataccgcatacgccctgagggggaaagcgggggatcgaaagacctcgcgcgattagagcggccgatgcctgattagcttgttggtggggtaaaagcccaccaaggcgacgatcagtagctggtctgagaggacgatcagccacactgggactgagacacggcccagactcctacgggaggcagcagtggggaattttggacaatgggggaaaccctgatccagcaatgccgcgtgagtgaagaaggccttcgggttgtaaagctcttttgtcagggaagaaacaccggctctaacacagtccgggaatgacggtacctgaagaataagcaccggctaactacgtgccagcagccgcggtaatacgtagggtgcgagcgttaatcggaattactgggcgtaaagcgtgcgcaggcggttatacaagacaggcgtgaaatccccgggcttaacctgggaatggcgcctgtgactgtatagctagagtgtgtcagaggggggtagaattccacgtgtagcagtgaaatgcgtagatatgtggaggaataccaatggcgaaggcagccccctgggataacactgacgctcatgcacgaaagcgtggggagcaaacaggattagataccctggtagtccacgccctaaacgatgctgactagttgttcgggatttacatcctgagtaacgtagctaacgcgtgaagtcagccgcctggggagtacggtcgcaagattaaaactcaaaggaattgacggggacccgcacaagcggtggatgatgtggattaattcgatgcaacgcgaaaaaccttacctacccttgacatgtcactaacgaagtagagatacattaggtgctcgtaagagaaagtgaacacaggtgctgcatggctgtcgtcagctcgtgtcgtgagatgttgggttaagtcccgcaacgagcgcaacccttgtctttagttgctacgcaagagcactctaaagagactgccggtgacaaaccggaggaaggtggggatgacgtcaagtcctcatggcccttatgggtagggcttcacacgtcatacaatggtgcatacagagggttgccaacccgcgagggggagctaatctcagaaaatgcatcgtagtccggatcgtagtctgcaactcgactacgtgaagctggaatcgctagtaatcgcggatcagaatgtcgcggtgaatacgttcccgggtcttgtacacaccgcccgtcataccatgggagtgggttttgccagaagcagttagcctaaccgcaaggagggcgactgccacggcagggttcatgactggggta

SEQ ID NO: 2588 - DNA, 1455 bp, unidentified
  source 1..1455: mol_type = unassigned DNA; note = Polynucleobacter victoriensis
attgaacgctggcggcatgccttacacatgcaagtcgaacggcagcacgggtgcttgcacctggtggcgagtggcgaacgggtgagtaatatatcggaacgtaccttattgtgggggataacgcagcgaaagctgtgctaataccgcataatccctaagggggaaagcgggggaccgtaaggcctcgcgcaattagagcggccgatacctgattagctagttggtgaggtaaaggctcaccaaggcaacgatcagtagctggtctgagaggacgatcagccacactgggactgagacacggcccagactcctacgggaggcagcagtggggaattttggacaatgggggcaaccctgatccagcaatgccgcgtgagtgaagaaggccttcgggttgtaaagctcttttgtcagggaagaaacagcagctctaacacagtttgcgaatgacggtacctgaagaataagcaccggctaactacgtgccagcagccgcggtaatacgtagggtgcaagcgttaatcggaattactgggcgtaaagcgtgcgcaggcggttatgtaagacaggcgtgaaatccccgggcttaacctgggaattgcgcttgtgactgcatagctagagtatgtcagaggggggtagaattccacgtgtagcagtgaaatgcgtagagatgtggaggaataccaatggcgaaggcagccccctgggataatactgacgctcatgcacgaaagcgtggggagcaaacaggattagataccctggtagtccacgccctaaacgatgctgactagttgttcgggaatttattcctgagtaacgtagctaacgcgtgaagtcagccgcctggggagtacggtcgcaagattaaaactcaaaggaattgacggggacccgcacaagcggtggatgatgtggattaattcgatgcaacgcgaaaaaccttacctacccttgacatgccactaacgaagtagagatacattaggtgcccgtaagggaaagtggacacaggtgctgcatggctgtcgtcagctcgtgtcgtgagatgttgggttaagtcccgcaacgagcgcaacccttgtctctagttgctacgcaagagcactctagagagactgccggtgacaaaccggaggaaggtggggatgacgtcaagtcctcatggcccttatgggtagggcttcacacgtcatacaatggtgcatacagagggttgccaacccgcgagggggagctaatctcagaaaatgcatcgtagtccggatcgtagtctgcaactcgactacgtgaagctggaatcgctagtaatcgcggatcagaatgtcgcggtgaatacgttcccgggtcttgtacacaccgcccgtcacaccatgggagtgggttttgccagaagccgttagcctaaccgcaaggagggcgacgaccacggcagggttcatgactggggtg

SEQ ID NO: 2589 - DNA, 1454 bp, unidentified
  source 1..1454: mol_type = unassigned DNA; note = Polynucleobacter wuianus
attgaacgctggcggcatgccttacacatgcaagtcgaacggcagcacgggtgcttgcacctggtggcgagtggcgaacgggtgagtaatacatcggaacgtaccttatcgtgggggataacgcagcgaaagctgtgctaataccgcatacgccctgagggggaaagcgggggatcgaaagacctcgcgcgattagagcggccgatgcctgattagcttgttggtggggtaaaagcccaccaaggcgacgatcagtagctggtctgagaggacgatcagccacactgggactgagacacggcccagactcctacgggaggcagcagtggggaattttggacaatgggggcaaccctgatccagcaatgccgcgtgagtgaagaaggccttcgggttgtaaagctcttttgtcagggaagaaacaccggctctaacacagtccgggaatgacggtacctgaagaataagcaccggctaactacgtgccagcagccgcggtaatacgtagggtgcgagcgttaatcggaattactgggcgtaaagcgtgcgcaggcggttatacaagacaggcgtgaaatccccgggcttaacctgggaatggcgcctgtgactgtatagctagagtgtgtcagaggggggtagaattccacgtgtagcagtgaaatgcgtagatatgtggaggaataccaatggcgaaggcagccccctgggataacactgacgctcatgcacgaaagcgtggggagcaaacaggattagataccctggtagtccacgccctaaacgatgctgactagttgttcgggatttacatcctgagtaacgtagctaacgcgtgaagtcagccgcctggggagtacggtcgcaagattaaaactcaaaggaattgacggggacccgcacaagcggtggatgatgtggattaattcgatgcaacgcgaaaaaccttacctacccttgacatgtcactaacaagtagagatacattaggtgctcgtaagagaaagtgaacacaggtgctgcatggctgtcgtcagctcgtgtcgtgagatgttgggttaagtcccgcaacgagcgcaacccttgtctttagttgctacgcaagagcactctaaagagactgccggtgacaaaccggaggaaggtggggatgacgtcaagtcctcatggcccttatgggtagggcttcacacgtcatacaatggtgcatacagagggttgccaacccgcgagggggagctaatctcagaaaatgcatcgtagtccggatcgtagtctgcaactcgactacgtgaagctggaatcgctagtaatcgcggatcagaatgtcgcggtgaatacgttcccgggtcttgtacacaccgcccgtcataccatgggagtgggttttgccagaagccgttagcctaaccgcaaggggggcgactgccacggcagggttcatgactggggta

SEQ ID NO: 2590 - DNA, 1427 bp, Pontibacillus chungwhensis
  source 1..1427: mol_type = unassigned DNA
gtgcctaatacatgcaagtcgagcgcgtgaaacaacatgatcccttcggggtgattgttgtggatcgagcggcggacgggtgagtaacacgtgggcaacctacccatgagatcgggataactccgggaaaccggagctaataccgaataacccagtgaactgcatggttcactggtaaaaggcggtttcggccgtcactcatggatgggcccgcggcgcattagctagttggtaaggtaacggcttaccaaggcaacgatgcgtagccgacctgagagggtgatcggccacactgggactgagacacggcccagactcctacgggaggcagcagtagggaatcttccgcaatggacgaaagtctgacggagcaacgccgcgtgaacgatgaaggtcttcggatcgtaaagttctgttgttagggaagaacaagtaccagaggaaatgctggtaccttgacggtacctaaccagaaagccacggctaactacgtgccagcagccgcggtaatacgtaggtggcaagcgttgtccggaattattgggcgtaaagcgcgcgcaggcggtttcttaagtctgatgtgaaagcccacagctcaactgtggagggccattggaaactggggaacttgagtacagaagaggagagtggaattccacgtgtagcggtgaaatgcgtagatatgtggaggaacaccagtggcgaaggcgactctctggtctgtaactgacgctgaggcgcgaaagcgtgggtagcaaacaggattagataccctggtagtccacgccgtaaacgttgagtgctaggtgttagggggtttccgccccttagtgctgaagttaacgcattaagcactccgcctggggagtacggccgcaaggctgaaactcaaaagaattgacgggggcccgcacaagcggtggagcatgtggtttaattcgaagcaacacgaagaaccttaccaggtcttgacatcttccgctatccctagagatagggagttcccttcggggacggaatgacaggtggtgcatggttgtcgtcagctcgtgtcgtgagatgttgggttaagtcccgcaacgagcgcaacccctaatcttagttgccagcattcagttgggcactctaaggtgactgccggtgacaaaccggaggaaggcggggatgacgtcaaatcatcatgccccttatgacctgggctacacacgtgctacaatggatggtacagagggccgcgagaccgcgaggtcaagcaaatctcaaaaaaccattctcagttcggattgcaggctgcaactcgcctgtatgaagccggaatcgctagtaatcgcaggtcagcatactgcggtgaatacgttcccgggccttgtacacaccgcccgtcacaccacgagagttggcaacacccgaagtcggtgaggtaacct

SEQ ID NO: 2591 - DNA, 1466 bp, Pontibacillus halophilus
  source 1..1466: mol_type = unassigned DNA
cctaatacatgcaagtcgagcgcgtgaaacaacatgattccttcggggtgattgttgtggaatgagcggcggacgggtgagtaacacgtgggtaacctacccacaagatcgggataactccgggaaaccggggctaataccgaataatcctttgaaccgcatggttcagaggtaaaagacggtttcggctgtcacttgtggatggacccgcggcgcattagctagttggtgaggtaacggctcaccaaggcgacgatgcgtagccgacctgagagggtgatcggccacactgggactgagacacggcccagactcctacgggaggcagcagtagggaatcttccgcaatggacgaaagtctgacggagcaacgccgcgtgagtgatgaaggttttcggatcgtaaagctctgttgttagggaagaacaagtaccagagtaactgctggtaccttgacggtacctaaccagaaagccccggctaactacgtgccagcagccgcggtaatacgtagggggcaagcgttgtccggaattattgggcgtaaagcgcgcgcaggcggttccttaagtctgatgtgaaaggccacggctcaaccgtggacggccattggaaactggggaacttgagtgcagaagaggagagtggaattccaagtgtagcggtgaaatgcgtagatatttggaggaacaccagtggcgaaggcgactctctggtctgcaactgacgctgaggcgcgaaagcgtgggtagcaaacaggattagataccctggtagtccacgccgtaaacgatgagtgctaggtgttagggggtttccgccccttagtgctgaagttaacgcattaagcactccgcctggggagtacggccgcaaggctgaaactcaaaggaattgacgggggcccgcacaagcggtggagcatgtggtttaattcgaagcaacgcgaagaaccttaccaggtcttgacatcttgtgctatccctagagatagggagttcccttcggggacacaatgacaggtggtgcatggttgtcgtcagctcgtgtcgtgagatgttgggttaagtcccgcaacgagcgcaacccctaatcttagttgccagcatttagttgggcactctaaggtgactgccggtgacaaaccggaggaaggcggggatgacgtcaaatcatcatgccccttatgacctgggctacacacgtgctacaatggatggtacagagggctgcgagaccgcgaggtcaagcgaatctcaaaaaaccattctcagttcggattgcaggctgcaactcgcctgtatgaagccggaatcgctagtaatcgcaggtcagcatactgcggtgaatacgttcccgggccttgtacacaccgcccgtcacaccacgagagttggcaacacccgaagtcggtgaggtaacctttttggagccagccgccgaaggtggggccaatgattggggtg

SEQ ID NO: 2592 - DNA, 1485 bp, Pontibacillus marinus
  source 1..1485: mol_type = unassigned DNA
gacgaacgctggcggcgtgcctaatacatgcaagtcgagcgcgtgaaacaacatgatcccttcggggtgattgttgtggatcgagcggcggacgggtgagtaacacgtgggtaacctacctgagagatcgggataaccccgggaaaccggggctaataccgaataatcgttggaaccgcatggttccaacgtaaaaggcggcttttgccgtcactttcagatggacccgcggcgcattagctagttggtaaggtaacggcttaccaaggcaacgatgcgtagccgacctgagagggtgatcggccacactgggactgagacacggcccagactcctacgggaggcagcagtagggaatcttccgcaatggacgaaagtctgacggagcaacgccgcgtgaacgatgaaggtcttcggatcgtaaagttctgttgttagggaagaacaagtaccagaggaaatgctggtaccttgacggtacctaaccagaaagccacggctaactacgtgccagcagccgcggtaatacgtaggtggcaagcgttgtccggaattattgggcgtaaagcgcgcgcaggcggttccttaagtctgatgtgaaagcccacagctcaactgtggagggccattggaaactggggaacttgagtacagaagaggagagcggaattccacgtgtagcggtgaaatgcgtagatatgtggaggaacaccagtggcgaaggcggctctctggtctgtaactgacgctgaggcgcgaaagcgtgggtagcaaacaggattagataccctggtagtccacgccgtaaacgttgagtgctaggtgttagggggtttccgccccttagtgctgaagttaacgcattaagcactccgcctggggagtacggccgcaaggctgaaactcaaaagaattgacgggggcccgcacaagcggtggagcatgtggtttaattcgaagcaacgcgaagaaccttaccaggtcttgacatcttccgctatccctagagatagggagttcccttcggggacggaatgacaggtggtgcatggttgtcgtcagctcgtgtcgtgagatgttgggttaagtcccgcaacgagcgcaacccctaatcttagttgccagcattcagttgggcactctaaggtgactgccggtgacaaaccggaggaaggcggggatgacgtcaaatcatcatgccccttatgacctgggctacacacgtgctacaatggatggtacagagggcagcgagaccgcgaggtcaagcaaatctcaaaaaaccattctcagttcggattgcaggctgcaactcgcctgtatgaagccggaatcgctagtaatcgcaggtcagcatactgcggtgaatacgttcccgggccttgtacacaccgcccgtcacaccacgagagttggcaacacccgaagtcggtgaggtaacctttttggagccagccgccgaaggtggggccaatgattggggtg

SEQ ID NO: 2593 - DNA, 1484 bp, Pontibacillus yanchengensis
  source 1..1484: mol_type = unassigned DNA
gacgaacgctggcggcgtgcctaatacatgcaagtcgagcgcgtgaagcaacatgatcccttcggggtgattgttgtggatcgagcggcggacgggtgagtaacacgtggataacctaccttcgagatcgggataaccccgggaaaccggggctaataccgaataatctgttagaccgcatggtcgaacagcaaacggcggccctgccgtcactcgaagatggatccgcggcgcattagctagttggtaaggtaacggcttaccaaggcgacgatgcgtagccgacctgagagggtgatcggccacactgggactgagacacggcccagactcctacgggaggcagcagtagggaatcttccgcaatggacgaaagtctgacggagcaacgccgcgtgaacgatgaaggtcttcggatcgtaaagttctgttgttagggaagaacaagtgccagaggaaatgctggcaccttgacggtacctaaccagaaagccccggctaactacgtgccagcagccgcggtaatacgtagggggcaagcgttgtccggaattattgggcgtaaagcgcgcgcaggcggttccttaagtctgatgtgaaagcccacggctcaaccgtggagggccattggaaactggggagcttgagtacagaagaggagagtggaattccacgtgtagcggtgaaatgcgtagatatgtggaggaacaccagtggcgaaggcgactctctggtctgtaactgacgctgaggcgcgaaagcgtgggtagcaaacaggattagataccctggtagtccacgccgtaaacgttgagtgctaggtgttagggggtttccgccccttagtgctgaagttaacgcattaagcactccgcctggggagtacggccgcaaggctgaaactcaaaggaattgacgggggcccgcacaagcggtggagcatgtggtttaattcgaagcaacgcgaagaaccttaccaggtcttgacatcttccgctatccctagagatagggagttcccttcggggacggaatgacaggtggtgcatggttgtcgtcagctcgtgtcgtgagatgttgggttaagtcccgcaacgagcgcaacccctaatcttagctgccagcattcagttgggcactctaaggtgactgccggtgacaaaccggaggaaggcggggatgacgtcaaatcatcatgccccttatgacctgggctacacacgtgctacaatggatggtacagagggcagcgagaccgcgaggtcaagcaaatctcaaaaaaccattctcagttcggattgcaggctgcaactcgcctgtatgaagccggaatcgctagtaatcgcaggtcagcatactgcggtgaatacgttcccgagccttgtacacaccgcccgtcacaccacgagagttggcaacacccgaagtcggtgaggtaacctttttggaggcagccgccgaaggtggggccaatgattggggtg

SEQ ID NO: 2594 - DNA, 1423 bp, Pontibacter korlensis
  source 1..1423: mol_type = unassigned DNA
atacatgcaagtcgaacggatcagagggcttcggttctctggttagtggcgcacgggtgcgtaacgcgtatgcaacctaccttccactgggggatagcccggggaaacccggattaataccgcatgtgaccactgagagggcatccgatcgtggtaaaagctgaggcggtggaagatgggcatgcgtgccattagctagttggcggggtaacggcccaccaaggctacgatggctaggggttctgagaggatggtcccccacactggtactgagacacggaccagactcctacgggaggcagcagtagggaatattgggcaatggccgagaggctgacccagccatgccgcgtgcaggaagaaggccttctgggttgtaaactgcttttatctgggaagaaaacgcccctgcgggggtaactgacggtaccagatgaataagcaccggctaactccgtgccagcagccgcggtaatacggagggtgcaagcgttgtccggatttattgggtttaaagggtgcgtaggcggcccgttaagtcagcggtgaaatcccacggctcaaccgtggaactgccgttgatactggcgggcttgagttcggtcgaggcgggcggaactggtggtgtagcggtgaaatgcttagataccaccaagaaccccgattgcgtaggcagctcgctgggccgaaactgacgctgaggcacgaaagcgtggggagcgaacaggattagataccctggtagtccacgccgtaaacgatgatgactcgatgttggcgatacactgtcagcgtccaagcgaaagcgttaagtcatccacctggggagtacgcccgcaagggtgaaactcaaaggaattgacgggggcccgcacaagcggtggagcatgtggtttaattcgatgatacgcgaggaaccttacctaggctagaatgcgcgtgaccgcaccagagatggtgcttcccttcggggcacaaagcaaggtgctgcatggctgtcgtcagctcgtgccgtgaggtgttgggttaagtcccgcaacgagcgcaacccctacctttagttgccagcgcgtcatggcggggactctaaagggactgccttcgcaagaagcgaggaaggcggggacgacgtcaagtcatcatggcccttacgcctagggctacacacgtgctacaatggccggtacagagggttgccacccagcgatggggcgccaatctcaaaaagccggtctcagttcggatcggagtctgcaactcgactccgtgaagccggaatcgctagtaatcgcgtatcagcaacgacgcggtgaatacgttcccgggccttgtacacaccgcccgtcaagccatggaagtcagggagacctgaagccggtgaccgtcataggagccgtctagggtaaaactggtaactggggct

SEQ ID NO: 2595 - DNA, 1407 bp, Porphyrobacter dokdonensis
  source 1..1407: mol_type = unassigned DNA
aacgaacgctggcggcatgcctaacacatgcaagtcgaacgagaccttcgggtctagtggcgcacgggtgcgtaacgcgtgggaacctgcccttaggttcggaataactcagagaaatttgagctaataccggataatgtcttcggaccaaagatttatcgcctttggatgggcccgcgttggattagctagttggtggggtaaaggcctaccaaggcgacgatccatagctggtctgagaggatgatcagccacactgggactgagacacggcccagactcctacgggaggcagcagtggggaatattggacaatgggcgaaagcctgatccagcaatgccgcgtgagtgatgaaggccttagggttgtaaagctcttttacccgagatgataatgacagtatcgggagaataagctccggctaactccgtgccagcagccgcggtaatacggagggagctagcgttgttcggaattactgggcgtaaagcgcacgtaggcggctttttaagtcagaggtgaaatcccggggctcaaccccggaactgcctttgaaactgggaagctagaatcctggagaggcgagtggaattccgagtgtagaggtgaaattcgtagatattcggaagaacaccagtggcgaaggcgactcgctggacaggtattgacgctgaggtgcgaaagcgtggggagcaaacaggattagataccctggtagtccacgccgtaaacgatgataactagctgtccgggttcatggaacttgggtggcgcagctaacgcattaagttatccgcctggggagtacggtcgcaagattaaaactcaaaggaattgacgggggcctgcacaagcggtggagcatgtggtttaattcgaagcaacgcgcagaaccttaccagcctttgacatcctaggacgacttctggagacagatttcttcccttcggggacctagtgacaggtgctgcatggctgtcgtcagctcgtgtcgtgagatgttgggttaagtcccgcaacgagcgcaaccctcgtccttagttgccatcatttagttgggcactttaaggaaactgccggtgataagccggaggaaggtggggatgacgtcaagtcctcatggcccttacaggctgggctacacacgtgctacaatggcaactacagtgggcagctatcccgcgagggtgagctaatctccaaaagttgtctcagttcggattgttctctgcaactcgagagcatgaaggcggaatcgctagtaatcgcggatcagcatgccgcggtgaatacgttcccaggccttgtacacaccgcccgtcacaccatgggagttggattcacccgaaggcagtgcgctaaccgcaaggaggcagctgaccacggtgggttcagcgactggggtg

SEQ ID NO: 2596 - DNA, 1409 bp, unidentified
  source 1..1409: mol_type = unassigned DNA; note = Porphyrobacter mercurialis
aacgaacgctggcggcatgcctaacacatgcaagtcgaacgagaccttcgggtctagtggcgcacgggtgcgtaacgcgtgggaacctgcctttaggttcgggataactcctcgaaaggggtgctaataccggatgatgtcttcggaccaaagatttatcgcctttagatgggcccgcgttggattagcttgttggtgaggtaaaggctcaccaaggcgacgatccatagctggtcttagaggatgatcagccacactgggactgagacacggcccagactcctacgggaggcagcagtggggaatattggacaatgggcgaaagcctgatccagcaatgccgcgtgagtgatgaaggccttagggttgtaaagctcttttacccgggatgataatgacagtaccgggagaataagccccggctaactccgtgccagcagccgcggtaatacggagggggctagcgttgttcggaaatactgggcgtaaagcgaacgtaggcggcttggcaagtcaggggtgaaatcccagtgctcaacactggaactgcctttgaaactgccaggcttgaatcctggagaggcgagtggaattccgagtgtagaggtgaaattcgtagatattcggaagaacaccagtggcgaaggcgactcgctggacaggtattgacgctgaggttcgaaagcgtggggagcaaacaggattagataccctggtagtccacgccgtaaacgatgataactagctgtccgggcacatggtgtttgggtggcgcagctaacgcattaagttatccgcctggggagtacggtcgcaagattaaaactcaaaggaattgacgggggcctgcacaagcggtggagcatgtggtttaattcgaagcaacgcgcagaaccttaccagcctttgacatcctcggacgactaccggagacggttttcttcccttacgggaccgagtgacaggtgctgcatggctgtcgtcagctcgtgtcgtgagatgttgggttaagtcccgcaacgagcgcaaccctcgtccttagttgccatcattaagttgggaactctaaggaaaccgccggtgataagccggaggaaggtggggatgacgtcaagtcctcatggcccttacaggctgggctacacacgtgctacaatggcatctacagtgggcagctaactcgcaagggtgcgctaatctccaaaagatgtctcagttcggattgtcctctgcaactcgagggcatgaaggcggaatcgctagtaatcgcggatcagcacgccgcggtgaatacgttcccaggccttgtacacaccgcccgtcacgccatgggagttggttctacccgaaggtggtgcgctaacccgcaagggaggcagccaaccacggtgggatcagcgactggggtg

SEQ ID NO: 2597 - DNA, 1406 bp, Porphyrobacter neustonensis
  source 1..1406: mol_type = unassigned DNA
aacgaacgctggcggcatgcctaacacatgcaagtcgaacgagaccttcggtctagtggcgcacgggtgcgtaacgcgtgggaacctgcctttaggttcggaataactcagagaaatttgagctaataccggataatgtcttcggaccaaagatttatcgcctttagatgggcccgcgtaagattagctagttggtggggtaaaggcctaccaaggcgacgatctttagctggtctgagaggatgatcagccacactgggactgagacacggcccagactcctacgggaggcagcagtggggaatattggacaatgggcgaaagcctgatccagcaatgccgcgtgagtgatgaaggccttagggttgtaaagctcttttaccagggatgataatgacagtacctggagaataagctccggctaactccgtgccagcagccgcggtaatacggagggagctagcgttgttcggaattactgggcgtaaagcgcacgtaggcggctttttaagtcaggggtgaaatcccggggctcaaccccggaactgcccttgaaactgggaagctagaatcttggagaggcgagtggaattccgagtgtagaggtgaaattcgtagatattcggaagaacaccagtggcgaaggcgactcgctggacaagtattgacgctgaggtgcgaaagcgtggggagcaaacaggattagataccctggtagtccacgccgtaaacgatgataactagctgtccgggctcatagagtttgggtggcgcagctaacgcattaagttatccgcctggggagtacggtcgcaagattaaaactcaaaggaattgacgggggcctgcacaagcggtggagcatgtggtttaattcgaagcaacgcgcagaaccttaccagcctttgacatcctaggacgacttctggagacagatttcttcccttcggggacctagtgacaggtgctgcatggctgtcgtcagctcgtgtcgtgagatgttgggttaagtcccgcaacgagcgcaaccctcgtccttagttgccatcatttagttgggcactttaaggaaactgccggtgataagccggaggaaggtggggatgacgtcaagtcctcatggcccttacaggctgggctacacacgtgctacaatggcatctacagtgggcagctattccgcaaggatgcgctaatctccaaaagatgtctcagttcggattgtcctctgcaactcgagggcatgaaggcggaatcgctagtaatcgcggatcagcatgccgcggtgaatacgttcccaggccttgtacacaccgcccgtcacaccatgggagttggattcacccgaaggcagtgcgctaaccgcaaggaggcagctgaccacggtgggttcagcgactggggtg

SEQ ID NO: 2598 - DNA, 1409 bp, Porphyrobacter sanguineus
  source 1..1409: mol_type = unassigned DNA
aacgaacgctggcggcatgcctaacacatgcaagtcgaacgagaccttcgggtctagtggcgcacgggtgcgtaacgcgtgggaacctgcctttaggttcggaataacagtgagaaattactgctaataccggataatgtcttcggaccaaagatttatcgcctttagatgggcccgcgttggattagctagttggtggggtaaaggcctaccaaggcgacgatccatagctggtctgagaggatgatcagccacactgggactgagacacggcccagactcctacgggaggcagcagtggggaatattggacaatgggcgaaagcctgatccagcaatgccgcgtgagtgatgaaggccttagggttgtaaagctcttttactggggatgataatgacagtacccagagaataagctccggctaactccgtgccagcagccgcggtaatacggagggagctagcgttgttcggaattactgggcgtaaagcgcacgtaggcggctttttaagtcaggggtgaaatcccggggctcaaccccggaactgcccttgaaactgggaagctagaatcttggagaggcgagtggaattccgagtgtagaggtgaaattcgtagatattcggaagaacaccagtggcgaaggcgactcgctggacaagtattgacgctgaggtgcgaaagcgtggggagcaaacaggattagataccctggtagtccacgccgtaaacgatgataactagctgtccgggctcatagagcttgggtggcgcagctaacgcattaagttatccgcctggggagtacggtcgcaagattaaaactcaaaggaattgacgggggcctgcacaagcggtggagcatgtggtttaattcgaagcaacgcgcagaaccttaccagcctttgacatcctaggacgacttctggagacagatttcttcccttcggggacctagtgacaggtgctgcatggctgtcgtcagctcgtgtcgtgagatgttgggttaagtcccgcaacgagcgcaaccctcgtccttagttgccatcattaagttgggcactttaaggaaactgccggtgataagccggaggaaggtggggatgacgtcaagtcctcatggcccttacaggctgggctacacacgtgctacaatggcatctacagtgggcagctattccgcaaggatgcgctaatctccaaaagatgtctcagttcggattgtcctctgcaactcgagggcatgaaggcggaatcgctagtaatcgcggatcagcatgccgcggtgaatacgttcccaggccttgtacacaccgcccgtcacaccatgggagttggattcactcgaaggcgttgagctaacccgcaagggaggcaggcgaccacagtgggtttagcgactggggtg

SEQ ID NO: 2599 - DNA, 1452 bp, Porphyromonas catoniae
  source 1..1452: mol_type = unassigned DNA
gatgaacgctagcgataggcttaacacatgcaagtcgaggggcagcatggtcttagcttgctaagactgatggcgaccggcgcacgggtgcgtaacgcgtatgcaacttgcctcacagagggggataacccgtcgaaagacggactaataccgcgtacactccagtctgggcatccaggctagaggaaatgaaattcgctgtgagataggcatgcgtcccattagctagttggtgaggtaacggctcaccaaggcgacgatgggtaggggaactgagaggttgaacccccacactggtactgagacacggaccagactcctacgggaggcagcagtgaggaatattggtcaatgggcgagagcctgaaccagccaagtcgcgtgaaggatgactgtcttatggattgtaaacttcttttgtaggggaataaagaatggtacgtgtaccatagtgaatgtaccctacgaataagcatcggctaactccgtgccagcagccgcggtaatacggaggatgcgagcgttatccggatttattgggtttaaagggtgcgtaggcggcctgttaagtcagcggtgaaatctaggggcttaactcctaaattgccattgatactggtgggcttgagtgtagatgaggtaggcggaatgcgtggtgtagcggtggaatgcatagatatcacgcagaactccaattgcgaaggcagcttactaaggtacaactgacgctgaagcacgaaagcgtgggtatcaaacaggattagataccctggtagtccacgcagtaaacgatgataactgggcgtatgcgatatacagtatgctcctaagcgaaagcgttaagttatccacctggggagtacgccggcaacggtgaaactcaaaggaattgacgggggcccgcacaagcggaggaacatgtggtttaattcgatgatacgcgaggaaccttacccgggattgaaatgtagacgacgagcggtgaaagtcgctttcccttcggggcttctatgtaggtgctgcatggttgtcgtcagctcgtgccgtgaggtgtcggcttaagtgccataacgagcgcaacccctgtctacggttgccatcaggtaatgctgggaactccgtagagactgccgtcgtaaggcgtgaggaaggtggggatgacgtcaaatcagcacggcccttacatccggggcgacacacgtgttacaatggtggggacaaagggcagctacctggcgacaggatgcgaatctccaaaccccatcacagttcggatcggagtctgcaactcgactccgtgaagctggattcgctagtaatcgcgcatcagccatggcgcggtgaatacgttcccgggccttgtacacaccgcccgtcaagccatgggagtctggagtacctaaagtccgtacctgcgagggtcggcctagggtaatacaggtgactggggct

SEQ ID NO: 2600 - DNA, 1455 bp, Porphyromonas circumdentaria
  source 1..1455: mol_type = unassigned DNA
gatgaacgctagcgataggcttaacacatgcaagtcgaggggcagcatggtcttagcttgctaagattgatggcgaccggcgcacgggtgcgtaacgcgtatgtaacctgcctgtaattaggggatagctcggtgaaagtcgaattaataccctatattctatatatttcgcatgggatttataggaaagatttattgattacagatgggcatgcgttccattagcttgttggtaaggtaacggcttaccaaggctacgatggatagggggactgagaggttgaccccccacactggtactgagacacggaccagactcctacgggaggcagcagtgaggaatattggtcaatgggcgaaagcctgaaccagccaagtcgcgtgaaggaagactgtcctatggattgtaaacttcttttgtagaggaataatggtagccacgtgtggctaaggggaatgtactctacgaataagtatcggctaactccgtgccagcagccgcggtaatacggaggatacgagcgttatccggatttattgggtttaaagggtgcgtaggtggcgaattaagtcagtggtgaaaagctgcagctcaactgtagtcttgccgttgaaactggtttgcttgagaggagacgaggtatgtggaatgtgtggtgtagcggtgaaatgcatagatatcacacagaacgccgattgcgaaggcagcgtaccaggctctatctgacactgaagcacgaaagcgtgggtatcaaacaggattagataccctggtagtccacgctgtaaacgatgaatactagatttttgcgatatacagtaagagtctaagcgaaagcgataagtattccacctggggagtacgccggcaacggtgaaactcaaaggaattgacgggggcccgcacaagcggaggaacatgtggtttaattcgatgatacgcgaggaaccttacctgggattgaaatttaggagaacgatttatgaaagtagattttcccttcggggctcctaagtaggtgctgcatggttgtcgtcagctcgtgccgtgaggtgtcggcttaagtgccataacgagcgcaacccgcgttgatagttactaacagataaagctgaggactctatcgagacagccgtcgtaagacgcgaggaaggggcggatgacgtcaaatcagcacggcccttacatccagggcgacacacgtgttacaatggcaaggacaaagggaagccacatagcgatatggagcagatcctcaaaccttgtcccagttcggatcggagtctgcaactcgactccgtgaagctggattcgctagtaatcgcgcatcagccatggcgcggtgaatacgttcccgggccttgtacacaccgcccgtcaagccatgggagtcgggggtacctgaagagtgtaaccgtaaggagcgcttaagggtaataccggtgactggggct

SEQ ID NO: 2601 - DNA, 1453 bp, Porphyromonas crevioricanis
  source 1..1453: mol_type = unassigned DNA
gatgaacgctagcgataggcttaacacatgcaagtcgaggggcatcgggtaagtagcttgctacttatgccggcgaccggcgcacgggtgcgtaacgcgtatgcaacctacctgtcagactgggataacccggtgaaagccggactaatactggatatacttattcttctgcatggggggataaggaaagatttattactgacagatgggcatgcgttccattagctagttggtgaggtaacggctcaccaaggcgacgatggataggggaactgagaggtttatcccccacactggtactgagacacggaccagactcctacgggaggcagcagtgaggaatattggtcaatgggcgagagcctgaaccagccaagtcgcgtgagggcagacggtcctaaggattgtaaacctctttttcaggggagtaaaattagatacgcgtatttaattgcaagtaccctgcgaataagcatcggctaactccgtgccagcagccgcggtaatacggaggatgcgagcgttatccggatttattgggtttaaagggtgcgtaggttgttttgtaagtcagtggtgaaacctgggggctcaacccctagcatgccgttgaaactgcagagctagagattagaataggtaggcggaatgtatggtgtagcggtgaaatgcatagatatcatacagaaccccgattgcgaaggcagcttaccgggctatatctgacactgaagcacgaaagcgtgggtatcaaacaggattagataccctggtagtccacgccgtaaacgatgattactcggagtatgcgatatgagtgtatgcttcttagcgaaagcgttaagtaatccacctggggagtacgtcggcaacgatgaaactcaaaggaattgacgggggcccgcacaagcggaggaacatgtggtttaattcgatgatacgcgaggaaccttacccgggattgaaatatagatgacaggcagcgagagttgttatcccttcggggcatctatgtaggtgctgcatggttgtcgtcagctcgtgccgtgaggtgtcggcttaagtgccctaacgagcgcaacccacattattagttactaacaggttaagctgaggactctaataagactgccggcgtaagccgtgaggaaggtgtggatgacgtcaaatcagcacggcccttacatccggggcgacacacgtgttacaatggtagggacaaagggcagctaccgggcgaccggatgcgaatctccaaaccctatcccagttcggatcggagtctgcaactcgactctgtgaagctggattcgctagtaatcgcgcatcagccatggcgcggtgaatacgttcccgggccttgtacacaccgcccgtcaagccatgggagtcgggggtacctgaagtacgtaaccgcgaggggcgtcctagggtaataccggtgactggggct

SEQ ID NO: 2602 - DNA, 1452 bp, Porphyromonas endodontalis
  source 1..1452: mol_type = unassigned DNA
gatgaacgctagcgataggcttaacacatgcaagtcgaggggcagcattattttagcttgctaagatagatggcgaccggcgcacgggtgcgtaacgcgtatgcaacctgcctgtaattagggaataacccggtgaaagtcggactaataccctatattcttctttctccgcatggaggaggacggaaagatttattgattacagatgggcatgcgtcccattagctggttggtaaggtaacggcttaccaaggcaacgatgggtagggggactgagaggttgaccccccacactggtactgagacacggaccagactcctacgggaggcagcagtgaggaatattggtcaatgggcgagagcctgaaccagccaagtcgcgtgaaggacgacggttctatggattgtaaacttcttttgtagaggaataatggcagctacgtgtagctgagtgcatgtactctacgaataagtatcggctaactccgtgccagcagccgcggtaatacggaggatacgagcgttatccggaattattgggtttaaagggtgcgtaggtggcgtattaagtcagtggtgaaaagctgcagctcaactgtagtcttgccgttgaaactgatatgctagagaggagacgaggtatgcggaatgtgtggtgtagcggtgaaatgcatagatatcacacagaacgccgattgcgaaggcagcgtaccaggctccgtctgacactgaagcacgaaagcgtggggatcaaacaggattagataccctggtagtccacgcagtaaacgatgaatactagatttttgcgatatactgtaagagtctaagcgaaagcgataagtattccacctggggagtacgccggcaacggtgaaactcaaaggaattgacgggggcccgcacaagcggaggaacatgtggtttaattcgatgatacgcgaggaaccttacccgggattgaaatttagatgatggcagatgagagtttgctttccttcgggacatctaagtaggtgctgcatggttgtcgtcagctcgtgccgtgaggtgtcggcttaagtgccataacgagcgcaacccgcgtcgatagttactaacaggttatgctgaggactctatcgagacagccgtcgtaagacgcgaggaaggggcggatgacgtcaaatcagcacggcccttacatccggggcgacacacgtgttacaatggcagggacaaagggaagcgacatggtgacatgaagcggatctccaaaccctgtcccagttcggatcggagtctgcaactcgactccgtgaagctggattcgctagtaatcgcgcatcagccatggcgcggtgaatacgttcccgggccttgtacacaccgcccgtcaagccatggaagttgggagtacctgaagagcgtaaccgcaaggggcgcttaagggtaataccagtgactggggct

SEQ ID NO: 2603 - DNA, 1454 bp, Porphyromonas gingivalis
  source 1..1454: mol_type = unassigned DNA
gatgaacgctagcgataggcttaacacatgcaagtcgaggggcagcatgatcttagcttgctaaggttgatggcgaccggcgcacgggtgcgtaacgcgtatgcaacttgccttacagagggggataacccgttgaaagacggactaaaaccgcatacacttgtattattgcatgatattacaaggaaatatttatagctgtaagataggcatgcgtcccattagctagttggtgaggtaacggctcaccaaggcgacgatgggtaggggaactgagaggtttatcccccacactggtactgagacacggaccagactcctacgggaggcagcagtgaggaatattggtcaatgggcgagagcctgaaccagccaagtcgcgtgaaggaagactgtcctaaggattgtaaacttcttttatacgggaataacgggcgatacgagtattgcattgaatgtaccgtaagaataagcatcggctaactccgtgccagcagccgcggtaatacggaggatgcgagcgttatccggatttattgggtttaaagggtgcgtaggttgttcggtaagtcagcggtgaaacctgagcgctcaacgttcagcctgccgttgaaactgccgggcttgagttcagcggcggcaggcggaattcgtggtgtagcggtgaaatgcatagatatcacgaggaactccgattgcgaaggcagcttgccatactgcgactgacactgaagcacgaaggcgtgggtatcaaacaggattagataccctggtagtccacgcagtaaacgatgattactaggagtttgcgatataccgtcaagcttccacagcgaaagcgttaagtaatccacctggggagtacgccggcaacggtgaaactcaaaggaattgacgggggcccgcacaagcggaggaacatgtggtttaattcgatgatacgcgaggaaccttacccgggattgaaatgtagatgactgatggtgaaaaccgtcttcccttcggggcttctatgtaggtgctgcatggttgtcgtcagctcgtgccgtgaggtgtcggcttaagtgccataacgagcgcaacccacatcggtagttgctaacagttttcgctgaggactctaccgagactgccgtcgtaaggcgtgaggaaggtgtggatgacgtcaaatcagcacggcccttacatccggggcgacacacgtgttacaatgggagggacaaagggcagctaccgggcgaccggatgcgaatctctaaacccttccccagttcggatcggagtctgcaactcgactccgtgaagctggattcgctagtaatcgcgcatcagccatggcgcggtgaatacgttcccgggccttgtacacaccgcccgtcaagccatgggagtcgggggtacctgaagggcgtaaccgcaaggggcgcactagggtaataccggtgactggggct

SEQ ID NO: 2604 - DNA, 1454 bp, Porphyromonas gingivicanis
  source 1..1454: mol_type = unassigned DNA
gatgaacgctagcgataggcttaacacatgcaagtcgaggggcagcataattttagcttgctaagattgatggcgaccggcgcacgggtgcgtaacgcgtatgcaacctgcctgtaattaggggatagctcggtgaaagtcgaattaataccctatattctatatttttcgcatgattgatataggaaagatttattgattacagatgggcatgcgttccattagcttgttggtaaggtaacggcttaccaaggcaacgatggatagggggactgagaggttgaccccccacactggtactgagacacggaccagactcctacgggaggcagcagtgaggaatattggtcaatgggcgcaagcctgaaccagccaagtcgcgtgaaggacgacggtcctatggattgtaaacttcttttgtagaggaataatgatggccacgagtggctgaaggaatgtactctacgaataagtatcggctaactccgtgccagcagccgcggtaatacggaggatacgagcgttatccggatttattgggtttaaagggtgcgtaggtggcgaattaagtcagtggtgaaaagctgcagctcaactgtagtcttgccgttgaaactggtttgcttgagaggagacgaggtatgcggaatgtgtggtgtagcggtgaaatgcatagatatcacacagaacgccgattgcgaaggcagcgtaccaggctctgtctgacactgaagcacgaaagcgtgggtatcaaacaggattagataccctggtagtccacgctgtaaacgatgaatactagatttttgcgatatacagtaagagtctaagcgaaagcgataagtattccacctggggagtacgccggcaacggtgaaactcaaaggaattgacgggggcccgcacaagcggaggaacatgtggtttaattcgatgatacgcgaggaaccttacctgggattgaaatttaggagaacgatttatgaaagtagattttcccttcggggctcctaagtaggtgctgcatggttgtcgtcagctcgtgccgtgaggtgtcggcttaagtgccataacgagcgcaacccgcgtcgatagttactaacaggtaatgctgaggactctatcgagacagccgtcgtaagacgagaggaaggggcggatgacgtcaaatcagcacggcccttacatccagggcgacacacgtgttacaatggcaaggacaaagggaagccacatagcgatatggagcagatcctcaaaccttgtcccagttcggatcggagtctgcaactcgactccgtgaagctggattcgctagtaatcgcgcatcagccatggcgcggtgaatacgttcccgggccttgtacacaccgcccgtcaagccatgggagtcgggggtacctgaagagtgtaaccgtaaggagcgcttaagggtaataccggtgactggggct

SEQ ID NO: 2605 - DNA, 1450 bp, Porphyromonas gulae
  source 1..1450: mol_type = unassigned DNA
aacgctagcgataggcttaacacatgcaagtcgaggggcagcatgaacttagcttgctaagtttgatggcgaccggcgcacgggtgcgtaacgcgtatgcaacttgccttacagagggggataacccgttgaaaggcggactaataccgcatacacttgcttggttgcatgatcgggcaaggaaatatttatagctgtaagataggcatgcgtcccattagctggttggtgaggtaacggctcaccaaggcaacgatgggtaggggaactgagaggtttatcccccacactggtactgagacacggaccagactcctacgggaggcagcagtgaggaatattggtcaatgggcgagagcctgaaccagccaagtcgcgtgaaggatgactgtcctaaggattgtaaacttcttttatacgggaataacgggcgatacgtgtattgctgtgaatgtaccgtaagaataagcatcggctaactccgtgccagcagccgcggtaatacggaggatgcgagcgttatccggatttattgggtttaaagggtgcgtaggttgttcggtaagtcagcggtgaaaactgagcgctcaacgttcagcgtgccgttgaaactgccgggcttgagttcagaggcggcaggcggaattcgtggtgtagcggtgaaatgcatagatatcacgaggaactccgattgcgaaggcagcttgccatactgcgactgacactgaagcacgaaggcgtgggtatcaaacaggattagataccctggtagtccacgcagtaaacgatgattactaggagtttgcgatataccgtcaagcttccacagcgaaagcgttaagtaatccacctggggagtacgccggcaacggtgaaactcaaaggaattgacgggggcccgcacaagcggaggaacatgtggtttaattcgatgatacgcgaggaaccttacccgggattgaaatgtagacgacggatggtgaaagccgtcttcccttcggggcgtctatgtaggtgctgcatggttgtcgtcagctcgtgccgtgaggtgtcggcttaagtgccataacgagcgcaacccacatcggtagttgctaacaggtttagctgaggactctaccgagactgccgtcgtaaggcgtgaggaaggtgtggatgacgtcaaatcagcacggcccttacatccggggcgacacacgtgttacaatgggagggacaaagggcagctaccgggcgaccggatgcgaatctcgaaacccttccccagttcggatcggagtctgcaactcgactccgtgaagctggattcgctagtaatcgcgcatcagccatggcgcggtgaatacgttcccgggccttgtacacaccgcccgtcaagccatgggagtcgggggtacctgaagggcgtaaccgcaaggggcgcactagggtaataccggtgactggggct

SEQ ID NO: 2606 - DNA, 1445 bp, Porphyromonas levii
  source 1..1445: mol_type = unassigned DNA
  misc_difference 18: note = n is a, c, g, or t
  misc_difference 310: note = n is a, c, g, or t
  misc_difference 510: note = n is a, c, g, or t
  misc_difference 614: note = n is a, c, g, or t
  misc_difference 780: note = n is a, c, g, or t
  misc_difference 932: note = n is a, c, g, or t
  misc_difference 942..943: note = n is a, c, g, or t
  misc_difference 990..992: note = n is a, c, g, or t
  misc_difference 1085: note = n is a, c, g, or t
  misc_difference 1262: note = n is a, c, g, or t
  misc_difference 1417: note = n is a, c, g, or t
aacgctagcgataggctnaacacatgcaagtcgaggggtaacatgggagtagcttgctgcttctgatgacgaccggcggatgggtgagtaacgcgtatgcaacttgcctcttagtggggaataacccggagaaatccggactaataccgcatacacttagttatccgcatggatgattaaggaaagatttattgctaagagataggcatgcgttccattagttagttggtgaggtaacggctcaccaaggcatcgatggataggggagctgagaggcttatcccccacattgggactgagacacggcccnaactcctacgggaggcagcagtgaggaatattggtcaatggaggaaactctgaaccagccaagtcgcgtgaaggatgactgtcctatggattgtaaacttctttagtaggcgagtaaacgtaggtacgagtacctacctgcaagtagcctaagaataagtatcggctaactccgtgccagcagccgcggtaatacggagnatacgagcgttatccggatttattgggtttaaagggtgcgtaggtggcagattaagtcagtggtgaaaagctgtggctcaaccatagtcttgccgttgaaactngtttgcttgagtacagttgatgtaggcggaatgcgtagtgtagcggtgaaatgcatagatattacgcagaactccgattgcgaaggcagcttacaaaagtgtaactgacactgatgcacgaaagcgtgggtatcaaacaggattagataccctggtagtccacgcngtaaactatgattactcagagtatgcgatataatgtatgctctcaagcgaaagcattaagtaatccacctggggagtacgtcggcaacgatgaaactcaaaggaattgacgggggcccgcacaagcggaggaacatgtggtttaattcgatnatacgcgagnnaccttacctgggattgaaatgtataggacaggggatggaaacattcnnnttctcttcggagacttatatgtaggtgctgcatggttgtcgtcagctcgtgccgtgaggtgtcggcttaagtgccataacgagcgcaaccctnatcgttagttactagcaggtagtgctgaggactctagcgagactgccgtcgtaagacgagaggaaggtggggatgacgtcaaatcagcacggcccttatatccagggcgacacacgtgttacaatggtgaggacaaagggtagctacctggtgacaggatgccaatctccaaacctnatctcagttcggatcgaagtctgcaactcgacttcgtgaagctggattcgctagtaatcgcgcatcagccatggcgcggtgaatacgttcccgggccttgtacacaccgcccgtcaagccatgggagctgggggtacctgaagtacgtgaccgcnaggagcgtccgagggtaagaccggtgac

SEQ ID NO: 2607 - DNA, 1452 bp, unidentified
  source 1..1452: mol_type = unassigned DNA; note = Porphyromonas loveana
gatgaacgctagcgataggcttaacacatgcaagtcgaggggcagcatggtcttagcttgctaagactgatggcgaccggcgcacgggtgcgtaacgcgtatgcaacttgccttacagagggggataacccgttgaaagacggactaacaccgcatatgctcaggggtctgcatgggcctttgaggaaatatttatagctgtaagataggcatgcgtcccattagcttgttggtgaggtaacggctcaccaaggcaacgatgggtaggggaactgagaggtttatcccccacactggtactgagacacggaccagactcctacgggaggcagcagtgaggaatattggtcaatgggcgagagcctgaaccagccaagtcgcgtgaaggatgaaggccctatgggtcgtaaacttcttttatacgggaataacgagccttacgggtagggcgctgaatgtaccgtaggaataagcatcggctaactccgtgccagcagccgcggtaatacggaggatgcgagcgttatccggatttattgggtttaaagggtgcgtaggttgcttggtaagtcagcggtgaaaactgaacgctcaacgttcagcgtgccgttgaaactgtcaggcttgagtgcagtggcggcaggcggaattcgtggtgtagcggtgaaatgcatagatatcacgaggaactccgattgcgaaggcagcttgccatactgtaactgacactgaagcacgaaggcgtgggtatcaaacaggattagataccctggtagtccacgcagtaaacgatgattactaggagtttgcgatataccgtaagctccacagcgaaagcgttaagtaatccacctggggagtacgccggcaacggtgaaactcaaaggaattgacgggggcccgcacaagcggaggaacatgtggtttaattcgatgatacgcgaggaaccttacccgggattgaaatgtagatgacagatggtgaaagccgttcttccttcgggacatctatgtaggtgctgcatggttgtcgtcagctcgtgccgtgaggtgtcggcttaagtgccataacgagcgcaacccacattggtagttactaacaggtcaagctgaggactctaccgagactgccgtcgtaaggcgcgaggaaggtgtggatgacgtcaaatcagcacggcccttacatccggggcgacacacgtgttacaatgggagggacaaagggcagctaccgggcgaccggatgcgaatctcgaaacccttccccagttcggatcggagtctgcaactcgactccgtgaagctggattcgctagtaatcgcgcatcagccatggcgcggtgaatacgttcccgggccttgtacacaccgcccgtcaagccatgggagtcgggggtacctgaaggacgtaaccgcaaggggcgtactagggtaataccggtgactggggct

SEQ ID NO: 2608 - DNA, 1454 bp, Porphyromonas macacae
  source 1..1454: mol_type = unassigned DNA
gatgaacgctagcgataggcttaacacatgcaagtcgaggggcagcatggtcttagcttgctaagattgatggcgaccggcgcacgggtgcgtaacgcgtatgtaacttgcctgatagaaagggataacccggtgaaagtcggactaataccttatggtcttgggttattgcatgatgattcaagtaaagattaattgctatcagataggcatgcgttccattagttggttggtgaggtaacggctcaccaaggctacgatggataggggaactgagaggtttatcccccacactggtactgagacacggaccagactcctacgggaggcagcagtgaggaatattggtcaatgggcgagagcctgaaccagccacgtcgcgtgaaggaagacggttctatggattgtaaacttcttttataggggattaaagttatccacgtgtggatatttgcaagtaccctatgaataagcatcggctaactccgtgccagcagccgcggtaatacggaggatgcgagcgttatccggatttattgggtttaaagggtgcgtaggtggcctgataagtcgggggtgaaaagctgtggctcaaccacagtcttgccttcgaaactgtttggcttgagtatagatgaagtaggcggaatttgtggtgtagcggtgaaatgcatagatatcacgaggaactccgattgcgaaggcagcttactaagttatgactgacactgaagcacgaaagcgtgggtatcaaacaggattagataccctggtagtccacgcagtaaacgatgataactgggcgtatgcgatatacagtatgctcctgagcgaaagcgttaagttatccacctggggagtacgccggcaacggtgaaactcaaaggaattgacgggggcccgcacaagcggaggaacatgtggtttaattcgatgatacgcgaggaaccttacccgggattgaaatttagcggactatgtatgaaagtacatatcctgtcacaaggccgctaagtaggtgctgcatggttgtcgtcagctcgtgccgtgaggtgtcggcttaagtgccataacgagcgcaacccacgttgtcagttactatcgggtaaagccgaggactctgacaagactgccgtcgtaaggcgcgaggaaggtgtggatgacgtcaaatcagcacggcccttacatccggggcgacacacgtgttacaatggtggggacaaagggcagctacttggtgacaagatgcgaatctccaaaccccatcccagttcggatcgtagtctgcaactcgactatgtgaagctggattcgctagtaatcgcgcatcagccatggcgcggtgaatacgttcccgggccttgtacacaccgcccgtcaagccatgggagtcgggagtacctaaagcacgtaaccgcgaggggcgtgtcagggtaataccggtgactggggct

SEQ ID NO: 2609 - DNA, 1460 bp, Pragia fontium
  source 1..1460: mol_type = unassigned DNA
acgctggcggcaggcctaacacatgcaagtcgagcggcagcggaaagtagcttgctactttgccggcgagcggcggacgggtgagtaatgtctgggaaactgcctgatggagggggataactactggaaacggtggctaataccgcgtaacgtcgcaagaccaaagagggggaccttcgggcctctcgccatcagatgtgcccagatgggattagctagtaggtggggtaatggctcacctaggcgacgatccctagctggtctgagaggatgaccagccacactgggactgagacacggcccagactcctacgggaggcagcagtggggaatattgcacaatgggggaaaccctgatgcagccatgccgcgtgtgtgaagaaggccttagggttgtaaagcactttcagcggggaggaagggtaggtacttaatacgtgcttacattgacgttacccgcagaagaagcaccggctaactccgtgccagcagccgcggtaatacggagggtgcaagcgttaatcggaattactgggcgtaaagcgcacgcaggcggtttgttaagttagatgtgaaatccccgggcttaacctgggaactgcatttaaaactggcaagctagagtcttgtagaggggggtagaattccatgtgtagcggtgaaatgcgtagagatgtggaagaataccggtggcgaaggcggccccctggacaaagactgacgctcaggtgcgaaagcgtggggagcaaacaggattagataccctggtagtccacgctgtaaacgatgtcgacttggaggttgttcccttgaggagtggcttccggagctaacgcgttaagtcgaccgcctggggagtacggccgcaaggttaaaactcaaatgaattgacgggggcccgcacaagcggtggagcatgtggtttaattcgatgcaacgcgaagaaccttacctactcttgacatccagagaacttagcagagatgctttggtgccttcgggaactctgagacaggtgctgcatggctgtcgtcagctcgtgttgtgaaatgttgggttaagtcccgcaacgagcgcaacccttatcctttgttgccagcaagtcatgttgggaactcaaaggagactgccggtgataaaccggaggaaggtggggatgacgtcaagtcatcatggcccttacgagtagggctacacacgtgctacaatggcgtatacaaagagaagctaactcgcgagagcatgcggacctcataaagtacgtcgtagtccggatcggagtctgcaactcgactccgtgaagtcggaatcgctagtaatcgtggatcagaatgccacggtgaatacgttcccgggccttgtacacaccgcccgtcacaccatgggagtgggttgcaaaagaagtaggtagcttaaccttcgggagggcgcttaccactttgtgattcatgactggggtg

SEQ ID NO: 2610 - DNA, 1452 bp, Prevotella bryantii
  source 1..1452: mol_type = unassigned DNA
gatgaacgctagctacaggcttaacacatgcaagtcgaggggtaacatgaagaaagcttgctttctttgatgacgaccggcgcacgggtgagtatcgcgtatccaacctgcccataagtagggaatagccttgcgaaagtaagattaatgccctatggtttccgtcgaagacatctgagatggaataaagatttatcgcttatggatggggatgcgtctgattaggtagtaggcggggtaacggcccacctagccgacgatcagtaggggttctgagaggaaggtcccccacattggaactgagacacggtccaaactcctacgggaggcagcagtgaggaatattggtcaatggacggaagtctgaaccagccaagtagcgtgcaggatgacggccctatgggttgtaaactgcttttttaggggaataaagttagccacgtgtggttatttgcatgtaccctacgaataaggaccggctaattccgtgccagcagccgcggtaatacggaaggtccgggcgttatccggatttattgggtttaaagggagcgcaggccgtttggtaagcgtgttgtgaaatgtccgggctcaacctgggcactgcagcgcgaactgtcagacttgagtgcacaggaagcgggcggaattcgtggtgtagcggtgaaatgcttagatatcacgaagaactccaattgcgaaggcagctcgctgtagtgttactgacgctaaagctcgaaagtgcgggtatcgaacaggattagataccctggtagtccgcacggtaaacgatggatgcccgctgtttgcccttcggggtgagtggctaagcgaaagcgttaagcatcccacctggggagtacgccggcaacggtgaaactcaaaggaattgacgggggcccgcacaagcggaggaacatgtggtttaattcgatgatacgcgaggaaccttacccgggcttgaattgcagatgacggatctagagatagtgacttccttcgggacatctgtgaaggtgctgcatggttgtcgtcagctcgtgccgtgaggtgtcggcttaagtgccataacgagcgcaacccttctcttcagttgccatcaggtagagctgggcactctggagacactgccaccgtaaggtgtgaggaaggtggggatgacgtcaaatcagcacggcccttacgtccggggctacacacgtgttacaatggccggtacagaaagtcggatgcccgtaaggtcattctaatcaagaaagccggtcccagttcggactgaggtctgcaacccgacctcacgaagctggattcgctagtaatcgcgcatcagccatggcgcggtgaatacgttcccgggccttgtacacaccgcccgtcaagccatgaaagccgggggtgcctgaagtccgtgaccgcaagggtcggcctagggcaaaactggtaattggggct

SEQ ID NO: 2611 - DNA, 1455 bp, unidentified
  source 1..1455: mol_type = unassigned DNA; note = Prevotella colorans
gatgaacgctagctacaggcttaacacatgcaagtcgaggggaaacggcatcaagcgcttgcgcctgatggacgtcgaccggcgcacgggtgagtaacgcgtatccaacctgccccacactaagggataacccgcagaaatgtggactaataccttatattttccaccaagggcatcgtcgatggaacaaagatttatcggtatgggatggggatgcgtccgattaggttgttggcggggtaacggcccaccaagccttcgatcggtaggggttctgagaggaaggtcccccacataggaactgagacacggtcctaactcctacgggaggcagcagtgaggaatattggtcaatgggcgtgagcctgaaccagccaagtagcgtgcaggaagacggccctatgggttgtaaactgcttttatgcggggataaaggagtccacgtgtggatttttgcaggtaccgcatgaataaggaccggctaattccgtgccagcagccgcggtaatacggaaggtccgggcgttatccggatttattgggtttaaagggagcgtaggccgcgttttaagcgtgttgtgaaatgtaggcgcccaacgtctgcatcgcagcgcgaactgggacgcttgagtacgcgcaacgttggcggaattcgtcgtgtagcggtgaaatgcttagatatgacgaggaactccgattgcgaaggcagctgacgggagcggcactgacgcttaagctcgaaggtgcgggtatcaaacaggattagataccctggtagtccgcacagtaaacgatggatgcccgctgtgtgccaattatggtacgcggctaagcgaaagcgttaagcatcccacctggggagtacgccggcaacggtgaaactcaaaggaattgacgggggcccgcacaagcggaggaacatgtggtttaattcgatgatacgcgaggaaccttacccgggcttgaactgccggtgcacgatccagagatggtgaggcccttcggggcgccggtggaggtgctgcatggttgtcgtcagctcgtgccgtgaggtgtcggcttaagtgccataacgagcgcaacccctctccgtagttgccatcaggtaatgctgggcactctgcggatactgccaccgcaaggtgcgaggaaggtggggatgacgtcaaatcagcacggcccttacgtccggggctacacacgtgttacaatggggggcacagcgagttggccgcgcgcaagttcggtccaatcaagaaatcccccctcagttcggactggggtctgcaacccgaccccacgaagctggattcgctagtaatcgcgcatcagccatggcgcggtgaatacgttcccgggccttgtacacaccgcccgtcaagccatgaaagctgggggtgcctgaagtccgtaaccgtcaaggagcggcctagggcaaaaccggtgattggggct

SEQ ID NO: 2612 - DNA, 1454 bp, Prevotella maculosa
  source 1..1454: mol_type = unassigned DNA
gatgaacgctagctacaggcttaacacatgcaagtcgaggggaaacgacattgaagcttgcttcgatggtcgtcgaccggcgcacgggtgagtaacgcgtatccaacctgcctctgaccaagggataacccgtcgaaagtcggactaataccttatgcagtcgtcggaagtcatctgatgacgacgaaagatttcatcggtgagagatggggatgcgtctgattagcttgttggcggggtaacggcccaccaaggcgacgatcagtaggggttctgagaggaaggtcccccacattggaactgagacacggtccaaactcctacgggaggcagcagtgaggaatattggtcaatgggcgcgagcctgaaccagccaagtagcgtgcaggatgacggccctatgggttgtaaactgcttttatgcggggataaagtgagggacgtgtccttcattgcaggtaccgcatgaataaggaccggctaattccgtgccagcagccgcggtaatacggaaggtccgggcgttatccggatttattgggtttaaagggagcgtaggccgtggattaagcgtgttgtgaaatgtagacgctcaacgtctgacttgcagcgcgaactggtccacttgagtgtgcacaacgcaggcggaattcgtcgtgtagcggtgaaatgcttagatatgacgaagaaccccgattgcgaaggcagcttgcgggagcacgactgacgctgaagctcgaaagtgcgggtatcgaacaggattagataccctggtagtccgcacggtaaacgatggatgcccgttgtcaggctgtatcagtctggtgaccaagcgaaagcattaagcatcccacctggggagtacgccggcaacggtgaaactcaaaggaattgacgggggcccgcacaagcggaggaacatgtggtttaattcgatgatacgcgaggaaccttacccgggcttgaattgcagacgtacgattcagagatgaagaggcccttcggggcgtctgtgaaggtgctgcatggttgtcgtcagctcgtgccgtgaggtgtcggcttaagtgccataacgagcgcaacccctatcctcggttgccatcgggtaatgccgggcactccgtggagactgccaccgtaaggtgtgaggaaggtggggacgacgtcaaatcagcacggcccttacgtccggggctacacacgtgttacaatggccggtacagcgagtcggccgcatgcaaatgcggtccaatcctgaaagccggtcccagttcggaccggggtctgcaacccgaccccgcgaagccggattcgctagtaatcgcgcatcagccatggcgcggtgaatacgttcccgggccttgtacacaccgcccgtcaagccatgaaagccgggggtgcctgaagtccgttaccgcgagggtcggcctaaggcaaaaccggtgattggggct

SEQ ID NO: 2613 - DNA, 1452 bp, Prevotella multisaccharivorax
  source 1..1452: mol_type = unassigned DNA
gatgaacgctagctacaggcctaacacatgcaagtcgaggggaaacgaagcgggagcttgcttctgctgtcgtcgaccggcgcacgggtgagtaacgcgtatccaacctggcctgaggtaagggataatccgcagaaatgtggtctaataccttatgtgctcctatgaggccatctgaagaggagcaaagatttatcgccttaggatggggatgcgtctgattagatagttggcggggcaacggcccaccaagtcatcgatcagtaggggttctgagaggaaagtcccccacattggaactgagacacggtccagactcctacgggaggcagcagtgaggaatattggtcaatgggcgagagcctgaaccagccaagtagcgtgcaggatgacggccctatgggttgtaaactgcttttatgcgggtataaaggagcatacgtgtatgtttttgcagttaccgcatgaataaggaccggctaattccgtgccagcagccgcggtaatacggaaggttctggtgttatccggatttattgggtttaaagggagcgcaggctgtcagataagcgtgttgtgaaatgcggttgctcaacatccgcactgcagcgcgaactgtttgacttgagtacgcacgacgttggtggaatttgccgtgtagcggtgaaatgcttagatatggcgaagaactccgattgcgaaggcagctgacgggagcgctactgacgctcatgctcgaaagtgcgggtatcgaacaggattagataccctggtagtccgcacggtaaacgctggatgcccgctatatgccccttagggtatgtggccaagtgaaaacgttaagcatcccacctggggagtacgccggcaacggtgaaactcaaaggaattgacgggggcccgcacaagcggaggaacatgtggtttaattcgatgatacgcgaggaaccttacccgggcttgaattgctgaggaaggcttcagagatggagctgcccttcggggcttcagtgaaggtgctgcatggttgtcgtcagctcgtgccgtgaggtgtcggcttaagtgccataacgagcgcaacccttttcttcagttgccatcaggtagtgctgggccctctggagatactgccgccgtaaggtgtgaggaaggtggggatgacgtcaaatcagcacggcccttacgtccggggctacacacgtgttacaatgggtggtacagcgagcagggttaccgcaaggtatcccgaatcattaaatccgccctcagttcggactggggtctgcaacccgaccccacgaagctggattcgctagtaatcgcgcatcagccatggcgcggtgaatacgttcccgggccttgtacacaccgcccgtcaagccatgaaagccgggggtgcctgaagtccgtgaccgcaaggatcggcctagggcaaaactggtaattggggct

SEQ ID NO: 2614 - DNA, 1454 bp, Prevotella oris
  source 1..1454: mol_type = unassigned DNA
gatgaacgctggctacaggcttaacacatgcaagtcgaggggaaacgacggggaagcttgcttccccgggcgtcgaccggcgcacgggtgagtaacgcgtatccaacctgcctctgactgagggataacccgtcgaaagtcggcctaatacctcatggcatcgtctgcgggcatccaacgacgattaaagatttcatcggtcagggatggggatgcgtctgattagcttgttggcggggtaacggcccaccaaggcgacgatcagtaggggttctgagaggaaggtcccccacattggaactgagacacggtccaaactcctacgggaggcagcagtgaggaatattggtcaatgggcgagagcctgaaccagccaagtagcgtgcaggatgacggccctatgggttgtaaactgcttttatgcggggataaagtgagggacgtgtccttcattgcaggtaccgcatgaataaggaccggctaattccgtgccagcagccgcggtaatacggaaggtccgggcgttatccggatttattgggtttaaagggagcgtaggccgtggattaagcgtgttgtgaaatgcaggtgctcaacgtctgcactgcagcgcgaactggtccacttgagtgtgcgcaacgcaggcggaattcgtcgtgtagcggtgaaatgcttagatatgacgaagaactccgattgcgaaggcagcttgcgggagcacaactgacgctgaagctcgaaagtgcgggtatcgaacaggattagataccctggtagtccgcacggtaaacgatggatgcccgttgtcaggctgtttcagcctggtgaccaagcgaaagcattaagcatcccacctggggagtacgccggcaacggtgaaactcaaaggaattgacgggggcccgcacaagcggaggaacatgtggtttaattcgatgatacgcgaggaaccttacccgggcttgaattgcagacgaacgattcagagatgatgaggcccttcggggcgtctgtgaaggtgctgcatggttgtcgtcagctcgtgccgtgaggtgtcggcttaagtgccataacgagcgcaacccctttcttcagttgccatcaggtgatgctgggcactctggagacactgccaccgcaaggtgtgaggaaggtggggatgacgtcaaatcagcacggcccttacgtccggggctacacacgtgttacaatggccggtacagagagttgattttgtgcaaacacgatctaatccttaaatccggtcccagttcggactggggtctgcaacccgaccccacgaagctggattcgctagtaatcgcgcatcagccatggcgcggtgaatacgttcccgggccttgtacacaccgcccgtcaagccatgaaagccgggggtgcctgaagtctgtgaccgcaaggaacggcctagggcaaaaccggtgattggggct

SEQ ID NO: 2615 - DNA, 1452 bp, Prevotella paludivivens
  source 1..1452: mol_type = unassigned DNA
gatgaacgctagctacaggcttaacacatgcaagtcgaggggtaacgagagggaagcttgctttccttgtcgacgaccggcgcacgggtgagtaacgcgtatccaacctgcccacaactagagaataaccttgcgaaagtaagactaatgctctataatttccttagatggcatctgacgaggaataaagatttatcggttatggatggggatgcgtctgattagcttgttggcggggtaacggcccaccaaggcaacgatcagtaggggttctgagaggaaggtcccccacattggaactgagacacggtccaaactcctacgggaggcagcagtgaggaatattggtcaatgggcgaaagcctgaaccagccaagtagcgtgcaggatgacggccctatgggttgtaaactgcttttatacagggataaagttagccacgtgtggctatttgcaggtactgtatgaataaggaccggctaattccgtgccagcagccgcggtaatacggaaggtccaggcgttatccggatttattgggtttaaagggagcgtaggccgtctgttaagcgtgttgtgaaatgtagatgctcaacatctgaattgcagcgcgaactggcagacttgagtgtgcgcaacgtaggcggaattcgtggtgtagcggtgaaatgcttagatatcacgaagaactccaattgcgaaggcagcttacgggagcacaactgacgctgaagctcgaaagtgcgggtatcgaacaggattagataccctggtagtccgcacggtaaacgatggatgcccgctgttgacccacctgggccagcggccaagcgaaagcattaagcatcccacctggggagtacgccggcaacggtgaaactcaaaggaattgacgggggcccgcacaagcggaggaacatgtggtttaattcgatgatacgcgaggaaccttacccgggcttgaattgcagaggaatttaccagagacggtaaagcccttcggggtctctgtgaaggtgctgcatggttgtcgtcagctcgtgccgtgaggtgtcggcttaagtgccataacgagcgcaacccctttctttagttgccatcaggtgatgctgggcactctggagatactgccaccgtaaggtgtgaggaaggtggggatgacgtcaaatcagcacggcccttacgtccggggctacacacgtgttacaatggccggtacagagagacggttgcttgcaaaagtaatccaatccttaaagccggtcccagttcggactggggtctgcaacccgaccccacgaagctggattcgctagtaatcgcgcatcagccatggcgcggtgaatacgttcccgggccttgtacacaccgcccgtcaagccatgaaagccgggggtgcctgaagtccgtgaccgcaaggaacggcctagggcaaaactggtaattggggct

SEQ ID NO: 2616 - DNA, 1454 bp, Prevotella salivae
  source 1..1454: mol_type = unassigned DNA
gatgaacgctagctacaggcttaacacatgcaagtcgaggggaaacgacattgaagcttgcttcgatgggcgtcgaccggcgcacgggtgagtaacgcgtatccaacctgcctctgactaagggataacccggcgaaagtcggactaataccttatgaggttttcagcagacatctaacgaaaacgaaagatttatcggtcagtgatggggatgcgtctgattagcttgttggcggggtaacggcccaccaaggcaacgatcagtaggggttctgagaggaaggtcccccacattggaactgagacacggtccaaactcctacgggaggcagcagtgaggaatattggtcaatgggcgagagcctgaaccagccaagtagcgtgcaggatgacggccctatgggttgtaaactgcttttatgtggggataaagtgagctacgtgtagtttattgcaggtaccacatgaataaggaccggctaattccgtgccagcagccgcggtaatacggaaggtccaggcgttatccggatttattgggtttaaagggagcgtaggccgtggattaagcgtgttgtgaaatgtagacgctcaacgtctgaattgcagcgcgaactggttcacttgagtatgcacaacgtaggcggaattcgtcgtgtagcggtgaaatgcttagatatgacgaagaactccgattgcgaaggcagcttacgggagcacaactgacgctgaagctcgaaggtgcgggtatcaaacaggattagataccctggtagtccgcacagtaaacgatggatgcccgttgttagttcacttatgaattagcgaccaagcgaaagcattaagcatcccacctggggagtacgccggcaacggtgaaactcaaaggaattgacgggggcccgcacaagcggaggaacatgtggtttaattcgatgatacgcgaggaaccttacccgggcttgaattgcagacgaacgattcagagatgatgaggcccttcggggcgtctgtgaaggtgctgcatggttgtcgtcagctcgtgccgtgaggtgtcggcttaagtgccataacgagcgcaaccccttttttcagttgccatcaggtgatgctgggcactctggagatactgccaccgtaaggtgtgaggaaggtggggatgacgtcaaatcagcacggcccttacgtccggggctacacacgtgttacaatggccggtacagagcgttggtcgtgtgcaaatacgatctaatccttaaagccggtcccagttcggactggggtctgcaacccgaccccacgaagctggattcgctagtaatcgcgcatcagccatggcgcggtgaatacgttcccgggccttgtacacaccgcccgtcaagccatgaaagccgggggtgcctgaagtctgtgaccgcaaggaacggcctagggcaaaactggtgattggggct

SEQ ID NO: 2617 - DNA, 1407 bp, Prochlorococcus marinus
  source 1..1407: mol_type = unassigned DNA
gatgaacgctggcggcgtgcttaacacatgcaagtcgaacgaacattcgggttagtggcggacgggtgagtaacgcgtgagaatctgccctcaggagggggataacggttggaaacgaccgctaataccccatatgccgataggtgaaatgaatttcgcctgaggatgagctcgcgtctgattagcttgttggtgaggtaatggctcaccaaggcttcgatcagtagctggtctgagaggatgatcagccacactgggactgagacacggcccagactcctacgggaggcagcagtggggaattttccgcaatgggcgaaagcctgacggagcaacgccgcgtgagggacgaaggcctctgggctgtaaacctcttttctcaaggaagaagatatgacggtacttgaggaataagccacggctaattccgtgccagcagccgcggtaatacgggagtggcaagcgttatccggaattattgggcgtaaagcgtccgcaggcggcctttcaagtctgctgttaaagcgtggagcttaactccattatggcagtggaaactgatcggcttgagtatggtaggggcagagggaattcccggtgtagcggtgaaatgcgtagatatcgggaagaacaccagtggcgaaggcgctctgctgggccattactgacgctcatggacgaaagccaggggagcgaaagggattagatacccctgtagtcctggccgtaaacgatgaacactaggtgtcgggggaatcgaccccttcggtgtcgtagctaacgcgttaagtgttccgcctggggagtacgcacgcaagtgtgaaactcaaaggaattgacgggggcccgcacaagcggtggagtatgtggtttaattcgatgcaacgcgaagaaccttaccagggtttgacatcctgagaacctcttagaaattagagggtgccttcgggaattcagtgacaggtggtgcatggctgtcgtcagctcgtgtcgtgagatgttgggttaagtcccgcaacgagcgcaacccacgtttttagttgccagcatttagttgggcactctagaaagaccgccggtgataaaccggaggaaggtgtggatgacgtcaagtcatcatgccccttacaccctgggctacacacgtactacaatgctacggacaaagggcagcaaactcgcgagagctagcaaatcccataaaccgtggctcagttcagatcgtaggctgcaactcgcctacgtgaagtaggaatcgctagtaatcgcaggtcagcatactgcggtgaatacgttcccgggccttgtacacaccgcccgtcacaccatggaagttggccatgcccgaagtcgttactccaacccttgtggaggaggacgccgaaggtggggctaatgactggggtg

SEQ ID NO: 2618 - DNA, 1410 bp, unidentified
  source 1..1410: mol_type = unassigned DNA; note = Prochlorothrix hollandica
gatgaacgctggcggcgtgcttaacacatgcaagtcgaacgaagtcttcggacttagtggcggacgggtgagtaacgcgtgaggacctaccctaaggacggggacaacagttggaaacgactgctaatacccgatgtgccgagaggtgaaagatttatcgcctaaggatggactcgcgtcagattagctagttggtgtggtaacggcataccaaggcaacgatctgtagctggtctgagaggatgatcagccacactgggactgagacacggcccagactcctacgggaggcagcagtggggaattttccgcaatgggcgaaagcctgacggagcaacgccgcgtgtgggaggaaggttttaggactgtaaaccacttttctcagggaagaagatctgacggtacctgaggaatcagcatcggctaattccgtgccagcagccgcggtaatacgggagatgcaagcgttatccggaattattgggcgtaaagcgtccgcaggcggtcttataagtctgtcgttaaagcacacagcttaactgtgggagagcgatggaaactgtgagactagagtgcggtaggggtagggggaattcccggtgtagcggtgaaatgcgtagatatcgggaagaacaccagcagcgaaagcgccctactgggccgcaactgacgctcatggacgaaagctaggggagcgaaagggattagatacccctgtagtcctagccgtaaacgatggacactaggtgttgtctgtatcgacccggacagtgccgtagctaacgcgttaagtgtcccgcctggggagtacgcacgcaagtgtgaaactcaaaggaattgacgggggcccgcacaagcggtggagtatgtggtttaattcgatgcaacgcgaagaaccttaccagggcttgacatcccgcgaatctctgtgaaagtggagagtgccttcgggagcgcggagacaggtggtgcatggctgtcgtcagctcgtgtcgtgagatgttgggttaagtcccgcaacgagcgcaaccctcgttcttagttgccatcattaagttgggcactctagggagactgccggtgacaaaccggaggaaggtggggacgacgtcaagtcatcatgccccttacgtcctgggctacacacgtactacaatgctagggacaaagagcagccaactcgcgagagtgagctaatctcataaaccctggctcagttcggattgcaggctgcaactcgcctgcatgaagtaggaatcgctagtaatcgcaggtcagaatactgcggtgaatacgttcccgggccttgtacacaccgcccgtcacaccatggaagttggccacgcccgaagtcgttaccctaaccgttcgcggaggggggcgccgaaggcagggctgatgactggggtg

SEQ ID NO: 2619 - DNA, 1413 bp, Prolinoborus fasciculus
  source 1..1413: mol_type = unassigned DNA
cttgctactttacctagcggcggacgggtgagtaatgcttaggaatctgcctattagtgggggacaacatctcgaaagggatgctaataccgcatacgtcctacgggagaaagcaggggaccttcgggccttgcgctaatagatgagcctaagtcggattagctagttggtggggtaaaggcctaccaaggcgacgatctgtagcgggtctgagaggatgatccgccacactgggactgagacacggcccagactcctacgggaggcagcagtggggaatattggacaatggggggaaccctgatccagccatgccgcgtgtgtgaagaaggccttttggttgtaaagcactttaagcgaggaggaggctaccgagattaatactcttggatagtggacgttactcgcagaataagcaccggctaactctgtgccagcagccgcggtaatacagagggtgcaagcgttaatcggatttactgggcgtaaagcgcgcgtaggtggccaattaagtcaaatgtgaaatccccgagcttaacttgggaattgcattcgatactggttggctagagtatgggagaggatggtagaattccaggtgtagcggtgaaatgcgtagagatctggaggaataccgatggcgaaggcagccatctggcctaatactgacactgaggtgcgaaagcatggggagcaaacaggattagataccctggtagtccatgccgtaaacgatgtctactagccgttggggcctttgaggctttagtggcgcagctaacgcgataagtagaccgcctggggagtacggtcgcaagactaaaactcaaatgaattgacgggggcccgcacaagcggtggagcatgtggtttaattcgatgcaacgcgaagaaccttacctggtcttgacatagtaagaactttccagagatggattggtgccttcgggaacttacatacaggtgctgcatggctgtcgtcagctcgtgtcgtgagatgttgggttaagtcccgcaacgagcgcaacccttttccttatttgccagcgggttaagccgggaactttaaggatactgccagtgacaaactggaggaaggcggggacgacgtcaagtcatcatggcccttacgaccagggctacacacgtgctacaatggtcggtacaaagggttgctacctcgcgagaggatgctaatctcaaaaagccgatcgtagtccggattggagtctgcaactcgactccatgaagtcggaatcgctagtaatcgcggatcagaatgccgcggtgaatacgttcccgggccttgtacacaccgcccgtcacaccatgggagtttgttgcaccagaagtaggtagtctaaccgtaaggaggacgcttaccacggtgtggcagatgactggggtgaagtc

SEQ ID NO: 2620 - DNA, 1444 bp, unidentified
  source 1..1444: mol_type = unassigned DNA; note = Prolixibacter denitrificans
gatgaacgctagcgggaggcttaacacatgcaagtcgaacggtaacaggtccttcgggacgctgacgagtggcgcacgggtgagtaacgcgtatgcaacctgccctgtacagggggatagcccggagaaatccggattaataccccatggtttctgtgattcgcatgttttacagaataaagtttcggcggtacaggatgggcatgcgtggcattagcttgttggtagggtaacggcttaccaaggcgacgatgcctaggggttctgagaggatgatcccccacactgggactgagacacggcccagactcctacgggaggcagcagtgaggaatattggtcaatgggcgagagcctgaaccagccatcccgcgtgcaggatgacggccctacgggttgtaaactgcttttctgcaagaagaatggtcactacgtgtagtgatttgacggtattgcaggaataagcatcggctaactccgtgccagcagccgcggtaatacggaggatgcaagcgttatccggattcattgggtttaaagggtgcgtaggcggctatataagtcagtggtgaaatgctgcagctcaactgtagaactgccattgaaactgtatagcttgagtgcgcctgaggtaggcggaatgagtagtgtagcggtgaaatgcttagatattactcagaacaccgattgcgaaggcagcttactaaagcgtaactgacgctgatgcacgaaagcgtggggagcgaacaggattagataccctggtagtccacgccgtaaacgatgataactcgctgttggcgatacacagtcagcggcttagcgaaagcattaagttatccacctggggagtacgatcgcaaggttgaaactcaaaggaattgacgggggcccgcacaagcggaggaacatgtggtttaattcgatgatacgcgaggaaccttacctgggcttaaatgtagaatgaccgttgccgaaaggtgacttcccttcggggcgttttacaaggtgctgcatggttgtcgtcagctcgtgccgtgaggtgtcgggttaagtcccataacgagcgcaacccttatcgtcagttgctagcaggtcaagctgaggactctggcgagactgccaccgtaaggtgagaggaaggtggggatgacgtcaaatcagcacggcccttatgtccagggctacacacgtgttacaatggtcggtacaaagggcagctacctggtaacaggatgctaatcccaaaagccggtctcagttcggattggagtctgcaacccgactccatgaagctggattcgctagtaatcgcgcatcagccatggcgcggtgaatacgttcccgggccttgtacacaccgcccgtcaaaccatggaagttgggggtacctgaagtctgcaaccgcaaggagcggcctagggtaaaaccaatgactggggtt

SEQ ID NO: 2621 - DNA, 1417 bp, Propionispira arboris
  source 1..1417: mol_type = unassigned DNA
tcgaacgggcgaacgggtgagtaacgcgtagacaacctaccttttagatggggacaacatcgcgaaagcggtgctaataccgaatgttgtgtctttcccacatgggaaagctactaaagatggcctctatttataagctgtcactaaaagatgggtctgcgtctgattagctagttggcgggggtaatgcccaccaaggcgacgatcagtagccggtcagagaggatgaacggccacattgggactgagacacggcccaaactcctacgggaggcagcagtggggaatcttccgcaatggacgaaagtctgacggagcaacgccgcgtgagtgaagaaggttttcggatcgtaaagctctgttgtttgagacgaacgtgcagtatacgaataatgtgctgtaatgacggtatcaaactagaaagccacggctaactacgtgccagcagccgcggtaatacgtaggtggcaagcgttgtccggaattattgggcgtaaagggagcgcaggtgggaatgtaagtcagtcttaaaagtgcggggctcaaccccgtgatgggacagaaactacatttcttgagtgcaggagaggaaagtggaattcctagtgtagcggtgaaatgcgtagatattaggaggaacaccagtggcgaaggcgactttctggactgtaactgacactgaggctcgaaagctaggggagcgaacgggattagataccccggtagtcctagccgtaaacgatgaatactaggtgtagggggtatcgacccctcctgtgccggagctaacgcaataagtattccgcctggggagtacggtcgcaaggttgaaactcaaaggaattgacggggacccgcacaagcggtggagtatgtggtttaattcgacgcaacgcgaagaaccttaccagggcttgacatcgagtgaaaggctaagagattagtcctctccttcgggaagacacgaaaacaggtggtgcatggctgtcgtcagctcgtgtcgtgagatgttgggttaagtcccgcaacgagcgcaacccctatcctatgttgccagcacgtaatggtgggaactcatgggagactgccgcggataacgcggaggaaggcggggatgacgtcaagtcatcatgccccttatgtcctgggctacacacgtactacaatgggataaacagagggaagcgagaccgcgaggtggagcaaacccataaattatctctcagttcggattgcaggctgcaactcgcctgcatgaagtcggaatcgctagtaatcgcaggtcagcatactgcggtgaatacgttcccgggtcttgtacacaccgcccgtcacaccacgaaagtcattcacacccgaagccggtggggtaaccgcaaggagccagccgtctaaggtgggggcgatgattggggtg

SEQ ID NO: 2622 - DNA, 1599 bp, Propionispora hippei
  source 1..1599: mol_type = unassigned DNA
gacgaacgctggcggcgtgcctaacacatgcaagtcgaacggttctggtgtttaacaccaaatgctacatgctaaccgggggatcacaaacaagccgcgtcttatgaacgagcgaagcgagttcattacgcaacttaaaagtgactaaccggaaaagtaagagcgattggtgttgaacgccaggtagtggcgaacgggtgagtaacgcgtaaacaacctgcctcatagatggggacaacaccgcgaaagtggtgctaataccgaatgttttaactttgctgcatggcagagttaataaaggtggcctctaaattatgctaccgttatgagaggggtttgcgtctgattagctagttggcggggtaatggcccaccaaggcgacgatcagtagccggtctgagaggatgaacggccacactgggactgagacacggcccagactcctacgggaggcagcagtggggaatcttccgcaatggacgaaagtctgacggagcaacgccgcgtgagtgaagaaggttttcggatcgtaaagctctgtcttttgggacgaatgtgctgtaggtgaataatctgtagcaatgacggtactaaaggaggaagccccggctaactacgtgccagcagccgcggtaatacgtaggtggcgagcgttgtccggaattattgggcgtaaagggcgcgtaggcggatctgtaagtctgacttaaaagtgcagggctcaaccctgtgaggggtcagaaactatagatcttgagtgcaggagaggaaagtggaattcccagtgtagcggtgaaatgcgtagatattgggaggaacaccagtggcgaaggcgactttctggactgtgtctgacgctgaggcgcgaaagccaggggagtgaacgggattagataccccggtaatcctggccgtaaacgatgggtactaggtgtaggaggtatcgaccccttctgtgccggagttaacgcaataagtaccccgcctggggagtacggccgcaaggttgaaactcaaaggaattgacgggggcccgcacaagcggtggagtatgtggtttaattcgacgcaacgcgaagaaccttaccagggcttgacattgagtgaaatgttaagagattagcacctctccttcgggagacacgaaaacaggtggtgcatggctgtcgtcagctcgtgtcgtgagatgttgggttaagtcccgcaacgagcgcaacccctgtcctatgttgccagcacgtaaaggtgggaactcatgggagactgccgcagagaatgcggaggaaggcggggatgacgtcaagtcatcatgccccttatgtcctgggctacacacgtactacaatgggcttaacagagggaagcgaagccgcgaggcagagcgaaccccgataaataagctctcagttcggatcgcaggctgcaactcgcctgcgtgaagtcggaatcgctagtaatcgcagatcagcatgctgcggtgaatacgttcccgggccttgtacacaccgcccgtcacaccacgagagttggaaacacccgaagccggtggggtaaccgcaaggagccagccgtcgaaggtggggccgatgattggggtg

SEQ ID NO: 2623 - DNA, 1479 bp, Propionispora vibrioides
  source 1..1479: mol_type = unassigned DNA
gacgaacgctggcggcgtgcctaacacatgcaagtcgaacggaggttttcagcaatggagatcttagtggcgaacgggtgagtaacgcgtaaacaacctgcctcatagatggggacaacaccgcgaaagtggtgctaataccgaatgttttaactaagccgcatggcagagttaataaaggtggcctctaaattatgctaccgttatgagaggggtttgcgtctgattagctagttggcggggtaatggcccaccaaggcgacgatcagtagccggtctgagaggatgaacggccacactgggactgagacacggcccagactcctacgggaggcagcagtggggaatcttccgcaatggacgaaagtctgacggagcaacgccgcgtgagtgaagaaggttttcggatcgtaaagctctgtcttttgggacgaatgtagactgtgtaaataatgcagtttaatgacggtactaaaggaggaagccacggctaactacgtgccagcagccgcggtaatacgtaggtggcgagcgttgtccggaattattgggcgtaaagggcgcgtaggcggatttgtaagtctgacttaaaagtgcagggctcaaccctgtgaggggtcagaaactatggatcttgagtgcaggagaggaaagtggaattcccagtgtagcggtgaaatgcgtagatattgggaggaacaccagtggcgaaggcgactttctggactgtgtctgacgctgaggcgcgaaagccaggggagtgaacgggattagataccccggtaatcctggccgtaaacgatgggtactaggtgtaggaggtatcgaccccttctgtgccggagttaacgcaataagtaccccgcctggggagtacggccgcaaggttgaaactcaaaggaattgacgggggcccgcacaagcggtggagtatgtggtttaattcgacgcaacgcgaagaaccttaccagggcttgacattgagtgaaatgttaagagattagcacctctccttcgggagacatgaaacaggtggtgcatggctgtcgtcagctcgtgtcgtgagatgttgggttaagtcccgcaacgagcgcaacccctgtcctatgttgccagcacgtaaaggtgggaactcatgggagactgccgcagagaatgcggaggaaggcggggatgacgtcaagtcatcatgccccttatgtcctgggctacacacgtactacaatgggcttaaacagagggaagcgaagccgcgaggcagagcgaaccccgataaataagctctcagttcggatcgcaggctgcaactcgcctgcgtgaagtcggaatcgctagtaatcgcagatcagcatgctgcggtgaatacgttcccgggccttgtacacaccgcccgtcacaccacgagagttggaaacacccgaagccggtggggtaaccgcaaggagccagccgtcgaaggtggggccgatgattggggtg

SEQ ID NO: 2624 - DNA, 1462 bp, Propionivibrio dicarboxylicus
  source 1..1462: mol_type = unassigned DNA
attgaacgctggcggcatgccttacacatgcaagtcgaacggcagcacgggtgcttgcacctggtggcgagtggcgaacgggtgagtaatgcatcggaacgtacccggaagtgggggataacgtagcgaaagttacgctaataccgcatattctgtgagcaggaaagcgggggatcttcggacctcgtgctttcggagcggccgatgtcggattagctagttggtgaggtaaaggctcaccaaggcgacgatccgtagcgggtctgagaggatgatccgccacactgggactgagacacggcccagactcctacgggaggcagcagtggggaattttggacaatgggggcaaccctgatccagccatgccgcgtgagtgaagaaggccttcgggttgtaaagctcttttgtcagggaagaaatggtctgggctaataccctgggcagatgacggtacctgaagaataagcaccggctaactacgtgccagcagccgcggtaatacgtagggtgcgagcgttaatcggaattactgggcgtaaagcgtgcgcaggcggttttgtaagtcagatgtgaaatccccgggctcaacctgggaactgcatttgagactgcaaggctagagtgtagcagaggggggtagaattccacgtgtagcagtgaaatgcgtagagatgtggaggaataccgatggcgaaggcagccccctgggctactactgacgctcatgcacgaaagcgtggggagcaaacaggattagataccctggtagtccacgccctaaacgatgtcaactggatgttggaagggttaaaccttttagtgtcgtagctaacgcgtgaagttgaccgcctggggagtacggccgcaaggctaaaactcaaaggaattgacggggacccgcacaagcggtggatgatgtggattaattcgatgcaacgcgaaaaaccttacctacccttgacatgtcaggaaccctggagagatctgggggtgcccgaaagggagcctgaacacaggtgctgcatggctgtcgtcagctcgtgtcgtgagatgttgggttaagtcccgcaacgagcgcaacccttgtcgttaattgccatcattaagttgggcactttaatgagactgccggtgacaaaccggaggaaggtggggatgacgtcaagtcctcatggcccttatgggtagggcttcacacgtcatacaatggtcggttcagagggttgccaacccgcgagggggagctaatctcagaaagccgatcgtagtccggattgcagtctgcaactcgactgcatgaagtcggaatcgctagtaatcgcggatcagcatgccgcggtgaatacgttcccgggtcttgtacacaccgcccgtcacaccatgggagcgggttctgccagaagtagttagcctaaccgcaaggggggcgattaccacggcagggttcgtgactggggtg

SEQ ID NO: 2625 - DNA, 1467 bp, Prosthecobacter debontii
  source 1..1467: mol_type = unassigned DNA
  misc_difference 302: note = n is a, c, g, or t
  misc_difference 754: note = n is a, c, g, or t
  misc_difference 1034: note = n is a, c, g, or t
  misc_difference 1050: note = n is a, c, g, or t
  misc_difference 1084: note = n is a, c, g, or t
  misc_difference 1097: note = n is a, c, g, or t
  misc_difference 1103: note = n is a, c, g, or t
  misc_difference 1371: note = n is a, c, g, or t
aacgaacgctggcggcgtggataagacatgcaagtcgaacgggacattatgagtagcaatacaagtgatgtttagtggcgaacgggtgcgtaacacgtggatacattccggaaagcgggggatagcccagggaaacttggattaataccgcatgtggtcgagagactaaagacggggatcgaaagacctgtcactttccgattggtccgcggcctatcagctagttggcggggtaatggcccaccaaggcgacgacgggtagctggtcttagaggacgaccacccacactggaactgagacncggtccagacacctacgggtggcagcagtcgagaatctttcacaatgggggcaaccctgatggagcgacaccacgtggaggataaggtcttcggattgtaaactcctgtcatgcgtgaacaaggttgcttggataatacctgagcaaattgatggtagcgcaagaggaagagacggctaactctgtgccagcagccgcggtaatacagaggtctcaagcgttgttcggaatcactgggcgtaaagggtgcgtaggtggcgtggcaagtcagatgtgaaagcccggggctcaacctcggaactgcatccgatactgccatgctagagtactggaggggtgactagaattctcggtgtagcagtgaaatgcgtagatatcgagaggaataccaaaggcgtaggcaggtcactggacagttactgacactgaggcacgaaggccaggggagcgancgggattagataccccggtagtcctggcagtaaacggtgcatacttggtgtgggaagattcgacccttcctgtgccggagctaacgcgttaagtatgccgcctgggaagtacggtcgcaagattaaaactcaaagaaattgacggggacccgcacaagcggtggagtatgtggcttaattcgatgcaacgcgaagaaccttacctggtcttgaaatacactgtgtctccgatgaaagtcggatagagtaacaatactcgctttgcacaggtcctgcatgnctgtcgtcagctcgtntcgtgagatgttgggttaagtcccccaacgagcncaaccctgtgatntgttgncacccggtttaccggagcactcgaatcagactgcctcgatcaacgaggaggaaggtggggatgacgtcaagtccgtatggcccttacgaccagggctgcacacgtactacaatgcccagcacaatgtgaaccgaaaccgcgaggtggaggaaatcagtaaaactgggctcagttcagattgtagtctgcaactcgactacatgaagttggaatcgctagtaatggtacatcagctacggtaccgtgaatacgttcccgggtcttgtanacaccgcccgtcacatcatggaagctggtttcgcccgaagtgcgtgagtcaaccgcaaggggacagcgccctaaggcaagactggtgactgggatg

SEQ ID NO: 2626 - DNA, 1468 bp, Prosthecobacter fusiformis
  source 1..1468: mol_type = unassigned DNA
aacgaacgctggcggcgtggataagacatgcaagtcgaacgggatatttctggtagtaatactaggaatgttcagtggcgaacgggtgcgtaacacgtggatacattccgggaagcgggggatagcccagggaaacttggattaataccgcatgtggtcgagagactaaagacggggaccgcaaggcctgtcacttcccgattggtccgcggcctatcagctagttggcggggtaaaggcccaccaaggctacgacgggtagctggtcttagaggacgaccagccacactggaactgagacacggtccagacacctacgggtggcagcagtcgagaatctttcacaatgggggcaaccctgatggagcgacgccgcgtggaggataaggtcttcggattgtaaactcctgtcatgcgtgaacaaggctgcgaggataatacctttgcagattgatggtagcgcaagaggaagagacggctaactctgtgccagcagccgcggtaatacagaggtctcaagcgttgttcggaatcactgggcgtaaagggtgcgtaggtggcgtggtaagtcagatgtgaaagcccagggctcaaccctggaattgcatccgatactgctgtgctagagtactggaggggtgactagaattctcggtgtagcagtgaaatgcgtagatatcgagaggaataccaaaggcgtaggcaggtcactggacagttactgacactgaggcacgaaggccaggggagcgaacgggattagataccccggtagtcctggcagtaaacggtgcatacttggtgtgggaagattcgacccttcctgtgccggagctaacgcgttaagtatgccgcctgggaagtacggtcgcaagattaaaactcaaagaaattgacggggacccgcacaagcggtggagtatgtggcttaattcgatgcaacgcgaagaaccttacctggtcttgacatgcactgtgtctccgatgaaagtcggatagagtagcaatactcgctttgcacaggtgctgcatggctgtcgtcagctcgtgtcgtgagatgttgggttaagtcccgcaacgagcgcaacccctgtgatttgttgccacccggtttaccggagcactcgaatcagactgcctcgatcaacgaggaggaaggtggggatgacgtcaagtccgtatggcccttacgaccagggctgcacacgtactacaatgcccagcacaatgtgaaccgaaaccgcgaggtggaggaaatcagtaaaactgggctcagttcagattgtagtctgcaactcgactacatgaagttggaatcgctagtaatggtacatcagctacggtaccgtgaatacgttcccgggtcttgtacacaccgcccgtcacatcatggaagctggtttcgcccgaagtgcgtgagtcaaccgcaaggggacagcgccctaaggcaagactggtgactgggatg

SEQ ID NO: 2627 - DNA, 1424 bp, Prosthecochloris aestuarii
  source 1..1424: mol_type = unassigned DNA
gacgaacgctggcggcgtgcctaacacatgcaagtcaaaggaaagtgacttcggttacaagtacttggcgcaagggtgagtaaggtataggtaatttgcctacaggaccgggataaccccgagaaatcggggacaataccggatgatgcagcggaaccgcatggttatgttgttaaatcaggaatggcctgtagataagcctatattccatcaggtagttggcagggtaacagcctaccaagcctacgacggatagctggtctgagaggatgatcagccacattggaactgagacacggtccagactcctacgggaggcagcagtgaggaatattgcgcaatgggcgaaagcctgacgcagcaacgccgcgtggatgatgaagttcttcggaatgtaaagtccttttgtagaggaagaatagcctgctttgcgggtgtgacggtactctacgaataagccacggctaactctgtgccagcagccgcggtgatacaggggtggcaagcgttgtccggatttactgggtgtaaagggtgcgcaggcggaatagtaagtcgggggttaaatccatgtgctcaacacatgcacggcttccgatactgctaatctagagtgtcgaagaggaaggtggaatttccggtgtaacggtggaatgtgtagatatcggaaagaacaccagtggcgaaggcagccttctggtcgacaactgacgctcaggcacgaaagcgtggggagcaaacaggattagataccctggtagtccacgccgtaaacgatgaatactagatgttggtcattcgtgatcagtgtcgcagctaacgcgttaagtattccacctgggaagtacgctcgcaagagtgaaactcaaaggaattgacgggggcccgcacaagcggtggatcatgtggtttaattcgatgcaacgcgaagaaccttacctaggcttgacatgctgactaaagctcctgaaagggagtgtccttcggggagtcagcacaggtgctgcatggctgtcgtcagctcgtgtcgtgagatgttgggttaagtcccgcaacgagcgcaacccctacaattagttgctagcaggtaaagctgaggactctaattgaactgcctacgcaagtagtgaggaaggaggggatgacgtcaagtcctcatggcccttacgcctagggccacacacgtgatacaatggcgactacagagggcaaagccgcgaggtggagataatcccttaaaagtcgtcctagtccggatcggagtctgcaactcgactccgtgaagctggaatcgctagtaatcgcagatcagcatgctgcggtgaatgtgttcccgggccttgtacacaccgcccgtcaagtcatggaagtcaggagtacccgaagacgcgtatgcgtttaaggtaagactggtaactgggact

SEQ ID NO: 2628 - DNA, 1408 bp, Prosthecochloris vibrioformis
  source 1..1408: mol_type = unassigned DNA
tgcctaacacatgcaagtcaaaggaaagcgccttcgggtgcgagtacttggcgcaagggtgagtaaggtataggtaagttgcctacaggaccggcataaccccgagaaatcggggacaataccggatgatgcagcggaaccgcatggttatgttgttaaatcaggaatggcctgtagataagcctatattccatcaggtagttggcggggtaacggcccaccaagcctacgacggatagctggtctgagaggatgatcagccacattggaactgagacacggtccagactcctacgggaggcagcagtgaggaatattgcgcaatgggcgaaagcctgacgcagcaacgccgcgtggatgatgaagtccttcgggatgtaaagtccttttgcagaggaagaacatgctggtttaccggcagtgacggtactctgcgaataagccacggctaactctgtgccagcagccgcggtgatacaggggtggcaagcgttgtccggatttactgggtgtaaagggtgcgcaggcggaataataagtcgggggttaaatccatgtgcttaacacatgacatgcttccgatactgttattctagagtgtcgaagaggaagatggaatttccggtgtaacggtggaatgtgtagatatcggaaagaacaccagtggcgaaggcagtcttctggtcgacaactgacgctcaggcacgaaagcgtggggagcgaacaggattagataccctggtagtccacgccgtaaacgatgaatactagatgttggtcattcgtgatcagtgtcgaagctaacgcgttaagtattccacctgggaagtacgctcgcaagagtgaaactcaaaggaattgacgggggcccacacaagcggtggatcatgtggtttaattcgatgcaacgcgaagaaccttacccgggcttgaaaggctggctaaacctcctgaaagggagggttcttcggggagccagtacaggtgctgcatggctgtcgtcagctcgtgtcgtgagatgttgggttaagtcccgcaacgagcgcaacccctacaattagttgctagcaggtaaagctgaggactctaattgaactgcctacgcaagtagagaggaaggaggggatgacgtcaagtcctcatggcccttacgtccggggctacacacgtgatacaatggtaactacagagggcaaagccgcgaggcagaggaaatcccttaaaagttatcctagtccggatcggagtctgcaactcgactccgtgaagctggaatcgctagtaatcgcagatcagcatgctgcggtgaatgtgttcctgggccttgtacacaccgcccgtcaagtcatggaagttgggagtacccgaagacgcgtatgcgtttaaggtaagaccagtaactgggact

SEQ ID NO: 2629 - DNA, 1453 bp, Proteiniphilum acetatigenes
  source 1..1453: mol_type = unassigned DNA
gatgaacgctagcgataggcctaacacatgcaagtcgaggggcatcacatgaagtagcaatacggatggtggcgaccggcgcacgggtgagtaacacgtatgcaacctgccttcaacaaggggataacccgttgaaagacggactaataccctataacacaggggccccgcatggggatatttgttaaagattaatcggttgaagatgggcatgcgttccattagctagttggtggggtaatggcccaccaaggcaacgatggataggggaactgagaggtttatcccccacactggtactgagacacggaccagactcctacgggaggcagcagtgaggaatattggtcaatggacgcaagtctgaaccagccacgtcgcgtgaaggaagacggccctacgggttgtaaacttcttttgcaagggaataaagtgagtcacgtgtgactttttgcaagtaccttgcgaataaggatcggctaactccgtgccagcagccgcggtaatacggaggatccgagcgttatccggatttattgggtttaaagggtgctcaggcgggcgattaagtcggcggtgaaattttgcggctcaaccgtaaaagtgccttcgaaactggttgccttgagtgtggatgaggtaggcggaatttgtggtgtagcggtgaaatgcatagatatcacgaggaactccgattgcgcaggcagcttactaagccataactgacgctcaagcacgaaggcgtggggatcaaacaggattagataccctggtagtccacgcagtaaacgatgattactggctgtttgcgatataatgtaagcggctgagcgaaagcgttaagtaatccacctggggagtacgttcgcaagaatgaaactcaaaggaattgacgggggcccgcacaagcggaggaacatgtggtttaattcgatgatacgcgaggaaccttacccgggcttgaaatgcatctggcgtctccagagatggggatttccttcgggacagatgtgtaggtgctgcatggttgtcgtcagctcgtgccgtgaggtgtcggcttaagtgccataacgagcgcaaccctcatcgttagttgccatcaggtcaagctggggactctaacgagactgccatcgtaagatgcgaggaaggtggggatgacgtcaaatcagcacggcccttacgtccggggcgacacacgtgttacaatgggtggtacaaagggcagctacatggcgacatgatgccaatctccaaaaccactctcagttcggatcggagtctgcaactcgactccgtgaagctggattcgctagtaatcgcgcatcagccacggcgcggtgaatacgttcccgggccttgtacacaccgcccgtcaagccatggaagctgggggtgcctgaagtccgtaaccggtgaggagcggcctagggtaaaaccggtgactggggct

SEQ ID NO: 2630 - DNA, 1453 bp, unidentified
  source 1..1453: mol_type = unassigned DNA; note = Proteiniphilum saccharofermentans
gatgaacgctagcgataggcctaacacatgcaagtcgaggggcatcacatgaagtagcaatacggatggtggcgaccggcgcacgggtgagtaacacgtatgcaacctgccttcaacaaggggataacccgttgaaagacggactaataccctataacacaggggtcccgcatgggaatatttgttaaaggacaaccggttgaagatgggcatgcgttccattagctagttggcggggtaacggcccaccaaggcaacgatggataggggaactgagaggtttatcccccacactggtactgagacacggaccagactcctacgggaggcagcagtgaggaatattggtcaatgggcgcaagcctgaaccagccacgtcgcgtgaaggaagacggccctacgggttgtaaacttcttttgcaagggaataaagtgggccacgtgtggccttttgcaagtaccttgcgaataaggatcggctaactccgtgccagcagccgcggtaatacggaggatccgagcgttatccggatttattgggtttaaagggtgctcaggcgggacattaagtcggcggtgaaattttgcggctcaaccgtaaaagtgccttcgaaactggtatccttgagtgtggatgaggtaggcggaatttgtggtgtagcggtgaaatgcatagatatcacgaggaactccgattgcgcaggcagcttactaagccataactgacgctcaagcacgaaggcgtggggatcaaacaggattagataccctggtagtccacgcagtaaacgatgattactggctgtttgcgatataatgtaagcggctgagcgaaagcgttaagtaatccacctggggagtacgttcgcaagaatgaaactcaaaggaattgacgggggcccgcacaagcggaggaacatgtggtttaattcgatgatacgcgaggaaccttacccgggcttgaaatgcgtctgacagtcggagagatccgatctcccttcggggcagacgtgtaggtgctgcatggttgtcgtcagctcgtgccgtgaggtgtcggcttaagtgccataacgagcgcaaccctcatcgttagttgccatcaggtagtgctggggactctaacgagactgccatcgtaagatgcgaggaaggtggggatgacgtcaaatcagcacggcccttacgtccggggcgacacacgtgttacaatgggtggtacaaagggcagctacatggcgacatgatgccaatccccaaaaccactctcagttcggatcggagtctgcaactcgactccgtgaagctggattcgctagtaatcgcgcatcagccacggcgcggtgaatacgttcccgggccttgtacacaccgcccgtcaagccatggaagctgggggtgcctgaagtccgtaaccgacaaggagcggcctagggtaaaaccggtgactggggct

SEQ ID NO: 2631 - DNA, 1465 bp, Proteus hauseri
  source 1..1465: mol_type = unassigned DNA
attgaacgctggcggcaggcctaacacatgcaagtcgagcggtaacagaggaaagcttgctttcttgctgacgagcggcggacgggtgagtaatgtatggggatctgcccgatagagggggataactactggaaacggtagctaataccgcatgacgtctacggaccaaagcaggggctcttcggaccttgcgctatcggatgaacccatatgggattagctagtaggtgaggtaatggctcacctaggcgacgatctctagctggtctgagaggatgatcagccacactgggactgagacacggcccagactcctacgggaggcagcagtggggaatattgcacaatgggcgcaagcctgatgcagccatgccgcgtgtatgaagaaggccttagggttgtaaagtactttcagcggggaggaaggtgttaagattaatactcttagcaattgacgttacccgcagaagaagcaccggctaactccgtgccagcagccgcggtaatacggagggtgcaagcgttaatcggaattactgggcgtaaagcgcacgcaggcggtcaattaagtcagatgtgaaagccccgagcttaacttgggaattgcatctgaaactggttggctagagtcttgtagaggggggtagaattccacgtgtagcggtgaaatgcgtagagatgtggaggaataccggtggcgaaggcggccccctggacaaagactgacgctcaggtgcgaaagcgtggggagcaaacaggattagataccctggtagtccacgctgtaaacgatgtcgatttggaggttgtgcccttgaggcgtggcttccggagctaacgcgttaaatcgaccgcctggggagtacggccgcaaggttaaaactcaaatgaattgacgggggcccgcacaagcggtggagcatgtggtttaattcgatgcaacgcgaagaaccttacctactcttgacatccagagaatcctttagagatagaggagtgccttcgggaactctgagacaggtgctgcatggctgtcgtcagctcgtgttgtgaaatgttgggttaagtcccgcaacgagcgcaacccttatcctttgttgccagcacgtaatggtgggaactcaaaggagactgccggtgataaaccggaggaaggtggggatgacgtcaagtcatcatggcccttacgagtagggctacacacgtgctacaatggcagatacaaagagaagcgacctcgcgagagcaagcggaactcataaagtctgtcgtagtccggattggagtctgcaactcgactccatgaagtcggaatcgctagtaatcgtagatcagaatgctacggtgaatacgttcccgggccttgtacacaccgcccgtcacaccatgggagtgggttgcaaaagaagtaggtagcttaaccttcgggagggcgcttaccactttgtgattcatgactggggtg

SEQ ID NO: 2632 - DNA, 1463 bp, Providencia burhodogranariea
  source 1..1463: mol_type = unassigned DNA
attgaacgctggcggcaggcctaacacatgcaagtcgagcggtaacaggggaagcttgcttctcgctgacgagcggcggacgggtgagtaatgtatggggatctgcccgatagagggggataactactggaaacggtggctaataccgcataatctctaaggagcaaagcaggggaacttcggtccttgcgctatcggatgaacccatatgggattagctagtaggtgaggtaatggctcacctaggcgacgatccctagctggtctgagaggatgatcagccacactgggactgagacacggcccagactcctacgggaggcagcagtggggaatattgcacaatgggcgcaagcctgatgcagccatgccgcgtgtatgaagaaggccttagggttgtaaagtactttcagtcgggaggaaggcgttgatgctaatatcatcaacgattgacgttaccgacagaagaagcaccggctaactccgtgccagcagccgcggtaatacggagggtgcaagcgttaatcggaattactgggcgtaaagcgcacgcaggcggttgattaagttagatgtgaaatccccgggcttaacctgggaatggcatctaaaactggtcagctagagtcttgtagaggggggtagaattccatgtgtagcggtgaaatgcgtagagatgtggaggaataccggtggcgaaggcggccccctggacaaagactgacgctcaggtgcgaaagcgtggggagcaaacaggattagataccctggtagtccacgctgtaaacgatgtcgatttggaggttgttcccttgaggagtggcttccggagctaacgcgttaaatcgaccgcctggggagtacggccgcaaggttaaaactcaaatgaattgacgggggcccgcacaagcggtggagcatgtggtttaattcgatgcaacgcgaagaaccttacctactcttgacatccagagaatttagcagagatgctttagtgccttcgggaactctgagacaggtgctgcatggctgtcgtcagctcgtgttgtgaaatgttgggttaagtcccgcaacgagcgcaacccttatcctttgttgccagcacgtcatggtgggaactcaaaggagactgccggtgataaaccggaggaaggtggggatgacgtcaagtcatcatggcccttacgagtagggctacacacgtgctacaatggcgtatacaaagagaagctacctcgcgagagcaagcggaactcataaagtacgtcgtagtccggattggagtctgcaactcgactccatgaagtcggaatcgctagtaatcgtagatcagaatgctacggtgaatacgttcccgggccttgtacacaccgcccgtcacaccatgggagtgggttgcaaaagaagtaggtagcttaaccttcgggagggcgcttaccactttgtgattcatgactggggtg

SEQ ID NO: 2633 - DNA, 1463 bp, Providencia rustigianii
  source 1..1463: mol_type = unassigned DNA
attgaacgctggcggcaggcctaacacatgcaagtcgagcggtaacaggggaagcttgcttctcgctgacgagcggcggacgggtgagtaatgtatggggatctgcccgatagagggggataactactggaaacggtagctaataccgcataatctctttggagcaaagcaggggaacttcggtccttgcgctatcggatgaacccatatgggattagctagttggtggggtaatggctcaccaaggcgacgatccctagctggtctgagaggatgatcagccacactgggactgagacacggcccagactcctacgggaggcagcagtggggaatattgcacaatgggcgcaagcctgatgcagccatgccgcgtgtatgaagaaggccttagggttgtaaagtactttcagttgggaggaaggcgttgatgctaatatcatcaacgattgacgttaccaacagaagaagcaccggctaactccgtgccagcagccgcggtaatacggagggtgcaagcgttaatcggaattactgggcgtaaagcgcacgcaggcggttgattaagttagatgtgaaatccccgggcttaacctgggaatggcatctaagactggtcagctagagtcttgtagaggggggtagaattccatgtgtagcggtgaaatgcgtagagatgtggaggaataccggtggcgaaggcggccccctggacaaagactgacgctcaggtgcgaaagcgtggggagcaaacaggattagataccctggtagtccacgctgtaaacgatgtcgatttggaggttgttcccttgaggagtggcttccggagctaacgcgttaaatcgaccgcctggggagtacggccgcaaggttaaaactcaaatgaattgacgggggcccgcacaagcggtggagcatgtggtttaattcgatgcaacgcgaagaaccttacctactcttgacatccagagaatttagcagagatgctttagtgccttcgggaactctgagacaggtgctgcatggctgtcgtcagctcgtgttgtgaaatgttgggttaagtcccgcaacgagcgcaacccttatcctttgttgccagcacgtcatggtgggaactcaaaggagactgccggtgataaaccggaggaaggtggggatgacgtcaagtcatcatggcccttacgagtagggctacacacgtgctacaatggcgtatacaaagagaagcgacctcgcgagagcaagcggaactcataaagtacgtcgtagtccggattggagtctgcaactcgactccatgaagtcggaatcgctagtaatcgtagatcagaatgctacggtgaatacgttcccgggccttgtacacaccgcccgtcacaccatgggagtgggttgcaaaagaagtaggtagcttaaccttcgggagggcgcttaccactttgtgattcatgactggggtg

SEQ ID NO: 2634 - DNA, 1462 bp, Providencia sneebia
  source 1..1462: mol_type = unassigned DNA
attgaacgctggcggcaggcctaacacatgcaagtcgagcggtaacaggagaagcttgcttctcgctgacgagcggcggacgggtgagtaatgtatggggatctgcccgatagagggggataaccactggaaacggtggctaataccgcataatctctaaggagcaaagcaggggaacttcggtccttgcgctatcggatgaacccatatgggattagctagtaggtgaggtaatggctcacctaggcgacgatccctagctggtctgagaggatgatcagccacactgggactgagacacggcccagactcctacgggaggcagcagtggggaatattgcacaatgggcgcaagcctgatgcagccatgccgcgtgtatgaagaaggccttagggttgtaaagtactttcagtcgggaggaaggcgttgatgctaatatcatcaacgattgacgttaccgacagaagaagcaccggctaactccgtgccagcagccgcggtaatacggagggtgcaagcgttaatcggaattactgggcgtaaagcgcacgcaggcggttgattaagttagatgtgaaatccccgggcttaacctgggaatggcatctaagactggtcagctagagtcttgtagaggggggtagaattccatgtgtagcggtgaaatgcgtagagatgtggaggaataccggtggcgaaggcggccccctggacaaagactgacgctcaggtgcgaaagcgtggggagcaaacaggattagataccctggtagtccacgctgtaaacgatgtcgatttggaggttgttccctagaggagtggcttccggagctaacgcgttaaatcgaccgcctggggagtacggccgcaaggttaaaactcaaatgaattgacgggggcccgcacaagcggtggagcatgtggtttaattcgatgcaacgcgaagaaccttacctactcttgacatccagagaactgagcagagatgcttaggtgccttcgggaactctgagacaggtgctgcatggctgtcgtcagctcgtgttgtgaaatgttgggttaagtcccgcaacgagcgcaacccttatcctttgttgccagcgattcggtcgggaactcaaaggagactgccagtgataaactggaggaaggtggggatgacgtcaagtcatcatggcccttacgagtagggctacacacgtgctacaatggcgtatacaaagagaagcgacctcgcgagagcaagcggaactcataaagtacgtcgtagtccggattggagtctgcaactcgactccatgaagtcggaatcgctagtaatcgtagatcagaatgctacggtgaatacgttcccgggccttgtacacaccgcccgtcacaccatgggagtgggttgcaaaagaagtaggtagcttaaccttcgggagggcgcttaccactttgtgattcatgactggggtg

SEQ ID NO: 2635 - DNA, 1451 bp, Pseudacidovorax intermedius
  source 1..1451: mol_type = unassigned DNA
attgaacgctggcggcatgccttacacatgcaagtcgaacggtaacaggccgcaaggtgctgacgagtggcgaacgggtgagtaatacatcggaacgtgcccgatcgtgggggataacgcagcgaaagctgtgctaataccgcatacgatctacggatgaaagcgggggatcgcaagacctcgcgcggacggagcggccgatggcagattaggtagttggtggggtaaaggcctaccaagccgacgatctgtagctggtctgagaggacgaccagccacactgggactgagacacggcccagactcctacgggaggcagcagtggggaattttggacaatgggcgcaagcctgatccagccatgccgcgtgcaggatgaaggccttcgggttgtaaactgcttttgtacggaacgaaaaggtttcttttaatacagggaactgatgacggtaccgtaagaataagcaccggctaactacgtgccagcagccgcggtaatacgtagggtgcgagcgttaatcggaattactgggcgtaaagcgtgcgcaggcggtgatgtaagacagaggtgaaatccccgggctcaacctgggaactgcctttgtgactgcatcgctggagtgcggcagagggggatggaattccgcgtgtagcagtgaaatgcgtagatatgcggaggaacaccgatggcgaaggcaatcccctgggcctgcactgacgctcatgcacgaaagcgtggggagcaaacaggattagataccctggtagtccacgccctaaacgatgtcaactggttgttgggaattagttttctcagtaacgaagctaacgcgtgaagttgaccgcctggggagtacggccgcaaggttgaaactcaaaggaattgacggggacccgcacaagcggtggatgatgtggtttaattcgatgcaacgcgaaaaaccttacccacctttgacatgtacggaatcctttagagatagaggagtgctcgaaagagagccgtaacacaggtgctgcatggctgtcgtcagctcgtgtcgtgagatgttgggttaagtcccgcaacgagcgcaacccttgccattagttgctacgaaagggcactctaatgggactgccggtgacaaaccggaggaaggtggggatgacgtcaagtcctcatggcccttataggtggggctacacacgtcatacaatggctggtacaaagggttgccaacccgcgagggggagctaatcccataaagccagtcgtagtccggatcgcagtctgcaactcgactgcgtgaagtcggaatcgctagtaatcgtggatcagcatgtcacggtgaatacgttcccgggtcttgtacacaccgcccgtcacaccatgggagcgggttctgccagaagtaggtagcctaaccgtaaggagggcgcttaccacggcagggttcgtgactggggtg

SEQ ID NO: 2636 - DNA, 1408 bp, unidentified
  source 1..1408: mol_type = unassigned DNA; note = Pseudanabaena biceps
gatgaacgctggcggtatgcttaacacatgcaagtcgaacggaatcttcggatttagtggcggacgggtgagtaacgcgtaagaatctacctataggttcgggacaacagttagaaatgactgctaataccggatatgccttcgggtgaaagttttaatgcctgtagatgagcttgcgttcgattagctagatggtggggtaaaggcctaccatggcgacgatcgataactggtctgagaggatgaccagtcacactgggactgagacacggcccagactcctacgggaggcagcagtggggaattttccgcaatgggcgaaagcctgacggagcaataccgcgtgagggacgaaggcctgtgggttgtaaacctcttttgttagggaagataatgacggtacctaacgaataagcatcggctaactccgtgccagcagccgcggtaagacggaggatgcaagcgttatccggaattattgggcgtaaagcgtacgtaggctgtttgataagtctgttgtcaaagcccgaggctcaaccttggatcggcaatggaaactgtgagactagagagagataggggcaggaggaattccaggtgtagcggtgaaatgcgtagatatctggaagaacaccagtggcgaaagcgtcctgctggatctcaactgacgctgaagtacgaaagctaggggagcgaatgggattagataccccagtagtcctagccgtaaacgatgggtactaggtgttggccgtatcgacccggtcagtgccgtagctaacgcgttaagtaccccgcctggggagtacggtcgcaagattgaaactcaaaggaattgacgggggcccgcacaagcggtggagtatgtggtttaattcgatgcaacgcgaagaaccttaccaaggcttgacatgtcgtgaatcctcttgaaagggaggagtgccttcgggagcacgaacacaggtggtgcatggctgtcgtcagctcgtgtcgtgagatgttgggttaagtcccgcaacgagcgcaaccctcgtttttagttgccatcattaagttgggcactctagagagactgccggtgacaaaccggaggaaggtggggatgacgtcaagtcatcatgccccttacgccttgggctacacacgtactacaatggccgggacaaagagtcgcgagcatgcgaatgcaagctaatctcgtaaacccggtcttagttcagattgcaggctgcaactcgcctgcatgaaggcggaatcgctagtaatcgcaggtcagcatactgcggtgaatacgttcccgggccttgtacacaccgcccgtcacaccatggaagctggtcacgcccgaagtcgttatctcaacccgtaagggagggaggcgcctaaggcagggctggtgactggggtg

SEQ ID NO: 2637 - DNA, 1462 bp, unidentified
  source 1..1462: mol_type = unassigned DNA; note = Pseudescherichia vulneris
attgaacgctggcggcaggcctaacacatgcaagtcgaacggtagcacagagagcttgctctcgggtgacgagtggcggacgggtgagtaatgtctgggaaactgcctgatggagggggataactactggaaacggtagctaataccgcataacgtcgcaagaccaaagagggggaccttcgggcctcttgccatcagatgtgcccagatgggattagctagtaggtggggtaacggctcacctaggcgacgatccctagctggtctgagaggatgaccagccacactggaactgagacacggtccagactcctacgggaggcagcagtggggaatattgcacaatgggcgcaagcctgatgcagccatgccgcgtgtatgaagaaggccttcgggttgtaaagtactttcagcggggaggaaggcgatacggttaataaccgtgtcgattgacgttacccgcagaagaagcaccggctaactccgtgccagcagccgcggtaatacggagggtgcaagcgttaatcggaattactgggcgtaaagcgcacgcaggcggtctgtcaagtcggatgtgaaatccccgggctcaacctgggaactgcattcgaaactgacaggctagagtcttgtagaggggggtagaattccaggtgtagcggtgaaatgcgtagagatctggaggaataccggtggcgaaggcggccccctggacaaagactgacgctcaggtgcgaaagcgtggggagcaaacaggattagataccctggtagtccacgctgtaaacgatgtcgacttggaggttgtgcccttgaggcgtggcttccggagctaacgcgttaagtcgaccgcctggggagtacggccgcaaggttaaaactcaaatgaattgacgggggcccgcacaagcggtggagcatgtggtttaattcgatgcaacgcgaagaaccttacctactcttgacatccagagaacttagcagagatgctttggtgccttcgggaactctgagacaggtgctgcatggctgtcgtcagctcgtgttgtgaaatgttgggttaagtcccgcaacgagcgcaacccttatcctttgttgccagcggttaggccgggaactcaaaggagactgccagtgataaactggaggaaggtggggatgacgtcaagtcatcatggcccttacgagtagggctacacacgtgctacaatggcgcatacaaagagaagcgaactcgcgagagcaagcggacctcataaagtgcgtcgtagtccggatcggagtctgcaactcgactccgtgaagtcggaatcgctagtaatcgtggatcagaatgccacggtgaatacgttcccgggccttgtacacaccgcccgtcacaccatgggagtgggttgcaaaagaagtaggtagcttaaccttcgggagggcgcttaccactttgtgattcatgactggggtg

SEQ ID NO: 2638 - DNA, 1458 bp, Pseudoalteromonas agarivorans
  source 1..1458: mol_type = unassigned DNA
attgaacgctggcggcaggcctaacacatgcaagtcgagcggtaacagaaagtagcttgctactttgctgacgagcggcggacgggtgagtaatgcttgggaacatgccttgaggtgggggacaacagttggaaacgactgctaataccgcataatgtctacggaccaaagggggcttcggctctcgcctttagattggcccaagtgggattagctagttggtgaggtaatggctcaccaaggcgacgatccctagctggtttgagaggatgatcagccacactgggactgagacacggcccagactcctacgggaggcagcagtggggaatattgcacaatgggcgcaagcctgatgcagccatgccgcgtgtgtgaagaaggccttcgggttgtaaagcactttcagtcaggaggaaaggttagtagttaatacctgctagctgtgacgttactgacagaagaagcaccggctaactccgtgccagcagccgcggtaatacggagggtgcgagcgttaatcggaattactgggcgtaaagcgtacgcaggcggtttgttaagcgagatgtgaaagccccgggctcaacctgggaactgcatttcgaactggcaaactagagtgtgatagagggtggtagaatttcaggtgtagcggtgaaatgcgtagagatctgaaggaataccgatggcgaaggcagccacctgggtcaacactgacgctcatgtacgaaagcgtggggagcaaacaggattagataccctggtagtccacgccgtaaacgatgtctactagaagctcggagcctcggctctgtttttcaaagctaacgcattaagtagaccgcctggggagtacggccgcaaggttaaaactcaaatgaattgacgggggcccgcacaagcggtggagcatgtggtttaattcgatgcaacgcgaagaaccttacctacacttgacatacagagaacttaccagagatggtttggtgccttcgggaactctgatacaggtgctgcatggctgtcgtcagctcgtgttgtgagatgttgggttaagtcccgcaacgagcgcaacccctatccttagttgctagcaggtaatgctgagaactctaaggagactgccggtgataaaccggaggaaggtggggacgacgtcaagtcatcatggcccttacgtgtagggctacacacgtgctacaatggcgcatacagagtgctgcgaactcgcgagagtaagcgaatcacttaaagtgcgtcgtagtccggattggagtctgcaactcgactccatgaagtcggaatcgctagtaatcgcatatcagaatgatgcggtgaatacgttcccgggccttgtacacaccgcccgtcacaccatgggagtgggttgctccagaagtagatagtctaaccctcgggaggacgtttaccacggagtgattcatgactggggtg

SEQ ID NO: 2639 - DNA, 1393 bp, Pseudoalteromonas aliena
  source 1..1393: mol_type = unassigned DNA
tgctgacgagcggcggacgggtgagtaatgcttgggaacatgccttgaggtgggggacaacagttggaaacgactgctaataccgcataatgtctacggaccaaagggggcttcggctctcgcctttagattggcccaagtgggattagctagttggtgaggtaatggctcaccaaggcgacgatccctagctggtttgagaggatgatcagccacactgggactgagacacggcccagactcctacgggaggcagcagtggggaatattgcacaatgggcgcaagcctgatgcagccatgccgcgtgtgtgaagaaggccttcgggttgtaaagcactttcagtcaggaggaaaggttagtagttaatacctgctagctgtgacgttactgacagaagaagcaccggctaactccgtgccagcagccgcggtaatacggagggtgcgagcgttaatcggaattactgggcgtaaagcgtacgcaggcggtttgttaagcgagatgtgaaagccctgggctcaacctgggaactgcatttcgaactggcaaactagagtgtgatagagggtggtagaatttcaggtgtagcggtgaaatgcgtagagatctgaaggaataccgatggcgaaggcagccacctgggtcaacactgacgctcatgtacgaaagcgtggggagcaaacgggattagataccccggtagtccacgccgtaaacgatgtctactagaagctcgggtcctcggacttgtttttcaaagctaacgcattaagtagaccgcctggggagtacggccgcaaggttaaaactcaaatgaattgacgggggcccgcacaagcggtggagcatgtggtttaattcgatgcaacgcgaagaaccttacctacacttgacatacagmgaacttaccagagatggtttggtgccttcgggaackctgatacaggtgctgcatggctgtcgtcagctcgtgttgtgagatgttgggttaagtcccgcaacgagcgcaacccctatccttagttgctagcaggtaatgctgagaactctaaggagactgccggtgataaaccggaggaaggtggggacgacgtcaagtcatcatggcccttacgtgtagggctacacacgtgctacaatggcgcatacagagtgctgcgaacctgcgaaggtaagcgaatcacttaaagtgcgtcgtagtccggattggagtctgcaactcgactccatgaagtcggaatcgctagtaatcgcgtatcagaatgacgcggtgaatacgttcccgggccttgtacacaccgcccgtcacaccatgggagtgggttgctccagaagtagatagtctaaccctcgggaggacgtttaccacggagtgattcatgactggggtg

SEQ ID NO: 2640 - DNA, 1461 bp, unidentified
  source 1..1461: mol_type = unassigned DNA; note = Pseudoalteromonas amylolytica
attgaacgctggcggcaggcctaacacatgcaagtcgagcggaaacgagaatagcttgctattcggcgtcgagcggcggacgggtgagtaatgcttgggaacatgcctttaggtgggggacaacagttggaaacgactgctaataccgcataatgtctacggaccaaagtgggggaccttcgggcctcacgcctaaagattggcccaagtgggattagctagttggtgaggtaatggctcaccaaggcgacgatccctagctggtttgagaggatgatcagccacactgggactgagacacggcccagactcctacgggaggcagcagtggggaatattgcacaatgggcgcaagcctgatgcagccatgccgcgtgtgtgaagaaggccttcgggttgtaaagcactttcagtaaggaggaaaggttaagtcttaatacggcttagctgtgacgttacttacagaagaagcaccggctaactccgtgccagcagccgcggtaatacggagggtgcgagcgttaatcggaattactgggcgtaaagcgtacgcaggcggtttgttaagcgagatgtgaaagccccgggcttaacctgggaactgcatttcgaactggcaaactagagtgtgatagagggtggtagaatttcaggtgtagcggtgaaatgcgtagagatctgaaggaataccgatggcgaaggcagccacctgggtcaacactgacgctcatgtacgaaagcgtggggagcaaacaggattagataccctggtagtccacgccgtaaacgatgtctactagaagctggggtcctcggacaactttttcaaagctaacgcattaagtagaccgcctggggagtacggccgcaaggttaaaactcaaatgaattgacgggggcccgcacaagcggtggagcatgtggtttaattcgatgcaacgcgaagaaccttacctacacttgacatacagagaactttctagagatagattggtgccttcgggaactctgatacaggtgctgcatggctgtcgtcagctcgtgttgtgagatgttgggttaagtcccgcaacgagcgcaacccctatccttagttgccagcgattcggtcgggaactctaaggagactgccggtgataaaccggaggaaggtggggacgacgtcaagtcatcatggcccttacgtgtagggctacacacgtgctacaatggcgtatacagagtgctgcgaacttgcgagagtaagcgaatcacttaaagtacgtcgtagtccggattggagtctgcaactcgactccatgaagtcggaatcgctagtaatcgcggatcagaatgccgcggtgaatacgttcccgggccttgtacacaccgcccgtcacaccatgggagtgggttgctccagaagtggatagtctaaccttcgggaggacgttcaccacggagtgattcatgactggggtg

SEQ ID NO: 2641 - DNA, 1458 bp, Pseudoalteromonas arctica
  source 1..1458: mol_type = unassigned DNA
attgaacgctggcggcaggcctaacacatgcaagtcgagcggtaacagaaagtagcttgctactttgctgacgagcggcggacgggtgagtaatgcttgggaacatgccttgaggtgggggacaacagttggaaacgactgctaataccgcataatgtctacggaccaaagggggcttcggctctcgcctttagattggcccaagtgggattagctagttggtgaggtaatggctcaccaaggcgacgatccctagctggtttgagaggatgatcagccacactgggactgagacacggcccagactcctacgggaggcagcagtggggaatattgcacaatgggcgcaagcctgatgcagccatgccgcgtgtgtgaagaaggccttcgggttgtaaagcactttcagtcaggaggaaaggttagtagttaatacctgctagctgtgacgttactgacagaagaagcaccggctaactccgtgccagcagccgcggtaatacggagggtgcgagcgttaatcggaattactgggcgtaaagcgtacgcaggcggtttgttaagcgagatgtgaaagccccgggctcaacctgggaactgcatttcgaactggcaaactagagtgtgatagagggtggtagaatttcaggtgtagcggtgaaatgcgtagagatctgaaggaataccgatggcgaaggcagccacctgggtcaacactgacgctcatgtacgaaagcgtggggagcaaacgggattagataccccggtagtccacgccgtaaacgatgtctactagaagctcggagcctcggttctgtttttcaaagctaacgcattaagtagaccgcctggggagtacggccgcaaggttaaaactcaaatgaattgacgggggcccgcacaagcggtggagcatgtggtttaattcgatgcaacgcgaagaaccttacctacacttgacatacagagaacttaccagagatggtttggtgccttcgggaactctgatacaggtgctgcatggctgtcgtcagctcgtgttgtgagatgttgggttaagtcccgcaacgagcgcaacccctatccttagttgctagcaggtaatgctgagaactctaaggagactgccggtgataaaccggaggaaggtggggacgacgtcaagtcatcatggcccttacgtgtagggctacacacgtgctacaatggcgcatacagagtgctgcgaactcgcgagagtaagcgaatcacttaaagtgcgtcgtagtccggattggagtctgcaactcgactccatgaagtcggaatcgctagtaatcgcgtatcagaatgacgcggtgaatacgttcccgggccttgtacacaccgcccgtcacaccatgggagtgggttgctccagaagtagatagtctaaccctcgggaggacgtttaccacggagtgattcatgactggggtg

SEQ ID NO: 2642 - DNA, 1423 bp, Pseudoalteromonas atlantica
  source 1..1423: mol_type = unassigned DNA
  misc_difference 49: note = n is a, c, g, or t
  misc_difference 1332: note = n is a, c, g, or t
ttgaacgctggcggcaggcctaacacatgcaagtcgagcggtaacaganagtagcttgctactttgctgacgagcggcggacgggtgagtaatgcttgggaacatgccttgaggtgggggacaacagttggaaacgactgctaataccgcataatgtctacggaccaaagggggcttcggctctcgcctttagattggcccaagtgggattagctagttggtgaggtaatggctcaccaaggcaacgatccctagctggtttgagaggatgatcagccacactgggactgagacacggcccagactcctacgggaggcagcagtggggaatattgcacaatgggcgcaagcctgatgcagccatgccgcgtgtgtgaagaaggccttcgggttgtaaagcactttcagtcaggaggaaaggttagtagttaatacctgctagctgtgacgttactgacagaagaagcaccggctaactccgtgccagcagccgcggtaatacggagggtgcgagcgttaatcggaattactgggcgtaaagcgtacgcaggcggtttgttaagcgagatgtgaaagccccgggctcaacctgggaactgcatttcgaactggcaaactagagtgtgatagagggtggtagaatttcaggtgtagcggtgaaatgcgtagagatctgaaggaataccgatggcgaaggcagccacctgggtcaacactgacgctcatgtacgaaagcgtggggagcaaacaggattagataccctggtagtccacgccgtaaacgatgtctactagaagctcggagcctcggctctgtttttcaaagctaacgcattaagtagaccgcctggggagtacggccgcaaggttaaaactcaaatgaattgacgggggccgcacaagcggtggagcatgtggtttaattcgatgcaacgcgaagaaccttacctacacttgacatacagagaacttaccagagatggtttggtgccttcgggaactctgatacaggtgctgcatggctgtcgtcagctcgtgttgtgagatgttgggttaagtcccgcaacgagcgcaacccctatccttagttgctagcaggtaatgctgagaactctaaggagactgccggtgataaaccggaggaaggtggggacgacgtcaagtcatcatggcccttacgtgtagggctacacacgtgctacaatggcgcatacagagtgctgcgaactcgcgagagtaagcgaatcacttaaagtgcgtcgtagtccggattggagtctgcaactcgactccatgaagtcggaatcgctagtaatcgcgtatcagaatgangcggtgaatacgttcccgggccttgtacacaccgcccgtcacaccatgggagtgggttgctccagaagtagatagtctaaccctcgggagg

SEQ ID NO: 2643 - DNA, 1461 bp, Pseudoalteromonas byunsanensis
  source 1..1461: mol_type = unassigned DNA
attgaacgctggcggcaggcctaacacatgcaagtcgagcggtaacatttctagcttgctagaagatgacgagcggcggacgggtgagtaatgcttgggaacatgcctttaggtgggggacaacagttggaaacgactgctaataccgcatgatgtctacggaccaaagtgggggaccttcgggcctcacgcctaaagattggcccaagtgggattagctagttggtgaggtaatggctcaccaaggcaacgatccctagctggtttgagaggatgatcagccacactgggactgagacacggcccagactcctacgggaggcagcagtggggaatattgcacaatgggcgcaagcctgatgcagccatgccgcgtgtgtgaagaaggccttcgggttgtaaagcactttcagtaaggaggaaaggttggatgttaatagcattcagctgtgacgttacttacagaagaagcaccggctaactccgtgccagcagccgcggtaatacggagggtgcgagcgttaatcggaattactgggcgtaaagcgtacgcaggcggtttgttaagcgagatgtgaaagccccgggcttaacctgggaactgcatttcgaactggcaaactagagtgtgatagagggtggtagaatttcaggtgtagcggtgaaatgcgtagagatctgaaggaataccgatggcgaaggcagccacctgggtcaacactgacgctcatgtacgaaagcgtggggagcaaacaggattagataccctggtagtccacgccgtaaacgatgtctactagaagctggggtcctcggacaactttttcaaagctaacgcattaagtagaccgcctggggagtacggccgcaaggttaaaactcaaatgaattgacgggggcccgcacaagcggtggagcatgtggtttaattcgatgcaacgcgaagaaccttacctacacttgacatacagagaactttccagagatggattggtgccttcgggaactctgatacaggtgctgcatggctgtcgtcagctcgtgttgtgagatgttgggttaagtcccgcaacgagcgcaacccctatccttagttgccagcgattcggtcgggaactctaaggagactgccggtgataaaccggaggaaggtggggacgacgtcaagtcatcatggcccttacgtgtagggctacacacgtgctacaatggcgtatacagagtgctgcgaacttgcgagagtaagcgaatcacttaaagtacgtcgtagtccggattggagtctgcaactcgactccatgaagtcggaatcgctagtaatcgcggatcagaatgccgcggtgaatacgttcccgggccttgtacacaccgcccgtcacaccatgggagtgggttgctccagaagtggatagtctaaccttagggaggacgttcaccacggagtgattcatgactggggtg

SEQ ID NO: 2644 - DNA, 1423 bp, Pseudoalteromonas carrageenovora
  source 1..1423: mol_type = unassigned DNA
  misc_difference 777: note = n is a, c, g, or t
  misc_difference 845: note = n is a, c, g, or t
  misc_difference 1071: note = n is a, c, g, or t
  misc_difference 1409: note = n is a, c, g, or t
ttgaacgctggcggcaggcctaacacatgcaagtcgagcggtaacagaaagtagcttgctactttgctgacgagcggcggacgggtgagtaatgcttgggaacatgccttgaggtgggggacaacagttggaaacgactgctaataccgcataatgtctacggaccaaagggggcttcggctctcgcctttagattggcccaagtgggattagctagttggtgaggtaatggctcaccaaggcaacgatccctagctggtttgagaggatgatcagccacactggaactgagacacggtccagactcctacgggaggcagcagtggggaatattgcacaatgggcgcaagcctgatgcagccatgccgcgtgtgtgaagaaggccttcgggttgtaaagcactttcagtcaggaggaaaggttagtagttaatacctgctagctgtgacgttactgacagaagaagcaccggctaactccgtgccagcagccgcggtaatacggagggtgcgagcgttaatcggaattactgggcgtaaagcgtacgcaggcggtttgttaagcgagatgtgaaagccccgggctcaacctgggaactgcatttcgaactggcaaactagagtgtgatagagggtggtagaatttcaggtgtagcggtgaaatgcgtagagatctgaaggaataccgatggcgaaggcagccacctgggtcaacactgacgctcatgtacgaaagcgtggggagcaaacaggattagataccctggtagtccacgcngtaaacgatgtctactagaagctcggaacctcggttctgtttttcaaagctaacgcattaagtagacngcctggggagtacggccgcaaggttaaaactcaaatgaattgacgggggccgcacaagcggtggagcatgtggtttaattcgatgcaacgcgaagaaccttacctacacttgacatacagagaacttaccagagatggtttggtgccttcgggaactctgatacaggtgctgcatggctgtcgtcagctcgtgttgtgagatgttgggttaagtcccgcaacgagngcaacccctatccttagttgctagcaggtaatgctgagaactctaaggagactgccggtgataaaccggaggaaggtggggacgacgtcaagtcatcatggcccttacgtgtagggctacacacgtgctacaatggcgcatacagagtgctgcgaactcgcgagagtaagcgaatcacttaaagtgcgtcgtagtccggattggagtctgcaactcgactccatgaagtcggaatcgctagtaatcgcgtatcagaatgacgcggtgaatacgttcccgggccttgtacacaccgcccgtcacaccatgggagtgggttgctccagaagtagatagtntaaccctcgggagg

SEQ ID NO: 2645 - DNA, 1436 bp, Pseudoalteromonas citrea
  source 1..1436: mol_type = unassigned DNA
  misc_difference 442: note = n is a, c, g, or t
ttgaacgctggcggcaggcctaacacatgcaagtcgagcggtaacagagatagcttgctatctgctgacgagcggcggacgggtgagtaatgcttgggaatatgccttttggtgggggacaacagttggaaacgactgctaataccgcataacgtctacggaccaaagtgggggaccttcgggcctcacgccaagagattagcccaagtgggattagctagttggtaaggtaatggcttaccaaggcaacgatccctagctggtttgagaggatgatcagccacactggaactgagacacggtccagactcctacgggaggcagcagtggggaatattgcacaatgggcgcaagcctgatgcagccatgccgcgtgtgtgaagaaggccttcgggttgtaaagcactttcagtcaggaggaaaggttagtagttaatagctnctagctgtgacgttactgacagaagaagcaccggctaactccgtgccagcagccgcggtaatacggagggtgcgagcgttaatcggaattactgggcgtaaagcgtacgcaggcggtttgttaagcgagatgtgaaagccccgggctcaacctgggaactgcatttcgaactggcagactagagtgtgatagagggtggtagaatttcaggtgtagcggtgaaatgcgtagagatctgaaggaataccgatggcgaaggcagccacctgggtcaacactgacgctcatgtacgaaagcgtggggagcaaacgggattagataccccggtagtccacgccgtaaacgatgtctactagaagctggggtccttcggacaactttttcaaagctaacgcattaagtagaccgcctggggagtacggccgcaaggttaaaactcaaatgaattgacgggggccgcacaagcggtggagcatgtggtttaattcgatgcaacgcgaagaaccttacctacacttgacatacagagaacttaccagagatggtttggtgccttcgggaactctgatacaggtgctgcatggctgtcgtcagctcgtgttgtgagatgttgggttaagtcccgcaacgagcgcaacccctatccttagttgccagcacataatggtgggaactctaaggagactgccggtgataaaccggaggaaggtggggacgacgtcaagtcatcatggcccttacgtgtagggctacacacgtgctacaatggcgcatacagagtgctgcgagcctgcgaaggttagcgaatcacttaaagtgcgtcgtagtccggattggagtctgcaactcgactccatgaagtcggaatcgctagtaatcgcggatcagaatgccgcggtgaatacgttcccgggccttgtacacaccgcccgtcacaccatgggagtgggttgctccagaagtaggtagcttaaccttagggagggcgcttac

SEQ ID NO: 2646 - DNA, 1423 bp, Pseudoalteromonas denitrificans
  source 1..1423: mol_type = unassigned DNA
  misc_difference 94: note = n is a, c, g, or t
  misc_difference 768: note = n is a, c, g, or t
  misc_difference 1061: note = n is a, c, g, or t
  misc_difference 1070: note = n is a, c, g, or t
  misc_difference 1122: note = n is a, c, g, or t
ttgaacgctggcggcaggcctaacacatgcaagtcgagcggtaacagagatagcttgctatctgctgacgagcggcggacgggtgagtaatgcntgggaatatgcctttaggtgggggacaacagttggaaacgactgctaataccgcataatgtctacggaccaaagtgggggaccttcgggcctcacgcctaaagattagcccaagtgggattagctagttggtgaggtaaaggctcaccaaggcaacgatccctagctggtttgagaggatgatcagccacactggaactgagacacggtccagactcctacgggaggcagcagtggggaatattgcacaatgggcgaaagcctgatgcagccatgccgcgtgtgtgaagaaggccctagggttgtaaagcactttcagcgaggaggaaaggttatagtttaatagactatagctgtgacgttactcgcagaagaagcaccggctaacttcgtgccagcagccgcggtaatacgaggggtgcaagcgttaatcggaattactgggcgtaaagcgtacgcaggcggtttgttaagcgagatgtgaaagccccgggctcaacctgggaactgcatttcgaactggcagactagagtatgatagagggtggtagaatttcaggtgtagcggtgaaatgcgtagagatctgaaggaataccgatggcgaaggcagccacctgggtcaatactgacgctcatgtacgaaagcgtggggagcaaacgggattagatacccnggtagtccacgccgtaaacgatgtctactaggagctggaatccttcggatgacttttccaaagctaacgcattaagtagaccgcctggggagtacggccgcaaggttaaaactcaaatgaattgacgggggccgcacaagcggtggagcatgtggtttaattcgatgcaacgcgaagaaccttacctacacttgacatccagagaagagactagagatagacttgtgccttcgggaactctgagacaggtgctgcatggctgtcgtcagctcgtgttgtgagatgttgggttnagtcccgcnacgagcgcaacccctatccttagttgctagcaggtaatgctgagaactctanggagactgccggtgataaaccggaggaaggtggggacgacgtcaagtcatcatggcccttacgtgtagggctacacacgtgctacaatggcaggtacagagtgctgcgaactcgcgagagtaagcgaatcacttaaagcctatcgtagtccggattggagtctgcaactcgactccatgaagtcggaatcgctagtaatcgcggatcagaatgccgcggtgaatacgttcccgggccttgtacacaccgcccgtcacaccatgggagtgggttgctccagaagtggctagtctaactgctg

SEQ ID NO: 2647 - DNA, 1458 bp, Pseudoalteromonas distincta
  source 1..1458: mol_type = unassigned DNA
attgaacgctggcggcaggcctaacacatgcaagtcgagcggtaacagagagtagcttgctactttgctgacgagcggcggacgggtgagtaatgcttgggaacatgccttgaggtgggggacaacagttggaaacgactgctaataccgcataatgtctacggaccaaagggggcttcggctctcgcctttagattggcccaagtgggattagctagttggtgaggtaatggctcaccaaggcgacgatccctagctggtttgagaggatgatcagccacactgggactgagacacggcccagactcctacgggaggcagcagtggggaatattgcacaatgggcgcaagcctgatgcagccatgccgcgtgtgtgaagaaggccttcgggttgtaaagcactttcagtcaggaggaaaggttagtagttaatacctgctagctgtgacgttactgacagaagaagcaccggctaactccgtgccagcagccgcggtaatacggagggtgcgagcgttaatcggaattactgggcgtaaagcgtacgcaggcggtttgttaagcgagatgtgaaagccccgggctcaacctgggaactgcatttcgaactggcaaactagagtgtgatagagggtggtagaatttcaggtgtagcggtgaaatgcgtagagatctgaaggaataccgatggcgaaggcagccacctgggtcaacactgacgctcatgtacgaaagcgtggggagcaaacgggattagataccccggtagtccacgccgtaaacgatgtctactagaagctcggagcctcggttctgtttttcaaagctaacgcattaagtagaccgcctggggagtacggccgcaaggttaaaactcaaatgaattgacgggggcccgcacaagcggtggagcatgtggtttaattcgatgcaacgcgaagaaccttacctacacttgacatacagagaacttaccagagatggtttggtgccttcgggaactctgatacaggtgctgcatggctgtcgtcagctcgtgttgtgagatgttgggttaagtcccgcaacgagcgcaacccctatccttagttgctagcaggtaatgctgagaactctaaggagactgccggtgataaaccggaggaaggtggggacgacgtcaagtcatcatggcccttacgtgtagggctacacacgtgctacaatggcgcatacagagtgctgcgaactcgcgagagtaagcgaatcacttaaagtgcgtcgtagtccggattggagtctgcaactcgactccatgaagtcggaatcgctagtaatcgcgtatcagaatgacgcggtgaatacgttcccgggccttgtacacaccgcccgtcacaccatgggagtgggttgctccagaagtagatagtctaaccctcgggaggacgtttaccacggagtgattcatgactggggtg

SEQ ID NO: 2648 - DNA, 1458 bp, Pseudoalteromonas elyakovii
  source 1..1458: mol_type = unassigned DNA
attgaacgctggcggcaggcctaacacatgcaagtcgagcggtaacagaragtagcttgctactttgctgacgagcggcggacgggtgagtaatgcttgggaacatgccttgaggtgggggacaacagttggaaacgactgctaataccgcataatgtctacggaccaaagggggcttcggctctcgcctttagattggcccaagtgggattagctagttggtgaggtaatggctcaccaaggcgacgatccctagctggtttgagaggatgatcagccacactgggactgagacacggcccagactcctacgggaggcagcagtggggaatattgcacaatgggcgcaagcctgatgcagccatgccgcgtgtgtgaagaaggccttcgggttgtaaagcactttcagtcaggaggaaaggttagtagttaatacctgctagctgtgacgttactgacagaagaagcaccggctaactccgtgccagcagccgcggtaatacggagggtgcgagcgttaatcggaattactgggcgtaaagcgtacgcaggcggtttgttaagcgagatgtgaaagccccgggctcaacctgggaactgcatttcgaactggcaaactagagtgtgatagagggtggtagaatttcaggtgtagcggtgaaatgcgtagagatctgaaggaataccgatggcgaaggcagccacctgggtcaacactgacgctcatgtacgaaagcgtggggagcaaacgggattagataccccggtagtccacgccgtaaacgatgtctactagaagctcggagcctcggttctgtttttcaaagctaacgcattaagtagaccgcctggggagtacggccgcaaggttaaaactcaaatgaattgacgggggcccgcacaagcggtggagcatgtggtttaattcgatgcaacgcgaagaaccttacctacacttgacatacagagaacttaccagagatggtttggtgccttcgggaactctgatacaggtgctgcatggctgtcgtcagctcgtgttgtgagatgttgggttaagtcccgcaacgagcgcaacccctatccttagttgctagcaggtaatgctgagaactctaaggagactgccggtgataaaccggaggaaggtggggacgacgtcaagtcatcatggcccttacgtgtagggctacacacgtgctacaatggcgcatacagagtgctgcgaactcgcgagagtaagcgaatcacttaaagtgcgtcgtagtccggattggagtctgcaactcgactccatgaagtcggaatcgctagtaatcgcgtatcagaatgacgcggtgaatacgttcccgggccttgtacacaccgcccgtcacaccatgggagtgggttgctccagaagtagatagtctaaccctcgggaggacgtttaccacggagtgattcatgactggggtg

SEQ ID NO: 2649 - DNA, 1458 bp, Pseudoalteromonas espejiana
  source 1..1458: mol_type = unassigned DNA
attgaacgctggcggcaggcctaacacatgcaagtcgagcggtaacagaaagtagcttgctactttgctgacgagcggcggacgggtgagtaatgcttgggaacatgccttgaggtgggggacaacagttggaaacgactgctaataccgcataatgtctacggaccaaagggggcttcggctctcgcctttagattggcccaagtgggattagctagttggtgaggtaatggctcaccaaggcaacgatccctagctggtttgagaggatgatcagccacactgggactgagacacggcccagactcctacgggaggcagcagtggggaatattgcacaatgggcgcaagcctgatgcagccatgccgcgtgtgtgaagaaggccttcgggttgtaaagcactttcagtcaggaggaaagattagtagttaatacctgctagttgtgacgttactgacagaagaagcaccggctaactccgtgccagcagccgcggtaatacggagggtgcgagcgttaatcggaattactgggcgtaaagcgtacgcaggcggtttgttaagcgagatgtgaaagccccgggctcaacctgggaactgcatttcgaactggcaaactagagtgtgatagagggtggtagaatttcaggtgtagcggtgaaatgcgtagagatctgaaggaataccgatggcgaaggcagccacctgggtcaacactgacgctcatgtacgaaagcgtggggagcaaacaggattagataccctggtagtccacgccgtaaacgatgtctactagaagctcggagcctcggctctgtttttcaaagctaacgcattaagtagaccgcctggggagtacggccgcaaggttaaaactcaaatgaattgacgggggcccgcacaagcggtggagcatgtggtttaattcgatgcaacgcgaagaaccttacctacacttgacatacagagaacttaccagagatggtttggtgccttcgggaactctgatacaggtgctgcatggctgtcgtcagctcgtgttgtgagatgttgggttaagtcccgcaacgagcgcaacccctatccttagttgctagcaggtaatgctgagaactctaaggagactgccggtgataaaccggaggaaggtggggacgacgtcaagtcatcatggcccttacgtgtagggctacacacgtgctacaatggcgcatacagagtgctgcgaactcgcgagagtaagcgaatcacttaaagtgcgtcgtagtccggattggagtctgcaactcgactccatgaagtcggaatcgctagtaatcgcgtatcagaatgacgcggtgaatacgttcccgggccttgtacacaccgcccgtcacaccatgggagtgggttgctccagaagtagatagtctaaccctcgggaggacgtttaccacggagtgattcatgactggggtg

SEQ ID NO: 2650 - DNA, 1458 bp, unidentified
  source 1..1458: mol_type = unassigned DNA; note = Pseudoalteromonas fuliginea
  misc_difference 1002: note = n is a, c, g, or t
attgaacgctggcggcaggcctaacacatgcaagtcgagcggtaacagaaagtagcttgctactttgctgacgagcggcggacgggtgagtaatgcttgggaacatgccttgaggtgggggacaacagttggaaacgactgctaataccgcataatgtctacggaccaaagggggcttcggctctcgcctttagattggcccaagtgggattagctagttggtgaggtaatggctcaccaaggcgacgatccctagctggtttgagaggatgatcagccacactgggactgagacacggcccagactcctacgggaggcagcagtggggaatattgcacaatgggcgcaagcctgatgcagccatgccgcgtgtgtgaagaaggccttcgggttgtaaagcactttcagtcaggaggaaaggttaacggttaatacccgttagctgtgacgttactgacagaagaagcaccggctaactccgtgccagcagccgcggtaatacggagggtgcgagcgttaatcggaattactgggcgtaaagcgtacgcaggcggtttgttaagcgagatgtgaaagccccgggctcaacctgggaactgcatttcgaactggcaaactagagtgtgatagagggtggtagaatttcaggtgtagcggtgaaatgcgtagagatctgaaggaataccgatggcgaaggcagccacctgggtcaacactgacgctcatgtacgaaagcgtggggagcaaacgggattagataccccggtagtccacgccgtaaacgatgtctactagaagctcggagcctcggttctgtttttcaaagctaacgcattaagtagaccgcctggggagtacggccgcaaggttaaaactcaaatgaattgacgggggcccgcacaagcggtggagcatgtggtttaattcgatgcaacgcgaagaaccttacctacacttgacatacagagaacttaccagagatggtttggtgccttcggganctctgatacaggtgctgcatggctgtcgtcagctcgtgttgtgagatgttgggttaagtcccgcaacgagcgcaacccctatccttagttgctagcaggtaatgctgagaactctaaggagactgccggtgataaaccggaggaaggtggggacgacgtcaagtcatcatggcccttacgtgtagggctacacacgtgctacaatggcgcatacagagtgctgcgaacctgcgaaggtaagcgaatcacttaaagtgcgtcgtagtccggattggagtctgcaactcgactccatgaagtcggaatcgctagtaatcgcgtatcagaatgacgcggtgaatacgttcccgggccttgtacacaccgcccgtcacaccatgggagtgggttgctccagaagtagatagtctaaccctcgggaggacgtttaccacggagtgattcatgactggggtg

SEQ ID NO: 2651 - DNA, 1436 bp, Pseudoalteromonas haloplanktis
  source 1..1436: mol_type = unassigned DNA
  misc_difference 50: note = n is a, c, g, or t
  misc_difference 62: note = n is a, c, g, or t
  misc_difference 779: note = n is a, c, g, or t
  misc_difference 784: note = n is a, c, g, or t
  misc_difference 826: note = n is a, c, g, or t
attgaacgctggcggcaggcctaacacatgcaagtcgagcggtaacaganagtagcttgctnctttgctgacgagcggcggacgggtgagtaatgcttgggaacatgccttgaggtgggggacaacagttggaaacgactgctaataccgcataatgtctacggaccaaagggggcttcgctctcgcctttagattggcccaagtgggattagctagttggtgaggtaatggctcaccaaggcgacgatccctagctggtttgagaggatgatcagccacactgggactgagacacggcccagactcctacgggaggcagcagtggggaatattgcacaatgggcgcaagcctgatgcagccatgccgcgtgtgtgaagaaggccttcgggttgtaaagcactttcagtcaggaggaaaggttagtagttaatacctgctagctgtgacgttactgacagaagaagcaccggctaactccgtgccagcagccgcggtaatacggagggtgcgagcgttaatcggaattactgggcgtaaagcgtacgcaggcggtttgttaagcgagatgtgaaagccccgggctcaacctgggaactgcatttcgaactggcaaactagagtgtgatagagggtggtagaatttcaggtgtagcggtgaaatgcgtagagatctgaaggaataccgatggcgaaggcagccacctgggtcaacactgacgctcatgtacgaaagcgtggggagcaaacgggattagataccccggtagtccacgccgnaaacnatgtctactagaagctcggagcctcggttctgtttggcaaanaacgcattaagtagaccgcctggggagtacggccgcaaggttaaaactcaaatgaattgacgggggccgcacaagcggtggagcatgtggtttaattcgatgcaacgcgaagaaccttacctacacttgacatacagagaacttaccagagatggtttggtgcttcgggaactctgatacaggtgctgcatggctgtcgtcagctcgtgttgtgagatgttgggttaagtcccgcaacgagcgcaacccctatccttagttgctagcaggtaatgctgagaactctaaggagactgccggtgataaaccggaggaaggtggggacgacgtcaagtcatcatggcccttacgtgtagggctacacacgtgctacaatggcgcatacagagtgctgcgaacctgcgaaggtaagcgaatcacttaaagtgcgtcgtagtccggattggagtctgcaactcgactccatgaagtcggaatcgctagtaatcgcgtatcagaatgacgcggtgaatacgttcccgggccttgtacacaccgcccgtcacaccatgggagtgggttgctccagaagtagatagtctaaccctcgggaggacgtttaccacggagt

SEQ ID NO: 2652 - DNA, 1456 bp, Pseudoalteromonas issachenkonii
  source 1..1456: mol_type = unassigned DNA
attgaacgctggcggcaggcctaacacatgcaagtcgagcggtaacatttctagcttgctagaagatgacgagcggcggacgggtgagtaatgcttgggaacatgccttgaggtgggggacaacagttggaaacgactgctaataccgcataatgtctacggaccaaagggggcttcggctcccgcctttagattggcccaagtgggattagctagttggtgaggtaatggctcaccaaggcgacgatccctagctggtttgagaggatgatcagccacactgggactgagacacggcccagactcctacgggaggcagcagtggggaatattgcacaatgggcgcaagcctgatgcagccatgccgcgtgtgtgaagaaggccttcgggttgtaaagcactttcagtcaggaggaaaggttagtagttaatacctgctagctgtgacgttactgacagaagaagcaccggctaactccgtgccagcagccgcggtaatacggagggtgcgagcgttaatcggaattactgggcgtaaagcgtacgcaggcggtttgttaagcgagatgtgaaagccccgggctcaacctgggaactgcatttcgaactggcaaactagagtgtgatagagggtggtagaatttcaggtgtagcggtgaaatgcgtagagatctgaaggaataccgatggcgaaggcagccacctgggtcaacactgacgctcatgtacgaaagcgtggggagcaaacaggattagataccctggtagtccacgccgtaaacgatgtctactagaagctcggaacctcggttctgtttttcaaagctaacgcattaagtagaccgcctggggagtacggccgcaaggttaaaactcaaatgaattgacgggggcccgcacaagcggtggagcatgtggtttaattcgatgcaacgcgaagaaccttacctacacttgacatacagagaacttaccagagatggtttggtgccttcgggaactctgatacaggtgctgcatggctgtcgtcagctcgtgttgtgagatgttgggttaagtcccgcaacgagcgcaacccctatccttagttgctagcaggtaatgctgagaactctaaggagactgccggtgataaaccggaggaaggtggggacgacgtcaagtcatcatggcccttacgtgtagggctacacacgtgctacaatggcgcatacagagtgctgcgaactcgcgagagtaagcgaatcacttaaagtgcgtcgtagtccggattggagtctgcaactcgactccatgaagtcggaatcgctagtaatcgcgtatcagaatgacgcggtgaatacgttcccgggccttgtacacaccgcccgtcacaccatgggagtgggttgctccagaagtagatagtctaaccttcgggaggacgtttaccacggagtgattcatgactggggtg

SEQ ID NO: 2653 - DNA, 1463 bp, Pseudoalteromonas lipolytica
  source 1..1463: mol_type = unassigned DNA
attgaacgctggcggcaggcctaacacatgcaagtcgagcggtaacagagagtagcttgctactctgctgacgagcggcggacgggtgagtaatgcttgggaatgtaccttatggtgggggacaacagttggaaacgactgctaataccgcataatgtcttcggaccaaagcgggggaccttcgggcctcgcgccataagatcagcccaagtgggattagctagttggtgaggtaatggctcaccaaggcgacgatccctagctggtttgagaggatgatcagccacactgggactgagacacggcccagactcctacgggaggcagcagtggggaatattgcacaatgggcgcaagcctgatgcagccatgccgcgtgtgtgaagaaggccttcgggttgtaaagcactttcagtaaggaggaaaggttggatgttaatagcattcagctgtgacgttacttacagaagaagcaccggctaactccgtgccagcagccgcggtaatacggagggtgcgagcgttaatcggaattactgggcgtaaagcgtacgcaggcggtttgttaagcgagatgtgaaagccccgggctcaacctgggaactgcatttcgaactggcaaactagagtgtgatagagggtggtagaatttcaggtgtagcggtgaaatgcgtagagatctgaaggaataccgatggcgaaggcagccacctgggtcaacactgacgctcatgtacgaaagcgtggggagcaaacaggattagataccctggtagtccacgccgtaaacgatgtctactagaagctcggttcctcggaactgtttttcaaagctaacgcattaagtagaccgcctggggagtacggccgcaaggttaaaactcaaatgaattgacgggggcccgcacaagcggtggagcatgtggtttaattcgatgcaacgcgaagaaccttacctacacttgacatacagagaacttaccagagatggtttggtgccttcgggaactctgatacaggtgctgcatggctgtcgtcagctcgtgttgtgagatgttgggttaagtcccgcaacgagcgcaacccctatccttagttgccagcgattcggtcgggaactctaaggagactgccggtgataaaccggaggaaggtggggacgacgtcaagtcatcatggcccttacgtgtagggctacacacgtgctacaatggcgcatacagagtgctgcgaacctgcgagggtaagcgaatcacttaaagtgcgtcgtagtccggattggagtctgcaactcgactccatgaagtcggaatcgctagtaatcgcgtatcagaatgacgcggtgaatacgttcccgggccttgtacacaccgcccgtcacaccatgggagtgggttgctccagaagtggatagtctaaccttcgggaggacgttcaccacggagtgattcatgactggggtg

SEQ ID NO: 2654 - DNA, 1455 bp, Pseudoalteromonas luteoviolacea
  source 1..1455: mol_type = unassigned DNA
attgaacgctggcggcaggcctaacacatgcaagtcgagcggaaacgagaatagcttgctattcggcgtcgagcggcggacgggtgagtaatgcttgggaacgtgccgtaaggtgggggacaaccattggaaacgatggctaataccgcataatgtctacggaccaaagggggcttcggctctcgccttatgatcggcccaagtgggattagctagttggtaaggtaatggcttaccaaggcgacgatccctagctggtttgagaggatgatcagccacactggaactgagacacggtccagactcctacgggaggcagcagtggggaatattgcacaatgggcgcaagcctgatgcagccatgccgcgtgtgtgaagaaggccttagggttgtaaagcactttcagtaaggaggaaaggttagtagttaatacctgctagctgtgacgttacttacagaagaagcaccggctaactccgtgccagcagccgcggtaatacggagggtgcgagcgttaatcggaattactgggcgtaaagcgtacgcaggcggtttgttaagcgagatgtgaaagccccgggctcaacctgggaactgcatttcgaactggcaaactagagtgtgatagagggtggtagaatttcaggtgtagcggtgaaatgcgtagagatctgaaggaataccgatggcgaaggcagccacctgggtcaacactgacgctcatgtacgaaagcgtggggagcaaacaggattagataccctggtagtccacgccgtaaacgatgtctactaggagctggggtcttcggacaacttttccaaagctaacgcattaagtagaccgcctggggagtacggccgcaaggttaaaactcaaatgaattgacgggggcccgcacaagcggtggagcatgtggtttaattcgatgcaacgcgaagaaccttacctacacttgacatacagagaacttaccagagatggtttggtgccttcgggaactctgatacaggtgctgcatggctgtcgtcagctcgtgttgtgagatgttgggttaagtcccgcaacgagcgcaacccctatccttagttgccagcgattcggtcgggaactctaaggagactgccggtgataaaccggaggaaggtggggacgacgtcaagtcatcatggcccttacgtgtagggctacacacgtgctacaatggcagatacagagtgctgcgaacttgcgagagtaagcgaatcacttaaagtctgtcgtagtccggattggagtctgcaactcgactccatgaagtcggaatcgctagtaatcgcggatcagaatgccgcggtgaatacgttcccgggccttgtacacaccgcccgtcacaccatgggagtgggttgctccagaagtaggtagcttaaccttcgggggggcgcttaccacggagtgattcatgactggggtg

SEQ ID NO: 2655 - DNA, 1371 bp, Pseudoalteromonas marina
  source 1..1371: mol_type = unassigned DNA
gagcggcggacgggtgagtaatgcttgggaacatgccttgaggtgggggacaacagttggaaacgactgctaataccgcataatgtctacggaccaaagggggcttcggctctcgcctttagattggcccaagtgggattagctagttggtgaggtaatggctcaccaaggcaacgatccctagctggtttgagaggatgatcagccacactggaactgagacacggtccagactcctacgggaggcagcagtggggaatattgcacaatgggcgaaagcctgatgcagccatgccgcgtgtgtgaagaaggccttcgggttgtaaagcactttcagtcaggaggaaagggtgtgagttaatacctcatatctgtgacgttactgacagaagaagcaccggctaactccgtgccagcagccgcggtaatacggagggtgcgagcgttaatcggaattactgggcgtaaagcgtacgcaggcggtttgttaagcgagatgtgaaagccccgggctcaacctgggaactgcatttcgaactggcaaactagagtgtgatagagggtggtagaatttcaggtgtagcggtgaaatgcgtagagatctgaaggaataccgatggcgaaggcagccacctgggtcaacactgacgctcatgtacgaaagcgtggggagcaaacgggattagataccccggtagtccacgccgtaaacgatgtctactagaagctcggaacctcggttctgtttttcaaagctaacgcattaagtagaccgcctggggagtacggccgcaaggttaaaactcaaatgaattgacgggggcccgcacaagcggtggagcatgtggtttaattcgatgcaacgcgaagaaccttacctacacttgacatacagagaactttctagagatagattggtgccttcgggagctctgatacaggtgctgcatggctgtcgtcagctcgtgttgtgagatgttgggttaagtcccgcaacgagcgcaacccctatccttagttgctagcaggtaatgctgagaactctaaggagactgccggtgataaaccggaggaaggtggggacgacgtcaagtcatcatggcccttacgtgtagggctacacacgtgctacaatggcgcatacagagtgctgcgaacctgcgaaggtaagcgaatcacttaaagtgcgtcgtagtccggattggagtctgcaactcgactccatgaagtcggaatcgctagtaatcgcgtatcagaatgacgcggtgaatacgttcccgggccttgtacacaccgcccgtcacaccatgggagtgggttgctccagaagtagatagtctaaccctcgggaggacgtttaccacggagtga

SEQ ID NO: 2656 - DNA, 1464 bp, unidentified
  source 1..1464: mol_type = unassigned DNA; note = Pseudoalteromonas neustonica
attgaacgctggcggcaggcctaacacatgcaagtcgagcggtaacagagagtagcttgctactttgctgacgagcggcggacgggtgagtaatgcttgggaatatgccttttggtgggggacaacagttggaaacgactgctaataccgcatgatgtctacggaccaaagtgggggaccttcgggcctcacgccaaaagattagcccaagtgggattagctagttggtaaggtaatggcttaccaaggcaacgatccctagctggtttgagaggatgatcagccacactgggactgagacacggcccagactcctacgggaggcagcagtggggaatattgcacaatgggcgcaagcctgatgcagccatgccgcgtgtgtgaagaaggccttcgggttgtaaagcactttcagtcaggaggaaagggtgtgttttaatagagcatatctgtgacgttactgacagaagaagcaccggctaactccgtgccagcagccgcggtaatacggagggtgcgagcgttaatcggaattactgggcgtaaagcgtacgcaggcggtttgttaagcgagatgtgaaagccccgggctcaacctgggaactgcatttcgaactggcaaactagagtgtgatagagggtggtagaatttcaggtgtagcggtgaaatgcgtagagatctgaaggaataccgatggcgaaggcagccacctgggtcaacactgacgctcatgtacgaaagcgtggggagcaaacaggattagataccctggtagtccacgccgtaaacgatgtctactagaagctcggagcctcggttctgtttttcaaagctaacgcattaagtagaccgcctggggagtacggccgcaaggttaaaactcaaatgaattgacgggggcccgcacaagcggtggagcatgtggtttaattcgatgcaacgcgaagaaccttacctacacttgacatacagagaacttaccagagatggtttggtgccttcgggaactctgatacaggtgctgcatggctgtcgtcagctcgtgttgtgagatgttgggttaagtcccgcaacgagcgcaacccctatccttagttgctagcaggtaatgctgagaactctaaggagactgccggtgataaaccggaggaaggtggggacgacgtcaagtcatcatggcccttacgtgtagggctacacacgtgctacaatggcgcatacagagtgctgcgaactcgcgagagtaagcgaatcacttaaagtgcgtcgtagtccggattggagtctgcaactcgactccatgaagtcggaatcgctagtaatcgcgtatcagaatgacgcggtgaatacgttcccgggccttgtacacaccgcccgtcacaccatgggagtgggttgctccagaagtagatagtctaaccctcgggaggacgtttaccacggagtgattcatgactggggtg

SEQ ID NO: 2657 - DNA, 1458 bp, Pseudoalteromonas nigrifaciens
  source 1..1458: mol_type = unassigned DNA
attgaacgctggcggcaggcctaacacatgcaagtcgagcggtaacagaaagtagcttgctactttgctgacgagcggcggacgggtgagtaatgcttgggaacatgccttgaggtgggggacaacagttggaaacgactgctaataccgcataatgtctacggaccaaagggggcttcggctctcgcctttagattggcccaagtgggattagctagttggtgaggtaatggctcaccaaggcgacgatccctagctggtttgagaggatgatcagccacactgggactgagacacggcccagactcctacgggaggcagcagtggggaatattgcacaatgggcgcaagcctgatgcagccatgccgcgtgtgtgaagaaggccttcgggttgtaaagcactttcagtcaggaggaaaggttagtagttaatacctgctagctgtgacgttactgacagaagaagcaccggctaactccgtgccagcagccgcggtaatacggagggtgcgagcgttaatcggaattactgggcgtaaagcgtacgcaggcggtttgttaagcgagatgtgaaagccccgggctcaacctgggaactgcatttcgaactggcaaactagagtgtgatagagggtggtagaatttcaggtgtagcggtgaaatgcgtagagatctgaaggaataccgatggcgaaggcagccacctgggtcaacactgacgctcatgtacgaaagcgtggggagcaaacgggattagataccccggtagtccacgccgtaaacgatgtctactagaagctcggagcctcggttctgtttttcaaagctaacgcattaagtagaccgcctggggagtacggccgcaaggttaaaactcaaatgaattgacgggggcccgcacaagcggtggagcatgtggtttaattcgatgcaacgcgaagaaccttacctacacttgacatacagagaacttaccagagatggtttggtgccttcgggaactctgatacaggtgctgcatggctgtcgtcagctcgtgttgtgagatgttgggttaagtcccgcaacgagcgcaacccctatccttagttgctagcaggtaatgctgagaactctaaggagactgccggtgataaaccggaggaaggtggggacgacgtcaagtcatcatggcccttacgtgtagggctacacacgtgctacaatggcgcatacagagtgctgcgaacctgcgaaggtaagcgaatcacttaaagtgcgtcgtagtccggattggagtctgcaactcgactccatgaagtcggaatcgctagtaatcgcgtatcagaatgacgcggtgaatacgttcccgggccttgtacacaccgcccgtcacaccatgggagtgggttgctccagaagtagatagtctaaccctcgggaggacgtttaccacggagtgattcatgactggggtg

SEQ ID NO: 2658 - DNA, 1424 bp, Pseudoalteromonas peptidolytica
  source 1..1424: mol_type = unassigned DNA
caggcctaacacatgcaagtcgagcggtaacatttctagcttgctagaagatgacgagcggcggacgggtgagtaatgcttgggaacatgccttgaggtgggggacaaccattggaaacgatggctaataccgcataatgtctacggaccaaagggggcttcggctctcgcctttagattggcccaagtgggattagctagttggtgaggtaagggctcaccaaggcgacgatccctagctggtttgagaggatgatcagccacactggaactgagacacggtccagactcctacgggaggcagcagtggggaatattgcacaatgggcgcaacctgatgcagccatgccgcgtgtgtgaagaaggccttagggttgtaaagcactttcagtcaggaggaaaggttagtagttaatacctgctagctgtgacgttactgacagaagaagcaccggctaactccgtgccagcagccgcggtaatacggagggtgcgagcgttaatcggaattactgggcgtaaagcgtacgcaggcggtttgttaagcgagatgtgaaagccccgggcttaacctgggaactgcatttcgaactggcaaactagagtgtgatagagggtggtagaatttcaggtgtagcggtgaaatgcgtagagatctgaaggaataccgatggcgaaggcagccacctgggtcaacactgacgctcatgtacgaaagcgtggggagcaaacaggattagataccctggtagtccacgccgtaaacgatgtctactaggagctggggtcttcggacaacttttccaaagctaacgcattaagtagaccgcctggggagtacggccgcaaggttaaaactcaaatgaattgacgggggcccgcacaagcggtggagcatgtggtttaattcgatgcaacgcgaagaaccttacctacacttgacatacagagaacttaccagagatgtttggtgccttcgggagtttgatacaggtgctgcatggctgttgtcagctcgtgttgtgagatgttgggttaagtcccgcaacgagcgcaacccctatccttagttgccagcgattcggtcgggaatctaaggagactgccggtgataaaccggaggaaggtgggacgacgtcaagtcatcatggcccttacgtgtagggctacacacgtgctacaatggcaggtacagagagcagcgagctagcgatagtgagcgaatcccttaaagcctgtcgtagtccggattggagtctgcaactcgactccatgaagtcggaatcgctagtaatcgcgaatcagaatgtcgcggtgaatacgttcccgggcttgtacacaccgcccgtcacaccatgggagtgggttgctccagaagtggatagtctaaccttcgggggacgttgaccacggagtgaatcatg

SEQ ID NO: 2659 - DNA, 1455 bp, Pseudoalteromonas phenolica
  source 1..1455: mol_type = unassigned DNA
attgaacgctggcggcaggcctaacacatgcaagtcgagcggtaacatttctagcttgctagaagatgacgagcggcggacgggtgagtaatgcttgggaatatgccttagggtgggggacaacagttggaaacgactgctaataccgcataacgtctacggaccaaagggggcttcggctctcgcccttagattagcccaagtgggattagctagttggtgaggtaatggctcaccaaggcgacgatccctagctggtttgagaggatgatcagccacactggaactgagacacggtccagactcctacgggaggcagcagtggggaatattgcacaatgggcgcaagcctgatgcagccatgccgcgtgtgtgaagaaggccttagggttgtaaagcactttcagtaaggaggaaaggttagtagttaatacctgctagctgtgacgttacttacagaagaagcaccggctaactccgtgccagcagccgcggtaatacggagggtgcgagcgttaatcggaattactgggcgtaaagcgtacgcaggcggtttgttaagcgagatgtgaaagccccgggctcaacctgggaactgcatttcgaactggcaaactagagtatgatagagggtggtagaatttcaggtgtagcggtgaaatgcgtagagatctgaaggaataccgatggcgaaggcagccacctgggtcaatactgacgctcatgtacgaaagcgtggggagcaaacgggattagataccccggtagtccacgccgtaaacgatgtctactaggagctggggtcttcggacaacttttccaaagctaacgcattaagtagaccgcctggggagtacggccgcaaggttaaaactcaaatgaattgacgggggcccgcacaagcggtggagcatgtggtttaattcgatgcaacgcgaagaaccttacctacacttgacatacagagaacttactagagatagtttggtgccttcgggaactctgatacaggtgctgcatggctgtcgtcagctcgtgttgtgagatgttgggttaagtcccgcaacgagcgcaacccctatccttagttgccagcgattcggtcgggaactctaaggagactgccggtgataaaccggaggaaggtggggacgacgtcaagtcatcatggcccttacgtgtagggctacacacgtgctacaatggcgcatacagagtgctgcaagctcgcgagagttagcgaatcacttaaaatgcgtcgtagtccggattggagtctgcaactcgactccatgaagtcggaatcgctagtaatcgcggatcagaatgccgcggtgaatacgttcccgggccttgtacacaccgcccgtcacaccatgggagtgggttgctccagaagtaggtagcttaaccttagggagggcgcttaccacggagtgattcatgactggggtg

SEQ ID NO: 2660 - DNA, 1455 bp, unidentified
  source 1..1455: mol_type = unassigned DNA; note = Pseudoalteromonas piratica
attgaacgctggcggcaggcctaacacatgcaagtcgagcggtaacatttctagcttgctagaagatgacgagcggcggacgggtgagtaatgcttgggaacatgcctttaggtgggggacaaccattggaaacgatggctaataccgcataatgtctacggaccaaagggggcttcggctctcgcctttagattggcccaagtgggattaggtagttggtgaggtaatggctcaccaagccgacgatccctagctggtttgagaggatgatcagccacactggaactgagacacggtccagactcctacgggaggcagcagtggggaatattgcacaatgggcgcaagcctgatgcagccatgccgcgtgtgtgaagaaggccttcgggttgtaaagcactttcagttgtgaggaaaggttagtagttaatacctgctagctgtgacgttagcaacagaagaagcaccggctaactccgtgccagcagccgcggtaatacggagggtgcgagcgttaatcggaattactgggcgtaaagcgtacgcaggcggtttgttaagcgagatgtgaaagccccgggctcaacctgggaactgcatttcgaactggcaaactagagtgtgatagagggtggtagaatttcaggtgtagcggtgaaatgcgtagagatctgaaggaataccgatggcgaaggcagccacctgggtcaacactgacgctcatgtacgaaagcgtggggagcaaacgggattagataccccggtagtccacgccgtaaacgatgtctactaggagttcggtttttcggaactgtcttccaaagctaacgcattaagtagaccgcctggggagtacggccgcaaggttaaaactcaaatgaattgacgggggcccgcacaagcggtggagcatgtggtttaattcgatgcaacgcgaagaaccttacctacacttgacatccagagaacttactagagatagtttggtgccttcgggaactctgagacaggtgctgcatggctgtcgtcagctcgtgttgtgagatgttgggttaagtcccgcaacgagcgcaacccctatccttagttgccagcgattcggtcgggaactctaaggagactgccggtgataaaccggaggaaggtggggacgacgtcaagtcatcatggcccttacgtgtagggctacacacgtgctacaatggcgcatacagagtgctgcgaactcgcgagagtaagcgaatcacttaaagtgcgtcgtagtccggattggagtctgcaactcgactccatgaagtcggaatcgctagtaatcgcgaatcagaatgtcgcggtgaatacgttcccgggccttgtacacaccgcccgtcacaccatgggagtgggttgctccagaagtaggtagcttaaccttagggagggcgcttaccacggagtgattcatgactggggtg

SEQ ID NO: 2661 - DNA, 1455 bp, Pseudoalteromonas piscicida
  source 1..1455: mol_type = unassigned DNA
attgaacgctggcggcaggcctaacacatgcaagtcgagcggtaacatttctagcttgctagaagatgacgagcggcggacgggtgagtaatgcttgggaacatgccttgaggtgggggacaaccattggaaacgatggctaataccgcataatgtctacggaccaaagggggcttcggctctcgcctttagattggcccaagtgggattagctagttggtgaggtaaaggctcaccaaggcgacgatccctagctggtttgagaggatgatcagccacactggaactgagacacggtccagactcctacgggaggcagcagtggggaatattgcacaatgggcgcaagcctgatgcagccatgccgcgtgtgtgaagaaggccttcgggttgtaaagcactttcagtcaggaggaaaggttagtagttaatacctgctagctgtgacgttactgacagaagaagcaccggctaactccgtgccagcagccgcggtaatacggagggtgcgagcgttaatcggaattactgggcgtaaagcgtacgcaggcggtttgttaagcgagatgtgaaagccccgggcttaacctgggaactgcatttcgaactggcaaactagagtgtgatagagggtggtagaatttcaggtgtagcggtgaaatgcgtagagatctgaaggaataccgatggcgaaggcagccacctgggtcaacactgacgctcatgtacgaaagcgtggggagcaaacaggattagataccctggtagtccacgccgtaaacgatgtctactaggagctggggtcttcggacaacttttccaaagctaacgcattaagtagaccgcctggggagtacggccgcaaggttaaaactcaaatgaattgacgggggcccgcacaagcggtggagcatgtggtttaattcgatgcaacgcgaagaaccttacctacacttgacatacagagaacttaccagagatggtttggtgccttcgggaactctgatacaggtgctgcatggctgtcgtcagctcgtgttgtgagatgttgggttaagtcccgcaacgagcgcaacccctatccttagttgccagcgattcggtcgggaactctaaggagactgccggtgataaaccggaggaaggtggggacgacgtcaagtcatcatggcccttacgtgtagggctacacacgtgctacaatggcaggtacagagagcagcgagctagcgatagtgagcgaatcccttaaagcctgtcgtagtccggattggagtctgcaactcgactccatgaagtcggaatcgctagtaatcgcaaatcagaatgttgcggtgaatacgttcccgggccttgtacacaccgcccgtcacaccatgggagtgggttgctccagaagtggatagtctaaccttcgggaggacgttcaccacggagtgattcatgactggggtg

SEQ ID NO: 2662 - DNA, 1473 bp, unidentified
  source 1..1473: mol_type = unassigned DNA; note = Pseudoalteromonas profundi
attgaacgctggcggcaggcctaacacatgcaagtcgagcggcagcgacaacattgaaccttcgggggatttgttgggcggcgagcggcggacgggtgagtaatgcttgggaatatgccttatggtgggggacaacagttggaaacgactgctaataccgcatgatgtctacggaccaaagtgggggaccttcgggcctcacgccataagattagcccaagtgggattagctagttggtgaggtaatggctcaccaaggcgacgatccctagctggtttgagaggatgatcagccacactgggactgagacacggcccagactcctacgggaggcagcagtggggaatattgcacaatgggcgcaagcctgatgcagccatgccgcgtgtgtgaagaaggccttcgggttgtaaagcactttcagtaaggaggaaaggttagtcactaatattggctagctgtgacgttacttacagaagaagcaccggctaactccgtgccagcagccgcggtaatacggagggtgcgagcgttaatcggaattactgggcgtaaagcgtacgcaggcggtttgttaagcgagatgtgaaagccccgggctcaacctgggaactgcatttcgaactggcaaactagagtgtgatagagggtggtagaatttcaggtgtagcggtgaaatgcgtagagatctgaaggaataccgatggcgaaggcagccacctgggtcaacactgacgctcatgtacgaaagcgtggggagcaaacaggattagataccctggtagtccacgccgtaaacgatgtctactagaagctcggttcctcggaactgtttttcaaagctaacgcattaagtagaccgcctggggagtacggccgcaaggttaaaactcaaatgaattgacgggggcccgcacaagcggtggagcatgtggtttaattcgatgcaacgcgaagaaccttacctacacttgacatacagagaacttaccagagatggtttggtgccttcgggaactctgatacaggtgctgcatggctgtcgtcagctcgtgttgtgagatgttgggttaagtcccgcaacgagcgcaacccctatccttagttgccagcgattcggtcgggaactctaaggagactgccggtgataaaccggaggaaggtggggacgacgtcaagtcatcatggcccttacgtgtagggctacacacgtgctacaatggcgcatacagagtgctgcgaacctgcgagggtaagcgaatcacttaaagtgcgtcgtagtccggattggagtctgcaactcgactccatgaagtcggaatcgctagtaatcgcgtatcagaatgacgcggtgaatacgttcccgggccttgtacacaccgcccgtcacaccatgggagtgggttgctccagaagtggatagtctaaccttcgggaggacgttcaccacggagtgattcatgactggggtg

SEQ ID NO: 2663 - DNA, 1426 bp, Pseudoalteromonas rubra
  source 1..1426: mol_type = unassigned DNA
  misc_difference 221: note = n is a, c, g, or t
  misc_difference 233: note = n is a, c, g, or t
  misc_difference 242: note = n is a, c, g, or t
ttgaacgctggcggcaggcctaacacatgcaagtcgagcggtaacatttctagcttgctagaagatgacgagcggcggacgggtgagtaatgcttgggaacatgcctttaggtgggggacaaccattggaaacgatggctaataccgcataatgtctacggaccaaagggggcttcggctctcgcctttagattggcccaagtgggattagctagttggtnaggtaacggctnaccaaggcnacgatccctagctggtttgagaggatgatcagccacactggaactgagacacggtccagactcctacgggaggcagcagtggggaatattgcacaatgggcgcaagcctgatgcagccatgccgcgtgtgtgaagaaggccttcgggttgtaaagcactttcagtcaggaggaaaggttagtagttaatacctgctagctgtgacgttactgacagaagaagcaccggctaactccgtgccagcagccgcggtaatacggagggtgcgagcgttaatcggaattactgggcgtaaagcgtacgcaggcggtttgttaagcgagatgtgaaagccccgggcttaacctgggaactgcatttcgaactggcaaactagagtgtgatagagggtggtagaatttcaggtgtagcggtgaaatgcgtagagatctgaaggaataccgatggcgaaggcagccacctgggtcaacactgacgctcatgtacgaaagcgtggggagcaaacaggattagataccctggtagtccacgccgtaaacgatgtctactaggagctggggtccttcggacaacttttccaaagctaacgcattaagtagaccgcctggggagtacggccgcaaggttaaaactcaaatgaattgacgggggccgcacaagcggtggagcatgtggtttaattcgatgcaacgcgaagaaccttacctacacttgacatacagagaacttaccagagatggtttggtgccttcgggaactctgatacaggtgctgcatggctgtcgtcagctcgtgttgtgagatgttgggttaagtcccgcaacgagcgcaacccttatccttagttgccagcgattcggtcgggaactctaaggagactgccggtgataaaccggaggaaggtggggacgacgtcaagtcatcatggcccttacgtgtagggctacacacgtgctacaatggcatatacagagtgctgcgaactagcgatagtaagcgaatcacttaaagtatgtcgtagtccggattggagtctgcaactcgactccatgaagtcggaatcgctagtaatcgcggatcagaatgccgcggtgaatacgttcccgggccttgtacacaccgcccgtcacaccatgggagtgggttgctccagaagtggatagcttaacttcgggagggcgttc

SEQ ID NO: 2664 - DNA, 1457 bp, Pseudoalteromonas ruthenica
  source 1..1457: mol_type = unassigned DNA
  misc_difference 157: note = n is a, c, g, or t
  misc_difference 159: note = n is a, c, g, or t
attgaacgctggcggcaggcctaacacatgcaagtcgagcggaaacgaagaggtgcttgcacctctggcgtcgagcggcggacgggtgagtaatgcttgggaacatgccttgaggtgggggacaaccgttggaaacgacggctaataccgcataatntntacggaccaaagggggcttcggctctcgcctttagattggcccaagtgggattagctagttggtgaggtaatggctcaccaaggcgacgatccctagctggtttgagaggatgatcagccacactgggactgagacacggcccagactcctacgggaggcagcagtggggaatattgcacaatgggcgcaagcctgatgcagccatgccgcgtgtgtgaagaaggccttcgggttgtaaagcactttcagcaaggaggaaaggttgttagttaatacctgatatctgtgacgttacttgcagaagaagcaccggctaactccgtgccagcagccgcggtaatacggagggtgcgagcgttaatcggaattactgggcgtaaagcgtacgcaggcggtttgttaagcgagatgtgaaagccccgggcttaacctgggaactgcatttcgaactggcaagctagagtgtgatagagggtggtagaatttcaggtgtagcggtgaaatgcgtagagatctgaaggaataccgatggcgaaggcagccacctgggtcaacactgacgctcatgtacgaaagcgtggggagcaaacaggattagataccctggtagtccacgccgtaaacgatgtctactaggagctcggcttttcggagctgttttccaaagcaaacgcattaagtagaccgcctggggagtacggccgcaaggttaaaactcaaatgaattgacgggggcccgcacaagcggtggagcatgtggtttaattcgatgcaacgcgaagaaccttacctacacttgacatccagagaactttctagagatagattggtgccttcgggaactctgagacaggtgctgcatggctgtcgtcagctcgtgttgtgagatgttgggttaagtcccgcaacgagcgcaacccctatccttagttgccagcgattcggtcgggaactctaaggagactgccggtgataaaccggaggaaggtggggacgacgtcaagtcatcatggcccttacgtgtagggctacacacgtgctacaatggcgcatacagagtgctgcgagcctgcgagggtgagcgaatcacttaaagtgcgtcgtagtccggattggagtctgcaactcgactccatgaagtcggaatcgctagtaatcgcgaatcagaatgtcgcggtgaatacgttcccgggccttgtacacaccgcccgtcacaccatgggagtgggttgctccagaagtggttagcctaaccttcgggagggcgatcaccacggagtgattcatgactggggtg

SEQ ID NO: 2665 - DNA, 1455 bp, Pseudoalteromonas spongiae
  source 1..1455: mol_type = unassigned DNA
attgaacgctggcggcaggcctaacacatgcaagtcgagcggtaacatttctagcttgctagaagatgacgagcggcggacgggtgagtaatgcttgggaacatgcctttgggtgggggacaaccattggaaacgatggctaataccgcataatgtctacggaccaaagggggcttcggctctcgcctttagattggcccaagtgggattagctagttggtgaggtaatggctcaccaaggcgacgatccctagctggtttgagaggatgatcagccacactggaactgagacacggtccagactcctacgggaggcagcagtggggaatattgcacaatgggcgcaagcctgatgcagccatgccgcgtgtgtgaagaaggccttcgggttgtaaagcactttcagttgtgaggaaaggttagtagttaatacctgctagctgtgacgttagcaacagaagaagcaccggctaactccgtgccagcagccgcggtaatacggagggtgcgagcgttaatcggaattactgggcgtaaagcgtacgcaggcggtttgttaagcgagatgtgaaagccccgggctcaacctgggaactgcatttcgaactggcaaactagagtgtgatagagggtggtagaatttcaggtgtagcggtgaaatgcgtagagatctgaaggaataccgatggcgaaggcagccacctgggtcaacactgacgctcatgtacgaaagcgtggggagcaaacgggattagataccccggtagtccacgccgtaaacgatgtctactaggagttcggtttttcggaactgtcttccaaagctaacgcattaagtagaccgcctggggagtacggccgcaaggttaaaactcaaatgaattgacgggggcccgcacaagcggtggagcatgtggtttaattcgatgcaacgcgaagaaccttacctacacttgacatccagagaacttactagagatagtttggtgccttcgggaactctgagacaggtgctgcatggctgtcgtcagctcgtgttgtgagatgttgggttaagtcccgcaacgagcgcaacccctatccttagttgccagcgattcggtcgggaactctaaggagactgccggtgataaaccggaggaaggtggggacgacgtcaagtcatcatggcccttacgtgtagggctacacacgtgctacaatggcgcatacagagtgctgcgaactcgcgagagtaagcgaatcacttaaagtgcgtcgtagtccggattggagtctgcaactcgactccatgaagtcggaatcgctagtaatcgcgaatcagaatgtcgcggtgaatacgttcccgggccttgtacacaccgcccgtcacaccatgggagtgggttgctccagaagtaggtagcttaaccttagggagggcgcttaccacggagtgattcatgactggggtg

SEQ ID NO: 2666 - DNA, 1456 bp, Pseudoalteromonas tetraodonis
  source 1..1456: mol_type = unassigned DNA
attgaacgctggcggcaggcctaacacatgcaagtcgagcggtaacatttctagcttgctagaagatgacgagcggcggacgggtgagtaatgcttgggaacatgccttgaggtgggggacaacagttggaaacgactgctaataccgcataatgtctacggaccaaagggggcttcggctctcgcctttagattggcccaagtgggattagctagttggtgaggtaatggctcaccaaggcgacgatccctagctggtttgagaggatgatcagccacactgggactgagacacggcccagactcctacgggaggcagcagtggggaatattgcacaatgggcgcaagcctgatgcagccatgccgcgtgtgtgaagaaggccttcgggttgtaaagcactttcagtcaggaggaaaggttagtagttaatacctgctagctgtgacgttactgacagaagaagcaccggctaactccgtgccagcagccgcggtaatacggagggtgcgagcgttaatcggaattactgggcgtaaagcgtacgcaggcggtttgttaagcgagatgtgaaagccccgggctcaacctgggaactgcatttcgaactggcaaactagagtgtgatagagggtggtagaatttcaggtgtagcggtgaaatgcgtagagatctgaaggaataccgatggcgaaggcagccacctgggtcaacactgacgctcatgtacgaaagcgtggggagcaaacaggattagataccctggtagtccacgccgtaaacgatgtctactagaagctcggaacctcggttctgtttttcaaagctaacgcattaagtagaccgcctggggagtacggccgcaaggttaaaactcaaatgaattgacgggggcccgcacaagcggtggagcatgtggtttaattcgatgcaacgcgaagaaccttacctacacttgacatacagagaacttaccagagatggtttggtgccttcgggaactctgatacaggtgctgcatggctgtcgtcagctcgtgttgtgagatgttgggttaagtcccgcaacgagcgcaacccctatccttagttgctagcaggtaatgctgagaactctaaggagactgccggtgataaaccggaggaaggtggggacgacgtcaagtcatcatggcccttacgtgtagggctacacacgtgctacaatggcgcatacagagtgctgcgaactcgcgagagtaagcgaatcacttaaagtgcgtcgtagtccggattggagtctgcaactcgactccatgaagtcggaatcgctagtaatcgcgtatcagaatgacgcggtgaatacgttcccgggccttgtacacaccgcccgtcacaccatgggagtgggttgctccagaagtagatagtctaaccctcgggaggacgtttaccacggagtgattcatgactggggtg

SEQ ID NO: 2667 - DNA, 1458 bp, Pseudoalteromonas translucida
  source 1..1458: mol_type = unassigned DNA
attgaacgctggcggcaggcctaacacatgcaagtcgagcggtaacagaaagtagcttgctactttgctgacgagcggcggacgggtgagtaatgcttgggaacatgccttgaggtgggggacaacagttggaaacgactgctaataccgcataatgtctacggaccaaagggggcttcggctctcgcctttagattggcccaagtgggattagctagttggtgaggtaatggctcaccaaggcgacgatccctagctggtttgagaggatgatcagccacactgggactgagacacggcccagactcctacgggaggcagcagtggggaatattgcacaatgggcgcaagcctgatgcagccatgccgcgtgtgtgaagaaggccttcgggttgtaaagcactttcagtcaggaggaaagcgtggtggttaatacccatcatgtgtgacgttactgacagaagaagcaccggctaactccgtgccagcagccgcggtaatacggagggtgcgagcgttaatcggaattactgggcgtaaagcgtacgcaggcggtttgttaagcgagatgtgaaagccccgggctcaacctgggaactgcatttcgaactggcaaactagagtgtgatagagggtggtagaatttcaggtgtagcggtgaaatgcgtagagatctgaaggaataccgatggcgaaggcagccacctgggtcaacactgacgctcatgtacgaaagcgtggggagcaaacgggattagataccccggtagtccacgccgtaaacgatgtctactagaagctcggagcctcggttctgtttttcaaagctaacgcattaagtagaccgcctggggagtacggccgcaaggttaaaactcaaatgaattgacgggggcccgcacaagcggtggagcatgtggtttaattcgatgcaacgcgaagaaccttacctacacttgacatacagagaacttaccagagatggtttggtgccttcgggaactctgatacaggtgctgcatggctgtcgtcagctcgtgttgtgagatgttgggttaagtcccgcaacgagcgcaacccctatccttagttgctagcaggtaatgctgagaactctaaggagactgccggtgataaaccggaggaaggtggggacgacgtcaagtcatcatggcccttacgtgtagggctacacacgtgctacaatggcgcatacagagtgctgcgaacctgcgaaggtaagcgaatcacttaaagtgcgtcgtagtccggattggagtctgcaactcgactccatgaagtcggaatcgctagtaatcgcgtatcagaatgacgcggtgaatacgttcccgggccttgtacacaccgcccgtcacaccatgggagtgggttgctccagaagtagatagtctaaccctcgggaggacgtttaccacggagtgattcatgactggggtg

SEQ ID NO: 2668 - DNA, 1464 bp, Pseudoalteromonas tunicata
  source 1..1464: mol_type = unassigned DNA
attgaacgctggcggcaggcctaacacatgcaagtcgagcggtagcacagagaaacttgtttcttgggtgacgagcggcggacgggtgagtaatgcttgggaacatgcctttaggtgggggacaacagttggaaacgactgctaataccgcatgatgtctacggaccaaagtgggggaccttcgggcctcacgcctaaagattggcccaagtgggattagctagttggtgaggtaatggctcaccaaggcaacgatctctagctggtttgagaggatgatcagccacactggaactgagacacggtccagactcctacgggaggcagcagtggggaatattgcacaatgggcgaaagcctgatgcagccatgccgcgtgtgtgaagaaggccttcgggttgtaaagcactttcagtcaggaggaaaggttacgttttaatagaacgtagctgtgacgttactgacagaagaagcaccggctaactccgtgccagcagccgcggtaatacggagggtgcgagcgttaatcggaattactgggcgtaaagcgtacgcaggcggttgattaagcgagatgtgaaagccccgggctcaacctgggaactgcatttcgaactggtcaactagagtgtgatagagggtggtagaatttcaggtgtagcggtgaaatgcgtagagatctgaaggaataccgatggcgaaggcagccacctgggtcaacactgacgctcatgtacgaaagcgtggggagcaaacaggattagataccctggtagtccacgccgtaaacgatgtctactagaagctggggtcctcggacaactttttcaaagctaacgcattaagtagaccgcctggggagtacggccgcaaggttaaaactcaaatgaattgacgggggcccgcacaagcggtggagcatgtggtttaattcgatgcaacgcgaagaaccttacctacacttgacatccagagaaatcgctagagatagctttgtgccttcgggaactctgagacaggtgctgcatggctgtcgtcagctcgtgttgtgagatgttgggttaagtcccgcaacgagcgcaacccctatccttagttgccagcgagtaatgtcgggaactctaaggagactgccggtgataaaccggaggaaggtggggacgacgtcaagtcatcatggcccttacgtgtagggctacacacgtgctacaatggcgagtacagagggcagcaagctagcgatagtgagcgaatcccttaaagctcgtcgtagtccggattggagtctgcaactcgactccatgaagtcggaatcgctagtaatcgcaaatcagaatgttgcggtgaatacgttcccgggccttgtacacaccgcccgtcacaccatgggagtgggttgcaccagaagtagctagcttaaccttcgggagggcggttaccacggtgtgattcatgactggggtg

SEQ ID NO: 2669 - DNA, 1355 bp, Pseudoalteromonas ulvae
  source 1..1355: mol_type = unassigned DNA
tgctagaagatgacgagcggcggacgggtgagtaatgcttgggaatatgccttagggtgggggacaacagttggaaacgactgctaataccgcatgatgtctacggaccaaagggggcttcggctctcgcccttagattagcccaagtgggattagctagttggtgaggtaaaggctcaccaaggcgacgatccctagctggtttgagaggatgatcagccacactggaactgagacacggtccagactcctacgggaggcagcagtggggaatattgcacaatgggggaaaccctgatgcagccatgccgcgtgtgtgaagaaggccttcgggttgtaaagcactttcagtaaggaggaaaggttagtagttaatacctgytagctgtgacgttacttacagaagaagcaccggctaactccgtgccagcagccgcggtaatacggagggtgcgagcgttaatcggaattactgggcgtaaagcgtacgcaggcggttgattaagcgagatgtgaaagccccgggctcaacctgggaactgcatttcgaactggtcaactagagtgtgatagagggtggtagaatttcaggtgtagcggtgaaatgcgtagagatctgaaggaataccgatggcgaaggcagccacctgggtcaacactgacgctcatgtacgaaagcgtggggagcaaacaggattagataccctggtagtccacgccgtaaacgatgtctactagaagctggggtcctcggacaactttttcaaagctaacgcattaagtagaccgcctggggagtacggccgcaaggttaaaactcaaatgaattgacgggggcccgcacaagcggtggagcatgtggtttaattcgatgcaacgcgaagaaccttacctacacttgacatccagagaaatcgctagagatagctttgtgccttcgggaactctgagacaggtgctgcatggctgtcgtcagctcgtgttgtgagatgttgggttaagtcccgcaacgagcgcaacccctatccttagttgccagcgagtaatgtcgggaactctaaggagactgccggtgataaaccggaggaaggtggggacgacgtcaagtcatcatggcccttacgtgtagggctacacacgtgctacaatggcaggtacagagggcagcaagctagcgatagtgagcgaatcccttaaagcttgtcgtagtccggattggagtctgcaactcgactccatgaagtcggaatcgctagtaatcgcaaatcagaatgttgcggtgaatacgttcccgggccttgtacacaccgcccgtcacaccatgggagtgggttgcaccagaagtagctagctta

SEQ ID NO: 2670 - DNA, 1425 bp, unidentified
  source 1..1425: mol_type = unassigned DNA; note = Pseudobacter ginsenosidimutans
gatgaacgctagcggcaggcttaatacatgcaagtcgaggggcatcgcaggtagcaatactgggcggcgaccggcaaacgggtgcggaacacgtacgcaaccttcctttaagtgtgggatagcccagggaaacttggattaataccacgtaatataattgagtggcatcacttaattattatagctccggcgcttaaagatgggcgtgcgcctgattaggtagttggcggggtaacggcccaccaagccttcgatcagtaactggtgtgagagcacgaccagtcacacgggcactgagacacgggcccgactcctacgggaggcagcagtaaggaatattggtcaatggacgcaagtctgaaccagccatgccgcgtggaggatgaaggtcctctggattgtaaacttcttttttctgggaagaaacctggcttttcttggtcagctgacggtaccagaagaataagcaccggctaactccgtgccagcagccgcggtaatacggagggtgcaagcgttatccggattcactgggtttaaagggtgcgtaggtgggctgataagtcagtggtgaaatccccgagcttaacttgggaactgccattgatactatcggtcttgaatatcgtgtaggtaagcggaatatgtcatgtagcggtgaaatgcttagatatgacatagaacaccaattgcgaaggcagcttactttacgatcattgacactgaggcacgaaagcgtggggagcaaacaggattagataccctggtagtccacgccctaaactatggatactcgacatcagcgatacactgttggtgtctgagcgaaagcattaagtatcccacctgggaagtacgaccgcaaggttgaaactcaaaggaattggcgggggtccgcacaagcggtggagcatgtggtttaattcgatgatacgcgaggaaccttacctgggctagaatgcagtctgaccgtgggtgaaagctcattttgtagcaatacacagattgtaaggtgctgcatggccgtcgtcagctcgtgccgtgaggtgttgggttaagtcccgcaacgagcgcaacccccatcattagttgccatcaggtaaagctgggaactctaatgaaactgccgtcgtaagacgcgaggaaggaggggatgatgtcaggtcatcatggcctttatgcccagggctacacacgtgctacaatgggggagacaaagggctgccacttggcaacaaggcgctaatcccaaaaactccctctcagttcggatcgcagtctgcaactcgactgcgtgaagctggaatcgctagtaatcgtatatcagcaatgatacggtgaatacgttcccggaccttgcacacaccgcccgtcaagccatggaagccgggtgtacctaaagtcggtaaccgcaaggagccgcct

SEQ ID NO: 2671 - DNA, 1434 bp, unidentified
  source 1..1434: mol_type = unassigned DNA; note = Pseudobacteroides cellulosolvens
gacgaacgctggcggcgtgcctaacacatgcaagtcgagcggagatatttagcaatagatatcttagcggcggacgggtgagtaacgcgtgggtaacctgccttatacagggggataacacagggaaacttgtgctaataccgcataacacaattttgtggcatcacagagttgtcaaaggagcaatccggtataagatggacccgcgtccaattagctagttggtggtgtaacggaccaccaaggcgacgattggtagccgaactgagaggttgatcggccacattgggactgagacacggcccagactcctacgggaggcagcagtggggaatattgcacaatgggggaaaccctgatgcagcaacgccgcgtgaaggatgaaggttttcggatcgtaaacttctttgatgagggacgaataatgacggtacctcaaaaacaagccacggctaactacgtgccagcagccgcggtaatacgtaggtggcgagcgttgtccggatttactgggtgtaaagggcgtgtaggcgggaatgtaagtcagatgtgaaactccgaagctcaacttcggaactgcatctgaaactatgtttcttgagtgctggagaggaaagcggaattcctagtgtagcggtgaaatgcgtagatattaggaggaacaccagtggcgaaggcggctttctggacagtaactgacgctgaggcgcgaaagcgtggggagcaaacaggattagataccctggtagtccacgctgtaaacgatggatactaggtgtgggaggtatcgaccccttccgtgccgcagttaacacaataagtatcccacctggggagtacggccgcaaggttgaaactcaaaggaattgacgggggcccgcacaagcagtggagtatgtggtttaattcgaagcaacgcgaagaaccttaccagggcttgacatcccttgacgatggtagagatatcatttcccttcggggcaaggagacaggtggtgcatggttgtcgtcagctcgtgtcgtgagatgttgggttaagtcccgcaacgagcgcaacccctgttgttagttgccatcattaagttgggcactctagcgagactgccggtgacaaatcggaggaaggtggggacgacgtcaaatcatcatgccccttatgtcctgggctacacacgtactacaatggctattacagagggaagctaagccgcaaggtggagcaaatccccaaaaatagtcccagttcagattgtgggctgaaactcgcccacatgaagtcggaattgctagtaatggcaggtcagcatactgccgtgaatacgttcccgggccttgtacacaccgcccgtcacaccatgagagtctgcaacacccgaagtcagtagtctaaccgcaaggaggacgctgccgaaggtggggccgatgattggggtg

SEQ ID NO: 2672 - DNA, 1443 bp, Pseudobutyrivibrio ruminis
  source 1..1443: mol_type = unassigned DNA
  misc_difference 176: note = n is a, c, g, or t
ggcggcgtgcctaacacatgcaagtcgacggagcaacttatcacgatcccttcggggtgacgatttgttgactgagtggcggacgggtgagtaacgcgtgggtaacctaccttgtacagggggacaacagttggaaacgactgctaataccgcataagcgcacagcatcgcatgangcagtgtgaaaagtttttcggtacaagatggacccgcgtctgattagctagttggtgaggtaacggcccaccaaggcgacgatcagtaaccgacctgagagggtgaccggccacattgggactgagacacggcccaaactcctacgggaggcagcagtggggaatattgcacaatgggcgaaagcctgatgcagcgacgccgcgtgagcgaagaagtatttcggtatgtaaagctctatcagcagggaagataatgacggtacctgactaagaagcaccggctaaatacgtgccagcagccgcggtaatacgtatggtgcaagcgttatccggatttactgggtgtaaagggagcgtaggcggttttacaagtctgatgtgaaagcccggggctcaactccggtattgcattggaaactgtagaactagagtgtcggaggggtaagtggaattcctagtgtagcggtgaaatgcgtagatattaggaggaacaccagtggcgaaggcggcttactggacgattactgacgctgaggctcgaaagcgtggggagcaaacaggattagataccctggtagtccacgccgtaaacgatgaatactaggtgttggcttccatagggagtcggtgccgcagctaacgcaataagtattccacctggggagtacgttcgcaagaatgaaactcaaaggaattgacggggacccgcacaagcggtggagcatgtggtttaattcgaagcaacgcgaagaaccttaccaaatcttgacatcccactgacaaagtatgtaatgtactcttccttcgggacagtggtgacaggtggtgcatggttgtcgtcagctcgtgtcgtgagatgttgggttaagtcccgcaacgagcgcaacccttatctttagtagccagcatttcggatgggcactctagagagactgcccgggtgaaccgggaggaaggtggggatgacgtcaaatcatcatgccccttatgatttgggctacacacgtgctacaatggcgtaaacaaagggaagcaattgggtgaccatgagcaaatctcaaaaataacgtctcagttcggattgtagtctgcaactcgactacatgaagctggaatcgctagtaatcgcgaatcagaatgtcgcggtgaatacgttcccgggtcttgtacacaccgcccgtcacaccatgggagttgggaatgcccgaagtctgtgacccaacccgtaaggagggagcagccgaaggcaggctcgataactggggtg

SEQ ID NO: 2673 - DNA, 1423 bp, Pseudobutyrivibrio xylanivorans
  source 1..1423: mol_type = unassigned DNA
  misc_difference 971: note = n is a, c, g, or t
  misc_difference 1043: note = n is a, c, g, or t
  misc_difference 1203: note = n is a, c, g, or t
acatgcatgtcgaacgaagcaatttcttacgatcccttcggggtgacgagttattgactcgagtggcggacgggtgagtaacgcgtgggtaacctgccttgtacagggggacaacagttggaaacgactgctaataccgcataagcgcacagcatcgcatgatgcagtgtgaaaagttttttcggtacaagatggacccgcgtctgattagctagttggtgaggtaacggcccaccaaggctacgatcagtagccgacctgaaagggtgaccggccacattgggactgagacacggcccaaactcctacgggaggcagcagtggggaatattgcacaatgggcgcaagcctgatgcagcgacgccgcgtgagcgaagaagtatttcggtatgtaaagctctatcagcagggaagataatgacggtacctgagtaagaagccccggctaactacgtgccagcagccgcggtcgtatggtgcaagcgttatccggatttactgggtgtaaagggagcgtaggcggttttacaagtctgatgtgaaagcccggggctcaactccggtattgcattggaaactgtagaactagagtgtcggaggggtaagtggaattcctagtgtagcggtgaaatgcgtagatattaggaggaacaccagtggcgaaggcggcttactggacgattactgacgctgaggctcgaaagcgtggggagcaaacaggattagataccctggtagtccacgccgtaaacgatgaatactaggtgttggcttccatagggagtcggtgccgcagctaacgcaataagtattccacctggggagtacgttcgcaagaatgaaactcaaaggaattgacggggacccgcacaagcggtggagcatgtggtttaattcgaagcaacgcgaagaaccttaccaaatcttgacatcctcttgacaaagatgtaatgtctctttcttcgggacangagtgacaggtggtgcatggttgtcgtcagctcgtgtcgagagaagttgggtcaagtcccgcacgagcgcancccttgtccttagtagccagcaattcggttgggcactctagggagactgcccgggtgaaccgggaggaaggtggggatgacgtcaaatcatcatgccccttatgatttgggctacacacgtgctacaatggcgtaaacaaagggaagcaatcgggtgacngtgagcaaatctcaaaaataacgtctcagttcggattgtagtctgcaactcgactacatgaagctggaatcgctagtaatcgcgaatcagaatgtcgcggtgaatacgttcccgggtcttgtacacaccgcccgtcacaccatgggagttgggaatgcccgaagtctgtgacccaaccgtaaggagggagcagccgaaggcaggctcgataactggggtg

SEQ ID NO: 2674 - DNA, 1459 bp, unidentified
  source 1..1459: mol_type = unassigned DNA; note = Pseudocitrobacter faecalis
gaacgctggcggcaggcctaacacatgcaagtcgaacggtaacagaaagcagcttgctgctttgctgacgagtggcggacgggtgagtaatgtctgggaaactgcctgatggagggggataactactggaaacggtagctaataccgcataacgtcgcaagaccaaagagggggaccttcgggcctcttgccatcggatgtgcccagatgggattagctagtaggtggggtaatggctcacctaggcgacgatccctagctggtctgagaggatgaccagccacactggaactgagacacggtccagactcctacgggaggcagcagtggggaatattgcacaatgggcgcaagcctgatgcagccatgccgcgtgtatgaagaaggccttcgggttgtaaagtactttcagcgaggaggaaggtgttgtggttaataaccacagcaattgacgttactcgcagaagaagcaccggctaactccgtgccagcagccgcggtaatacggagggtgcaagcgttaatcggaattactgggcgtaaagcgcacgcaggcggtttgttaagtcagatgtgaaatccccgggctcaacctgggaactgcatttgaaactggcaagcttgagtctcgtagaggggggtagaattccaggtgtagcggtgaaatgcgtagagatctggaggaataccggtggcgaaggcggccccctggacgaagactgacgctcaggtgcgaaagcgtggggagcaaacaggattagataccctggtagtccacgctgtaaacgatgtcgacttggaggttgtgcccttgaggcgtggcttccggagctaacgcgttaagtcgaccgcctggggagtacggccgcaaggttaaaactcaaatgaattgacgggggcccgcacaagcggtggagcatgtggtttaattcgatgcaacgcgaagaaccttacctggtcttgacatccacagaacttagcagagatgctttggtgccttcgggaactgtgagacaggtgctgcatggctgtcgtcagctcgtgttgtgaaatgttgggttaatgcccgcaacgagcgcaacccttatcctttgttgccagcggttcggccgggaactcaaaggagactgccagtgataaactggaggaaggtggggatgacgtcaagtcatcatggcccttacgaccagggctacacacgtgctacaatggcatatacaaagagaagcgacctcgcgagagcaagcggacctcataaagtatgtcgtagtccggattggagtctgcaactcgactccatgaagtcggaatcgctagtaatcgtagatcagaatgctacggtgaatacgttcccgggccttgtacacaccgcccgtcacaccatgggagtgggttgcaaaagaagtaggtagcttaaccttcgggagggcgcttaccactttgtgattcatgactgggg

SEQ ID NO: 2675 - DNA, 1386 bp, Pseudofulvimonas gallinarii
  source 1..1386: mol_type = unassigned DNA
  misc_difference 812: note = n is a, c, g, or t
gcagtcgaacggcagcgcggacttcggtctggcggcgagtggcggacgggtgaggaatgcatcggaatctgccccgacgtgggggataacttggggaaactcaagctaataccgcatacgtcctaacggggaaagcaggggaccttcgggccttgcgcggcgggatgagccgatgccggattagctagttggcggggtaaaggcccaccaaggcgacgatccgtagctggtctgagaggatgatcagccacaccgggactgagacacggcccggactcctacgggaggcagcagtggggaatattggacaatgggcgcaagcctgatccagcaatgccgcgtgtgtgaagaaggccttcgggttgtaaagcacttttatcaggaaagaaatcccatgggttaataccctgtggggatgacggtacctgaggaataagcaccggctaacttcgtgccagcagccgcggtaatacgaagggtgcaagcgttaatcggaattactgggcgtaaagggtgcgtaggcggttcgttaagttggatgtgaaagccctgggctcaacctgggaatggcatccaaaactggcgggctggagtgcggtagaggatggtggaattcccggtgtagcggtgaaatgcgtagagatcgggaggaacatcgatggcgaaggcagccatctggaccagcactgacgctgaggcacgaaagcgtggggagcaaacaggattagataccctggtagtccacgccctaaacgatgcgaactggatgttgtgggcaactaggccctcagtatcgaagctaacgcgttaanttcgccgcctggggagtacggtcgcaagactgaaactcaaaggaattgacgggggcccgcacaagcggtggagtatgtggtttaattcgatgcaacgcgaagaaccttacctggccttgacatgtccggaatyctgcagagatgcgggagtgccttcgggaatcggaacacaggtgctgcatggctgtcgtcagctcgtgtcgtgagatgttgggttaagtcccgcaacgagcgcaacccttgtccctagttgccagcacgtaatggtgggaactctagggagaccgccggtgacaaaccggaggaaggtggggatgacgtcaagtcatcatggcccttacggccagggstacacacgtactacaatggaacgtacagagggttgcgataccgcgaggtggagccaatcccagaaaacgtttytcagtccggatcggagtytgcaactcgactccgtgaagtyggaatcgctagtaatcgcagatcagaatgctgcggtgaatacgttcccgggccttgtacacaccgcccgtcacaccatgggagtgggctgctccagaagccgttagcctaa

SEQ ID NO: 2676 - DNA, 1456 bp, unidentified
  source 1..1456: mol_type = unassigned DNA; note = Pseudohaliea rubra
attgaacgctggcggcaggcctaacacatgcaagtcgagcgcgaaaggccttcgggttgagtagagcggcggacgggtgagtaacgcgtaggaatctacctggtagtgggggacaactcggggaaactcgagctaataccgcatacgccctgagggggaaagcgggggatcttcggacctcgcgctattggatgagcctgcgttggattagctagttggtggggtaaaggcctaccaaggcgacgatccatagctggtctgagaggatgatcagccacaccgggactgagacacggcccggactcctacgggaggcagcagtggggaatattgcgcaatgggggaaaccctgacgcagccatgccgcgtgtgtgaagaaggccttcgggttgtaaagcactttcacttgggaagaaaagtttgtcgttaatagcggcaagccgtgacattaccttgagaagaagcaccggctaactccgtgccagcagccgcggtaatacggagggtgcaagcgttaatcggaattactgggcgtaaagcgcgcgtaggcggtttgttaagtcggatgtgaaagccccgggctcaacctgggaattgcacccgatactggccgactggagtgcgagagagggaggtagaattccacgtgtagcggtgaaatgcgtagatatgtggaggaataccggtggcgaaggcggcctcctggctcgacactgacgctgaggtgcgaaagcgtggggagcaaacaggattagataccctggtagtccacgccgtaaacgatgtctactagccgttggggaacttgagtccttggtggcgcagttaacgcgataagtagaccgcctggggagtacggccgcaaggttaaaactcaaatgaattgacgggggcccgcacaagcggtggagcatgtggtttaattcgatgcaacgcgaagaaccttaccaggccttgacatccttggaatcctgcagagatgcgggagtgccttcgggaatcaagtgacaggtgctgcatggctgtcgtcagctcgtgtcgtgagatgttgggttaagtcccgtaacgagcgcaacccttgtcctttgttgccagcacgtaatggtgggaactcaaaggagactgccggtgacaaaccggaggaaggtggggacgacgtcaagtcatcatggcccttacggcctgggctacacacgtgctacaatggaacgcacagagggcagcaaccccgcgagggtgagcgaatcccacaaaacgtttcgtagtccggatcggagtctgcaactcgactccgtgaagtcggaatcgctagtaatcgcgaatcagaatgtcgcggtgaatacgttcccgggccttgtacacaccgcccgtcacaccatgggagtgggttgctccagaagtggttagtctaaccttcggggggacgatcaccacggagtgattcatgactggggtg

SEQ ID NO: 2677 - DNA, 1461 bp, unidentified
  source 1..1461: mol_type = unassigned DNA; note = Pseudohongiella acticola
attgaacgctggcggcaggcttaacacatgcaagtcgagcggaaacgatgggagcttgctcccaggcgtcgagcggcggacgggtgagtaacgcgtaggaatctgcctggtagtgggggatagctcggggaaactcgaattaataccgcatacgccctacgggggaaagcaggggatcttcggaccttgcgctatcagatgagcctgcgtcggattagctagttggtggggtaaaggcccaccaaggcgacgatccgtaactggtctgagaggatgatcagtcacaccggaactgagacacggtccggactcctacgggaggcagcagtggggaatattggacaatgggggcaaccctgatccagccatgccgcgtgtgtgaagaaggccttcgggttgtaaagcactttaagcagggaggaaaggggcaagactaataatcttgtcagttgacgttacctgcagaataagcaccggctaacttcgtgccagcagccgcggtaatacgaagggtgcaagcgttaatcggaattactgggcgtaaagcgcgcgtaggcggtttggttagttggatgtgaaagcccagggctcaaccttggaactgcatccaatactgccaggctagagtacgggagaggggggtagaattccacgtgtagcggtgaaatgcgtagagatgtggaggaataccggtggcgaaggcggccccctggatcgatactgacgctgaggtgcgaaagcgtggggagcaaacaggattagataccctggtagtccacgccgtaaacgatgtcaactagccgttgggagcgtaatgctctgagtggcgcagctaacgcactaagttgaccgcctggggagtacggtcgcaagattaaaactcaaatgaattgacgggggcccgcacaagcggtggagcatgtggtttaattcgacgcaacgcgaagaaccttacctggtcttgacatcccaagaactttccagagatggattggtgccttcgggaacttggagacaggtgctgcatggctgtcgtcagctcgtgtcgtgagatgttgggttaagtcccgtaacgagcgcaacccttgtccttatttgccatcatttagttgggcactctaaggagactgccggtgacaaaccggaggaaggtggggacgacgtcaagtcatcatggcccttacgaccagggctacacacgtgctacaatggttcgtacaaagggttgccaagccgcgaggtggagctaatcccataaaacgaatcgtagtccggatcggagtctgcaactcgactccgtgaagtcggaatcgctagtaatcgtaaatcagaatgttacggtgaatacgttcccgggccttgtacacaccgcccgtcacaccatgggagtgggttgcaaaagaagtgggtagcataaccttcgggagtgcgctcaccactttgtgattcatgactggggtg

SEQ ID NO: 2678 - DNA, 1459 bp, unidentified
  source 1..1459: mol_type = unassigned DNA; note = Pseudohongiella spirulinae
attgaacgctggcggcaggcttaacacatgcaagtcgagcggtaacaggggtagcttgctacccgctgacgagcggcgaacgggtgagtaacgcgtaggaatctgcctgatagagggggatagcccggggaaacccggattaataccgcatacgccctacgggggaaagcaggggatcttcggaccttgcgctatcagatgagcctgcgtcggattagctagttggtggggtaaaggcctaccaaggcgacgatccgtagctggtctgagaggatgatcagccacaccggaactgagacacggtccggactcctacgggaggcagcagtggggaatattggacaatgggggcaaccctgatccagccatgccgcgtgtgtgaagaaggccttcgggttgtaaagcactttaagcagggaggaaagggcaacggttaatacccgttgcagttgacgttacctgcagaataagcaccggctaacttcgtgccagcagccgcggtaatacgaagggtgcaagcgttaatcggaattactgggcgtaaagcgcgcgtaggcggtttggtaagtgtgatgtgaaagcccagggctcaaccttggaactgcatcacatactgtcaggctagagtacgggagaggggggtagaattccacgtgtagcggtgaaatgcgtagagatgtggaggaataccggtggcgaaggcggccccctggatcgatactgacgctgaggtgcgaaagcgtggggagcaaacaggattagataccctggtagtccacgccgtaaacgatgtcaactagccgttgggagcgtaatgctctgagtggcgcagctaacgcactaagttgaccgcctggggagtacggtcgcaagattaaaactcaaatgaattgacgggggcccgcacaagcggtggagcatgtggtttaattcgacgcaacgcgaagaaccttacctggtcttgacatccagagaactttccagagatggattggtgccttcgggaactctgagacaggtgctgcatggctgtcgtcagctcgtgtcgtgagatgttgggttaagtcccgtaacgagcgcaacccttgtccttatttgccatcatttagttgggcactctaaggagactgccggtgacaaaccggaggaaggtggggacgacgtcaagtcatcatggcccttacgaccagggctacacacgtgctacaatggggcgtacaaagggttgccaagccgcgaggtggagctaatcccataaaacgtctcgtagtccggattggagtctgcaactcgactccatgaagtcggaatcgctagtaatcgtaaatcagaatgttacggtgaatacgttcccgggccttgtacacaccgcccgtcacaccatgggagtgggttgcaaaagaagtgggtagtctaacttcggaggacgctcaccactttgtgattcatgactggggtg

SEQ ID NO: 2679 - DNA, 1459 bp, Pseudomonas abietaniphila
  source 1..1459: mol_type = unassigned DNA
attgaacgctggcggcaggcctaacacatgcaagtcgagcggatgaagggagcttgctccctgattcagcggcggacgggtgagtaatgcctaggaatctgcctggtagtgggggacaacgtctcgaaagggacgctaataccgcatacgtcctacgggagaaagtgggggatcttcggacctcacgctatcagatgagcctaggtcggattagctagttggtgaggtaatggctcaccaaggcgacgatccgtaactggtctgagaggatgatcagtcacactggaactgagacacggtccagactcctacgggaggcagcagtggggaatattggacaatgggcgaaagcctgatccagccatgccgcgtgtgtgaagaaggtcttcggattgtaaagcactttaagttgggaggaagggcattaacctaatacgttagtgttttgacgttaccgacagaataagcaccggctaactctgtgccagcagccgcggtaatacagagggtgcaagcgttaatcggaattactgggcgtaaagcgcgcgtaggtggtttgttaagttgaatgtgaaatccccgggctcaacctgggaactgcatccaaaactggcaagctagagtagggcagagggtggtggaatttcctgtgtagcggtgaaatgcgtagatataggaaggaacaccagtggcgaaggcgaccacctgggctcatactgacactgaggtgcgaaagcgtggggagcaaacaggattagataccctggtagtccacgccgtaaacgatgtcaactagccgttgggagtcttgaactcttagtggcgcagctaacgcattaagttgaccgcctggggagtacggccgcaaggttaaaactcaaatgaattgacgggggcccgcacaagcggtggagcatgtggtttaattcgaagcaacgcgaagaaccttaccaggccttgacatccaatgaactttccagagatggattggtgccttcgggaacattgagacaggtgctgcatggctgtcgtcagctcgtgtcgtgagatgttgggttaagtcccgtaacgagcgcaacccttgtccttagttaccagcacgttatggtgggcactctaaggagactgccggtgacaaaccggaggaaggtggggatgacgtcaagtcatcatggcccttacggcctgggctacacacgtgctacaatggtcggtacagagggttgccaagccgcgaggtggagctaatcccacaaaaccgatcgtagtccggatcgcagtctgcaactcgactgcgtgaagtcggaatcgctagtaatcgcgaatcagaatgtcgcggtgaatacgttcccgggccttgtacacaccgcccgtcacaccatgggagtgggttgcaccagaagtagctagtctaaccttcggggggacggttaccacggtgtgattcatgactggggtg

SEQ ID NO: 2680 - DNA, 1459 bp, Pseudomonas agarici
  source 1..1459: mol_type = unassigned DNA
attgaacgctggcggcaggcctaacacatgcaagtcgagcggatgaagggagcttgctcccggattcagcggcggacgggtgagtaatgcctaggaatctgcctggtagtgggggacaacgtttcgaaaggaacgctaataccgcatacgtcctacgggagaaagcaggggaccttcgggccttgcgctatcagatgagcctaggtcggattagctagttggtgaggtaaaggctcaccaaggcgacgatccgtaactggtctgagaggatgatcagtcacactggaactgagacacggtccagactcctacgggaggcagcagtggggaatattggacaatgggcgaaagcctgatccagccatgccgcgtgtgtgaagaaggtcttcggattgtaaagcactttaagttgggaggaagggcattaacctaatacgttagtgttttgacgttaccgacagaataagcaccggctaactctgtgccagcagccgcggtaatacagagggtgcaagcgttaatcggaattactgggcgtaaagcgcgcgtaggtggttggttaagttggatgtgaaatccccgggctcaacctgggaactgcatccaaaactggccagctagagtagggtagagggtggtggaatttcctgtgtagcggtgaaatgcgtagatataggaaggaacaccagtggcgaaggcgaccacctggactcatactgacactgaggtgcgaaagcgtggggagcaaacaggattagataccctggtagtccacgccgtaaacgatgtcaactagccgttgggaaccttgagttcttagtggcgcagctaacgcattaagttgaccgcctggggagtacggccgcaaggttaaaactcaaatgaattgacgggggcccgcacaagcggtggagcatgtggtttaattcgaagcaacgcgaagaaccttaccaggccttgacatccaatgaatcttccagagatggaggagtgccttcgggaacattgagacaggtgctgcatggctgtcgtcagctcgtgtcgtgagatgttgggttaagtcccgtaacgagcgcaacccttgtccttagttaccagcacgtgatggtgggcactctaaggagactgccggtgacaaaccggaggaaggtggggatgacgtcaagtcatcatggcccttacggcctgggctacacacgtgctacaatggtcggtacaaagggttgccaagccgcgaggtggagctaatcccataaaaccgatcgtagtccggatcgcagtctgcaactcgactgcgtgaagtcggaatcgctagtaatcgcgaatcagaatgtcgcggtgaatacgttcccgggccttgtacacaccgcccgtcacaccatgggagtgggttgcaccagaagtagctagtctaaccttcgggaggacggttaccacggtgtgattcatgactggggtg

SEQ ID NO: 2681 - DNA, 1459 bp, Pseudomonas alcaliphila
  source 1..1459: mol_type = unassigned DNA
attgaacgctggcggcaggcctaacacatgcaagtcgagcggatgacgggagcttgctccctgatttagcggcggacgggtgagtaatgcctaggaatctgcctggtagtgggggataacgttccgaaaggaacgctaataccgcatacgtcctacgggagaaagcaggggaccttcgggccttgcgctatcagatgagcctaggtcggattagctagttggtgaggtaatggctcaccaaggcgacgatccgtaactggtctgagaggatgatcagtcacactggaactgagacacggtccagactcctacgggaggcagcagtggggaatattggacaatgggcgaaagcctgatccagccatgccgcgtgtgtgaagaaggtcttcggattgtaaagcactttaagttgggaggaagggcattaacctaatacgttagtgttttgacgttaccgacagaataagcaccggctaacttcgtgccagcagccgcggtaatacgaagggtgcaagcgttaatcggaattactgggcgtaaagcgcgcgtaggtggttcgttaagttggatgtgaaagccccgggctcaacctgggaactgcatccaaaactggcgagctagagtacggtagagggtggtggaatttcctgtgtagcggtgaaatgcgtagatataggaaggaacaccagtggcgaaggcgaccacctggactgatactgacactgaggtgcgaaagcgtggggagcaaacaggattagataccctggtagtccacgccgtaaacgatgtcaactagccgttgggttccttgagaacttagtggcgcagctaacgcattaagttgaccgcctggggagtacggccgcaaggttaaaactcaaatgaattgacgggggcccgcacaagcggtggagcatgtggtttaattcgaagcaacgcgaagaaccttacctggccttgacatgctgagaactttccagagatggattggtgccttcgggaactcagacacaggtgctgcatggctgtcgtcagctcgtgtcgtgagatgttgggttaagtcccgtaacgagcgcaacccttgtccttagttaccagcacgttatggtgggcactctaaggagactgccggtgacaaaccggaggaaggtggggatgacgtcaagtcatcatggcccttacggccagggctacacacgtgctacaatggtcggtacaaagggttgccaagccgcgaggtggagctaatcccataaaaccgatcgtagtccggatcgcagtctgcaactcgactgcgtgaagtcggaatcgctagtaatcgtgaatcagaatgtcacggtgaatacgttcccgggccttgtacacaccgcccgtcacaccatgggagtgggttgctccagaagtagctagtctaaccttcggggggacggttaccacggagtgattcatgactggggtg

SEQ ID NO: 2682 - DNA, 1459 bp, unidentified
  source 1..1459: mol_type = unassigned DNA; note = Pseudomonas alkylphenolica
attgaacgctggcggcaggcctaacacatgcaagtcgagcggatgagaagagcttgctcttcgattcagcggcggacgggtgagtaatgcctaggaatctgcctggtagtgggggacaacgtttcgaaaggaacgctaataccgcatacgtcctacgggagaaagcaggggaccttcgggccttgcgctatcagatgagcctaggtcggattagctagttggtgaggtaatggctcaccaaggcgacgatccgtaactggtctgagaggatgatcagtcacactggaactgagacacggtccagactcctacgggaggcagcagtggggaatattggacaatgggcgaaagcctgatccagccatgccgcgtgtgtgaagaaggtcttcggattgtaaagcactttaagttgggaggaagggcattaacctaatacgttagtgttttgacgttaccaacagaataagcaccggctaactctgtgccagcagccgcggtaatacagagggtgcaagcgttaatcggaattactgggcgtaaagcgcgcgtaggtggttcgttaagttggatgtgaaatccccgggctcaacctgggaactgcatccaaaactggcgagctagagtagggcagagggtggtggaatttcctgtgtagcggtgaaatgcgtagatataggaaggaacaccagtggcgaaggcgaccacctgggctcatactgacactgaggtgcgaaagcgtggggagcaaacaggattagataccctggtagtccacgccgtaaacgatgtcaactagccgttggaatccttgagattttagtggcgcagctaacgcattaagttgaccgcctggggagtacggccgcaaggttaaaactcaaatgaattgacgggggcccgcacaagcggtggagcatgtggtttaattcgaagcaacgcgaagaaccttaccaggccttgacatgcagagaactttccagagatggattggtgccttcgggaactctgacacaggtgctgcatggctgtcgtcagctcgtgtcgtgagatgttgggttaagtcccgtaacgagcgcaacccttgtccttagttaccagcacgttatggtgggcactctaaggagactgccggtgacaaaccggaggaaggtggggatgacgtcaagtcatcatggcccttacggcctgggctacacacgtgctacaatggtcggtacagagggttgccaagccgcgaggtggagctaatctcacaaaaccgatcgtagtccggatcgcagtctgcaactcgactgcgtgaagtcggaatcgctagtaatcgcgaatcagaatgtcgcggtgaatacgttcccgggccttgtacacaccgcccgtcacaccatgggagtgggttgcaccagaagtagctagtctaaccttcgggaggacggttaccacggtgtgattcatgactggggtg

SEQ ID NO: 2683 - DNA, 1461 bp, Pseudomonas amygdali
  source 1..1461: mol_type = unassigned DNA
attgaacgctggcggcaggcctaacacatgcaagtcgagcggcagcacgggtacttgtacctggtggcgagcggcggacgggtgagtaatgcctaggaatctgcctggtagtgggggataacgctcggaaacggacgctaataccgcatacgtcctacgggagaaagcaggggaccttcgggccttgcgctatcagatgagcctaggtcggattagctagttggtgaggtaatggctcaccaaggcgacgatccgtaactggtctgagaggatgatcagtcacactggaactgagacacggtccagactcctacgggaggcagcagtggggaatattggacaatgggcgaaagcctgatccagccatgccgcgtgtgtgaagaaggtcttcggattgtaaagcactttaagttgggaggaagggcagttacctaatacgtgattgttttgacgttaccgacagaataagcaccggctaactctgtgccagcagccgcggtaatacagagggtgcaagcgttaatcggaattactgggcgtaaagagcgcgtaggtggtttgttaagttggatgtgaaatccccgggctcaacctgggaactgcatccaaaactggcaagctagagtatggtagagggtggtggaatttcctgtgtagcggtgaaatgcgtagatataggaaggaacaccagtggcgaaggcgaccacctggactgatactgacactgaggtgcgaaagcgtggggagcaaacaggattagataccctggtagtccacgccgtaaacgatgtcaactagccgttgggagccttgagctcttagtggcgcagctaacgcattaagttgaccgcctggggagtacggccgcaaggttaaaactcaaatgaattgacgggggcccgcacaagcggtggagcatgtggtttaattcgaagcaacgcgaagaaccttaccaggccttgacatccaatgaactttccagagatggattggtgccttcgggaacattgagacaggtgctgcatggctgtcgtcagctcgtgtcgtgagatgttgggttaagtcccgtaacgagcgcaacccttgtccttagttaccagcacgtaatggtgggcactctaaggagactgccggtgacaaaccggaggaaggtggggatgacgtcaagtcatcatggcccttacggcctgggctacacacgtgctacaatggtcggtacagagggttgccaagccgcgaggtggagctaatctcacaaaaccgatcgtagtccggatcgcagtctgcaactcgactgcgtgaagtcggaatcgctagtaatcgcgaatcagaatgtcgcggtgaatacgttcccgggccttgtacacaccgcccgtcacaccatgggagtgggttgcaccagaagtagctagtctaaccttcggggggacggttaccacggtgtgattcatgactggggtg

SEQ ID NO: 2684 - DNA, 1459 bp, Pseudomonas anguilliseptica
  source 1..1459: mol_type = unassigned DNA
attgaacgctggcggcaggcctaacacatgcaagtcgagcggtagagagaagcttgcttctcttgagagcggcggacgggtgagtaatgcctaggaatctgcctagtggtggggggtaacgttcggaaacggacgctaataccgcatacgtcctacgggagaaagcgggggatcttcggacctcgcgccattagatgagcctaggtcggattagctagttggtgaggtaatggctcaccaaggcgacgatccgtaactggtctgagaggatgatcagtcacactggaactgagacacggtccagactcctacgggaggcagcagtggggaatattggacaatgggcgaaagcctgatccagccatgccgcgtgtgtgaagaaggtcttcggattgtaaagcactttaagttgggaggaagggcagtaacctaatacgttattgttttgacgttaccgacagaataagcaccggctaacttcgtgccagcagccgcggtaatacgaagggtgcaagcgttaatcggaattactgggcgtaaagcgcgcgtaggtggttcagtaagttggaagtgaaatccccaggctcaacctgggaactgctttcaaaactgctgagctagagtacggtagagggtggtggaatttcctgtgtagcggtgaaatgcgtagatataggaaggaacaccagtggcgaaggcgaccacctggactgatactgacactgaggtgcgaaagcgtggggagcaaacaggattagataccctggtagtccacgccgtaaacgatgtcaactagccgttggaatccttgagattttagtggcgcagctaacgcattaagttgaccgcctggggagtacggccgcaaggttaaaactcaaatgaattgacgggggcccgcacaagcggtggagcatgtggtttaattcgaagcaacgcgaagaaccttacctggccttgacatgctgagagctttccagagatggattggtgccttcgggagctcagacacaggtgctgcatggctgtcgtcagctcgtgtcgtgagatgttgggttaagtcccgtaacgagcgcaacccttgtccttagttaccagcacgttatggtggggactctaaggagactgccggtgacaagccggaggaaggtggggatgacgtcaagtcatcatggcccttacggccggggctacacacgtgctacaatggtcggcacaaagggttgccaagccgcgaggtggagctaatcccataaaaccgatcgtagtccggatcgcagtctgcaactcgactgcgtgaagtcggaatcgctagtaatcgtgaatcagaatgtcacggtgaatacgttcccgggccttgtacacaccgcccgtcacaccatgggagtgggttgcaccagaagtagctagtctaaccgcaagggggacggttaccacggtgtgattcatgactggggtg

SEQ ID NO: 2685 - DNA, 1459 bp, Pseudomonas antarctica
  source 1..1459: mol_type = unassigned DNA
attgaacgctggcggcaggcctaacacatgcaagtcgagcggtagagagaagcttgcttctcttgagagcggcggacgggtgagtaatgcctaggaatctgcctggtagtgggggataacgttcggaaacggacgctaataccgcatacgtcctacgggagaaagcaggggaccttcgggccttgcgctatcagatgagcctaggtcggattagctagttggtgaggtaatggctcaccaaggctacgatccgtaactggtctgagaggatgatcagtcacactggaactgagacacggtccagactcctacgggaggcagcagtggggaatattggacaatgggcgaaagcctgatccagccatgccgcgtgtgtgaagaaggtcttcggattgtaaagcactttaagttgggaggaagggcagttacctaatacgtgattgttttgacgttaccgacagaataagcaccggctaactctgtgccagcagccgcggtaatacagagggtgcaagcgttaatcggaattactgggcgtaaagcgcgcgtaggtggtttgttaagttggatgtgaaatccccgggctcaacctgggaactgcattcaaaactgactgactagagtatggtagagggtggtggaatttcctgtgtagcggtgaaatgcgtagatataggaaggaacaccagtggcgaaggcgaccacctggactaatactgacactgaggtgcgaaagcgtggggagcaaacaggattagataccctggtagtccacgccgtaaacgatgtcaactagccgttgggagccttgagctcttagtggcgcagctaacgcattaagttgaccgcctggggagtacggccgcaaggttaaaactcaaatgaattgacgggggcccgcacaagcggtggagcatgtggtttaattcgaagcaacgcgaagaaccttaccaggccttgacatccaatgaactttctagagatagattggtgccttcgggaacattgagacaggtgctgcatggctgtcgtcagctcgtgtcgtgagatgttgggttaagtcccgtaacgagcgcaacccttgtccttagttaccagcacgtaatggtgggcactctaaggagactgccggtgacaaaccggaggaaggtggggatgacgtcaagtcatcatggcccttacggcctgggctacacacgtgctacaatggtcggtacagagggttgccaagccgcgaggtggagctaatcccacaaaaccgatcgtagtccggatcgcagtctgcaactcgactgcgtgaagtcggaatcgctagtaatcgcgaatcagaatgtcgcggtgaatacgttcccgggccttgtacacaccgcccgtcacaccatggcagtgggttgcaccagaagtagctagtctaaccttcgggaggacggttaccacggtgtgattcatgactggggtg

SEQ ID NO: 2686 - DNA, 1458 bp, Pseudomonas argentinensis
  source 1..1458: mol_type = unassigned DNA
attgaacgctggcggcaggcctaacacatgcaagtcgagcggttgacgggagcttgctccctgattcagcggcggacgggtgagtaatgcctaggaatctgcctattagtgggggacaacgtttcgaaaggaacgctaataccgcatacgtcctacgggagaaagcaggggaccttcgggccttgcgctaatagatgagcctaggtcggattagctagttggtggggtaaaggctcaccaaggcgacgatccgtaactggtctgagaggatgatcagtcacactggaactgagacacggtccagactcctacgggaggcagcagtggggaatattggacaatgggcgaaagcctgatccagccatgccgcgtgtgtgaagaaggtcttcggattgtaaagcactttaagttgggaggaagggttgtagattaatactctgcaattttgacgttaccgacagaataagcaccggctaactctgtgccagcagccgcggtaatacagagggtgcaagcgttaatcggaattactgggcgtaaagcgcgcgtaggtggtttgttaagttggatgtgaaagccccgggctcaacctgggaactgcatccaaaactggcaagctagagtacggtagagggtggtggaatttcctgtgtagcggtgaaatgcgtagatataggaaggaacaccagtggcgaaggcgaccacctggactgatactgacactgaggtgcgaaagcgtggggagcaaacaggattagataccctggtagtccacgccgtaaacgatgtcaactagccgttggaatccttgagattttagtggcgcagctaacgcattaagttgaccgcctggggagtacggccgcaaggttaaaactcaaatgaattgacgggggcccgcacaagcggtggagcatgtggtttaattcgaagcaacgcgaagaaccttacctggccttgacatgctgagaactttccagagatggattggtgccttcgggaactcagacacaggtgctgcatggctgtcgtcagctcgtgtcgtgagatgttgggttaagtcccgtaacgagcgcaacccttgtccttagttaccagcacctcgggtgggaactctaaggagactgccggtgacaaaccggaggaaggtggggatgacgtcaagtcatcatggcccttacggccagggctacacacgtgctacaatggtcggtacaaagggttgccaagccgcgaggtggagctaatcccataaaaccgatcgtagtccggatcgcagtctgcaactcgactgcgtgaagtcggaatcgctagtaatcgtgaatcagaatgtcacggtgaatacgttcccgggccttgtacacaccgcccgtcacaccatgggagtgggttgcaccagaagtagctagtctaaccttcgggaggacggttaccacggtgtgattcatgactggggtg

SEQ ID NO: 2687 - DNA, 1459 bp, Pseudomonas arsenicoxydans
  source 1..1459: mol_type = unassigned DNA
attgaacgctggcggcaggcctaacacatgcaagtcgagcggtagagagaagcttgcttctcttgagagcggcggacgggtgagtaatgcctaggaatctgcctggtagtgggggataacgctcggaaacggacgctaataccgcatacgtcctacgggagaaagcaggggaccttcgggccttgcgctatcagatgagcctaggtcggattagctagttggtgaggtaatggctcaccaaggcgacgatccgtaactggtctgagaggatgatcagtcacactggaactgagacacggtccagactcctacgggaggcagcagtggggaatattggacaatgggcgaaagcctgatccagccatgccgcgtgtgtgaagaaggtcttcggattgtaaagcactttaagttgggaggaagggcagttacctaatacgtatctgttttgacgttaccgacagaataagcaccggctaactctgtgccagcagccgcggtaatacagagggtgcaagcgttaatcggaattactgggcgtaaagcgcgcgtaggtggtttgttaagttggatgtgaaatccccgggctcaacctgggaactgcattcaaaactgacaagctagagtatggtagagggtggtggaatttcctgtgtagcggtgaaatgcgtagatataggaaggaacaccagtggcgaaggcgaccacctggactgatactgacactgaggtgcgaaagcgtggggagcaaacaggattagataccctggtagtccacgccgtaaacgatgtcaactagccgttgggagccttgagctcttagtggcgcagctaacgcattaagttgaccgcctggggagtacggccgcaaggttaaaactcaaatgaattgacgggggcccgcacaagcggtggagcatgtggtttaattcgaagcaacgcgaagaaccttaccaggccttgacatccaatgaactttccagagatggattggtgccttcgggaacattgagacaggtgctgcatggctgtcgtcagctcgtgtcgtgagatgttgggttaagtcccgtaacgagcgcaacccttgtccttagttaccagcacgtaatggtgggcactctaaggagactgccggtgacaaaccggaggaaggtggggatgacgtcaagtcatcatggcccttacggcctgggctacacacgtgctacaatggtcggtacagagggttgccaagccgcgaggtggagctaatcccagaaaaccgatcgtagtccggatcgcagtctgcaactcgactgcgtgaagtcggaatcgctagtaatcgcgaatcagaatgtcgcggtgaatacgttcccgggccttgtacacaccgcccgtcacaccatgggagtgggttgcaccagaagtagctagtctaaccttcgggaggacggttaccacggtgtgattcatgactggggtg

SEQ ID NO: 2688 - DNA, 1459 bp, Pseudomonas asplenii
  source 1..1459: mol_type = unassigned DNA
attgaacgctggcggcaggcctaacacatgcaagtcgagcggatgagaagagcttgctcttcgattcagcggcggacgggtgagtaatgcctaggaatctgcctggtagtgggggacaacgtttcgaaaggaacgctaataccgcatacgtcctacgggagaaagcaggggaccttcgggccttgcgctatcagatgagcctaggtcggattagctagttggtgaggtaatggctcaccaaggcgacgatccgtaactggtctgagaggatgatcagtcacactggaactgagacacggtccagactcctacgggaggcagcagtggggaatattggacaatgggcgaaagcctgatccagccatgccgcgtgtgtgaagaaggtcttcggattgtaaagcactttaagttgggaggaagggcattaacctaatacgttagtgttttgacgttaccgacagaataagcaccggctaactctgtgccagcagccgcggtaatacagagggtgcaagcgttaatcggaattactgggcgtaaagcgcgcgtaggtggttcgttaagttggatgtgaaatccccgggctcaacctgggaactgcatccaaaactggcgagctagagtagggtagagggtggtggaatttcctgtgtagcggtgaaatgcgtagatataggaaggaacaccagtggcgaaggcgaccacctggactcatactgacactgaggtgcgaaagcgtggggagcaaacaggattagataccctggtagtccacgccgtaaacgatgtcaactagccgttgggaaccttgagttcttagtggcgcagctaacgcattaagttgaccgcctggggagtacggccgcaaggttaaaactcaaatgaattgacgggggcccgcacaagcggtggagcatgtggtttaattcgaagcaacgcgaagaaccttaccaggccttgacatgcagagaactttccagagatggattggtgccttcgggaactctgacacaggtgctgcatggctgtcgtcagctcgtgtcgtgagatgttgggttaagtcccgtaacgagcgcaacccttgtccttagttaccagcacgtcatggtgggcactctaaggagactgccggtgacaaaccggaggaaggtggggatgacgtcaagtcatcatggcccttacggcctgggctacacacgtgctacaatggtcggtacagagggttgccaagccgcgaggtggagctaatcccacaaaaccgatcgtagtccggatcgcagtctgcaactcgactgcgtgaagtcggaatcgctagtaatcgcgaatcagaatgtcgcggtgaatacgttcccgggccttgtacacaccgcccgtcacaccatgggagtgggttgcaccagaagtagctagtctaaccttcgggaggacggttaccacggtgtgattcatgactggggtg

SEQ ID NO: 2689 - DNA, 1459 bp, unidentified
  source 1..1459: mol_type = unassigned DNA; note = Pseudomonas asturiensis
attgaacgctggcggcaggcctaacacatgcaagtcgagcggtagagagaagcttgcttctcttgagagcggcggacgggtgagtaatgcctaggaatctgcctggtagtgggggataacgctcggaaacggacgctaataccgcatacgtcctacgggagaaagcaggggaccttcgggccttgcgctatcagatgagcctaggtcggattagctagttggtgaggtaatggctcaccaaggcgacgatccgtaactggtctgagaggatgatcagtcacactggaactgagacacggtccagactcctacgggaggcagcagtggggaatattggacaatgggcgaaagcctgatccagccatgccgcgtgtgtgaagaaggtcttcggattgtaaagcactttaagttgggaggaagggcattaacctaatacgttagtgttttgacgttaccgacagaataagcaccggctaactctgtgccagcagccgcggtaatacagagggtgcaagcgttaatcggaattactgggcgtaaagcgcgcgtaggtggtttgttaagttgaatgtgaaatccccgggctcaacctgggaactgcatccaaaactggcaagctagagtatggtagagggtggtggaatttcctgtgtagcggtgaaatgcgtagatataggaaggaacaccagtggcgaaggcgaccacctggactgatactgacactgaggtgcgaaagcgtggggagcaaacaggattagataccctggtagtccacgccgtaaacgatgtcaactagccgttggggaccttgagtctttagtggcgcagctaacgcattaagttgaccgcctggggagtacggccgcaaggttaaaactcaaatgaattgacgggggcccgcacaagcggtggagcatgtggtttaattcgaagcaacgcgaagaaccttaccaggccttgacatccaatgaaccttccagagatggaggggtgccttcgggagcattgagacaggtgctgcatggctgtcgtcagctcgtgtcgtgagatgttgggttaagtcccgtaacgagcgcaacccttgtccttagttaccagcacgtcatggtgggcactctaaggagactgccggtgacaaaccggaggaaggtggggatgacgtcaagtcatcatggcccttacggcctgggctacacacgtgctacaatggtcggtacagagggttgccaagccgcgaggtggagctaatctcacaaaaccgatcgtagtccggatcgcagtctgcaactcgactgcgtgaagtcggaatcgctagtaatcgcgaatcagaatgtcgcggtgaatacgttcccgggccttgtacacaccgcccgtcacaccatgggagtgggttgcaccagaagtagctagtctaaccttcggggggacggttaccacggtgtgattcatgactggggtg

SEQ ID NO: 2690 - DNA, 1461 bp, Pseudomonas avellanae
  source 1..1461: mol_type = unassigned DNA
attgaacgctggcggcaggcctaacacatgcaagtcgagcggcagcacgggtacttgtacctggtggcgagcggcggacgggtgagtaatgcctaggaatctgcctggtagtgggggataacgctcggaaacggacgctaataccgcatacgtcctacgggagaaagcaggggaccttcgggccttgcgctatcagatgagcctaggtcggattagctagttggtgaggtaatggctcaccaaggcgacgatccgtaactggtctgagaggatgatcagtcacactggaactgagacacggtccagactcctacgggaggcagcagtggggaatattggacaatgggcgaaagcctgatccagccatgccgcgtgtgtgaagaaggtcttcggattgtaaagcactttaagttgggaggaagggcagttacctaatacgtatctgttttgacgttaccgacagaataagcaccggctaactctgtgccagcagccgcggtaatacagagggtgcaagcgttaatcggaattactgggcgtaaagcgcgcgtaggtggtttgttaagttgaatgtgaaatccccgggctcaacctgggaactgcatccaaaactggcaagctagagtatggtagagggtggtggaatttcctgtgtagcggtgaaatgcgtagatataggaaggaacaccagtggcgaaggcgaccacctggactgatactgacactgaggtgcgaaagcgtggggagcaaacaggattagataccctggtagtccacgccgtaaacgatgtcaactagccgttgggagccttgagctcttagtggcgcagctaacgcattaagttgaccgcctggggagtacggccgcaaggttaaaactcaaatgaattgacgggggcccgcacaagcggtggagcatgtggtttaattcgaagcaacgcgaagaaccttaccaggccttgacatccaatgaatcctttagagatagaggagtgccttcgggaacattgagacaggtgctgcatggctgtcgtcagctcgtgtcgtgagatgttgggttaagtcccgtaacgagcgcaacccttgtccttagttaccagcacgttaaggtgggcactctaaggagactgccggtgacaaaccggaggaaggtggggatgacgtcaagtcatcatggcccttacggcctgggctacacacgtgctacaatggtcggtacagagggttgccaagccgcgaggtggagctaatctcacaaaaccgatcgtagtccggatcgcagtctgcaactcgactgcgtgaagtcggaatcgctagtaatcgcgaatcagaatgtcgcggtgaatacgttcccgggccttgtacacaccgcccgtcacaccatgggagtgggttgcaccagaagtagctagtctaaccttcggggggacggttaccacggtgtgattcatgactggggtg

SEQ ID NO: 2691 - DNA, 1459 bp, Pseudomonas azotoformans
  source 1..1459: mol_type = unassigned DNA
attgaacgctggcggcaggcctaacacatgcaagtcgagcggtagagagaagcttgcttctcttgagagcggcggacgggtgagtaatgcctaggaatctgcctggtagtgggggataacgttcggaaacggacgctaataccgcatacgtcctacgggagaaagcaggggaccttcgggccttgcgctatcagatgagcctaggtcggattagctagttggtggggtaatggctcaccaaggcgacgatccgtaactggtctgagaggatgatcagtcacactggaactgagacacggtccagactcctacgggaggcagcagtggggaatattggacaatgggcgaaagcctgatccagccatgccgcgtgtgtgaagaaggtcttcggattgtaaagcactttaagttgggaggaagggttgtagattaatactctgcaattttgacgttaccgacagaataagcaccggctaactctgtgccagcagccgcggtaatacagagggtgcaagcgttaatcggaattactgggcgtaaagcgcgcgtaggtggtttgttaagttggatgtgaaatccccgggctcaacctgggaactgcattcaaaactgactgactagagtatggtagagggtggtggaatttcctgtgtagcggtgaaatgcgtagatataggaaggaacaccagtggcgaaggcgaccacctggactaatactgacactgaggtgcgaaagcgtggggagcaaacaggattagataccctggtagtccacgccgtaaacgatgtcaactagccgttggaagccttgagcttttagtggcgcagctaacgcattaagttgaccgcctggggagtacggccgcaaggttaaaactcaaatgaattgacgggggcccgcacaagcggtggagcatgtggtttaattcgaagcaacgcgaagaaccttaccaggccttgacatccaatgaactttctagagatagattggtgccttcgggaacattgagacaggtgctgcatggctgtcgtcagctcgtgtcgtgagatgttgggttaagtcccgtaacgagcgcaacccttgtccttagttaccagcacgtaatggtgggcactctaaggagactgccggtgacaaaccggaggaaggtggggatgacgtcaagtcatcatggcccttacggcctgggctacacacgtgctacaatggtcggtacagagggttgccaagccgcgaggtggagctaatcccataaaaccgatcgtagtccggatcgcagtctgcaactcgactgcgtgaagtcggaatcgctagtaatcgcgaatcagaatgtcgcggtgaatacgttcccgggccttgtacacaccgcccgtcacaccatgggagtgggttgcaccagaagtagctagtctaaccttcgggaggacggttaccacggtgtgattcatgactggggtg

SEQ ID NO: 2692 - DNA, 1446 bp, Pseudomonas baetica
  source 1..1446: mol_type = unassigned DNA
ggcaggcctaacacatgcaagtcgagcggatgaaaggagcttgctcctggattcagcggcggacgggtgagtaatgcctaggaatctgcctggtagtgggggacaacgtttcgaaaggaacgctaataccgcatacgtcctacgggagaaagcaggggaccttcgggccttgcgctatcagatgagcctaggtcggattagctagttggtgaggtaatggctcaccaaggcgacgatccgtaactggtctgagaggatgatcagtcacactggaactgagacacggtccagactcctacgggaggcagcagtggggaatattggacaatgggcgaaagcctgatccagccatgccgcgtgtgtgaagaaggtcttcggattgtaaagcactttaagttgggaggaagggcagtaaattaatactttgctgttttgacgttaccgacagaataagcaccggctaactctgtgccagcagccgcggtaatacagagggtgcaagcgttaatcggaattactgggcgtaaagcgcgcgtaggtggtttgttaagttggatgtgaaatccccgggctcaacctgggaactgcattcaaaactgacaagctagagtatggtagagggtggtggaatttcctgtgtagcggtgaaatgcgtagatataggaaggaacaccagtggcgaaggcgaccacctggactgatactgacactgaggtgcgaaagcgtggggagcaaacaggattagataccctggtagtccacgccgtaaacgatgtcaactagccgttgggagccttgagctcttagtggcgcagctaacgcattaagttgaccgcctggggagtacggccgcaaggttaaaactcaaatgaattgacgggggcccgcacaagcggtggagcatgtggtttaattcgaagcaacgcgaagaaccttaccaggccttgacatccaatgaactttccagagatggattggtgccttcgggaacattgagacaggtgctgcatggctgtcgtcagctcgtgtcgtgagatgttgggttaagtcccgtaacgagcgcaacccttgtccttagttaccagcacgttatggtgggcactctaaggagactgccggtgacaaaccggaggaaggtggggatgacgtcaagtcatcatggcccttacggcctgggctacacacgtgctacaatggtcggtacaaagggttgccaagccgcgaggtggagctaatcccataaaaccgatcgtagtccggatcgcagtctgcaactcgactgcgtgaagtcggaatcgctagtaatcgcgaatcagaatgtcgcggtgaatacgttcccgggccttgtacacaccgcccgtcacaccatgggagtgggttgcaccagaagtagctagtctaaccttcgggaggacggttaccacggtgtgattcatgactggggtg

SEQ ID NO: 2693 - DNA, 1459 bp, Pseudomonas balearica
  source 1..1459: mol_type = unassigned DNA
attgaacgctggcggcaggcctaacacatgcaagtcgagcggcagcgggtccttcgggatgccggcgagcggcggacgggtgagtaatgcctaggaatctgcctggtagtgggggataactcggggaaactcgagctaataccgcatacgtcctacgggagaaagcgggggatcttcggacctcgcgctaccagatgagcctaggtcggattagctagttggtgaggtaaaggctcaccaaggcgacgatccgtagctggtctgagaggatgatcagccacactggaactgagacacggtccagactcctacgggaggcagcagtggggaatattggacaatgggcgaaagcctgatccagccatgccgcgtgtgtgaagaaggtcttcggattgtaaagcactttaagttgggaggaagggcagtaagctaataccttgctgttttgacgttaccgacagaataagcaccggctaacttcgtgccagcagccgcggtaatacgaagggtgcaagcgttaatcggaattactgggcgtaaagcgcgcgtaggtggtttgataagttggatgtgaaagccccgggctcaacctgggaattgcatccaaaactgtctggctagagtatggcagagggtggtggaatttcctgtgtagcggtgaaatgcgtagatataggaaggaacaccagtggcgaaggcgaccacctgggctaatactgacactgaggtgcgaaagcgtggggagcaaacaggattagataccctggtagtccacgccgtaaacgatgtcgactagccgttgggatccttgagatcttagtggcgcagctaacgcattaagtcgaccgcctggggagtacggccgcaaggttaaaactcaaatgaattgacgggggcccgcacaagcggtggagcatgtggtttaattcgaagcaacgcgaagaaccttaccaggccttgacatgcagagaactttccagagatggattggtgccttcgggaactctgacacaggtgctgcatggctgtcgtcagctcgtgtcgtgagatgttgggttaagtcccgtaacgagcgcaacccttgtccttagttaccagcacgttaaggtgggcactctaaggagactgccggtgacaaaccggaggaaggtggggatgacgtcaagtcatcatggcccttacggcctgggctacacacgtgctacaatggtcggtacaaagggttgccaagccgcgaggtggagctaatcccataaaaccgatcgtagtccggatcgcagtctgcaactcgactgcgtgaagtcggaatcgctagtaatcgtgaatcagaatgtcacggtgaatacgttcccgggccttgtacacaccgcccgtcacaccatgggagtgggttgctccagaagtagctagtctaaccttcggggggacggttaccacggagtgattcatgactggggtg

SEQ ID NO: 2694 - DNA, 1459 bp, unidentified
  source 1..1459: mol_type = unassigned DNA; note = Pseudomonas batumici
attgaacgctggcggcaggcctaacacatgcaagtcgagcggatgagaggagcttgctcttcgattcagcggcggacgggtgagtaatgcctaggaatctgcctggtagtgggggacaacgtttcgaaaggaacgctaataccgcatacgtcctacgggagaaagcaggggaccttcgggccttgcgctatcagatgagcctaggtcggattagctagttggtgaggtaatggctcaccaaggcgacgatccgtaactggtctgagaggatgatcagtcacactggaactgagacacggtccagactcctacgggaggcagcagtggggaatattggacaatgggcgaaagcctgatccagccatgccgcgtgtgtgaagaaggtcttcggattgtaaagcactttaagttgggaggaagggttgtacgttaataccgtgcaattttgacgttaccgacagaataagcaccggctaactctgtgccagcagccgcggtaatacagagggtgcaagcgttaatcggaattactgggcgtaaagcgcgcgtaggtggttcgttaagttggatgtgaaatccccgggctcaacctgggaactgcatccaaaactggcgagctagagtatggtagagggtggtggaatttcctgtgtagcggtgaaatgcgtagatataggaaggaacaccagtggcgaaggcgaccacctggactgatactgacactgaggtgcgaaagcgtggggagcaaacaggattagataccctggtagtccacgccgtaaacgatgtcaactagccgttggggaccttgagtctttagtggcgcagctaacgcattaagttgaccgcctggggagtacggccgcaaggttaaaactcaaatgaattgacgggggcccgcacaagcggtggagcatgtggtttaattcgaagcaacgcgaagaaccttaccaggccttgacatccaatgaactttccagagatggattggtgccttcgggaacattgagacaggtgctgcatggctgtcgtcagctcgtgtcgtgagatgttgggttaagtcccgtaacgagcgcaacccttgtccttagttaccagcacgttatggtgggcactctaaggagactgccggtgacaaaccggaggaaggtggggatgacgtcaagtcatcatggcccttacggcctgggctacacacgtgctacaatggtcggtacaaagggttgccaagccgcgaggtggagctaatcccataaaaccgatcgtagtccggatcgcagtctgcaactcgactgcgtgaagtcggaatcgctagtaatcgcgaatcagaatgtcgcggtgaatacgttcccgggccttgtacacaccgcccgtcacaccatgggagtgggttgcaccagaagtagctagtctaaccttcggggggacggttaccacggtgtgattcatgactggggtg

SEQ ID NO: 2695 - DNA, 1459 bp, Pseudomonas benzenivorans
  source 1..1459: mol_type = unassigned DNA
attgaacgctggcggcaggcctaacacatgcaagtcgagcggatgagggtagcttgctacctgattcagcggcggacgggtgagtaatgcctaggaatctgcctggtagtgggggacaacgtttcgaaaggaacgctaataccgcatacgtcctacgggagaaagtgggggatcttcggacctcacgctatcagatgagcctaggtcggattagctagttggtggggtaaaggctcaccaaggcgacgatccgtaactggtctgagaggatgatcagtcacactggaactgagacacggtccagactcctacgggaggcagcagtggggaatattggacaatgggcgaaagcctgatccagccatgccgcgtgtgtgaagaaggtcttcggattgtaaagcactttaagttgggaggaagggcagtaagttaataccttgctgttttgacgttaccgacagaataagcaccggctaactctgtgccagcagccgcggtaatacagagggtgcaagcgttaatcggaattactgggcgtaaagcgcgcgtaggtggtttgttaagttggatgtgaaagccccgggctcaacctgggaactgcatccaaaactggcaagctagagtacggtagagggtggtggaatttcctgtgtagcggtgaaatgcgtagatataggaaggaacaccagtggcgaaggcgaccacctggactgatactgacactgaggtgcgaaagcgtggggagcaaacaggattagataccctggtagtccacgccgtaaacgatgtcaactagccgttggaatccttgagattttagtggcgcagctaacgcattaagttgaccgcctggggagtacggccgcaaggttaaaactcaaatgaattgacgggggcccgcacaagcggtggagcatgtggtttaattcgaagcaacgcgaagaaccttacctggccttgacatctacagaactttccagagatggattggtgccttcgggaactgtaagacaggtgctgcatggctgtcgtcagctcgtgtcgtgagatgttgggttaagtcccgtaacgagcgcaacccttgtccttagttaccagcacgttatggtgggcactctaaggagactgccggtgacaaaccggaggaaggtggggatgacgtcaagtcatcatggcccttacggccagggctacacacgtgctacaatggtcggtacaaagggttgccaagccgcgaggtggagctaatcccataaaaccgatcgtagtccggatcgcagtctgcaactcgactgcgtgaagtcggaatcgctagtaatcgtgaatcagaatgtcacggtgaatacgttcccgggccttgtacacaccgcccgtcacaccatgggagtgggttgcaccagaagtagctagtctaaccttcggggggacggttaccacggtgtgattcatgactggggtg

SEQ ID NO: 2696 - DNA, 1459 bp, Pseudomonas borbori
  source 1..1459: mol_type = unassigned DNA
attgaacgctggcggcaggcctaacacatgcaagtcgagcggtagagaaaagcttgcttttcttgagagcggcggacgggtgagtaatgcctaggaatctgcctggtggtgggggataacgttcggaaacggacgctaataccgcatacgtcctacgggagaaagcgggggaccttcgggcctcgcgccatcagatgagcctaggtcggattagctagttggtgaggtaacggctcaccaaggcgacgatccgtaactggtctgagaggatgatcagtcacactggaactgagacacggtccagactcctacgggaggcagcagtggggaatattggacaatgggcgaaagcctgatccagccatgccgcgtgtgtgaagaaggtcttcggattgtaaagcactttaagttgggaggaagggcagtaagcgaataccttgctgttttgacgttaccgacagaataagcaccggctaactctgtgccagcagccgcggtaatacagagggtgcaagcgttaatcggaattactgggcgtaaagcgcgcgtaggtggttggttaagttggatgtgaaagccccgggctcaacctgggaactgcatccaaaactggccggctagagtacggtagagggtggtggaatttcctgtgtagcggtgaaatgcgtagatataggaaggaacaccagtggcgaaggcgaccacctggactgatactgacactgaggtgcgaaagcgtggggagcaaacaggattagataccctggtagtccacgccgtaaacgatgtcaactagccgttggattccttgagagtttagtggcgcagctaacgcattaagttgaccgcctggggagtacggccgcaaggttaaaactcaaatgaattgacgggggcccgcacaagcggtggagcatgtggtttaattcgaagcaacgcgaagaaccttacctggccttgacatgctgagaactttccagagatggattggtgccttcgggagctcagacacaggtgctgcatggctgtcgtcagctcgtgtcgtgagatgttgggttaagtcccgtaacgagcgcaacccttgtccttagttaccagcacgttatggtgggcactctaaggagactgccggtgacaaaccggaggaaggtggggatgacgtcaagtcatcatggcccttacggccagggctacacacgtgctacaatggtcggtacaaagggttgccaagccgcgaggtggagctaatcccataaaaccgatcgtagtccggatcgcagtctgcaactcgactgcgtgaagtcggaatcgctagtaatcgtgaatcagaatgtcacggtgaatacgttcccgggccttgtacacaccgcccgtcacaccatgggagtgggttgcaccagaagtagctagtctaaccttcggggggacggttaccacggtgtgattcatgactggggtg

SEQ ID NO: 2697 - DNA, 1456 bp, Pseudomonas brassicacearum
  source 1..1456: mol_type = unassigned DNA
acgctggcggcaggcctaacacatgcaagtcgagcggtaagaagaggtgcttgcacctcttgagagcggcggacgggtgagtaatgcctaggaatctgcctggtagtgggggataacgctcggaaacggacgctaataccgcatacgtcctacgggagaaagcaggggaccttcgggccttgcgctatcagatgagcctaggtcggattagctagttggtggggtaatggctcaccaaggcgacgatccgtaactggtctgagaggatgatcagtcacactggaactgagacacggtccagactcctacgggaggcagcagtggggaatattggacaatgggcgaaagcctgatccagccatgccgcgtgtgtgaagaaggtcttcggattgtaaagcactttaagttgggaggaagggcattaacctaatacgttagtgttttgacgttaccgacagaataagcaccggctaactctgtgccagcagccgcggtaatacagagggtgcaagcgttaatcggaattactgggcgtaaagcgcgcgtaggtggttcgttaagttggatgtgaaatccccgggctcaacctgggaactgcattcaaaactgtcgagctagagtatggtagagggtggtggaatttcctgtgtagcggtgaaatgcgtagatataggaaggaacaccagtggcgaaggcgaccacctggactgatactgacactgaggtgcgaaagcgtggggagcaaacaggattagataccctggtagtccacgccgtaaacgatgtcaactagccgttgggagccttgagctcttagtggcgcagctaacgcattaagttgaccgcctggggagtacggccgcaaggttaaaactcaaatgaattgacgggggcccgcacaagcggtggagcatgtggtttaattcgaagcaacgcgaagaaccttaccaggccttgacatccaatgaactttccagagatggattggtgccttcgggaacattgagacaggtgctgcatggctgtcgtcagctcgtgtcgtgagatgttgggttaagtcccgtaacgagcgcaacccttgtccttagttaccagcacgttatggtgggcactctaaggagactgccggtgacaaaccggaggaaggtggggatgacgtcaagtcatcatggcccttacggcctgggctacacacgtgctacaatggtcggtacagagggttgccaagccgcgaggtggagctaatcccacaaaaccgatcgtagtccggatcgcagtctgcaactcgactgcgtgaagtcggaatcgctagtaatcgcgaatcagaatgtcgcggtgaatacgttcccgggccttgtacacaccgcccgtcacaccatgggagtgggttgcaccagaagtagctagtctaaccttcgggaggacggttaccacggtgtgattcatgactggggtg

SEQ ID NO: 2698 - DNA, 1451 bp, Pseudomonas brenneri
  source 1..1451: mol_type = unassigned DNA
  misc_difference 1246: note = n is a, c, g, or t
ctggcggcaggcctaacacatgcaagtcgagcggtagagagaagcttgcttctcttgagagcggcggacgggtgagtaatgcctaggaatctgcctggtagtgggggataacgttcggaaacggacgctaataccgcatacgtcctacgggagaaagcaggggaccttcgggccttgcgctatcagatgagcctaggtcggattagctagttggtggggtaatggctcaccaaggcgacgatccgtaactggtctgagaggatgatcagtcacactggaactgagacacggtccagactcctacgggaggcagcagtggggaatattggacaatgggcgaaagcctgatccagccatgccgcgtgtgtgaagaaggtcttcggattgtaaagcactttaagttgggaggaagggcagtaaattaatactttgctgttttgacgttaccgacagaataagcaccggctaactctgtgccagcagccgcggtaatacagagggtgcaagcgttaatcggaattactgggcgtaaagcgcgcgtaggtggttagttaagttggatgtgaaatccccgggctcaacctgggaactgcattcaaaactgactgactagagtatggtagagggtggtggaatttcctgtgtagcggtgaaatgcgtagatataggaaggaacaccagtggcgaaggcgaccacctggactgatactgacactgaggtgcgaaagcgtggggagcaaacaggattagataccctggtagtccacgccgtaaacgatgtcaactagccgttgggagccttgagctcttagtggcgcagctaacgcattaagttgaccgcctggggagtacggccgcaaggttaaaactcaaatgaattgacgggggcccgcacaagcggtggagcatgtggtttaattcgaagcaacgcgaagaaccttaccaggccttgacatccaatgaactttctagagatagattggtgccttcgggaacattgagacaggtgctgcatggctgtcgtcagctcgtgtcgtgagatgttgggttaagtcccgtaacgagcgcaacccttgtccttagttaccagcacgtaatggtgggcactctaaggagactgccggtgacaaaccggaggaaggtggggatgacgtcaagtcatcatggcccttacggcctgggctacacacgtgctacaatggtcggtacagagggttgccaagccgcgaggtggagctaatcccanaaaaccgatcgtagtccggatcgcagtctgcaactcgactgcgtgaagtcggaatcgctagtaatcgcgaatcagaatgtcgcggtgaatacgttcccgggccttgtacacaccgcccgtcacaccatgggagtgggttgcaccagaagtagctagtctaaccttcgggaggacggttaccacggtgtgattcatgactggggtg

SEQ ID NO: 2699 - DNA, 1459 bp, unidentified
  source 1..1459: mol_type = unassigned DNA; note = Pseudomonas canadensis
attgaacgctggcggcaggcctaacacatgcaagtcgagcggtagagagaagcttgcttctcttgagagcggcggacgggtgagtaatgcctaggaatctgcctggtagtgggggataacgttcggaaacgaacgctaataccgcatacgtcctacgggagaaagcaggggaccttcgggccttgcgctatcagatgagcctaggtcggattagctagttggtgaggtaatggctcaccaaggcgacgatccgtaactggtctgagaggatgatcagtcacactggaactgagacacggtccagactcctacgggaggcagcagtggggaatattggacaatgggcgaaagcctgatccagccatgccgcgtgtgtgaagaaggtcttcggattgtaaagcactttaagttgggaggaagggcattaacctaatacgttagtgttttgacgttaccgacagaataagcaccggctaactctgtgccagcagccgcggtaatacagagggtgcaagcgttaatcggaattactgggcgtaaagcgcgcgtaggtggtttgttaagttggatgtgaaatccccgggctcaacctgggaactgcattcaaaactgactgactagagtatggtagagggtggtggaatttcctgtgtagcggtgaaatgcgtagatataggaaggaacaccagtggcgaaggcgaccacctggactaatactgacactgaggtgcgaaagcgtggggagcaaacaggattagataccctggtagtccacgccgtaaacgatgtcaactagccgttggaagccttgagcttttagtggcgcagctaacgcattaagttgaccgcctggggagtacggccgcaaggttaaaactcaaatgaattgacgggggcccgcacaagcggtggagcatgtggtttaattcgaagcaacgcgaagaaccttaccaggccttgacatccaatgaactttctagagatagattggtgccttcgggaacattgagacaggtgctgcatggctgtcgtcagctcgtgtcgtgagatgttgggttaagtcccgtaacgagcgcaacccttgtccttagttaccagcacgtaatggtgggcactctaaggagactgccggtgacaaaccggaggaaggtggggatgacgtcaagtcatcatggcccttacggcctgggctacacacgtgctacaatggtcggtacagagggttgccaagccgcgaggtggagctaatcccataaaaccgatcgtagtccggatcgcagtctgcaactcgactgcgtgaagtcggaatcgctagtaatcgcgaatcagaatgtcgcggtgaatacgttcccgggccttgtacacaccgcccgtcacaccatgggagtgggttgcaccagaagtagctagtctaaccttcgggaggacggttaccacggtgtgattcatgactggggtg

SEQ ID NO: 2700 - DNA, 1461 bp, Pseudomonas cannabina
  source 1..1461: mol_type = unassigned DNA
attgaacgctggcggcaggcctaacacatgcaagtcgagcggcagcacgggtacttgtacctggtggcgagcggcggacgggtgagtaatgcctaggaatctgcctggtagtgggggataacgctcggaaacggacgctaataccgcatacgtcctacgggagaaagcaggggaccttcgggccttgcgctatcagatgagcctaggtcggattagctagttggtgaggtaatggctcaccaaggcgacgatccgtaactggtctgagaggatgatcagtcacactggaactgagacacggtccagactcctacgggaggcagcagtggggaatattggacaatgggcgaaagcctgatccagccatgccgcgtgtgtgaagaaggtcttcggattgtaaagcactttaagttgggaggaagggcagttacctaatacgtatctgttttgacgttaccgacagaataagcaccggctaactctgtgccagcagccgcggtaatacagagggtgcaagcgttaatcggaattactgggcgtaaagcgcgcgtaggtggtttgttaagttgaatgtgaaatccccgggctcaacctgggaactgcatccaaaactggcaagctagagtatggtagagggtggtggaatttcctgtgtagcggtgaaatgcgtagatataggaaggaacaccagtggcgaaggcgaccacctggactgatactgacactgaggtgcgaaagcgtggggagcaaacaggattagataccctggtagtccacgccgtaaacgatgtcaactagccgttgggagccttgagctcttagtggcgcagctaacgcattaagttgaccgcctggggagtacggccgcaaggttaaaactcaaatgaattgacgggggcccgcacaagcggtggagcatgtggtttaattcgaagcaacgcgaagaaccttaccaggccttgacatccaatgaactttccagagatggatgggtgccttcgggaacattgagacaggtgctgcatggctgtcgtcagctcgtgtcgtgagatgttgggttaagtcccgtaacgagcgcaacccttgtccttagttaccagcacgtaatggtgggcactctaaggagactgccggtgacaaaccggaggaaggtggggatgacgtcaagtcatcatggcccttacggcctgggctacacacgtgctacaatggtcggtacagagggttgccaagccgcgaggtggagctaatctcacaaaaccgatcgtagtccggatcgcagtctgcaactcgactgcgtgaagtcggaatcgctagtaatcgcgaatcagaatgtcgcggtgaatacgttcccgggccttgtacacaccgcccgtcacaccatgggagtgggttgcaccagaagtagctagtctaaccttcggggggacggctaccacggtgtgattcatgactggggtg

SEQ ID NO: 2701 - DNA, 1461 bp, unidentified
  source 1..1461: mol_type = unassigned DNA; note = Pseudomonas caspiana
attgaacgctggcggcaggcctaacacatgcaagtcgagcggcagcacgggtacttgtacctggtggcgagcggcggacgggtgagtaatgcctaggaatctgcctggtagtgggggataacgctcggaaacggacgctaataccgcatacgtcctacgggagaaagcaggggaccttcgggccttgcgctatcagatgagcctaggtcggattagctagttggtgaggtaatggctcaccaaggcgacgatccgtaactggtctgagaggatgatcagtcacactggaactgagacacggtccagactcctacgggaggcagcagtggggaatattggacaatgggcgaaagcctgatccagccatgccgcgtgtgtgaagaaggtcttcggattgtaaagcactttaagttgggaggaagggcatttacctaatacgtaagtgttttgacgttaccgacagaataagcaccggctaactctgtgccagcagccgcggtaatacagagggtgcaagcgttaatcggaattactgggcgtaaagcgcgcgtaggtggtttgttaagttggatgtgaaatccccgggctcaacctgggaactgcatccaaaactggcaagctagagtatggtagagggtggtggaatttcctgtgtagcggtgaaatgcgtagatataggaaggaacaccagtggcgaaggcgaccacctggactgatactgacactgaggtgcgaaagcgtggggagcaaacaggattagataccctggtagtccacgccgtaaacgatgtcaactagccgttgggagccttgagctcttagtggcgcagctaacgcattaagttgaccgcctggggagtacggccgcaaggttaaaactcaaatgaattgacgggggcccgcacaagcggtggagcatgtggtttaattcgaagcaacgcgaagaaccttaccaggccttgacatccaatgaactttccagagatggattggtgccttcgggaacattgagacaggtgctgcatggctgtcgtcagctcgtgtcgtgagatgttgggttaagtcccgtaacgagcgcaacccttgtccttagttaccagcacattatggtgggcactctaaggagactgccggtgacaaaccggaggaaggtggggatgacgtcaagtcatcatggcccttacggcctgggctacacacgtgctacaatggtcggtacagagggttgccaagccgcgaggtggagctaatcccataaaaccgatcgtagtccggatcgcagtctgcaactcgactgcgtgaagtcggaatcgctagtaatcgcgaatcagaatgtcgcggtgaatacgttcccgggccttgtacacaccgcccgtcacaccatgggagtgggttgcaccagaagtagctagtctaaccttcggggggacggttaccacggtgtgattcatgactggggtg

SEQ ID NO: 2702 - DNA, 1459 bp, Pseudomonas cedrina
  source 1..1459: mol_type = unassigned DNA
attgaacgctggcggcaggcctaacacatgcaagtcgagcggtagagagaagcttgcttctcttgagagcggcggacgggtgagtaatgcctaggaatctgcctggtagtgggggataacgttcggaaacggacgctaataccgcatacgtcctacgggagaaagcaggggaccttcgggccttgcgctatcagatgagcctaggtcggattagctagttggtgaggtaatggctcaccaaggcgacgatccgtaactggtctgagaggatgatcagtcacactggaactgagacacggtccagactcctacgggaggcagcagtggggaatattggacaatgggcgaaagcctgatccagccatgccgcgtgtgtgaagaaggtcttcggattgtaaagcactttaagttgggaggaagggttgtagattaatactctgcaattttgacgttaccgacagaataagcaccggctaactctgtgccagcagccgcggtaatacagagggtgcaagcgttaatcggaattactgggcgtaaagcgcgcgtaggtggtttgttaagttggatgtgaaatccccgggctcaacctgggaactgcattcaaaactgactgactagagtgtggtagagggtggtggaatttcctgtgtagcggtgaaatgcgtagatataggaaggaacaccagtggcgaaggcgaccacctggaccaacactgacactgaggtgcgaaagcgtggggagcaaacaggattagataccctggtagtccacgccgtaaacgatgtcaactagccgttgggagccttgagctcttagtggcgcagctaacgcattaagttgaccgcctggggagtacggccgcaaggttaaaactcaaatgaattgacgggggcccgcacaagcggtggagcatgtggtttaattcgaagcaacgcgaagaaccttaccaggccttgacatccaatgaactttccagagatggatgggtgccttcgggaacattgagacaggtgctgcatggctgtcgtcagctcgtgtcgtgagatgttgggttaagtcccgtaacgagcgcaacccttgtccttagttaccagcacgtaatggtgggcactctaaggagactgccggtgacaaaccggaggaaggtggggatgacgtcaagtcatcatggcccttacggcctgggctacacacgtgctacaatggtcggtacagagggttgccaagccgcgaggtggagctaatcccacaaaaccgatcgtagtccggatcgcagtctgcaactcgactgcgtgaagtcggaatcgctagtaatcgcgaatcagaatgtcgcggtgaatacgttcccgggccttgtacacaccgcccgtcacaccatgggagtgggttgcaccagaagtagctagtctaaccttcgggaggacggttaccacggtgtgattcatgactggggtg

SEQ ID NO: 2703 - DNA, 1461 bp, unidentified
  source 1..1461: mol_type = unassigned DNA; note = Pseudomonas cerasi
attgaacgctggcggcaggcctaacacatgcaagtcgagcggcagcacgggtacttgtgcctggtggcgagcggcggacgggtgagtaatgcctaggaatctgcctggtagtgggggataacgctcggaaacggacgctaataccgcatacgtcctacgggagaaagcaggggaccttcgggccttgcgctatcagatgagcctaggtcggattagctagttggtgaggtaatggctcaccaaggcgacgatccgtaactggtctgagaggatgatcagtcacactggaactgagacacggtccagactcctacgggaggcagcagtggggaatattggacaatgggcgaaagcctgatccagccatgccgcgtgtgtgaagaaggtcttcggattgtaaagcactttaagttgggaggaagggcagttacctaatacgtgattgttttgacgttaccgacagaataagcaccggctaactctgtgccagcagccgcggtaatacagagggtgcaagcgttaatcggaattactgggcgtaaagcgcgcgtaggtggtttgttaagttgaatgtgaaatccccgggctcaacctgggaactgcatccaaaactggcaagctagagtatggtagagggtggtggaatttcctgtgtagcggtgaaatgcgtagatataggaaggaacaccagtggcgaaggcgaccacctggactgatactgacactgaggtgcgaaagcgtggggagcaaacaggattagataccctggtagtccacgccgtaaacgatgtcaactagccgttgggagccttgagctcttagtggcgcagctaacgcattaagttgaccgcctggggagtacggccgcaaggttaaaactcaaatgaattgacgggggcccgcacaagcggtggagcatgtggtttaattcgaagcaacgcgaagaaccttaccaggccttgacatccaatgaactttccagagatggattggtgccttcgggaacattgagacaggtgctgcatggctgtcgtcagctcgtgtcgtgagatgttgggttaagtcccgtaacgagcgcaacccttgtccttagttaccagcacgttatggtgggcactctaaggagactgccggtgacaaaccggaggaaggtggggatgacgtcaagtcatcatggcccttacggcctgggctacacacgtgctacaatggtcggtacagagggttgccaagccgcgaggtggagctaatctcacaaaaccgatcgtagtccggatcgcagtctgcaactcgactgcgtgaagtcggaatcgctagtaatcgcgaatcagaatgtcgcggtgaatacgttcccgggccttgtacacaccgcccgtcacaccatgggagtgggttgcaccagaagtagctagtctaaccttcggggggacggttaccacggtgtgattcatgactggggtg

SEQ ID NO: 2704 - DNA, 1459 bp, unidentified
  source 1..1459: mol_type = unassigned DNA; note = Pseudomonas chengduensis
attgaacgctggcggcaggcctaacacatgcaagtcgagcggatgagaggagcttgctccttgatttagcggcggacgggtgagtaatgcctaggaatctgcctggtagtgggggataacgttccgaaaggaacgctaataccgcatacgtcctacgggagaaagcaggggaccttcgggccttgcgctatcagatgagcctaggtcggattagctagttggtgaggtaatggctcaccaaggcgacgatccgtaactggtctgagaggatgatcagtcacactggaactgagacacggtccagactcctacgggaggcagcagtggggaatattggacaatgggcgaaagcctgatccagccatgccgcgtgtgtgaagaaggtcttcggattgtaaagcactttaagttgggaggaagggcattaacctaatacgttagtgttttgacgttaccgacagaataagcaccggctaacttcgtgccagcagccgcggtaatacgaagggtgcaagcgttaatcggaattactgggcgtaaagcgcgcgtaggtggttcgttaagttggatgtgaaagccccgggctcaacctgggaactgcatccaaaactggcgagctagagtacggtagagggtggtggaatttcctgtgtagcggtgaaatgcgtagatataggaaggaacaccagtggcgaaggcgaccacctggactgatactgacactgaggtgcgaaagcgtggggagcaaacaggattagataccctggtagtccacgccgtaaacgatgtcaactagccgttgggttccttgagaacttagtggcgcagctaacgcattaagttgaccgcctggggagtacggccgcaaggttaaaactcaaatgaattgacgggggcccgcacaagcggtggagcatgtggtttaattcgaagcaacgcgaagaaccttacctggccttgacatgctgagaactttccagagatggattggtgccttcgggagctcagacacaggtgctgcatggctgtcgtcagctcgtgtcgtgagatgttgggttaagtcccgtaacgagcgcaacccttgtccttagttaccagcacgtaatggtgggcactctaaggagactgccggtgacaaaccggaggaaggtggggatgacgtcaagtcatcatggcccttacggccagggctacacacgtgctacaatggtcggtacaaagggttgccaagccgcgaggtggagctaatcccataaaaccgatcgtagtccggatcgcagtctgcaactcgactgcgtgaagtcggaatcgctagtaatcgtgaatcagaatgtcacggtgaatacgttcccgggccttgtacacaccgcccgtcacaccatgggagtgggttgctccagaagtagctagtctaaccttcggggggacggttaccacggagtgattcatgactggggtg

SEQ ID NO: 2705 - DNA, 1501 bp, unidentified
  source 1..1501: mol_type = unassigned DNA; note = Pseudomonas chloritidismutans
  misc_difference 66: note = n is a, c, g, or t
ggctcagattgaacgctggcggcaggcctaacacatgcaagtcgagcggatgaagagagcttgctntctgattcagcggcggacgggtgagtaatgcctaggaatctgcctgatagtgggggacaacgtttcgaaaggaacgctaataccgcatacgtcctacgggagaaagcaggggaccttcgggccttgcgctatcagatgagcctaggtcggattagctagttggtgaggtaacggctcaccaaggcgacgatccgtaactggtctgagaggatgatcagtcacactggaactgagacacggtccagactcctacgggaggcagcagtggggaatattggacaatgggcgaaagcctgatccagccatgccgcgtgtgtgaagaaggtcttcggattgtaaagcactttaagttgggaggaagggcattaacctaatacgttagtgttttgacgttaccgacagaataagcaccggctaacttcgtgccagcagccgcggtaatacgaagggtgcaagcgttaatcggaattactgggcgtaaagcgcgcgtaggtggtttgttaagttgaatgtgaaagccccgggctcaacctgggaactgcatccaaaactggcaagctagagtatggcagagggtggtggaatttcctgtgtagcggtgaaatgcgtagatataggaaggaacaccagtggcgaaggcgaccacctgggctaatactgacactgaggtgcgaaagcgtggggagcaaacaggattagataccctggtagtccacgccgtaaacgatgtcgactagccgttgggatccttgagatcttagtggcgcagctaacgcattaagtcgaccgcctggggagtacggccgcaaggttaaaactcaaatgaattgacgggggcccgcacaagcggtggagcatgtggtttaattcgaagcaacgcgaagaaccttaccaggccttgacatgcagagaactttccagagatggattggtgccttcgggaactctgacacaggtgctgcatggctgtcgtcagctcgtgtcgtgagatgttgggttaagtcccgtaacgagcgcaacccttgtccttagttaccagcacgttaaggtgggcactctaaggagactgccggtgacaaaccggaggaaggtggggatgacgtcaagtcatcatggcccttacggcctgggctacacacgtgctacaatggtcggtacaaagggttgccaagccgcgaggtggagctaatcccataaaaccgatcgtagtccggatcgcagtctgcaactcgactgcgtgaagtcggaatcgctagtaatcgtgaatcagaatgtcacggtgaatacgttcccgggccttgtacacaccgcccgtcacaccatgggagtgggttgctccagaagtagctagtctaaccttcggggggacggttaccacggagtgattcatgactggggtgaagtcgtaacaaggtagccgtaggggaacctgcgt

SEQ ID NO: 2706 - DNA, 1461 bp, Pseudomonas cichorii
  source 1..1461: mol_type = unassigned DNA
attgaacgctggcggcaggcctaacacatgcaagtcgggcggcagcacaggtacttgtaccgggtggcgagcggcggacgggtgagtaatgcctaggaatctgcctggtagtgggggataacgctcggaaacggacgctaataccgcatacgtcctacgggagaaagcaggggaccttcgggccttgcgctatcagatgagcctaggtcggattagctagttggtgaggtaaaggctcaccaaggcgacgatccgtaactggtctgagaggatgatcagtcacactggaactgagacacggtccagactcctacgggaggcagcagtggggaatattggacaatgggcgaaagcctgatccagccatgccgcgtgtgtgaagaaggtcttcggattgtaaagcactttaagttgggaggaagggtcgttacctaatacgtgacgattttgacgttaccgacagaataagcaccggctaactctgtgccagcagccgcggtaatacagagggtgcaagcgttaatcggaattactgggcgtaaagcgcgcgtaggtggttcgttaagttggatgtgaaatccccgggctcaacctgggaactgcatccaaaactggcgagctagagtagggcagagggtggtggaatttcctgtgtagcggtgaaatgcgtagatataggaaggaacaccagtggcgaaggcgaccacctgggctcatactgacactgaggtgcgaaagcgtggggagcaaacaggattagataccctggtagtccacgccgtaaacgatgtcaactagccgttggaatccttgagattttagtggcgcagctaacgcattaagttgaccgcctggggagtacggccgcaaggttaaaactcaaatgaattgacgggggcccgcacaagcggtggagcatgtggtttaattcgaagcaacgcgaagaaccttaccaggccttgacatccagtgaacttaccagagatggtttggtgccttcgggaacactgagacaggtgctgcatggctgtcgtcagctcgtgtcgtgagatgttgggttaagtcccgtaacgagcgcaacccttgtccttagttaccagcacgtgatggtgggcactctaaggagactgccggtgacaaaccggaggaaggtggggatgacgtcaagtcatcatggcccttacggcctgggctacacacgtgctacaatggtcggtacagagggttgccaagccgcgaggtggagctaatctcacaaaaccgatcgtagtccggatcgcagtctgcaactcgactgcgtgaagtcggaatcgctagtaatcgcgaatcagaatgtcgcggtgaatacgttcccgggccttgtacacaccgcccgtcacaccatgggagtgggttgcaccagaagtagctagtctaaccttcggggggacggttaccacggtgtgattcatgactggggtg

SEQ ID NO: 2707 - DNA, 1459 bp, Pseudomonas citronellolis
  source 1..1459: mol_type = unassigned DNA
attgaacgctggcggcaggcctaacacatgcaagtcgagcggatgaagggagcttgcttctggattcagcggcggacgggtgagtaatgcctaggaatctgcctggtagtgggggacaacgttccgaaaggagcgctaataccgcatacgtcctacgggagaaagtgggggatcttcggacctcacgctatcagatgagcctaggtcggattagctagtaggtggggtaatggctcacctaggcgacgatccgtaactggtctgagaggatgatcagtcacactggaactgagacacggtccagactcctacgggaggcagcagtggggaatattggacaatgggcgaaagcctgatccagccatgccgcgtgtgtgaagaaggtcttcggattgtaaagcactttaagttgggaggaagggcagtaagttaataccttgctgttttgacgttaccaacagaataagcaccggctaacttcgtgccagcagccgcggtaatacgaagggtgcaagcgttaatcggaattactgggcgtaaagcgcgcgtaggtggtttggtaagatggatgtgaaatccccgggctcaacctgggaactgcatccataactgcctgactagagtacggtagagggtggtggaatttcctgtgtagcggtgaaatgcgtagatataggaaggaacaccagtggcgaaggcgaccacctggactgatactgacactgaggtgcgaaagcgtggggagcaaacaggattagataccctggtagtccacgccgtaaacgatgtcgactagccgttgggatccttgagatcttagtggcgcagctaacgcgataagtcgaccgcctggggagtacggccgcaaggttaaaactcaaatgaattgacgggggcccgcacaagcggtggagcatgtggtttaattcgaagcaacgcgaagaaccttacctggccttgacatgtccggaattctgcagagatgcgggagtgccttcgggaatcggaacacaggtgctgcatggctgtcgtcagctcgtgtcgtgagatgttgggttaagtcccgtaacgagcgcaacccttgtccttagttaccagcacgttatggtgggcactctaaggagactgccggtgacaaaccggaggaaggtggggatgacgtcaagtcatcatggcccttacggccagggctacacacgtgctacaatggtcggtacagagggttgccaagccgcgaggtggagctaatcccagaaaaccgatcgtagtccggatcgcagtctgcaactcgactgcgtgaagtcggaatcgctagtaatcgtgaatcagaatgtcacggtgaatacgttcccgggccttgtacacaccgcccgtcacaccatgggagtgggttgctccagaagtagctagtctaaccgcaagggggacggttaccacggagtgattcatgactggggtg

SEQ ID NO: 2708 - DNA, 1445 bp, unidentified
  source 1..1445: mol_type = unassigned DNA; note = Pseudomonas coleopterorum
attgaacgctggcggcaggcctaacacatgcaagtcgagcggttgaaggaagcttgcttcctgattcagcggcggacgggtgagtaatgcctaggaatctgcctggtagtgggggacaacgtttcgaaaggaacgctaataccgcatacgtcctacgggagaaagcaggggaccttcgggccttgcgctatcagatgagcctaggtcggattagctagttggtgaggtaatggctcaccaaggcgacgatccgtaactggtctgagaggatgatcagtcacactggaactgagacacggtccagactcctacgggaggcagcagtggggaatattggacaatgggcgaaagcctgatccagccatgccgcgtgtgtgaagaaggtcttcggattgtaaagcactttaagttgggaggaagggcagtcagcgaataccttgctgtcttgacgttaccgacagaataagcaccggctaactctgtgccagcagccgcggtaatacagagggtgcaagcgttaatcggaattactgggcgtaaagcgcgcgtaggtggtttgttaagttggatgtgaaatccccgggctcaacctgggaactgcatccaaaactggcaagctagagtagggcagagggtggtggaatttcctgtgtagcggtgaaatgcgtagatataggaaggaacaccagtggcgaaggcgaccacctgggctcatactgacactgaggtgcgaaagcgtggggagcaaacaggattagataccctggtagtccacgccgtaaacgatgtcaactagccgttgggagtcttgaactcttagtggcgcagctaacgcattaagttgaccgcctggggagtacggccgcaaggttaaaactcaaatgaattgacgggggcccgcacaagcggtggagcatgtggtttaattcgaagcaacgcgaagaaccttaccaggccttgacatccaatgaactttccagagatggatgggtgccttcgggaacattgagacaggtgctgcatggctgtcgtcagctcgtgtcgtgagatgttgggttaagtcccgtaacgagcgcaacccttgtccttagttaccagcacgttatggtgggcactctaaggagactgccggtgacaaaccggaggaaggtggggatgacgtcaagtcatcatggcccttacggcctgggctacacacgtgctacaatggtcggtacagagggttgccaagccgcgaggtggagctaatctcacaaaaccgatcgtagtccggatcgcagtctgcaactcgactgcgtgaagtcggaatcgctagtaatcgcgaatcagaatgtcgcggtgaatacgttcccgggccttgtacacaccgcccgtcacaccatgggagtgggttgcaccagaagtagctagtctaaccttcgggaggacggttaccacggtgtgat

SEQ ID NO: 2709 - DNA, 1459 bp, Pseudomonas composti
  source 1..1459: mol_type = unassigned DNA
attgaacgctggcggcaggcctaacacatgcaagtcgagcggtagagaggagcttgcttctcttgagagcggcggacgggtgagtaatgcctaggaatctgcctagtggtgggggataacgttcggaaacggacgctaataccgcatacgtcctacgggagaaagcgggggatcttcggacctcgcgccattagatgagcctaggtcggattagctagttggtgaggtaatggctcaccaaggcgacgatccgtaactggtctgagaggatgatcagtcacactggaactgagacacggtccagactcctacgggaggcagcagtggggaatattggacaatgggcgaaagcctgatccagccatgccgcgtgtgtgaagaaggtcttcggattgtaaagcactttaagttgggaggaagggttgtagattaatactctgcaattttgacgttaccgacagaataagcaccggctaacttcgtgccagcagccgcggtaatacgaagggtgcaagcgttaatcggaattactgggcgtaaagcgcgcgtaggtggttcgttaagttggatgtgaaagccccgggctcaacctgggaactgcatccaaaactggcgagctagagtacggtagagggtggtggaatttcctgtgtagcggtgaaatgcgtagatataggaaggaacaccagtggcgaaggcgaccacctggactgatactgacactgaggtgcgaaagcgtggggagcaaacaggattagataccctggtagtccacgccgtaaacgatgtcaactagccgttgggttccttgagaacttagtggcgcagctaacgcattaagttgaccgcctggggagtacggccgcaaggttaaaactcaaatgaattgacgggggcccgcacaagcggtggagcatgtggtttaattcgaagcaacgcgaagaaccttacctggccttgacatgctgagaactttccagagatggattggtgccttcgggaactcagacacaggtgctgcatggctgtcgtcagctcgtgtcgtgagatgttgggttaagtcccgtaacgagcgcaacccttgtccttagttaccagcacgttatggtgggcactctaaggagactgccggtgacaaaccggaggaaggtggggatgacgtcaagtcatcatggcccttacggccagggctacacacgtgctacaatggtcggtacaaagggttgccaagccgcgaggtggagctaatcccataaaaccgatcgtagtccggatcgcagtctgcaactcgactgcgtgaagtcggaatcgctagtaatcgtgaatcagaatgtcacggtgaatacgttcccgggccttgtacacaccgcccgtcacaccatgggagtgggttgctccagaagtagctagtctaaccttcggggggacggttaccacggagtgattcatgactggggtg

SEQ ID NO: 2710 - DNA, 1461 bp, Pseudomonas congelans
  source 1..1461: mol_type = unassigned DNA
attgaacgctggcggcaggcctaacacatgcaagtcgagcggcagcacgggtacttgtacctggtggcgagcggcggacgggtgagtaatgcctaggaatctgcctggtagtgggggataacgctcggaaacggacgctaataccgcatacgtcctacgggagaaagcaggggaccttcgggccttgcgctatcagatgagcctaggtcggattagctagttggtgaggtaatggctcaccaaggcgacgatccgtaactggtctgagaggatgatcagtcacactggaactgagacacggtccagactcctacgggaggcagcagtggggaatattggacaatgggcgaaagcctgatccagccatgccgcgtgtgtgaagaaggtcttcggattgtaaagcactttaagttgggaggaagggcagttacctaatacgtgattgttttgacgttaccgacagaataagcaccggctaactctgtgccagcagccgcggtaatacagagggtgcaagcgttaatcggaattactgggcgtaaagcgcgcgtaggtggtttgttaagttgaatgtgaaatccccgggctcaacctgggaactgcatccaaaactggcaagctagagtatggtagagggtggtggaatttcctgtgtagcggtgaaatgcgtagatataggaaggaacaccagtggcgaaggcgaccacctggactgatactgacactgaggtgcgaaagcgtggggagcaaacaggattagataccctggtagtccacgccgtaaacgatgtcaactagccgttgggagccttgagctcttagtggcgcagctaacgcattaagttgaccgcctggggagtacggccgcaaggttaaaactcaaatgaattgacgggggcccgcacaagcggtggagcatgtggtttaattcgaagcaacgcgaagaaccttaccaggccttgacatccaatgaactttccagagatggattggtgccttcgggaacattgagacaggtgctgcatggctgtcgtcagctcgtgtcgtgagatgttgggttaagtcccgtaacgagcgcaacccttgtccttagttaccagcacgttaaggtgggcactctaaggagactgccggtgacaaaccggaggaaggtggggatgacgtcaagtcatcatggcccttacggcctgggctacacacgtgctacaatggtcggtacagagggttgccaagccgcgaggtggagctaatctcacaaaaccgatcgtagtccggatcgcagtctgcaactcgactgcgtgaagtcggaatcgctagtaatcgcgaatcagaatgtcgcggtgaatacgttcccgggccttgtacacaccgcccgtcacaccatgggagtgggttgcaccagaagtagctagtctaaccttcggggggacggttaccacggtgtgattcatgactggggtg

SEQ ID NO: 2711 - DNA, 1461 bp, unidentified
  source 1..1461: mol_type = unassigned DNA; note = Pseudomonas coronafaciens
attgaacgctggcggcaggcctaacacatgcaagtcgagcggcagcacgggtacttgtacctggtggcgagcggcggacgggtgagtaatgcctaggaatctgcctggtagtgggggataacgttcggaaacggacgctaataccgcatacgtcctacgggagaaagcaggggaccttcgggccttgcgctatcagatgagcctaggtcggattagctagttggtgaggtaatggctcaccaaggcgacgatccgtaactggtctgagaggatgatcagtcacactggaactgagacacggtccagactcctacgggaggcagcagtggggaatattggacaatgggcgaaagcctgatccagccatgccgcgtgtgtgaagaaggtcttcggattgtaaagcactttaagttgggaggaagggcatttacctaatacgtaagtgttttgacgttaccgacagaataagcaccggctaactctgtgccagcagccgcggtaatacagagggtgcaagcgttaatcggaattactgggcgtaaagcgcgcgtaggtggtttgttaagttgaatgtgaaatccccgggctcaacctgggaactgcatccaaaactggcaggctagagtatggtagagggtggtggaatttcctgtgtagcggtgaaatgcgtagatataggaaggaacaccagtggcgaaggcgaccacctggactgatactgacactgaggtgcgaaagcgtggggagcaaacaggattagataccctggtagtccacgccgtaaacgatgtcaactagccgttgggagccttgagctcttagtggcgcagctaacgcattaagttgaccgcctggggagtacggccgcaaggttaaaactcaaatgaattgacgggggcccgcacaagcggtggagcatgtggtttaattcgaagcaacgcgaagaaccttaccaggccttgacatccaatgaatcctttagagatagaggagtgccttcgggagcattgagacaggtgctgcatggctgtcgtcagctcgtgtcgtgagatgttgggttaagtcccgtaacgagcgcaacccttgtccttagttaccagcacgttaaggtgggcactctaaggagactgccggtgacaaaccggaggaaggtggggatgacgtcaagtcatcatggcccttacggcctgggctacacacgtgctacaatggtcggtacagagggttgccaagccgcgaggtggagctaatctcacaaaaccgatcgtagtccggatcgcagtctgcaactcgactgcgtgaagtcggaatcgctagtaatcgcgaatcagaatgtcgcggtgaatacgttcccgggccttgtacacaccgcccgtcacaccatgggagtgggttgcaccagaagtagctagtctaaccttcggggggacggttaccacggtgtgattcatgactggggtg

SEQ ID NO: 2712 - DNA, 1438 bp, Pseudomonas corrugata
  source 1..1438: mol_type = unassigned DNA
ctaacacatgcaagtcgagcggtagagaggtgcttgcacctcttgagagcggcggacgggtgagtaatgcctaggaatctgcctggtagtgggggataacgctcggaaacggacgctaataccgcatacgtcctacgggagaaagcaggggaccttcgggccttgcgctatcagatgagcctaggtcggattagctagttggtgaggtaatggctcaacaaggcgacgatccgtaactggtctgagaggatgatcagtcacactggaactgagacacggtccagactcctacgggaggcagcagtggggaatattggacaatgggcgaaagcctgatccagccatgccgcgtgtgtgaagaaggtcttcggattgtaaagcactttaagttggaggaagggcattaacctaatacgttagtgttttgacgttaccgacagaataagcaccggctaactctgtgccagcagccgcggtaatacagagggtgcaagcgttaatcggaattactgggcgtaaagcgcgcgtaggtggtttgttaagttggatgtgaaagccccgggctcaacctgggaactgcattcaaaactgacaagctagagtatggtagagggtggtggaatttcctgtgtagcggtgaaatgcgtagatataggaaggaacaccagtggcgaaggcgaccacctggactgatactgacactgaggtgcgaaagcgtggggagcaaacaggattagataccctggtagtccacgccgtaaacgatgtcaactagccgttgggagccttgagctcttagtggcgcagctaacgcattaagttgaccgcctggggagtacggccgcaaggttaaaactcaaatgaattgacgggggcccgcacaagcggtggagcatgtggtttaattcgaagcaacgcgaagaaccttaccaggccttgacatccaatgaactttccagagatggattggtgccttcgggaacattgagacaggtgctgcatggctgtcgtcagctcgtgtcgtgagatgttgggttaagtcccgtaacgagcgcaacccttgtccttagttaccagcacgttatggtgggcactctaaggagactgccggtgacaaaccggaggaaggtggggatgacgtcaagtcatcatggcccttacggcctgggctacacacgtgctacaatggtcggtacagagggttgccaagccgcgaggtggagctaatcccacaaaaccgatcgtagtccggatcgcagtctgcaactcgactgcgtgaagtcggaatcgctagtaatcgcgaatcagaatgtcgcggtgaatacgttcccgggccttgtacacaccgcccgtcacaccatgggagtgggttgcaccagaagtagctagtctaaccttcggggggacggttaccacggtgtgattcatgactggggtg

SEQ ID NO: 2713 - DNA, 1459 bp, Pseudomonas costantinii
  source 1..1459: mol_type = unassigned DNA
attgaacgctggcggcaggcctaacacatgcaagtcgagcggtagagagaagcttgcttctcttgagagcggcggacgggtgagtaatgcctaggaatctgcctggtagtgggggataacgttcggaaacggacgctaataccgcatacgtcctacgggagaaagcaggggaccttcgggccttgcgctatcagatgagcctaggtcggattagctagttggtgaggtaatggctcaccaaggcgacgatccgtaactggtctgagaggatgatcagtcacactggaactgagacacggtccagactcctacgggaggcagcagtggggaatattggacaatgggcgaaagcctgatccagccatgccgcgtgtgtgaagaaggtcttcggattgtaaagcactttaagttgggaggaagggcagttgcctaatacgtaactgttttgacgttaccgacagaataagcaccggctaactctgtgccagcagccgcggtaatacagagggtgcaagcgttaatcggaattactgggcgtaaagcgcgcgtaggtggtttgttaagttggatgtgaaatccccgggctcaacctgggaactgcattcaaaactgactgactagagtatggtagagggtggtggaatttcctgtgtagcggtgaaatgcgtagatataggaaggaacaccagtggcgaaggcgaccacctggactaatactgacactgaggtgcgaaagcgtggggagcaaacaggattagataccctggtagtccacgccgtaaacgatgtcaactagccgttggaagccttgagcttttagtggcgcagctaacgcattaagttgaccgcctggggagtacggccgcaaggttaaaactcaaatgaattgacgggggcccgcacaagcggtggagcatgtggtttaattcgaagcaacgcgaagaaccttaccaggccttgacatccaatgaactttctagagatagattggtgccttcgggaacattgagacaggtgctgcatggctgtcgtcagctcgtgtcgtgagatgttgggttaagtcccgtaacgagcgcaacccttgtccttagttaccagcacgtaatggtgggcactctaaggagactgccggtgacaaaccggaggaaggtggggatgacgtcaagtcatcatggcccttacggcctgggctacacacgtgctacaatggtcggtacagagggttgccaaaccgcgaggtggagctaatcccataaaaccgatcgtagtccggatcgcagtctgcaactcgactgcgtgaagtcggaatcgctagtaatcgcgaatcagaatgtcgcggtgaatacgttcccgggccttgtacacaccgcccgtcacaccatgggagtgggttgcaccagaagtagctagtctaaccttcgggaggacggttaccacggtgtgattcatgactggggtg

SEQ ID NO: 2714 - DNA, 1459 bp, Pseudomonas cremoricolorata
  source 1..1459: mol_type = unassigned DNA
attgaacgctggcggcaggcctaacacatgcaagtcgagcggatgagaagagcttgctcttcgattcagcggcggacgggtgagtaatgcctaggaatctgcctggtagtgggggacaacgtctcgaaagggacgctaataccgcatacgtcctacgggagaaagcaggggaccttcgggccttgcgctatcagatgagcctaggtcggattagcttgttggtgaggtaatggctcaccaaggcgacgatccgtaactggtctgagaggatgatcagtcacactggaactgagacacggtccagactcctacgggaggcagcagtggggaatattggacaatgggcgaaagcctgatccagccatgccgcgtgtgtgaagaaggtcttcggattgtaaagcactttaagttgggaggaagggcaatcagcgaatacctggttgttttgacgttaccgacagaataagcaccggctaactctgtgccagcagccgcggtaatacagagggtgcaagcgttaatcggaattactgggcgtaaagcgcgcgtaggtggtttgttaagttggatgtgaaagccccgggctcaacctgggaactgcatccaaaactggcaagctagagtatggtagagggtggtggaatttcctgtgtagcggtgaaatgcgtagatataggaaggaacaccagtggcgaaggcgaccacctggaccaatactgacactgaggtgcgaaagcgtggggagcaaacaggattagataccctggtagtccacgccgtaaacgatgtcaactagccgttggaatccttgagattttagtggcgcagctaacgcattaagttgaccgcctggggagtacggccgcaaggttaaaactcaaatgaattgacgggggcccgcacaagcggtggagcatgtggtttaattcgaagcaacgcgaagaaccttaccaggccttgacatgcagagaactttccagagatggattggtgccttcgggaactctgacacaggtgctgcatggctgtcgtcagctcgtgtcgtgagatgttgggttaagtcccgtaacgagcgcaacccttgtccttagttaccagcacgttatggtgggcactctaaggagactgccggtgacaaaccggaggaaggtggggatgacgtcaagtcatcatggcccttacggcctgggctacacacgtgctacaatggtcggtacagagggttgccaagccgcgaggtggagctaatctcacaaaaccgatcgtagtccggatcgcagtctgcaactcgactgcgtgaagtcggaatcgctagtaatcgcgaatcagaatgtcgcggtgaatacgttcccgggccttgtacacaccgcccgtcacaccatgggagtgggttgcaccagaagtagctagtctaaccctcgggaggacggttaccacggtgtgattcatgactggggtg

SEQ ID NO: 2715 - DNA, 1430 bp, Pseudomonas cuatrocienegasensis
  source 1..1430: mol_type = unassigned DNA
attgaacgctggcggcaggcctaacacatgcaagtcgagcggtagaggggagcttgcttcccttgagagcggcggacgggtgagtaatgcctaggaatctgcctagtggtgggggataacgttcggaaacggacgctaataccgcatacgtcctacgggagaaagcgggggaccttcgggcctcgcgccattagatgagcctaggtcggattagctagttggtgaggtaacggctcaccaaggcgacgatccgtaactggtctgagaggatgatcagtcacactggaactgagacacggtccagactcctacgggaggcagcagtggggaatattggacaatgggcgaaagcctgatccagccatgccgcgtgtgtgaagaaggtcttcggattgtaaagcactttaagttgggaggaagggtagtaacttaatacgttgctattttgacgttaccgacagaataagcaccggctaactctgtgccagcagccgcggtaatacagagggtgcaagcgttaatcggaattactgggcgtaaagcgcgcgtaggtggtttgttaagttggatgtgaaagccccgggctcaacctgggaactgcatccaaaactggcaagctagagtacggtagagggtggtggaatttcctgtgtagcggtgaaatgcgtagatataggaaggaacaccagtggcgaaggcgaccacctggactgatactgacactgaggtgcgaaagcgtggggagcaaacaggattagataccctggtagtccacgccgtaaacgatgtcaactagccgttgggagtcttgaactcttagtggcgcagctaacgcattaagttgaccgcctggggagtacggccgcaaggttaaaactcaaatgaattgacgggggcccgcacaagcggtggagcatgtggtttaattcgaagcaacgcgaagaaccttacctggccttgacatgctgagaactttccagagatggattggtgccttcgggaactcagacacaggtgctgcatggctgtcgtcagctcgtgtcgtgagatgttgggttaagtcccgtaacgagcgcaacccttgtccttagttaccagcacgttatggtgggaactctaaggagactgccggtgacaaaccggaggaaggtggggatgacgtcaagtcatcatggcccttacggccagggctacacacgtgctacaatggtcggtacaaagggttgccaagccgcgaggtggagctaatcccataaaaccgatcgtagtccggatcgcagtctgcaactcgactgcgtgaagtcggaatcgctagtaatcgtgaatcagaatgtcacggtgaatacgttcccgggccttgtacacaccgcccgtcacaccatgggagtgggttgcaccagaagtagctagtctaaccgcaagggggacgg

SEQ ID NO: 2716 - DNA, 1459 bp, Pseudomonas deceptionensis
  source 1..1459: mol_type = unassigned DNA
attgaacgctggcggcaggcctaacacatgcaagtcgagcggtagagaggtgcttgcacctcttgagagcggcggacgggtgagtaatatctaggaatctgcctggtagtgggggataacgttcggaaacggacgctaataccgcatacgtcctacgggagaaagcaggggaccttcgggccttgcgctatcagatgagcctagatcggattagctagttggtgaggtaatggctcaccaaggctacgatccgtaactggtctgagaggatgatcagtcacactggaactgagacacggtccagactcctacgggaggcagcagtggggaatattggacaatgggcgaaagcctgatccagccatgccgcgtgtgtgaagaaggtcttcggattgtaaagcactttaagttgggaggaagggcattaacctaatacgttagtgtcttgacgttaccgacagaataagcaccggctaactctgtgccagcagccgcggtaatacagagggtgcaagcgttaatcggaattactgggcgtaaagcgcgcgtaggtggtttgttaagttgaatgtgaaatccccgggctcaacctgggaactgcatccaaaactggcaagctagagtatggtagagggtagtggaatttcctgtgtagcggtgaaatgcgtagatataggaaggaacaccagtggcgaaggcgactacctggactgatactgacactgaggtgcgaaagcgtggggagcaaacaggattagataccctggtagtccacgccgtaaacgatgtcaactagccgttgggagtcttgaactcttagtggcgcagctaacgcattaagttgaccgcctggggagtacggccgcaaggttaaaactcaaatgaattgacgggggcccgcacaagcggtggagcatgtggtttaattcgaagcaacgcgaagaaccttaccaggccttgacatccaatgaactttctagagatagattggtgccttcgggaacattgagacaggtgctgcatggctgtcgtcagctcgtgtcgtgagatgttgggttaagtcccgtaacgagcgcaacccttgtccttagttaccagcacgtaatggtgggcactctaaggagactgccggtgacaaaccggaggaaggtggggatgacgtcaagtcatcatggcccttacggcctgggctacacacgtgctacaatggtcggtacaaagggttgccaagccgcgaggtggagctaatcccataaaaccgatcgtagtccggatcgcagtctgcaactcgactgcgtgaagtcggaatcgctagtaatcgtgaatcagaatgtcacggtgaatacgttcccgggccttgtacacaccgcccgtcacaccatgggagtgggttgcaccagaagtagctagtctaaccctcgggaggacggttaccacggtgtgattcatgactggggtg

SEQ ID NO: 2717 - DNA, 1459 bp, Pseudomonas delhiensis
  source 1..1459: mol_type = unassigned DNA
attgaacgctggcggcaggcctaacacatgcaagtcgagcggatgaagggagcttgctcccggattcagcggcggacgggtgagtaatgcctaggaatctgcctggtagtgggggacaacgttccgaaaggagcgctaataccgcatacgtcctacgggagaaagtgggggatcttcggacctcacgctatcagatgagcctaggtcggattagctagtaggtggggtaatggctcacctaggcgacgatccgtaactggtctgagaggatgatcagtcacactggaactgagacacggtccagactcctacgggaggcagcagtggggaatattggacaatgggcgaaagcctgatccagccatgccgcgtgtgtgaagaaggtcttcggattgtaaagcactttaagttgggaggaagggcagtaagttaataccttgctgttttgacgttaccaacagaataagcaccggctaacttcgtgccagcagccgcggtaatacgaagggtgcaagcgttaatcggaattactgggcgtaaagcgcgcgtaggtggtttggtaagatggatgtgaaatccccgggctcaacctgggaactgcatccataactgcctgactagagtacggtagagggtggtggaatttcctgtgtagcggtgaaatgcgtagatataggaaggaacaccagtggcgaaggcgaccacctggactgatactgacactgaggtgcgaaagcgtggggagcaaacaggattagataccctggtagtccacgccgtaaacgatgtcgactagccgttgggatccttgagatcttagtggcgcagctaacgcgataagtcgaccgcctggggagtacggccgcaaggttaaaactcaaatgaattgacgggggcccgcacaagcggtggagcatgtggtttaattcgaagcaacgcgaagaaccttacctggccttgacatgtccggaatcctgcagagatgcgggagtgccttcgggaatcggaacacaggtgctgcatggctgtcgtcagctcgtgtcgtgagatgttgggttaagtcccgtaacgagcgcaacccttgtccttagttaccagcgggttatgccgggcactctaaggagactgccggtgacaaaccggaggaaggtggggatgacgtcaagtcatcatggcccttacggccagggctacacacgtgctacaatggtcggtacagagggttgccaagccgcgaggtggagctaatcccacaaaaccgatcgtagtccggatcgcagtctgcaactcgactgcgtgaagtcggaatcgctagtaatcgtgaatcagaatgtcacggtgaatacgttcccgggccttgtacacaccgcccgtcacaccatgggagtgggttgctccagaagtagctagtctaaccttcggggggacggttaccacggagtgattcatgactggggtg

SEQ ID NO: 2718 - DNA, 1459 bp, unidentified
  source 1..1459: mol_type = unassigned DNA; note = Pseudomonas donghuensis
attgaacgctggcggcaggcctaacacatgcaagtcgagcggatgagaagagcttgctcttcgattcagcggcggacgggtgagtaatacctaggaatctgcctggtagtgggggacaacgtttcgaaaggaacgctaataccgcatacgtcctacgggagaaagcaggggaccttcgggccttgcgctatcagatgagcctaggtcggattagctagttggtgaggtaatggctcaccaaggcgacgatccgtaactggtctgagaggatgatcagtcacactggaactgagacacggtccagactcctacgggaggcagcagtggggaatattggacaatgggcgaaagcctgatccagccatgccgcgtgtgtgaagaaggtcttcggattgtaaagcactttaagttgggaggaagggtacttacctaatacgtgagtattttgacgttaccgacagaataagcaccggctaactctgtgccagcagccgcggtaatacagagggtgcaagcgttaatcggaattactgggcgtaaagcgcgcgtaggtggttcgttaagttggatgtgaaatccccgggctcaacctgggaactgcatccaaaactggcgagctagagtagggcagagggtggtggaatttcctgtgtagcggtgaaatgcgtagatataggaaggaacaccagtggcgaaggcgaccacctgggctcatactgacactgaggtgcgaaagcgtggggagcaaacaggattagataccctggtagtccacgccgtaaacgatgtcaactagccgttggaatccttgagattttagtggcgcagctaacgcattaagttgaccgcctggggagtacggccgcaaggttaaaactcaaatgaattgacgggggcccgcacaagcggtggagcatgtggtttaattcgaagcaacgcgaagaaccttaccaggccttgacatgcagagaactttccagagatggattggtgccttcgggaactctgacacaggtgctgcatggctgtcgtcagctcgtgtcgtgagatgttgggttaagtcccgtaacgagcgcaacccttgtccttagttaccagcacgttatggtgggcactctaaggagactgccggtgacaaaccggaggaaggtggggatgacgtcaagtcatcatggcccttacggcctgggctacacacgtgctacaatggtcggtacagagggttgccaagccgcgaggtggagctaatctcacaaaaccgatcgtagtccggatcgcagtctgcaactcgactgcgtgaagtcggaatcgctagtaatcgcgaatcagaatgtcgcggtgaatacgttcccgggccttgtacacaccgcccgtcacaccatgggagtgggttgcaccagaagtagctagtctaaccttcgggaggacggttaccacggtgtgattcatgactggggtg

SEQ ID NO: 2719 - DNA, 1404 bp, Pseudomonas duriflava
  source 1..1404: mol_type = unassigned DNA
ctacacatgcaagtcgagcggatgaggagagcttgctctctgattcagcggcggacgggtgagtaatgcctaggaatctgcctgatagtgggggacaacgtttcgaaaggaacgctaataccgcatacgtcctacgggagaaagtgggggatcttcggacctcacgctatcagatgagcctaggtcggattagctagtaggtgaggtaatggctcacctaggcgacgatccgtaactggtctgagaggatgatcagtcacactggaactgagacacggtccagactcctacgggaggcagcagtggggaatattggacaatgggcgaaagcctgatccagccatgccgcgtgtgtgaagaaggccctcgggtcgtaaagcactttaagctgggaggaagggttgtaacctaatacgttgcagctttgacgttaccagcagaataagcaccggctaactctgtgccagcagccgcggtaatacagagggtgcaagcgttaatcggaattactgggcgtaaagcgcgcgtaggtggcttgataagttggatgtgaaatccccgggctcaacctgggaactgcatccaaaactgtctggctagagtacggtagagggtggtggaatttcctgtgtagcggtgaaatgcgtagatataggaaggaacaccagtggcgaaggcgaccacctggactgatactgacactgaggtgcgaaagcgtggggagcaaacaggattagataccctggtagtccacgccgtaaacgatgtcaactagccgttgggttccttgaggacttagtggcgcagctaacgcaataagttgaccgcctggggagtacggccgcaaggttaaaactcaaatgaattgacgggggcccgcacaagcggtggagcatgtggtttaattcgaagcaacgcgaagaaccttacctggccttgacatgctgcgaatctgagagagatctcggagtgccttcgggaacgcagacacaggtgctgcatggctgtcgtcagctcgtgtcgtgagatgttgggttaagtcccgtaacgagcgcaacccttgtccttagttaccagcacgttatggtgggcactctaaggagactgccggtgacaaaccggaggaaggtggggatgacgtcaagtcatcatggcccttacggccagggctacacacgtgctacaatggtcggtacaaagggttgccaagccgcgaggtggagctaatctcagaaaaccgatcgtagtccggatcgcagtctgcaactcgactgcgtgaagtcggaatcgctagtaatcgtgaatcagaacgtcacggtgaatacgttcccgggccttgtacacaccgcccgtcacaccatgggagtgggttgcaccagaagtagctagtctaaccttcgggag

SEQ ID NO: 2720 - DNA, 1459 bp, unidentified
  source 1..1459: mol_type = unassigned DNA; note = Pseudomonas endophytica
attgaacgctggcggcaggcctaacacatgcaagtcgagcggtagagagaagcttgcttctcttgagagcggcggacgggtgagtaatacctaggaatctgcctgatagtgggggataacgttcggaaacggacgctaataccgcatacgtcctacgggagaaagcaggggaccttcgggccttgcgctatcagatgagcctaggtcggattagctagttggtgaggtaatggctcaccaaggctacgatccgtaactggtctgagaggatgatcagtcacactggaactgagacacggtccagactcctacgggaggcagcagtggggaatattggacaatgggcgaaagcctgatccagccatgccgcgtgtgtgaagaaggtcttcggattgtaaagcactttaagttgggaggaagggtattaacctaatacgttagtactttgacgttaccgacagaataagcaccggctaactctgtgccagcagccgcggtaatacagagggtgcaagcgttaatcggaattactgggcgtaaagcgcgcgtaggtggtttgttaagttgaatgtgaaatccccgggctcaacctgggaactgcatccaaaactggcaagctagagtatggtagagggtagtggaatttcctgtgtagcggtgaaatgcgtagatataggaaggaacaccagtggcgaaggcgactacctggactgatactgacactgaggtgcgaaagcgtggggagcaaacaggattagataccctggtagtccacgccgtaaacgatgtcaactagccgttgggagtcttgaactcttagtggcgcagctaacgcattaagttgaccgcctggggagtacggccgcaaggttaaaactcaaatgaattgacgggggcccgcacaagcggtggagcatgtggtttaattcgaagcaacgcgaagaaccttaccaggccttgacatccaatgaactttctagagatagattggtgccttcgggaacattgagacaggtgctgcatggctgtcgtcagctcgtgtcgtgagatgttgggttaagtcccgtaacgagcgcaacccttgtccttagttaccagcacgtaatggtgggcactctaaggagactgccggtgacaaaccggaggaaggtggggatgacgtcaagtcatcatggcccttacggcctgggctacacacgtgctacaatggtcggtacaaagggttgccaagccgcgaggtggagctaatcccataaaaccgatcgtagtccggatcgcagtctgcaactcgactgcgtgaagtcggaatcgctagtaatcgtgaatcagaatgtcacggtgaatacgttcccgggccttgtacacaccgcccgtcacaccatgggagtgggttgcaccagaagtagctagtctaaccttcgggaggacggttaccacggtgtgattcatgactggggtg

SEQ ID NO: 2721 - DNA, 1459 bp, unidentified
  source 1..1459: mol_type = unassigned DNA; note = Pseudomonas entomophila
attgaacgctggcggcaggcctaacacatgcaagtcgagcggatgacgggagcttgctccttgattcagcggcggacgggtgagtaatgcctaggaatctgcctggtagtgggggacaacgtttcgaaaggaacgctaataccgcatacgtcctacgggagaaagcaggggaccttcgggccttgcgctatcagatgagcctaggtcggattagctagttggtggggtaatggctcaccaaggcgacgatccgtaactggtctgagaggatgatcagtcacactggaactgagacacggtccagactcctacgggaggcagcagtggggaatattggacaatgggcgaaagcctgatccagccatgccgcgtgtgtgaagaaggtcttcggattgtaaagcactttaagttgggaggaagggcagtaagttaataccttgctgttttgacgttaccgacagaataagcaccggctaactctgtgccagcagccgcggtaatacagagggtgcaagcgttaatcggaattactgggcgtaaagcgcgcgtaggtggttcgttaagttggatgtgaaagccccgggctcaacctgggaactgcatccaaaactggcgagctagagtatggtagagggtggtggaatttcctgtgtagcggtgaaatgcgtagatataggaaggaacaccagtggcgaaggcgaccacctggactgatactgacactgaggtgcgaaagcgtggggagcaaacaggattagataccctggtagtccacgccgtaaacgatgtcaactagccgttggaatccttgagattttagtggcgcagctaacgcattaagttgaccgcctggggagtacggccgcaaggttaaaactcaaatgaattgacgggggcccgcacaagcggtggagcatgtggtttaattcgaagcaacgcgaagaaccttaccaggccttgacatgcagagaactttccagagatggattggtgccttcgggaactctgacacaggtgctgcatggctgtcgtcagctcgtgtcgtgagatgttgggttaagtcccgtaacgagcgcaacccttgtccttagttaccagcacgttatggtgggcactctaaggagactgccggtgacaaaccggaggaaggtggggatgacgtcaagtcatcatggcccttacggcctgggctacacacgtgctacaatggtcggtacagagggttgccaagccgcgaggtggagctaatctcacaaaaccgatcgtagtccggatcgcagtctgcaactcgactgcgtgaagtcggaatcgctagtaatcgcaaatcagaatgttgcggtgaatacgttcccgggccttgtacacaccgcccgtcacaccatgggagtgggttgcaccagaagtagctagtctaaccttcggggggacggttaccacggtgtgattcatgactggggtg

SEQ ID NO: 2722 - DNA, 1459 bp, Pseudomonas extremaustralis
  source 1..1459: mol_type = unassigned DNA
attgaacgctggcggcaggcctaacacatgcaagtcgagcggtagagagaagcttgcttctcttgagagcggcggacgggtgagtaatgcctaggaatctgcctggtagtgggggataacgttcggaaacggacgctaataccgcatacgtcctacgggagaaagcaggggaccttcgggccttgcgctatcagatgagcctaggtcggattagctagttggtgaggtaatggctcaccaaggcgacgatccgtaactggtctgagaggatgatcagtcacactggaactgagacacggtccagactcctacgggaggcagcagtggggaatattggacaatgggcgaaagcctgatccagccatgccgcgtgtgtgaagaaggtcttcggattgtaaagcactttaagttgggaggaagggcagttacctaatacgtgattgttttgacgttaccgacagaataagcaccggctaactctgtgccagcagccgcggtaatacagagggtgcaagcgttaatcggaattactgggcgtaaagcgcgcgtaggtggtttgttaagttggatgtgaaatccccgggctcaacctgggaactgcattcaaaactgactgactagagtatggtagagggtggtggaatttcctgtgtagcggtgaaatgcgtagatataggaaggaacaccagtggcgaaggcgaccacctggactgatactgacactgaggtgcgaaagcgtggggagcaaacaggattagataccctggtagtccacgccgtaaacgatgtcaactagccgttgggagccttgagctcttagtggcgcagctaacgcattaagttgaccgcctggggagtacggccgcaaggttaaaactcaaatgaattgacgggggcccgcacaagcggtggagcatgtggtttaattcgaagcaacgcgaagaaccttaccaggccttgacatccaatgaactttctagagatagattggtgccttcgggaacattgagacaggtgctgcatggctgtcgtcagctcgtgtcgtgagatgttgggttaagtcccgtaacgagcgcaacccttgtccttagttaccagcacgtaatggtgggcactctaaggagactgccggtgacaaaccggaggaaggtggggatgacgtcaagtcatcatggcccttacggcctgggctacacacgtgctacaatggtcggtacagagggttgccaagccgcgaggtggagctaatcccagaaaaccgatcgtagtccggatcgcagtctgcaactcgactgcgtgaagtcggaatcgctagtaatcgcgaatcagaatgtcgcggtgaatacgttcccgggccttgtacacaccgcccgtcacaccatgggagtgggttgcaccagaagtagctagtctaaccctcgggaggacggttaccacggtgtgattcatgactggggtg

SEQ ID NO: 2723 - DNA, 1457 bp, Pseudomonas extremorientalis
  source 1..1457: mol_type = unassigned DNA
attgaacgctggcggcaggcctaacacatgcaagtcgagcggtagagagaagcttgcttctcttgagagcggcggacgggtgagtaatgcctaggaatctgcctggtagtgggggataacgttcggaaacgaacgctaataccgcatacgtcctacgggagaaagcaggggaccttcgggccttgcgctatcagatgagcctaggtcggattagctagttggtgaggtaatggctcaccaaggcgacgatccgtaactggtctgagaggatgatcagtcacactggaactgagacacggtccagactcctacgggaggcagcagtggggaatattggacaatgggcgaaagcctgatccagccatgccgcgtgtgtgaagaaggtcttcggattgtaaagcactttaagttgggaggaagggcagttacctaatacgtgattgttttgacgttaccgacagaataagcaccggctaactctgtgccagcagccgcggtaatacagagggtgcaagcgttaatcggaattactgggcgtaaagcgcgcgtaggtggtttgttaagttggatgtgaaatccccgggctcaacctgggaactgcattcaaaactgactgactagagtatggtagagggtggtggaatttcctgtgtagcggtgaaatgcgtagatataggaaggaacaccagtggcgaaggcgaccacctggactaatactgacactgaggtgcgaaagcgtggggagcaaacaggattagataccctggtagtccacgccgtaaacgatgtcaactagccgttggaagccttgagcttttagtggcgcagctaacgcattaagttgaccgcctggggagtacggccgcaaggttaaaactcaaatgaattgacgggggcccgcacaagcggtggagcatgtggtttaattcgaagcaacgcgaagaaccttaccaggccttgacatccatgaactttccagagatggattggtgccttcggaacattgagacaggtgctgcatggctgtcgtcagctcgtgtcgtgagatgttgggttaagtcccgtaacgagcgcaacccttgtccttagttaccagcacgtaatggtgggcactctaaggagactgccggtgacaaaccggaggaaggtggggatgacgtcaagtcatcatggcccttacggcctgggctacacacgtgctacaatggtcggtacagagggttgccaagccgcgaggtggagctaatcccataaaaccgatcgtagtccggatcgcagtctgcaactcgactgcgtgaagtcggaatcgctagtaatcgcgaatcagaatgtcgcggtgaatacgttcccgggccttgtacacaccgcccgtcacaccatgggagtgggttgcaccagaagtagctagtctaaccttcggggggacggttaccacggtgtgattcatgactggggtg

SEQ ID NO: 2724 - DNA, 1442 bp, Pseudomonas ficuserectae
  source 1..1442: mol_type = unassigned DNA
  misc_difference 80: note = n is a, c, g, or t
  misc_difference 811..812: note = n is a, c, g, or t
  misc_difference 856..859: note = n is a, c, g, or t
cctaacacatgcaagtcgagcggcagcacgggtacttgtacctggtggcgagcggcggacgggtgagtaatgcctaggantctgcctggtagtgggggataacgctcggaaacggacgctaataccgcatacgtcctacgggagaaagcaggggaccttcgggccttgcgctatcagatgagcctaggtcggattagctagttggtgaggtaatggctcaccaaggcgacgatccgtaactggtctgagaggatgatcagtcacactggaactgagacacggtccagactcctacgggaggcagcagtggggaatattggacaatgggcgaaagcctgatccagccatgccgcgtgtgtgaagaaggtcttcggattgtaaagcactttaagttgggaggaagggcagttacctaatacgtgattgttttgacgttaccgacagaataagcaccggctaactctgtgccagcagccgcggtaatacagagggtgcaagcgttaatcggaattactgggcgtaaagcgcgcgtaggtggtttgttaagttgaatgtgaaatccccgggctcaacctgggaactgcatccaaaactggcaagctagagtatggtagagggtggtggaatttcctgtgtagcggtgaaatgcgtagatataggaaggaacaccagtggcgaaggcgaccacctggactgatactgacactgaggtgcgaaagcgtggggagcaaacaggattagataccctggtagtccacgccgtaaacgatgtcaactagccgttgggagccttgagctcttagtggcgcanntaacgcattaagttgaccgcctggggagtacggccgcaaggttnnnnctcaaatgaattgacgggggcccgcacaagcggtggagcatgtggtttaattcgaagcaacgcgaagaaccttaccaggccttgacatccaatgaactttccagagatggattggtgccttcgggaacattgagacaggtgctgcatggctgtcgtcagctcgtgtcgtgagatgttgggttaagtcccgtaacgagcgcaacccttgtccttagttaccagcacgttatggtgggcactctaaggagactgccggtgacaaaccggaggaaggtggggatgacgtcaagtcatcatggcccttacggcctgggctacacacgtgctacaatggtcggtacagagggttgccaagccgcgaggtggagctaatctcacaaaaccgatcgtagtccggatcgcagtctgcaactcgactgcgtgaagtcggaatcgctagtaatcgcgaatcagaatgtcgcggtgaatacgttcccgggccttgtacacaccgcccgtcacaccatgggagtgggttgcaccagaagtagctagtctaaccttcgggaggacggttaccacggtgtgattcatgactggggtg

SEQ ID NO: 2725 - DNA, 1459 bp, Pseudomonas flavescens
  source 1..1459: mol_type = unassigned DNA
attgaacgctggcggcaggcctaacacatgcaagtcgagcggttgaggggagcttgctccctgattcagcggcggacgggtgagtaatgcctaggaatctgcctattagtgggggacaacgtttcgaaaggaacgctaataccgcatacgtcctacgggagaaagcaggggaccttcgggccttgcgctaatagatgagcctaggtcggattagctagttggtggggtaaaggctcaccaaggcgacgatccgtaactggtctgagaggatgatcagtcacactggaactgagacacggtccagactcctacgggaggcagcagtggggaatattggacaatgggcgaaagcctgatccagccatgccgcgtgtgtgaagaaggtcttcggattgtaaagcactttaagttgggaggaagggcagtaagcgaataccttgctgttttgacgttaccgacagaataagcaccggctaactctgtgccagcagccgcggtaatacagagggtgcaagcgttaatcggaattactgggcgtaaagcgcgcgtaggtggtttgttaagttggatgtgaaagccccgggctcaacctgggaactgcatccaaaactggcaagctagagtacggtagagggtggtggaatttcctgtgtagcggtgaaatgcgtagatataggaaggaacaccagtggcgaaggcgaccacctggactgatactgacactgaggtgcgaaagcgtggggagcaaacaggattagataccctggtagtccacgccgtaaacgatgtcaactagccgttggaatccttgagattttagtggcgcagctaacgcattaagttgaccgcctggggagtacggccgcaaggttaaaactcaaatgaattgacgggggcccgcacaagcggtggagcatgtggtttaattcgaagcaacgcgaagaaccttacctggccttgacatgctgagaactttccagagatggattggtgccttcgggaactcagacacaggtgctgcatggctgtcgtcagctcgtgtcgtgagatgttgggttaagtcccgtaacgagcgcaacccttgtccttagttaccagcacgttatggtgggaactctaaggagactgccggtgacaaaccggaggaaggtggggatgacgtcaagtcatcatggcccttacggccagggctacacacgtgctacaatggtcggtacaaagggttgccaagccgcgaggtggagctaatcccataaaaccgatcgtagtccggatcgcagtctgcaactcgactgcgtgaagtcggaatcgctagtaatcgtgaatcagaatgtcacggtgaatacgttcccgggccttgtacacaccgcccgtcacaccatgggagtgggttgcaccagaagtagctagtctaaccttcggggggacggttaccacggtgtgattcatgactggggtg

SEQ ID NO: 2726 - DNA, 1459 bp, unidentified
  source 1..1459: mol_type = unassigned DNA; note = Pseudomonas flexibilis
attgaacgctggcggcaggcctaacacatgcaagtcgagcggatgagggtagcttgctacctgattcagcggcggacgggtgagtaatgcctaggaatctgcccgatagtgggggataacgttccgaaaggaacgctaataccgcatacgtcctacgggagaaagcgggggatcttcggacctcgcgctatcggatgagcctaggtcggattagctagttggtggggtaaaggctcaccaaggcgacgatccgtagctggtctgagaggatgatcagccacactggaactgagacacggtccagactcctacgggaggcagcagtggggaatattggacaatgggcgaaagcctgatccagccatgccgcgtgtgtgaagaaggtcttcggattgtaaagcactttaagttgggaggaagggttgtaacctaatacgttgcaactttgacgttaccgacagaataagcaccggctaacttcgtgccagcagccgcggtaatacgaagggtgcaagcgttaatcggaattactgggcgtaaagcgcgcgtaggtggtttgataagttggatgtgaaagccccgggctcaacctgggaattgcatccaaaactgtctgactagagtacggtagagggtagtggaatttcctgtgtagcggtgaaatgcgtagatataggaaggaacaccagtggcgaaggcgactacctggactgatactgacactgaggtgcgaaagcgtggggagcaaacaggattagataccctggtagtccacgccgtaaacgatgtcaactagttgttgggttccttgaggacttagtaacgcagctaacgcattaagttgaccgcctggggagtacggccgcaaggttaaaactcaaatgaattgacgggggcccgcacaagcggtggagcatgtggtttaattcgaagcaacgcgaagaaccttacctggccttgacatgctgagaactttccagagatggattggtgccttcgggaactcagacacaggtgctgcatggctgtcgtcagctcgtgtcgtgagatgttgggttaagtcccgtaacgagcgcaacccttgtccttagttaccagcacgttatggtgggcactctaaggagactgccggtgacaaaccggaggaaggtggggatgacgtcaagtcatcatggcccttacggccagggctacacacgtgctacaatggtcggtacaaagggttgccaagccgcgaggtggagctaatcccataaaaccgatcgtagtccggatcgcagtctgcaactcgactgcgtgaagtcggaatcgctagtaatcgtgaatcagaatgtcacggtgaatacgttcccgggccttgtacacaccgcccgtcacaccatgggagtgggttgctccagaagtagctagtctaaccttcggggggacggttaccacggagtgattcatgactggggtg

SEQ ID NO: 2727 - DNA, 1459 bp, unidentified
  source 1..1459: mol_type = unassigned DNA; note = Pseudomonas floridensis
attgaacgctggcggcaggcctaacacatgcaagtcgagcggtagagaggtgcttgcacctcttgagagcggcggacgggtgagtaatgcctaggaatctgcctggtagtgggggataacgctcggaaacggacgctaataccgcatacgtcctacgggagaaagcaggggaccttcgggccttgcgctatcagatgagcctaggtcggattagctagttggtgaggtaatggctcaccaaggcgacgatccgtaactggtctgagaggatgatcagtcacactggaactgagacacggtccagactcctacgggaggcagcagtggggaatattggacaatgggcgcaagcctgatccagccatgccgcgtgtgtgaagaaggtcttcggattgtaaagcactttaagttgggaggaagggccattacctaatacgtggtggttttgacgttaccgacagaataagcaccggctaactctgtgccagcagccgcggtaatacagagggtgcaagcgttaatcggaattactgggcgtaaagcgcgcgtaggtggtttgttaagttgaatgtgaaatccccgggctcaacctgggaactgcatccaaaactggcaagctagagtagggcagagggtggtggaatttcctgtgtagcggtgaaatgcgtagatataggaaggaacaccagtggcgaaggcgaccacctgggctcatactgacactgaggtgcgaaagcgtggggagcaaacaggattagataccctggtagtccacgccgtaaacgatgtcaactagccgttggaatccttgagattttagtggcgcagctaacgcattaagttgaccgcctggggagtacggccgcaaggttaaaactcaaatgaattgacgggggcccgcacaagcggtggagcatgtggtttaattcgaagcaacgcgaagaaccttaccaggccttgacatccaatgaaccttccagagatggaggggtgccttcgggagcattgagacaggtgctgcatggctgtcgtcagctcgtgtcgtgagatgttgggttaagtcccgtaacgagcgcaacccttgtccttagttaccagcacgttaaggtgggcactctaaggagactgccggtgacaaaccggaggaaggtggggatgacgtcaagtcatcatggcccttacggcctgggctacacacgtgctacaatggtcggtacagagggttgccaagccgcgaggtggagctaatctcacaaaaccgatcgtagtccggatcgcagtctgcaactcgactgcgtgaagtcggaatcgctagtaatcgcgaatcagaatgtcgcggtgaatacgttcccgggccttgtacacaccgcccgtcacaccatgggagtgggttgcaccagaagtagctagtctaaccttcgggaggacggttaccacggtgtgattcatgactggggtg

SEQ ID NO: 2728 - DNA, 1460 bp, Pseudomonas frederiksbergensis
  source 1..1460: mol_type = unassigned DNA
attgaacgctggcggcaggcctaacacatgcaagtcgagcggcagcacgggtacttgtacctggtggcgagcggcggacgggtgagtaatgcctaggaatctgcctggtagtgggggataacgctcggaaacggacgctaataccgcatacgtcctacgggagaaagcaggggaccttcgggccttgcgctatcagatgagcctaggtcggattagctagttggtgaggtaatggctcaccaaggcgacgatccgtaactggtctgagaggatgatcagtcacactggaactgagacacggtccagactcctacgggaggcagcagtggggaatattggacaatgggcgaaagcctgatccagccatgccgcgtgtgtgaagaaggtcttcggattgtaaagcactttaagttgggaggaagggcatttacctaatacgtaagtgttttgacgttaccgacagaataagcaccggctaactctgtgccagcagccgcggtaatacagagggtgcaagcgttaatcggaattactgggcgtaaagcgcgcgtaggtggttcgttaagttggatgtgaaatccccgggctcaacctgggaactgcattcaaaactgtcgagctagagtatggtagagggtggtggaatttcctgtgtagcggtgaaatgcgtagatataggaaggaacaccagtggcgaaggcgaccacctggactgatactgacactgaggtgcgaaagcgtggggagcaaacaggattagataccctggtagtccacgccgtaaacgatgtcaactagccgttgggagccttgagctcttagtggcgcagctaacgcattaagttgaccgcctggggagtacggccgcaaggttaaaactcaaatgaattgacgggggcccgcacaagcggtggagcatgtggtttaattcgaagcaacgcgaagaaccttaccaggccttgacatccaatgaactttccagagatggattggtgccttcgggaacattgagacaggtgctgcatggctgtcgtcagctcgtgtcgtgagatgttgggttaagtcccgtaacgagcgcaacccttgtccttagttaccagcacgtaatggtgggcactctaaggagactgccggtgacaaaccggaggaaggtggggatgacgtcaagtcatcatggcccttacggcctgggctacacacgtgctacaatggtcggtacagagggttgccaagccgcgaggtggagctaatcccagaaaaccgatcgtagtccggatcgcagtctgcaactcgactgcgtgaagtcggaatcgctagtaatcgcgaatcagaatgtcgcggtgaatacgttcccgggccttgtacacaccgccgtcacaccatgggaatgggttgcaccagaagtagctagtctaaccttcgggaggacggttaccacggtgtgattcatgactggggtg

SEQ ID NO: 2729 - DNA, 1459 bp, Pseudomonas fuscovaginae
  source 1..1459: mol_type = unassigned DNA
attgaacgctggcggcaggcctaacacatgcaagtcgagcggatgagaagagcttgctcttcgattcagcggcggacgggtgagtaatgcctaggaatctgcctggtagtgggggacaacgtttcgaaaggaacgctaataccgcatacgtcctacgggagaaagcaggggaccttcgggccttgcgctatcagatgagcctaggtcggattagctagttggtgaggtaatggctcaccaaggcgacgatccgtaactggtctgagaggatgatcagtcacactggaactgagacacggtccagactcctacgggaggcagcagtggggaatattggacaatgggcgaaagcctgatccagccatgccgcgtgtgtgaagaaggtcttcggattgtaaagcactttaagttgggaggaagggcattaacctaatacgttagtgttttgacgttaccgacagaataagcaccggctaactctgtgccagcagccgcggtaatacagagggtgcaagcgttaatcggaattactgggcgtaaagcgcgcgtaggtggttcgttaagttggatgtgaaatccccgggctcaacctgggaactgcatccaaaactggcgagctagagtagggtagagggtggtggaatttcctgtgtagcggtgaaatgcgtagatataggaaggaacaccagtggcgaaggcgaccacctggactcatactgacactgaggtgcgaaagcgtggggagcaaacaggattagataccctggtagtccacgccgtaaacgatgtcaactagccgttgggaaccttgagttcttagtggcgcagctaacgcattaagttgaccgcctggggagtacggccgcaaggttaaaactcaaatgaattgacgggggcccgcacaagcggtggagcatgtggtttaattcgaagcaacgcgaagaaccttaccaggccttgacatgcagagaactttccagagatggatcggtgccttcgggaactctgacacaggtgctgcatggctgtcgtcagctcgtgtcgtgagatgttgggttaagtcccgtaacgagcgcaacccttgtccttagttaccagcacgtcatggtgggcactctaaggagactgccggtgacaaaccggaggaaggtggggatgacgtcaagtcatcatggcccttacggcctgggctacacacgtgctacaatggtcggtacagagggttgccaagccgcgaggtggagctaatcccacaaaaccgatcgtagtccggatcgcagtctgcaactcgactgcgtgaagtcggaatcgctagtaatcgcgaatcagaatgtcgcggtgaatacgttcccgggccttgtacacaccgcccgtcacaccatgggagtgggttgcaccagaagtagctagtctaaccttcgggaggacggttaccacggtgtgattcatgactggggtg

SEQ ID NO: 2730 - DNA, 1425 bp, Pseudomonas geniculata
  source 1..1425: mol_type = unassigned DNA
  misc_difference 83: note = n is a, c, g, or t
  misc_difference 109: note = n is a, c, g, or t
  misc_difference 152: note = n is a, c, g, or t
  misc_difference 810..811: note = n is a, c, g, or t
acatgcaagtcgaacggcagcacagaggagcttgctccttgggtggcgagtggcggacgggtgaggaatacatcggaatctantctgtcgtgggggataacgtaggganacttacgctaataccgcatacgacctacgggtgaaagcagggnaccttcgggccttgcgcgattgaatgagccgatgtcggattagctagttggcggggtaaaggcccaccaaggcgacgatccgtagctggtctgagaggatgatcagccacactggaactgagacacggtccagactcctacgggaggcagcagtggggaatattggacaatgggcgcaagcctgatccagccataccgcgtgggtgaagaaggccttcgggttgtaaagcccttttgttgggaaagaaatccagctggctaatacccggttgggatgacggtacccaaagaataagcaccggctaacttcgtgccagcagccgcggtaatacgaagggtgcaagcgttactcggaattactgggcgtaaagcgtgcgtaggtggtcgtttaagtccgttgtgaaagccctgggctcaacctgggaactgcagtggatactgggcgactagagtgtggtagagggtagcggaattcctggtgtagcagtgaaatgcgtagagatcaggaggaacatccatggcgaaggcagctacctggaccaacactgacactgaggcacgaaagcgtggggagcaaacaggattagataccctggtagtccacgccctaaacgatgcgaactggatgttgggtgcaatttggcacgcagtatcgaanntaacgcgttaagttcgccgcctggggagtacggtcgcaagactgaaactcaaaggaattgacgggggcccgcacaagcggtggagtatgtggtttaattcgatgcaacgcgaagaaccttacctggccttgacatgtcgagaactttccagagatggattggtgccttcgggaactcgaacacaggtgctgcatggctgtcgtcagctcgtgtcgtgagatgttgggttaagtcccgcaacgagcgcaacccttgtccttagttgccagcacgtaatggtgggaactctaaggagaccgccggtgacaaaccggaggaaggtggggatgacgtcaagtcatcatggcccttacggccagggctacacacgtactacaatggtagggacagagggctgcaagccggcgacggtaagccaatcccagaaaccctatctcagtccggattggagtctgcaactcgactccatgaagtcggaatcgctagtaatcgcagatcagcattgctgcggtgaatacgttcccgggccttgtacacaccgcccgtcacaccatgggagtttgttgcaccagaagcaggtagcttaaccttcgggagggcgcttgccacggtgt

SEQ ID NO: 2731 - DNA, 1459 bp, Pseudomonas graminis
  source 1..1459: mol_type = unassigned DNA
attgaacgctggcggcaggcctaacacatgcaagtcgagcggatgaagagagcttgctctctgattcagcggcggacgggtgagtaatgcctaggaatctgcctggtagtgggggacaacgtctcgaaagggacgctaataccgcatacgtcctacgggagaaagcaggggaccttcgggccttgcgctatcagatgagcctaggtcggattagctagttggtgaggtaatggctcaccaaggcgacgatccgtaactggtctgagaggatgatcagtcacactggaactgagacacggtccagactcctacgggaggcagcagtggggaatattggacaatgggcgaaagcctgatccagccatgccgcgtgtgtgaagaaggtcttcggattgtaaagcactttaagttgggaggaagggcagtaagcgaataccttgctgttttgacgttaccgacagaataagcaccggctaactctgtgccagcagccgcggtaatacagagggtgcaagcgttaatcggaattactgggcgtaaagcgcgcgtaggtggtttgttaagttgaatgtgaaatccccgggctcaacctgggaactgcatccaaaactggcaagctagagtagggcagagggtggtggaatttcctgtgtagcggtgaaatgcgtagatataggaaggaacaccagtggcgaaggcgaccacctgggctcatactgacactgaggtgcgaaagcgtggggagcaaacaggattagataccctggtagtccacgccgtaaacgatgtcaactagccgttggaagccttgagcttttagtggcgcagctaacgcattaagttgaccgcctggggagtacggccgcaaggttaaaactcaaatgaattgacgggggcccgcacaagcggtggagcatgtggtttaattcgaagcaacgcgaagaaccttaccaggccttgacatccaatgaactttccagagatggattggtgccttcgggaacattgagacaggtgctgcatggctgtcgtcagctcgtgtcgtgagatgttgggttaagtcccgtaacgagcgcaacccttgtccttagttaccagcacattatggtgggcactctaaggagactgccggtgacaaaccggaggaaggtggggatgacgtcaagtcatcatggcccttacggcctgggctacacacgtgctacaatggtcggtacagagggttgctaagccgcgaggtggagctaatcccagaaaaccgatcgtagtccggatcgcagtctgcaactcgactgcgtgaagtcggaatcgctagtaatcgcgaatcagaatgtcgcggtgaatacgttcccgggccttgtacacaccgcccgtcacaccatgggagtgggttgcaccagaagtagctagtctaaccttcgggaggacggttaccacggtgtgattcatgactggggtg

SEQ ID NO: 2732 - DNA, 1451 bp, Pseudomonas grimontii
  source 1..1451: mol_type = unassigned DNA
  misc_difference 419: note = n is a, c, g, or t
ctggcggcaggcctaacacatgcaagtcgagcggtagagagaagcttgcttctcttgagagcggcggacgggtgagtaatgcctaggaatctgcctggtagtgggggataacgttcggaaacggacgctaataccgcatacgtcctacgggagaaagcaggggaccttcgggccttgcgctatcagatgagcctaggtcggattagctagttggtgaggtaatggctcaccaaggcgacgatccgtaactggtctgagaggatgatcagtcacactggaactgagacacggtccagactcctacgggaggcagcagtggggaatattggacaatgggcgaaagcctgatccagccatgccgcgtgtgtgaagaaggtcttcggattgtaaagcactttaagttgggaggaagggccatnacctaatacgtgatggttttgacgttaccgacagaataagcaccggctaactctgtgccagcagccgcggtaatacagagggtgcaagcgttaatcggaattactgggcgtaaagcgcgcgtaggtggtttgttaagttggatgtgaaatccccgggctcaacctgggaactgcattcaaaactgactgactagagtatggtagagggtggtggaatttcctgtgtagcggtgaaatgcgtagatataggaaggaacaccagtggcgaaggcgaccacctggactgatactgacactgaggtgcgaaagcgtggggagcaaacaggattagataccctggtagtccacgccgtaaacgatgtcaactagccgttgggagccttgagctcttagtggcgcagctaacgcattaagttgaccgcctggggagtacggccgcaaggttaaaactcaaatgaattgacgggggcccgcacaagcggtggagcatgtggtttaattcgaagcaacgcgaagaaccttaccaggccttgacatccaatgaactttctagagatagattggtgccttcgggaacattgagacaggtgctgcatggctgtcgtcagctcgtgtcgtgagatgttgggttaagtcccgtaacgagcgcaacccttgtccttagttaccagcacgtaatggtgggcactctaaggagactgccggtgacaaaccggaggaaggtggggatgacgtcaagtcatcatggcccttacggcctgggctacacacgtgctacaatggtcggtacagagggttgccaagccgcgaggtggagctaatcccagaaaaccgatcgtagtccggatcgcagtctgcaactcgactgcgtgaagtcggaatcgctagtaatcgcgaatcagaatgtcgcggtgaatacgttcccgggccttgtacacaccgcccgtcacaccatgggagtgggttgcaccagaagtagctagtctaaccttcgggaggacggttaccacggtgtgattcatgactggggtg

SEQ ID NO: 2733 - DNA, 1459 bp, unidentified
  source 1..1459: mol_type = unassigned DNA; note = Pseudomonas guangdongensis
attgaacgctggcggcaggcctaacacatgcaagtcgagcggatgaaggtagcttgctaccggattcagcggcggacgggtgagtaatgcctaggaatctgcccggtaatgggggataacgtttcgaaaggaacgctaataccgcatacgtcctacgggagaaagcaggggaccttcgggccttgcgttatcggatgagcctaggtcggattagctagttggtgaggtaatggctcaccaaggcgacgatccgtaactggtctgagaggatgatcagtcacactggaactgagacacggtccagactcctacgggaggcagcagtggggaatattggacaatgggcgaaagcctgatccagccatgccgcgtgtgtgaagaaggtcttcggattgtaaagcactttaagttgggaggaagggcagtcagttaataccttgctgtcttgacgttaccaacagaataagcaccggctaacttcgtgccagcagccgcggtaatacgaagggtgcaagcgttaatcggaattactgggcgtaaagcgcgcgtaggtggttcagcaagttggatgtgaaagccccgggctcaacctgggaactgcatccaaaactactgagctagagtacggtagagggtggtggaatttcctgtgtagcggtgaaatgcgtagatataggaaggaacaccagtggcgaaggcgaccacctggactgatactgacactgaggtgcgaaagcgtggggagcaaacaggattagataccctggtagtccacgccgtaaacgatgtcaactagttgttgggttccttgagaacttagtaacgaagctaacgcgataagttgaccgcctggggagtacggccgcaaggttaaaactcaaatgaattgacgggggcccgcacaagcggtggagcatgtggtttaattcgaagcaacgcgaagaaccttacctggccttgacatgcagagaactttccagagatggattggtgccttcgggagctctgacacaggtgctgcatggctgtcgtcagctcgtgtcgtgagatgttgggttaagtcccgtaacgagcgcaacccttgtccttagttaccagcacgttatggtgggcactctaaggagactgccggtgacaaaccggaggaaggtggggatgacgtcaagtcatcatggcccttacggccagggctacacacgtgctacaatggtcggtacagagggttgccaagccgcgaggtggagctaatcccacaaaaccgatcgtagtccggatcgcagtctgcaactcgactgcgtgaagtcggaatcgctagtaatcgtgaatcagaatgtcacggtgaatacgttcccgggccttgtacacaccgcccgtcacaccatgggagtgggttgctccagaagtagctagtctaaccttagggagggcggttaccacggagtgattcatgactggggtg

SEQ ID NO: 2734 - DNA, 1459 bp, unidentified
  source 1..1459: mol_type = unassigned DNA; note = Pseudomonas guariconensis
attgaacgctggcggcaggcctaacacatgcaagtcgagcggatgacgggagcttgctccttgattcagcggcggacgggtgagtaatgcctaggaatctgcctggtagtgggggacaacgttccgaaaggagcgctaataccgcatacgtcctacgggagaaagtgggggatcttcggacctcacgctatcagatgagcctaggtcggattagctagttggtgaggtaaaggctcaccaaggcgacgatccgtaactggtctgagaggatgatcagtcacactggaactgagacacggtccagactcctacgggaggcagcagtggggaatattggacaatgggcgaaagcctgatccagccatgccgcgtgtgtgaagaaggtcttcggattgtaaagcactttaagttgggaggaagggcagtaagttaataccttgctgttttgacgttaccgacagaataagcaccggctaactctgtgccagcagccgcggtaatacagagggtgcaagcgttaatcggaattactgggcgtaaagcgcgcgtaggtggttcgttaagttggatgtgaaagccccgggctcaacctgggaactgcatccaaaactggcgagctagagtatggtagagggtggtggaatttcctgtgtagcggtgaaatgcgtagatataggaaggaacaccagtggcgaaggcgaccacctggactgatactgacactgaggtgcgaaagcgtggggagcaaacaggattagataccctggtagtccacgccgtaaacgatgtcaactagccgttggaatccttgagattttagtggcgcagctaacgcattaagttgaccgcctggggagtacggccgcaaggttaaaactcaaatgaattgacgggggcccgcacaagcggtggagcatgtggtttaattcgaagcaacgcgaagaaccttaccaggccttgacatgcagagaactttccagagatggattggtgccttcgggaactctgacacaggtgctgcatggctgtcgtcagctcgtgtcgtgagatgttgggttaagtcccgtaacgagcgcaacccttgtccttagttaccagcacgttatggtgggcactctaaggagactgccggtgacaaaccggaggaaggtggggatgacgtcaagtcatcatggcccttacggcctgggctacacacgtgctacaatggtcggtacagagggttgccaagccgcgaggtggagctaatctcacaaaaccgatcgtagtccggatcgcagtctgcaactcgactgcgtgaagtcggaatcgctagtaatcgcgaatcagaatgtcgcggtgaatacgttcccgggccttgtacacaccgcccgtcacaccatgggagtgggttgcaccagaagtagctagtctaaccttcggggggacggttaccacggtgtgattcatgactggggtg

SEQ ID NO: 2735 - DNA, 1458 bp, unidentified
  source 1..1458: mol_type = unassigned DNA; note = Pseudomonas guguanensis
attgaacgctggcggcaggcctaacacatgcaagtcgagcggatgaggggagcttgctccctgatttagcggcggacgggtgagtaatgcctaggaatctgcctggtagtgggggataacgttccgaaaggaacgctaataccgcatacgtcctacgggagaaagcaggggaccttcgggccttgcgctatcagatgagcctaggtcggattagctagttggtgaggtaatggctcaccaaggcgacgatccgtaactggtctgagaggatgatcagtcacactggaactgagacacggtccagactcctacgggaggcagcagtggggaatattggacaatgggcgaaagcctgatccagccatgccgcgtgtgtgaagaaggtcttcggattgtaaagcactttaagttgggaggaagggctgctggttaataccctgcagttttgacgttaccaacagaataagcaccggctaacttcgtgccagcagccgcggtaatacgaagggtgcaagcgttaatcggaattactgggcgtaaagcgcgcgtaggtggttttgtaagttggaggtgaaatccccgggctcaacctgggaactgcctccaaaactgcatgactagagtacggtagagggtggtggaatttcctgtgtagcggtgaaatgcgtagatataggaaggaacaccagtggcgaaggcgaccacctggactgatactgacactgaggtgcgaaagcgtggggagcaaacaggattagataccctggtagtccacgccgtaaacgatgtcaactagccgttggaatccttgagattttagtggcgcagctaacgcattaagttgaccgcctggggagtacggccgcaaggttaaaactcaaatgaattgacgggggcccgcacaagcggtggagcatgtggtttaattcgaagcaacgcgaagaaccttacctggccttgacatgctgagaactttccagagatggattggtgccttcgggaactcagacacaggtgctgcatggctgtcgtcagctcgtgtcgtgagatgttgggttaagtcccgtaacgagcgcaacccttgtccttagttaccagcacctcgggtgggcactctaaggagactgccggtgacaaaccggaggaaggtggggatgacgtcaagtcatcatggcccttacggccagggctacacacgtgctacaatggtcggtacaaagggttgccaagccgcgaggtggagctaatcccataaaaccgatcgtagtccggatcgcagtctgcaactcgactgcgtgaagtcggaatcgctagtaatcgtgaatcagaatgtcacggtgaatacgttcccgggccttgtacacaccgcccgtcacaccatgggagtgggttgctccagaagtagctagtctaaccttcggggggacggttaccacggagtgattcatgactggggtg

SEQ ID NO: 2736 - DNA, 1459 bp, Pseudomonas guineae
  source 1..1459: mol_type = unassigned DNA
attgaacgctggcggcaggcctaacacatgcaagtcgagcggtagagagaagcttgcttctcttgagagcggcggacgggtgagtaatgcctaggaatctgcctagtggtgggggataacgttcggaaacggacgctaataccgcatacgtcctacgggagaaagcgggggaccttcgggcctcgcgccattagatgagcctaggtcggattagctagttggtgaggtaatggctcaccaaggctacgatccgtaactggtctgagaggatgatcagtcacactggaactgagacacggtccagactcctacgggaggcagcagtggggaatattggacaatgggcgaaagcctgatccagccatgccgcgtgtgtgaagaaggtcttcggattgtaaagcactttaagttgggaggaagggtagtaacttaatacgttgctactttgacgttaccgacagaataagcaccggctaacttcgtgccagcagccgcggtaatacgaagggtgcaagcgttaatcggaattactgggcgtaaagcgcgcgtaggtggttcagtaagttgaatgtgaaatccccgggctcaacctgggaactgcatccaaaactgctgaactagagtacggtagagggtagtggaatttcctgtgtagcggtgaaatgcgtagatataggaaggaacaccagtggcgaaggcgactacctggactggtactgacactgaggtgcgaaagcgtggggagcaaacaggattagataccctggtagtccacgccgtaaacgatgtcaactagccgttgggagtcttgaactcttagtggcgcagctaacgcattaagttgaccgcctggggagtacggccgcaaggttaaaactcaaatgaattgacgggggcccgcacaagcggtggagcatgtggtttaattcgaagcaacgcgaagaaccttacctggccttgacatgctgagaactttctagagatagattggtgccttcgggaactcagacacaggtgctgcatggctgtcgtcagctcgtgtcgtgagatgttgggttaagtcccgtaacgagcgcaacccttgtccttagttaccagcacgtaatggtgggaactctaaggagactgccggtgacaaaccggaggaaggtggggatgacgtcaagtcatcatggcccttacggccagggctacacacgtgctacaatggtcggtacaaagggttgccaagccgcgaggtggagctaatcccataaaaccgatcgtagtccggatcgcagtctgcaactcgactgcgtgaagtcggaatcgctagtaatcgtgaatcagaatgtcacggtgaatacgttcccgggccttgtacacaccgcccgtcacaccatgggagtgggttgcaccagaagtagctagtctaaccttcgggaggacggttaccacggtgtgattcatgactggggtg

SEQ ID NO: 2737 - DNA, 1459 bp, unidentified
  source 1..1459: mol_type = unassigned DNA; note = Pseudomonas helleri
attgaacgctggcggcaggcctaacacatgcaagtcgagcggtagagagaagcttgcttctcttgagagcggcggacgggtgagtaatacctaggaatctgcctgatagtgggggataacgttcggaaacggacgctaataccgcatacgtcctacgggagaaagcaggggaccttcgggccttgcgctatcagatgagcctaggtcggattagctagttggtgaggtaatggctcaccaaggctacgatccgtaactggtctgagaggatgatcagtcacactggaactgagacacggtccagactcctacgggaggcagcagtggggaatattggacaatgggcgaaagcctgatccagccatgccgcgtgtgtgaagaaggtcttcggattgtaaagcactttaagttgggaggaagggcagtaaattaatactttgctgttttgacgttaccgacagaataagcaccggctaactctgtgccagcagccgcggtaatacagagggtgcaagcgttaatcggaattactgggcgtaaagcgcgcgtaggtggtttgttaagttgaatgtgaaatccccgggctcaacctgggaactgcatccaaaactggcaagctagagtatggtagagggtagtggaatttcctgtgtagcggtgaaatgcgtagatataggaaggaacaccagtggcgaaggcgactacctggactgatactgacactgaggtgcgaaagcgtggggagcaaacaggattagataccctggtagtccacgccgtaaacgatgtcaactagccgttgggagtcttgaactcttagtggcgcagctaacgcattaagttgaccgcctggggagtacggccgcaaggttaaaactcaaatgaattgacgggggcccgcacaagcggtggagcatgtggtttaattcgaagcaacgcgaagaaccttaccaggccttgacatccaatgaactttctagagatagattggtgccttcgggaacattgagacaggtgctgcatggctgtcgtcagctcgtgtcgtgagatgttgggttaagtcccgtaacgagcgcaacccttgtccttagttaccagcacgtaatggtgggcactctaaggagactgccggtgacaaaccggaggaaggtggggatgacgtcaagtcatcatggcccttacggcctgggctacacacgtgctacaatggtcggtacaaagggttgccaagccgcgaggtggagctaatcccataaaaccgatcgtagtccggatcgcagtctgcaactcgactgcgtgaagtcggaatcgctagtaatcgtgaatcagaatgtcacggtgaatacgttcccgggccttgtacacaccgcccgtcacaccatgggagtgggttgcaccagaagtagctagtctaaccttcgggaggacggttaccacggtgtgattcatgactggggtg

SEQ ID NO: 2738 - DNA, 1459 bp, unidentified
  source 1..1459: mol_type = unassigned DNA; note = Pseudomonas helmanticensis
attgaacgctggcggcaggcctaacacatgcaagtcgagcggatgagaggagcttgctcctggattcagcggcggacgggtgagtaatgcctaggaatctgcctggtagtgggggacaacgtttcgaaaggaacgctaataccgcatacgtcctacgggagaaagcaggggaccttcgggccttgcgctatcagatgagcctaggtcggattagctagttggtgaggtaatggctcaccaaggcgacgatccgtaactggtctgagaggatgatcagtcacactggaactgagacacggtccagactcctacgggaggcagcagtggggaatattggacaatgggcgaaagcctgatccagccatgccgcgtgtgtgaagaaggtcttcggattgtaaagcactttaagttgggaggaagggcagtaacttaatacgttgctgttttgacgttaccgacagaataagcaccggctaactctgtgccagcagccgcggtaatacagagggtgcaagcgttaatcggaattactgggcgtaaagcgcgcgtaggtggttcgttaagttggatgtgaaatccccgggctcaacctgggaactgcattcaaaactgtcgagctagagtatggtagagggtggtggaatttcctgtgtagcggtgaaatgcgtagatataggaaggaacaccagtggcgaaggcgaccacctggactgatactgacactgaggtgcgaaagcgtggggagcaaacaggattagataccctggtagtccacgccgtaaacgatgtcaactagccgttgggagccttgagctcttagtggcgcagctaacgcattaagttgaccgcctggggagtacggccgcaaggttaaaactcaaatgaattgacgggggcccgcacaagcggtggagcatgtggtttaattcgaagcaacgcgaagaaccttaccaggccttgacatccaatgaactttccagagatggattggtgccttcgggaacattgagacaggtgctgcatggctgtcgtcagctcgtgtcgtgagatgttgggttaagtcccgtaacgagcgcaacccttgtccttagttaccagcacgtaatggtgggcactctaaggagactgccggtgacaaaccggaggaaggtggggatgacgtcaagtcatcatggcccttacggcctgggctacacacgtgctacaatggtcggtacaaagggttgccaagccgcgaggtggagctaatcccataaaaccgatcgtagtccggatcgcagtctgcaactcgactgcgtgaagtcggaatcgctagtaatcgtgaatcagaatgtcacggtgaatacgttcccgggccttgtacacaccgcccgtcacaccatgggagtgggttgcaccagaagtagctagtctaaccttcgggaggacggttaccacggtgtgattcatgactggggtg

SEQ ID NO: 2739 - DNA, 1414 bp, unidentified
  source 1..1414: mol_type = unassigned DNA; note = Pseudomonas hunanensis
acccatgcaagtcgagcggatgacgggagcttgctccttgattcagcggcggacgggtgagtaatgcctaggaatctgcctggtagtgggggacaacgtttcgaaaggaacgctaataccgcatacgtcctacgggagaaagcaggggaccttcgggccttgcgctatcagatgagcctaggtcggattagctagttggtgaggtaatggctcaccaaggcgacgatccgtaactggtctgagaggatgatcagtcacactggaactgagacacggtccagactcctacgggaggcagcagtggggaatattggacaatgggcgaaagcctgatccagccatgccgcgtgtgtgaagaaggtcttcggattgtaaagcactttaagttgggaggaagggcagtaagctaataccttgctgttttgacgttaccgacagaataagcaccggctaactctgtgccagcagccgcggtaatacagagggtgcaagcgttaatcggaattactgggcgtaaagcgcgcgtaggtggtttgttaagttggatgtgaaagccccgggctcaacctgggaactgcatccaaaactggcaagctagagtacggtagagggtggtggaatttcctgtgtagcggtgaaatgcgtagatataggaaggaacaccagtggcgaaggcgaccacctggactgatactgacactgaggtgcgaaagcgtggggagcaaacaggattagataccctggtagtccacgccgtaaacgatgtcaactagccgttggaatccttgagattttagtggcgcagctaacgcattaagttgaccgcctggggagtacggccgcaaggttaaaactcaaatgaattgacgggggcccgcacaagcggtggagcatgtggtttaattcgaagcaacgcgaagaaccttaccaggccttgacatgcagagaactttccagagatggattggtgccttcgggaactctgacacaggtgctgcatggctgtcgtcagctcgtgtcgtgagatgttgggttaagtcccgtaacgagcgcaacccttgtccttagttaccagcacgttatggtgggcactctaaggagactgccggtgacaaaccggaggaaggtggggatgacgtcaagtcatcatggcccttacggcctgggctacacacgtgctacaatggtcggtacagagggttgccaagccgcgaggtggagctaatctcacaaaaccgatcgtagtccggatcgcagtctgcaactcgactgcgtgaagtcggaatcgctagtaatcgcgaatcagaatgtcgcggtgaatacgttcccgggccttgtacacaccgcccgtcacaccatgggagtgggttgcaccagaagtagctagtctaaccttcgggaggacggtaccacg

SEQ ID NO: 2740 - DNA, 1459 bp, unidentified
  source 1..1459: mol_type = unassigned DNA; note = Pseudomonas hussainii
attgaacgctggcggcaggcctaacacatgcaagtcgagcggatgaagagagcttgctcttggattcagcggcggacgggtgagtaatgcctaggaatctgcctagtagtgggggacaacagttggaaacgactgctaataccgcatacgtcctacgggagaaagtgggggatcttcggacctcacgctattagatgagcctaggtacgattagctagttggtagggtaaaggcctaccaaggcgacgatcgttaactggtctgagaggatgatcagtcacactggaactgagacacggtccagactcctacgggaggcagcagtggggaatattggacaatgggggaaaccctgatccagccatgccgcgtgtgtgaagaaggtcttcggattgtaaagcactttaagttgggaggaagggcagtaagttaataccttgctgttttgacgttaccgacagaataagcaccggctaactctgtgccagcagccgcggtaatacagagggtgcaagcgttaatcggaattactgggcgtaaagcgcgcgtaggtggttacgtaagttgaaggtgaaatccccgggcttaacctgggaactgcctccaaaactgcgtggctagagtacggtagagggtagtggaatttcctgtgtagcggtgaaatgcgtagatataggaaggaacaccagtggcgaaggcgactacctggactgatactgacactgaggtgcgaaagcgtggggagcaaacaggattagataccctggtagtccacgccgtaaacgatgtcaactagccgttgggctccttgagagcttagtggcgcagctaacgcattaagttgaccgcctggggagtacggccgcaaggttaaaactcaaatgaattgacgggggcccgcacaagcggtggagcatgtggtttaattcgaagcaacgcgaagaaccttacctggccttgacatgctgagaactttccagagatggattggtgccttcgggaactcagacacaggtgctgcatggctgtcgtcagctcgtgtcgtgagatgttgggttaagtcccgtaacgagcgcaacccttgtccttagttaccagcacgttatggtgggcactctaaggagactgccggtgacaaaccggaggaaggtggggatgacgtcaagtcatcatggcccttacggccagggctacacacgtgctacaatggtaggtacagagggttgccaagccgcgaggtggagctaatctcacaaaacctatcgtagtccggattggagtctgcaactcgactccatgaagtcggaatcgctagtaatcgtgaatcagaatgtcacggtgaatacgttcccgggccttgtacacaccgcccgtcacaccatgggagtgggttgctccagaagtagctagtctaaccttcggggggacggttaccacggagtgattcatgactggggtg

SEQ ID NO: 2741 - DNA, 1458 bp, Pseudomonas indica
  source 1..1458: mol_type = unassigned DNA
attgaacgctggcggcaggcctaacacatgcaagtcgagcggcagcgggtccttcgggatgccggcgagcggcggacgggtgagtaatgcctaggaatctgcctggtagtgggggataacgcggggaaactcgcgctaataccgcatacgtcctacgggagaaagtgggggaccttcgggcctcacgctatcagatgagcctaggtcggattagctagttggtagggtaaaggcctaccaaggcgacgatccgtaactggtctgagaggatgatcagtcacactggaactgagacacggtccagactcctacgggaggcagcagtggggaatattggacaatgggcgaaagcctgatccagccatgccgcgtgtgtgaagaaggtcttcggattgtaaagcactttaagttgggaggaagggcagtaagttaataccttgctgttttgacgttaccgacagaataagcaccggctaactctgtgccagcagccgcggtaatacagagggtgcaagcgttaatcggaattactgggcgtaaagcgcgcgtaggtggttcagcaagttggatgtgaaatccccgggctcaacctgggaactgcatccaaaactactgagctagagtacggtagagggtggtggaatttcctgtgtagcggtgaaatgcgtagatataggaaggaacaccagtggcgaaggcgaccacctggactgatactgacactgaggtgcgaaagcgtggggagcaaacaggattagataccctggtagtccacgccgtaaacgatgtcgactagccgttggaatccttgagattttagtggcgcagctaacgcattaagtcgaccgcctggggagtacggccgcaaggttaaaactcaaatgaattgacgggggcccgcacaagcggtggagcatgtggtttaattcgaagcaacgcgaagaaccttacctggccttgacatcctgcgaacctttcagagatgagagggtgccttcgggaacgcagagacaggtgctgcatggctgtcgtcagctcgtgtcgtgagatgttgggttaagtcccgtaacgagcgcaacccttgtccttagttaccagcacctcgggtgggcactctaaggagactgccggtgacaaaccggaggaaggtggggatgacgtcaagtcatcatggcccttacggccagggctacacacgtgctacaatggtcggtacagagggttgccaagccgcgaggtggagctaatcccagaaaaccgatcgtagtccggatcgcagtctgcaactcgactgcgtgaagtcggaatcgctagtaatcgcgaatcagaatgtcgcggtgaatacgttcccgggccttgtacacaccgcccgtcacaccatgggagtgggttgctccagaagtagctagtctaaccttcggggggacggttaccacggagtgattcatgactggggtg

SEQ ID NO: 2742 - DNA, 1417 bp, unidentified
  source 1..1417: mol_type = unassigned DNA; note = Pseudomonas indoloxydans
acacatgcaagtcgagcggatgagaggagcttgctccttgatttagcggcggacgggtgagtaatgcctaggaatctgcctggtagtgggggataacgtccggaaacgaacgctaataccgcatacgtcctacgggagaaagcaggggaccttcgggccttgcgctatcagatgagcctaggtcggattagctagttggtgaggtaatggctcaccaaggcgacgatccgtaactggtctgagaggatgatcagtcacactggaactgagacacggtccagactcctacgggaggcagcagtggggaatattggacaatgggcgaaagcctgatccagccatgccgcgtgtgtgaagaaggtcttcggattgtaaagcactttaagttgggaggaagggcagtaagctaataccttgctgttttgacgttaccgacagaataagcaccggctaacttcgtgccagcagccgcggtaatacgaagggtgcaagcgttaatcggaattactgggcgtaaagcgcgcgtaggtggttcgttaagttggatgtgaaagccccgggctcaacctgggaactgcatccaaaactggcgagctagagtacggtagagggtggtggaatttcctgtgtagcggtgaaatgcgtagatataggaaggaacaccagtggcgaaggcgaccacctggactgatactgacactgaggtgcgaaagcgtggggagcaaacaggattagataccctggtagtccacgccgtaaacgatgtcaactagccgttgggttccttgagaacttagtggcgcagctaacgcattaagttgaccgcctggggagtacggccgcaaggttaaaactcaaatgaattgacgggggcccgcacaagcggtggagcatgtggtttaattcgaagcaacgcgaagaaccttacctggccttgacatgctgagaactttccagagatggattggtgccttcgggaactcagacacaggtgctgcatggctgtcgtcagctcgtgtcgtgagatgttgggttaagtcccgtaacgagcgcaacccttgtccttagttaccagcacgtaatggtgggcactctaaggagactgccggtgacaaaccggaggaaggtggggatgacgtcaagtcatcatggcccttacggccagggctacacacgtgctacaatggtcggtacaaagggttgccaagccgcgaggtggagctaatcccataaaaccgatcgtagtccggatcgcagtctgcaactcgactgcgtgaagtcggaatcgctagtaatcgtgaatcagaatgtcacggtgaatacgttcccgggccttgtacacaccgcccgtcacaccatgggagtgggttgctccagaagtagctagtctaaccttcggggggacggtaccacggag

SEQ ID NO: 2743 - DNA, 1459 bp, Pseudomonas jessenii
  source 1..1459: mol_type = unassigned DNA
attgaacgctggcggcaggcctaacacatgcaagtcgagcggatgacaggagcttgctcctgaattcagcggcggacgggtgagtaatgcctaggaatctgcctggtagtgggggacaacgtttcgaaaggaacgctaataccgcatacgtcctacgggagaaagcaggggaccttcgggccttgcgctatcagatgagcctaggtcggattagctagttggtgaggtaatggctcaccaaggcgacgatccgtaactggtctgagaggatgatcagtcacactggaactgagacacggtccagactcctacgggaggcagcagtggggaatattggacaatgggcgaaagcctgatccagccatgccgcgtgtgtgaagaaggtcttcggattgtaaagcactttaagttgggaggaagggttgtagattaatactctgcaattttgacgttaccgacagaataagcaccggctaactctgtgccagcagccgcggtaatacagagggtgcaagcgttaatcggaattactgggcgtaaagcgcgcgtaggtggtttgttaagttggatgtgaaagccccgggctcaacctgggaactgcattcaaaactgacaagctagagtatggtagagggtggtggaatttcctgtgtagcggtgaaatgcgtagatataggaaggaacaccagtggcgaaggcgaccacctggactgatactgacactgaggtgcgaaagcgtggggagcaaacaggattagataccctggtagtccacgccgtaaacgatgtcaactagccgttgggagccttgagctcttagtggcgcagctaacgcattaagttgaccgcctggggagtacggccgcaaggttaaaactcaaatgaattgacgggggcccgcacaagcggtggagcatgtggtttaattcgaagcaacgcgaagaaccttaccaggccttgacatccaatgaactttccagagatggattggtgccttcgggaacattgagacaggtgctgcatggctgtcgtcagctcgtgtcgtgagatgttgggttaagtcccgtaacgagcgcaacccttgtccttagttaccagcacgtaatggtgggcactctaaggagactgccggtgacaaaccggaggaaggtggggatgacgtcaagtcatcatggcccttacggcctgggctacacacgtgctacaatggtcggtacagagggttgccaagccgcgaggtggagctaatcccataaaaccgatcgtagtccggatcgcagtctgcaactcgactgcgtgaagtcggaatcgctagtaatcgcgaatcagaatgtcgcggtgaatacgttcccgggccttgtacacaccgcccgtcacaccatgggagtgggttgcaccagaagtagctagtctaaccttcgggaggacggttaccacggtgtgattcatgactggggtg

SEQ ID NO: 2744 - DNA, 1459 bp, Pseudomonas jinjuensis
  source 1..1459: mol_type = unassigned DNA
attgaacgctggcggcaggcctaacacatgcaagtcgagcggatgagaggagcttgctccttgattcagcggcggacgggtgagtaatgcctaggaatctgcctgatagtgggggacaacgtttcgaaaggaacgctaataccgcatacgtcctacgggagaaagcaggggaccttcgggccttgcgctatcagatgagcctaggtcggattagctagtaggtgaggtaatggctcacctaggcgacgatccgtaactggtctgagaggatgatcagtcacactggaactgagacacggtccagactcctacgggaggcagcagtggggaatattggacaatgggcgaaagcctgatccagccatgccgcgtgtgtgaagaaggtcttcggattgtaaagcactttaagttgggaggaagggctgcaagttaataccttgtagttttgacgttaccaacagaataagcaccggctaacttcgtgccagcagccgcggtaatacgaagggtgcaagcgttaatcggaattactgggcgtaaagcgcgcgtaggtggtttgttaagttggaggtgaaatccccgggctcaacctgggaactgcctccaaaactggctgactagagtacggtagagggtggtggaatttcctgtgtagcggtgaaatgcgtagatataggaaggaacaccagtggcgaaggcgaccacctggactgatactgacactgaggtgcgaaagcgtggggagcaaacaggattagataccctggtagtccacgccgtaaacgatgtcgactagccgttgggatccttgagatcttagtggcgcagctaacgcgataagtcgaccgcctggggagtacggccgcaaggttaaaactcaaatgaattgacgggggcccgcacaagcggtggagcatgtggtttaattcgaagcaacgcgaagaaccttacctggccttgacatgtccggaatcctgcagagatgcgggagtgccttcgggaatcggaacacaggtgctgcatggctgtcgtcagctcgtgtcgtgagatgttgggttaagtcccgtaacgagcgcaacccttgtccttagttaccagcacgttaaggtgggcactctaaggagactgccggtgacaaaccggaggaaggtggggatgacgtcaagtcatcatggcccttacggccagggctacacacgtgctacaatggtcggtacagagggttgccaagccgcgaggtggagctaatcccagaaaaccgatcgtagtccggatcgcagtctgcaactcgactgcgtgaagtcggaatcgctagtaatcgtgaatcagaatgtcacggtgaatacgttcccgggccttgtacacaccgcccgtcacaccatgggagtgggttgctccagaagtagctagtctaaccgcaagggggacggttaccacggagtgattcatgactggggtg

SEQ ID NO: 2745 - DNA, 1459 bp, Pseudomonas kilonensis
  source 1..1459: mol_type = unassigned DNA
attgaacgctggcggcaggcctaacacatgcaagtcgagcggtagagaggtgcttgcacctcttgagagcggcggacgggtgagtaatgcctaggaatctgcctggtagtgggggataacgctcggaaacggacgctaataccgcatacgtcctacgggagaaagcaggggaccttcgggccttgcgctatcagatgagcctaggtcggattagctagttggtggggtaatggctcaccaaggcgacgatccgtaactggtctgagaggatgatcagtcacactggaactgagacacggtccagactcctacgggaggcagcagtggggaatattggacaatgggcgaaagcctgatccagccatgccgcgtgtgtgaagaaggtcttcggattgtaaagcactttaagttgggaggaagggcattaacctaatacgttagtgttttgacgttaccgacagaataagcaccggctaactctgtgccagcagccgcggtaatacagagggtgcaagcgttaatcggaattactgggcgtaaagcgcgcgtaggtggtttgttaagttggatgtgaaagccccgggctcaacctgggaactgcattcaaaactgacaagctagagtatggtagagggtggtggaatttcctgtgtagcggtgaaatgcgtagatataggaaggaacaccagtggcgaaggcgaccacctggactgatactgacactgaggtgcgaaagcgtggggagcaaacaggattagataccctggtagtccacgccgtaaacgatgtcaactagccgttgggagccttgagctcttagtggcgcagctaacgcattaagttgaccgcctggggagtacggccgcaaggttaaaactcaaatgaattgacgggggcccgcacaagcggtggagcatgtggtttaattcgaagcaacgcgaagaaccttaccaggccttgacatccaatgaactttccagagatggattggtgccttcgggaacattgagacaggtgctgcatggctgtcgtcagctcgtgtcgtgagatgttgggttaagtcccgtaacgagcgcaacccttgtccttagttaccagcacgtaatggtgggcactctaaggagactgccggtgacaaaccggaggaaggtggggatgacgtcaagtcatcatggcccttacggcctgggctacacacgtgctacaatggtcggtacagagggttgccaagccgcgaggtggagctaatcccacaaaaccgatcgtagtccggatcgcagtctgcaactcgactgcgtgaagtcggaatcgctagtaatcgcgaatcagaatgtcgcggtgaatacgttcccgggccttgtacacaccgcccgtcacaccatgggagtgggttgcaccagaagtagctagtctaaccttcggggggacggttaccacggtgtgattcatgactggggtg

SEQ ID NO: 2746 - DNA, 1459 bp, Pseudomonas knackmussii
  source 1..1459: mol_type = unassigned DNA
attgaacgctggcggcaggcctaacacatgcaagtcgagcggatgaagggagcttgctctctgattcagcggcggacgggtgagtaatgcctaggaatctgcctggtagtgggggacaacgtttcgaaaggaacgctaataccgcatacgtcctacgggagaaagtgggggatcttcggacctcacgctatcagatgagcctaggtcggattagctagtaggtgaggtaatggctcacctaggcgacgatccgtaactggtctgagaggatgatcagtcacactggaactgagacacggtccagactcctacgggaggcagcagtggggaatattggacaatgggcgaaagcctgatccagccatgccgcgtgtgtgaagaaggtcttcggattgtaaagcactttaagttgggaggaagggcagtaagttaataccttgctgttttgacgttaccaacagaataagcaccggctaacttcgtgccagcagccgcggtaatacgaagggtgcaagcgttaatcggaattactgggcgtaaagcgcgcgtaggtggtttggtaagatggatgtgaaatccccgggctcaacctgggaactgcatccataactgcctgactagagtacggtagagggtggtggaatttcctgtgtagcggtgaaatgcgtagatataggaaggaacaccagtggcgaaggcgaccacctggactgatactgacactgaggtgcgaaagcgtggggagcaaacaggattagataccctggtagtccacgccgtaaacgatgtcgactagccgttggaatccttgagattttagtggcgcagctaacgcgataagtcgaccgcctggggagtacggccgcaaggttaaaactcaaatgaattgacgggggcccgcacaagcggtggagcatgtggtttaattcgaagcaacgcgaagaaccttacctggccttgacatgtccggaatcttgcagagatgcgagagtgccttcgggaatcggaacacaggtgctgcatggctgtcgtcagctcgtgtcgtgagatgttgggttaagtcccgtaacgagcgcaacccttgtccttagttaccagcacgttatggtgggcactctaaggagactgccggtgacaaaccggaggaaggtggggatgacgtcaagtcatcatggcccttacggccagggctacacacgtgctacaatggtcggtacagagggttgccaagccgcgaggtggagctaatcccataaaaccgatcgtagtccggatcgcagtctgcaactcgactgcgtgaagtcggaatcgctagtaatcgtgaatcagaatgtcacggtgaatacgttcccgggccttgtacacaccgcccgtcacaccatgggagtgggttgctccagaagtagctagtctaaccgcaagggggacggttaccacggagtgattcatgactggggtg

SEQ ID NO: 2747 - DNA, 1455 bp, Pseudomonas koreensis
  source 1..1455: mol_type = unassigned DNA
aacgctggcggcaggcctaacacatgcaagtcgagcggatgaaaggagcttgctcctggattcagcggcggacgggtgagtaatgcctaggaatctgcctggtagtgggggacaacgtttcgaaaggaacgctaataccgcatacgtcctacgggagaaagcaggggaccttcgggccttgcgctatcagatgagcctaggtcggattagctagttggtgaggtaatggctcaccaaggcgacgatccgtaactggtctgagaggatgatcagtcacactggaactgagacacggtccagactcctacgggaggcagcagtggggaatattggacaatgggcgaaagcctgatccagccatgccgcgtgtgtgaagaaggtcttcggattgtaaagcactttaagttgggaggaagggttgtagattaatactctgcaattttgacgttaccgacagaataagcaccggctaactctgtgccagcagccgcggtaatacagagggtgcaagcgttaatcggaattactgggcgtaaagcgcgcgtaggtggtttgttaagttggatgtgaaatccccgggctcaacctgggaactgcatccaaaactggcaagctagagtatggtagagggtggtggaatttcctgtgtagcggtgaaatgcgtagatataggaaggaacaccagtggcgaaggcgaccacctggactgatactgacactgaggtgcgaaagcgtggggagcaaacaggattagataccctggtagtccacgccgtaaacgatgtcaactagccgttgggagccttgagctcttagtggcgcagctaacgcattaagttgaccgcctggggagtacggccgcaaggttaaaactcaaatgaattgacgggggcccgcacaagcggtggagcatgtggtttaattcgaagcaacgcgaagaaccttaccaggccttgacatccaatgaactttccagagatggattggtgccttcgggaacattgagacaggtgctgcatggctgtcgtcagctcgtgtcgtgagatgttgggttaagtcccgtaacgagcgcaacccttgtccttagttaccagcacgtaatggtgggcactctaaggagactgccggtgacaaaccggaggaaggtggggatgacgtcaagtcatcatggcccttacggcctgggctacacacgtgctacaatggtcggtacagagggttgccaagccgcgaggtggagctaatcccacaaaaccgatcgtagtccggatcgcagtctgcaactcgactgcgtgaagtcggaatcgctagtaatcgcgaatcagaatgtcgcggtgaatacgttcccgggccttgtacacaccgcccgtcacaccatgggagtgggttgcaccagaagtagctagtctaaccttcgggaggacggttaccacggtgtgattcatgactggggtg

SEQ ID NO: 2748 - DNA, 1459 bp, unidentified
  source 1..1459: mol_type = unassigned DNA; note = Pseudomonas kunmingensis
attgaacgctggcggcaggcctaacacatgcaagtcgagcggatgaggagagcttgctctctgattcagcggcggacgggtgagtaatgcctaggaatccgcctgatagtgggggacaacgtttcgaaaggaacgctaataccgcatacgtcctacgggagaaagcaggggaccttcgggccttgcgctatcagatgagcctaggtcggattagctagttggtgaggtaatggctcaccaaggcgacgatccgtaactggtctgagaggatgatcagtcacactggaactgagacacggtccagactcctacgggaggcagcagtggggaatattggacaatgggcgaaagcctgatccagccatgccgcgtgtgtgaagaaggtcttcggattgtaaagcactttaagttgggaggaagggcattaacctaatacgttagtgttttggcgttaccgacagaataagcaccggctaacttcgtgccagcagccgcggtaatacgaagggtgcaagcgttaatcggaattactgggcgtaaagcgcgcgtaggtggtttgttaagttgaatgtgaaagccccgggctcaacctgggaactgcatccaaaactggcaaactagagtatggcagagggtggtggaatttcctgtgtagcggtgaaatgcgtagatataggaaggaacaccagtggcgaaggcgaccacctgggctaatactgacactgaggtgcgaaagcgtggggagcaaacaggattagataccctggtagtccacgccgtaaacgatgtcgactagccgttgggatccttgagatcttagtggcgcagctaacgcattaagtcgaccgcctggggagtacggccgcaaggttaaaactcaaatgaattgacgggggcccgcacaagcggtggagcatgtggtttaattcgaagcaacgcgaagaaccttaccaggccttgacatgcagagaactttccagagatggattggtgccttcgggaactctgacacaggtgctgcatggctgtcgtcagctcgtgtcgtgagatgttgggttaagtcccgtaacgagcgcaacccttgtccttagttaccagcacgctaaggtgggcactctaaggagactgccggtgacaaaccggaggaaggtggggatgacgtcaagtcatcatggcccttacggcctgggctacacacgtgctacaatggtcggtacaaagggttgccaagccgcgaggtggagctaatcccataaaaccgatcgtagtccggatcgcagtctgcaactcgactgcgtgaagtcggaatcgctagtaatcgtgaatcagaatgtcacggtgaatacgttcccgggccttgtacacaccacccgtcacaccatgggagtgggttgctccagaagtagctagtctaaccttcggggggacggttaccacggagtgattcatgactggggtg

SEQ ID NO: 2749 - DNA, 1420 bp, unidentified
  source 1..1420: mol_type = unassigned DNA; note = Pseudomonas lactis
attgaacgctggcggcaggcctaacacatgcaagtcgagcggtagagagaagcttgcttctcttgagagcggcggacgggtgagtaatgcctaggaatctgcctggtagtgggggataacgttcggaaacggacgctaataccgcatacgtcctacgggagaaagcaggggaccttcgggccttgcgctatcagatgagcctaggtcggattagctagttggtggggtaatggctcaccaaggcgacgatccgtaactggtctgagaggatgatcagtcacactggaactgagacacggtccagactcctacgggaggcagcagtggggaatattggacaatgggcgaaagcctgatccagccatgccgcgtgtgtgaagaaggtcttcggattgtaaagcactttaagttgggaggaagggttgtagattaatactctgcaattttgacgttaccgacagaataagcaccggctaactctgtgccagcagccgcggtaatacagagggtgcaagcgttaatcggaattactgggcgtaaagcgcgcgtaggtggtttgttaagttggatgtgaaatccccgggctcaacctgggaactgcattcaaaactgactgactagagtatggtagagggtggtggaatttcctgtgtagcggtgaaatgcgtagatataggaaggaacaccagtggcgaaggcgaccacctggactaatactgacactgaggtgcgaaagcgtggggagcaaacaggattagataccctggtagtccacgccgtaaacgatgtcaactagccgttggaagccttgagcttttagtggcgcagctaacgcattaagttgaccgcctggggagtacggccgcaaggttaaaactcaaatgaattgacgggggcccgcacaagcggtggagcatgtggtttaattcgaagcaacgcgaagaaccttaccaggccttgacatccaatgaactttctagagatagattggtgccttcgggaacattgagacaggtgctgcatggctgtcgtcagctcgtgtcgtgagatgttgggttaagtcccgtaacgagcgcaacccttgtccttagttaccagcacgtaatggtgggcactctaaggagactgccggtgacaaaccggaggaaggtggggatgacgtcaagtcatcatggcccttacggcctgggctacacacgtgctacaatggtcggtacagagggttgccaagccgcgaggtggagctaatcccataaaaccgatcgtagtccggatcgcagtctgcaactcgactgcgtgaagtcggaatcgctagtaatcgcgaatcagaatgtcgcggtgaatacgttcccgggccttgtacacaccgcccgtcacaccatgggagtgggttgcaccagaagtagctagtctaaccttc

SEQ ID NO: 2750 - DNA, 1459 bp, Pseudomonas lini
  source 1..1459: mol_type = unassigned DNA
  misc_difference 51: note = n is a, c, g, or t
attgaacgctggcggcaggcctaacacatgcaagtcgagcggtagagaggngcttgcacctcttgagagcggcggacgggtgagtaatgcctaggaatctgcctggtagtgggggataacgctcggaaacggacgctaataccgcatacgtcctacgggagaaagcaggggaccttcgggccttgcgctatcagatgagcctaggtcggattagctagttggtgaggtaatggctcaccaaggcgacgatccgtaactggtctgagaggatgatcagtcacactggaactgagacacggtccagactcctacgggaggcagcagtggggaatattggacaatgggcgaaagcctgatccagccatgccgcgtgtgtgaagaaggtcttcggattgtaaagcactttaagttgggaggaagggcagttacctaatacgtatctgttttgacgttaccgacagaataagcaccggctaactctgtgccagcagccgcggtaatacagagggtgcaagcgttaatcggaattactgggcgtaaagcgcgcgtaggtggttcgttaagttggatgtgaaatccccgggctcaacctgggaactgcattcaaaactgacgagctagagtatggtagagggtggtggaatttcctgtgtagcggtgaaatgcgtagatataggaaggaacaccagtggcgaaggcgaccacctggactgatactgacactgaggtgcgaaagcgtggggagcaaacaggattagataccctggtagtccacgccgtaaacgatgtcaactagccgttgggagccttgagctcttagtggcgcagctaacgcattaagttgaccgcctggggagtacggccgcaaggttaaaactcaaatgaattgacgggggcccgcacaagcggtggagcatgtggtttaattcgaagcaacgcgaagaaccttaccaggccttgacatccaatgaactttccagagatggattggtgccttcgggaacattgagacaggtgctgcatggctgtcgtcagctcgtgtcgtgagatgttgggttaagtcccgtaacgagcgcaacccttgtccttagttaccagcacgtcatggtgggcactctaaggagactgccggtgacaaaccggaggaaggtggggatgacgtcaagtcatcatggcccttacggcctgggctacacacgtgctacaatggtcggtacagagggttgccaagccgcgaggtggagctaatcccagaaaaccgatcgtagtccggatcgcagtctgcaactcgactgcgtgaagtcggaatcgctagtaatcgcgaatcagaatgtcgcggtgaatacgttcccgggccttgtacacaccgcccgtcacaccatgggagtgggttgcaccagaagtagctagtctaaccttcgggaggacggttaccacggtgtgattcatgactggggtg

SEQ ID NO: 2751 - DNA, 1456 bp, unidentified
  source 1..1456: mol_type = unassigned DNA; note = Pseudomonas linyingensis
gaacgctggcggcaggcctaacacatgcaagtcgagcggatgagggtagcttgctacctgattcagcggcggacgggtgagtaatgcctaggaatctgcccgatagtgggggacaacgtttcgaaaggaacgctaataccgcatacgtcctacgggagaaagcaggggaccttcgggccttgcgctatcggatgagcctaggtcggattagctagttggtggggtaaaggctcaccaaggcgacgatccgtaactggtctgagaggatgatcagtcacactggaactgagacacggtccagactcctacgggaggcagcagtggggaatattggacaatgggcgaaagcctgatccagccatgccgcgtgtgtgaagaaggtcttcggattgtaaagcactttaagctgggaggaagggcagtaagttaataccttgctgttttgacgttaccagcagaataagcaccggctaacttcgtgccagcagccgcggtaatacgaagggtgcaagcgttaatcggaattactgggcgtaaagcgcgcgtaggtggttcagcaagttggatgtgaaagccccgggctcaacctgggaactgcatccaaaactactgggctagagtatggtagagggtggtggaatttcctgtgtagcggtgaaatgcgtagatataggaaggaacaccagtggcgaaggcgaccacctggactaatactgacactgaggtgcgaaagcgtggggagcaaacaggattagataccctggtagtccacgccgtaaacgatgtcaactagttgttgggttccttgaggacttagtaacgaagctaacgcgataagttgaccgcctggggagtacggccgcaaggttaaaactcaaatgaattgacgggggcccgcacaagcggtggagcatgtggtttaattcgaagcaacgcgaagaaccttacctggccttgacatgctgagaactttccagagatggattggtgccttcgggaactcagacacaggtgctgcatggctgtcgtcagctcgtgtcgtgagatgttgggttaagtcccgtaacgagcgcaacccttgtccttagttaccagcacgtaatggtgggcactctaaggagactgccggtgacaaaccggaggaaggtggggatgacgtcaagtcatcatggcccttacggccagggctacacacgtgctacaatggtcggtacagagggttgccaagccgcgaggtggagctaatctcacaaaaccgatcgtagtccggatcgcagtctgcaactcgactgcgtgaagtcggaatcgctagtaatcgtgaatcagaatgtcacggtgaatacgttcccgggccttgtacacaccgcccgtcacaccatgggagtgggttgctccagaagtagctagtctaaccttcggggggacggttaccacggagtgattcatgactggggtg

SEQ ID NO: 2752 - DNA, 1459 bp, Pseudomonas lurida
  source 1..1459: mol_type = unassigned DNA
attgaacgctggcggcaggcctaacacatgcaagtcgagcggtagagagaagcttgcttctcttgagagcggcggacgggtgagtaatgcctaggaatctgcctggtagtgggggataacgttcggaaacggacgctaataccgcatacgtcctacgggagaaagcaggggaccttcgggccttgcgctatcagatgagcctaggtcggattagctagttggtggggtaatggctcaccaaggcgacgatccgtaactggtctgagaggatgatcagtcacactggaactgagacacggtccagactcctacgggaggcagcagtggggaatattggacaatgggcgaaagcctgatccagccatgccgcgtgtgtgaagaaggtcttcggattgtaaagcactttaagttgggaggaagggcagttgcctaatacgtaactgttttgacgttaccgacagaataagcaccggctaactctgtgccagcagccgcggtaatacagagggtgcaagcgttaatcggaattactgggcgtaaagcgcgcgtaggtggtttgttaagttggatgtgaaatccccgggctcaacctgggaactgcattcaaaactgactgactagagtatggtagagggtggtggaatttcctgtgtagcggtgaaatgcgtagatataggaaggaacaccagtggcgaaggcgaccacctggactaatactgacactgaggtgcgaaagcgtggggagcaaacaggattagataccctggtagtccacgccgtaaacgatgtcaactagccgttggaagccttgagcttttagtggcgcagctaacgcattaagttgaccgcctggggagtacggccgcaaggttaaaactcaaatgaattgacgggggcccgcacaagcggtggagcatgtggtttaattcgaagcaacgcgaagaaccttaccaggccttgacatccaatgaactttctagagatagattggtgccttcgggaacattgagacaggtgctgcatggctgtcgtcagctcgtgtcgtgagatgttgggttaagtcccgtaacgagcgcaacccttgtccttagttaccagcacgtaatggtgggcactctaaggagactgccggtgacaaaccggaggaaggtggggatgacgtcaagtcatcatggcccttacggcctgggctacacacgtgctacaatggtcggtacagagggttgccaagccgcgaggtggagctaatcccataaaaccgatcgtagtccggatcgcagtctgcaactcgactgcgtgaagtcggaatcgctagtaatcgcgaatcagaatgtcgcggtgaatacgttcccgggccttgtacacaccgcccgtcacaccatgggagtgggttgcaccagaagtagctagtctaaccttcgggaggacggttaccacggtgtgattcatgactggggtg

SEQ ID NO: 2753 - DNA, 1459 bp, Pseudomonas lutea
  source 1..1459: mol_type = unassigned DNA
attgaacgctggcggcaggcctaacacatgcaagtcgagcggatgaagggagcttgctccctgattcagcggcggacgggtgagtaatgcctaggaatctgcctggtagtgggggacaacgtctcgaaagggacgctaataccgcatacgtcctacgggagaaagcaggggaccttcgggccttgcgctatcagatgagcctaggtcggattagctagttggtgaggtaatggctcaccaaggcgacgatccgtaactggtctgagaggatgatcagtcacactggaactgagacacggtccagactcctacgggaggcagcagtggggaatattggacaatgggcgaaagcctgatccagccatgccgcgtgtgtgaagaaggtcttcggattgtaaagcactttaagttgggaggaagggcagctaattaatacttcgctgttttgacgttaccgacagaataagcaccggctaactctgtgccagcagccgcggtaatacagagggtgcaagcgttaatcggaattactgggcgtaaagcgcgcgtaggtggtttgttaagttgaatgtgaaatccccgggctcaacctgggaactgcatccaaaactggcaagctagagtagggcagagggtggtggaatttcctgtgtagcggtgaaatgcgtagatataggaaggaacaccagtggcgaaggcgaccacctgggctcatactgacactgaggtgcgaaagcgtggggagcaaacaggattagataccctggtagtccacgccgtaaacgatgtcaactagccgttggaagccttgagcttttagtggcgcagctaacgcattaagttgaccgcctggggagtacggccgcaaggttaaaactcaaatgaattgacgggggcccgcacaagcggtggagcatgtggtttaattcgaagcaacgcgaagaaccttaccaggccttgacatccaatgaactttccagagatggattggtgccttcgggaacattgagacaggtgctgcatggctgtcgtcagctcgtgtcgtgagatgttgggttaagtcccgtaacgagcgcaacccttgtccttagttaccagcacgttaaggtgggcactctaaggagactgccggtgacaaaccggaggaaggtggggatgacgtcaagtcatcatggcccttacggcctgggctacacacgtgctacaatggtcggtacagagggttgccaagccgcgaggtggagctaatcccagaaaaccgatcgtagtccggatcgcagtctgcaactcgactgcgtgaagtcggaatcgctagtaatcgcgaatcagaatgtcgcggtgaatacgttcccgggccttgtacacaccgcccgtcacaccatgggagtgggttgcaccagaagtagctagtctaaccttcgggaggacggttaccacggtgtgattcatgactggggtg

SEQ ID NO: 2754 - DNA, 1461 bp, Pseudomonas mandelii
  source 1..1461: mol_type = unassigned DNA
attgaacgctggcggcaggcctaacacatgcaagtcgagcggcagcacgggtacttgtacctggtggcgagcggcggacgggtgagtaatgcctaggaatctgcctggtagtgggggataacgctcggaaacggacgctaataccgcatacgtcctacgggagaaagcaggggaccttcgggccttgcgctatcagatgagcctaggtcggattagctagttggtgaggtaatggctcaccaaggcgacgatccgtaactggtctgagaggatgatcagtcacactggaactgagacacggtccagactcctacgggaggcagcagtggggaatattggacaatgggcgaaagcctgatccagccatgccgcgtgtgtgaagaaggtcttcggattgtaaagcactttaagttgggaggaagggcagttacctaatacgtatctgttttgacgttaccgacagaataagcaccggctaactctgtgccagcagccgcggtaatacagagggtgcaagcgttaatcggaattactgggcgtaaagcgcgcgtaggtggtttgttaagttggatgtgaaatccccgggctcaacctgggaactgcattcaaaactgacaagctagagtatggtagagggtggtggaatttcctgtgtagcggtgaaatgcgtagatataggaaggaacaccagtggcgaaggcgaccacctggactgatactgacactgaggtgcgaaagcgtggggagcaaacaggattagataccctggtagtccacgccgtaaacgatgtcaactagccgttgggagccttgagctcttagtggcgcagctaacgcattaagttgaccgcctggggagtacggccgcaaggttaaaactcaaatgaattgacgggggcccgcacaagcggtggagcatgtggtttaattcgaagcaacgcgaagaaccttaccaggccttgacatccaatgaactttccagagatggattggtgccttcgggaacattgagacaggtgctgcatggctgtcgtcagctcgtgtcgtgagatgttgggttaagtcccgtaacgagcgcaacccttgtccttagttaccagcacgtaatggtgggcactctaaggagactgccggtgacaaaccggaggaaggtggggatgacgtcaagtcatcatggcccttacggcctgggctacacacgtgctacaatggtcggtacagagggttgccaagccgcgaggtggagctaatcccagaaaaccgatcgtagtccggatcgcagtctgcaactcgactgcgtgaagtcggaatcgctagtaatcgcgaatcagaatgtcgcggtgaatacgttcccgggccttgtacacaccgcccgtcacaccatgggagtgggttgcaccagaagtagctagtctaaccttcggggggacggttaccacggtgtgattcatgactggggtg

SEQ ID NO: 2755 - DNA, 1351 bp, Pseudomonas marginalis
  source 1..1351: mol_type = unassigned DNA
agtgggggataacgttcggaaacggacgctaataccgcatacgtcctacgggagaaagcaggggaccttcgggccttgcgctatcagatgagcctaggtcggattagctagttggtggggtaatggctcaccaaggcgacgatccgtaactggtctgagaggatgatcagtcacactggaactgagacacggtccagactcctacgggaggcagcagtggggaatattggacaatgggcgaaagcctgatccagccatgccgcgtgtgtgaagaaggtcttcggattgtaaagcactttaagttgggaggaagggccattacctaatacgtgatggttttgacgttaccgacagaataagcaccggctaactctgtgccagcagccgcggtaatacagagggtgcaagcgttaatcggaattactgggcgtaaagcgcgcgtaggtggtttgttaagttggatgtgaaatccccgggctcaacctgggaactgcattcaaaactgactgactagagtatggtagaggtgggtggaatttcctgtgtagcggtgaaatgcgtagatataggaaggaacaccagtggcgaaggcgaccacctggactgatactgacactgaggtgcgaaagcgtggggagcaaacaggattagataccctggtagtccacgccgtaaacgatgtcaactagccgttgggagccttgagctcttagtggcgcagctaacgcattaagttgaccgcctggggagtacggccgcaaggttaaaactcaaatgaattgacgggggcccgcacaagcggtggagcatgtggtttaattcgaagcaacgcgaagaaccttaccaggccttgacatccaatgaactttccagagatggattggtgccttcgggaacattgagacaggtgctgcatggctgtcgtcagctcgtgtcgtgagatgttgggttaagtcccgtaacgagcgcaacccttgtccttagttaccagcacgtgatggtggcactctaaggagactgccggtgacaaaccggaggaaggtggggatgacgtcaagtcatcatggcccttacggcctgggctacacacgtgctacaatggtcggtacagagggttgccaagccgcgaggtggagctaatcccagaaaaccgatcgtagtccggatcgcagtctgcaactcgactgcgtgaagtcggaatcgctagtaatcgcgaatcagaatgtcgcggtgaatacgttcccgggccttgtacacaccgcccgtcacaccatgggagtgggttgcaccagaagtagctagtctaaccttcgggaggacggttaccacggtgtgattcatgactggggtg

SEQ ID NO: 2756 - DNA, 1434 bp, Pseudomonas marincola
  source 1..1434: mol_type = unassigned DNA
aagtcgagcggtaacagagagtagcttgctactttgctgacgagcggcggacgggtgagtaatgcctaggaatctgcctagtagtgggggataacgttcggaaacgaacgctaataccgcatacgtcctacgggagaaagtgggggaccttcgggcctcacgctattagatgagcctaggtcggattagctagttggtgaggtaatggctcaccaaggcgacgatccgtaactggtctgagaggatgatcagtcacactggaactgagacacggtccagactcctacgggaggcagcagtggggaatattggacaatgggcgaaagcctgatccagccatgccgcgtgtgtgaagaaggtcttcggattgtaaagcactttaagttgggaggaagggcagtaaattaatactttgctgttttgacgttaccgacagaataagcaccggctaactctgtgccagcagccgcggtaatacagagggtgcaagcgttaatcggaattactgggcgtaaagcgcgcgtaggcggtttgttaagttggatgtgaaagccccgggctcaacctgggaactgcatccaaaactggcaagctagagtacagtagagggtggtggaatttcctgtgtagcggtgaaatgcgtagatataggaaggaacaccagtggcgaaggcgaccacctggactgatactgacgctgaggtgcgaaagcgtggggagcaaacaggattagataccctggtagtccacgccgtaaacgatgtcaactagccgttggattccttgagaatttagtggcgcagctaacgcattaagttgaccgcctggggagtacggccgcaaggttaaaactcaaatgaattgacgggggcccgcacaagcggtggagcatgtggtttaattcgaagcaacgcgaagaaccttacctggccttgacatgctgagaactttccagagatggattggtgccttcgggaactcagacacaggtgctgcatggctgtcgtcagctcgtgtcgtgagatgttgggttaagtcccgtaacgagcgcaacccttgtccttagttaccagcacgttatggtgggaactctaaggagactgccggtgacaaaccggaggaaggtggggatgacgtcaagtcatcatggcccttacggccagggctacacacgtgctacaatggtcggtacaaagggttgccaagccgcgaggtggagctaatcccataaaaccgatcgtagtccggatcgcagtctgcaactcgactgcgtgaagtcggaatcgctagtaatcgtgaatcagaatgtcacggtgaatacgttcccgggccttgtacacaccgcccgtcacaccatgggagtgggttgcaccagaagtagctagtctaaccgcaagggggacggttaccacggtgtgattcatgactggggtg

SEQ ID NO: 2757 - DNA, 1459 bp, Pseudomonas mediterranea
  source 1..1459: mol_type = unassigned DNA
attgaacgctggcggcaggcctaacacatgcaagtcgagcggtagagaggtgcttgcacctcttgagagcggcggacgggtgagtaatgcctaggaatctgcctggtagtgggggataacgctcggaaacggacgctaataccgcatacgtcctacgggagaaagcaggggaccttcgggccttgcgctatcagatgagcctaggtcggattagctagttggtgaggtaatggctcaccaaggcgacgatccgtaactggtctgagaggatgatcagtcacactggaactgagacacggtccagactcctacgggaggcagcagtggggaatattggacaatgggcgaaagcctgatccagccatgccgcgtgtgtgaagaaggtcttcggattgtaaagcactttaagttgggaggaagggccattacctaatacgtgatggttttgacgttaccgacagaataagcaccggctaactctgtgccagcagccgcggtaatacagagggtgcaagcgttaatcggaattactgggcgtaaagcgcgcgtaggtggttcgttaagttggatgtgaaagccccgggctcaacctgggaactgcattcaaaactgtcgagctagagtatggtagagggtggtggaatttcctgtgtagcggtgaaatgcgtagatataggaaggaacaccagtggcgaaggcgaccacctggactgatactgacactgaggtgcgaaagcgtggggagcaaacaggattagataccctggtagtccacgccgtaaacgatgtcaactagccgttgggagccttgagctcttagtggcgcagctaacgcattaagttgaccgcctggggagtacggccgcaaggttaaaactcaaatgaattgacgggggcccgcacaagcggtggagcatgtggtttaattcgaagcaacgcgaagaaccttaccaggccttgacatccaatgaactttccagagatggattggtgccttcgggagcattgagacaggtgctgcatggctgtcgtcagctcgtgtcgtgagatgttgggttaagtcccgtaacgagcgcaacccttgtccttagttaccagcacgtgatggtgggcactctaaggagactgccggtgacaaaccggaggaaggtggggatgacgtcaagtcatcatggcccttacggcctgggctacacacgtgctacaatggtcggtacagagggttgccaagccgcgaggtggagctaatcccataaaaccgatcgtagtccggatcgcagtctgcaactcgactgcgtgaagtcggaatcgctagtaatcgcgaatcagaatgtcgcggtgaatacgttcccgggccttgtacacaccgcccgtcacaccatgggagtgggttgcaccagaagtagctagtctaaccttcggggggacggttaccacggtgtgattcatgactggggtg

SEQ ID NO: 2758 - DNA, 1461 bp, unidentified
  source 1..1461: mol_type = unassigned DNA; note = Pseudomonas meliae
attgaacgctggcggcaggcctaacacatgcaagtcgagcggcagcacgggtacttgtacctggtggcgagcggcggacgggtgagtaatgcctaggaatctgcctggtagtgggggataacgctcggaaacggacgctaataccgcatacgtcctacgggagaaagcaggggaccttcgggccttgcgctatcagatgagcctaggtcggattagctagttggtgaggtaatggctcaccaaggcgacgatccgtaactggtctgagaggatgatcagtcacactggaactgagacacggtccagactcctacgggaggcagcagtggggaatattggacaatgggcgaaagcctgatccagccatgccgcgtgtgtgaagaaggtcttcggattgtaaagcactttaagttgggaggaagggcagttacctaatacgtgattgttttgacgttaccgacagaataagcaccggctaactctgtgccagcagccgcggtaatacagagggtgcaagcgttaatcggaattactgggcgtaaagcgcgcgtaggtggtttgttaagttggatgtgaaatccccgggctcaacctgggaactgcatccaaaactggcaagctagagtatggtagagggtggtggaatttcctgtgtagcggtgaaatgcgtagatataggaaggaacaccagtggcgaaggcgaccacctggactgatactgacactgaggtgcgaaagcgtggggagcaaacaggattagataccctggtagtccacgccgtaaacgatgtcaactagccgttgggagccttgagctcttagtggcgcagctaacgcattaagttgaccgcctggggagtacggccgcaaggttaaaactcaaatgaattgacgggggcccgcacaagcggtggagcatgtggtttaattcgaagcaacgcgaagaaccttaccaggccttgacatccaatgaactttccagagatggattggtgccttcgggaacattgagacaggtgctgcatggctgtcgtcagctcgtgtcgtgagatgttgggttaagtcccgtaacgagcgcaacccttgtccttagttaccagcacgtaatggtgggcactctaaggagactgccggtgacaaaccggaggaaggtggggatgacgtcaagtcatcatggcccttacggcctgggctacacacgtgctacaatggtcggtacagagggttgccaagccgcgaggtggagctaatctcacaaaaccgatcgtagtccggatcgcagtctgcaactcgactgcgtgaagtcggaatcgctagtaatcgcgaatcagaatgtcgcggtgaatacgttcccgggccttgtacacaccgcccgtcacaccatgggagtgggttgcaccagaagtagctagtctaaccttcggggggacggttaccacggtgtgattcatgactggggtg

SEQ ID NO: 2759 - DNA, 1458 bp, Pseudomonas mendocina
  source 1..1458: mol_type = unassigned DNA
attgaacgctggcggcaggcctaacacatgcaagtcgagcggatgaagagagcttgctctctgatttagcggcggacgggtgagtaatgcctaggaatctgcctggtagtgggggataacgttccgaaaggaacgctaataccgcgtacgtcctacgggagaaagcaggggaccttcgggccttgcgctatcagatgagcctaggtcggattagctagttggtgaggtaatggctcaccaaggcgacgatccgtaactggtctgagaggatgatcagtcacactggaactgagacacggtccagactcctacgggaggcagcagtggggaatattggacaatgggcgaaagcctgatccagccatgccgcgtgtgtgaagaaggtcttcggattgtaaagcactttaagttgggaggaagggcattaacctaatacgttagtgttttgacgttaccaacagaataagcaccggctaacttcgtgccagcagccgcggtaatacgaagggtgcaagcgttaatcggaattactgggcgtaaagcgcgcgtaggtggttcgttaagttggatgtgaaagccccgggctcaacctgggaactgcatccaaaactggcgagctagagtacggtagagggtggtggaatttcctgtgtagcggtgaaatgcgtagatataggaaggaacaccagtggcgaaggcgaccacctggactgatactgacactgaggtgcgaaagcgtggggagcaaacaggattagataccctggtagtccacgccgtaaacgatgtcaactagccgttggaatccttgagattttagtggcgcagctaacgcattaagttgaccgcctggggagtacggccgcaaggttaaaactcaaatgaattgacgggggcccgcacaagcggtggagcatgtggtttaattcgaagcaacgcgaagaaccttacctggccttgacatgctgagaactttccagagatggattggtgccttcgggaactcagacacaggtgctgcatggctgtcgtcagctcgtgtcgtgagatgttgggttaagtcccgtaacgagcgcaacccttgtccttagttaccagcacctcgggtgggcactctaaggagactgccggtgacaaaccggaggaaggtggggatgacgtcaagtcatcatggcccttacggccagggctacacacgtgctacaatggtcggtacaaagggttgccaagccgcgaggtggagctaatcccataaaaccgatcgtagtccggatcgcagtctgcaactcgactgcgtgaagtcggaatcgctagtaatcgtgaatcagaatgtcacggtgaatacgttcccgggccttgtacacaccgcccgtcacaccatgggagtgggttgctccagaagtagctagtctaaccttcggggggacggttaccacggagtgattcatgactggggtg

SEQ ID NO: 2760 - DNA, 1454 bp, unidentified
  source 1..1454: mol_type = unassigned DNA; note = Pseudomonas mesoacidophila
attgaacgctggcggcatgccttacacatgcaagtcgaacggcagcacgggtgcttgcacctggtggcgagtggcgaacgggtgagtaatacatcggaacatgtcctgtagtgggggatagcccggcgaaagccggattaataccgcatacgatctacggatgaaagcgggggaccttcgggcctcgcgctatagggttggccgatggctgattagctagttggtggggtaaaggcctaccaaggcgacgatcagtagctggtctgagaggacgaccagccacactgggactgagacacggcccagactcctacgggaggcagcagtggggaattttggacaatgggggaaaccctgatccagcaatgccgcgtgtgtgaagaaggccttcgggttgtaaagcacttttgtccggaaagaaatccttgatcctaatatggtcgggggatgacggtaccggaagaataagcaccggctaactacgtgccagcagccgcggtaatacgtagggtgcgagcgttaatcggaattactgggcgtaaagcgtgcgcaggcggtttgctaagaccgatgtgaaatccccgggctcaacctgggaactgcattggtgactggcaggctagagcatggcagaggggggtagaattccacgtgtagcagtgaaatgcgtagagatgtggaggaataccgatggcgaaggcagccccctgggccaatactgacgctcatgcacgaaagcgtggggagcaaacaggattagataccctggtagtccacgccctaaacgatgtcaactagttgttggggattcatttccttagtaacgtagctaacgcgtgaagttgaccgcctggggagtacggtcgcaagattaaaactcaaaggaattgacggggacccgcacaagcggtggatgatgtggattaattcgatgcaacgcgaaaaaccttacctacccttgacatggtcggaatcccgaagagattcgggagtgctcgaaagagaaccggcgcacaggtgctgcatggctgtcgtcagctcgtgtcgtgagatgttgggttaagtcccgcaacgagcgcaacccttgtccttagttgctacgcaagagcactctaaggagactgccggtgacaaaccggaggaaggtggggatgacgtcaagtcctcatggcccttatgggtagggcttcacacgtcatacaatggtcggaacagagggtcccaacccgcgagggggagctaatcccagaaaaccgatcgtagtccggattgcactctgcaactcgagtgcatgaagctggaatcgctagtaatcgcggatcagcatgccgcggtgaatacgttcccgggtcttgtacacaccgcccgtcacaccatgggagtgggttttaccagaagtggctagtctaaccgcaaggaggacggtcaccacggtaggattcatgactggggtg

SEQ ID NO: 2761 - DNA, 1459 bp, Pseudomonas mohnii
  source 1..1459: mol_type = unassigned DNA
attgaacgctggcggcaggcctaacacatgcaagtcgagcggatgaagagagcttgctctctgattcagcggcggacgggtgagtaatgcctaggaatctgcctggtagtgggggacaacgtctcgaaagggacgctaataccgcatacgtcctacgggagaaagcaggggaccttcgggccttgcgctatcagatgagcctaggtcggattagctagttggtgaggtaatggctcaccaaggcgacgatccgtaactggtctgagaggatgatcagtcacactggaactgagacacggtccagactcctacgggaggcagcagtggggaatattggacaatgggcgaaagcctgatccagccatgccgcgtgtgtgaagaaggtcttcggattgtaaagcactttaagttgggaggaagggcagtaacttaatacgttgctgttttgacgttaccgacagaataagcaccggctaactctgtgccagcagccgcggtaatacagagggtgcaagcgttaatcggaattactgggcgtaaagcgcgcgtaggtggtttgttaagttggatgtgaaagccccgggctcaacctgggaactgcattcaaaactgacaagctagagtatggtagagggtggtggaatttcctgtgtagcggtgaaatgcgtagatataggaaggaacaccagtggcgaaggcgaccacctggactgatactgacactgaggtgcgaaagcgtggggagcaaacaggattagataccctggtagtccacgccgtaaacgatgtcaactagccgttgggagccttgagctcttagtggcgcagctaacgcattaagttgaccgcctggggagtacggccgcaaggttaaaactcaaatgaattgacgggggcccgcacaagcggtggagcatgtggtttaattcgaagcaacgcgaagaaccttaccaggccttgacatccaatgaactttccagagatggattggtgccttcgggaacattgagacaggtgctgcatggctgtcgtcagctcgtgtcgtgagatgttgggttaagtcccgtaacgagcgcaacccttgtccttagttaccagcacgttatggtgggcactctaaggagactgccggtgacaaaccggaggaaggtggggatgacgtcaagtcatcatggcccttacggcctgggctacacacgtgctacaatggtcggtacagagggttgccaagccgcgaggtggagctaatcccacaaaaccgatcgtagtccggatcgcagtctgcaactcgactgcgtgaagtcggaatcgctagtaatcgcgaatcagaatgtcgcggtgaatacgttcccgggccttgtacacaccgcccgtcacaccatgggagtgggttgcaccagaagtagctagtctaaccttcgggaggacggttaccacggtgtgattcatgactggggtg

SEQ ID NO: 2762 - DNA, 1459 bp, Pseudomonas moorei
  source 1..1459: mol_type = unassigned DNA
attgaacgctggcggcaggcctaacacatgcaagtcgagcggatgaagagagcttgctctctgattcagcggcggacgggtgagtaatgcctaggaatctgcctggtagtgggggacaacgtttcgaaaggaacgctaataccgcatacgtcctacgggagaaagcaggggaccttcgggccttgcgctatcagatgagcctaggtcggattagctagttggtgaggtaatggctcaccaaggcgacgatccgtaactggtctgagaggatgatcagtcacactggaactgagacacggtccagactcctacgggaggcagcagtggggaatattggacaatgggcgaaagcctgatccagccatgccgcgtgtgtgaagaaggtcttcggattgtaaagcactttaagttgggaggaagggywgtarmttaayackytgcwrttttgacgttaccgacagaataagcaccggctaactctgtgccagcagccgcggtaatacagagggtgcaagcgttaatcggaattactgggcgtaaagcgcgcgtaggtggtttgttaagttggatgtgaaagccccgggctcaacctgggaactgcattcaaaactgacaagctagagtatggtagagggtggtggaatttcctgtgtagcggtgaaatgcgtagatataggaaggaacaccagtggcgaaggcgaccacctggactgatactgacactgaggtgcgaaagcgtggggagcaaacaggattagataccctggtagtccacgccgtaaacgatgtcaactagccgttgggagccttgagctcttagtggcgcagctaacgcattaagttgaccgcctggggagtacggccgcaaggttaaaactcaaatgaattgacgggggcccgcacaagcggtggagcatgtggtttaattcgaagcaacgcgaagaaccttaccaggccttgacatccaatgaayytycyagagatrgmkkrgtgccttcgggaacattgagacaggtgctgcatggctgtcgtcagctcgtgtcgtgagatgttgggttaagtcccgtaacgagcgcaacccttgtccttagttaccagcacgttatggtgggcactctaaggagactgccggtgacaaaccggaggaaggtggggatgacgtcaagtcatcatggcccttacggcctgggctacacacgtgctacaatggtcggtacagagggttgccaagccgcgaggtggagctaatcccataaaaccgatcgtagtccggatcgcagtctgcaactcgactgcgtgaagtcggaatcgctagtaatcgcgaatcagaatgtcgcggtgaatacgttcccgggccttgtacacaccgcccgtcacaccatgggagtgggttgcaccagaagtagctagtctaaccttcggggggacggttaccacggtgtgattcatgactggggtg

SEQ ID NO: 2763 - DNA, 1459 bp, Pseudomonas moraviensis
  source 1..1459: mol_type = unassigned DNA
attgaacgctggcggcaggcctaacacatgcaagtcgagcggatgaaaggagcttgctcctggattcagcggcggacgggtgagtaatgcctaggaatctgcctggtagtgggggacaacgtttcgaaaggaacgctaataccgcatacgtcctacgggagaaagcaggggaccttcgggccttgcgctatcagatgagcctaggtcggattagctagttggtgaggtaatggctcaccaaggcgacgatccgtaactggtctgagaggatgatcagtcacactggaactgagacacggtccagactcctacgggaggcagcagtggggaatattggacaatgggcgaaagcctgatccagccatgccgcgtgtgtgaagaaggtcttcggattgtaaagcactttaagttgggaggaagggttgtagattaatactaatgcattttgacgttaccgacagaataagcaccggctaactctgtgccagcagccgcggtaatacagagggtgcaagcgttaatcggaattactgggcgtaaagcgcgcgtaggtggtttgttaagttggatgtgaaatccccgggctcaacctgggaactgcatccaaaactggcaagctagagtatggtagagggtggtggaatttcctgtgtagcggtgaaatgcgtagatataggaaggaacaccagtggcgaaggcgaccacctggactgatactgacactgaggtgcgaaagcgtggggagcaaacaggattagataccctggtagtccacgccgtaaacgatgtcaactagccgttgggagccttgagctcttagtggcgcagctaacgcattaagttgaccgcctggggagtacggccgcaaggttaaaactcaaatgaattgacgggggcccgcacaagcggtggagcatgtggtttaattcgaagcaacgcgaagaaccttaccaggccttgacatccaatgaactttccagagatggattggtgccttcgggaacattgagacaggtgctgcatggctgtcgtcagctcgtgtcgtgagatgttgggttaagtcccgtaacgagcgcaacccttgtccttagttaccagcacgttatggtgggcactctaaggagactgccggtgacaaaccggaggaaggtggggatgacgtcaagtcatcatggcccttacggcctgggctacacacgtgctacaatggtcggtacaaagggttgccaagccgcgaggtggagctaatcccataaaaccgatcgtagtccggatcgcagtctgcaactcgactgcgtgaagtcggaatcgctagtaatcgcgaatcagaatgtcgcggtgaatacgttcccgggccttgtacacaccgcccgtcacaccatgggagtgggttgcaccagaagtagctagtctaaccttcgggaggacggttaccacggtgtgattcatgactggggtg

SEQ ID NO: 2764 - DNA, 1459 bp, Pseudomonas mucidolens
  source 1..1459: mol_type = unassigned DNA
attgaacgctggcggcaggcctaacacatgcaagtcgagcggtagagagaagcttgcttctcttgagagcggcggacgggtgagtaatgcctaggaatctgcctggtagtgggggataacgttcggaaacggacgctaataccgcatacgtcctacgggagaaagcaggggaccttcgggccttgcgctatcagatgagcctaggtcggattagctagttggtggggtaatggctcaccaaggcgacgatccgtaactggtctgagaggatgatcagtcacactggaactgagacacggtccagactcctacgggaggcagcagtggggaatattggacaatgggcgaaagcctgatccagccatgccgcgtgtgtgaagaaggtcttcggattgtaaagcactttaagttgggaggaagggttgtagattaatactctgcaattttgacgttaccgacagaataagcaccggctaactctgtgccagcagccgcggtaatacagagggtgcaagcgttaatcggaattactgggcgtaaagcgcgcgtaggtggtttgttaagttggatgtgaaatccccgggctcaacctgggaactgcattcaaaactgactgactagagtatggtagagggtggtggaatttcctgtgtagcggtgaaatgcgtagatataggaaggaacaccagtggcgaaggcgaccacctggactgatactgacactgaggtgcgaaagcgtggggagcaaacaggattagataccctggtagtccacgccgtaaacgatgtcaactagccgttgggagccttgagctcttagtggcgcagctaacgcattaagttgaccgcctggggagtacggccgcaaggttaaaactcaaatgaattgacgggggcccgcacaagcggtggagcatgtggtttaattcgaagcaacgcgaagaaccttaccaggccttgacatccaatgaactttctagagatagattggtgccttcgggaacattgagacaggtgctgcatggctgtcgtcagctcgtgtcgtgagatgttgggttaagtcccgtaacgagcgcaacccttgtccttagttaccagcacgtaatggtgggcactctaaggagactgccggtgacaagccggaggaaggtggggatgacgtcaagtcatcatggcccttacggcctgggctacacacgtgctacaatggtcggtacaaagggttgccaagccgcgaggtggagctaatcccataaaaccgatcgtagtccggatcgcagtctgcaactcgactgcgtgaagtcggaatcgctagtaatcgcgaatcagaatgtcgcggtgaatacgttcccgggccttgtacacaccgcccgtcacaccatgggagtgggttgcaccagaagtagctagtctaaccttcgggaggacggttaccacggtgtgattcatgactggggtg

SEQ ID NO: 2765 - DNA, 1459 bp, Pseudomonas nitroreducens
  source 1..1459: mol_type = unassigned DNA
  misc_difference 1361: note = n is a, c, g, or t
attgaacgctggcggcaggcctaacacatgcaagtcgagcggatgatgggagcttgctcccggattcagcggcggacgggtgagtaatgcctaggaatctgcctggtagtgggggacaacgtttcgaaaggaacgctaataccgcatacgtcctacgggagaaagcaggggaccttcgggccttgcgctatcagatgagcctaggtcggattagctagttggtggggtaaaggcctaccaaggcgacgatccgtaactggtctgagaggatgatcagtcacactggaactgagacacggtccagactcctacgggaggcagcagtggggaatattggacaatgggcgaaagcctgatccagccatgccgcgtgtgtgaagaaggtcttcggattgtaaagcactttaagttgggaggaagggcagtaagttaataccttgctgttttgacgttaccaacagaataagcaccggctaacttcgtgccagcagccgcggtaatacgaagggtgcaagcgttaatcggaattactgggcgtaaagcgcgcgtaggtggtttggtaagatggatgtgaaatccccgggctcaacctgggaactgcatccataactgcctgactagagtacggtagagggtggtggaatttcctgtgtagcggtgaaatgcgtagatataggaaggaacaccagtggcgaaggcgaccacctggactgatactgacactgaggtgcgaaagcgtggggagcaaacaggattagataccctggtagtccacgccgtaaacgatgtcgactagccgttggaatccttgagattttagtggcgcagctaacgcgataagtcgaccgcctggggagtacggccgcaaggttaaaactcaaatgaattgacgggggcccgcacaagcggtggagcatgtggtttaattcgaagcaacgcgaagaaccttacctggccttgacatgtccggaaccttgcagagatgcgagggtgccttcgggaatcggaacacaggtgctgcatggctgtcgtcagctcgtgtcgtgagatgttgggttaagtcccgtaacgagcgcaacccttgtccttagttaccagcacgttatggtgggcactctaaggagactgccggtgacaaaccggaggaaggtggggatgacgtcaagtcatcatggcccttacggccagggctacacacgtgctacaatggtcggtacagagggttgccaagccgcgaggtggagctaatcccataaaaccgatcgtagtccggatcgcagtctgcaactcgactgcgtgaagtcggaatcgctagtaatcgtgaatcagaatgtcacggtgaatacgttcccgggccttgnacacaccgcccgtcacaccatgggagtgggttgctccagaagtagctagtctaaccgcaagggggacggttaccacggagtgattcatgactggggtg

SEQ ID NO: 2766 - DNA, 1459 bp, Pseudomonas orientalis
  source 1..1459: mol_type = unassigned DNA
attgaacgctggcggcaggcctaacacatgcaagtcgagcggtagagagaagcttgcttctcttgagagcggcggacgggtgagtaaagcctaggaatctgcctggtagtgggggataacgttcggaaacggacgctaataccgcatacgtcctacgggagaaagcaggggaccttcgggccttgcgctatcagatgagcctaggtcggattagctagttggtgaggtaatggctcaccaaggcgacgatccgtaactggtctgagaggatgatcagtcacactggaactgagacacggtccagactcctacgggaggcagcagtggggaatattggacaatgggcgaaagcctgatccagccatgccgcgtgtgtgaagaaggtcttcggattgtaaagcactttaagttgggaggaagggcagttacttaatacgtgattgttttgacgttaccgacagaataagcaccggctaactctgtgccagcagccgcggtaatacagagggtgcaagcgttaatcggaattactgggcgtaaagcgcgcgtaggtggtttgttaagttggatgtgaaatccccgggctcaacctgggaactgcattcaaaactgactgactagagtgtggtagagggtggtggaatttcctgtgtagcggtgaaatgcgtagatataggaaggaacaccagtggcgaaggcgaccacctggaccaacactgacactgaggtgcgaaagcgtggggagcaaacaggattagataccctggtagtccacgccgtaaacgatgtcaactagccgttgggagccttgagctcttagtggcgcagctaacgcattaagttgaccgcctggggagtacggccgcaaggttaaaactcaaatgaattgacgggggcccgcacaagcggtggagcatgtggtttaattcgaagcaacgcgaagaaccttaccaggccttgacatccaatgaactttctagagatagattggtgccttcgggaacattgagacaggtgctgcatggctgtcgtcagctcgtgtcgtgagatgttgggttaagtcccgtaacgagcgcaacccttgtccttagttaccagcacgtaatggtgggcactctaaggagactgccggtgacaaaccggaggaaggtggggatgacgtcaagtcatcatggcccttacggcctgggctacacacgtgctacaatggtcggtacagagggttgccaagccgcgaggtggagctaatcccacaaaaccgatcgtagtccggatcgcagtctgcaactcgactgcgtgaagtcggaatcgctagtaatcgcgaatcagaatgtcgcggtgaatacgttcccgggccttgtacacaccgcccgtcacaccatgggagtgggttgcaccagaagtagctagtctaaccttcgggaggacggttaccacggtgtgattcatgactggggtg

SEQ ID NO: 2767 - DNA, 1459 bp, unidentified
  source 1..1459: mol_type = unassigned DNA; note = Pseudomonas oryzae
attgaacgctggcggcaggcctaacacatgcaagtcgagcggatgaggggagcttgcttcctgattcagcggcggacgggtgagtaatgcctaggaatctgcccgatagtgggggacaacgtttcgaaaggaacgctaataccgcatacgtcctacgggagaaagtgggggatcttcggacctcacgctatcggatgagcctaggtcggattagctagttggtggggtaatggctcaccaaggcgacgatccgtaactggtctgagaggatgatcagtcacactggaactgagacacggtccagactcctacgggaggcagcagtggggaatattggacaatgggcgaaagcctgatccagccatgccgcgtgtgtgaagaaggtcttcggattgtaaagcactttaagttgggaggaagggctgccggttaataccctgcagttttgacgttaccaacagaataagcaccggctaacttcgtgccagcagccgcggtaatacgaagggtgcaagcgttaatcggaattactgggcgtaaagcgcgcgtaggtggttcagcaagttggatgtgaaagccccgggctcaacctgggaactgcatccaaaactactgggctagagtacggtagagggtggtggaatttcctgtgtagcggtgaaatgcgtagatataggaaggaacaccagtggcgaaggcgaccacctggactgatactgacactgaggtgcgaaagcgtggggagcaaacaggattagataccctggtagtccacgccgtaaacgatgtcaactagctgttgggttccttgagaacttagtagcgcagctaacgcgataagttgaccgcctggggagtacggccgcaaggttaaaactcaaatgaattgacgggggcccgcacaagcggtggagcatgtggtttaattcgaagcaacgcgaagaaccttacctggccttgacatgctgagaactttccagagatggattggtgccttcgggaactcagacacaggtgctgcatggctgtcgtcagctcgtgtcgtgagatgttgggttaagtcccgtaacgagcgcaacccttgtccttagttaccagcacgttatggtgggcactctaaggagactgccggtgacaaaccggaggaaggtggggatgacgtcaagtcatcatggcccttacggccagggctacacacgtgctacaatggtcggtacagagggttgccaagccgcgaggtggagctaatctcacaaaaccgatcgtagtccggatcgcagtctgcaactcgactgcgtgaagtcggaatcgctagtaatcgtgaatcagaatgtcacggtgaatacgttcccgggccttgtacacaccgcccgtcacaccatgggagtgggttgctccagaagtagctagtctaaccttcggggggacggttaccacggagtgattcatgactggggtg

SEQ ID NO: 2768 - DNA, 1458 bp, Pseudomonas otitidis
  source 1..1458: mol_type = unassigned DNA
attgaacgctggcggcaggcctaacacatgcaagtcgagcggatgagtggagcttgctccatgattcagcggcggacgggtgagtaatgcctaggaatctgcctggtagtgggggataacgtttcgaaaggaacgctaataccgcatacgtcctacgggagaaagtgggggatcttcggacctcacgctatcagatgagcctaggtcggattagctagttggtggggtaatggcccaccaaggcgacgatccgtaactggtctgagaggatgatcagtcacactggaactgagacacggtccagactcctacgggaggcagcagtggggaatattggacaatgggcgaaagcctgatccagccatgccgcgtgtgtgaagaaggtcttcggattgtaaagcactttaagttgggaggaagagcagtaagttaataccttgctgttttgacgttaccaacagaataagcaccggctaacttcgtgccagcagccgcggtaatacgaagggtgcaagcgttaatcggaattactgggcgtaaagcgcgcgtaggtggttcagcaagttggatgtgaaagccccgggctcaacctgggaattgcatccaaaactactgagctagagtacggtagagggtggtggaatttcctgtgtagcggtgaaatgcgtagatataggaaggaacaccagtggcgaaggcgaccacctggactgatactgacactgaggtgcgaaagcgtggggagcaaacaggattagataccctggtagtccacgccgtaaacgatgtcgactagccgttgggatccttgagatcttagtggcgcagctaacgcgataagtcgaccgcctggggagtacggccgcaaggttaaaactcaaatgaattgacgggggcccgcacaagcggtggagcatgtggtttaattcgaagcaacgcgaagaaccttacctggccttgacatgcagagaactttccagagatggattggtgccttcgggaactctgacacaggtgctgcatggctgtcgtcagctcgtgtcgtgagatgttgggttaagtcccgtaacgagcgcaacccttgtccttagttaccagcacctcgggtgggcactctaaggagactgccggtgacaaaccggaggaaggtggggatgacgtcaagtcatcatggcccttacggccagggctacacacgtgctacaatggtcggtacaaagggttgccaagccgcgaggtggagctaatcccataaaaccgatcgtagtccggatcgcagtctgcaactcgactgcgtgaagtcggaatcgctagtaatcgtgaatcagaatgtcacggtgaatacgttcccgggccttgtacacaccgcccgtcacaccatgggagtgggttgctccagaagtagctagtctaaccgcaaggaggacggttaccacggagtgattcatgactggggtg

SEQ ID NO: 2769 - DNA, 1408 bp, Pseudomonas palleroniana
  source 1..1408: mol_type = unassigned DNA
agtcgagcggtagagagaagcttgcttctcttgagagcggcggacgggtgagtaatgcctaggaatctgcctggtagtgggggataacgtccggaaacggacgctaataccgcatacgtcctacgggagaaagcaggggaccttcgggccttgcgctatcagatgagcctaggtcggattagctagttggtgaggtaatggctcaccaaggcgacgatccgtaactggtctgagaggatgatcagtcacactggaactgagacacggtccagactcctacgggaggcagcagtggggaatattggacaatgggcgaaagcctgatccagccatgccgcgtgtgtgaagaaggtcttcggattgtaaagcactttaagttgggaggaagggcagttgcctaatacgtaactgttttgacgttaccgacagaataagcaccggctaactctgtgccagcagccgcggtaatacagagggtgcaagcgttaatcggaattactgggcgtaaagcgcgcgtaggtggtttgttaagttggatgtgaaatccccgggctcaacctgggaactgcattcaaaactgactgactagagtatggtagagggtggtggaatttcctgtgtagcggtgaaatgcgtagatataggaaggaacaccagtggcgaaggcgaccacctggactgatactgacactgaggtgcgaaagcgtggggagcaaacaggattagataccctggtagtccacgccgtaaacgatgtcaactagccgttggaagccttgagcttttagtggcgcagctaacgcattaagttgaccgcctggggagtacggccgcaaggttaaaactcaaatgaattgacgggggcccgcacaagcggtggagcatgtggtttaattcgaagcaacgcgaagaaccttaccaggccttgacatccaatgaactttccagagatggattggtgccttcgggaacattaagacaggtgctgcatggctgtcgtcagctcgtgtcgtgagatgttgggttaagtcccgtaacgagcgcaacccttgtccttagttaccagcacgttatggtgggcactctaaggagactgccggtgacaaaccggaggaaggtggggatgacgtcaagtcatcatggcccttacggcctgggctacacacgtgctacaatggtcggtacaaagggttgccaagccgcgaggtgaagctaatcccataaaaccgatcgtagtccggatcgcagtctgcaactcgactgcgtgaagtcggaatcgctagtaatcgcgaatcagaatgtcgcggtgaatacgttcccgggccttgtacacaccgcccgtcacaccatgggagtgggttgcaccagaagtagctagtctaacctcgggaggacggttaccacggtg

SEQ ID NO: 2770 - DNA, 1459 bp, Pseudomonas panacis
  source 1..1459: mol_type = unassigned DNA
  misc_difference 1016: note = n is a, c, g, or t
attgaacgctggcggcaggcctaacacatgcaagtcgagcggtagagagaagcttgcttctcttgagagcggcggacgggtgagtaatgcctaggaatctgcctggtagtgggggataacgttcggaaacggacgctaataccgcatacgtcctacgggagaaagcaggggaccttcgggccttgcgctatcagatgagcctaggtcggattagctagttggtggggtaatggctcaccaaggcgacgatccgtaactggtctgagaggatgatcagtcacactggaactgagacacggtccagactcctacgggaggcagcagtggggaatattggacaatgggcgaaagcctgatccagccatgccgcgtgtgtgaagaaggtcttcggattgtaaagcactttaagttgggaggaagggcagtaaattaatactttgctgttttgacgttaccgacagaataagcaccggctaactctgtgccagcagccgcggtaatacagagggtgcaagcgttaatcggaattactgggcgtaaagcgcgcgtaggtggtttgttaagttggatgtgaaatccccgggctcaacctgggaaccgcattcaaaactgactgactagagtatggtagagggtggtggaatttcctgtgtagcggtgatatgcgtagatataggaaggaacaccagtggcgaaggcgaccacctggactgatactgacactgaggtgcgaaagcgtggggagcaaacaggattagataccctggtagtccacgccgtaaacgatgtcaactagccgttgggagccttgagctcttagtggcgcagctaacgcattaagttgaccgcctggggagtacggccgcaaggttaaaactcaaatgaattgacgggggcccgcacaagcggtggagcatgtggtttaattcgaagcaacgcgaagaaccttaccaggccttgacatccaatgaactttccagagatggatgggtgccttcgggaacattgagacaggngctgcatggctgtcgtcagctcgtgtcgtgagatgttgggttaagtcccgtaacgagcgcaacccttgtccttagttaccagcacgtaatggtgggcactctaaggagactgccggtgacaaaccggaggaaggtggggatgacgtcaagtcatcatggcccttacggcctgggctacacacgtgctacaatggtcggtacagagggttgccaagccgcgaggtggagctaatcccagaaaaccgatcgtagtccggatcgcagtctgcaactcgactgcgtgaagtcggaatcgctagtaaccgcgaatcagaatgtcgcggtgaatacgttcccgggccttgtacacaccgcccgtcacaccatgggagtgggttgcaccagaagtagctagtctaaccttcgggaggacggttaccacggtgtgattcatgactggggtg

SEQ ID NO: 2771 - DNA, 1459 bp, Pseudomonas panipatensis
  source 1..1459: mol_type = unassigned DNA
attgaacgctggcggcaggcctaacacatgcaagtcgagcggatgaagagagcttgctctctgattcagcggcggacgggtgagtaatgcctaggaatctgcctggtagtgggggacaacgtttcgaaaggaacgctaataccgcatacgtcctacgggagaaagtgggggatcttcggacctcacgctatcagatgagcctaggtcggattagctagttggtggggtaaaggcctaccaaggcgacgatccgtaactggtctgagaggatgatcagtcacactggaactgagacacggtccagactcctacgggaggcagcagtggggaatattggacaatgggcgaaagcctgatccagccatgccgcgtgtgtgaagaaggtcttcggattgtaaagcactttaagttgggaggaagggcagtaagttaataccttgctgttttgacgttaccgacagaataagcaccggctaacttcgtgccagcagccgcggtaatacgaagggtgcaagcgttaatcggaattactgggcgtaaagcgcgcgtaggtggtttggtaagatggatgtgaaatccccgggctcaacctgggaactgcatccataactgcctgactagagtacggtagagggtggtggaatttcctgtgtagcggtgaaatgcgtagatataggaaggaacaccagtggcgaaggcgaccacctggactgatactgacactgaggtgcgaaagcgtggggagcaaacaggattagataccctggtagtccacgccgtaaacgatgtcgactagccgttgggatccttgagatcttagtggcgcagctaacgcgataagtcgaccgcctggggagtacggccgcaaggttaaaactcaaatgaattgacgggggcccgcacaagcggtggagcatgtggtttaattcgaagcaacgcgaagaaccttacctggccttgacatgtccggaatcctgcagagatgcgggagtgccttcgggaatcggaacacaggtgctgcatggctgtcgtcagctcgtgtcgtgagatgttgggttaagtcccgtaacgagcgcaacccttgtccttagttaccagcacgttaaggtgggcactctaaggagactgccggtgacaaaccggaggaaggtggggatgacgtcaagtcatcatggcccttacggccagggctacacacgtgctacaatggtcggtacagagggttgccaagccgcgaggtggagctaatcccacaaaaccgatcgtagtccggatcgcagtctgcaactcgactgcgtgaagtcggaatcgctagtaatcgtgaatcagaatgtcacggtgaatacgttcccgggccttgtacacaccgcccgtcacaccatgggagtgggttgctccagaagtagctagtctaaccgcaagggggacggttaccacggagtgattcatgactggggtg

SEQ ID NO: 2772 - DNA, 1459 bp, Pseudomonas parafulva
  source 1..1459: mol_type = unassigned DNA
attgaacgctggcggcaggcctaacacatgcaagtcgagcggatgacgggagcttgctccttgattcagcggcggacgggtgagtaatgcctaggaatctgcctggtagtgggggacaacgtttcgaaaggaacgctaataccgcatacgtcctacgggagaaagcaggggaccttcgggccttgcgctatcagatgagcctaggtcggattagcttgttggtgaggtaatggctcaccaaggcgacgatccgtaactggtctgagaggatgatcagtcacactggaactgagacacggtccagactcctacgggaggcagcagtggggaatattggacaatgggcgaaagcctgatccagccatgccgcgtgtgtgaagaaggtcttcggattgtaaagcactttaagttgggaggaagggttgtagattaatactctgcaattttgacgttaccgacagaataagcaccggctaactctgtgccagcagccgcggtaatacagagggtgcaagcgttaatcggaattactgggcgtaaagcgcgcgtaggtggtttgttaagttggatgtgaaagccccgggctcaacctgggaactgcatccaaaactggcaagctagagtacggtagagggtggtggaatttcctgtgtagcggtgaaatgcgtagatataggaaggaacaccagtggcgaaggcgaccacctggactgatactgacactgaggtgcgaaagcgtggggagcaaacaggattagataccctggtagtccacgccgtaaacgatgtcaactagccgttggaatccttgagattttagtggcgcagctaacgcattaagttgaccgcctggggagtacggccgcaaggttaaaactcaaatgaattgacgggggcccgcacaagcggtggagcatgtggtttaattcgaagcaacgcgaagaaccttaccaggccttgacatgcagagaactttccagagatggattggtgccttcgggaactctgacacaggtgctgcatggctgtcgtcagctcgtgtcgtgagatgttgggttaagtcccgtaacgagcgcaacccttgtccttagttaccagcacgttatggtgggcactctaaggagactgccggtgacaaaccggaggaaggtggggatgacgtcaagtcatcatggcccttacggcctgggctacacacgtgctacaatggtcggtacagagggttgccaagccgcgaggtggagctaatctcacaaaaccgatcgtagtccggatcgcagtctgcaactcgactgcgtgaagtcggaatcgctagtaatcgcgaatcagaatgtcgcggtgaatacgttcccgggccttgtacacaccgcccgtcacaccatgggagtgggttgcaccagaagtagctagtctaaccttcgggaggacggttaccacggtgtgattcatgactggggtg

SEQ ID NO: 2773 - DNA, 1420 bp, unidentified
  source 1..1420: mol_type = unassigned DNA; note = Pseudomonas paralactis
attgaacgctggcggcaggcctaacacatgcaagtcgagcggtagagagaagcttgcttctcttgagagcggcggacgggtgagtaatgcctaggaatctgcctggtagtgggggataacgttcggaaacggacgctaataccgcatacgtcctacgggagaaagcaggggaccttcgggccttgcgctatcagatgagcctaggtcggattagctagttggtgaggtaatggctcaccaaggcgacgatccgtaactggtctgagaggatgatcagtcacactggaactgagacacggtccagactcctacgggaggcagcagtggggaatattggacaatgggcgaaagcctgatccagccatgccgcgtgtgtgaagaaggtcttcggattgtaaagcactttaagttgggaggaagggttgtagattaatactctgcaattttgacgttaccgacagaataagcaccggctaactctgtgccagcagccgcggtaatacagagggtgcaagcgttaatcggaattactgggcgtaaagcgcgcgtaggtggtttgttaagttggatgtgaaatccccgggctcaacctgggaactgcattcaaaactgactgactagagtatggtagagggtggtggaatttcctgtgtagcggtgaaatgcgtagatataggaaggaacaccagtggcgaaggcgaccacctggactaatactgacactgaggtgcgaaagcgtggggagcaaacaggattagataccctggtagtccacgccgtaaacgatgtcaactagccgttggaagccttgagcttttagtggcgcagctaacgcattaagttgaccgcctggggagtacggccgcaaggttaaaactcaaatgaattgacgggggcccgcacaagcggtggagcatgtggtttaattcgaagcaacgcgaagaaccttaccaggccttgacatccaatgaactttctagagatagattggtgccttcgggaacattgagacaggtgctgcatggctgtcgtcagctcgtgtcgtgagatgttgggttaagtcccgtaacgagcgcaacccttgtccttagttaccagcacgtaatggtgggcactctaaggagactgccggtgacaaaccggaggaaggtggggatgacgtcaagtcatcatggcccttacggcctgggctacacacgtgctacaatggtcggtacagagggttgccaagccgcgaggtggagctaatcccataaaaccgatcgtagtccggatcgcagtctgcaactcgactgcgtgaagtcggaatcgctagtaatcgcgaatcagaatgtcgcggtgaatacgttcccgggccttgtacacaccgcccgtcacaccatgggagtgggttgcaccagaagtagctagtctaaccttc

SEQ ID NO: 2774 - DNA, 1459 bp, Pseudomonas pelagia
  source 1..1459: mol_type = unassigned DNA
attgaacgctggcggcaggcctaacacatgcaagtcgagcggtagagagaagcttgcttctcttgagagcggcggacgggtgagtaatacctgggaatctgcctgatagtgggggataacgttcggaaacggacgctaataccgcatacgtcctacgggagaaagcaggggatcttcggaccttgcgctatcagatgagcccaggtcggattagcttgttggtgaggtaaaggctcaccaaggcgacgatccgtaactggtctgagaggatgatcagtcacactggaactgagacacggtccagactcctacgggaggcagcagtggggaatattggacaatgggcgcaagcctgatccagccatgccgcgtgtgtgaagaaggtcttcggattgtaaagcactttaagttgggaggaagggctgatgcttaatacgtatcagtcttgacgttaccgacagaataagcaccggctaactctgtgccagcagccgcggtaatacagagggtgcaagcgttaatcggaattactgggcgtaaagcgcgcgtaggtggctaagtaagatgggtgtgaaatccccgggctcaacctgggaactgcatccataactgcttagctagagtacggtagagggtagtggaatttcctgtgtagcggtgaaatgcgtagatataggaaggaacaccagtggcgaaggcgactacctggactgatactgacactgaggtgcgaaagcgtggggagcaaacaggattagataccctggtagtccacgccgtaaacgatgtcaactagccgttgggaaccttgagttcttagtggcgcagctaacgcactaagttgaccgcctggggagtacggtcgcaagattaaaactcaaatgaattgacgggggcccgcacaagcggtggagcatgtggtttaattcgaagcaacgcgaagaaccttacctggccttgacatgctgagaactttccagagatggattggtgccttcgggaactcagacacaggtgctgcatggctgtcgtcagctcgtgtcgtgagatgttgggttaagtcccgtaacgagcgcaacccttgtccttagttaccagcacgtaatggtgggcactctaaggagactgccggtgacaaaccggaggaaggtggggatgacgtcaagtcatcatggcccttacggccagggctacacacgtgctacaatggggggtacaaagggttgccaagccgcgaggtggagctaatcccataaaacctctcgtagtccggatcggagtctgcaactcgactccgtgaagtcggaatcgctagtaatcgtggatcagaacgccacggtgaatacgttcccgggccttgtacacaccgcccgtcacaccatgggagtgggttgcaccagaagtagctagtctaaccttcgggaggacggttaccacggtgtgattcatgactggggtg

SEQ ID NO: 2775 - DNA, 1459 bp, Pseudomonas peli
  source 1..1459: mol_type = unassigned DNA
attgaacgctggcggcaggcctaacacatgcaagtcgagcggtagagagaagcttgcttctcttgagagcggcggacgggtgagtaatgcctaggaatctgcctagtggtgggggataacgttcggaaacggacgctaataccgcatacgtcctacgggagaaagcgggggaccttcgggcctcgcgccattagatgagcctaggtcggattagctagttggtgaggtaatggctcaccaaggcgacgatccgtaactggtctgagaggatgatcagtcacactggaactgagacacggtccagactcctacgggaggcagcagtggggaatattggacaatgggcgaaagcctgatccagccatgccgcgtgtgtgaagaaggtcttcggattgtaaagcactttaagttgggaggaagggtagtaacttaatacgttgctactttgacgttaccgacagaataagcaccggctaacttcgtgccagcagccgcggtaatacgaagggtgcaagcgttaatcggaattactgggcgtaaagcgcgcgtaggtggttcagtaagttggaagtgaaatccccgggctcaacctgggaactgctttcaaaactgctgagctagagtacggtagagggtggtggaatttcctgtgtagcggtgaaatgcgtagatataggaaggaacaccagtggcgaaggcgaccacctggactgatactgacactgaggtgcgaaagcgtggggagcaaacaggattagataccctggtagtccacgccgtaaacgatgtcaactagccgttgggagtcttgaactcttagtggcgcagctaacgcattaagttgaccgcctggggagtacggccgcaaggttaaaactcaaatgaattgacgggggcccgcacaagcggtggagcatgtggtttaattcgaagcaacgcgaagaaccttacctggccttgacatgctgagaactttctagagatagattggtgccttcgggaactcagacacaggtgctgcatggctgtcgtcagctcgtgtcgtgagatgttgggttaagtcccgtaacgagcgcaacccttgtccttagttaccagcacgtaatggtgggaactctaaggagactgccggtgacaaaccggaggaaggtggggatgacgtcaagtcatcatggcccttacggccagggctacacacgtgctacaatggtcggtacaaagggttgccaagccgcgaggtggagctaatcccataaaaccgatcgtagtccggatcgcagtctgcaactcgactgcgtgaagtcggaatcgctagtaatcgtgaatcagaatgtcacggtgaatacgttcccgggccttgtacacaccgcccgtcacaccatgggagtgggttgcaccagaagtagctagtctaaccgcaagggggacggttaccacggtgtgattcatgactggggtg

SEQ ID NO: 2776 - DNA, 1459 bp, Pseudomonas plecoglossicida
  source 1..1459: mol_type = unassigned DNA
attgaacgctggcggcaggcctaacacatgcaagtcgagcggatgacgggagcttgctccttgattcagcggcggacgggtgagtaatgcctaggaatctgcctggtagtgggggacaacgtttcgaaaggaacgctaataccgcatacgtcctacgggagaaagcaggggaccttcgggccttgcgctatcagatgagcctaggtcggattagctagttggtggggtaatggctcaccaaggcgacgatccgtaactggtctgagaggatgatcagtcacactggaactgagacacggtccagactcctacgggaggcagcagtggggaatattggacaatgggcgaaagcctgatccagccatgccgcgtgtgtgaagaaggtcttcggattgtaaagcactttaagttgggaggaagggcagtaagctaataccttgctgttttgacgttaccgacagaataagcaccggctaactctgtgccagcagccgcggtaatacagagggtgcaagcgttaatcggaattactgggcgtaaagcgcgcgtaggtggttcgttaagttggatgtgaaagccccgggctcaacctgggaactgcatccaaaactggcgagctagagtacggtagagggtggtggaatttcctgtgtagcggtgaaatgcgtagatataggaaggaacaccagtggcgaaggcgaccacctggactgatactgacactgaggtgcgaaagcgtggggagcaaacaggattagataccctggtagtccacgccgtaaacgatgtcaactagccgttggaatccttgagattttagtggcgcagctaacgcattaagttgaccgcctggggagtacggccgcaaggttaaaactcaaatgaattgacgggggcccgcacaagcggtggagcatgtggtttaattcgaagcaacgcgaagaaccttaccaggccttgacatgcagagaactttccagagatggattggtgccttcgggaactctgacacaggtgctgcatggctgtcgtcagctcgtgtcgtgagatgttgggttaagtcccgtaacgagcgcaacccttgtccttagttaccagcacgttatggtgggcactctaaggagactgccggtgacaaaccggaggaaggtggggatgacgtcaagtcatcatggcccttacggcctgggctacacacgtgctacaatggtcggtacagagggttgccaagccgcgaggtggagctaatctcacaaaaccgatcgtagtccggatcgcagtctgcaactcgactgcgtgaagtcggaatcgctagtaatcgcgaatcagaatgtcgcggtgaatacgttcccgggccttgtacacaccgcccgtcacaccatgggagtgggttgcaccagaagtagctagtctaaccttcgggaggacggttaccacggtgtgattcatgactggggtg

SEQ ID NO: 2777 - DNA, 1459 bp, Pseudomonas poae
  source 1..1459: mol_type = unassigned DNA
attgaacgctggcggcaggcctaacacatgcaagtcgagcggtagagagaagcttgcttctcttgagagcggcggacgggtgagtaatgcctaggaatctgcctggtagtgggggataacgttcggaaacggacgctaataccgcatacgtcctacgggagaaagcaggggaccttcgggccttgcgctatcagatgagcctaggtcggattagctagttggtggggtaatggctcaccaaggcgacgatccgtaactggtctgagaggatgatcagtcacactggaactgagacacggtccagactcctacgggaggcagcagtggggaatattggacaatgggcgaaagcctgatccagccatgccgcgtgtgtgaagaaggtcttcggattgtaaagcactttaagttgggaggaagggcagttacctaatacgtgattgttttgacgttaccgacagaataagcaccggctaactctgtgccagcagccgcggtaatacagagggtgcaagcgttaatcggaattactgggcgtaaagcgcgcgtaggtggtttgttaagttggatgtgaaatccccgggctcaacctgggaactgcattcaaaactgactgactagagtatggtagagggtggtggaatttcctgtgtagcggtgaaatgcgtagatataggaaggaacaccagtggcgaaggcgaccacctggactaatactgacactgaggtgcgaaagcgtggggagcaaacaggattagataccctggtagtccacgccgtaaacgatgtcaactagccgttggaagccttgagcttttagtggcgcagctaacgcattaagttgaccgcctggggagtacggccgcaaggttaaaactcaaatgaattgacgggggcccgcacaagcggtggagcatgtggtttaattcgaagcaacgcgaagaaccttaccaggccttgacatccaatgaactttctagagatagattggtgccttcgggaacattgagacaggtgctgcatggctgtcgtcagctcgtgtcgtgagatgttgggttaagtcccgtaacgagcgcaacccttgtccttagttaccagcacgtaatggtgggcactctaaggagactgccggtgacaaaccggaggaaggtggggatgacgtcaagtcatcatggcccttacggcctgggctacacacgtgctacaatggtcggtacagagggttgccaagccgcgaggtggagctaatcccataaaaccgatcgtagtccggatcgcagtctgcaactcgactgcgtgaagtcggaatcgctagtaatcgcgaatcagaatgtcgcggtgaatacgttcccgggccttgtacacaccgcccgtcacaccatgggagtgggttgcaccagaagtagctagtctaaccttcgggaggacggttaccacggtgtgattcatgactggggtg

SEQ ID NO: 2778 - DNA, 1459 bp, Pseudomonas pohangensis
  source 1..1459: mol_type = unassigned DNA
attgaacgctggcggcaggcctaacacatgcaagtcgagcggtagaagggagcttgcttcctttgagagcggcggacgggtgagtaaagcctaggaatctgcctggtagtgggggataacgttcggaaacggacgctaataccgcatacgtcctacgggagaaagtgggggatcttcggacctcacgctatcagatgagcctaggtcggattagctagttggtgaggtaatggctcaccaaggcgacgatccgtaactggtctgagaggatgatcagtcacactggaactgagacacggtccagactcctacgggaggcagcagtggggaatattggacaatgggcgcaagcctgatccagccatgccgcgtgtgtgaagaaggtcttcggattgtaaagcactttaagttgggaggaagggtagtagcttaatacgttgctactttgacgttaccgacagaataagcaccggctaactctgtgccagcagccgcggtaatacagagggtgcaagcgttaatcggaattactgggcgtaaagcgcgcgtaggtggttatgtaagttgaatgtgaaatccccgggctcaacctgggaactgcatccaaaactgcatggctagagtacggtagagggtggtggaatttcctgtgtagcggtgaaatgcgtagatataggaaggaacaccagtggcgaaggcgaccacctggactgatactgacactgaggtgcgaaagcgtggggagcaaacaggattagataccctggtagtccacgccgtaaacgatgtcaactagccgttgggttccttgagaacttagtggcgcagctaacgcattaagttgaccgcctggggagtacggccgcaaggttaaaactcaaatgaattgacgggggcccgcacaagcggtggagcatgtggtttaattcgaagcaacgcgaagaaccttaccaggccttgacatgcagagaactttccagagatggattggtgccttcgggaactctgacacaggtgctgcatggctgtcgtcagctcgtgtcgtgagatgttgggttaagtcccgtaacgagcgcaacccttgcccttagttaccagcacgtaatggtgggcactctaaggggactgccggtgacaaaccggaggaaggtggggatgacgtcaagtcatcatggcccttacggcctgggctacacacgtgctacaatggtcggtacagagggttgccaagccgcgaggtggagctaatcccacaaaaccgatcgtagtccggatcggagtctgcaactcgactccgtgaagtcggaatcgctagtaatcgtgaatcagaatgtcacggtgaatacgttcccgggccttgtacacaccgcccgtcacaccatgggagtgggttgctccagaagtagctagtctaaccgcaagggggacggttaccacggagtgattcatgactggggtg

SEQ ID NO: 2779 - DNA, 1459 bp, unidentified
  source 1..1459: mol_type = unassigned DNA; note = Pseudomonas prosekii
attgaacgctggcggcaggcctaacacatgcaagtcgagcggtagagagaagcttgcttctcttgagagcggcggacgggtgagtaatgcctaggaatctgcctggtagtgggggataacgctcggaaacggacgctaataccgcatacgtcctacgggagaaagcaggggaccttcgggccttgcgctatcagatgagcctaggtcggattagctagttggtgaggtaatggctcaccaaggcgacgatccgtaactggtctgagaggatgatcagtcacactggaactgagacacggtccagactcctacgggaggcagcagtggggaatattggacaatgggcgaaagcctgatccagccatgccgcgtgtgtgaagaaggtcttcggattgtaaagcactttaagttgggaggaagggcagttacctaatacgtatctgttttgacgttaccgacagaataagcaccggctaactctgtgccagcagccgcggtaatacagagggtgcaagcgttaatcggaattactgggcgtaaagcgcgcgtaggtggtttgttaagttggatgtgaaatccccgggctcaacctgggaactgcattcaaaactgacaagctagagtatggtagagggtggtggaatttcctgtgtagcggtgaaatgcgtagatataggaaggaacaccagtggcgaaggcgaccacctggactgatactgacactgaggtgcgaaagcgtggggagcaaacaggattagataccctggtagtccacgccgtaaacgatgtcaactagccgttgggagccttgagctcttagtggcgcagctaacgcattaagttgaccgcctggggagtacggccgcaaggttaaaactcaaatgaattgacgggggcccgcacaagcggtggagcatgtggtttaattcgaagcaacgcgaagaaccttaccaggccttgacatccaatgaactttccagagatggattggtgccttcgggagcattgagacaggtgctgcatggctgtcgtcagctcgtgtcgtgagatgttgggttaagtcccgtaacgagcgcaacccttgtccttagttaccagcacgtaatggtgggcactctaaggagactgccggtgacaaaccggaggaaggtggggatgacgtcaagtcatcatggcccttacggcctgggctacacacgtgctacaatggtcggtacagagggttgccaagccgcgaggtggagctaatcccagaaaaccgatcgtagtccggatcgcagtctgcaactcgactgcgtgaagtcggaatcgctagtaatcgcgaatcagaatgtcgcggtgaatacgttcccgggccttgtacacaccgcccgtcacaccatgggagtgggttgcaccagaagtagctagtctaaccttcgggaggacggttaccacggtgtgattcatgactggggtg

SEQ ID NO: 2780 - DNA, 1461 bp, unidentified
  source 1..1461: mol_type = unassigned DNA; note = Pseudomonas protegens
attgaacgctggcggcaggcctaacacatgcaagtcgagcggcagcacgggtacttgtacctggtggcgagcggcggacgggtgagtaatgcctaggaatctgcctagtagtgggggataacgtccggaaacgggcgctaataccgcatacgtcctacgggagaaagtgggggatcttcggacctcacgctattagatgagcctaggtcggattagctagttggtgaggtaatggctcaccaaggcgacgatccgtaactggtctgagaggatgatcagtcacactggaactgagacacggtccagactcctacgggaggcagcagtggggaatattggacaatgggcgaaagcctgatccagccatgccgcgtgtgtgaagaaggtcttcggattgtaaagcactttaagttgggaggaagggcagttacctaatacgtgattgttttgacgttaccgacagaataagcaccggctaactctgtgccagcagccgcggtaatacagagggtgcaagcgttaatcggaattactgggcgtaaagcgcgcgtaggtggtttgttaagttggatgtgaaagccccgggctcaacctgggaactgcatccaaaactggcaagctagagtatggtagagggtggtggaatttcctgtgtagcggtgaaatgcgtagatataggaaggaacaccagtggcgaaggcgaccacctggactgatactgacactgaggtgcgaaagcgtggggagcaaacaggattagataccctggtagtccacgccgtaaacgatgtcaactagccgttgggagccttgagctcttagtggcgcagctaacgcattaagttgaccgcctggggagtacggccgcaaggttaaaactcaaatgaattgacgggggcccgcacaagcggtggagcatgtggtttaattcgaagcaacgcgaagaaccttaccaggccttgacatccaatgaactttctagagatagattggtgccttcgggaacattgagacaggtgctgcatggctgtcgtcagctcgtgtcgtgagatgttgggttaagtcccgtaacgagcgcaacccttgtccttagttaccagcacgttatggtgggcactctaaggagactgccggtgacaaaccggaggaaggtggggatgacgtcaagtcatcatggcccttacggcctgggctacacacgtgctacaatggtcggtacaaagggttgccaagccgcgaggtggagctaatcccataaaaccgatcgtagtccggatcgcagtctgcaactcgactgcgtgaagtcggaatcgctagtaatcgcgaatcagaatgtcgcggtgaatacgttcccgggccttgtacacaccgcccgtcacaccatgggagtgggttgcaccagaagtagctagtctaaccttcgggaggacggttaccacggtgtgattcatgactggggtg

SEQ ID NO: 2781 - DNA, 1462 bp, Pseudomonas pseudoalcaligenes
  source 1..1462: mol_type = unassigned DNA
  misc_difference 281: note = n is a, c, g, or t
  misc_difference 815: note = n is a, c, g, or t
attgaacgctggcggcaggcctaacacatgcaagtcgagcggatgaagggagcttgctccctgatttagcggcggacgggtgagtaatgcctaggaatctgcctggtagtgggggataacgttccgaaaggaacgctaataccgcatacgtcctacgggagaaagcaggggaccttcgggccttgcgctatcagatgagcctaggtcggattagctagttggtgaggtaatggctcaccaaggcgacgatccgtaactggtctgagaggatgatcagtcanactggaactgagacacggtccagactcctacgggaggcagcagtggggaatattggacaatgggcgaaagcctgatccagccatgccgcgtgtgtgaagaaggtcttcggattgtaaagcactttaagttgggaggaagggcagtaagctaataccttgctgttttgacgttaccgacagaataagcaccggctaacttcgtgccagcagccgcggtaatacgaagggtgcaagcgttaatcggaattactgggcgtaaagcgcgcgtaggtggttcgttaagttggatgtgaaagccccgggctcaacctgggaactgcatccaaaactggcgagctagagtacggtagagggtggtggaatttcctgtgtagcggtgaaatgcgtagatataggaaggaacaccagtggcgaaggcgaccacctggactgatactgacactgaggtgcgaaagcgtggggagcaaacaggattagataccctggtagtccacgccgtaaacgatgtcaactagccgttgggttccttgagancttagtggcgcagctaacgcattaagttgaccgcctggggagtacggccgcaaggttaaaactcaaatgaattgacgggggcccgcacaagcggtggagcatgtggtttaattcgaagcaacgcgaagaaccttacctggccttgacatgctgagaactttccagagatggattggtgccttcgggaactcagacacaggtgctgcatggctgtcgtcagctcgtgtcgtgagatgttgggttaagtcccgtaacgagcgcaacccttgtccttagttaccagcacgtaatggtgggcactctaaggagactgccggtgacaaaccggaggaaggtggggatgacgtcaagtcatcatggcccttacggccagggctacacacgtgctacaatggtcggtacaaagggttgccaagccgcgaggtggagctaatcccataaaaccgatcgtagtccggatcgcagtctgcaactcgactgcgtgaagtcggaatcgctagtaatcgtgaatcagaatgtcacggtgaatacgttcccgggccttgtacacaccgcccgtcacaccatgggagtgggttgctccagaagtagctagtctaaccttcggggggacggttaccacggagtgattcatgactggggtgaag

SEQ ID NO: 2782 - DNA, 1457 bp, Pseudomonas psychrophila
  source 1..1457: mol_type = unassigned DNA
  misc_difference 39: note = n is a, c, g, or t
attgaacgctggcggcaggcctaacacatgcaagtcgancggtagagagaagcttgcttctcttgagagcggcggacgggtgagtaatacctaggaatctgcctgatagtgggggataacgttcggaaacggacgctaataccgcatacgtcctacgggagaaagcaggggaccttcgggccttgcgctatcagatgagcctaggtcggattagctagttggtgaggtaatggctcaccaaggctacgatccgtaactggtctgagaggatgatcagtcacactggaactgagacacggtccagactcctacgggaggcagcagtggggaatattggacaatgggcgaaagcctgatccagccatgccgcgtgtgtgaagaaggtcttcggattgtaaagcactttaagttgggaggaagggcattaacctaatacgttagtgttttgacgttaccgacagaataagcaccggctaactctgtgccagcagccgcggtaatacagagggtgcaagcgttaatcggaattactgggcgtaaagcgcgcgtaggtggtttgttaagttgaatgtgaaatccccgggctcaacctgggaactgcatccaaaactggcaagctagagtatggtagagggtagtggaatttcctgtgtagcggtgaaatgcgtagatataggaaggaacaccagtggcgaaggcgactacctggactgatactgacactgaggtgcgaaagcgtggggagcaaacaggattagataccctggtagtccacgccgtaaacgatgtcaactagccgttgggagtcttgaactcttagtggcgcagctaacgcattaagttgaccgcctggggagtacggccgcaaggttaaaactcaaatgaattgacgggggcccgcacaagcggtggagcatgtggtttaattcgaagcaacgcgaagaaccttaccaggccttgacatccaatgaactttctagagatagattggtgccttcgggaacattgagacaggtgctgcatggctgtcgtcagctcgtgtcgtgagatgttgggttaagtcccgtaacgagcgcaacccttgtccttagttaccagcacgtaatggtgggcactctaaggagactgccggtgacaaaccggaggaaggtggggatgacgtcaagtcatcatggccttacggcctgggctacacacgtgctacaatggtcggtacaaagggttgccaagccgcgaggtggagctaatcccataaaaccgatcgtagtccggatcgcagtctgcaactcgactgcgtgaagtcggaatcgctagtaatcgtgaatcagaatgtcacggtgaatacgttcccgggccttgtacacaccgcccgtcacaccatgggagtggttgcaccagaagtagctagtctaaccctcgggaggacggttaccacggtgtgattcatgactggggtg

SEQ ID NO: 2783 - DNA, 1459 bp, Pseudomonas psychrotolerans; identical to SEQ ID NO: 312
  source 1..1459: mol_type = unassigned DNA

SEQ ID NO: 2784 - DNA, 1459 bp, unidentified
  source 1..1459: mol_type = unassigned DNA; note = Pseudomonas punonensis
attgaacgctggcggcaggcctaacacatgcaagtcgagcggatgacgggagcttgctccctgattcagcggcggacgggtgagtaatgcctaggaatctgcctattagtgggggacaacgtttcgaaaggaacgctaataccgcatacgtcctacgggagaaagcaggggaccttcgggccttgcgctaatagatgagcctaggtcggattagctagttggtgaggtaatggctcaccaaggcgacgatccgtaactggtctgagaggatgatcagtcacactggaactgagacacggtccagactcctacgggaggcagcagtggggaatattggacaatgggcgaaagcctgatccagccatgccgcgtgtgtgaagaaggtcttcggattgtaaagcactttaagttgggaggaagggttgtagattaatactctgcaattttgacgttaccgacagaataagcaccggctaactctgtgccagcagccgcggtaatacagagggtgcaagcgttaatcggaattactgggcgtaaagcgcgcgtaggtggtttgttaagttggatgtgaaagccccgggctcaacctgggaactgcatccaaaactggcaagctagagtacggtagagggtggtggaatttcctgtgtagcggtgaaatgcgtagatataggaaggaacaccagtggcgaaggcgaccacctggactgatactgacactgaggtgcgaaagcgtggggagcaaacaggattagataccctggtagtccacgccgtaaacgatgtcaactagccgttgggttccttgagaacttagtggcgcagctaacgcattaagttgaccgcctggggagtacggccgcaaggttaaaactcaaatgaattgacgggggcccgcacaagcggtggagcatgtggtttaattcgaagcaacgcgaagaaccttacctggccttgacatgctgagaactttccagagatggattggtgccttcgggaactcagacacaggtgctgcatggctgtcgtcagctcgtgtcgtgagatgttgggttaagtcccgtaacgagcgcaacccttgtccttagttaccagcacgttatggtgggaactctaaggagactgccggtgacaaaccggaggaaggtggggatgacgtcaagtcatcatggcccttacggccagggctacacacgtgctacaatggtcggtacaaagggttgccaagccgcgaggtggagctaatcccataaaaccgatcgtagtccggatcgcagtctgcaactcgactgcgtgaagtcggaatcgctagtaatcgtgaatcagaatgtcacggtgaatacgttcccgggccttgtacacaccgcccgtcacaccatgggagtgggttgcaccagaagtagctagtctaaccttcggggggacggttaccacggtgtgattcatgactggggtg

SEQ ID NO: 2785 - DNA, 1459 bp, unidentified
  source 1..1459: mol_type = unassigned DNA; note = Pseudomonas reidholzensis
attgaacgctggcggcaggcctaacacatgcaagtcgagcggatgagaagagcttgctcttcgattcagcggcggacgggtgagtaatgcctaggaatctgcctggtagtgggggacaacgtttcgaaaggaacgctaataccgcatacgtcctacgggagaaagcaggggaccttcgggccttgcgctatcagatgagcctaggtcggattagctagttggtgaggtaatggctcaccaaggcgacgatccgtaactggtctgagaggatgatcagtcacactggaactgagacacggtccagactcctacgggaggcagcagtggggaatattggacaatgggcgaaagcctgatccagccatgccgcgtgtgtgaagaaggtcttcggattgtaaagcactttaagttgggaggaagggcagttggttaataccttgctgctttgacgttaccgacagaataagcaccggctaactctgtgccagcagccgcggtaatacagagggtgcaagcgttaatcggaattactgggcgtaaagcgcgcgtaggtggtttgttaagttggatgtgaaagccccgggctcaacctgggaactgcatccaaaactggcaagctagagtacagtagagggtggtggaatttcctgtgtagcggtgaaatgcgtagatataggaaggaacaccagtggcgaaggcgaccacctggactgatactgacactgaggtgcgaaagcgtggggagcaaacaggattagataccctggtagtccacgccgtaaacgatgtcaactagccgttggaatccttgagattttagtggcgcagctaacgcattaagttgaccgcctggggagtacggccgcaaggttaaaactcaaatgaattgacgggggcccgcacaagcggtggagcatgtggtttaattcgaagcaacgcgaagaaccttaccaggccttgacatgcagagaactttctagagatagattggtgccttcgggaactctggcacaggtgctgcatggctgtcgtcagctcgtgtcgtgagatgttgggttaagtcccgtaacgagcgcaacccttgtccttagttaccagcacgttatggtgggcactctaaggagactgccggtgacaaaccggaggaaggtggggatgacgtcaagtcatcatggcccttacggcctgggctacacacgtgctacaatggtcggtacagagggtcgccaagccgcgaggtggagctaatctcacaaaaccgatcgtagtccggatcgcagtctgcaactcgactgcgtgaagtcggaatcgctagtaatcgcgaatcagaatgtcgcggtgaatacgttcccgggccttgtacacaccgcccgtcacaccatgggagtgggttgcaccagaagtagctagtctaaccttcgggaggacggttaccacggtgtgattcatgactggggtg

SEQ ID NO: 2786 - DNA, 1459 bp, Pseudomonas reinekei
  source 1..1459: mol_type = unassigned DNA
attgaacgctggcggcaggcctaacacatgcaagtcgagcggatgacaggagcttgctcctgaattcagcggcggacgggtgagtaatgcctaggaatctgcctgrtagtgggggacaacgtttcgaaaggaacgctaataccgcatacgtcctacgggagaaagcaggggaccttcgggccttgcgctatcagatgagcctaggtcggattagctagttggtgaggtaatggctcaccaaggcgacgatccgtaactggtctgagaggatgatcagtcacactggaactgagacacggtccagactcctacgggaggcagcagtggggaatattggacaatgggcgaaagcctgatccagccatgccgcgtgtgtgaagaaggtcttcggattgtaaagcactttaagttgggaggaagggttgtagattaatactctgcaattttgacgttaccgacagaataagcaccggctaactctgtgccagcagccgcggtaatacagagggtgcaagcgttaatcggaattactgggcgtaaagcgcgcgtaggtggtttgttaagttggatgtgaaatccccgggctcaacctgggaactgcattcaaaactgacaagctagagtatggtagagggtggtggaatttcctgtgtagcggtgaaatgcgtagatataggaaggaacaccagtggcgaaggcgaccacctggactgatactgacactgaggtgcgaaagcgtggggagcaaacaggattagataccctggtagtccacgccgtaaacgatgtcaactagccgttgggagccttgagctcttagtggcgcagctaacgcattaagttgaccgcctggggagtacggccgcaaggttaaaactcaaatgaattgacgggggcccgcacaagcggtggagcatgtggtttaattcgaagcaacgcgaagaaccttaccaggccttgacatccaatgaactttccagagatggattggtgccttcgggaacattgagacaggtgctgcatggctgtcgtcagctcgtgtcgtgagatgttgggttaagtcccgtaacgagcgcaacccttgtccttagttaccagcacgttatggtgggcactctaaggagactgccggtgacaaaccggaggaaggtggggatgacgtcaagtcatcatggcccttacggcctgggctacacacgtgctacaatggtcggtacagagggttgccaagccgcgaggtggagctaatcccataaaaccgatcgtagtccggatcgcagtctgcaactcgactgcgtgaagtcggaatcgctagtaatcgcgaatcagaatgtcgcggtgaatacgttcccgggccttgtacacaccgcccgtcacaccatgggagtgggttgcaccagaagtagctagtctaaccttcgggaggacggttaccacggtgtgattcatgactggggtg

SEQ ID NO: 2787 - DNA, 1459 bp, Pseudomonas resinovorans
  source 1..1459: mol_type = unassigned DNA
  misc_difference 691: note = n is a, c, g, or t
  misc_difference 825: note = n is a, c, g, or t
attgaacgctggcggcagccctaacaaatccaagtcgagcggcagcgggtccttcgggatgccggcgagcggcggacgggtgagtaatgcctaggaatctgcctgatagtgggggataacgttcggaaacggacgctaataccgcatacgtcctacgggagaaagcgggggatcttcggacctcgcgctatcagatgagcctaggtcggattagctagttggtggggtaatggctcaccaaggcgacgatccgtaactggtctgagaggatgatcagtcacactggaactgagacacggtccagactcctacgggaggcagcagtggggaatattggacaatgggcgaaagcctgatccagccatgccgcgtgtgtgaagaaggtcttcggattgtaaagcactttaagttgggaggaagggcagtaagctaatatcttgctgttttgacgttaccaacagaataagcaccggctaacttcgtgccagcagccgcggtaatacgaagggtgcaagcgttaatcggaattactgggcgtaaagcgcgcgtaggtggttcagcaagttggatgtgaaagccccgggctcaacctgggaactgcatccaaaactactgagctagagtacggtagagggtggtggaayttcctgtgtagcggtgwactgcgtagatataggaaggaacaccagtngtgaagccgaccacctggactgatactgtaactkaggtgcgaaagtgtgggcagcaaacaggattagataccctggtagtccacgccgtaaacgatgtcgactagccgttgggttccttgagracttagtggcncagctaacgcgataagtcgacctcctggggagtacgaccgcaaggttaaaactcaaatgaattgacgggggcccgcacaagcggtggagcatgtggtttaattcgaagcaacgcgaagaaccttacctggccttgacatgctgagaactttccagagatggattggtgccttcgggaactcagacacaggtgctgcatggctgtcgtcagctcgtgtcgtgagatgttgggttaagtcccgtaacgagcgcaacccttgtccttagttaccagcacgttatggtgggcactctaaggagactgccggtgacaaaccggaggaaggtggggatgacgtcaagtcatcatggcccttacggccagggctacacacgtgctacaatggtcggtacraagggttgccaagccgcgaggtggagctaatcccataaaaccgatcgtagtccggatcgcagtctgcaactcgactgcgtgaagtcggaatcgctagtaatcgtgamtcagaatgtcacggtgaatacgttcccgggccttgtacacaccgcccgtcacaccatgggagtgggttgctccagaagtagctagtctaaccgcaagggggacggttaccacggagtgattcatgactggggtg

SEQ ID NO: 2788 - DNA, 1459 bp, Pseudomonas rhizosphaerae
  source 1..1459: mol_type = unassigned DNA
attgaacgctggcggcaggcctaacacatgcaagtcgagcggttgaaggaagcttgcttcctgattcagcggcggacgggtgagtaatgcctaggaatctgcctggtagtgggggacaacgtttcgaaaggaacgctaataccgcatacgtcctacgggagaaagcaggggaccttcgggccttgcgctatcagatgagcctaggtcggattagctagttggtgaggtaatggctcaccaaggcgacgatccgtaactggtctgagaggatgatcagtcacactggaactgagacacggtccagactcctacgggaggcagcagtggggaatattggacaatgggcgaaagcctgatccagccatgccgcgtgtgtgaagaaggtcttcggattgtaaagcactttaagttgggaggaagggcagtaagcgaataccttgctgttttgacgttaccgacagaataagcaccggctaactctgtgccagcagccgcggtaatacagagggtgcaagcgttaatcggaattactgggcgtaaagcgcgcgtaggtggtttgttaagttgaatgtgaaatccccgggctcaacctgggaactgcatccaaaactggcaagctagagtagggcagagggtggtggaatttcctgtgtagcggtgaaatgcgtagatataggaaggaacaccagtggcgaaggcgaccacctgggctcatactgacactgaggtgcgaaagcgtggggagcaaacaggattagataccctggtagtccacgccgtaaacgatgtcaactagccgttgggagtcttgaactcttagtggcgcagctaacgcattaagttgaccgcctggggagtacggccgcaaggttaaaactcaaatgaattgacgggggcccgcacaagcggtggagcatgtggtttaattcgaagcaacgcgaagaaccttaccaggccttgacatccaatgaactttccagagatggattggtgccttcgggaacattgagacaggtgctgcatggctgtcgtcagctcgtgtcgtgagatgttgggttaagtcccgtaacgagcgcaacccttgtccttagttaccagcacgttatggtgggcactctaaggagactgccggtgacaaaccggaggaaggtggggatgacgtcaagtcatcatggcccttacggcctgggctacacacgtgctacaatggtcggtacagagggtcgccaagccgcgaggtggagctaatctcacaaaaccgatcgtagtccggatcgcagtctgcaactcgactgcgtgaagtcggaatcgctagtaatcgcgaatcagaatgtcgcggtgaatacgttcccgggccttgtacacaccgcccgtcacaccatgggagtgggttgcaccagaagtagctagtctaaccttcgggaggacggttaccacggtgtgattcatgactggggtg

SEQ ID NO: 2789 - DNA, 1459 bp, unidentified
  source 1..1459: mol_type = unassigned DNA; note = Pseudomonas sagittaria
attgaacgctggcggcaggcctaacacatgcaagtcgagcggatgagggtagcttgctacctgattcagcggcggacgggtgagtaatgcctaggaatctgcccgatagtgggggacaacgtttcgaaaggaacgctaataccgcatacgtcctacgggagaaagcaggggaccttcgggccttgcgctatcggatgagcctaggtcggattagctagttggtggggtaaaggctcaccaaggcgacgatccgtaactggtctgagaggatgatcagtcacactggaactgagacacggtccagactcctacgggaggcagcagtggggaatattggacaatgggcgaaagcctgatccagccatgccgcgtgtgtgaagaaggtcttcggattgtaaagcactttaagctgggaggaagggcagtaagttaataccttgctgctttgacgttaccagcagaataagcaccggctaacttcgtgccagcagccgcggtaatacgaagggtgcaagcgttaatcggaattactgggcgtaaagcgcgcgtaggtggttcagcaagttggatgtgaaagccccgggctcaacctgggaactgcatccaaaactactgggctagagtatggtagagggtggtggaatttcctgtgtagcggtgaaatgcgtagatataggaaggaacaccagtggcgaaggcgaccacctggactaatactgacactgaggtgcgaaagcgtggggagcaaacaggattagataccctggtagtccacgccgtaaacgatgtcaactagttgttgggttccttgaggacttagtaacgaagctaacgcgataagttgaccgcctggggagtacggccgcaaggttaaaactcaaatgaattgacgggggcccgcacaagcggtggagcatgtggtttaattcgaagcaacgcgaagaaccttacctggccttgacatgctgagaactttccagagatggattggtgccttcgggaactcagacacaggtgctgcatggctgtcgtcagctcgtgtcgtgagatgttgggttaagtcccgtaacgagcgcaacccttgtccttagttaccagcacgtaatggtgggcactctaaggagactgccggtgacaaaccggaggaaggtggggatgacgtcaagtcatcatggcccttacggccagggctacacacgtgctacaatggtcggtacagagggttgccaaaccgcgaggtggagctaatctcacaaaaccgatcgtagtccggatcgcagtctgcaactcgactgcgtgaagtcggaatcgctagtaatcgtgaatcagaatgtcacggtgaatacgttcccgggccttgtacacaccgcccgtcacaccatgggagtgggttgctccagaagtagctagtctaaccttcggggggacggttaccacggagtgattcatgactggggtg

SEQ ID NO: 2790 - DNA, 1459 bp, unidentified
  source 1..1459: mol_type = unassigned DNA; note = Pseudomonas salegens
attgaacgctggcggcaggcctaacacatgcaagtcgagcgattgaagggagcttgctccctgatttagcggcggacgggtgagtaatgcctaggaatctgcctggtagtgggggacaactcggggaaacccgagctaataccgcatacgtcctacgggagaaagtgggggatcttcggacctcacgctatcagatgagcctaggtcggattagcttgttggtgaggtaacggctcaccaaggcagcgatccgtaactggtctgagaggatgatcagtcacactggaactgagacacggtccagactcctacgggaggcagcagtggggaatattggacaatgggggcaaccctgatccagccatgccgcgtgtgtgaagaaggtcttcggattgtaaagcactttaagttgggaggaagggttgtacgttaatagcgtgcaattttgacgttaccaacagaataagcaccggctaactctgtgccagcagccgcggtaatacagagggtgcaagcgttaatcggaattactgggcgtaaagcgcgcgtaggcggtcaagtaagatgggtgtgaaatccccgggctcaacctgggaactgcatccataactgcttgactagagtacagtagagggtggtggaatttcctgtgtagcggtgaaatgcgtagatataggaaggaacaccagtggcgaaggcgaccacctggactgatactgacgctgaggtgcgaaagcgtggggagcaaacaggattagataccctggtagtccacgccgtaaacgatgtcaactagccgttggggaccttgagtctttagtggcgcagctaacgcactaagttgaccgcctggggagtacggccgcaaggttaaaactcaaatgaattgacgggggcccgcacaagcggtggagcatgtggtttaattcgaagcaacgcgaagaaccttacctggccttgacatgctgagaactttccagagatggattggtgccttcgggaactcagacacaggtgctgcatggctgtcgtcagctcgtgtcgtgagatgttgggttaagtcccgtaacgagcgcaacccttgtccttagttaccagcacgttatggtgggcactctaaggagactgccggtgacaaaccggaggaaggtggggatgacgtcaagtcatcatggcccttacggccagggctacacacgtgctacaatgggcggtacagagggttgccaagccgcgaggtggagctaatctctcaaaaccgttcgtagtccggattggagtctgcaactcgactccatgaagtcggaatcgctagtaatcgcgaatcagaatgtcgcggtgaatacgttcccgggccttgtacacaccgcccgtcacaccatgggagtgggttgctccagaagtagctagtctaactttcgagaggacggttaccacggagtgattcatgactggggtg

SEQ ID NO: 2791 - DNA, 1374 bp, Pseudomonas salomonii
  source 1..1374: mol_type = unassigned DNA
tcttgagagcggcggacgggtgagtaatgcctaggaatctgcctggtgttgggggataacgctcggaaacggacgctaataccgcatacgtcctacgggagaaagcaggggaccttcgggccttgcgctatcagatgagcctaggtcggattagctagttggtcaggtaatggctcaccaaggcgacgatccgtaactggtctgagaggatgatcagtcacactggaactgagacacggtccagactcctacgggaggcagcagtggggaatattggacaatgggcgaaagcctgatccagccatgccgcgtgtgtgaagaaggtcttcggattgtaaagcactttaagttgggaggaagggcattaacctaatacgttagtgttttgacgttaccgacagaataagcaccggctaactctgtgccagcagccgcggtaatacagagggtgcaagcgttaatcggaattactgggcgtaaagcgcgcgtaggtggtttgttaagttggatgtgaaatccccgggctcaacctgggaactgcattcaaaactgacttactagagtatggtagagggtggtggaatttcctgtgtagcggtgaaatgcgtagatataggaaggaacaccagtggcgaaggcgaccacctggactaatactgacactgaggtgcgaaagcgtggggagcaaacaggattagataccctggtagtccacgccgtaaacgatgtcaactagccgttggaagccttgagcttttagtggcgcagctaacgcattaagttgaccgcctggggagtacggccgcaaggttaaaactcaaatgaattgacgggggcccgcacaagcggtggagcatgtggtttaattcgaagcaacgcgaagaaccttaccaggccttgacatccaatgaactttctagagatagattggtgccttagggaacattgagacaggtgctgcatggctgtcgtcagctcgtgtcgtgagatgttgggttaagtcccgtaacgagcgcaacccttgtccttagttaccagcacgttatggtgggcactctaaggagactgccggtgacaaaccggaggaaggtggggatgacgtcaagtcatcatggcccttacggcctgggctacacacgtgctacaatggtcggtacagagggttgccaagccgcgaggtggagctaatcccacaaaaccgatcgtagtccggatcgcagtctgcaactcgactgcgtgaagtcggaatcgctagtaatcgcgaatcagaatgtcgcggtgaatacgttcccgggccttgtacacaccgcccgtcacaccatgggagtgggttgcaccagaagtagctagtctaacctcgggaggacggttacc

SEQ ID NO: 2792 - DNA, 1461 bp, Pseudomonas saponiphila
  source 1..1461: mol_type = unassigned DNA
attgaacgctggcggcaggcctaacacatgcaagtcgagcggcagcacgggtacttgtacctggtggcgagcggcggacgggtgagtaatgcctaggaatctgcctagtagtgggggataacgtccggaaacgggcgctaataccgcatacgtcctacgggagaaagtgggggatcttcggacctcacgctattagatgagcctaggtcggattagctagttggtgaggtaatggctcaccaaggcgacgatccgtaactggtctgagaggatgatcagtcacactggaactgagacacggtccagactcctacgggaggcagcagtggggaatattggacaatgggcgaaagcctgatccagccatgccgcgtgtgtgaagaaggtcttcggattgtaaagcactttaagttgggaggaagggtacttacctaatacgtgagtattttgacgttaccgacagaataagcaccggctaactctgtgccagcagccgcggtaatacagagggtgcaagcgttaatcggaattactgggcgtaaagcgcgcgtaggtggtttgttaagttggatgtgaaagccccgggctcaacctgggaactgcatccaaaactggcaagctagagtatggtagagggtggtggaatttcctgtgtagcggtgaaatgcgtagatataggaaggaacaccagtggcgaaggcgaccacctggactgatactgacactgaggtgcgaaagcgtggggagcaaacaggattagataccctggtagtccacgccgtaaacgatgtcaactagccgttgggagccttgagctcttagtggcgcagctaacgcattaagttgaccgcctggggagtacggccgcaaggttaaaactcaaatgaattgacgggggcccgcacaagcggtggagcatgtggtttaattcgaagcaacgcgaagaaccttaccaggccttgacatccaatgaactttccagagatggattggtgccttcgggaacattgagacaggtgctgcatggctgtcgtcagctcgtgtcgtgagatgttgggttaagtcccgtaacgagcgcaacccttgtccttagttaccagcacgttatggtgggcactctaaggagactgccggtgacaaaccggaggaaggtggggatgacgtcaagtcatcatggcccttacggcctgggctacacacgtgctacaatggtcggtacaaagggttgccaagccgcgaggtggagctaatcccataaaaccgatcgtagtccggatcgcagtctgcaactcgactgcgtgaagtcggaatcgctagtaatcgcgaatcagaatgtcgcggtgaatacgttcccgggccttgtacacaccgcccgtcacaccatgggagtgggttgcaccagaagtagctagtctaaccttcggggggacggttaccacggtgtgattcatgactggggtg

SEQ ID NO: 2793 - DNA, 1461 bp, Pseudomonas savastanoi
  source 1..1461: mol_type = unassigned DNA
  misc_difference 830..831: note = n is a, c, g, or t
attgaacgctggcggcaggcctaacacatgcaagtcgagcggcagcacgggtacttgtacctggtggcgagcggcggacgggtgagtaatgcctaggaatctgcctggtagtgggggataacgctcggaaacggacgctaataccgcatacgtcctacgggagaaagcaggggaccttcgggccttgcgctatcagatgagcctaggtcggattagctagttggtgaggtaatggctcaccaaggcgacgatccgtaactggtctgagaggatgatcagtcacactggaactgagacacggtccagactcctacgggaggcagcagtggggaatattggacaatgggcgaaagcctgatccagccatgccgcgtgtgtgaagaaggtcttcggattgtaaagcactttaagttgggaggaagggcagttacctaatacgtgattgttttgacgttaccgacagaataagcaccggctaactctgtgccagcagccgcggtaatacagagggtgcaagcgttaatcggaattactgggcgtaaagcgcgcgtaggtggtttgttaagttggatgtgaaatccccgggctcaacctgggaactgcatccaaaactggcaagctagagtatggtagagggtggtggaatttcctgtgtagcggtgaaatgcgtagatataggaaggaacaccagtggcgaaggcgaccacctggactgatactgacactgaggtgcgaaagcgtggggagcaaacaggattagataccctggtagtccacgccgtaaacgatgtcaactagccgttgggagccttgagccttgagtggcgcanntaacgcattaagttgaccgcctggggagtacggccgcaaggttaaaactcaaatgaattgacgggggcccgcacaagcggtggagcatgtggtttaattcgaagcaacgcgaagaaccttaccaggccttgacatccaatgaactttccagagatggattggtgccttcgggagcattgagacaggtgctgcatggctgtcgtcagctcgtgtcgtgagatgttgggttaagtcccgtaacgagcgcaacccttgtccttagttaccagcacgtaatggtgggcactctaaggagactgccggtgacaaaccggaggaaggtggggatgacgtcaagtcatcatggcccttacggcctgggctacacacgtgctacaatggtcggtacagagggttgccaagccgcgaggtggagctaatctcacaaaaccgatcgtagtccggatcgcagtctgcaactcgactgcgtgaagtcggaatcgctagtaatcgcgaatcagaatgtcgcggtgaatacgttcccgggccttgtacacaccgcccgtcacaccatgggagtgggttgcaccagaagtagctagtctaaccttcggggggacggttaccacggtgtgattcatgactggggtg

SEQ ID NO: 2794 - DNA, 1463 bp, Pseudomonas segetis
  source 1..1463: mol_type = unassigned DNA
attgaacgctggcggcaggcctaacacatgcaagtcgagcggaaacgatgagagcttgctctcaggcgtcgagcggcggacgggtgagtaatgcctaggaatctgcctagtagtgggggataacgttcggaaacggacgctaataccgcatacgtcctacgggagaaagtgggggatcttcggacctcacgctattagatgagcctaggtcggattagctagttggtgaggtaatggctcaccaaggcgacgatccgtaactggtctgagaggatgatcagtcacactggaactgagacacggtccagactcctacgggaggcagcagtggggaatattggacaatgggcgaaagcctgatccagccatgccgcgtgtgtgaagaaggtcttcggattgtaaagcactttaagttgggaggaagggcagtaagttaataccttgctgttttgacgttaccgacagaataagcaccggctaactctgtgccagcagccgcggtaatacagagggtgcaagcgttaatcggaattactgggcgtaaagcgcgcgtaggcggtttgttaagttggatgtgaaagccccgggctcaacctgggaactgcatccaaaactggcaagctagagtacagtagagggtggtggaatttcctgtgtagcggtgaaatgcgtagatataggaaggaacaccagtggcgaaggcgaccacctggactgatactgacgctgaggtgcgaaagcgtggggagcaaacaggattagataccctggtagtccacgccgtaaacgatgtcaactagccgttggattccttgagaatttagtggcgcagctaacgcattaagttgaccgcctggggagtacggccgcaaggttaaaactcaaatgaattgacgggggcccgcacaagcggtggagcatgtggtttaattcgaagcaacgcgaagaaccttacctggccttgacatgctgagaactttccagagatggattggtgccttcgggaactcagacacaggtgctgcatggctgtcgtcagctcgtgtcgtgagatgttgggttaagtcccgtaacgagcgcaacccttgtccttagttaccagcacgttatggtgggaactctaaggagactgccggtgacaaaccggaggaaggtggggatgacgtcaagtcatcatggcccttacggccagggctacacacgtgctacaatggtcggtacaaagggttgccaagccgcgaggtggagctaatcccataaaaccgatcgtagtccggatcgcagtctgcaactcgactgcgtgaagtcggaatcgctagtaatcgtgaatcagaatgtcacggtgaatacgttcccgggccttgtacacaccgcccgtcacaccatgggagtgggttgcaccagaagtagctagtctaaccttcggggggacggttaccacggtgtgattcatgactggggtg

SEQ ID NO: 2795 - DNA, 1459 bp, Pseudomonas seleniipraecipitans
  source 1..1459: mol_type = unassigned DNA
attgaacgctggcggcaggcctaacacatgcaagtcgagcggttgacgggagcttgctccctgattcagcggcggacgggtgagtaatgcctaggaatctgcctattagtgggggacaacgtttcgaaaggaacgctaataccgcatacgtcctacgggagaaagcaggggaccttcgggccttgcgctaatagatgagcctaggtcggattagctagttggtggggtaatggctcaccaaggcgacgatccgtaactggtctgagaggatgatcagtcacactggaactgagacacggtccagactcctacgggaggcagcagtggggaatattggacaatgggcgaaagcctgatccagccatgccgcgtgtgtgaagaaggtcttcggattgtaaagcactttaagttgggaggaagggcagtaaattaatactttgctgttttgacgttaccgacagaataagcaccggctaactctgtgccagcagccgcggtaatacagagggtgcaagcgttaatcggaattactgggcgtaaagcgcgcgtaggtggtttgttaagttggatgtgaaagccccgggctcaacctgggaactgcatccaaaactggcaagctagagtacggtagagggtggtggaatttcctgtgtagcggtgaaatgcgtagatataggaaggaacaccagtggcgaaggcgaccacctggactgatactgacactgaggtgcgaaagcgtggggagcaaacaggattagataccctggtagtccacgccgtaaacgatgtcaactagccgttgggttccttgagaacttagtggcgcagctaacgcattaagttgaccgcctggggagtacggccgcaaggttaaaactcaaatgaattgacgggggcccgcacaagcggtggagcatgtggtttaattcgaagcaacgcgaagaaccttaccaggccttgacatgctgagaactttccagagatggattggtgccttcgggaactcagacacaggtgctgcatggctgtcgtcagctcgtgtcgtgagatgttgggttaagtcccgtaacgagcgcaacccttgtccttagttaccagcacgtaatggtgggaactctaaggagactgccggtgacaaaccggaggaaggtggggatgacgtcaagtcatcatggcccttacggcctgggctacacacgtgctacaatggtcggtacaaagggttgccaagccgcgaggtggagctaatcccataaaaccgatcgtagtccggatcgcagtctgcaactcgactgcgtgaagtcggaatcgctagtaatcgtgaatcagaatgtcacggtgaatacgttcccgggccttgtacacaccgcccgtcacaccatgggagtgggttgcaccagaagtagctagtctaaccttcgggaggacggttaccacggtgtgattcatgactggggtg

SEQ ID NO: 2796 - DNA, 1443 bp, unidentified
  source 1..1443: mol_type = unassigned DNA; note = Pseudomonas sihuiensis
ttgctggcggcaggctaacacatgcaagtcgagcggatgagaggagcttgctccttgatttagcggcggacgggtgagtaatgcctaggaatctgcctggtagtgggggataacgttccgaaaggaacgctaataccgcgtacgtcctacgggagaaagcaggggaccttcgggccttgcgctatcagatgagcctaggtcggattagctagttggtgaggtaatggctcaccaaggcgacgatccgtaactggtctgagaggatgatcagtcacactggaactgagacacggtccagactcctacgggaggcagcagtggggaatattggacaatgggcgaaagcctgatccagccatgccgcgtgtgtgaagaaggtcttcggattgtaaagcactttaagttgggaggaagggctgctggttaataccctgcagttttgacgttaccaacagaataagcaccggctaacttcgtgccagcagccgcggtaatacgaagggtgcaagcgttaatcggaattactgggcgtaaagcgcgcgtaggtggttcgttaagttggatgtgaaagccccgggctcaacctgggaactgcatccaaaactggcgagctagagtacggtagagggtggtggaatttcctgtgtagcggtgaaatgcgtagatataggaaggaacaccagtggcgaaggcgaccacctggactgatactgacactgaggtgcgaaagcgtggggagcaaacaggattagataccctggtagtccacgccgtaaacgatgtcaactagccgttggaatccttgagatcttagtggcgccagctaagcgcattaagttgaccgcctggggagtacggccgcaaggtttaaaactcaaatgaattgacgggggcccgcaccaacggtggagccatgtggtttaattcgaagcaacgcggagaaccttacctggccttgacctggtgagaactttccagaggatggattggtgcctttgggaactcagacaccggtgctgccatggcgtcgtcaggtcgtgtcgtgaggaggttgggttagtcccgtaacgagcgcaacccttgtccttagtttcccagcacctctggtgggcactctaaggagactgccggtgacaaaccggaggaaggtggggatgacgtcaagtcatcatggcccttacggccagggctacacacgtgctacaatggtcggtacaaagggttgccaagccgcgaggtggagctaatcccataaaaccgatcgtagtccggatcgcagtctgcaactcgactgcgtgaagtcggaatcgctagtaatcgtgaatcagaatgtcacggtgaatacgttcccgggccttgtacacaccgcccgtcacaccatgggagtgggttgctccagaagtagctagtctaaccttcgggggacggtaccacgacgatacg

SEQ ID NO: 2797 - DNA, 1539 bp, unidentified
  source 1..1539: mol_type = unassigned DNA; note = Pseudomonas silesiensis
gaactgaagagtttgatcatggctcagattgaacgctggcggcaggcctaacacatgcaagtcgagcggcagcacgggtacttgtacctggtggcgagcggcggacgggtgagtaatgcctaggaatctgcctggtagtgggggataacgctcggaaacggacgctaataccgcatacgtcctacgggagaaagcaggggaccttcgggccttgcgctatcagatgagcctaggtcggattagctagttggtgaggtaatggctcaccaaggcgacgatccgtaactggtctgagaggatgatcagtcacactggaactgagacacggtccagactcctacgggaggcagcagtggggaatattggacaatgggcgaaagcctgatccagccatgccgcgtgtgtgaagaaggtcttcggattgtaaagcactttaagttgggaggaagggcagttacctaatacgtatctgttttgacgttaccgacagaataagcaccggctaactctgtgccagcagccgcggtaatacagagggtgcaagcgttaatcggaattactgggcgtaaagcgcgcgtaggtggtttgttaagttggatgtgaaatccccgggctcaacctgggaactgcattcaaaactgacaagctagagtatggtagagggtggtggaatttcctgtgtagcggtgaaatgcgtagatataggaaggaacaccagtggcgaaggcgaccacctggactgatactgacactgaggtgcgaaagcgtggggagcaaacaggattagataccctggtagtccacgccgtaaacgatgtcaactagccgttgggagccttgagctcttagtggcgcagctaacgcattaagttgaccgcctggggagtacggccgcaaggttaaaactcaaatgaattgacgggggcccgcacaagcggtggagcatgtggtttaattcgaagcaacgcgaagaaccttaccaggccttgacatccaatgaactttccagagatggattggtgccttcgggaacattgagacaggtgctgcatggctgtcgtcagctcgtgtcgtgagatgttgggttaagtcccgtaacgagcgcaacccttgtccttagttaccagcacgtaatggtgggcactctaaggagactgccggtgacaaaccggaggaaggtggggatgacgtcaagtcatcatggcccttacggcctgggctacacacgtgctacaatggtcggtacagagggttgccaagccgcgaggtggagctaatcccagaaaaccgatcgtagtccggatcgcagtctgcaactcgactgcgtgaagtcggaatcgctagtaatcgcgaatcagaatgtcgcggtgaatacgttcccgggccttgtacacaccgcccgtcacaccatgggagtgggttgcaccagaagtagctagtctaaccttcgggaggacggttaccacggtgtgattcatgactggggtgaagtcgtaacaaggtagccgtaggggaacctgcggctggatcacctcctta

SEQ ID NO: 2798 - DNA, 1343 bp, Pseudomonas simiae
  source 1..1343: mol_type = unassigned DNA
gttgcttctcttgagagcggcggacgggtgagtaatgcctaggaatctgcctggtagtgggggataacgttcggaaacggacgctaataccgcatacgtcctacgggagaaagcaggggaccttcgggccttgcgctatcagatgagcctaggtcggattagctagttggtgaggtaatggctcaccaaggcgacgatccgtaactggtctgagaggatgatcagtcacactggaactgagacacggtccagactcctacgggaggcagcagtggggaatattggacaatgggcgaaagcctgatccagccatgccgcgtgtgtgaagaaggtcttcggattgtaaagcactttaagttgggaggaagggcagttacctaatacgtgattgttttgacgttaccgacagaataagcaccggctaactctgtgccagcagccgcggtaatacagagggtgcaagcgttaatcggaattactgggcgtaaagcgcgcgtaggtggtttgttaagttggatgtgaaatccccgggctcaacctgggaactgcattcaaaactgactgactagagtatggtagagggtggtggaatttcctgtgtagcggtgaaatgcgtagatataggaaggaacaccagtggcgaaggcgaccacctggactaatactgacactgaggtgcgaaagcgtggggagcaaacaggattagataccctggtagtccacgccgtaaacgatgtcaactagccgttggaagccttgagcttttagtggcgcagctaacgcattaagttgaccgcctggggagtacggccgcaaggttaaaactcaaatgaattgacgggggcccgcacaagcggtggagcatgtggtttaattcgaagcaacgcgaagaaccttaccaggccttgacatccaatgaactttctagagatagattggtgccttcgggaacattgagacaggtgctgcatggctgtcgtcagctcgtgtcgtgagatgttgggttaagtcccgtaacgagcgcaacccttgtccttagttaccagcacgtaatggtgggcactctaaggagactgccggtgacaaaccggaggaaggtggggatgacgtcaagtcatcatggcccttacggcctgggctacacacgtgctacaatggtcggtacagagggttgccaagccgcgaggtggagctaatcccataaaaccgatcgtagtccggatcgcagtctgcaactcgactgcgtgaagtcggaatcgctagtaatcgcgaatcagaatgtcgcggtgaatacgttcccgggccttgtacacaccgcccgtcacaccatgggagtgggttgc

SEQ ID NO: 2799 - DNA, 1421 bp, unidentified
  source 1..1421: mol_type = unassigned DNA; note = Pseudomonas soli
gcggatgacgggagcttgctccttgattcagcggcggacgggtgagtaatgcctaggaatctgcctggtagtgggggacaacgtttcgaaaggaacgctaataccgcatacgtcctacgggagaaagcaggggaccttcgggccttgcgctatcagatgagcctaggtcggattagctagtaggtgaggtaatggctcacctaggcgacgatccgtaactggtctgagaggatgatcagtcacactggaactgagacacggtccagactcctacgggaggcagcagtggggaatattggacaatgggcgaaagcctgatccagccatgccgcgtgtgtgaagaaggtcttcggattgtaaagcactttaagttgggaggaagggttgtacgctaataccgtgcaattttgacgttaccgacagaataagcaccggctaactctgtgccagcagccgcggtaatacagagggtgcaagcgttaatcggaattactgggcgtaaagcgcgcgtaggtggttcgttaagttggatgtgaaagccccgggctcaacctgggaactgcatccaaaactggcgagctagagtatggtagagggtggtggaatttcctgtgtagcggtgaaatgcgtagatataggaaggaacaccagtggcgaaggcgaccacctggactgatactgacactgaggtgcgaaagcgtggggagcaaacaggattagataccctggtagtccacgccgtaaacgatgtcaactagccgttggaatccttgagattttagtggcgcagctaacgcattaagttgaccgcctggggagtacggccgcaaggttaaaactcaaatgaattgacgggggcccgcacaagcggtggagcatgtggtttaattcgaagcaacgcgaagaaccttaccaggccttgacatgcagagaactttccagagatggattggtgccttcgggaactctgacacaggtgctgcatggctgtcgtcagctcgtgtcgtgagatgttgggttaagtcccgtaacgagcgcaacccttgtccttagttaccagcacgttatggtgggcactctaaggagactgccggtgacaaaccggaggaaggtggggatgacgtcaagtcatcatggcccttacggcctgggctacacacgtgctacaatggtcggtacagagggttgccaagccgcgaggtggagctaatctcacaaaaccgatcgtagtccggatcgcagtctgcaactcgactgcgtgaagtcggaatcgctagtaatcgcaaatcagaatgttgcggtgaatacgttcccgggccttgtacacaccgcccgtcacaccatgggagtgggttgcaccagaagtagctagtctaaccttcgggaggacggttaccacggtgtgattcatgactggggtg

SEQ ID NO: 2800 - DNA, 1458 bp, unidentified
  source 1..1458: mol_type = unassigned DNA; note = Pseudomonas songnenensis
attgaacgctggcggcaggcgctacacatgcagtcgagcggatgaagggagcttgctctctgattcagcggcggacgggtgagtaatgcctaggaatctgcctggtagtgggggacaacgtttcgaaaggaacgctaataccgcatacgtcctacgggagaaagcaggggaccttcgggccttgcgctatcagatgagcctaggtcggattagctagttggtgaggtaaaggctcaccaaggcgacgatccgtaactggtctgagaggatgatcagtcacactggaactgagacacggtccagactcctacgggaggcagcagtggggaatattggacaatgggcgaaagcctgatccagccatgccgcgtgtgtgaagaaggtcttcggattgtaaagcactttaagttgggaggaagggcagtaagctaataccttgctgttttgacgttaccgacagaataagcaccggctaacttcgtgccagcagccgcggtaatacgaagggtgcaagcgttaatcggaattactgggcgtaaagcgcgcgtaggtggttcgttaagttggatgtgaaagccccgggctcaacctgggaactgcatccaaaactggcgagctagagtatggcagagggtggtggaatttcctgtgtagcggtgaaatgcgtagatataggaaggaacaccagtggcgaaggcgaccacctgggctaatactgacactgaggtgcgaaagcgtggggagcaaacaggattagataccctggtagtccacgccgtaaacgatgtcgactagccgttgggatccttgagatcttagtggcgcagctaacgcattaagtcgaccgcctggggagtacggccgcaaggttaaaactcaaatgaattgacgggggcccgcacaagcggtggagcatgtggtttaattcgaagcaacgcgaagaaccttaccaggccttgacatgcagagaactttccagagatggattggtgccttcgggaactctgacacaggtgctgcatggctgtcgtcagctcgtgtcgtgagatgttgggttaagtcccgtaacgagcgcaacccttgtccttagttaccagcacgttaaggtgggcactctaaggagactgccggtgacaaaccggaggaaggtggggatgacgtcaagtcatcatggcccttacggcctgggctacacacgtgctacaatggtcggtacaaagggttgccaagccgcgaggtggagctaatcccataaaaccgatcgtagtccggatcgcagtctgcaactcgactgcgtgaagtcggaatcgctagtaatcgtgaatcagaatgtcacggtgaatacgttcccgggccttgtacacaccgcccgtcacaccatgggagtgggttgctccagaagtagctagtctaaccttcgcggggacggttaccacggagtgattcatgactggggtg

SEQ ID NO: 2801 - DNA, 1458 bp, Pseudomonas straminea
  source 1..1458: mol_type = unassigned DNA
attgaacgctggcggcaggcctaacacatgcaagtcgagcggttgaggggagcttgctccctgattcagcggcggacgggtgagtaatgcctaggaatctgcctattagtgggggacaacgtttcgaaaggaacgctaataccgcatacgtcctacgggagaaagcaggggaccttcgggccttgcgctaatagatgagcctaggtcggattagcttgttggtgaggtaatggctcaccaaggcgacgatccgtaactggtctgagaggatgatcagtcacactggaactgagacacggtccagactcctacgggaggcagcagtggggaatattggacaatgggcgaaagcctgatccagccatgccgcgtgtgtgaagaaggtcttcggattgtaaagcactttaagttgggaggaagggttgtagattaatactctgcaattttgacgttaccgacagaataagcaccggctaactctgtgccagcagccgcggtaatacagagggtgcaagcgttaatcggaattactgggcgtaaagcgcgcgtaggtggtttgttaagttggatgtgaaagccccgggctcaacctgggaactgcatccaaaactggcaagctagagtacggtagagggtggtggaatttcctgtgtagcggtgaaatgcgtagatataggaaggaacaccagtggcgaaggcgaccacctggactgatactgacactgaggtgcgaaagcgtggggagcaaacaggattagataccctggtagtccacgccgtaaacgatgtcaactagccgttggaatccttgagattttagtggcgcagctaacgcattaagttgaccgcctggggagtacggccgcaaggttaaaactcaaatgaattgacgggggcccgcacaagcggtggagcatgtggtttaattcgaagcaacgcgaagaaccttacctggccttgacatgctgagaactttccagagatggattggtgccttcgggaactcagacacaggtgctgcatggctgtcgtcagctcgtgtcgtgagatgttgggttaagtcccgtaacgagcgcaacccttgtccttagttaccagcacctcgggtgggaactctaaggagactgccggtgacaaaccggaggaaggtggggatgacgtcaagtcatcatggcccttacggccagggctacacacgtgctacaatggtcggtacaaagggttgccaagccgcgaggtggagctaatcccataaaaccgatcgtagtccggatcgcagtctgcaactcgactgcgtgaagtcggaatcgctagtaatcgtgaatcagaatgtcacggtgaatacgttcccgggccttgtacacaccgcccgtcacaccatgggagtgggttgcaccagaagtagctagtctaaccttcgggaggacggttaccacggtgtgattcatgactggggtg

SEQ ID NO: 2802 - DNA, 1459 bp, Pseudomonas synxantha
  source 1..1459: mol_type = unassigned DNA
attgaacgctggcggcaggcctaacacatgcaagtcgagcggtagagagaagcttgcttctcttgagagcggcggacgggtgagtaatgcctaggaatctgcctggtagtgggggataacgttcggaaacggacgctaataccgcatacgtcctacgggagaaagcaggggaccttcgggccttgcgctatcagatgagcctaggtcggattagctagttggtggggtaatggctcaccaaggcgacgatccgtaactggtctgagaggatgatcagtcacactggaactgagacacggtccagactcctacgggaggcagcagtggggaatattggacaatgggcgaaagcctgatccagccatgccgcgtgtgtgaagaaggtcttcggattgtaaagcactttaagttgggaggaagggttgtagattaatactctgcaattttgacgttaccgacagaataagcaccggctaactctgtgccagcagccgcggtaatacagagggtgcaagcgttaatcggaattactgggcgtaaagcgcgcgtaggtggtttgttaagttggatgtgaaatccccgggctcaacctgggaactgcattcaaaactgactgactagagtatggtagagggtggtggaatttcctgtgtagcggtgaaatgcgtagatataggaaggaacaccagtggcgaaggcgaccacctggactgatactgacactgaggtgcgaaagcgtggggagcaaacaggattagataccctggtagtccacgccgtaaacgatgtcaactagccgttgggagccttgagctcttagtggcgcagctaacgcattaagttgaccgcctggggagtacggccgcaaggttaaaactcaaatgaattgacgggggcccgcacaagcggtggagcatgtggtttaattcgaagcaacgcgaagaaccttaccaggccttgacatccaatgaactttctagagatagattggtgccttcgggaacattgagacaggtgctgcatggctgtcgtcagctcgtgtcgtgagatgttgggttaagtcccgtaacgagcgcaacccttgtccttagttaccagcacgtaatggtgggcactctaaggagactgccggtgacaaaccggaggaaggtggggatgacgtcaagtcatcatggcccttacggcctgggctacacacgtgctacaatggtcggtacagagggttgccaagccgcgaggtggagctaatcccagaaaaccgatcgtagtccggatcgcagtctgcaactcgactgcgtgaagtcggaatcgctagtaatcgcgaatcagaatgtcgcggtgaatacgttcccgggccttgtacacaccgcccgtcacaccatgggagtgggttgcaccagaagtagctagtctaaccttcgggaggacggttaccacggtgtgattcatgactggggtg

SEQ ID NO: 2803 - DNA, 1461 bp, Pseudomonas syringae
  source 1..1461: mol_type = unassigned DNA
attgaacgctggcggcaggcctaacacatgcaagtcgagcggcagcacgggtacttgtacctggtggcgagcggcggacgggtgagtaatgcctaggaatctgcctggtagtgggggataacgctcggaaacggacgctaataccgcatacgtcctacgggagaaagcaggggaccttcgggccttgcgctatcagatgagcctaggtcggattagctagttggtgaggtaatggctcaccaaggcgacgatccgtaactggtctgagaggatgatcagtcacactggaactgagacacggtccagactcctacgggaggcagcagtggggaatattggacaatgggcgaaagcctgatccagccatgccgcgtgtgtgaagaaggtcttcggattgtaaagcactttaagttgggaggaagggcagttacctaatacgtgattgttttgacgttaccgacagaataagcaccggctaactctgtgccagcagccgcggtaatacagagggtgcaagcgttaatcggaattactgggcgtaaagcgcgcgtaggtggtttgttaagttgaatgtgaaatccccgggctcaacctgggaactgcatccaaaactggcaagctagagtatggtagagggtggtggaatttcctgtgtagcggtgaaatgcgtagatataggaaggaacaccagtggcgaaggcgaccacctggactgatactgacactgaggtgcgaaagcgtggggagcaaacaggattagataccctggtagtccacgccgtaaacgatgtcaactagccgttgggagccttgagctcttagtggcgcagctaacgcattaagttgaccgcctggggagtacggccgcaaggttaaaactcaaatgaattgacgggggcccgcacaagcggtggagcatgtggtttaattcgaagcaacgcgaagaaccttaccaggccttgacatccaatgaactttccagagatggattggtgccttcgggagcattgagacaggtgctgcatggctgtcgtcagctcgtgtcgtgagatgttgggttaagtcccgtaacgagcgcaacccttgtccttagttaccagcacgttaaggtgggcactctaaggagactgccggtgacaaaccggaggaaggtggggatgacgtcaagtcatcatggcccttacggcctgggctacacacgtgctacaatggtcggtacagagggttgccaagccgcgaggtggagctaatctcacaaaaccgatcgtagtccggatcgcagtctgcaactcgactgcgtgaagtcggaatcgctagtaatcgcgaatcagaatgtcgcggtgaatacgttcccgggccttgtacacaccgcccgtcacaccatgggagtgggttgcaccagaagtagctagtctaaccttcggggggacggttaccacggtgtgattcatgactggggtg

SEQ ID NO: 2804 - DNA, 1459 bp, Pseudomonas taeanensis
  source 1..1459: mol_type = unassigned DNA
attgaacgctggcggcaggcctaacacatgcaagtcgagcggtagaaagtagcttgctacttttgagagcggcggacgggtgagtaatgcctaggaatctgcctagtggtgggggataacgttcggaaacggacgctaataccgcatacgtcctacgggagaaagcgggggaccttcgggcctcgcgccattagatgagcctaggtcggattagctagttggtgaggtaatggctcaccaaggcgacgatccgtaactggtctgagaggatgatcagtcacactggaactgagacacggtccagactcctacgggaggcagcagtggggaatattggacaatgggcgaaagcctgatccagccatgccgcgtgtgtgaagaaggtcttcggattgtaaagcactttaagttgggaggaagggttgtaacttaatacgttgcaattttgacgttaccgacagaataagcaccggctaactctgtgccagcagccgcggtaatacagagggtgcaagcgttaatcggaattactgggcgtaaagcgcgcgtaggtggtttgttaagttgaatgtgaaagccccgggctcaacctgggaactgcatccaaaactggcaagctagagtacggtagagggtggtggaatttcctgtgtagcggtgaaatgcgtagatataggaaggaacaccagtggcgaaggcgaccacctggactgatactgacactgaggtgcgaaagcgtggggagcaaacaggattagataccctggtagtccacgccgtaaacgatgtcaactagccgttggattccttgaggatttagtggcgcagctaacgcattaagttgaccgcctggggagtacggccgcaaggttaaaactcaaatgaattgacgggggcccgcacaagcggtggagcatgtggtttaattcgaagcaacgcgaagaaccttaccaggccttgacatctacagaactttccagagatggattggtgccttcgggaactgtaagacaggtgctgcatggctgtcgtcagctcgtgtcgtgagatgttgggttaagtcccgtaacgagcgcaacccttgtccttagttaccagcacgtaatggtgggcactctaaggagactgccggtgacaaaccggaggaaggtggggatgacgtcaagtcatcatggcccttacggcctgggctacacacgtgctacaatggtcggtacaaagggttgccaagccgcgaggtggagctaatcccataaaaccgatcgtagtccggatcgcagtctgcaactcgactgcgtgaagtcggaatcgctagtaatcgtgaatcagaatgtcacggtgaatacgttcccgggccttgtacacaccgcccgtcacaccatgggagtgggttgcaccagaagtagctagtctaaccgcaagggggacggttaccacggtgtgattcatgactggggtg

SEQ ID NO: 2805 - DNA, 1451 bp, Pseudomonas taiwanensis
  source 1..1451: mol_type = unassigned DNA
attgaacgctggcggcaggcctaacacatgcaagtcgagcggatgacgggagcttgctccttgattcagcggcggacgggtgagtaatgcctaggaatctgcctggtagtgggggacaacgtttcgaaaggaacgctaataccgcatacgtcctacgggagaaagcaggggaccttcgggccttgcgctatcagatgagcctaggtcggattagctagttggtgaggtaatggctcaccaaggcgacgatccgtaactggtctgagaggatgatcagtcacactggaactgagacacggtccagactcctacgggaggcagcagtggggaatattggacaatgggcgaaagcctgatccagccatgccgcgtgtgtgaagaaggtcttcggattgtaaagcactttaagttgggaggaagggcagtaagttaataccttgctgttttgacgttaccgacagaataagcaccggctaactctgtgccagcagccgcggtaatacagagggtgcaagcgttaatcggaattactgggcgtaaagcgcgcgtaggtggttcgttaagttggatgtgaaagccccgggctcaacctgggaactgcatccaaaactggcgagctagagtacggtagagggtggtggaatttcctgtgtagcggtgaaatgcgtagatataggaaggaacaccagtggcgaaggcgaccacctggactgatactgacactgaggtgcgaaagcgtggggagcaaacaggattagataccctggtagtccacgccgtaaacgatgtcaactagccgttggaatccttgagattttagtggcgcagctaacgcattaagttgaccgcctggggagtacggccgcaaggttaaaactcaaatgaattgacgggggcccgcacaagcggtggagcatgtggtttaattcgaagcaacgcgaagaaccttaccaggccttgacatgcagagaactttccagagatggattggtgccttcgggaactctgacacaggtgctgcatggctgtcgtcagctcgtgtcgtgagatgttgggttaagtcccgtaacgagcgcaacccttgtccttagttaccagcacgttatggtgggcactctaaggagactgccggtgacaaaccggaggaaggtggggatgacgtcaagtcatcatggcccttacggcctgggctacacacgtgctacaatggtcggtacagagggttgccaagccgcgaggtggagctaatctcacaaaaccgatcgtagtccggatcgcagtctgcaactcgactgcgtgaagtcggaatcgctagtaatcgcgaatcagaatgtcgcggtgaatacgttcccgggccttgtacacaccgcccgtcacaccatgggagtgggttgcaccagaagtagctagtctaaccttcgggaggacggttaccacggtgtgattcatga

SEQ ID NO: 2806 - DNA, 1428 bp, Pseudomonas thermotolerans
  source 1..1428: mol_type = unassigned DNA
ctggcggcaggcctaacacatgcaagtcgagcggcagcacgggagcttgctcctggtggcgagcggcggacgggtgagtaatgcctaggaatctgcctgttagtgggggataactcggggaaactcgagctaataccgcatacgtcctacgggagaaagtgggggaccttcgggcctcacgctaacagatgagcctaggtcggattagctagttggtggggtaaaggcctaccaaggcgacgatccgtagctggtctgagaggatgatcagccacactggaactgagacacggtccagactcctacgggaggcagcagtggggaatattggacaatgggcgaaagcctgatccagccatgccgcgtgtgtgaagaaggtcttcggattgtaaagcactttaagttgggaggaagggcgcttggctaatacccaagggttttgacgttaccaacagaataagcaccggctaacttcgtgccagcagccgcggtaatacgaagggtgcgagcgttaatcggaattactgggcgtaaagcgcgcgtaggcggtttgttaagttggaggtgaaatccccgggctcaacctgggaagtgcctccaaaactggctgactagagtacggtagagggtggtggaatttcctgtgtagcggtgaaatgcgtagatataggaaggaacaccagtggcgaaggcgaccacctggactgatactgacgctgaggtgcgaaagcgtggggagcaaacaggattagataccctggtagtccacgccgtaaacgatgtcgactagccgttgggctccttgagagcttagtggcgcagctaacgcattaagtcgaccgcctggggagtacggccgcaaggttaaaactcaaatgaattgacgggggcccgcacaagcggtggagcatgtggtttaattcgaagcaacgcgaagaaccttacctggccttgacatgcagagaactttccagagatggattggtgccttcgggaactctgacacaggtgctgcatggctgtcgtcagctcgtgtcgtgagatgttgggttaagtcccgtaacgagcgcaacccttgtccttagttaccagcgattcggtcgggcactctaaggagactgccggtgacaaaccggaggaaggtggggatgacgtcaagtcatcatggcccttacggccagggctacacacgtgctacaatggtcggtacagagggttgccaagccgcgaggcggagctaatcccagaaaaccgatcgtagtccggatcgcagtctgcaactcgactgcgtgaagtcggaatcgctagtaatcgcgaatcagaatgtcgcggtgaatacgttcccgggccttgtacacaccgcccgtcacaccatgggagtgggttgctccagaagtagctagtctaaccgcaagggggacggttacc

SEQ ID NO: 2807 - DNA, 1459 bp, Pseudomonas thivervalensis
  source 1..1459: mol_type = unassigned DNA
attgaacgctggcggcaggcctaacacatgcaagtcgagcggtagagaggtgcttgcacctcttgagagcggcggacgggtgagtaatgcctaggaatctgcctggtagtgggggataacgctcggaaacggacgctaataccgcatacgtcctacgggagaaagcaggggaccttcgggccttgcgctatcagatgagcctaggtcggattagctagttggtggggtaatggctcaccaaggcgacgatccgtaactggtctgagaggatgatcagtcacactggaactgagacacggtccagactcctacgggaggcagcagtggggaatattggacaatgggcgaaagcctgatccagccatgccgcgtgtgtgaagaaggtcttcggattgtaaagcactttaagttgggaggaagggcattaacctaatacgttggtgycttgacgttaccgacagaataagcaccggctaactctgtgccagcagccgcggtaatacagagggtgcaagcgttaatcggaattactgggcgtaaagcgcgcgtaggtggttcgttaagttggatgtgaaagccccgggctcaacctgggaactgcattcaaaactgtcgagctagagtatggtagagggtggtggaatttcctgtgtagcggtgaaatgcgtagatataggaaggaacaccagtggcgaaggcgaccacctggactgatactgacactgaggtgcgaaagcgtggggagcaaacaggattagataccctggtagtccacgccgtaaacgatgtcaactagccgttgggagccttgagctcttagtggcgcagctaacgcattaagttgaccgcctggggagtacggccgcaaggttaaaactcaaatgaattgacgggggcccgcacaagcggtggagcatgtggtttaattcgaagcaacgcgaagaaccttaccaggccttgacatccaatgaactttccagagatggattggtgccttcgggarcattgagacaggtgctgcatggctgtcgtcagctcgtgtcgtgagatgttgggttaagtcccgtaacgagcgcaacccttgtccttagttaccagcacgtaatggtgggcactctaaggagactgccggtgacaaaccggaggaaggtggggatgacgtcaagtcatcatggcccttacggcctgggctacacacgtgctacaatggtcggtacagagggttgccaagccgcgaggtggagctaatcccacaaaaccgatcgtagtccggatcgcagtctgcaactcgactgcgtgaagtcggaatcgctagtaatcgcgaatcagaatgtcgcggtgaatacgttcccgggccttgtacacaccgcccgtcacaccatgggagtgggttgcaccagaagtagctagtctaaccttcgggaggacggttaccacggtgtgattcatgactggggtg

SEQ ID NO: 2808 - DNA, 1459 bp, Pseudomonas toyotomiensis
  source 1..1459: mol_type = unassigned DNA
attgaacgctggcggcaggcctaacacatgcaagtcgagcggatgagaggagcttgctccttgatttagcggcggacgggtgagtaatgcctaggaatctgcctggtagtgggggataacgttccgaaaggaacgctaataccgcatacgtcctacgggagaaagcaggggaccttcgggccttgcgctatcagatgagcctaggtcggattagctggttggtgaggtaatggctcaccaaggcgacgatccgtaactggtctgagaggatgatcagtcacactggaactgagacacggtccagactcctacgggaggcagcagtggggaatattggacaatgggcgaaagcctgatccagccatgccgcgtgtgtgaagaaggtcttcggattgtaaagcactttaagttgggaggaagggcattaacctaatacgttagtgttttgacgttaccgacagaataagcaccggctaacttcgtgccagcagccgcggtaatacgaagggtgcaagcgttaatcggaattactgggcgtaaagcgcgcgtaggtggttcgttaagttggatgtgaaagccccgggctcaacctgggaactgcatccaaaactggcgagctagagtacggtagagggtggtggaatttcctgtgtagcggtgaaatgcgtagatataggaaggaacaccagtggcgaaggcgaccacctggactgatactgacactgaggtgcgaaagcgtggggagcaaacaggattagataccctggtagtccacgccgtaaacgatgtcaactagccgttgggttccttgagaacttagtggcgcagctaacgcattaagttgaccgcctggggagtacggccgcaaggttaaaactcaaatgaattgacgggggcccgcacaagcggtggagcatgtggtttaattcgaagcaacgcgaagaaccttacctggccttgacatgctgagaactttccagagatggattggtgccttcgggaactcagacacaggtgctgcatggctgtcgtcagctcgtgtcgtgagatgttgggttaagtcccgtaacgagcgcaacccttgtccttagttaccagcacgttatggtgggcactctaaggagactgccggtgacaaaccggaggaaggtggggatgacgtcaagtcatcatggcccttacggccagggctacacacgtgctacaatggtcggtacaaagggttgccaagccgcgaggtggagctaatcccataaaaccgatcgtagtccggatcgcagtctgcaactcgactgcgtgaagtcggaatcgctagtaatcgtgaatcagaatgtcacggtgaatacgttcccgggccttgtacacaccgcccgtcacaccatgggagtgggttgctccagaagtagctagtctaaccttcggggggacggttaccacggagtgattcatgactggggtg

SEQ ID NO: 2809 - DNA, 1461 bp, Pseudomonas tremae
  source 1..1461: mol_type = unassigned DNA
attgaacgctggcggcaggcctaacacatgcaagtcgagcggcagcacgggtacttgtacctggtggcgagcggcggacgggtgagtaatgcctaggaatctgcctggtagtgggggataacgctcggaaacggacgctaataccgcatacgtcctacgggagaaagcaggggaccttcgggccttgcgctatcagatgagcctaggtcggattagctagttggtgaggtaatggctcaccaaggcgacgatccgtaactggtctgagaggatgatcagtcacactggaactgagacacggtccagactcctacgggaggcagcagtggggaatattggacaatgggcgaaagcctgatccagccatgccgcgtgtgtgaagaaggtcttcggattgtaaagcactttaagttgggaggaagggcagttacctaatacgtgattgttttgacgttaccgacagaataagcaccggctaactctgtgccagcagccgcggtaatacagagggtgcaagcgttaatcggaattactgggcgtaaagcgcgcgtaggtggtttgttaagttggatgtgaaatccccgggctcaacctgggaactgcatccaaaactggcaagctagagtatggtagagggtggtggaatttcctgtgtagcggtgaaatgcgtagatataggaaggaacaccagtggcgaaggcgaccacctggactgatactgacactgaggtgcgaaagcgtggggagcaaacaggattagataccctggtagtccacgccgtaaacgatgtcaactagccgttgggagccttgagctcttagtggcgcagctaacgcattaagttgaccgcctggggagtacggccgcaaggttaaaactcaaatgaattgacgggggcccgcacaagcggtggagcatgtggtttaattcgaagcaacgcgaagaaccttaccaggccttgacatccaatgaactttccagagatggattggtgccttcgggaacattgagacaggtgctgcatggctgtcgtcagctcgtgtcgtgagatgttgggttaagtcccgtaacgagcgcaacccttgtccttagttaccagcacgtaatggtgggcactctaaggagactgccggtgacaaaccggaggaaggtggggatgacgtcaagtcatcatggcccttacggcctgggctacacacgtgctacaatggtcggtacagagggttgccaagccgcgaggtggagctaatctcacaaaaccgatcgtagtccggatcgcagtctgcaactcgactgcgtgaagtcggaatcgctagtaatcgcgaatcagaatgtcgcggtgaatacgttcccgggccttgtacacaccgcccgtcacaccatgggagtgggttgcaccagaagtagctagtctaaccttcgtggggacggttaccacggtgtgattcatgactggggtg

SEQ ID NO: 2810 - DNA, 1459 bp, Pseudomonas trivialis
  source 1..1459: mol_type = unassigned DNA
attgaacgctggcggcaggcctaacacatgcaagtcgagcggtagagagaagcttgcttctcttgagagcggcggacgggtgagtaatgcctaggaatctgcctggtagtgggggataacgttcggaaacggacgctaataccgcatacgtcctacgggagaaagcaggggaccttcgggccttgcgctatcagatgagcctaggtcggattagctagttggtggggtaatggctcaccaaggcgacgatccgtaactggtctgagaggatgatcagtcacactggaactgagacacggtccagactcctacgggaggcagcagtggggaatattggacaatgggcgaaagcctgatccagccatgccgcgtgtgtgaagaaggtcttcggattgtaaagcactttaagttgggaggaagggcagttacctaatacgtgattgttttgacgttaccgacagaataagcaccggctaactctgtgccagcagccgcggtaatacagagggtgcaagcgttaatcggaattactgggcgtaaagcgcgcgtaggtggtttgttaagttggatgtgaaatccccgggctcaacctgggaactgcattcaaaactgactgactagagtatggtagagggtggtggaatttcctgtgtagcggtgaaatgcgtagatataggaaggaacaccagtggcgaaggcgaccacctggactaatactgacactgaggtgcgaaagcgtggggagcaaacaggattagataccctggtagtccacgccgtaaacgatgtcaactagccgttggaagccttgagcttttagtggcgcagctaacgcattaagttgaccgcctggggagtacggccgcaaggttaaaactcaaatgaattgacgggggcccgcacaagcggtggagcatgtggtttaattcgaagcaacgcgaagaaccttaccaggccttgacatccaatgaactttctagagatagattggtgccttcgggaacattgagacaggtgctgcatggctgtcgtcagctcgtgtcgtgagatgttgggttaagtcccgtaacgagcgcaacccttgtccttagttaccagcacgtaatggtgggcactctaaggagactgccggtgacaaaccggaggaaggtggggatgacgtcaagtcatcatggcccttacggcctgggctacacacgtgctacaatggtcggtacagagggttgccaagccgcgaggtggagctaatcccacaaaaccgatcgtagtccggatcgcagtctgcaactcgactgcgtgaagtcggaatcgctagtaatcgcgaatcagaatgtcgcggtgaatacgttcccgggccttgtacacaccgcccgtcacaccatgggagtgggttgcaccagaagtagctagtctaaccttcgggaggacggttaccacggtgtgattcatgactggggtg

SEQ ID NO: 2811 - DNA, 1459 bp, Pseudomonas umsongensis
  source 1..1459: mol_type = unassigned DNA
attgaacgctggcggcaggcctaacacatgcaagtcgagcggatgatgagagcttgctctctgattcagcggcggacgggtgagtaatgcctaggaatctgcctggtagtgggggacaacgtctcgaaagggacgctaataccgcatacgtcctacgggagaaagcaggggaccttcgggccttgcgctatcagatgagcctaggtcggattagctagttggtgaggtaatggctcaccaaggcgacgatccgtaactggtctgagaggatgatcagtcacactggaactgagacacggtccagactcctacgggaggcagcagtggggaatattggacaatgggcgaaagcctgatccagccatgccgcgtgtgtgaagaaggtcttcggattgtaaagcactttaagttgggaggaagggcagtaaattaatactttgctgttttgacgttaccgacagaataagcaccggctaactctgtgccagcagccgcggtaatacagagggtgcaagcgttaatcggaattactgggcgtaaagcgcgcgtaggtggtttgttaagttggatgtgaaatccccgggctcaacctgggaactgcattcaaaactgacaagctagagtatggtagagggtggtggaatttcctgtgtagcggtgaaatgcgtagatataggaaggaacaccagtggcgaaggcgaccacctggactgatactgacactgaggtgcgaaagcgtggggagcaaacaggattagataccctggtagtccacgccgtaaacgatgtcaactagccgttgggagccttgagctcttagtggcgcagctaacgcattaagttgaccgcctggggagtacggccgcaaggttaaaactcaaatgaattgacgggggcccgcacaagcggtggagcatgtggtttaattcgaagcaacgcgaagaaccttaccaggccttgacatccaatgaactttccagagatggattggtgccttcgggaacattgagacaggtgctgcatggctgtcgtcagctcgtgtcgtgagatgttgggttaagtcccgtaacgagcgcaacccttgtccttagttaccagcacgtaatggtgggcactctaaggagactgccggtgacaaaccggaggaaggtggggatgacgtcaagtcatcatggcccttacggcctgggctacacacgtgctacaatggtcggtacagagggttgccaagccgcgaggtggagctaatcccataaaaccgatcgtagtccggatcgcagtctgcaactcgactgcgtgaagtcggaatcgctagtaatcgcgaatcagaatgtcgcggtgaatacgttcccgggccttgtacacaccgcccgtcacaccatgggagtgggttgcaccagaagtagctagtctaaccttcgggaggacggttaccacggtgtgattcatgactggggtg

SEQ ID NO: 2812 - DNA, 1459 bp, Pseudomonas vancouverensis
  source 1..1459: mol_type = unassigned DNA
attgaacgctggcggcaggcctaacacatgcaagtcgagcggatgaagagagcttgctctctgattcagcggcggacgggtgagtaatgcctaggaatctgcctggtagtgggggacaacgtttcgaaaggaacgctaataccgcatacgtcctacgggagaaagcaggggaccttcgggccttgcgctatcagatgagcctaggtcggattagctagttggtgaggtaatggctcaccaaggcgacgatccgtaactggtctgagaggatgatcagtcacactggaactgagacacggtccagactcctacgggaggcagcagtggggaatattggacaatgggcgaaagcctgatccagccatgccgcgtgtgtgaagaaggtcttcggattgtaaagcactttaagttgggaggaagggttgtagattaatactctgcaattttgacgttaccgacagaataagcaccggctaactctgtgccagcagccgcggtaatacagagggtgcaagcgttaatcggaattactgggcgtaaagcgcgcgtaggtggtttgttaagttggatgtgaaagccccgggctcaacctgggaactgcattcaaaactgacaagctagagtatggtagagggtggtggaatttcctgtgtagcggtgaaatgcgtagatataggaaggaacaccagtggcgaaggcgaccacctggactgatactgacactgaggtgcgaaagcgtggggagcaaacaggattagataccctggtagtccacgccgtaaacgatgtcaactagccgttgggagccttgagctcttagtggcgcagctaacgcattaagttgaccgcctggggagtacggccgcaaggttaaaactcaaatgaattgacgggggcccgcacaagcggtggagcatgtggtttaattcgaagcaacgcgaagaaccttaccaggccttgacatccaatgaactttccagagatggattggtgccttcgggaacattgagacaggtgctgcatggctgtcgtcagctcgtgtcgtgagatgttgggttaagtcccgtaacgagcgcaacccttgtccttagttaccagcacgttatggtgggcactctaaggagactgccggtgacaaaccggaggaaggtggggatgacgtcaagtcatcatggcccttacggcctgggctacacacgtgctacaatggtcggtacagagggttgccaagccgcgaggtggagctaatcccataaaaccgatcgtagtccggatcgcagtctgcaactcgactgcgtgaagtcggaatcgctagtaatcgcgaatcagaatgtcgcggtgaatacgttcccgggccttgtacacaccgcccgtcacaccatgggagtgggttgcaccagaagtagctagtctaaccttcggggggacggttaccacggtgtgattcatgactggggtg

SEQ ID NO: 2813 - DNA, 1459 bp, Pseudomonas veronii
  source 1..1459: mol_type = unassigned DNA
attgaacgctggcggcaggcctaacacatgcaagtcgagcggtagagagaagcttgcttctcttgagagcggcggacgggtgagtaatgcctaggaatctgcctggtagtgggggataacgttcggaaacggacgctaataccgcatacgtcctacgggagaaagcaggggaccttcgggccttgcgctatcagatgagcctaggtcggattagctagttggtgaggtaatggctcaccaaggcgacgatccgtaactggtctgagaggatgatcagtcacactggaactgagacacggtccagactcctacgggaggcagcagtggggaatattggacaatgggcgaaagcctgatccagccatgccgcgtgtgtgaagaaggtcttcggattgtaaagcactttaagttgggaggaagggcagttacctaatacgtaattgttttgacgttaccgacagaataagcaccggctaactctgtgccagcagccgcggtaatacagagggtgcaagcgttaatcggaattactgggcgtaaagcgcgcgtaggtggttagttaagttggatgtgaaatccccgggctcaacctgggaactgcattcaaaactgactgactagagtatggtagagggtggtggaatttcctgtgtagcggtgaaatgcgtagatataggaaggaacaccagtggcgaaggcgaccacctggactgatactgacactgaggtgcgaaagcgtggggagcaaacaggattagataccctggtagtccacgccgtaaacgatgtcaactagccgttgggagccttgagctcttagtggcgcagctaacgcattaagttgaccgcctggggagtacggccgcaaggttaaaactcaaatgaattgacgggggcccgcacaagcggtggagcatgtggtttaattcgaagcaacgcgaagaaccttaccaggccttgacatccaatgaactttccagagatggattggtgccttcgggaacattgagacaggtgctgcatggctgtcgtcagctcgtgtcgtgagatgttgggttaagtcccgtaacgagcgcaacccttgtccttagttaccagcacgtaatggtgggcactctaaggagactgccggtgacaaaccggaggaaggtggggatgacgtcaagtcatcatggcccttacggcctgggctacacacgtgctacaatggtcggtacagagggttgccaagccgcgaggtggagctaatcccagaaaaccgatcgtagtccggatcgcagtctgcaactcgactgcgtgaagtcggaatcgctagtaatcgcgaatcagaatgtcgcggtgaatacgttcccgggccttgtacacaccgcccgtcacaccatgggagtgggttgcaccagaagtagctagtctaaccttcggggggacggttaccacggtgtgattcatgactggggtg

SEQ ID NO: 2814 - DNA, 1459 bp, unidentified
  source 1..1459: mol_type = unassigned DNA; note = Pseudomonas versuta
attgaacgctggcggcaggcctaacacatgcaagtcgagcggtagagaggtgcttgcacctcttgagagcggcggacgggtgagtaatacctaggaatctgcctggtagtgggggataacgttcggaaacggacgctaataccgcatacgtcctacgggagaaagcaggggaccttcgggccttgcgctatcagatgagcctaggtcggattagctagttggtgaggtaatggctcaccaaggctacgatccgtaactggtctgagaggatgatcagtcacactggaactgagacacggtccagactcctacgggaggcagcagtggggaatattggacaatgggcgaaagcctgatccagccatgccgcgtgtgtgaagaaggtcttcggattgtaaagcactttaagttgggaggaagggcattaacctaatacgttagtgctttgacgttaccgacagaataagcaccggctaactctgtgccagcagccgcggtaatacagagggtgcaagcgttaatcggaattactgggcgtaaagcgcgcgtaggtggtttgttaagttgaatgtgaaatccccgggctcaacctgggaactgcatccaaaactggcaagctagagtatggtagagggtggtggaatttcctgtgtagcggtgaaatgcgtagatataggaaggaacaccagtggcgaaggcgaccacctggactgatactgacactgaggtgcgaaagcgtggggagcaaacaggattagataccctggtagtccacgccgtaaacgatgtcaactagccgttgggagtcttgaactcttagtggcgcagctaacgcattaagttgaccgcctggggagtacggccgcaaggttaaaactcaaatgaattgacgggggcccgcacaagcggtggagcatgtggtttaattcgaagcaacgcgaagaaccttaccaggccttgacatccaatgaactttctagagatagattggtgccttcgggaacattgagacaggtgctgcatggctgtcgtcagctcgtgtcgtgagatgttgggttaagtcccgtaacgagcgcaacccttgtccttagttaccagcacgtaatggtgggcactctaaggagactgccggtgacaaaccggaggaaggtggggatgacgtcaagtcatcatggcccttacggcctgggctacacacgtgctacaatggtcggtacaaagggttgccaagccgcgaggtggagctaatcccataaaaccgatcgtagtccggatcgcagtctgcaactcgactgcgtgaagtcggaatcgctagtaatcgtgaatcagaatgtcacggtgaatacgttcccgggccttgtacacaccgcccgtcacaccatgggagtgggttgcaccagaagtagctagtctaaccttcgggaggacggttaccacggtgtgattcatgactggggtg

SEQ ID NO: 2815 - DNA, 1459 bp, Pseudomonas viridiflava
  source 1..1459: mol_type = unassigned DNA
attgaacgctggcggcaggcctaacacatgcaagtcgagcggtagagagaagcttgcttctcttgagagcggcggacgggtgagtaatgcctaggaatctgcctggtagtgggggataacgctcggaaacggacgctaataccgcatacgtcctacgggagaaagcaggggaccttcgggccttgcgctatcagatgagcctaggtcggattagctagttggtgaggtaatggctcaccaaggcgacgatccgtaactggtctgagaggatgatcagtcacactggaactgagacacggtccagactcctacgggaggcagcagtggggaatattggacaatgggcgaaagcctgatccagccatgccgcgtgtgtgaagaaggtcttcggattgtaaagcactttaagttgggaggaagggcagtaacctaatacgttattgttttgacgttaccgacagaataagcaccggctaactctgtgccagcagccgcggtaatacagagggtgcaagcgttaatcggaattactgggcgtaaagcgcgcgtaggtggtttgttaagttgaatgtgaaatccccgggctcaacctgggaactgcatccaaaactggcaagctagagtagggcagagggtggtggaatttcctgtgtagcggtgaaatgcgtagatataggaaggaacaccagtggcgaaggcgaccacctgggctcatactgacactgaggtgcgaaagcgtggggagcaaacaggattagataccctggtagtccacgccgtaaacgatgtcaactagccgttggaatccttgagattttagtggcgcagctaacgcattaagttgaccgcctggggagtacggccgcaaggttaaaactcaaatgaattgacgggggcccgcacaagcggtggagcatgtggtttaattcgaagcaacgcgaagaaccttaccaggccttgacatccaatgaatcctttagagatagaggagtgccttcgggagcattgagacaggtgctgcatggctgtcgtcagctcgtgtcgtgagatgttgggttaagtcccgtaacgagcgcaacccttgtccttagttaccagcacgttaaggtgggcactctaaggagactgccggtgacaaaccggaggaaggtggggatgacgtcaagtcatcatggcccttacggcctgggctacacacgtgctacaatggtcggtacagagggttgccaagccgcgaggtggagctaatctcacaaaaccgatcgtagtccggatcgcagtctgcaactcgactgcgtgaagtcggaatcgctagtaatcgcgaatcagaatgtcgcggtgaatacgttcccgggccttgtacacaccgcccgtcacaccatgggagtgggttgcaccagaagtagctagtctaaccttcgggaggacggttaccacggtgtgattcatgactggggtg

SEQ ID NO: 2816 - DNA, 1459 bp, Pseudomonas vranovensis
  source 1..1459: mol_type = unassigned DNA
attgaacgctggcggcaggcctaacacatgcaagtcgagcggatgagaagagcttgctcttcgattcagcggcggacgggtgagtaatacctaggaatctgcctggtagtgggggacaacgttttgaaagggacgctgataccgcatacgccctacgggggcaagcaggggaccttcgggccttgcgctatcagatgagcctaggtcggattagctagttggtgaggtaatggctcaccaaggcgacgatccgtaactggtctgagaggatgatcagtcacactggaactgagacacggtccagactcctacgggaggcagcagtggggaatattggacaatgggcgaaagcctgatccagccatgccgcgtgtgtgaagaaggtcttcggattgtaaagcactttaagttgggaggaagggcattaacctaatacgttagtgttttgacgttaccgacagaataagcaccggctaactctgtgccagcagccgcggtaatacagagggtgcaagcgttaatcggaattactgggcgtaaagcgcgcgtaggtggttcgttaagttggatgtgaaatccccgggctcaacctgggaactgcatccaaaactggcgagctagagtagggcagagggtggtggaatttcctgtgtagcggtgaaatgcgtagatataggaaggaacaccagtggcgaaggcgaccacctgggctcatactgacactgaggtgcgaaagcgtggggagcaaacaggattagataccctggtagtccacgccgtaaacgatgtcaactagccgttgggaaccttgagattttagtggcgcagctaacgcattaagttgaccgcctggggagtacggccgcaaggttaaaactcaaatgaattgacgggggcccgcacaagcggtggagcatgtggtttaattcgaagcaacgcgaagaaccttaccaggccttgacatgcagagaactttccagagatggattggtgccttcgggaactctgacacaggtgctgcatggctgtcgtcagctcgtgtcgtgagatgttgggttaagtcccgtaacgagcgcaacccttgtccttagttaccagcacgttatggtgggcactctaaggagactgccggtgacaaaccggaggaaggtggggatgacgtcaagtcatcatggcccttacggcctgggctacacacgtgctacaatggtcggtacagagggtcgccaagccgcgaggtggagctaatctcacaaaaccgatcgtagtccggatcgcagtctgcaactcgactgcgtgaagtcggaatcgctagtaatcgcgaatcagaatgtcgcggtgaatacgttcccgggccttgtacacaccgcccgtcacaccatgggagtgggttgcaccagaagtagctagtctaaccttcgggaggacggttaccacggtgtgattcatgactggggtg

SEQ ID NO: 2817 - DNA, 1459 bp, unidentified
  source 1..1459: mol_type = unassigned DNA; note = Pseudomonas wadenswilerensis
attgaacgctggcggcaggcctaacacatgcaagtcgagcggatgagaagagcttgctcttcgattcagcggcggacgggtgagtaatacctaggaatctgcctggtagtgggggacaacgtttcgaaaggaacgctaataccgcatacgccctacgggggaaagcaggggaccttcgggccttgcgctatcagatgagcctaggtcggattagctagttggtgaggtaatggctcaccaaggcgacgatccgtaactggtctgagaggatgatcagtcacactggaactgagacacggtccagactcctacgggaggcagcagtggggaatattggacaatgggcgaaagcctgatccagccatgccgcgtgtgtgaagaaggtcttcggattgtaaagcactttaagttgggaggaagggtacttacctaatacgtgagtattttgacgttaccgacagaataagcaccggctaactctgtgccagcagccgcggtaatacagagggtgcaagcgttaatcggaattactgggcgtaaagcgcgcgtaggtggttcgttaagttggatgtgaaatccccgggctcaacctgggaactgcatccaaaactggcgagctagagtagggcagagggtggtggaatttcctgtgtagcggtgaaatgcgtagatataggaaggaacaccagtggcgaaggcgaccacctgggctcatactgacactgaggtgcgaaagcgtggggagcaaacaggattagataccctggtagtccacgccgtaaacgatgtcaactagccgttggaatccttgagattttagtggcgcagctaacgcattaagttgaccgcctggggagtacggccgcaaggttaaaactcaaatgaattgacgggggcccgcacaagcggtggagcatgtggtttaattcgaagcaacgcgaagaaccttaccaggccttgacatgcagagaactttccagagatggattggtgccttcgggaactctgacacaggtgctgcatggctgtcgtcagctcgtgtcgtgagatgttgggttaagtcccgtaacgagcgcaacccttgtccttagttaccagcacgttatggtgggcactctaaggagactgccggtgacaaaccggaggaaggtggggatgacgtcaagtcatcatggcccttacggcctgggctacacacgtgctacaatggtcggtacagagggttgccaagccgcgaggtggagctaatctcacaaaaccgatcgtagtccggatcgcagtctgcaactcgactgcgtgaagtcggaatcgctagtaatcgcgaatcagaatgtcgcggtgaatacgttcccgggccttgtacacaccgcccgtcacaccatgggagtgggttgcaccagaagtagctagtctaaccttcgggaggacggttaccacggtgtgattcatgactggggtg

SEQ ID NO: 2818 - DNA, 1459 bp, unidentified
  source 1..1459: mol_type = unassigned DNA; note = Pseudomonas weihenstephanensis
attgaacgctggcggcaggcctaacacatgcaagtcgagcggtagagaggtgcttgcacctcttgagagcggcggacgggtgagtaatacctaggaatctgcctgatagtgggggataacgttcggaaacggacgctaataccgcatacgtcctacgggagaaagcaggggaccttcgggccttgcgctatcagatgagcctaggtcggattagctagttggtgaggtaatggctcaccaaggctacgatccgtaactggtctgagaggatgatcagtcacactggaactgagacacggtccagactcctacgggaggcagcagtggggaatattggacaatgggcgaaagcctgatccagccatgccgcgtgtgtgaagaaggtcttcggattgtaaagcactttaagttgggaggaagggcattaacctaatacgttagtgttttgacgttaccgacagaataagcaccggctaactctgtgccagcagccgcggtaatacagagggtgcaagcgttaatcggaattactgggcgtaaagcgcgcgtaggtggtttgttaagttgaatgtgaaatccccgggctcaacctgggaactgcatccaaaactggcaagctagagtatggtagagggtagtggaatttcctgtgtagcggtgaaatgcgtagatataggaaggaacaccagtggcgaaggcgactacctggactgatactgacactgaggtgcgaaagcgtggggagcaaacaggattagataccctggtagtccacgccgtaaacgatgtcaactagccgttgggagtcttgaactcttagtggcgcagctaacgcattaagttgaccgcctggggagtacggccgcaaggttaaaactcaaatgaattgacgggggcccgcacaagcggtggagcatgtggtttaattcgaagcaacgcgaagaaccttaccaggccttgacatccaatgaactttctagagatagattggtgccttcgggaacattgagacaggtgctgcatggctgtcgtcagctcgtgtcgtgagatgttgggttaagtcccgtaacgagcgcaacccttgtccttagttaccagcacgtaatggtgggcactctaaggagactgccggtgacaaaccggaggaaggtggggatgacgtcaagtcatcatggcccttacggcctgggctacacacgtgctacaatggtcggtacaaagggttgccaagccgcgaggtggagctaatcccataaaaccgatcgtagtccggatcgcagtctgcaactcgactgcgtgaagtcggaatcgctagtaatcgtgaatcagaatgtcacggtgaatacgttcccgggccttgtacacaccgcccgtcacaccatgggagtgggttgcaccagaagtagctagtctaaccctcgggaggacggttaccacggtgtgattcatgactggggtg

SEQ ID NO: 2819 - DNA, 1459 bp, Pseudomonas xinjiangensis
  source 1..1459: mol_type = unassigned DNA
attgaacgctggcggcaggcctaacacatgcaagtcgagcggtagaggggagcttgctccccttgagagcggcggacgggtgagtaacacctgggaatctgcctggtagtgggggataacgttccgaaaggaacgctaataccgcatacgtcctacgggagaaagcaggggatcttcggaccttgcgctatcagatgagcccaggtcggattagctagtaggtgaggtaatggctcacctaggcgacgatccgtaactggtctgagaggatgatcagtcacactggaactgagacacggtccagactcctacgggaggcagcagtggggaatattggacaatgggcgcaagcctgatccagccatgccgcgtgtgtgaagaaggtcttcggattgtaaagcactttaagttgggaggaagggaagtaagctaataccttgctttcttgacgttaccaacagaataagcaccggctaactctgtgccagcagccgcggtaatacagagggtgcaagcgttaatcggaattactgggcgtaaagcgcgcgtaggtggctaagtaagatgggtgtgaaatccccgggctcaacctgggaactgcatccataactgcttagctagagtacggtagagggtagtggaatttcctgtgtagcggtgaaatgcgtagatataggaaggaacaccagtggcgaaggcgactacctggactgatactgacactgaggtgcgaaagcgtggggagcaaacaggattagataccctggtagtccacgccgtaaacgatgtcaactagccgttggaatccttgagattttagtggcgcagctaacgcaataagttgaccgcctggggagtacggtcgcaagattaaaactcaaatgaattgacgggggcccgcacaagcggtggagcatgtggtttaattcgaagcaacgcgaagaaccttacctggccttgacatgctgagaaccttccagagatggaagggtgccttcgggaactcagacacaggtgctgcatggctgtcgtcagctcgtgtcgtgagatgttgggttaagtcccgtaacgagcgcaacccttgtccttagttaccagcacattatggtgggcactctaaggagactgccggtgacaaaccggaggaaggtggggatgacgtcaagtcatcatggcccttacggccagggctacacacgtgctacaatggtcggtacagagggtcgccaagccgcgaggtggagctaatcccttaaaaccgatcgtagtccggattggagtctgcaactcgactccatgaagtcggaatcgctagtaatcgcgaatcagaacgtcgcggtgaatacgttcccgggccttgtacacaccgcccgtcacaccatgggagtgggttgcaccagaagtagctagtctaaccttcgggaggacggttaccacggtgtgattcatgactggggtg

SEQ ID NO: 2820 - DNA, 1436 bp, unidentified
  source 1..1436: mol_type = unassigned DNA; note = Pseudomonas yamanorum
attgaacgctggcggcaggcctaacacatgcaagtcgagcggtagagagaagcttgcttctcttgagagcggcggacgggtgagtaatgcctaggaatctgcctggtagtgggggataacgttcggaaacggacgctaataccgcatacgtcctacgggagaaagcaggggaccttcgggccttgcgctatcagatgagcctaggtcggattagctagttggtggggtaatggctcaccaaggcgacgatccgtaactggtctgagaggatgatcagtcacactggaactgagacacggtccagactcctacgggaggcagcagtggggaatattggacaatgggcgaaagcctgatccagccatgccgcgtgtgtgaagaaggtcttcggattgtaaagcactttaagttgggaggaagggcagtaaattaatactttgctgttttgacgttaccgacagaataagcaccggctaactctgtgccagcagccgcggtaatacagagggtgcaagcgttaatcggaattactgggcgtaaagcgcgcgtaggtggttcgttaagttggatgtgaaatccccgggctcaacctgggaactgcattcaaaactgacgagctagagtatggtagagggtggtggaatttcctgtgtagcggtgaaatgcgtagatataggaaggaacaccagtggcgaaggcgaccacctggactgatactgacactgaggtgcgaaagcgtggggagcaaacaggattagataccctggtagtccacgccgtaaacgatgtcaactagccgttgggagccttgagctcttagtggcgcagctaacgcattaagttgaccgcctggggagtacggccgcaaggttaaaactcaaatgaattgacgggggcccgcacaagcggtggagcatgtggtttaattcgaagcaacgcgaagaaccttaccaggccttgacatccaatgaactttctagagatagattggtgccttcgggaacattgagacaggtgctgcatggctgtcgtcagctcgtgtcgtgagatgttgggttaagtcccgtaacgagcgcaacccttgtccttagttaccagcacgtaatggtgggcactctaaggagactgccggtgacaaaccggaggaaggtggggatgacgtcaagtcatcatggcccttacggcctgggctacacacgtgctacaatggtcggtacagagggttgccaagccgcgaggtggagctaatcccagaaaaccgatcgtagtccggatcgcagtctgcaactcgactgcgtgaagtcggaatcgctagtaatcgcgaatcagaatgtcgcggtgaatacgttcccgggccttgtacacaccgcccgtcacaccatgggagtgggttgcaccagaagtagctagtctaaccttcgggaggacggttacca

SEQ ID NO: 2821 - DNA, 1459 bp, unidentified
  source 1..1459: mol_type = unassigned DNA; note = Pseudomonas zeshuii
attgaacgctggcggcaggcctaacacatgcaagtcgagcggatgaggagagcttgctctctgattcagcggcggacgggtgagtaatgcctaggaatctgcctggtagtgggggacaacgtttcgaaaggaacgctaataccgcatacgtcctacgggagaaagtgggggatcttcggacctcacgctatcagatgagcctaggtcggattagctagttggtggggtaacggctcaccaaggcgacgatccgtaactggtctgagaggatgatcagtcacactggaactgagacacggtccagactcctacgggaggcagcagtggggaatattggacaatgggcgaaagcctgatccagccatgccgcgtgtgtgaagaaggccctcgggtcgtaaagcactttaagctgggaggaagggttgtaacctaatacgttgcagctttgacgttaccagcagaataagcaccggctaactctgtgccagcagccgcggtaatacagagggtgcaagcgttaatcggaattactgggcgtaaagcgcgcgtaggtggcttggtaagttgaatgtgaaatccccgggctcaacctgggaactgcatccaaaactgcctggctagagtacggtagagggtggtggaatttcctgtgtagcggtgaaatgcgtagatataggaaggaacaccagtggcgaaggcgaccacctggactgatactgacactgaggtgcgaaagcgtggggagcaaacaggattagataccctggtagtccacgccgtaaacgatgtcaactagccgttggggtccttgagactttagtggcgcagctaacgcaataagttgaccgcctggggagtacggccgcaaggttaaaactcaaatgaattgacgggggcccgcacaagcggtggagcatgtggtttaattcgaagcaacgcgaagaaccttaccaggccttgacatgcagagaactttccagagatggagaggtgccttcgggagctctgacacaggtgctgcatggctgtcgtcagctcgtgtcgtgagatgttgggttaagtcccgtaacgagcgcaacccttgtccttagttaccagcacatcatggtgggcactctaaggagactgccggtgacaaaccggaggaaggtggggatgacgtcaagtcatcatggcccttacggcctgggctacacacgtgctacaatggtcggtacaaagggttgccaaaccgcgaggtggagctaatcccataaaaccgatcgtagtccggatcgcagtctgcaactcgactgcgtgaagtcggaatcgctagtaatcgtgaatcagaacgtcacggtgaatacgttcccgggccttgtacacaccgcccgtcacaccatgggagtgggttgcaccagaagtagctagtctaaccttcgggaggacggttaccacggtgtgattcatgactggggtg

SEQ ID NO: 2822 - DNA, 1403 bp, unidentified
  source 1..1403: mol_type = unassigned DNA; note = Pseudomonas zhaodongensis
catgcagtcgagcggatgaatggagcttgctccatgattcagcggcggacgggtgagtaatgcctaggaatctgcctattagtgggggacaacgtttcgaaaggaacgctaataccgcatacgtcctacgggagaaagcaggggaccttcgggccttgcgctaatagatgagcctaggtcggattagctagttggtgaggtaatggctcaccaaggcgacgatccgtaactggtctgagaggatgatcagtcacactggaactgagacacggtccagactcctacgggaggcagcagtggggaatattggacaatgggcgaaagcctgatccagccatgccgcgtgtgtgaagaaggtcttcggattgtaaagcactttaagttgggaggaagggcattaacctaatacgttagtgttttgacgttaccgacagaataagcaccggctaacttcgtgccagcagccgcggtaatacgaagggtgcaagcgttaatcggaattactgggcgtaaagcgcgcgtaggtggtttgttaagttggatgtgaaagccccgggctcaacctgggaactgcatccaaaactggcaagctagagtatggcagagggtggtggaatttcctgtgtagcggtgaaatgcgtagatataggaaggaacaccagtggcgaaggcgaccacctgggctaatactgacactgaggtgcgaaagcgtggggagcaaacaggattagataccctggtagtccacgccgtaaacgatgtcgactagccgttgggatccttgagatcttagtggcgcagctaacgcattaagtcgaccgcctggggagtacggccgcaaggttaaaactcaaatgaattgacgggggcccgcacaagcggtggagcatgtggtttaattcgaagcaacgcgaagaaccttaccaggccttgacatgcagagaactttccagagatggattggtgccttcgggaactctgacacaggtgctgcatggctgtcgtcagctcgtgtcgtgagatgttgggttaagtcccgtaacgagcgcaacccttgtccttagttaccagcacgtaatggtgggcactctaaggagactgccggtgacaaaccggaggaaggtggggatgacgtcaagtcatcatggcccttacggcctgggctacacacgtgctacaatggtcggtacaaagggttgccaagccgcgaggtggagctaatcccataaaaccgatcgtagtccggatcgcagtctgcaactcgactgcgtgaagtcggaatcgctagtaatcgtgaatcagaatgtcacggtgaatacgttcccgggccttgtacacaccgcccgtcacaccatgggagtgggttgctccagaagtagctagtctaaccttcgcaggacggt

SEQ ID NO: 2823 - DNA, 1451 bp, unidentified
  source 1..1451: mol_type = unassigned DNA; note = Pseudopedobacter saltans
gatgaacgctagcggcaggcctaatacatgcaagtcgaacgggattcagtttaaagcttgctttaggctgatgagagtggcgaacgggtgcgtaacgcgtatgcaacctacctatcacagggggatagctcggcgaaagtcggattaacaccgcatgacatcatgatatggcatcatattatgatcaaatctgaggaggtgatagatgggcatgcgtgccattagctagttggcggggtaacggcccaccaaggcgacgatggctaggggatctgagaggattgccccccacactggtactgagacacggaccagactcctacgggaggcagcagtaaggaatattggtcaatggagggaactctgaaccagccatgccgcgtgcaggaagactgccctatgggttgtaaactgcttttgttagggaataaaccttcttacgagtaggaagctgaatgtacctaaagaataaggatcggctaactccgtgccagcagccgcggtaatacggaggatccgagcgttatccggatttattgggtttaaagggagcgtaggcggctggataagtcaggggtgaaagacggcagctcaactgtcgcagtgcccttgatactgtttggcttgaatatagttgaggtaggcggaatgtgacaagtagcggtgaaatgcatagatatgtcacagaacaccgattgcgaaggcagcttgctaagctataattgacgctgaggctcgaaagcgtgggtatcgaacaggattagataccctggtagtccacgccctaaacgatgatgactcgatgttagcgatataccgttagcgtccaagcgaaagcgttaagtcatccacctggggagtacgtccgcaagggtgaaactcaaaggaattgacgggggcccgcacaagcggaggagcatgtggtttaattcgatgatacgcgaggaaccttacccgggcttgaaagttactgaatgatttagagatagatcagtccttcgggacaggaaactaggtgctgcatggctgtcgtcagctcgtgccgtgaggtgttgggttaagtcccgcaacgagcgcaacccctatgtttagttgccagcatttaaggtggggactctaaacagactgcctgcgcaagcagtgaggaaggatgggacgacgtcaagtcatcatggcccttacgtccggggctacacacgtgctacaatggtcggtacagagggctgctacctggcaacaggatgccaatctcaaaaagccgatcacagttcggatcggagcctgcaactcggctccgtgaagttggattcgctagtaatcgcgtatcagcaatgacgcggtgaatacgttcccgggccttgtacacaccgcccgtcaagccatggaaattgggggtgcctaaagtccgtaaccgcaaggagcggcctagggtaaaaccgataactggggct

SEQ ID NO: 2824 - DNA, 1453 bp, Pseudorhodoferax soli
  source 1..1453: mol_type = unassigned DNA
attgaacgctggcggcatgccttacacatgcaagtcgaacggcagcacgggagcaatcctggtggcgagtggcgaacgggtgagtaatatatcggaacgtgcccagtcgtgggggataacgcagcgaaagctgtgctaataccgcatacgatctatggatgaaagcgggggatcgcaagacctcgcgcgattggagcggccgatatcagattaggtagttggtggggtaaaggctcaccaagccgacgatctgtagctggtctgagaggacgaccagccacactggaactgagacacggtccagactcctacgggaggcagcagtggggaattttggacaatgggcgcaagcctgatccagcaatgccgcgtgcaggatgaaggccttcgggttgtaaactgcttttgtacggaacgaaaaggctctggttaatacctggggcccatgacggtaccgtaagaataagcaccggctaactacgtgccagcagccgcggtaatacgtagggtgcgagcgttaatcggaattactgggcgtaaagcgtgcgcaggcggtaatgcaagacagatgtgaaatccccgggcttaacctgggaactgcatttgtgactgcattgctggagtgcggcagagggggattgaattccgcgtgtagcagtgaaatgcgtagatatgcggaggaacaccgatggcgaaggcaatcccctgggcctgcactgacgctcatgcacgaaagcgtggggagcaaacaggattagataccctggtagtccacgccctaaacgatgtcaactggttgttgggtcttaactgactcagtaacgaagctaacgcgtgaagttgaccgcctggggagtacggccgcaaggttgaaactcaaaggaattgacggggacccgcacaagcggtggatgatgtggtttaattcgatgcaacgcgaaaaaccttacccacctttgacatgtatggaatcctttagagatgaaggagtgctcgaaagagagccataacacaggtgctgcatggctgtcgtcagctcgtgtcgtgagatgttgggttaagtcccgcaacgagcgcaacccttgccattagttgctacgaaagggcactctaatgggactgccggtgataaaccggaggaaggtggggatgacgtcaagtcctcatggcccttataggtggggctacacacgtcatacaatggctggtacaaagggttgccaacccgcgagggggagctaatcccataaaaccagtcgtagtccggatcgcagtctgcaactcgactgcgtgaagtcggaatcgctagtaatcgtggatcagaatgtcacggtgaatacgttcccgggtcttgtacacaccgcccgtcacaccatgggagcgggttctgccagaagtagttagcctaaccgcaaggagggcgattaccacggcagggttcgtgattggggtg

SEQ ID NO: 2825 - DNA, 1406 bp, unidentified
  source 1..1406: mol_type = unassigned DNA; note = Pseudovibrio axinellae
aacgaacgctggcggcaggcctaacacatgcaagtcgaacgattccttcgggaatagtggcagacgggtgagtaacgcgtgggaaattaccttatggtagggaacaacagttggaaacgactgctaataccctatgtgccctacgggggaaagatttatcgccataagatgtgcccgcgttagattagctagttggtgaggtaagagctcaccaaggcgacgatctatagctggtctgagaggatgatcagccacactgggactgagacacggcccagactcctacgggaggcagcagtggggaatattggacaatgggggcaaccctgatccagccatgccgcgtgtgtgatgacggccttagggttgtaaagcactttcagcagtgaagataatgacattaactgcagaagaagccccggctaacttcgtgccagcagccgcggtaatacgaagggggctagcgttgttcggaatcactgggcgtaaagagtacgtaggcggactaataagttaggggtgaaatcccaaggctcaaccttggaactgcctttaatactgttagtcttgagatcgagagaggtgagtggaactccgagtgtagaggtgaaattcgtagatattcggaagaacaccagtggcgaaggcggctcactggctcgatactgacgctgaggtacgaaagcgtggggagcaaacaggattagataccctggtagtccacgccgtaaacgatgaatgctagttgtcaggtagcttgctatttggtgacgcagctaacgcattaagcattccgcctggggagtacggtcgcaagattaaaactcaaaggaattgacgggggcccgcacaagcggtggagcatgtggtttaattcgaagcaacgcgcagaaccttaccagcccttgacatttgacgctacatcgggagaccgatggttcccttcggggacgtcaggacaggtgctgcatggctgtcgtcagctcgtgtcgtgagatgttgggttaagtcccgcaacgagcgcaaccctcgcccttagttgccagcatttagttgggcactctagggggactgccggtgataagccggaggaaggtggggatgacgtcaagtcctcatggcccttacgggctgggctacacacgtgctacaatggcggtgacagtgggcagcgacctcgcgaggggtagctaatctctaaaagccgtctcagttcggattgttctctgcaactcgagagcatgaagttggaatcgctagtaatcgcgtaacagcatgacgcggtgaatacgttcccgggccttgtacacaccgcccgtcacaccatgggagttggttttacccgaaggcgctgcgctaacccgtaaggggggcaggcgaccacggtagggtcagcgactggggtg

SEQ ID NO: 2826 - DNA, 1404 bp, Pseudovibrio denitrificans
  source 1..1404: mol_type = unassigned DNA
aacgaacgctggcggcaggcctaacacatgcaagtcgaacggatccttcgggattagtggcagacgggtgagtaacgcgtgggaagctaccttgtggtagggaacaacagttggaaacgactgctaataccctatgagccctatgggggaaagatttatcgccatgagatgtgcccgcgttagattagctagttggtaaggtaatggcttaccaaggcgacgatctatagctggtctgagaggatgatcagccacactgggactgagacacggcccagactcctacgggaggcagcagtggggaatattggacaatgggggcaaccctgatccagccatgccgcgtgagtgatgacggccttagggttgtaaagctctttcagcagtgaagataatgacattaactgcagaagaagccccggctaacttcgtgccagcagccgcggtaatacgaagggggctagcgttgttcggaatcactgggcgtaaagcgtacgtaggcggactgatcagtcaggggtgaaatcccggggctcaaccccggaactgcctttgatactgtcagtcttgagatcgagagaggtgagtggaactccgagtgtagaggtgaaattcgtagatattcggaagaacaccagtggcgaaggcggctcactggctcgatactgacgctgaggtacgaaagcgtggggagcaaacaggattagataccctggtagtccacgccgtaaacgatgaatgctagttgtcaggtagcttgctatttggtgacgcagctaacgcattaagcattccgcctggggagtacggtcgcaagattaaaactcaaaggaattgacgggggcccgcacaagcggtggagcatgtggtttaattcgaagcaacgcgcagaaccttaccagcccttgacatttggcgctacaaccggagacggttggttcccttcggggacgtcaggacaggtgctgcatggctgtcgtcagctcgtgtcgtgagatgttgggttaagtcccgcaacgagcgcaaccctcgcccttagttgccagcatttagttgggcactctagggggactgccggtgataagccggaggaaggtggggatgacgtcaagtcctcatggcccttacgggctgggctacacacgtgctacaatggcggtgacagtgggcagcgacctcgcgaggggaagctaatctccaaaagccgtctcagttcggattgttctctgcaactcgagagcatgaagttggaatcgctagtaatcgcgtaacagcatgacgcggtgaatacgttcccgggccttgtacacaccgcccgtcacaccatgggagttggttttacccgaaggcgctgtgctaaccgcaaggaggcaggcgaccacggtagggtcagcgactggggtg

SEQ ID NO: 2827 - DNA, 1467 bp, Pseudoxanthomonas dokdonensis
  source 1..1467: mol_type = unassigned DNA
agtgaacgctggcggtaggcctaacacatgcaagtcgaacggcagcacaggagagcttgctctctgggtggcgagtggcggacgggtgaggaatacatcggaatctaccttttcgtgggggataacgtagggaaacttacgctaataccgcatacgacctacgggtgaaagtgggggaccttcgggcctcacgcggatagatgagccgatgtcggattagctagttggaggggtaatggcccaccaaggcgacgatccgtagctggtctgagaggatgatcagccacactggaactgagacacggtccagactcctacgggaggcagcagtggggaatattggacaatgggcgcaagcctgatccagccataccgcgtgggtgaagaaggccttcgggttgtaaagcccttttgttgggaaagaaaagcagtcgattaatactcgattgttctgacggtacccaaagaataagcaccggctaacttcgtgccagcagccgcggtaatacgaagggtgcaagcgttactcggaattactgggcgtaaagcgtgcgtaggtggttgtttaagtctgctgtgaaagccctgggctcaacctgggaattgcagtggatactgggcgactagagtgtggtagaggatagtggaatttccggtgtagcagtgaaatgcgtagagatcggaaggaacatctgtggcgaaggcgactatctgggccaacactgacactgaggcacgaaagcgtggggagcaaacaggattagataccctggtagtccacgccctaaacgatgcgaactggatgttgggcacaacttggtgcccagtatcgaagctaacgcgttaagttcgccgcctggggagtacggtcgcaagactgaaactcaaaggaattgacgggggcccgcacaagcggtggagtatgtggtttaattcgatgcaacgcgaagaaccttacctggtcttgacatctagcgaactttccagagatggattggtgccttcgggaacgctaagacaggtgctgcatggctgtcgtcagctcgtgtcgtgagatgttgggttaagtcccgcaacgagcgcaacccttgtccttagttgccagcacgtaatggtgggaactctaaggagaccgccggtgacaaaccggaggaaggtggggatgacgtcaagtcatcatggcccttacgaccagggctacacacgtactacaatggttaggacagagggctgcaaacccgcgagggcaagccaatcccagaaacctaatctcagtccggattggagtctgcaactcgactccatgaagtcggaatcgctagtaatcgcagatcagcattgctgcggtgaatacgttcccgggccttgtacacaccgcccgtcacaccatgggagtttgttgcaccagaagcaggtagcttaaccttcgggagggcgcttgccacggtgtggccgatgactggggtg

SEQ ID NO: 2828 - DNA, 1467 bp, Pseudoxanthomonas indica
  source 1..1467: mol_type = unassigned DNA
agtgaacgctggcggtaggcctaacacatgcaagtcgaacggcagcacaggagagcttgctctctgggtggcgagtggcggacgggtgaggaatacatcggaatctaccttgtcgtgggggataacgtagggaaacttacgctaataccgcatacgaccttcgggtgaaagtgggggaccgcaaggcctcacgcgattagatgagccgatgtcggattagctagttggcggggtaaaagcccaccaaggcgacgatccgtagctggtctgagaggatgatcagccacactggaactgagacacggtccagactcctacgggaggcagcagtggggaatattggacaatgggcgcaagcctgatccagccataccgcgtgggtgaagaaggccttcgggttgtaaagcccttttgttgggaaagaaatcctgtcgattaatacttggcggggatgacggtacccaaagaataagcaccggctaacttcgtgccagcagccgcggtaatacgaagggtgcaagcgttactcggaattactgggcgtaaagcgtgcgtaggtggtggtttaagtctgctgtgaaagccctgggctcaacctgggaattgcagtggatactgggtcactagagtgtggtagagggatgcggaatttccggtgtagcagtgaaatgcgtagagatcggaaggaacatccgtggcgaaggcggcatcctgggccaacactgacactgaggcacgaaagcgtggggagcaaacaggattagataccctggtagtccacgccctaaacgatgcgaactggatgttgggtgcaacttggcacccagtatcgaagctaacgcgttaagttcgccgcctggggagtacggtcgcaagactgaaactcaaaggaattgacgggggcccgcacaagcggtggagtatgtggtttaattcgatgcaacgcgaagaaccttacctggccttgacatgtcgcgaactttccagagatggattggtgccttcgggaacgcgaacacaggtgctgcatggctgtcgtcagctcgtgtcgtgagatgttgggttaagtcccgcaacgagcgcaacccttgtccttagttgccagcacgtaatggtgggaactctaaggagaccgccggtgacaaaccggaggaaggtggggatgacgtcaagtcatcatggcccttacggccagggctacacacgtactacaatgggaaggacagagggctgcaaacccgcgagggcaagccaatcccagaaaccttctctcagtccggattggagtctgcaactcgactccatgaagtcggaatcgctagtaatcgcagatcagcattgctgcggtgaatacgttcccgggccttgtacacaccgcccgtcacaccatgggagtttgttgcaccagaagcaggtagcttaaccttcgggagggcgcttgccacggtgtggccgatgactggggtg

SEQ ID NO: 2829 - DNA, 1468 bp, Pseudoxanthomonas spadix
  source 1..1468: mol_type = unassigned DNA
gaacgctggcggtaggcctaacacatgcaagtcgaacggcagcacagtaagagcttgctcttatgggtggcgagtggcggacgggtgaggaatacatcggaatctaccttttggtgggggataacgtagggaaacttacgctaataccgcatacgcccttcgggggaaagccggggaccagcaatggcctggtgctgatagatgagccgatgtcggattagctagttggtgaggtaatggctcaccaaggcgacgatccgtagctggtctgagaggatgatcagccacactggaactgagacacggtccagactcctacgggaggcagcagtggggaatattggacaatgggcgcaagcctgatccagccataccgcgtgggtgaagaaggccttcgggttgtaaagcccttttgttgggaaagaaaagcattcggttaatacccgggtgttctgacggtacccaaagaataagcaccggctaacttcgtgccagcagccgcggtaatacgaagggtgcaagcgttactcggaattactgggcgtaaagcgtgcgtaggtggtggtttaagtccgttgtgaaagccctgggctcaacctgggaattgcagtggatactgggtcactagagtgtggtagaggatagtggaatttccggtgtagcagtgaaatgcgtagagatcggaaggaacatctgtggcgaaggcgactatctgggccaacactgacactgaggcacgaaagcgtggggagcaaacaggattagataccctggtagtccacgccctaaacgatgcgaactggatgttgggttcaacttggaacccagtatcgaagctaacgcgttaagttcgccgcctggggagtacggtcgcaagactgaaactcaaaggaattgacgggggcccgcacaagcggtggagtatgtggtttaattcgatgcaacgcgaagaaccttacctggtcttgacatccacggaactttccagagatggattggtgccttcgggaaccgtgagacaggtgctgcatggctgtcgtcagctcgtgtcgtgagatgttgggttaagtcccgcaacgagcgcaacccttgtccttagttgccagcacgtaaaggtgggaactctaaggagaccgccggtgacaaaccggaggaaggtggggatgacgtcaagtcatcatggcccttacgaccagggctacacacgtactacaatggtcaggacagagggctgcaagccggcgacggtgagccaatcccagaaacctgatctcagtccggattggagtctgcaactcgactccatgaagtcggaatcgctagtaatcgcagatcagcattgctgcggtgaatacgttcccgggccttgtacacaccgcccgtcacaccatgggagtttgttgcaccagaagcaggtagcttaaccgcaaggagggcgcttgccacggtgtggccgatgactggggtg

SEQ ID NO: 2830 - DNA, 1467 bp, Pseudoxanthomonas suwonensis
  source 1..1467: mol_type = unassigned DNA
agagaacgctggcggtaggcctaacacatgcaagtcgaacggcagcacaggagagcttgctctctgggtggcgagtggcggacaggtgaggaatacatcggaatctactctgtcgtgggggataacgtagggaaacttacgctaataccgcatacgacctacgggtgaaagtgggggaccgcaaggcctcacgcgatagaatgagccgatgtcggattagctagttggcggggtaaaggcccaccaaggcgacgatccgtagctggtctgagaggatgatcagccacactggaactgagacacggtccagactcctacgggaggcagcagtggggaatattggacaatgggcgcaagcctgatccagccataccgcgtgagtgaagaaggccctcgggttgtaaagctcttttgttgggaaagaaatcctgttggctaatacccggcagggatgacggtacccaaagaataagcaccggctaacttcgtgccagcagccgcggtaatacgaagggtgcaagcgttactcggaattactgggcgtaaagcgtgcgtaggtggtggtttaagtctgttgtgaaagccctgggctcaacctgggaattgcagtggatactggatcactagagtgtggtagagggtggcggaattcccggtgtagcagtgaaatgcgtagagatcgggaggaacatccgtggcgaaggcggccacctgggccaacactgacactgaggcacgaaagcgtggggagcaaacaggattagataccctggtagtccacgccctaaacgatgcgaactggatgttgggttcaacttggaacccagtatcgaagctaacgcgttaagttcgccgcctggggagtacggtcgcaagactgaaactcaaaggaattgacgggggcccgcacaagcggtggagtatgtggtttaattcgatgcaacgcgaagaaccttacctggtcttgacatccacggaactttccagagatggattggtgccttcgggaaccgtgagacaggtgctgcatggctgtcgtcagctcgtgtcgtgagatgttgggttaagtcccgcaacgagcgcaacccttgtccttagttgccagcacgtaatggtgggaactctaaggagaccgccggtgacaaaccggaggaaggtggggatgacgtcaagtcatcatggcccttacgaccagggctacacacgtactacaatggtggggacagagggctgcaatcccgcgagggtgagccaatcccagaaaccccatctcagtccggattggagtctgcaactcgactccatgaagtcggaatcgctagtaatcgcagatcagcattgctgcggtgaatacgttcccgggccttgtacacaccgcccgtcacaccatgggagtttgttgcaccagaagcaggtagcttaaccttcgggagggcgcttgccacggtgtggccgatgactggggtg

SEQ ID NO: 2831 - DNA, 1469 bp, Pseudoxanthomonas taiwanensis
  source 1..1469: mol_type = unassigned DNA
agtgaacgctggcggcaggcctaacacatgcaagtcgaacggcagcgggtaggaagcttgcttcctatgccggcgagtggcggacgggtgaggaacacatcggaatctactccgtcgtgggggataacgtagggaaacttacgctaataccgcatacgacctaagggtgaaagtgggggaccgcaaggcctcacgcgatggaatgagccgatgtccgattagctagttggcggggtaaaggcccaccaaggcgacgatcggtagctggtctgagaggatgatcagccacactgggactgagacacggcccagactcctacgggaggcagcagtggggaatattggacaatgggcgaaagcctgatccagccatgccgcgtgggtgaagaaggccttcgggttgtaaagcccttttgttggggaagaaatcctgctggctaatacccggcggggatgacggtacccaaagaataagcaccggctaacttcgtgccagcagccgcggtaatacgaagggtgcaagcgttactcggaattactgggcgtaaagcgtgcgtaggtggtggcttaagtccgttgtgaaagccctgggctcaacctgggaattgcagtggatactgrgtcactagagtgtggtagagggtggcggaattcccggtgtagcagtgaaatgcgtagagatcgggaggaacacccgtggcgaaggcggccacctgggccaacactgacactgaggcacgaaagcgtggggagcaaacaggattagataccctggtagtccacgccctaaacgatgcgaactggatgttgggttcaatttgggactcagtatcgaagctaacgcgttaagttcgccgcctggggagtacggtcgcaagactgaaactcaaaggaattgacgggggcccgcacaagcggtggagtatgtggtttaattcgatgcaacgcgaagaaccttacctggtcttgacatccgcggaactgcccagagatgggcgggtgccttcgggagccgcgagacaggtgctgcatggctgtcgtcagctcgtgtcgtgagatgttgggttaagtcccgcaacgagcgcaacccttgtccttagttgccagcacgtaatggtgggaactctaaggagaccgccggtgacaaaccggaggaaggtggggatgacgtcaagtcatcatggcccttacgaccagggctacacacgtactacaatggtggggacagagggctgcgaacccgcgagggggagccaatcccagaaaccccatctcagtccggattggagtctgcaactcgactccatgaagtcggaatcgctagtaatcgcagatcagcattgctgcggtgaatacgttcccgggccttgtacacaccgcccgtcacaccatgggagttggttgcaccagaagcaggtagcttaaccgcaaggagggcgcttgccacggtgtggccaatgactggggtg

SEQ ID NO: 2832 - DNA, 1426 bp, unidentified
  source 1..1426: mol_type = unassigned DNA; note = Pseudoxanthomonas wuyuanensis
ctacacatgcaagtcgaacggcagcacaggagagcttgctctctgggtggcgagtggcggacgggtgaggaatacatcggaatctacctagtcgtgggggataacgtagggaaacttacgctaataccgcatacgacctacgggtgaaagtgggggaccttcgggcctcacgcgattagatgagccgatgtcggattagctagttggaggggtaatggcccaccaaggcgacgatccgtagctggtctgagaggatgatcagccacactggaactgagacacggtccagactcctacgggaggcagcagtggggaatattggacaatgggcgcaagcctgatccagccataccgcgtgggtgaagaaggccttcgggttgtaaagcccttttgttgggaaagaaatcctattgattaatactcggtggggatgacggtacccaaagaataagcaccggctaacttcgtgccagcagccgcggtaatacgaagggtgcaagcgttactcggaattactgggcgtaaagcgtgcgtaggtggttgtttaagtctgctgtgaaagccctgggctcaacctgggaattgcagtggatactgggcgactagagtgtggtagaggatagtggaatttccggtgtagcagtgaaatgcgtagagatcggaaggaacatctgtggcgaaggcgactatctgggccaacactgacactgaggcacgaaagcgtggggagcaaacaggattagataccctggtagtccacgccctaaacgatgcgaactggatgttgggtgcaacttggcacccagtatcgaagctaacgcgttaagttcgccgcctggggagtacggtcgcaagactgaaactcaaaggaattgacgggggcccgcacaagcggtggagtatgtggtttaattcgatgcaacgcgaagaaccttacctggtcttgacatccacggaactttccagagatggattggtgccttcgggaaccgtgagacaggtgctgcatggctgtcgtcagctcgtgtcgtgagatgttgggttaagtcccgcaacgagcgcaacccttgtccttagttgccagcacgtaatggtgggaactctaaggagaccgccggtgacaaaccggaggaaggtggggatgacgtcaagtcatcatggcccttacgaccagggctacacacgtactacaatggtgaggacagagggctgcaaacccgcgagggcaagccaatcccagaaacctcatctcagtccggattggagtctgcaactcgactccatgaagtcggaatcgctagtaatcgcagatcagcattgctgcggtgaatacgttcccgggccttgtacacaccgcccgtcacaccatgggagtttgttgcaccagaagcaggtagcttaaccttcgggagggcgcttgccacgg

SEQ ID NO: 2833 - DNA, 1475 bp, Psychrobacillus insolitus
  source 1..1475: mol_type = unassigned DNA
gacgaacgctggcggcatgcctaatacatgcaagtcgagcgaatgatgaagaagcttgcttcttctgatttagcggcggacgggtgagtaacacgtgggcaacctgccctgtagattgggataactccgggaaaccggggctaataccgaataatccatttcctctcatggggaaatgttaaaagacggtttcggctgtcactacaggatgggcccgcggcgcattagctagttggtgaggtaacggctcaccaaggcgacgatgcgtagccgacctgagagggtgatcggccacactgggactgagacacggcccagactcctacgggaggcagcagtagggaatcttccacaatggacgaaagtctgatggagcaatgccgcgtgagtgaagaaggttttcggatcgtaaaactctgttgtgagggaagaacaactccgcgagtaactgctcgtaccttgacggtacctcattagaaagccacggctaactacgtgccagcagccgcggtaatacgtaggtggcaagcgttgtccggaattattgggcgtaaagcgcgcgcaggcggtcctttaagtctgatgtgaaatcccacggctcaaccgtggaaggtcattggaaactgggggacttgagtacagaagaggaaagtggaattccaagtgtagcggtgaaatgcgtagagatttggaggaacaccagtggcgaaggcgactttctggtctgtaactgacgctgaggcgcgaaagcgtggggagcaaacaggattagataccctggtagtccagggcgtaaacgatgagtgctaagtgttagggggtttccgccccttagtgctgcagctaacgcattaagcactccgcctggggagtacggtcgcaagactgaaactcaaaggaattgacgggggcccgcacaagcggtggagcatgtggtttaattcgaagcaacgcgaagaaccttaccaggtcttgacatcccactgaccggtctagagatagatctttcccttcggggacagtggtgacaggtggtgcatggttgtcgtcagctcgtgtcgtgagatgttgggttaagtcccgcaacgagcgcaacccttgatcttagttgccagcattcagttgggcactctaaggtgactgccggtgataaaccggaggaaggtggggatgacgtcaaatcatcatgccccttatgacctgggctacacacgtgctacaatggacggtacagagggtcgcaaccccgcgagggtgagctaatcccataaaaccgttctcagttcggattgtaggctgcaactcgcctacatgaagccggaatcgctagtaatcgtggatcagcatgccacggtgaggggttcccgggccttgtacacaccgcccgtcacaccacgagagtttgtaacacccgaagtcggtggggtaacccttacgggagccagccgccgaaggtgggacagatgattggggtg

SEQ ID NO: 2834 - DNA, 1476 bp, unidentified
  source 1..1476: mol_type = unassigned DNA; note = Psychrobacillus lasiicapitis
gacgaacgctggcggcgtgcctaatacatgcaagtcgagcgaatgatgaagaagcttgcttcttctgatttagcggcggacgggtgagtaacacgtgggcaacctgccctgtagattgggataactccgggaaaccggggctaataccgaataatccattccctcacatgtgggaatgttaaaagacggtttcgactgtcactacaggatgggcccgcggcgcattagctagttggtgaggtaacggctcaccaaggcgacgatgcgtagccgacctgagagggtgatcggccacactgggactgagacacggcccagactcctacgggaggcagcagtagggaatcttccacaatggacgaaagtctgatggagcaacgccgcgtgagtgaagaaggttttcggatcgtaaaactctgttgtgagggaagaacaagtacgagagtaactgctcgtaccttgacggtacctcattagaaagccacggctaactacgtgccagcagccgcggtaatacgtaggtggcaagcgttgtccggaattattgggcgtaaagcgcgcgcaggcggtcctttaagtctgatgtgaaagcccacggctcaaccgtggaaggtcattggaaactgggggacttgagtgcagaagaggaaagtggaattccaagtgtagcggtgaaatgcgtagagatttggaggaacaccagtggcgaaggcgactttctggtctgtaactgacgctgaggcgcgaaagcgtggggagcaaacaggattagataccctggtagtccacgccgtaaacgatgagtgctaagtgttagggggtttccgccccttagtgctgcagctaacgcattaagcactccgcctggggagtacggtcgcaagactgaaactcaaaggaattgacgggggcccgcacaagcggtggagcatgtggtttaattcgaagcaacgcgaagaaccttaccaggtcttgacatcccgctgaccgctctagagatagagttttcccttcggggacagcggtgacaggtggtgcatggttgtcgtcagctcgtgtcgtgagatgttgggttaagtcccgcaacgagcgcaacccttgatcttagttgccagcattcagttgggcactctaaggtgactgccggtgataaaccggaggaaggtggggatgacgtcaaatcatcatgccccttatgacctgggctacacacgtgctacaatggacggtacagagggtcgcaaccccgcgagggtgagctaatcccataaaaccgttctcagttcggattgtaggctgcaactcgcctacatgaagccggaatcgctagtaatcgtggatcagcatgccacggtgaatacgttcccgggccttgtacacaccgcccgtcacaccacgagagtttgtaacacccgaagtcggtggggtaacccttacgggagccagccgccgaaggtgggacagatgattggggtg

SEQ ID NO: 2835 - DNA, 1477 bp, Psychrobacillus psychrodurans
  source 1..1477: mol_type = unassigned DNA
gacgaacgctggcggcatgcctaatacatgcaagtcgagcgaatgacgaagaagcttgcttcttctgatttagcggcggacgggtgagtaacacgtgggcaacctgccctgtagattgggataactccgggaaaccggggctaataccgaataatccatttcctcacatggggagatgttaaaagacggcatctcgctgtcactacaggatgggcccgcggcgcattagctagttggtgaggtaacggctcaccaaggcgacgatgcgtagccgacctgagagggtgatcggccacactgggactgagacacggcccagactcctacgggaggcagcagtagggaatcttccacaatggacgaaagtctgatggagcaatgccgcgtgagtgaagaaggttttcggatcgtaaaactctgttgtgagggaagaacaagtacgagagtaactgctcgtaccttgacggtacctcattagaaagccacggctaactacgtgccagcagccgcggtaatacgtaggtggcaagcgttgtccggaattattgggcgtaaagcgcgcgcaggcggtcctttaagtctgatgtgaaatcccacggctcaaccgtggaaggtcattggaaactgggggacttgagtacagaagaggaaagcggaattccaagtgtagcggtgaaatgcgtagagatttggaggaacaccagtggcgaaggcggctttctggtctgtaactgacgctgaggcgcgaaagcgtggggagcaaacaggattagataccctggtagtccacgccgtaaacgatgagtgctaagtgttagggggtttccgccccttagtgctgcagctaacgcattaagcactccgcctggggagtacggtcgcaagactgaaactcaaaggaattgacgggggcccgcacaagcggtggagcatgtggtttaattcgaagcaacgcgaagaaccttaccaggtcttgacatcccgctgaccggcctagagataggcttttcccttcggggacagcggtgacaggtggtgcatggttgtcgtcagctcgtgtcgtgagatgttgggttaagtcccgcaacgagcgcaacccttgatcttagttgccagcattcagttgggcactctaaggtgactgccggtgataaaccggaggaaggtggggatgacgtcaaatcatcatgccccttatgacctgggctacacacgtgctacaatggacggtacagagggtcgcaaccccgcgagggtgagcaaatcccataaaaccgttctcagttcggattgtaggctgcaactcgcctacatgaagccggaatcgctagtaatcgtggatcagcatgccacggtgaatacgttcccgggccttgtacacaccgcccgtcacaccacgagagtttgtaacacccgaagtcggtggggtaacccttacgggagccagccgccgaaggtgggacagatgattggggtg

SEQ ID NO: 2836 - DNA, 1290 bp, unidentified
  source 1..1290: mol_type = unassigned DNA; note = Psychrobacillus soli
taatccatttcctcacatgaggaaatgttaaaagacggtctcggctgtcactacaggatgggcccgcggcgcattagctagttggtggggtaatggctcaccaaggcgacgatgcgtagccgacctgagagggtgatcggccacactgggactgagacacggcccagactcctacgggaggcagcagtagggaatcttccacaatggacgaaagtctgatggagcaacgccgcgtgagtgaagaaggttttcggatcgtaaaactctgttgtgagggaagaacaagtacgagagtaactgctcgtaccttgacggtacctcattagaaagccacggctaactacgtgccagcagccgcggtaatacgtaggtggcaagcgttgtccggaattattgggcgtaaagcgcgcgcaggcggtcctttaagtctgatgtgaaagcccacggctcaaccgtggaaggtcattggaaactgggggacttgagtgcagaagaggaaagtggaattccaagtgtagcggtgaaatgcgtagagatttggaggaacaccagtggcgaaggcgactttctggtctgtaactgacgctgaggcgcgaaagcgtggggagcaaacaggattagataccctggtagtccacgccgtaaacgatgagtgctaagtgttagggggtttccgccccttagtgctgcagctaacgcattaagcactccgcctggggagtacggtcgcaagactgaaactcaaaggaattgacgggggcccgcacaagcggtggagcatgtggtttaattcgaagcaacgcgaagaaccttaccaggtcttgacatcccgctgaccggtctagagatagatctttcccttcggggacagcggtgacaggtggtgcatggttgtcgtcagctcgtgtcgtgagatgttgggttaagtcccgcaacgagcgcaacccttgatcttagttgccagcattcagttgggcactctaaggtgactgccggtgataaaccggaggaaggtggggatgacgtcaaatcatcatgccccttatgacctgggctacacacgtgctacaatggacggtacagagggtcgcaaccccgcgagggtgagctaatcccataaaaccgttctcagttcggattgtaggctgcaactcgcctacatgaagccggaatcgctagtaatcgtggatcagcatgccacggtgaatacgttcccgggccttgtacacaccgcccgtcacaccacgagagtttgtaacacccgaagtcggtggggaaccctacggagcc

SEQ ID NO: 2837 - DNA, 1461 bp, Psychrobacter alimentarius
  source 1..1461: mol_type = unassigned DNA
attgaacgctggcggcaggcttaacacatgcaagtcgagcggtaacatttctagcttgctagaagatgacgagcggcggacgggtgagtaatacttaggaatctacctagtagtgggggatagctcggggaaactcgaattaataccgcatacgacctacgggagaaagggggcaacttgttgctctcgctattagatgagcctaagtcggattagctagatggtggggtaaaggcctaccatggcgacgatctgtagctggtctgagaggatgatcagccacaccgggactgagacacggcccggactcctacgggaggcagcagtggggaatattggacaatgggggaaaccctgatccagccatgccgcgtgtgtgaagaaggccttttggttgtaaagcactttaagcagtgaagaagactcttcggttaatacctggagacgatgacattagctgcagaataagcaccggctaactctgtgccagcagccgcggtaatacagagggtgcaagcgttaatcggaattactgggcgtaaagcgagcgtaggtggcttgataagtcagatgtgaaatccccgggcttaacctgggaactgcatctgatactgtcaggctagagtaggtgagaggaaggtagaattccaggtgtagcggtgaaatgcgtagagatctggaggaataccgatggcgaaggcagccttctggcatcatactgacactgaggctcgaaagcgtgggtagcaaacaggattagataccctggtagtccacgccgtaaacgatgtctactagtcgttgggtcccttgaggacttagtgacgcagctaacgcaataagtagaccgcctggggagtacggccgcaaggttaaaactcaaatgaattgacgggggcccgcacaagcggtggagcatgtggtttaattcgatgcaacgcgaagaaccttacctggtcttgacatatctagaatcctgcagagatgcgggagtgccttcgggaattagaatacaggtgctgcatggctgtcgtcagctcgtgtcgtgagatgttgggttaagtcccgcaacgagcgcaacccttgtccttagttaccagcgggttaagccgggaactctaaggatactgccagtgacaaactggaggaaggcggggacgacgtcaagtcatcatggcccttacgaccagggctacacacgtgctacaatggtaggtacagagggcagctacacagcgatgtgatgcgaatctcaaaaagcctatcgtagtccagattggagtctgcaactcgactccatgaagtaggaatcgctagtaatcgcggatcagaatgccgcggtgaatacgttcccgggccttgtacacaccgcccgtcacaccatgggagttgattgcaccagaagtggttagcctaaccgtaaggaaggcgatcaccacggtgtggttgatgactggggtg

SEQ ID NO: 2838 - DNA, 1461 bp, Psychrobacter aquaticus
  source 1..1461: mol_type = unassigned DNA
attgaacgctggcggcaggcttaacacatgcaagtcgagcggaaacgatgatagcttgctatcaggcgtcgagcggcggacgggtgagtaatacttaggaatctacctagtagtgggggatagctcggggaaactcgaattaataccgcatacgacctacgggagaaagggggcaacttgttgctctcgctattagatgagcctaagtcggattagctagatggtggggtaaaggcctaccatggcgacgatctgtagctggtctgagaggatgatcagccacaccgggactgagacacggcccggactcctacgggaggcagcagtggggaatattggacaatgggggaaaccctgatccagccatgccgcgtgtgtgaagaaggccttttggttgtaaagcactttaagcagtgaagaagactcttcggttaatacccggagacgatgacattagctgcagaataagcaccggctaactctgtgccagcagccgcggtaatacagagggtgcaagcgttaatcggaattactgggcgtaaagcgagcgtaggtggcttgataagtcagatgtgaaatccccgggcttaacctgggaactgcatctgaaactgtcaggctagagtaggtgagaggaaggtagaattccaggtgtagcggtgaaatgcgtagagatctggaggaataccgatggcgaaggcagccttctggcatcatactgacactgaggctcgaaagcgtgggtagcaaacaggattagataccctggtagtccacgccgtaaacgatgtctactagtcgttgggtcccttgaggacttagtgacgcagctaacgcaataagtagaccgcctggggagtacggccgcaaggttaaaactcaaatgaattgacgggggcccgcacaagcggtggagcatgtggtttaattcgatgcaacgcgaagaaccttacctggtcttgacatatctagaatcctgcagagatgcgggagtgccttcgggaattagaatacaggtgctgcatggctgtcgtcagctcgtgtcgtgagatgttgggttaagtcccgcaacgagcgcaacccttgtccttagttaccagcgggttaagccgggaactctaaggatactgccagtgacaaactggaggaaggcggggacgacgtcaagtcatcatggcccttacgaccagggctacacacgtgctacaatggtaggtacagagggcagctacacagcgatgtgatgcgaatctcaaaaagcctatcgtagtccagattggagtctgcaactcgactccatgaagtaggaatcgctagtaatcgcggatcagaatgccgcggtgaatacgttcccgggccttgtacacaccgcccgtcacaccatgggagttgattgcaccagaagtggatagcttaaccttcggggaggcgttcaccacggtgtggttgatgactggggtg

SEQ ID NO: 2839 - DNA, 1461 bp, Psychrobacter arcticus
  source 1..1461: mol_type = unassigned DNA
attgaacgctggcggcaggcttaacacatgcaagtcgagcggaaacgatggtagcttgctaccaggcgtcgagcggcggacgggtgagtaatacttaggaatctacctagtagtgggggatagcacggggaaactcgtattaataccgcatacgacctacgggagaaagggggcagtttactgctctcgctattagatgagcctaagtcggattagctagatggtggggtaaaggcctaccatggcgacgatctgtagctggtctgagaggatgatcagccacaccgggactgagacacggcccggactcctacgggaggcagcagtggggaatattggacaatgggggaaaccctgatccagccatgccgcgtgtgtgaagaaggccttttggttgtaaagcactttaagcagtgaagaagactccatggttaatacccatggacgatgacattagctgcagaataagcaccggctaactctgtgccagcagccgcggtaatacagagggtgcaagcgttaatcggaattactgggcgtaaagggagcgtaggtggctcgataagtcagatgtgaaatccccgggctcaacctgggaactgcatctgatactgttgagctagagtatgtgagaggaaggtagaattccaggtgtagcggtgaaatgcgtagagatctggaggaataccgatggcgaaggcagccttctggcataatactgacactgaggctcgaaagcgtgggtagcaaacaggattagataccctggtagtccacgccgtaaacgatgtctactagtcgttgggtcccttgaggacttagtgacgcagctaacgcaataagtagaccgcctggggagtacggccgcaaggttaaaactcaaatgaattgacgggggcccgcacaagcggtggagcatgtggtttaattcgatgcaacgcgaagaaccttacctggtcttgacatatctagaatcctgcagagatgcgggagtgccttcgggaattagaatacaggtgctgcatggctgtcgtcagctcgtgtcgtgagatgttgggttaagtcccgcaacgagcgcaacccttgtccttagttaccagcgggttaagccgggaactctaaggatactgccagtgacaaactggaggaaggcggggacgacgtcaagtcatcatggcccttacgaccagggctacacacgtgctacaatggtaggtacagagggcagctacacagcgatgtgatgcgaatctcaaaaagcctatcgtagtccagattggagtctgcaactcgactccatgaagtaggaatcgctagtaatcgcggatcagaatgccgcggtgaatacgttcccgggccttgtacacaccgcccgtcacaccatgggagttgattgcaccagaagtggatagcttaaccttcgggaaggcgttcaccacggtgtggttgatgactggggtg

SEQ ID NO: 2840 - DNA, 1461 bp, Psychrobacter cryohalolentis
  source 1..1461: mol_type = unassigned DNA
attgaacgctggcggcaggcttaacacatgcaagtcgagcggaaacgatgatagcttgctatcaggcgtcgagcggcggacgggtgagtaatacttaggaatctacctagtagtgggggatagcacggggaaactcgtattaataccgcatacgacctacgggagaaagggggcagtttactgctctcgctattagatgagcctaagtcggattagctagatggtggggtaaaggcctaccatggcgacgatctgtagctggtctgagaggatgatcagccacaccgggactgagacacggcccggactcctacgggaggcagcagtggggaatattggacaatgggggaaaccctgatccagccatgccgcgtgtgtgaagaaggccttttggttgtaaagcactttaagcagtgaagaagactcttcggttaatacccggagacgatgacattagctgcagaataagcaccggctaactctgtgccagcagccgcggtaatacagagggtgcaagcgttaatcggaattactgggcgtaaagggagcgtaggtggctcgataagtcagatgtgaaatccccgggctcaacctgggaactgcatctgatactgttgagctagagtatgtgagaggaaggtagaattccaggtgtagcggtgaaatgcgtagagatctggaggaataccgatggcgaaggcagccttctggcataatactgacactgaggctcgaaagcgtgggtagcaaacaggattagataccctggtagtccacgccgtaaacgatgtctactagtcgttgggtcccttgaggacttagtgacgcagctaacgcaataagtagaccgcctggggagtacggccgcaaggttaaaactcaaatgaattgacgggggcccgcacaagcggtggagcatgtggtttaattcgatgcaacgcgaagaaccttacctggtcttgacatatctagaatcctgcagagatgcgggagtgccttcgggaattagaatacaggtgctgcatggctgtcgtcagctcgtgtcgtgagatgttgggttaagtcccgcaacgagcgcaacccttgtccttagttaccagcgggttaagccgggaactctaaggatactgccagtgacaaactggaggaaggcggggacgacgtcaagtcatcatggcccttacgaccagggctacacacgtgctacaatggtaggtacagagggcagctacacagcgatgtgatgcgaatctcaaaaagcctatcgtagtccagattggagtctgcaactcgactccatgaagtaggaatcgctagtaatcgcggatcagaatgccgcggtgaatacgttcccgggccttgtacacaccgcccgtcacaccatgggagttgattgcaccagaagtggatagcttaaccttcgggggagcgttcaccacggtgtggttgatgactggggtg

SEQ ID NO: 2841 - DNA, 1461 bp, Psychrobacter fozii
  source 1..1461: mol_type = unassigned DNA
attgaacgctggcggcaggcttaacacatgcaagtcgagcggaaacgatgatagcttgctatcaggcgtcgagcggcggacgggtgagtaatacttaggaatctacctagtagtgggggatagcacggggaaactcgtattaataccgcatacgacctacgggagaaagggggcagtttactgctctcgctattagatgagcctaagtcggattagctagatggtggggtaaaggcctaccatggcgacgatctgtagctggtctgagaggatgatcagccacaccgggactgagacacggcccggactcctacgggaggcagcagtggggaatattggacaatgggggaaaccctgatccagccatgccgcgtgtgtgaagaaggccttttggttgtaaagcactttaagcagtgaagaagactccgtggttaatacccacggacgatgacattagctgcagaataagcaccggctaactctgtgccagcagccgcggtaatacagagggtgcaagcgttaatcggaattactgggcgtaaagggagcgtaggtggctctataagtcagatgtgaaatccccgggctcaacctgggaactgcatctgaaactgtagagctagagtatgtgagaggaaggtagaattccaggtgtagcggtgaaatgcgtagagatctggaggaataccgatggcgaaggcagccttctggcataatactgacactgaggctcgaaagcgtgggtagcaaacaggattagataccctggtagtccacgccgtaaacgatgtctactagtcgttgggtcccttgaggacttagtgacgcagctaacgcaataagtagaccgcctggggagtacggccgcaaggttaaaactcaaatgaattgacgggggcccgcacaagcggtggagcatgtggtttaattcgatgcaacgcgaagaaccttacctggtcttgacatatctagaatcctgcagagatgcgggagtgccttcgggaattagaatacaggtgctgcatggctgtcgtcagctcgtgtcgtgagatgttgggttaagtcccgcaacgagcgcaacccttgtccttagttaccagcgggttaagccgggaactctaaggatactgccagtgacaaactggaggaaggcggggacgacgtcaagtcatcatggcccttacgaccagggctacacacgtgctacaatggtaggtacagagggcagctacacagcgatgtgatgcgaatctcaaaaagcctatcgtagtccagattggagtctgcaactcgactccatgaagtaggaatcgctagtaatcgcggatcagaatgccgcggtgaatacgttcccgggccttgtacacaccgcccgtcacaccatgggagttgattgcaccagaagtggatagcttaaccttcggggaggcgttcaccacggtgtggttgatgactggggtg

SEQ ID NO: 2842 - DNA, 1461 bp, Psychrobacter frigidicola
  source 1..1461: mol_type = unassigned DNA
attgaacgctggcggcaggcttaacacatgcaagtcgagcggtaacatttctagcttgctagaagatgacgagcggcggacgggtgagtaatacttaggaatctacctagtagtgggggatagctcggggaaactcgaattaataccgcatacgacctacgggagaaagggggcaacttgttgctctcgctattagatgagcctaagtcggattagctagatggtggggtaaaggcctaccatggcgacgatctgtagctggtctgagaggatgatcagccacaccgggactgagacacggcccggactcctacgggaggcagcagtggggaatattggacaatgggggcaaccctgatccagccatgccgcgtgtgtgaagaaggccttttggttgtaaagcactttaagcagtgaagaagactccgtggttaatacccacggacgatgacattagctgcagaataagcaccggctaactctgtgccagcagccgcggtaatacagagggtgcaagcgttaatcggaattactgggcgtaaagggagcgtaggtggctcgataagtcagatgtgaaatccccgggcttaacctgggaactgctactgatactgttgagctagagtatgtgagaggaaggtagaattccaggtgtagcggtgaaatgcgtagagatctggaggaataccgatggcgaaggcagccttctggcataatactgacactgaggctcgaaagcgtgggtagcaaacaggattagataccctggtagtccacgccgtaaacgatgtctactagtcgttgggtcccttgaggacttagtgacgcagctaacgcaataagtagaccgcctggggagtacggccgcaaggttaaaactcaaatgaattgacgggggcccgcacaagcggtggagcgtgtggtttaattcgatgcaacgcgaagaaccttacctggtcttgacatatctagaatcctgcagagatgcgggagtgccttcgggaattagaatacaggtgctgcatggctgtcgtcagctcgtgtcgtgagatgttgggttaagtcccgcaacgagcgcaacccttgtccttagttaccagcgggttaagccgggaactctaaggatactgccagtgacaaactggaggaaggcggggacgacgtcaagtcatcatggcccttacgaccagggctacacacgtgctacaatggtaggtacagagggcagctacacagcgatgtgatgcgaatctcaaaaagcctatcgtagtccagattggagtctgcaactcgactccatgaagtaggaatcgctagtaatcgcggatcagaatgccgcggtgaatacgttcccgggccttgtacacaccgcccgtcacaccatgggagttgattgcaccagaagtggatagcctaaccttcgggaaggcgttcaccacggtgtggttgatgactggggtg

SEQ ID NO: 2843 - DNA, 1458 bp, Psychrobacter immobilis
  source 1..1458: mol_type = unassigned DNA
  misc_difference 42: note = n is a, c, g, or t
  misc_difference 49: note = n is a, c, g, or t
  misc_difference 63: note = n is a, c, g, or t
ttgaacgctggcggcaggcttaacacatgcaagtcgagcggnaacgatnggagcttgctattngctgtcgagcggcggacgggtgagtaatacttaggaatctacctagtagtgggggatagcacggggaaactcgtattaataccgcatacgacctacgggagaaagggggcagtttactgctctcgctattagatgagcctaagtcggattagctagatggtggggtaaaggcctaccatggcgacgatctgtagctggtctgagaggatgatcagccacaccgggactgagacacggcccggactcctacgggaggcagcagtggggaatattggacaatgggggaaaccctgatccagccatgccgcgtgtgtgaagaaggccttttggttgtaaagcactttaagcagtgaagaagactccgtggttaatacccatggacgatgacattagctgcagaataagcaccggctaactctgtgccagcagccgcggtaatacagagggtgcaagcgttaatcggaattactgggcgtaaagggagcgtaggtggctctataagtcagatgtgaaatccccgggcttaacctgggaactgcatctgaaactgtagagctagagtatgtgagaggaaggtagaattccaggtgtagcggtgaaatgcgtagagatctggaggaataccgatggcgaaggcagccttctggcataatactgacactgaggctcgaaagcgtgggtagcaaacaggattagataccctggtagtccacgccgtaaacgatgtctactagtcgttgggtcccttgaggacttagtgacgcagctaacgcaataagtagtccgcctggggagtacggccgcaaggttaaaactcaaatgaattgacgggggcccgcacaagcggtggagcatgtggtttaattcgatgcaacgcgaagaaccttacctggtcttgacatatctagaatcctgcagagatgcgggagtgccttcgggaattagaatacaggtgctgcatggctgtcgtcagctcgtgtcgtgagatgttgggttaagtcccgcaacgagcgcaacccttgtccttagttaccagcgggttagccgggaactctaaggatactgccagtgacaaactggaggaaggcggggacgacgtcaagtcatcatggcccttacgaccagggctacacacgtgctacaatggtaggtacagagggcagctacacagcgatgtgatgcgaatctcaaaaagcctatcgtagtccagattggagtctgcaactcgactccatgaagtaggaatcgctagtaatcgcggtacagaatgccgcggtgaatacgttcccgggccttgtacacaccgcccgtcacaccatgggagttgattgcaccagaagtggatagcttaaccttcgggggagcgttcacacggtgtggttgatgactggggtg

SEQ ID NO: 2844 - DNA, 1449 bp, Psychrobacter lutiphocae
  source 1..1449: mol_type = unassigned DNA
ggcggcaggcttaacacatgcaagtcgagcggaaacgatgggagcttgctcccaggcgtcgagcggcggacgggtgagtaacacttaggaatctgcccagtagtgggggatagctcggggaaactcgaattaataccgcatacaccctacggggaaaagggggcgcttgcgctctcgctattggatgagcctaagacggattagctagttggtggggtaaaggcctaccaaggcgacgatctgtagctggtctgagaggatgatcagccacaccgggactgagacacggcccggactcctacgggaggcagcagtggggaatattggacaatgggggcaaccctgatccagccatgccgcgtgtgtgaagaaggccttttggttgtaaagcactttaagcagtgaagaagaccttatggttaatacccataagcgatgacattagctgcagaataagcaccggctaactctgtgccagcagccgcggtaatacagagggtgcaagcgttaatcggaattactgggcgtaaagcgagcgtaggtggtttaataagtcagatgtgaaatccccgggcttaacctgggaactgcatctgatactgttaagctagagtaggtgagagggaggtagaatttcaggtgtagcggtgaaatgcgtagagatctgaaggaataccgatggcgaaggcagcctcctggcatcatactgacactgaggttcgaaagcgtgggtagcaaacaggattagataccctggtagtccacgccgtaaacgatgtctactagtcgttgggggacttgatcccttagtgacgcagctaacgcaataagtagaccgcctggggagtacggccgcaaggttaaaactcaaatgaattgacgggggcccgcacaagcggtggagcatgtggtttaattcgatgcaacgcgaagaaccttacctggtcttgacatacacagaatcttgtagagatacgagagtgccttcgggaattgtgatacaggtgctgcatggctgtcgtcagctcgtgtcgtgagatgttgggttaagtcccgcaacgagcgcaacccttttccttagttaccagcggttaggccggggactctaaggatactgccagtgacaaactggaggaaggcggggacgacgtcaagtcatcatggcccttacgaccagggctacacacgtgctacaatggtaggtacagagggcagctacacagcgatgtgatgcgaatctcaaaaagcctatcgtagtccggattggagtctgcaactcgactccatgaagtcggaatcgctagtaatcgcggatcagaatgccgcggtgaatacgttcccgggccttgtacacaccgcccgtcacaccatgggagttgattgcaccagaagtgggtagcctaaccttttagggaggcgctcaccacggtgtggtcgatgactggggtg

SEQ ID NO: 2845 - DNA, 1459 bp, Psychrobacter pacificensis
  source 1..1459: mol_type = unassigned DNA
  misc_difference 75: note = n is a, c, g, or t
  misc_difference 175: note = n is a, c, g, or t
  misc_difference 347: note = n is a, c, g, or t
attgaacgctggcggcaggcttaacacatgcaagtcgagcggaaacgatgatagcttgctattaggcgtcgagcngcggacgggtgagtaatacttaggaatctacctagtagtgggggatagctcggggaaactcgaattaataccgcatacgtctacgggagaaagcaggggntcattagaccttgcgctattagatgagcctaagtcggattagctagatggtggggtaaaggcctaccatggcgacgatctgtagctggtctgagaggatgatcagccacaccgggactgagacacggcccggactctacgggaggcagcagtggggaatattggacaatggngggaaccctgatccagccatgccgcgtgtgtgaagaaggccttttggttgtaaagcactttaagcagtgaagaagactcttcggttaatacccggggacgatgacattagctgcagaataagcaccggctaactctgtgccagcagccgcggtaatacagagggtgcaagcgttaatcggaattactgggcgtaaagcgagcgtaggtggcttgataagtcagatgtgaaatccccgggcttaacctgggaactgcatctgaaactgttaggctagagtaggtgagagggaagtagaatttcaggtgtagcggtgaaatgcgtagagatctgaaggaataccgatggcgaaggcagcttcctggcatcatactgacactgaggctcgaaagcgtgggtagcaaacaggattagataccctggtagtccacgccgtaaacgatgtctactagtcgttgggtcccttgaggacttagtgacgcagctaacgcaataagtagaccgcctggggagtacggccgcaaggttaaaactcaaatgaattgacgggggcccgcacaagcggtggagcatgtggtttaattcgatgcaacgcgaagaaccttacctggtcttgacatacacagaatcttgtagagatacgagagtgccttcgggaattgtgatacaggtgctgcatggctgtcgtcagctcgtgtcgtgagatgttgggttaagtcccgcaacgagcgcaacccttgtccttagttaccagcacttcgggtgggaactctaaggatactgccagtgacaaactggaggaaggcggggacgacgtcaagtcatcatggcccttacgaccagggctacacacgtgctacaatggtaggtacagagggcagctacacagcgatgtgatgcgaatctcaaaaagcctatcgtagtccagattggagtctgcaactcgactccatgaagtaggaatcgctagtaatcgcggatcagaatgccgcggtgaatacgttcccgggccttgtacacaccgcccgtcacaccatgggagttgattgcaccagaagtggttagcctaacttagtgagggcgatcaccacggtgtggtcgatgactggggtg

SEQ ID NO: 2846 - DNA, 1457 bp, unidentified
  source 1..1457: mol_type = unassigned DNA; note = Psychrobacter pasteurii
attgaacgctggcggcaggcttaacacatgcaagtcgagcggaaacgatggtagcttgctaccaggcgtcgagcggcggacgggtgagtaatacttaggaatctgcccagtagtgggggatagctcggggaaactcgaattaataccgcatacaccctacggggaaaagggggcgcttgcgctctcgctattggatgagcctaagacggattagctagttggtggggtaaaggcctaccaaggcgacgatctgtagctggtctgagaggatgatcagccacaccgggactgagacacggcccggactcctacgggaggcagcagtggggaatattggacaatgggggcaaccctgatccagccatgccgcgtgtgtgaagaaggccttttggttgtaaagcactttaagcagtgaagaagacctaacggttaatacccgttagcgatgacattagctgcagaataagcaccggctaactctgtgccagcagccgcggtaatacagagggtgcaagcgttaatcggaattactgggcgtaaagcgagcgtaggtggcttgataagtcagatgtgaaatccccgggcttaacctgggaactgcatctgatactgttgggctagagtaggtgagagggaggtagaatttcaggtgtagcggtgaaatgcgtagagatctgaaggaataccgatggcgaaggcagcctcctggcatcatactgacactgaggttcgaaagcgtgggtagcaaacaggattagataccctggtagtccacgccgtaaacgatgtctactagtcgttggggaacttgattccttagtgacgcagctaacgcaataagtagaccgcctggggagtacggccgcaaggttaaaactcaaatgaattgacgggggcccgcacaagcggtggagcatgtggtttaattcgatgcaacgcgaagaaccttacctggtcttgacatatctagaatcctgcagagatgcgggagtgccttcgggaattagaatacaggtgctgcatggctgtcgtcagctcgtgtcgtgagatgttgggttaagtcccgcaacgagcgcaacccttttccttagttaccagcggtttggccggggactctaaggatactgccagtgacaaactggaggaaggcggggacgacgtcaagtcatcatggcccttacgaccagggctacacacgtgctacaatggtaggtacagagggcagctacacagcgatgtgatgcgaatctcaaaaagcctatcgtagtccagattggagtctgcaactcgactccatgaagtcggaatcgctagtaatcgcggatcagaatgccgcggtgaatacgttcccgggccttgtacacaccgcccgtcacaccatgggagttgattgcaccagaagtgggtagcctaacttttagagggcgctcaccacggtgtggttgatgactggggtg

SEQ ID NO: 2847 - DNA, 1458 bp, unidentified
  source 1..1458: mol_type = unassigned DNA; note = Psychrobacter piechaudii
attgaacgctggcggcaggcttaacacatgcaagtcgagcggtaacaggagaagcttgcttcttgctgacgagcggcggacgggtgagtaatacttaggaatctgcccagtagtgggggatagctcggggaaactcgaattaataccgcatacaccctacggggaaaagggggcactttgtgctctcgctattggatgagcctaagtcggattagctagttggtggggtaaaggcctaccaaggcgacgatctgtagctggtctgagaggatgatcagccacaccgggactgagacacggcccggactcctacgggaggcagcagtggggaatattggacaatgggggcaaccctgatccagccatgccgcgtgtgtgaagaaggccttttggttgtaaagcactttaagcagtgaagaagactctatggttaatacccatagacgatgacattagctgcagaataagcaccggctaactctgtgccagcagccgcggtaatacagagggtgcaagcgttaatcggaattactgggcgtaaagcgagcgtaggtggcttaataagtcagatgtgaaatccccgggcttaacctgggaactgcatctgatactgttaggctagagtaggtgagagggaggtagaatttcaggtgtagcggtgaaatgcgtagagatctgaaggaataccgatggcgaaggcagcctcctggcatcatactgacactgaggttcgaaagcgtgggtagcaaacaggattagataccctggtagtccacgccgtaaacgatgtctactagtcgttggggaacttgattccttagtgacgcagctaacgcaataagtagaccgcctggggagtacggccgcaaggttaaaactcaaatgaattgacgggggcccgcacaagcggtggagcatgtggtttaattcgatgcaacgcgaagaaccttacctggtcttgacatatctagaatcctgcagagatgcgggagtgccttcgggaattagaatacaggtgctgcatggctgtcgtcagctcgtgtcgtgagatgttgggttaagtcccgcaacgagcgcaacccttttccttagttaccagcggttaggccggggactctaaggatactgccagtgacaaactggaggaaggcggggacgacgtcaagtcatcatggcccttacgaccagggctacacacgtgctacaatggtaggtacagagggcagctacacagcgatgtgatgcgaatctcaaaaagcctatcgtagtccagattggagtctgcaactcgactccatgaagtcggaatcgctagtaatcgcggatcagaatgccgcggtgaatacgttcccgggccttgtacacaccgcccgtcacaccatgggagttgattgcaccagaagtgggtagcctaacttttagagggcgctcaccacggtgtggtcgatgactggggtg

SEQ ID NO: 2848 - DNA, 1457 bp, Psychrobacter piscatorii
  source 1..1457: mol_type = unassigned DNA
aacgctggcggcaggcttaacacatgcaagtcgagcggaaacgatgatagcttgctatcaggcgtcgagcggcggacgggtgagtaatacttaggaatctacctagtagtgggggatagcacggggaaactcgtattaataccgcatacgtcctacgggagaaagggggcaacttgttgctctcgctattagatgagcctaagtcggattagctagatggtggggtaaaggcctaccatggcgacgatctgtagctggtctgagaggatgatcagccacaccgggactgagacacggcccggactcctacgggaggcagcagtggggaatattggacaatgggggaaaccctgatccagccatgccgcgtgtgtgaagaaggccttttggttgtaaagcactttaagcagtgaagaagactcttcggttaatacccggagacgatgacattagctgcagaataagcaccggctaactctgtgccagcagccgcggtaatacagagggtgcaagcgttaatcggaattactgggcgtaaagcgagcgtaggtggcttgataagtcagatgtgaaatccccgggcttaacctgggaactgcatctgaaactgttaggctagagtaggtgagagggaagtagaatttcaggtgtagcggtgaaatgcgtagagatctgaaggaataccgatggcgaaggcagcttcctggcatcatactgacactgaggctcgaaagcgtgggtagcaaacaggattagataccctggtagtccacgccgtaaacgatgtctactagtcgttgggtcccttgaggacttagtgacgcagctaacgcaataagtagaccgcctggggagtacggccgcaaggttaaaactcaaatgaattgacgggggcccgcacaagcggtggagcatgtggtttaattcgatgcaacgcgaagaaccttacctggtcttgacatatctagaatcctgcagagatgcgggagtgccttcgggaattagaatacaggtgctgcatggctgtcgtcagctcgtgtcgtgagatgttgggttaagtcccgcaacgagcgcaacccttgtccttagttaccagcgggttaagccgggaactctaaggatactgccagtgacaaactggaggaaggcggggacgacgtcaagtcatcatggcccttacgaccagggctacacacgtgctacaatggtaggtacagagggcagctacacagcgatgtgatgcgaatctcaaaaagcctatcgtagtccagattggagtctgcaactcgactccatgaagtaggaatcgctagtaatcgcggatcagaatgccgcggtgaatacgttcccgggccttgtacacaccgcccgtcacaccatgggagttgattgcaccagaagtggatagcttaaccgtaaggggagcgttcaccacggtgtggttgatgactggggtg

SEQ ID NO: 2849 - DNA, 1461 bp, Psychrobacter urativorans
  source 1..1461: mol_type = unassigned DNA
attgaacgctggcggcaggcttaacacatgcaagtcgagcggtaacaggagaagcttgcttctcgctgacgagcggcggacgggtgagtaatacttaggaatctacctagtagtgggggatagcacggggaaactcgtattaataccgcatacgacctacgggagaaagggggcagtttactgctctcgctattagatgagcctaagtcggattagctagatggtggggtaaaggcctaccatggcgacgatctgtagctggtctgagaggatgatcagccacaccgggactgagacacggcccggactcctacgggaggcagcagtggggaatattggacaatgggggaaaccctgatccagccatgccgcgtgtgtgaagaaggccttttggttgtaaagcactttaagcagtgaagaagactccgtggttaatacccacggacgatgacattagctgcagaataagcaccggctaactctgtgccagcagccgcggtaatacagagggtgcaagcgttaatcggaattactgggcgtaaagggagcgtaggtggctcgataagtcagatgtgaaatccccgggcttaacctgggaactgcatctgatactgttgagctagagtatgtgagaggaaggtagaattccaggtgtagcggtgaaatgcgtagagatctggaggaataccgatggcgaaggcagccttctggcataatactgacactgaggctcgaaagcgtgggtagcaaacaggattagataccctggtagtccacgccgtaaacgatgtctactagtcgttgggtcccttgaggacttagtgacgcagctaacgcaataagtagaccgcctggggagtacggccgcaaggttaaaactcaaatgaattgacgggggcccgcacaagcggtggagcatgtggtttaattcgatgcaacgcgaagaaccttacctggtcttgacatatctagaatcctgcagagatgcgggagtgccttcgggaattagaatacaggtgctgcatggctgtcgtcagctcgtgtcgtgagatgttgggttaagtcccgcaacgagcgcaacccttgtccttagttaccagcgggttaagccgggaactctaaggatactgccagtgacaaactggaggaaggcggggacgacgtcaagtcatcatggcccttacgaccagggctacacacgtgctacaatggtaggtacagagggcagctacacagcgatgtgatgcgaatctcaaaaagcctatcgtagtccagattggagtctgcaactcgactccatgaagtaggaatcgctagtaatcgcggatcagaatgccgcggtgaatacgttcccgggccttgtacacaccgcccgtcacaccatgggagttgattgcaccagaagtggatagcttaaccttcgggggagcgttcaccacggtgtggttgatgactggggtg

SEQ ID NO: 2850 - DNA, 1469 bp, unidentified
  source 1..1469: mol_type = unassigned DNA; note = Psychromonas ingrahami
attgaacgctggcggcaggcttaacacatgcaagtcgaacggtaacagagaatagcttgctattttgctgacgagtggcggacgggtgagtaatgcttgggaatttgccttgttgcgggggacaacagttggaaacgactgctaataccgcataatgtctccggaccaaaggtggcctctatttatatgctatcgcgacaagatgagcccaagtgggattagctagttggtaaggtaatggcttaccaaggcgtcgatccctagctggtcttagaggatgaccagccacactggaactgagacacggtccagactcctacgggaggcagcagtggggaatattgcacaatggaggaaactctgatgcagccatgccgcgtgtgtgaagaaggctttcgggttgtaaagcactttcagcgaggaggaaagggtaatggttaatatccattatctgtgacgttactcgcagaagaagcaccggctaactccgtgccagcagccgcggtaatacggagggtgcgagcgttaatcggaattactgggcgtaaagcgcgcgtaggcggttaattaagtcagatgtgaaagcccagggctcaaccttggaactgcatttgaaactggttaactagagttttgtagagggtggtagaatttcaggtgtagcggtgaaatgcgtagagatctgaaggaataccagtggcgaaggcggccacctggacaaagactgacgctgaggcgcgaaggcgtggggagcaaacgggattagataccccggtagtccacgcagtaaacgatgtctattagaagtttgtggctatatgccgtgggtttcaaagctaacgcattaaatagaccgcctggggagtacggccgcaaggttaaaactcaaatgaattgacgggggcccgcacaagcggtggagcatgtggtttaattcgatgcaacgcgaagaaccttaccatcccttgacatccagagaatctgttagagatagtagagtgccttcgggaactctgagacaggtgctgcatggctgtcgtcagctcgtgttgtgaaatgttgggttaagtcccgcaacgagcgcaacccttatccttagttgccagcacgtaatggtgggaactctagggagactgccggtgataaaccggaggaaggtggggacgacgtcaagtcatcatggcccttacgggatgggctacacacgtgctacaatggcaaatacaaagggttgctagcctgcgaaggtatgcgaatctcataaagtttgtcgtagtccggatcggagtctgcaactcgactccgtgaagttggaatcgctagtaatcgtggatcagaatgccacggtgaatacgttcccgggccttgtacacaccgcccgtcacaccatgggagtgggctgcaccagaagtcattagcttaacctttcggggatggcgatgaccacggtgtggttcatgactggggtg

SEQ ID NO: 2851 - DNA, 1469 bp, Psychromonas ingrahamii; identical to SEQ ID NO: 2850
  source 1..1469: mol_type = unassigned DNA

SEQ ID NO: 2852 - DNA, 1446 bp, Psychrosphaera saromensis
  source 1..1446: mol_type = unassigned DNA
attgaacgctggcggcaggcctaacacatgcaagtcgaacggtaacagaactagcttgctagttgctgacgagtggcggacgggtgagtaatgcttgggaatttgcctttaggtgggggacaacagttggaaacgactgctaataccgcataatagctacggcttaaagggggcttcggctctcgcctttagagaagcccaagtgggattagatagttggtgtggtaatggcgcaccaagtcaacgatccctagctggtctgagaggatgatcagccacactggaactgagacacggtccagactcctacgggaggcagcagtggggaatattgcacaatgggcgcaagcctgatgcagccatgccgcgtgtgtgaagaaggccttcgggttgtaaagcactttcagcgaggaggaaagcttagtggttaatacctactaggtgtgacgttactcgcagaagaaggaccggctaactccgtgccagcagccgcggtaatacggagggtccgagcgttaatcggaattactgggcgtaaagcgtacgcaggcggtcatttaagtcagatgtgaaagccccgggctcaacctgggaactgcatttgaaactggatgactagagtgcgacagagggtggtagaatttcaggtgtagcggtgaaatgcgtagagatctgaaggaataccaatggcgaaggcagccacctgggtcgacactgacgctcatgtacgaaagcgtgggtagcaaacaggattagataccctggtagtccacgccgtaaacgatgtctactagcagcttggcgcttaagcgctgttttgcgaagctaacgcgataagtagaccgcctggggagtacggccgcaaggttaaaactcaaatgaattgacgggggcccgcacaagcggtggagcatgtggtttaattcgatgcaacgcgaagaaccttaccatctcttgacatccagagaattttctagagatagattagtgccttcgggaactctgagacaggtgctgcatggctgtcgtcagctcgtgttgtgaaatgttgggttaagtcccgcaacgagcgcaacccttatccttagttgctagcaggttatgctgagaactctaaggagactgccggtgacaaaccggaggaaggtggggacgacgtcaagtcatcatggcccttacgagatgggctacacacgtgctacaatggcaagtacaaagggttgcaaactcgcgagagtaagcggatcccataaagcttgtcgtagtccggattggagtctgcaactcgactccatgaagtcggaatcgctagtaatcgtggatcagaatgccacggtgaatacgttcccgggccttgtacacaccgcccgtcacaccatgggagtgggctgcaaaagaagtaggtagtttaaccttcgggaggacgcttaccactttgtggttcat

SEQ ID NO: 2853 - DNA, 1435 bp, unidentified
  source 1..1435: mol_type = unassigned DNA; note = Pyrinomonas methylaliphatogenes
aatcaacgctggcggcgtgcctcagacatgcaagtcgtacgcgaaagagggcttcggccctcgagtagagtggcgtccgggtgagtaacacgtgggtaatctgcctctgggtggggaataacccggggaaacccgggctaataccgcatacagcgacgcagcctgcgggccgcgtcgtgaaagcgggggacctcggcaacgaggcctcgcgcccggagaggagcctgcggcggattagctagttggtgaggtaatggctcaccaaggcgacgatccgtagccggcctgagagggcggtcggccacactggcactgacacacgggccagactcctacgggaggcagcagtcgggaatcttgggcaatgggcgcaagcctgacccagcaacgccgcgtggaggatgaagtccttcgggatgtaaactccgaaagaaggggacgaataagcatgggctaataccccgtgcgatgacggtaccctttgtaagccccggctaactacgtgccagcagccgcggtaatacgtagggggcaagcgttgttcggatttactgggcgtaaagcgcgcgtaggcggcactgcaagtcacttgtgaaatctccgggcttaacccggtaggggccaagtgatactgcagagctagagtgcggaagaggcagctggaattctcggtgtagcggtgaaatgcgtagatatcgagaggaacaccggtggcgaaggcgggctgctgggccgacactgacgctgaggcgcgaaagctaggggagcaaacaggattagataccctggtagtcctagccctaaacgatggatgcttggtgttcggggttctttagtccccgagtgccgcagctaacgcggtaagcatcccgcctggggagtacggtcgcaaggctgaaactcaaaggaattgacggggacccgcacaagcggtggagcatgtggtttaattcgacgcaacgcgaagaaccttacctgggctagaatgcccctgacagccccagagatggggtcttccgggtaacaccggacagggtgcaaggtgctgcatggctgtcgtcagctcgtgtcgtgagatgttgggttaagtcccgcaacgagcgcaacccttgccaacagttgccagcggttcggccgggcactctgttgggactgccgttgataaaacggaggaaggtggggatgacgtcaagtcctcatggcctttatgcccagggctacacacgtgctacaatggccggtacaaagcgctgcgaacccgtgagggggagccaatcgcaaaaagccggtcccagttcggattgcagtctgcaactcgactgcatgaagctggaatcgctagtaatcgcggatcagcatgccgcggtgaatacgttcccgggtcttgtacacaccgcccgtcacatcacgaaagcgggctgtactagaagtggcc

SEQ ID NO: 2854 - DNA, 1475 bp, unidentified
  source 1..1475: mol_type = unassigned DNA; note = Quasibacillus thermotolerans
gacgaacgctggcggcgtgcctaatacatgcaagtcgagcggacggaagggagcttgctcccggaagtcagcggcggacgggtgagtaacacgtgggtaacctgcctgtaagactgggataactccgggaaaccggggctaataccggatagcttcttcctccgcatggaggaagaatgaaaggcggcctttggctgtcacttacagatggacccgcggcgcattagctagttggtggggtaacggcccaccaaggcgacgatgcgtagccgacctgagagggtgatcggccacactgggactgagacacggcccagactcctacgggaggcagcagtagggaatcttccgcaatggacgaaagtctgacggagcaacgccgcgtgagtgaagaaggttttcggatcgtaaagctctgttgtcagggaagaacaagtaccggagtcactgccggtaccttgacggtacctgaccagaaagccacggctaactacgtgccagcagccgcggtaatacgtaggtggcaagcgttgtccggaattattgggcgtaaagcgcgcgcaggcggccttttaagtctgatgtgaaagcccacggctcaaccgtggagggtcattggaaactggaaggcttgagtgcagaagaggagagcggaattccacgtgtagcggtgaaatgcgtagagatgtggaggaacaccagcggcgaaggcggctctctggtctgtaactgacgctgaggcgcgaaagcgtggggagcgaacaggattagataccctggtagtccacgccgtaaacgatgagtgctaagtgttggagggtttccgcccttcagtgctgcagctaacgcattaagcactccgcctggggagtacggccgcaaggctgaaactcaaaggaattgacgggggcccgcacaagcggtggagcatgtggtttaattcgaagcaacgcgaagaaccttaccaggtcttgacatcctctgacacctctggagacagagcgttccccttcgggggacagagtgacaggtggtgcatggttgtcgtcagctcgtgtcgtgagatgttgggttaagtcccgcaacgagcgcaacccttgaccttagttgccagcattcagttgggcactctaaggtgactgccggtgacaaaccggaggaaggtggggatgacgtcaaatcatcatgccccttatgacctgggctacacacgtgctacaatggatggtacaaagggcagcgaagccgcgaggtgaagccaatcccataaaaccattctcagttcggattgcaggctgcaactcgcctgcatgaagccggaatcgctagtaatcgcggatcagcatgccgcggtgaatacgttcccgggccttgtacacaccgcccgtcacaccacgagagtttgcaacacccgaagtcggtggggtaacccttacgggagccagccgcctaaggtggggcagatgattggggtg

SEQ ID NO: 2855 - DNA, 1465 bp, Rahnella aquatilis
  source 1..1465: mol_type = unassigned DNA
attgaacgctggcggcaggcctaacacatgcaagtcgagcggcagcgggaagtagcttgctactttgccggcgagcggcggacgggtgagtaatgtctgggaaactgcctgatggagggggataactactggaaacggtagctaataccgcatgacctcgaaagagcaaagtgggggatcttcggacctcacgccatcggatgtgcccagatgggattagctagtaggtgaggtaatggctcacctaggcgacgatccctagctggtctgagaggatgaccagccacactggaactgagacacggtccagactcctacgggaggcagcagtggggaatattgcacaatgggcgcaagcctgatgcagccatgccgcgtgtgtgaagaaggccttagggttgtaaagcactttcagcgaggaggaaggcatcacacttaatacgtgtggtgattgacgttactcgcagaagaagcaccggctaactccgtgccagcagccgcggtaatacggagggtgcaagcgttaatcggaattactgggcgtaaagcgcacgcaggcggtttgttaagtcagatgtgaaatccccgcgcttaacgtgggaactgcatttgaaactggcaagctagagtcttgtagaggggggtagaattccaggtgtagcggtgaaatgcgtagagatctggaggaataccggtggcgaaggcggccccctggacaaagactgacgctcaggtgcgaaagcgtggggagcaaacaggattagataccctggtagtccacgctgtaaacgatgtcgacttggaggttgtgcccttgaggcgtggcttccggagctaacgcgttaagtcgaccgcctggggagtacggccgcaaggttaaaactcaaatgaattgacgggggcccgcacaagcggtggagcatgtggtttaattcgatgcaacgcgaagaaccttacctactcttgacatccacggaattcgccagagatggcttagtgccttcgggaaccgtgagacaggtgctgcatggctgtcgtcagctcgtgttgtgaaatgttgggttaagtcccgcaacgagcgcaacccttatcctttgttgccagcgagtaatgtcgggaactcaaaggagactgccggtgataaaccggaggaaggtggggatgacgtcaagtcatcatggcccttacgagtagggctacacacgtgctacaatggcatatacaaagagaagcgaactcgcgagagcaagcggacctcataaagtatgtcgtagtccggattggagtctgcaactcgactccatgaagtcggaatcgctagtaatcgtagatcagaatgctacggtgaatacgttcccgggccttgtacacaccgcccgtcacaccatgggagtgggttgcaaaagaagtaggtagcttaaccttcgggagggcgcttaccactttgtgattcatgactggggtg

SEQ ID NO: 2856 - DNA, 1461 bp, unidentified
  source 1..1461: mol_type = unassigned DNA; note = Rahnella inusitata
tgaacgctggcggcaggcctaacacatgcaagtcgagcggtagcacaggagagcttgctctttgggtgacgagcggcggacgggtgagtaatgtctgggaaactgcctgatggaggggataactactggaaacggtagctaataccgcatgacctcgcaagagcaaagtgggggaccttcgggcctcacgccatcggatgtgcccagatgggattagctagtaggtggggtaatggctcacctaggcgacgatccctagctggtctgagaggatgaccagccacactggaactgagacacggtccagactcctacgggaggcagcagtggggaatattgcacaatgggcgcaagcctgatgcagccatgccgcgtgtgtgaagaaggccttagggttgtaaagcactttcagcgaggaggaaggcgttgtagttaatagctgcagcgattgacgttactcgcagaagaagcaccggctaactccgtgccagcagccgcggtaatacggagggtgcaagcgttaatcggaattactgggcgtaaagcgcacgcaggcggtttgttaagtcagatgtgaaatccccgagcttaacttgggaactgcatttgaaactggcaagctagagtcttgtagaggggggtagaattccaggtgtagcggtgaaatgcgtagagatctggaggaataccggtggcgaaggcggccccctggacaaagactgacgctcaggtgcgaaagcgtggggagcaaacaggattagataccctggtagtccacgctgtaaacgatgtcgacttggaggttgtgcccttgaggcgtggcttccggagctaacgcgttaagtcgaccgcctggggagtacggccgcaaggttaaaactcaaatgaattgacgggggcccgcacaagcggtggagcatgtggtttaattcgatgcaacgcgaagaaccttacctactcttgacatccacggaattcgctagagatagcttagtgccttcgggaaccgtgagacaggtgctgcatggctgtcgtcagctcgtgttgtgaaatgttgggttaagtcccgcaacgagcgcaacccttatcctttgttgccagcacgtaatgttgggaactcaaaggagactgccggtgataaaccggaggaaggtggggatgacgtcaagtcatcatggcccttacgagtagggctacacacgtgctacaatggcatatacaaagagaagcaaactcgcgagagcaagcggacctcataaagtatgtcgtagtccggattggagtctgcaactcgactccatgaagtcggaatcgctagtaatcgtagatcagaatgctacggtgaatacgtcccgggccttgtacacaccgcccgtcacaccatgggagtgggttgcaaaagaagtaggtagcttaaccttcgggagggcgcttaccactttgtgattcatgactggggtg

SEQ ID NO: 2857 - DNA, 1345 bp, unidentified
  source 1..1345: mol_type = unassigned DNA; note = Rahnella woolbedingensis
ggacgggtgagtaatgtctgggaaactgcctgatggagggggataactactggaaacggtagctaataccgcatgacctcgcaagagcaaagtgggggaccttcgggcctcacgccatcggatgtgcccagatgggattagctagtaggtgaggtaatggctcacctaggcgacgatccctagctggtctgagaggatgaccagccacactggaactgagacacggtccagactcctacgggaggcagcagtggggaatattgcacaatgggcgcaagcctgatgcagccatgccgcgtgtgtgaagaaggccttagggttgtaaagcactttcagcgaggaggaagggttcagtgttaatagcactgtgcattgacgttactcgcagaagaagcaccggctaactccgtgccagcagccgcggtaatacggagggtgcaagcgttaatcggaattactgggcgtaaagcgcacgcaggcggtttgttaagtcagatgtgaaatccccgagcttaacttgggaactgcatttgaaactggcaagctagagtcttgtagaggggggtagaattccaggtgtagcggtgaaatgcgtagagatctggaggaataccggtggcgaaggcggccccctggacaaagactgacgctcaggtgcgaaagcgtggggagcaaacaggattagataccctggtagtccacgctgtaaacgatgtcgacttggaggttgtgcccttgaggcgtggcttccggagctaacgcgttaagtcgaccgcctggggagtacggccgcaaggttaaaactcaaatgaattgacgggggcccgcacaagcggtggagcatgtggtttaattcgatgcaacgcgaagaaccttacctactcttgacatccagagaattcgctagagatagcttagtgccttcgggaactctgagacaggtgctgcatggctgtcgtcagctcgtgttgtgaaatgttgggttaagtcccgcaacgagcgcaacccttatcctttgttgccagcacgtaatggtgggaactcaaaggagactgccggtgacaaaccggaggaaggtggggatgacgtcaagtcatcatggcccttacgagtagggctacacacgtgctacaatggcatatacaaagagaagcaaactcgcgagagcaagcggacctcataaagtatgtcgtagtccggattggagtctgcaactcgactccatgaagtcggaatcgctagtaatcgtagatcagaatgctacggtgaatacgttcccgggccttgtacacaccgcccgtcacaccatgggagtgggttgcaaaagaagtaggtagcttaacct

SEQ ID NO: 2858 - DNA, 1436 bp, Ralstonia insidiosa
  source 1..1436: mol_type = unassigned DNA
ctggcggcatgccttacacatgcaagtcgaacggcagcatgatctagcttgctagattgatggcgagtggcgaacgggtgagtaatacatcggaacgtgccctgtagtgggggataactagtcgaaagattagctaataccgcatacgacctgagggtgaaagtgggggaccgcaaggcctcatgctataggagcggccgatgtctgattagctagttggtgaggtaaaggctcaccaaggcgacgatcagtagctggtctgagaggacgatcagccacactgggactgagacacggcccagactcctacgggaggcagcagtggggaattttggacaatgggggcaaccctgatccagcaatgccgcgtgtgtgaagaaggccttcgggttgtaaagcacttttgtccggaaagaaatcgcacttactaatattaggtgtggatgacggtaccggaagaataaggaccggctaactacgtgccagcagccgcggtaatacgtagggtccaagcgttaatcggaattactgggcgtaaagcgtgcgcaggcggttgtgcaagaccgatgtgaaatccccgggcttaacctgggaattgcattggtgactgcacggctagagtgtgtcagaggggggtagaattccacgtgtagcagtgaaatgcgtagagatgtggaggaataccgatggcgaaggcagccccctgggataacactgacgctcatgcacgaaagcgtggggagcaaacaggattagataccctggtagtccacgccctaaacgatgtcaactagttgttggggattcatttccttagtaacgtagctaacgcgtgaagttgaccgcctggggagtacggtcgcaagattaaaactcaaaggaattgacggggacccgcacaagcggtggatgatgtggattaattcgatgcaacgcgaaaaaccttacctacccttgacatgccactaacgaagcagagatgcattaggtgctcgaaagagaaagtggacacaggtgctgcatggctgtcgtcagctcgtgtcgtgagatgttgggttaagtcccgcaacgagcgcaacccttgtctctagttgctacgaaagggcactctagagagactgccggtgacaaaccggaggaaggtggggatgacgtcaagtcctcatggcccttatgggtagggcttcacacgtcatacaatggtgcatacagagggttgccaagccgcgaggtggagctaatcccagaaaatgcatcgtagtccggatcgtagtctgcaactcgactacgtgaagctggaatcgctagtaatcgcggatcagcatgccgcggtgaatacgttcccgggtcttgtacacaccgcccgtcacaccatgggagtgggttttgccagaagtagttagcctaaccgcaaggggggcgattaccacggcagg

SEQ ID NO: 2859 - DNA, 1442 bp, Ralstonia mannitolilytica
  source 1..1442: mol_type = unassigned DNA
gccttacacatgcaagtcgaacggcagcgggggaaagcttgctttcctgccggcgagtggcgaacgggtgagtaatacatcggaacgtgccctgtagtgggggataactagtcgaaagattagctaataccgcatacgacctgagggtgaaagtgggggaccgcaaggcctcatgctataggagcggccgatgtctgattagctagttggtggggtaaaggcctaccaaggcgacgatcagtagctggtctgagaggacgatcagccacactgggactgagacacggcccagactcctacgggaggcagcagtggggaattttggacaatgggcgaaagcctgatccagcaatgccgcgtgtgtgaagaaggccttcgggttgtaaagcacttttgtccggaaagaaatggctctggttaatacccggagttgatgacggtaccggaagaataaggaccggctaactacgtgccagcagccgcggtaatacgtagggtccaagcgttaatcggaattactgggcgtaaagcgtgcgcaggcggttgtgcaagaccgatgtgaaatccccgggcttaacctgggaattgcattggtgactgcacggctagagtgtgtcagagggaggtagaattccacgtgtagcagtgaaatgcgtagagatgtggaggaataccgatggcgaaggcagcctcctgggataacactgacgctcatgcacgaaagcgtggggagcaaacaggattagataccctggtagtccacgccctaaacgatgtcaactagttgttggggattcatttccttagtaacgtagctaacgcgtgaagttgaccgcctggggagtacggtcgcaagattaaaactcaaaggaattgacggggacccgcacaagcggtggatgatgtggattaattcgatgcaacgcgaaaaaccttacctacccttgacatgccactaacgaagcagagatgcattaggtgctcgaaagagaaagtggacacaggtgctgcatggctgtcgtcagctcgtgtcgtgagatgttgggttaagtcccgcaacgagcgcaacccttgtctctagttgctacgaaagggcactctagagagactgccggtgacaaaccggaggaaggtggggatgacgtcaagtcctcatggcccttatgggtagggcttcacacgtcatacaatggtgcatacagagagttgccaagccgcgaggtggagctaatcccagaaaatgcatcgtagtccggatcgtagtctgcaactcgactacgtgaagctggaatcgctagtaatcgcggatcagcatgccgcggtgaatacgttcccgggtcttgtacacaccgcccgtcacaccatgggagtgggctttaccagaagtagttagcctaaccgcaaggagggcgattaccacggtagggttcatgactgggacg

SEQ ID NO: 2860 - DNA, 1460 bp, Ralstonia pickettii
  source 1..1460: mol_type = unassigned DNA
attgaacgctggcggcatgccttacacatgcaagtcgaacggcagcatgatctagcttgctagattgatggcgagtggcgaacgggtgagtaatacatcggaacgtgccctgtagtgggggataactagtcgaaagattagctaataccgcatacgacctgagggtgaaagtgggggaccgcaaggcctcatgctataggagcggccgatgtctgattagctagttggtgaggtaaaggctcaccaaggcgacgatcagtagctggtctgagaggacgatcagccacactgggactgagacacggcccagactcctacgggaggcagcagtggggaattttggacaatgggcgaaagcctgatccagcaatgccgcgtgtgtgaagaaggccttcgggttgtaaagcacttttgtccggaaagaaatggctctggttaatacctggggtcgatgacggtaccggaagaataaggaccggctaactacgtgccagcagccgcggtaatacgtagggtccaagcgttaatcggaattactgggcgtaaagcgtgcgcaggcggttgtgcaagaccgatgtgaaatccccgagcttaacttgggaattgcattggtgactgcacggctagagtgtgtcagaggggggtagaattccacgtgtagcagtgaaatgcgtagagatgtggaggaataccgatggcgaaggcagccccctgggataacactgacgctcatgcacgaaagcgtggggagcaaacaggattagataccctggtagtccacgccctaaacgatgtcaactagttgttggggattcatttccttagtaacgtagctaacgcgtgaagttgaccgcctggggagtacggtcgcaagattaaaactcaaaggaattgacggggacccgcacaagcggtggatgatgtggattaattcgatgcaacgcgaaaaaccttacctacccttgacatgccactaacgaagcagagatgcattaggtgctcgaaagagaaagtggacacaggtgctgcatggctgtcgtcagctcgtgtcgtgagatgttgggttaagtcccgcaacgagcgcaacccttgtctctagttgctacgaaagggcactctagagagactgccggtgacaaaccggaggaaggtggggatgacgtcaagtcctcatggcccttatgggtagggcttcacacgtcatacaatggtgcatacagagggttgccaagccgcgaggtggagctaatcccagaaaatgcatcgtagtccggatcgtagtctgcaactcgactacgtgaagctggaatcgctagtaatcgcggatcagcatgccgcggtgaatacgttcccgggtcttgtacacaccgcccgtcacaccatgggagtgggctttaccagaagtagttagcctaaccgcaaggagggcgattaccacggtagggttcatgactggggtg

SEQ ID NO: 2861 - DNA, 1394 bp, unidentified
  source 1..1394: mol_type = unassigned DNA; note = Ralstonia pseudosolanacearum
cggcagcgggggtagcttgctacctgccggcgagtggcgaacgggtgagtaatacatcggaacgtgccctgtagtgggggataactagtcgaaagattagctaataccgcatacgacctgagggtgaaagtgggggaccgcaaggcctcatgctataggagcggccgatgtctgattagctagttggtggggtaaaggcccaccaaggcgacgatcagtagctggtctgagaggacgatcagccacactgggactgagacacggcccagactcctacgggaggcagcagtggggaattttggacaatgggggcaaccctgatccagcaatgccgcgtgtgtgaagaaggccttcgggttgtaaagcacttttgtccggaaagaaatcgctctggttaatacctggagtggatgacggtaccggaagaataaggaccggctaactacgtgccagcagccgcggtaatacgtagggtccaagcgttaatcggaattactgggcgtaaagcgtgcgcaggcggttgtgcaagaccgatgtgaaatccccgggcttaacctgggaattgcattggtgactgcacggctagagtgtgtcagagggaggtagaattccacgtgtagcagtgaaatgcgtagagatgtggaggaataccgatggcgaaggcagcctcctgggataacactgacgctcatgcacgaaagcgtggggagcaaacaggattagataccctggtagtccacgccctaaacgatgtcaactagttgttggggattcatttccttagtaacgtagctaacgcgtgaagttgaccgcctggggagtacggtcgcaagattaaaactcaaaggaattgacggggacccgcacaagcggtggatgatgtggattaattcgatgcaacgcgaaaaaccttacctacccttgacatgccactaacgaagcagagatgcattaggtgctcgaaagagaaagtggacacaggtgctgcatggctgtcgtcagctcgtgtcgtgagatgttgggttaagtcccgcaacgagcgcaacccttgtctctagttgctacgaaagggcactctagagagactgccggtgacaaaccggaggaaggtggggatgacgtcaagtcctcatggcccttatgggtagggcttcaaacgtcatacaatggtgcatacagagggttgccaagccgcgaggtggagctaatcccagaaatgcatcgtagtccggatcgtagtctgcaactcgactacgtgaagctggaatcgctagtaatcgcggatcagcatgccgcggtgaatacgttcccgggtcttgtacacaccgcccgtcacaccatgggagtgggttttgccagaagtagttagcctaccgtaaggggggcgatacacg

SEQ ID NO: 2862 - DNA, 1458 bp, Ralstonia solanacearum
  source 1..1458: mol_type = unassigned DNA
attgaacgctggcggcatgccttacacatgcaagtcgaacggcagcgggggtagcttgctacctgccggcgagtggcgaacgggtgagtaatacatcggaacgtgccctgtagtgggggataactagtcgaaagactggctaataccgcatacgacctgagggtgaaagtgggggaccgcaaggcctcatgctataggagcggccgatgtctgattagctagttggtggggtaaaggcctaccaaggcgacgatcagtagctggtctgagaggacgatcagccacactgggactgagacacggcccagactcctacgggaggcagcagtggggaattttggacaatgggggcaaccctgatccagcaatgccgcgtgtgtgaagaaggccttcgggttgtaaagcacttttgtccggaaagaaatcgcttcggttaatacctggagtggatgacggtaccggaagaataaggaccggctaactacgtgccagcagccgcggtaatacgtagggtccaagcgttaatcggaattactgggcgtaaagcgtgcgcaggcggttgtgcaagaccgatgtgaaatccccgggcttaacctgggaattgcattggtgactgcacggctagagtgtgtcagagggaggtagaattccacgtgtagcagtgaaatgcgtagagatgtggaggaataccgatggcgaaggcagcctcctgggataacactgacgctcatgcacgaaagcgtggggagcaaacaggattagataccctggtagtccacgccctaaacgatgtcaactagttgttggggattcatttccttagtaacgtagctaacgcgtgaagttgaccgcctggggagtacggtcgcaagattaaaactcaaaggaattgacggggacccgcacaagcggtggatgatgtggattaattcgatgcaacgcgaaaaaccttacctacccttgacatgccactaacgaagcagagatgcattaggtgctcgaaagagaaagtggacacaggtgctgcatggctgtcgtcagctcgtgtcgtgagatgttgggttaagtcccgcaacgagcgcaacccttgtctctagttgctacgaaagggcactctagagagactgccggtgacaaaccggaggaaggtggggatgacgtcaagtcctcatggcccttatgggtagggcttcacacgtcatacaatggtgcatacagagggttgccaagccgcgaggtggagctaatcccagaaaatgcatcgtagtccggatcgtagtctgcaactcgactacgtgaagctggaatcgctagtaatcgcggatcagcatgccgcggtgaatacgttcccgggtcttgtacacaccgcccgtcacaccatgggagtgggttttgccagaagtagttagcctaaccgtaaggggggcgattaccacggcagggttcatgactggggtg

SEQ ID NO: 2863 - DNA, 1445 bp, Ralstonia syzygii
  source 1..1445: mol_type = unassigned DNA
aacgctggcggcatgccttacacatgcaagtcgaacggcagcgggggtagcttgctacctccggcgagtggcgaacgggtgagtaatacatcggaacgtgccctgtagtgggggataactatcgaaagactggctaataccgcatacgacctgagggtgaaagtggggcccgcaaggcctcatgctataggagcggccgatgtctgattagctagttggtggggtaaaggcccaccaaggcgacgatcagtagctggtctgagaggacgatcagccacactgggactgagagacggcccagactcctacgggaggcagcagtggggaattttggacaatgggggcaaccctgatccagcaatgccgcgtgtgtgaagaaggccttcgggttgtaaagcacttttgtccggaaagaaatcgcttcggttaatacctggagtggatgacggtaccggaagaataaggaccggctaactacgtgccagcagccgcggtaatacgtagggtccaagcgttaatcggaattactgggcgtaaagcgtgcgcaggcggttgtgcaagaccgatgtgaaatccccgggcttaacctgggaattgcattggtgactgcacggctagagtgtgtcagaggggggtagaattccacgtgtagcagtgaaatgcgtagagatgtggaggaataccgatggcgaaggcagccccctgggataacactgacgctcatgcacgaaagcgtggggagcaaacaggattagataccctggtagtccacgccctaaacgatgtcaactagttgttggggattcatttccttagtaacgtagctaacgcgtgaagttgaccgcctggggagtacggtcgcaagattaaaactcaaaggaattgacggggacccgcacaagcggtggatgatgtggattaattcgatgcaacgcgaaaaaccttacctacccttgacatgccactaacgaagcagagatgcattaggtgtcgaaagagaaagtggacacaggtgctgcatggctgtcgtcagctcgtgtcgtgagatgttgggttaagtcccgcaacgagcgcaacccttgtctctagttgctacgaaagggcactctagagagactgccggtgacaaaccggaggaaggtggggatgacgtcaagtcctcatggcccttatgggtagggcttcacacgtcatacaatggtgcatacagagggttgccaagccgcgaggtggagctaatcccagaaaatgcatcgtagtccggatcgtagtctgcaactcgactacgtgaagctggaatcgctagtaatcgcggatcagcatgccgcggtgaatacgttcccgggtcttgtacacaccgcccgtcacaccatgggagtgggctttaccagaagtagttagcctaaccgcaaggagggcgattaccacgtagggttcatgactgg

SEQ ID NO: 2864 - DNA, 1452 bp, unidentified
  source 1..1452: mol_type = unassigned DNA; note = Raoultella electrica
tgaacgctggcggcaggcctaacacattcaagtcaagcggtagcacagagagcttgctctcgggtgacgagtggcggacgggtgagtaatgtctgggaaactgcctgatggagggggataactactggaaacggtagctaataccgcataacgtcgcaagaccaaagtgggggaccttcgggcctcatgccatcagatgtgcccagatgggattagctagtaggtggggtaacggctcacctaggcgacgatccctagctggtctgagaggatgaccagccacactggaactgagacacggtccagactcctacgggaggcagcagtggggaatattgcacaatgggcgcaagcctgatgcagccatgccgcgtgtatgaagaaggccttcgggttgtaaagtactttcagcgaggaggaaggcgttgaggttaataacctcatcgattgacgttactcgcagaagaagcaccggctaactccgtgccagcagccgcggtaatacggagggtgcaagcgttaatcggaattactgggcgtaaagcgcacgcaggcggtctgttaagtcagatgtgaaatccccgggctcaacctgggaactgcatttgaaactggcaggcttgagtcttgtagaggggggtagaattccaggtgtagcggtgaaatgcgtagagatctggaggaataccggtggcgaaggcggccccctggacaaagactgacgctcaggtgcgaaagcgtggggagcaaacaggattagataccctggtagtccacgctgtaaacgatgtcgacttggaggttgttcccttgaggagtggcttccggagctaacgcgttaagtcgaccgcctggggagtacggccgcaaggttaaaactcaaatgaattgacgggggcccgcacaagcggtggagcatgtggtttaattcgatgcaacgcgaagaaccttacctactcttgacatccagagaacttagcagagatgctttggtgccttcgggaactctgagacaggtgctgcatggctgtcgtcagctcgtgttgtgaaatgttgggttaagtcccgcaacgagcgcaacccttatcctttgttgccagcgatttggtcgggaactcaaaggagactgccagtgataaactggaggaaggtggggatgacgtcaagtcatcatggcccttacgagtagggctacacacgtgctacaatggcatatacaaagagaagcgacctcgcgagagcaagcggacctcataaagtatgtcgtagtccggattggagtctgcaactcgactccatgaagtcggaatcgctagtaatcgtagatcagaatgctacggtgaatacgttcccgggccttgtacacaccgcccgtcacaccatgggagtgggttgcaaaagaagtaggtagcttaaccttcgggagggcgcttaccactttgtgattcatga

SEQ ID NO: 2865 - DNA, 1454 bp, Raoultella terrigena
  source 1..1454: mol_type = unassigned DNA
tgaacgctggcggcaggcctaacacatgcaagtcgagcggtagcacagaagagcttgctcttcgggtgacgagcggcggacgggtgagtaatgtctgggaaactgcctgatggagggggataactactggaaacggtagctaataccgcataacgtcgcaagaccaaagtgggggaccttcgggcctcatgccatcagatgtgcccagatgggattagctagtaggtgaggtaatggctcacctaggcgacgatccctagctggtctgagaggatgaccagccacactggaactgagacacggtccagactcctacgggaggcagcagtggggaatattgcacaatgggcgcaagcctgatgcagccatgccgcgtgtatgaagaaggccttcgggttgtaaagtactttcagcgaggaggaaggcgttaaggttaataaccttagcgattgacgttactcgcagaagaagcaccggctaactccgtgccagcagccgcggtaatacggagggtgcaagcgttaatcggaattactgggcgtaaagcgcacgcaggcggtctgtcaagtcggatgtgaaatccccgggctcaacctgggaactgcatccgaaactggcaggctagagtcttgtagaggggggtagaattccaggtgtagcggtgaaatgcgtagagatctggaggaataccggtggcgaaggcggccccctggacaaagactgacgctcaggtgcgaaagcgtggggagcaaacaggattagataccctggtagtccacgctgtaaacgatgtcgacttggaggttgttcccttgaggagtggcttccggagctaacgcgttaagtcgaccgcctggggagtacggccgcaaggttaaaactcaaatgaattgacgggggcccgcacaagcggtggagcatgtggtttaattcgatgcaacgcgaagaaccttacctactcttgacatccagagaacttagcagagatgctttggtgccttcgggaactctgagacaggtgctgcatggctgtcgtcagctcgtgttgtgaaatgttgggttaagtcccgcaacgagcgcaacccttatcctttgttgccagcggttcggccgggaactcaaaggagactgccagtgataaactggaggaaggtggggatgacgtcaagtcatcatggcccttacgagtagggctacacacgtgctacaatggcatatacaaagagaagcgacctcgcgagagcaagcggacctcataaagtatgtcgtagtccggatcggagtctgcaactcgactccgtgaagtcggaatcgctagtaatcgtggatcagaatgccacggtgaatacgttcccgggccttgtacacaccgcccgtcacaccatgggagtgggttgcaaaagaagtaggtagcttaaccttcgggagggcgcttaccactttgtgattcatga

SEQ ID NO: 2866 - DNA, 1410 bp, unidentified
  source 1..1410: mol_type = unassigned DNA; note = Raphidiopsis brookii
gatgaacgctggcggtatgcttaacacatgcaagtcgaacgagatgcttaggcatctagtggcggacgggtgagtaacgcgtgagaatctggctccaggtcggggacaacagttggaaacgactgctaataccggatgtgccgagaggtgaaagatttatcgcctggagatgagctcgcgtctgattagctagttggtggtgtaagggactaccaaggcatcgatcagtagctggtctgagaggatgatcagccacactgggactgagacacggcccagactcctacgggaggcagcagtggggaattttccgcaatgggcgaaagcctgacggagcaataccgcgtgagggaggaaggctcttgggtcgtaaacctcttttctcaaggaagaagaaagtgacggtacttgaggaataagcatcggctaactccgtgccagcagccgcggtaatacggaggatgcaagcgttatccggaatgattgggcgtaaagggtctgcaggtggaactgaaagtctgctgttaaagagtttggcttaaccaaataaaagcggtggaaactacagaactagagtgcggtaggggcaaaaggaattcctggtgtagcggtgaaatgcgtagatatcaggaagaacaccggtggcgaaagcgttttgctagaccgtaactgacactgagggacgaaagctaggggagcgaatgggattagataccccagtagtcctagccgtaaacgatggatactaggcgtggcttgtatcgacccgagccgtgccggagctaacgcgttaagtatcccgcctggggagtacgcacgcaagtgtgaaactcaaaggaattgacgggggcccgcacaagcggtggagtatgtggtttaattcgatgcaacgcgaagaaccttaccaagacttgacatcctgcgaatcccagtgaaagctgggagtgccttagggagcgcagagacaggtggtgcatggctgtcgtcagctcgtgtcgtgagatgttgggttaagtcccgcaacgagcgcaaccctcgtttttagttgccagcattaagttgggcactctagagagactgccggtgacaaaccggaggaaggtgaggatgacgtcaagtcagcatgccccttacgtcttgggctacacacgtactacaatgctacggacagagggcagcgagccagggatggcaagcgaatccagaaaccgtagctcagttcagatcgaaggctgcaactcgccttcgtgaaggaggaatcgctagtaattgcaggtcagcatactgcagtgaattcgttcccgggccttgtacacaccgcccgtcacaccatggaagttggtcacgcccgaagtcattaccccaaccgaaaggagggggatgcctaaggtaggactggtgactggggtg

SEQ ID NO: 2867 - DNA, 1397 bp, unidentified
  source 1..1397: mol_type = unassigned DNA; note = Raphidiopsis curvata
gatgaacgctggcggtatgcttaacacatgcaagtcgaacgggatgcttaggcatctagtggcggacgggtgagtaacgcgtgagaatctggctccaggtcggggataacagttggaaacgactgctaataccggatgtgccgagaggtgaaagatttatcgcctggagatgagctcgcgtctgattagctagttggtggtgtaagggaccaccaaggcttcgatcagtagctggtctgagaggatgatcagccacactgggactgagacacggcccagactcctacgggaggcagcagtggggaattttccgcaatgggcgaaagcctgacggagcaataccgcgtgagggaggaaggctcttgggtcgtaaacctcttttctcaaggaagaagaaagtgacggtacttgaggaataagcatcggctaactccgtgccagcagccgcggtaatacggaggatgcaagcgttatccggaatgattgggcgtaaagggtctgcaggtggaactgaaagtctgctgttaaagagtttggctcaaccaaataaaagcggtggaaactacagaactagagtgtggtaggggcaaaaggaattcctggtgtagcggtgaaatgcgtagatatcaggaagaacaccggtggcgaaagcgttttgctagaccataactgacactgagggacgaaagctaggggagcgaatgggattagataccccagtagtcctagccgtaaacgatggatactaggcgtggcttgtatcgacccgagccgtgccggagctaacgcgttaagtatcccgcctggggagtacgcacgcaagtgtgaaactcaaaggaattgacgggggcccgcacaagcggtggagtatgtggtttaattcgatgcaacgcgaagaaccttaccaagacttgacatcctgcgaatcccggtgaaagccgggagtgccttcgggagcgcagagacaggtggtgcatggctgtcgtcagctcgtgtcgtgagatgttgggttaagtcccgcaacgagcgcaaccctcgtttttagttgccagcattaagttgggcactctagagagactgccggtgacaaaccggaggaaggtgaggatgacgtcaagtcagcatgccccttacgtcttgggctacacacgtactacaatgctacggacagagggcagcaagccagggatggcaagcgaatccacaaaccgtagctcagttcagatcgaaggctgcaactcgccttcgtgaaggaggaatcgctagtaattgcaggtcagcatactgcagtgaattcgttcccgggccttgtacacaccgcccgtcacgccatggaagttggtcacgcccgaagtcattaccccaaccgaaaggagggggatgcctaaggtaggact

SEQ ID NO: 2868 - DNA, 1451 bp, Reinekea blandensis
  source 1..1451: mol_type = unassigned DNA
attgaacgctggcggtaggcttaacacatgcaagtcgagcggaaacgatcctagcttgctaggaggcgtcgagcggcggacgggtgagtaacgcgtaggaacctgcccggtagttggggatagcccggagaaatccggattaataccgaataatctctacggaggaaaggcggcttcggctgtcgctactggatgggcctgcgttggattagctagttggtgaggtaagagctcaccaaggcgacgatccatagctggtctgagaggatgatcagccacactgggactgagacacggcccagactcctacgggaggcagcagtggggaatattgggcaatgggcgcaagcctgacccagccataccgcgtgtgtgaagaaggccttcgggttgtaaagcacttcagcgaggaggaaaggttgatggttaatacccatcagctgtgacgttactcgcagaagaagcaccggctaactccgtgccagcagccgcggtaatacggagggtgcaagcgttaatcggaattactgggcgtaaagcgcgcgtaggtggtttgttaagttggatgtgaaagccccgggctcaacctgggaattgcatccaaaactggcagacttgagtacggcagaggcaagtggaatttccagtgtagcggtgaaatgcgtagagattggaaagaacaccagtggcgaaggcgacttgctgggctgatactgacactgaggtgcgaaagcgtggggagcaaacaggattagataccctggtagtccacgccgtaaacgctgtctattagccgttgggcctgttatgggcttggtggcgaagctaacgcgataaatagaccgcctggggagtacggccgcaaggttaaaactcaaatgaattgacgggggcccgcacaagcggtggagcatgtggtttaattcgaagcaacgcgaagaaccttacctactcttgaaatccagtgaacttagcagagatgctttggtgccttcgggaacactgagacaggtgctgcatggctgtcgtcagctcgtgttgtgaaatgttgggttaagtcccgtaacgagcgcaacccctatccttagttgccagcgagtaatgtcggggactctaaggagactgccggtgacaaaccggaggaaggcggggatgacgtcaagtcatcatggcccttacgagtagggctacacacgtgctacaatggcgtatacagagggttgcgaagccgcgaggtggagctaatctcacaaagtacgtcgtagtccggattggagtctgcaactcgactccatgaagtcggaatcgctagtaatcgtgaatcagaatgtcacggtgaatacgttcccgggccttgtacacaccgcccgtcacaccatgggagttgattgcaccagaagtgggtagcttaaaattgggcgctcaccacggtgtggttaatgactggggtg

SEQ ID NO: 2869 - DNA, 1466 bp, unidentified
  source 1..1466: mol_type = unassigned DNA; note = Reinekea forsetii
attgaacgctggcggtaggcttaacacatgcaagtcgagcggaaacgactctagcttgctagaaggcgtcgagcggcggacgggtgagtaacgcgtaggaatctacccggtagttggggatagcccggagaaatccggattaataccgaataatctctacggaggaaagggggcttcggctctcgctactggatgagcctgcgttggattagctagttggtgaggtaaatgctcaccaaggcgacgatccatagctggtctgagaggatgatcagccacactgggactgagacacggcccagactcctacgggaggcagcagtggggaatattggacaatgggggcaaccctgatccagccataccgcgtgtgtgaagaaggccttcgggttgtaaagcactttcagcgaggaggaaaagctatcggttaatacccgttagccttgacgttactcgcagaagaagcaccggctaactccgtgccagcagccgcggtaatacggagggtgcaagcgttaatcggaattactgggcgtaaagcgcgcgtaggcggttggttaagttggatgtgaaagccctgggctcaacctaggaactgcatacaaaactggccaactagagtacagcagaggcaagtggaatttccagtgtagcggtgaaatgcgtagagattggaaggaacaccagtggcgaaggcgacttgctgggctgatactgacgctgaggtgcgaaagcgtggggagcaaacaggattagataccctggtagtccacgccgtaaacgatgtctattagccgttgggtctgttacggacttggtggcgaagctaacgcgataaatagaccgcctggggagtacggccgcaaggttaaaactcaaatgaattgacgggggcccgcacaagcggtggagcatgtggtttaattcgaagcaacgcgaagaaccttacctactcttgaaatcctgtgaacttactagagatagtttggtgccttcgggaacacagtgacaggtgctgcatggctgtcgtcagctcgtgttgtgaaatgttgggttaagtcccgtaacgagcgcaacccctatccttagttgccagcgagtaatgtcggggactctaaggagactgccggtgacaaaccggaggaaggcggggatgacgtcaagtcatcatggcccttacgagtagggctacacacgtgctacaatggccggtacagacggttgcgaagccgcgaggtgaagctaatccgagaaagccggtcgtagtccggattggagtctgcaactcgactccatgaagtcggaatcgctagtaatcgtgaatcagaacgtcacggtgaatacgttcccgggccttgtacacaccgcccgtcacaccatgggagttgattgcaccagaagtgggtagcttaacttcatcttcggatgaaagggcgcttaccacggtgtggttgacgactggggtg

SEQ ID NO: 2870 - DNA, 1452 bp, Reinekea marinisedimentorum
  source 1..1452: mol_type = unassigned DNA
attgaacgctggcggtaggcttaacacatgcaagtcgagcggtaacatttctagcttgctagaagatgacgagcggcggacgggtgagtaacgcgtaggaacttacccagtagttggggatagcccggagaaatccggattaataccgaataatctctacggaggaaagggggcttcggctctcgctactggatgggcctgcgttggattagctagttggtgtggtaaaggcgcaccaaggcgacgatccatagctggtctgagaggatgatcagccacactgggactgagacacggcccagactcctacgggaggcagcagtggggaatattggacaatgggcggaagcctgatccagccataccgcgtgtgtgaagaaggccttcgggttgtaaagcactttcaatgaggaggaaaggttattggttaatacccaatagctgtgacgttactcatagaagaagcaccggctaactccgtgccagcagccgcggtaatacggagggtgcaagcgttaatcggaattactgggcgtaaagcgcgcgtaggcggcttgttaagttggatgtgaaagccccgggctcaacctgggaactgcattcaaaactgacaagctggagtacagcagaggcaagtggaatttcaggtgtagcggtgaaatgcgtagagatctgaaggaacaccagtggcgaaggcgacttgctgggctgatactgacgctgaggtgcgaaagcgtggggagcaaacaggattagataccctggtagtccacgccgtaaacgatgtctattagccgttgggtctgttacggacttggtggcgaagctaacgcgataaatagaccgcctggggagtacggccgcaaggttaaaactcaaatgaattgacgggggcccgcacaagcggtggagcatgtggtttaattcgaagcaacgcgaagaaccttacctactcttgaaatcctgtgaagtctgtagagatacggatgtgccttcgggaacacagtgacaggtgctgcatggctgtcgtcagctcgtgttgtgaaatgttgggttaagtcccgtaacgagcgcaacccctatccttagttgccagcgagtaatgtcggggactctaaggagactgccggtgacaaaccggaggaaggcggggatgacgtcaagtcatcatggcccttacgagtagggctacacacgtgctacaatggcgcatacagacggtggcgaagcagcgatgtggagctaatctgagaaagtgcgtcgtagtccggattggagtctgcaactcgactccatgaagtcggaatcgctagtaatcgtgaatcagaatgtcacggtgaatacgttcccgggccttgtacacaccgcccgtcacaccatgggagttgattgcaccagaagtgggtagcttaaaattgggcgctcaccacggtgtggttaatgactggggtg

SEQ ID NO: 2871 - DNA, 1447 bp, Rheinheimera nanhaiensis
  source 1..1447: mol_type = unassigned DNA
attgaacgctggcggcaggcctaacacatgcaagtcgagcgggaacttcggttctagcggcggacgggtgagtaatgtatagggagctgcccgacagagggggataccagttggaaacgactgttaataccgcataacgtctacggaccaaagtatgggaccttcgggccatatgctgtcggatgcacctatatgggattagctagttggtggggtaacggctcaccaaggcgacgatccctagctggtttgagaggatgatcagccacactggaactgagacacggtccagactcctacgggaggcagcagtggggaatattggacaatgggcgcaagcctgatccagccatgccgcgtgtgtgaagaaggccttcgggttgtaaagcactttcagcgaggaggaaggggtgtgtgttaatagcacacatctttgacgttactcgcagaagaagcaccggctaactccgtgccagcagccgcggtaatacggagggtgcaagcgttaatcggaattactgggcgtaaagcgcacgtaggcggtgtgttaagttggatgtgaaagccccgggctcaacctgggaattgcattcaaaactggcacgctagagtatgtgagaggggggtagaattccaagtgtagcggtgaaatgcgtagagatttggaggaataccagtggcgaaggcggccccctggcacaatactgacgctgaggtgcgaaagcgtggggagcaaacaggattagataccctggtagtccacgccgtaaacgatgtctactagctgttcgtggtcttgtactgtgagtagcgcagctaacgcactaagtagaccgcctggggagtacggtcgcaagattaaaactcaaatgaattgacgggggcccgcacaagcggtggagcatgtggtttaattcgacgcaacgcgaagaaccttacctactcttgacatctagcgaagattgtagagatacgattgtgccttcgggaacgctaagacaggtgctgcatggctgtcgtcagctcgtgttgtgaaatgttgggttaagtcccgcaacgagcgcaacccttatccttagttgccagcgagtaatgtcgggaactctagggagactgccggtgataaaccggaggaaggtggggacgacgtcaagtcatcatggcccttacgagtagggctacacacgtgctacaatggtacgtacagagggaggcaagctggcgacagtgagcggatctcttaaagcgtatcgtagtccggatcgcagtctgcaactcgactgcgtgaagtcggaatcgctagtaatcgcaaatcagaatgttgcggtgaatacgttcccgggccttgtacacaccgcccgtcacaccatgggagtgggttgcaaaagaagtaggtagcttaaccttcgggagggcgcttaccactttgtgattcatgactggggtg

SEQ ID NO: 2872 - DNA, 1400 bp, Rheinheimera pacifica
  source 1..1400: mol_type = unassigned DNA
  misc_difference 394: note = n is a, c, g, or t
  misc_difference 405..406: note = n is a, c, g, or t
ctacacatgcaagtcgagcggggttttcggacctagcggcggacgggtgagtaatgtatagggagctgcccgacagagggggataccagttggaaacgactgttaataccgcataacgtctacggaccaaagtatgggaccttcgggccatatgctgtcggatgcacctatatgggattagctagttggtggggtaatggctcaccaaggcgacgatccctagctggtttgagaggatgatcagccacactggaactgagacacggtccagactcctacgggaggcagcagtggggaatattggacaatgggcgcaagcctgatccagcctgccgcgtgtgtgaagaaggccttcgggttgtaaagcactttcagcgaggaggaagggtgttgngttaatagccnnctttttgacgttactcgcagaagaagcaccggctaactccgtgccagcagccgcggtaatacggagggtgcaagcgttaatcggaattactgggcgtaaagcgcacgtaggcggtttgttaagttggatgtgaaagccccgggctcaacctgggaattgcattcaagactggcaagctagagtatgtgagaggggggtagaattccaagtgtagcggtgaaatgcgtagagatttggaggaataccagtggcgaaggcggccccctggcacaatactgacgctcaggtgcgaaagcgtggggagcaaacaggattagataccctggtagtccacgccgtaaacgatgtctactagctgttcgtggtcttgtactgtgagtagcgcagctaacgcactaagtagaccgcctggggagtcggtcgcaagattaaaactcaaatgaattgacgggggcccgcacaagcggtggagcatgtggtttaattcgacgcaacgcgaagaaccttacctactcttgacatctagcgaagattgtagagatacgattgtgccttcgggaacgctaagacaggtgctgcatggctgtcgtcagctcgtgttgtgaaatgttgggttaagtcccgcaacgagcgcaacccttatccttagttgccagcacgtaatggtgggaactctagggagactgccggtgataaaccggaggaaggtggggacgacgtcaagtcatcatggcccttacgagtagggctacacacgtgctacaatggtacgtacagagggaggcaagctggcgacagtgagcggatctcataaagcgtatcgtagtccggattggagtctgcaactcgactccatgaagtcggaatcgctagtaatcgtgaatcagaatgtcacggtgaatacgttcccgggccttgtacacaccgcccgtcacaccatgggagtgggttgcaaaagaagtaggtagcttaaccttcgggagggcgcttacca

SEQ ID NO: 2873 - DNA, 1457 bp, unidentified
  source 1..1457: mol_type = unassigned DNA; note = Rheinheimera salexigens
attgaacgctggcggcaggcctaacacatgcaagtcgagcggtaacatgccttcgggtgatgacgagcggcggacgggtgagtaatgcgtaggaaactgccaagcagagggggataccagttggaaacggctgttaataccgcataacgtctacggaccaaagaatgggaccttcgggccattcgctgtttgatgtgcctacgtgagattagctagttggtggggtaatggctcaccaaggcgacgatctctagctggtttgagaggatgatcagccacactgggactgagacacggcccagactcctacgggaggcagcagtggggaatattggacaatgggcgcaagcctgatccagccatgccgcgtgtgtgaagaaggccttcgggttgtaaagcactttcagcgaggaggaagggataagcgttaatagcggttatttttgacgttactcgcagaagaagcaccggctaacttcgtgccagcagccgcggtaatacgaggggtgcaagcgttaatcggaattactgggcgtaaagcgtacgtaggcggttgattaagttggatgtgaaagccccgggctcaacctgggaattgcattcaaaactggtcgactagagtatgtgagaggggggtagaattccaagtgtagcggtgaaatgcgtagagatttggaggaataccagtggcgaaggcggccccctggcacaatactgacgctgaggtacgaaagcgtggggagcaaacaggattagataccctggtagtccacgccgtaaacgatgtctactagctgttcgtggtcttgtaccgtgagtagcgcagctaacgcactaagtagaccgcctggggagtacggtcgcaagattaaaactcaaatgaattgacgggggcccgcacaagcggtggagcatgtggtttaattcgacgcaacgcgaagaaccttacctactcttgacatctagcgaagattgtagagatacagttgtgccttcgggaacgctaagacaggtgctgcatggctgtcgtcagctcgtgttgtgaaatgttgggttaagtcccgcaacgagcgcaacccttatccttagttgccagcacgtaatggtgggaactctagggagactgccggtgataaaccggaggaaggtggggacgacgtcaagtcatcatggcccttacgagtagggctacacacgtgctacaatggtacgtacagagggaggcaagctggcgacagtgagcggatctcttaaagcgtatcgtagtccggatcgcagtctgcaactcgactgcgtgaagtcggaatcgctagtaatcgcgaatcagaatgtcgcggtgaatacgttcccgggccttgtacacaccgcccgtcacaccatgggagtgggttgcaaaagaagtagatagcttaaccttcgggagggcgtttaccactttgtgattcatgactggggtg

SEQ ID NO: 2874 - DNA, 1457 bp, unidentified
  source 1..1457: mol_type = unassigned DNA; note = Rheinheimera tuosuensis
attgaacgctggcggcaggcctaacacatgcaagtcgagcggtaacatgccttcgggtgatgacgagcggcggacgggtgagtaatgtataggaagctgcccgatagagggggataaccactggaaacggtggctaataccgcataatgtctacggaccaaagtatgggaccttcgggccatatgctatcggatgcgcctatatgggattagctagttggtgtggtaatggcgcaccaaggcgacgatccctagctggtttgagaggatgatcagccacactgggactgagacacggcccagactcctacgggaggcagcagtggggaatattggacaatgggcgcaagcctgatccagccatgccgcgtgtgtgaagaaggccttcgggttgtaaagcactttcagcgaggaggaagggtgttgttttaatagaacagcattttgacgttactcgcagaagaagcaccggctaactccgtgccagcagccgcggtaatacggagggtgcaagcgttaatcggaattactgggcgtaaagcgcacgcaggcggctttttaagtcggatgtgaaagccccgggctcaacctgggaattgcattcgatactggggagctagagtatgtgagaggggggtagaattccaagtgtagcggtgaaatgcgtagagatttggaggaataccagtggcgaaggcggccccctggcacaatactgacgctcaggtgcgaaagcgtggggagcaaacaggattagataccctggtagtccacgccgtaaacgatgtctactagatgttcgtggtcttgtaccgtgagtatcgcagctaacgcattaagtagaccgcctggggagtacggtcgcaagattaaaactcaaatgaattgacgggggcccgcacaagcggtggagcatgtggtttaattcgacgcaacgcgaagaaccttacctactcttgacatctagcgaagattgtagagatacgattgtgccttcgggaacgctaagacaggtgctgcatggctgtcgtcagctcgtgttgtgaaatgttgggttaagtcccgcaacgagcgcaacccttatccttagttgccagcacgtaaaggtgggaactctagggagactgccggtgataaaccggaggaaggtggggacgacgtcaagtcatcatggcccttacgagtagggctacacacgtgctacaatggtacgtacagagggaggcaagctggcgacagtgagcggatctcataaagcgtatcgtagtccggattggagtctgcaactcgactccatgaagtcggaatcgctagtaatcgtgaatcagaatgtcacggtgaatacgttcccgggccttgtacacaccgcccgtcacaccatgggagtgggttgcaaaagaagtaggtagcttaaccttcgggagggcgcttaccactttgtgattcatgactggggtg

SEQ ID NO: 2875 - DNA, 1305 bp, unidentified
  source 1..1305: mol_type = unassigned DNA; note = Rhizobium acidisoli
ggagcggcagacgggtgagtaacgcgtgggaatctacccttgactacggaataacgcagggaaacttgtgctaataccgtatgtgtccttcgggagaaagatttatcggtcaaggatgagcccgcgttggattagctagttggtggggtaaaggcctaccaaggcgacgatccatagctggtctgagaggatgatcagccacattgggactgagacacggcccaaactcctacgggaggcagcagtggggaatattggacaatgggcgcaagcctgatccagccatgccgcgtgagtgatgaaggccctagggttgtaaagctctttcaccggagaagataatgacggtatccggagaagaagccccggctaacttcgtgccagcagccgcggtaatacgaagggggctagcgttgttcggaattactgggcgtaaagcgcacgtaggcggatcgatcagtcaggggtgaaatcccagggctcaaccctggaactgcctttgatactgtcgatctggagtatggaagaggtgagtggaattccgagtgtagaggtgaaattcgtagatattcggaggaacaccagtggcgaaggcggctcactggtccattactgacgctgaggtgcgaaagcgtggggagcaaacaggattagataccctggtagtccacgccgtaaacgatgaatgttagccgtcgggcagtatactgttcggtggcgcagctaacgcattaaacattccgcctggggagtacggtcgcaagattaaaactcaaaggaattgacgggggcccgcacaagcggtggagcatgtggtttaattcgaagcaacgcgcagaaccttaccagcccttgacatgcccggctacttgcagagatgcaaggttcccttcggggaccgggacacaggtgctgcatggctgtcgtcagctcgtgtcgtgagatgttgggttaagtcccgcaacgagcgcaaccctcgcccttagttgccagcattcagttgggcactctaaggggactgccggtgataagccgagaggaaggtggggatgacgtcaagtcctcatggcccttacgggctgggctacacacgtgctacaatggtggtgacagtgggcagcgagcacgcgagtgtgagctaatctccaaaagccatctcagttcggattgcactctgcaactcgagtgcatgaagttggaatcgctagtaatcgcggatcagcatgccgcggtgaatacgttcccgggccttgtacacaccgcccgtcacaccatgggagttggttttacccgaaggtagtgcgc

SEQ ID NO: 2876 - DNA, 903 bp, unidentified
  source 1..903: mol_type = unassigned DNA; note = Rhizobium aethiopicum
tcgagcgccccgcaaggggagcggcagacgggtgagtaacgcgtgggaacgtaccctttactacggaataacgcagggaaacttgtgctaataccgtatgtgccctttgggggaaagatttatcggtaaaggatcggcccgcgttggattagctagttggtggggtaaaggcctaccaaggcgacgatccatagctggtctgagaggatgatcagccacattgggactgagacacggcccaaactcctacgggaggcagcagtggggaatattggacaatgggcgcaagcctgatccagccatgccgcgtgagtgatgaaggccctagggttgtaaagctctttcaccggagaagataatgacggtatccggagaagaagccccggctaacttcgtgccagcagccgcggtaatacgaagggggctagcgttgttcggaattactgggcgtaaagcgcacgtaggcggatcgatcagtcaggggtgaaatcccagggctcaaccctggaactgcctttgatactgtcgatctggagtatggaagaggtgagtggaattccgagtgtagaggtgaaattcgtagatattcggaggaacaccagtggcgaaggcggctcactggtccattactgacgctgaggtgcgaaagcgtggggagcaaacaggattagataccctggtagtccacgccgtaaacgatgaatgttagccgtcgggcagtatactgttcggtggcgcagctaacgcattaaacattccgcctggggagtacggtcgcaagattaaaactcaaaggaattgacggggggcccgcacaagcggtggagcatgtggtttaattcgaagcaacgcgcagaaccttaccagcccttgacatgcccggctacctgcagagatgcaggg

SEQ ID NO: 2877 - DNA, 1403 bp, unidentified
  source 1..1403: mol_type = unassigned DNA; note = Rhizobium altiplani
aacgaacgctggcggcaggcttaacacatgcaagtcgagcgccccgcaaggggagcggcagacgggtgagtaacgcgtgggaacgtacccttttctacggaataacccagggaaacttggactaataccgtatgtgcccttcgggggaaagatttatcggaaaaggatcggcccgcgttggattagctagttggtggggtaaaggcctaccaaggcgacgatccatagctggtctgagaggatgatcagccacattgggactgagacacggcccaaactcctacgggaggcagcagtggggaatattggacaatgggcgcaagcctgatccagccatgccgcgtgagtgatgaaggccctagggttgtaaagctctttcaccggtgaagataatgacggtaaccggagaagaagccccggctaacttcgtgccagcagccgcggtaatacgaagggggctagcgttgttcggatttactgggcgtaaagcgcacgtaggcggatcgatcagtcaggggtgaaatcccagagctcaactctggaactgcctttgatactgtcgatctggagtatggaagaggtgagtggaattccgagtgtagaggtgaaattcgtagatattcggaggaacaccagtggcgaaggcggctcactggtccattactgacgctgaggtgcgaaagcgtggggagcaaacaggattagataccctggtagtccacgccgtaaacgatgaatgttagccgtcgggcagtatactgttcggtggcgcagctaacgcattaaacattccgcctggggagtacggtcgcaagattaaaactcaaaggaattgacgggggcccgcacaagcggtggagcatgtggtttaattcgaagcaacgcgcagaaccttaccagcccttgacatgtccggctagctgcagagatgcagtgttcccttcggggaccggaacacaggtgctgcatggctgtcgtcagctcgtgtcgtgagatgttgggttaagtcccgcaacgagcgcaaccctcgcccttagttgccagcattcagttgggcactctaaggggactgccggtgataagccgagaggaaggtggggatgacgtcaagtcctcatggcccttacgggctgggctacacacgtgctacaatggtggtgacagtgggcagcgagaccgcgaggtcgagctaatctccaaaagccatctcagttcggattgcactctgcaactcgagtgcatgaagttggaatcgctagtaatcgcggatcagcatgccgcggtgaatacgttcccgggccttgtacacaccgcccgtcacaccatgggagttggttttacccgaaggtagtgtgctaaccgcaaggaggcagctaaccacggtagggtcagcgactggggtg

SEQ ID NO: 2878 - DNA, 1403 bp, unidentified
  source 1..1403: mol_type = unassigned DNA; note = Rhizobium anhuiense
aacgaacgctggcggcaggcttaacacatgcaagtcgagcgccccgcaaggggagcggcagacgggtgagtaacgcgtgggaatctacccttgactacggaataacgcagggaaacttgtgctaataccgtatgtgtccttcgggagaaagatttatcggtcaaggatgagcccgcgttggattagctagttggtggggtaaaggcctaccaaggcgacgatccatagctggtctgagaggatgatcagccacattgggactgagacacggcccaaactcctacgggaggcagcagtggggaatattggacaatgggcgcaagcctgatccagccatgccgcgtgagtgatgaaggccctagggttgtaaagctctttcaccggagaagataatgacggtatccggagaagaagccccggctaacttcgtgccagcagccgcggtaatacgaagggggctagcgttgttcggaattactgggcgtaaagcgcacgtaggcggatcgatcagtcaggggtgaaatcccagggctcaaccctggaactgcctttgatactgtcgatctggagtatggaagaggtgagtggaattccgagtgtagaggtgaaattcgtagatattcggaggaacaccagtggcgaaggcggctcactggtccattactgacgctgaggtgcgaaagcgtggggagcaaacaggattagataccctggtagtccacgccgtaaacgatgaatgttagccgtcgggcagtatactgttcggtggcgcagctaacgcattaaacattccgcctggggagtacggtcgcaagattaaaactcaaaggaattgacgggggcccgcacaagcggtggagcatgtggtttaattcgaagcaacgcgcagaaccttaccagcccttgacatgcccggctacttgcagagatgcaaggttcccttcggggaccgggacacaggtgctgcatggctgtcgtcagctcgtgtcgtgagatgttgggttaagtcccgcaacgagcgcaaccctcgcccttagttgccagcattcagttgggcactctaaggggactgccggtgataagccgagaggaaggtggggatgacgtcaagtcctcatggcccttacgggctgggctacacacgtgctacaatggtggtgacagtgggcagcgagcacgcgagtgtgagctaatctccaaaagccatctcagttcggattgcactctgcaactcgagtgcatgaagttggaatcgctagtaatcgcggatcagcatgccgcggtgaatacgttcccgggccttgtacacaccgcccgtcacaccatgggagttggttttacccgaaggtagtgcgctaaccgcaaggaggcagctaaccacggtagggtcagcgactggggtg

SEQ ID NO: 2879 - DNA, 1403 bp, unidentified
  source 1..1403: mol_type = unassigned DNA; note = Rhizobium azibense
aacgaacgctggcggcaggcttaacacatgcaagtcgagcgccccgcaaggggagcggcagacgggtgagtaacgcgtgggaacgtaccctttactacggaataacgcagggaaacttgtgctaataccgtatgtgcccttcgggggaaagatttatcggtaagggatcggcccgcgttggattagctagttggtggggtaaaggcctaccaaggcgacgatccatagctggtctgagaggatgatcagccacattgggactgagacacggcccaaactcctacgggaggcagcagtggggaatattggacaatgggcgcaagcctgatccagccatgccgcgtgagtgatgaaggccctagggttgtaaagctctttcaccggagaagataatgacggtatccggagaagaagccccggctaacttcgtgccagcagccgcggtaatacgaagggggctagcgttgttcggaattactgggcgtaaagcgcacgtaggcggacatttaagtcaggggtgaaatcccagagctcaactctggaactgcctttgatactgggtgtctggagtatggaagaggtgagtggaattccgagtgtagaggtgaaattcgtagatattcggaggaacaccagtggcgaaggcggctcactggtccattactgacgctgaggtgcgaaagcgtggggagcaaacaggattagataccctggtagtccacgccgtaaacgatgaatgttagccgtcggcaagtttacttgtcggtggcgcagctaacgcattaaacattccgcctggggagtacggtcgcaagattaaaactcaaaggaattgacgggggcccgcacaagcggtggagcatgtggtttaattcgaagcaacgcgcagaaccttaccagcccttgacatccggtgctacatccagagatggatggtttccttcgggaacgccgagacaggtgctgcatggctgtcgtcagctcgtgtcgtgagatgttgggttaagtcccgcaacgagcgcaaccctcgcccttagttgccagcattcagttgggcactctaaggggactgccggtgataagccgagaggaaggtggggatgacgtcaagtcctcatggcccttacgggctgggctacacacgtgctacaatggtggtgacagtgggcagcgagcacgcgagtgtgagctaatctccaaaagccatctcagttcggattgcactctgcaactcgagtgcatgaagttggaatcgctagtaatcgcggatcagcatgccgcggtgaatacgttcccgggccttgtacacaccgcccgtcacaccatgggagttggttttacccgaaggtagtgcgctaaccgcaaggaggcagctaaccacggtagggtcagcgactggggtg

SEQ ID NO: 2880 - DNA, 1236 bp, unidentified
  source 1..1236: mol_type = unassigned DNA; note = Rhizobium esperanzae
ggggaaagatttatcggtaaaggatcggcccgcgttggattagctagttggtggggtaaaggcctaccaaggcgacgatccatagctggtctgagaggatgatcagccacattgggactgagacacggcccaaactcctacgggaggcagcagtggggaatattggacaatgggcgcaagcctgatccagccatgccgcgtgagtgatgaaggccctagggttgtaaagctctttcaccggagaagataatgacggtatccggagaagaagccccggctaacttcgtgccagcagccgcggtaatacgaagggggctagcgttgttcggaattactgggcgtaaagcgcacgtaggcggatcgatcagtcaggggtgaaatcccagggctcaaccctggaactgcctttgatactgtcgatctggagtatggaagaggtgagtggaattccgagtgtagaggtgaaattcgtagatattcggaggaacaccagtggcgaaggcggctcactggtccattactgacgctgaggtgcgaaagcgtggggagcaaacaggattagataccctggtagtccacgccgtaaacgatgaatgttagccgtcgggcagtatactgttcggtggcgcagctaacgcattaaacattccgcctggggagtacggtcgcaagattaaaactcaaaggaattgacgggggcccgcacaagcggtggagcatgtggtttaattcgaagcaacgcgcagaaccttaccagcccttgacatgcccggctacttgcagagatgcaaggttcccttcggggaccgggacacaggtgctgcatggctgtcgtcagctcgtgtcgtgagatgttgggttaagtcccgcaacgagcgcaaccctcgcccttagttgccagcattcagttgggcactctaaggggactgccggtgataagccgagaggaaggtggggatgacgtcaagtcctcatggcccttacgggctgggctacacacgtgctacaatggtggtgacagtgggcagcgagcacgcgagtgtgagctaatctccaaaagccatctcagttcggattgcactctgcaactcgagtgcatgaagttggaatcgctagtaatcgcggatcagcatgccgcggtgaatacgttcccgggccttgtacacaccgcccgtcacaccatgggagttggttttacccgaaggtagtgcgctaaccgcaaggaggcagctaacc

SEQ ID NO: 2881 - DNA, 1403 bp, Rhizobium etli
  source 1..1403: mol_type = unassigned DNA
aacgaacgctggcggcaggcttaacacatgcaagtcgagcgccccgcaaggggagcggcagacgggtgagtaacgcgtgggaacgtaccctttactacggaataacgcagggaaacttgtgctaataccgtatgtgccctttgggggaaagatttatcggtaaaggatcggcccgcgttggattagctagttggtggggtaaaggcctaccaaggcgacgatccatagctggtctgagaggatgatcagccacattgggactgagacacggcccaaactcctacgggaggcagcagtggggaatattggacaatgggcgcaagcctgatccagccatgccgcgtgagtgatgaaggccctagggttgtaaagctctttcaccggagaagataatgacggtatccggagaagaagccccggctaacttcgtgccagcagccgcggtaatacgaagggggctagcgttgttcggaattactgggcgtaaagcgcacgtaggcggatcgatcagtcaggggtgaaatcccagggctcaaccctggaactgcctttgatactgtcgatctggagtatggaagaggtgagtggaattccgagtgtagaggtgaaattcgtagatattcggaggaacaccagtggcgaaggcggctcactggtccattactgacgctgaggtgcgaaagcgtggggagcaaacaggattagataccctggtagtccacgccgtaaacgatgaatgttagccgtcgggcagtatactgttcggtggcgcagctaacgcattaaacattccgcctggggagtacggtcgcaagattaaaactcaaaggaattgacgggggcccgcacaagcggtggagcatgtggtttaattcgaagcaacgcgcagaaccttaccagcccttgacatgcccggcgacctgcagagatgcagggttcccttcggggaccgggacacaggtgctgcatggctgtcgtcagctcgtgtcgtgagatgttgggttaagtcccgcaacgagcgcaaccctcgcccttagttgccagcatttggttgggcactctaaggggactgccggtgataagccgagaggaaggtggggatgacgtcaagtcctcatggcccttacgggctgggctacacacgtgctacaatggtggtgacagtgggcagcgagcacgcgagtgtgagctaatctccaaaagccatctcagttcggattgcactctgcaactcgagtgcatgaagttggaatcgctagtaatcgcggatcagcatgccgcggtgaatacgttcccgggccttgtacacaccgcccgtcacaccatgggagttggttttacccgaaggtagtgcgctaaccgcaaggaggcagctaaccacggtagggtcagcgactggggtg

SEQ ID NO: 2882 - DNA, 1403 bp, unidentified
  source 1..1403: mol_type = unassigned DNA; note = Rhizobium favelukesii
aacgaacgctggcggcaggcttaacacatgcaagtcgagcgccccgcaaggggagcggcagacgggtgagtaacgcgtgggaacgtaccctttactacggaataacgcatggaaacgtgtgctaataccgtatgtgccctttgggggaaagatttatcggtaaaggatcggcccgcgttggattagctagttggtggggtaaaggcctaccaaggcgacgatccatagctggtctgagaggatgatcagccacattgggactgagacacggcccaaactcctacgggaggcagcagtggggaatattggacaatgggcgcaagcctgatccagccatgccgcgtgagtgatgaaggccctagggttgtaaagctctttcaccggtgaagataatgacggtaaccggagaagaagccccggctaacttcgtgccagcagccgcggtaatacgaagggggctagcgttgttcggatttactgggcgtaaagcgcacgtaggcggatcgatcagtcaggggtgaaatcccagagctcaactctggaactgcctttgatactgtcgatctggagtatggaagaggtgagtggaattccgagtgtagaggtgaaattcgtagatattcggaggaacaccagtggcgaaggcggctcactggtccattactgacgctgaggtgcgaaagcgtggggagcaaacaggattagataccctggtagtccacgccgtaaacgatgaatgttagccgtcgggcagtatactgttcggtggcgcagctaacgcattaaacattccgcctggggagtacggtcgcaagattaaaactcaaaggaattgacgggggcccgcacaagcggtggagcatgtggtttaattcgaagcaacgcgcagaaccttaccagcccttgacatgcccggctagctacagagatgtagtgttcccttcggggaccgggacacaggtgctgcatggctgtcgtcagctcgtgtcgtgagatgttgggttaagtcccgcaacgagcgcaaccctcgcccttagttgccagcattcagttgggcactctaaggggactgccggtgataagccgagaggaaggtggggatgacgtcaagtcctcatggcccttacgggctgggctacacacgtgctacaatggtggtgacagtgggcagcgagacagcgatgtcgagctaatctccaaaagccatctcagttcggattgcactctgcaactcgagtgcatgaagttggaatcgctagtaatcgcggatcagcatgccgcggtgaatacgttcccgggccttgtacacaccgcccgtcacaccatgggagttggttttacccgaaggtagtgtgctaaccgcaaggaggcagctaaccacggtagggtcagcgactggggtg

SEQ ID NO: 2883 - DNA, 1403 bp, unidentified
  source 1..1403: mol_type = unassigned DNA; note = Rhizobium freirei
aacgaacgctggcggcaggcttaacacatgcaagtcgagcgccccgcaaggggagcggcagacgggtgagtaacgcgtgggaatctaccttttgctacggaataacgcagggaaacttgtgctaataccgtatgtgtccttcgggagaaagatttatcggcaagagatgagcccgcgttggattagctagttggtggggtaaaggcctaccaaggcgacgatccatagctggtctgagaggatgatcagccacattgggactgagacacggcccaaactcctacgggaggcagcagtggggaatattggacaatgggcgcaagcctgatccagccatgccgcgtgagtgatgaaggccctagggttgtaaagctctttcaccggagaagataatgacggtatccggagaagaagccccggctaacttcgtgccagcagccgcggtaatacgaagggggctagcgttgttcggaattactgggcgtaaagcgcacgtaggcggatcgatcagtcaggggtgaaatcccagggctcaaccctggaactgcctttgatactgtcgatctggagtatggaagaggtgagtggaattccgagtgtagaggtgaaattcgtagatattcggaggaacaccagtggcgaaggcggctcactggtccattactgacgctgaggtgcgaaagcgtggggagcaaacaggattagataccctggtagtccacgccgtaaacgatgaatgttagccgtcgggcagtatactgttcggtggcgcagctaacgcattaaacattccgcctggggagtacggtcgcaagattaaaactcaaaggaattgacgggggcccgcacaagcggtggagcatgtggtttaattcgaagcaacgcgcagaaccttaccagcccttgacatcctgtgttacctctagagatagggggtccacttcggtggcgcagagacaggtgctgcatggctgtcgtcagctcgtgtcgtgagatgttgggttaagtcccgcaacgagcgcaaccctcgcccttagttgccagcatttagttgggcactctaaggggactgccggtgataagccgagaggaaggtggggatgacgtcaagtcctcatggcccttacgggctgggctacacacgtgctacaatggtggtgacagtgggcagcgagcacgcgagtgtgagctaatctccaaaagccatctcagttcggattgcactctgcaactcgagtgcatgaagttggaatcgctagtaatcgcggatcagcatgccgcggtgaatacgttcccgggccttgtacacaccgcccgtcacaccatgggagttggttttacccgaaggtagtgcgctaaccgcaaggaggcagctaaccacggtagggtcagcgactggggtg

SEQ ID NO: 2884 - DNA, 1404 bp, Rhizobium gallicum
  source 1..1404: mol_type = unassigned DNA
aacgaacgctggcggcaggcttaacacatgcaagtcgagcgccccgcaaggggagcggcagacgggtgagtaacgcgtgggaacgtaccctttactacggaataacgcagggaaacttgtgctaataccgtatgtgcccttcgggggaaagatttatcggtaagggatcggcccgcgttggattagctagttggtggggtaaaggcctaccaaggcgacgatccatagctggtctgagaggatgatcagccacattgggactgagacacggcccaaactcctacgggaggcagcagtggggaatattggacaatgggcgcaagcctgatccagccatgccgcgtgagtgatgaaggccctagggttgtaaagctctttcaccggagaagataatgacggtatccggagaagaagccccggctaacttcgtgccagcagccgcggtaatacgaagggggctagcgttgttcggaattactgggcgtaaagcgcacgtaggcggacatttaagtcaggggtgaaatcccagagctcaactctggaactgcctttgatactgggtgtctggagtatggaagaggtgagtggaattccgagtgtagaggtgaaattcgtagatgttcggaggaacaccagtggcgaaggcggctcactggtccattactgacgctgaggtgcgaaagcgtggggagcaaacaggattagataccctggtagtccacgccgtaaacgatgaatgttagccgtcggcaagtttacttgtcggtggcgcacgtaacgcattaaacattccgcctggggagtacggtcgcaagattaaaactcaaaggaattgacgggggcccgcacaagcggtggagcatgtggtttaattcgaagcaacgcgcagaaccttaccagcccttgacatgccccggctacctacagagatgtagggttcccttcggggaccgggacacaggtgctgcatggctgtcgtcagctcgtgtcgtgagatgttgggttaagtcccgcaacgagcgcaaccctcgcccttagttgccagcatttagttgggcactctaaggggactgccggtgataagccgagaggaaggtggggatgacgtcaagtcctcatggcccttacgggctgggctacacacgtgctacaatggtggtgacagtgggcagcgagcacgcgagtgtgagctaatctccaaaagccatctcagttcggattgcactctgcaactcgagtgcatgaagttggaatcgctagtaatcgcggatcagcatgccgcggtgaatacgttcccgggccttgtacacaccgcccgtcacaccatgggagttggttttacccgaaggtagtgcgctaaccgcaaggaggcagctaaccacggtagggtcagcgactggggtg

SEQ ID NO: 2885 - DNA, 1430 bp, Rhizobium giardinii
  source 1..1430: mol_type = unassigned DNA
gcggcaggcttaacacatgccaattgcgagcgcccccgcaaggggagcggcagacgggtgagtaacgcgtgggaatctacccatctctacggaataactcagggaaacttgtgctaataccgtatacgcccttcgggggaaagatttatcggagatggatgagcccgcgttggattagctagttggtggggtaaaggcctaccaaggcgacgatccatagctggtctgagaggatgatcagccacattgggactgaaacacggcccaaactccttacggaaggcagcagtggggaatattggacaatgggcgcaagcctgatccagccatgccgcgtgagtgatgaaggccttagggttgtaaagctctttcaccggagaagataatgacggtatccggagaagaagccccggctaacttcgtgccagcagccgcggtaatacgaagggggctagcgttgttcggaattactgggcgtaaagcgcacgtaggcggatcgatcagtcaggggtgaaatcccagagctcaactctggaactgcctttgatactgtcgatctagagtatggaagaggtgagtggaattccgagtgtagaggtgaaattcgtagatattcggaggaacaccagtggcgaaggcggctcactggtccattactgacgctgaggtgcgaaagcgtggggagcaaacaggattagataccctggtagtccacgccgtaaacgatgaatgttagccgtcggcaagtttacttgtcggtggcgcagctaacgcattaaacattccgcctggggagtacggtcgcaagattaaaactcaaaggaattgacgggggcccgcacaagcggtggagcatgtggtttaattcgaagcaacgcgcagaaccttaccagctcttgacatcccgatcgcggacagtggagacattgtccttcagttaggctggatcggtgacaggtgctgcatggctgtcgtcagctcgtgtcgtgagatgttgggttaagtcccgcaacgagcgcaaccctcgcccttagttgccagcattcagttgggcactctaaggggactgccggtgataagccgagaggaaggtggggatgacgtcaagtcctcatggcccttacgggctgggctacacacgtgctacaatggtggtgacagtgggcagcgagaccgcgaggtcgagctaatctccaaaagccatctcagttcggattgcactctgcaactcgagtgcatgaagttggaatcgctagtaatcgcagatcagcatgctgcggtgaatacgttcccgggccttgtacacaccgcccgtcacaccatgggagttggttttacccgaaggtagtgcgctaaccgcaaggaggcagctaaccacggtagggtcagcgactggggtgaagtcgtaacaaggtagccgtaggggaacc

SEQ ID NO: 2886 - DNA, 1403 bp, unidentified
  source 1..1403: mol_type = unassigned DNA; note = Rhizobium grahamii
aacgaacgctggcggcaggcttaacacatgcaagtcgagcgccccgcaaggggagcggcagacgggtgagtaacgcgtgggaacgtaccctttactacggaataacgcatggaaacgtgtgctaataccgtatgtgcccttcgggggaaagatttatcggtaaaggatcggcccgcgttggattagctagttggtggggtaaaggcctaccaaggcgacgatccatagctggtctgagaggatgatcagccacattgggactgagacacggcccaaactcctacgggaggcagcagtggggaatattggacaatgggcgcaagcctgatccagccatgccgcgtgagtgatgaaggccttagggttgtaaagctctttcaccggtgaagataatgacggtaaccggagaagaagccccggctaacttcgtgccagcagccgcggtaatacgaagggggctagcgttgttcggatttactgggcgtaaagcgcacgtaggcggatcgatcagtcaggggtgaaatcccagagctcaactctggaactgcctttgatactgtcgatctggagtatggaagaggtgagtggaattccgagtgtagaggtgaaattcgtagatattcggaggaacaccagtggcgaaggcggctcactggtccattactgacgctgaggtgcgaaagcgtggggagcaaacaggattagataccctggtagtccacgccgtaaacgatgaatgttagccgtcgggcagtatactgttcggtggcgcagctaacgcattaaacattccgcctggggagtacggtcgcaagattaaaactcaaaggaattgacgggggcccgcacaagcggtggagcatgtggtttaattcgaagcaacgcgcagaaccttaccagcccttgacatgtccggctacttgcagagatgcaaggttcccttcggggaccggaacacaggtgctgcatggctgtcgtcagctcgtgtcgtgagatgttgggttaagtcccgcaacgagcgcaaccctcgcccttagttgccagcattcagttgggcactctaaggggactgccggtgataagccgagaggaaggtggggatgacgtcaagtcctcatggcccttacgggctgggctacacacgtgctacaatggtggtgacagtgggcagcgagacagcgatgtcgagctaatctccaaaagccatctcagttcggattgcactctgcaactcgagtgcatgaagttggaatcgctagtaatcgcggatcagcatgccgcggtgaatacgttcccgggccttgtacacaccgcccgtcacaccatgggagttggttttacccgaaggtagtgtgctaaccgcaaggaggcagctaaccacggtagggtcagcgactggggtg

SEQ ID NO: 2887 - DNA, 1403 bp, Rhizobium hainanense
  source 1..1403: mol_type = unassigned DNA
aacgaacgctggcggcaggcttaacacatgcaagtcgagcgccccgcaaggggagcggcagacgggtgagtaacgcgtgggaatctaccttttgctacggaataacgcagggaaacttgtgctaataccgtatgtgtccttcgggagaaagatttatcggcaagagatgagcccgcgttggattagctagttggtggggtaaaggcctaccaaggcgacgatccatagctggtctgagaggatgatcagccacattgggactgagacacggcccaaactcctacgggaggcagcagtggggaatattggacaatgggcgcaagcctgatccagccatgccgcgtgagtgatgaaggccctagggttgtaaagctctttcaccggagaagataatgacggtatccggagaagaagccccggctaacttcgtgccagcagccgcggtaatacgaagggggctagcgttgttcggaattactgggcgtaaagcgcacgtaggcggatcgatcagtcaggggtgaaatcccagggctcaaccctggaactgcctttgatactgtcgatctggagtatggaagaggtgagtggaattccgagtgtagaggtgaaattcgtagatattcggaggaacaccagtggcgaaggcggctcactggtccattactgacgctgaggtgcgaaagcgtggggagcaaacaggattagataccctggtagtccacgccgtaaacgatgaatgttagccgtcgggcagtatactgttcggtggcgcagctaacgcattaaacattccgcctggggagtacggtcgcaagattaaaactcaaaggaattgacgggggcccgcacaagcggtggagcatgtggtttaattcgaagcaacgcgcagaaccttaccagcccttgacatcctgtgttacccctagagatagggggtccacttcggtggcgcagagacaggtgctgcatggctgtcgtcagctcgtgtcgtgagatgttgggttaagtcccgcaacgagcgcaaccctcgcccttagttgccagcatttagttgggcactctaaggggactgccggtgataagccgagaggaaggtggggatgacgtcaagtcctcatggcccttacgggctgggctacacacgtgctacaatggtggtgacagtgggcagcgagcacgcgagtgtgagctaatctccaaaagccatctcagttcggattgcactctgcaactcgagtgcatgaagttggaatcgctagtaatcgcggatcagcatgccgcggtgaatacgttcccgggccttgtacacaccgcccgtcacaccatgggagttggttttacccgaaggtagtgcgctaaccgcaaggaggcagctaaccacggtagggtcagcgactggggtg

SEQ ID NO: 2888 - DNA, 1400 bp, unidentified
  source 1..1400: mol_type = unassigned DNA; note = Rhizobium ipomoeae
aacgaacgctggcggcaggcttaacacatgcaagtcgagcgccccgcaaggggagtggcagacgggtgagtaacgcgtgggaatctaccgtaccctacggaacaacagttggaaacgactgctaataccgtatacgccctacgggggaaagatttatcggggtatgatgagcccgcgttggattagctagttggtggggtaaaggcctaccaaggcgacgatccatagctggtctgagaggatgatcagccacattgggactgagacacggcccaaactcctacgggaggcagcagtggggaatattggacaatgggcgcaagcctgatccagccatgccgcgtgagtgatgaaggtcttaggattgtaaagctctttcaccgatgaagataatgacggtagtcggagaagaagccccggctaacttcgtgccagcagccgcggtaatacgaagggggctagcgttgttcggaattactgggcgtaaagcgcacgtaggcggatatttaagtcaggggtgaaatcccagagctcaactctggaactgcctttgatactgggtatcttgagtatggaagaggtgagtggaattccgagtgtagaggtgaaattcgtagatattcggaggaacaccagtggcgaaggcggctcactggtccattactgacgctgaggtgcgaaagcgtggggagcaaacaggattagataccctggtagtccacgccgtaaacgatgaatgttagccgtcggcaagtttacttgtcggtggcgcagctaacgcattaaacattccgcctggggagtacggtcgcaagattaaaactcaaaggaattgacgggggcccgcacaagcggtggagcatgtggtttaattcgaagcaacgcgcagaaccttaccagctcttgacatctgggtcgcggttaccggagacggtatccttcagttcggctggacccaagacaggtgctgcatggctgtcgtcagctcgtgtcgtgagatgttgggttaagtcccgcaacgagcgcaaccctcgcccttagttgccagcattcagttgggcactctaaggggactgccggtgataagccgagaggaaggtggggatgacgtcaagtcctcatggcccttacgggctgggctacacacgtgctacaatggtggtgacagtgggcagcgagacagcgatgtcgagctaatctccaaaagccatctcagttcggattgcactctgcaactcgagtgcatgaagttggaatcgctagtaatcgcggatcagcatgccgcggtgaatacgttcccgggccttgtacacaccgcccgtcacaccatgggagttggttttacccgaaggtagtgcgctaacccgcaagggaggcagctaaccacggtagggtcagcg

SEQ ID NO: 2889 - DNA, 1371 bp, unidentified
  source 1..1371: mol_type = unassigned DNA; note = Rhizobium jaguaris
agtcgagcgccccgcaaggggagcggcagacgggtgagtaacgcgtgggaatctacccttttctacggaataacgcagggaaacttgtgctaataccgtatgtgtccttcgggagaaagatttatcgggaaaggatgagcccgcgttggattagctagttggtggggtaaaggcctaccaaggcgacgatccatagctggtctgagaggatgatcagccacattgggactgagacacggcccaaactcctacgggaggcagcagtggggaatattggacaatgggcgcaagcctgatccagccatgccgcgtgagtgatgaaggccctagggttgtaaagctctttcaccggagaagataatgacggtatccggagaagaagccccggctaacttcgtgccagcagccgcggtaatacgaagggggctagcgttgttcggaattactgggcgtaaagcgcacgtaggcggatcgatcagtcaggggtgaaatcccagggctcaaccctggaactgcctttgatactgtcgatctggagtatggaagaggtgagtggaattccgagtgtagaggtgaaattcgtagatattcggaggaacaccagtggcgaaggcggctcactggtccattactgacgctgaggtgcgaaagcgtggggagcaaacaggattagataccctggtagtccacgccgtaaacgatgaatgttagccgtcgggcagtatactgttcggtggcgcagctaacgcattaaacattccgcctggggagtacggtcgcaagattaaaactcaaaggaattgacgggggcccgcacaagcggtggagcatgtggtttaattcgaagcaacgcgcagaaccttaccagcccttgacatcctgtgttacccagagagatttggggtccacttcggtggcgcagagacaggtgctgcatggctgtcgtcagctcgtgtcgtgagatgttgggttaagtcccgcaacgagcgcaaccctcgcccttagttgccagcatttagttgggcactctaaggggactgccggtgataagccgagaggaaggtggggatgacgtcaagtcctcatggcccttacgggctgggctacacacgtgctacaatggtggtgacagtgggcagcgagcacgcgagtgtgagctaatctccaaaagccatctcagttcggattgcactctgcaactcgagtgcatgaagttggaatcgctagtaatcgcggatcagcatgccgcggtgaatacgttcccgggccttgtacacaccgcccgtcacaccatgggagttggttttacccgaaggtagtgcgctaaccgcaaggaggcagctaaccacggtagggtcagcgactggggtg

SEQ ID NO: 2890 - DNA, 1403 bp, unidentified; identical to SEQ ID NO: 2878
  source 1..1403: mol_type = unassigned DNA; note = Rhizobium laguerreae

SEQ ID NO: 2891 - DNA, 1403 bp, Rhizobium leguminosarum; identical to SEQ ID NO: 2878
  source 1..1403: mol_type = unassigned DNA

SEQ ID NO: 2892 - DNA, 1403 bp, Rhizobium loessense
  source 1..1403: mol_type = unassigned DNA
aacgaacgctggcggcaggcttaacacatgcaagtcgagcgccccgcaaggggagcggcagacgggtgagtaacgcgtgggaacgtaccctttactacggaataacgcagggaaacttgtgctaataccgtatgtgcccttcgggggaaagatttatcggtaagggatcggcccgcgttggattagctagttggtggggtaaaggcctaccaaggcgacgatccatagctggtctgagaggatgatcagccacattgggactgagacacggcccaaactcctacgggaggcagcagtggggaatattggacaatgggcgcaagcctgatccagccatgccgcgtgagtgatgaaggccctagggttgtaaagctctttcaccggagaagataatgacggtatccggagaagaagccccggctaacttcgtgccagcagccgcggtaatacgaagggggctagcgttgttcggaattactgggcgtaaagcgcacgtaggcggacatttaagtcaggggtgaaatcccagagctcaactctggaactgcctttgatactgggtgtctggagtatggaagaggtgagtggaattccgagtgtagaggtgaaattcgtagatattcggaggaacaccagtggcgaaggcggctcactggtccattactgacgctgaggtgcgaaagcgtggggagcaaacaggattagataccctggtagtccacgccgtaaacgatgaatgttagccgtcggcaagtttacttgtcggtggcgcagctaacgcattaaacattccgcctggggagtacggtcgcaagattaaaactcaaaggaattgacgggggcccgcacaagcggtggagcatgtggtttaattcgaagcaacgcgcagaaccttaccagcccttgacatgcccggcgacctacagagatgtagggttcccttcggggaccgggacacaggtgctgcatggctgtcgtcagctcgtgtcgtgagatgttgggttaagtcccgcaacgagcgcaaccctcgcccttagttgccagcattgagttgggcactctaaggggactgccggtgataagccgagaggaaggtggggatgacgtcaagtcctcatggcccttacgggctgggctacacacgtgctacaatggtggtgacagtgggcagcgagcacgcgagtgtgagctaatctccaaaagccatctcagttcggattgcactctgcaactcgagtgcatgaagttggaatcgctagtaatcgcggatcagcatgccgcggtgaatacgttcccgggccttgtacacaccgcccgtcacaccatgggagttggttttacccgaaggtagtgcgctaaccgcaaggaggcagctaaccacggtagggtcagcgactggggtg

SEQ ID NO: 2893 - DNA, 1403 bp, Rhizobium lusitanum
  source 1..1403: mol_type = unassigned DNA
aacgaacgctggcggcaggcttaacacatgcaagtcgagcgccccgcaaggggagcggcagacgggtgagtaacgcgtgggaatctacccttttctacggaataacgcagggaaacttgtgctaataccgtatgtgtccttcgggagaaagatttatcgggaaaggatgagcccgcgttggattagctagttggtggggtaaaggcctaccaaggcgacgatccatagctggtctgagaggatgatcagccacattgggactgagacacggcccaaactcctacgggaggcagcagtggggaatattggacaatgggcgcaagcctgatccagccatgccgcgtgagtgatgaaggccctagggttgtaaagctctttcaccggagaagataatgacggtatccggagaagaagccccggctaacttcgtgccagcagccgcggtaatacgaagggggctagcgttgttcggaattactgggcgtaaagcgcacgtaggcggatcgatcagtcaggggtgaaatcccagggctcaaccctggaactgcctttgatactgtcgatctggagtatggaagaggtgagtggaattccgagtgtagaggtgaaattcgtagatattcggaggaacaccagtggcgaaggcggctcactggtccattactgacgctgaggtgcgaaagcgtggggagcaaacaggattagataccctggtagtccacgccgtaaacgatgaatgttagccgtcgggcagtatactgttcggtggcgcagctaacgcattaaacattccgcctggggagtacggtcgcaagattaaaactcaaaggaattgacgggggcccgcacaagcggtggagcatgtggtttaattcgaagcaacgcgcagaaccttaccagcccttgacatcctgtgttacccgtagagatatggggtccacttcggtggcgcagagacaggtgctgcatggctgtcgtcagctcgtgtcgtgagatgttgggttaagtcccgcaacgagcgcaaccctcgcccttagttgccagcatttagttgggcactctaaggggactgccggtgataagccgagaggaaggtggggatgacgtcaagtcctcatggcccttacgggctgggctacacacgtgctacaatggtggtgacagtgggcagcgagcacgcgagtgtgagctaatctccaaaagccatctcagttcggattgcactctgcaactcgagtgcatgaagttggaatcgctagtaatcgcggatcagcatgccgcggtgaatacgttcccgggccttgtacacaccgcccgtcacaccatgggagttggttttacccgaaggtagtgcgctaaccgcaaggaggcagctaaccacggtagggtcagcgactggggtg

SEQ ID NO: 2894 - DNA, 1349 bp, unidentified
  source 1..1349: mol_type = unassigned DNA; note = Rhizobium mesoamericanum
gcggcagacgggtgagtaacgcgtgggaacgtaccctttgctacggaataacccagggaaacttggactaataccgtatgtgcccttcgggggaaagatttatcggcaaaggatcggcccgcgttggattagctagttggtggggtaaaggcctaccaaggcgacgatccatagctggtctgagaggatgatcagccacattgggactgagacacggcccaaactcctacgggaggcagcagtggggaatattggacaatgggcgcaagcctgatccagccatgccgcgtgagtgatgaaggccctagggttgtaaagctctttcaccggtgaagataatgacggtaaccggagaagaagccccggctaacttcgtgccagcagccgcggtaatacgaagggggctagcgttgttcggaattactgggcgtaaagcgcacgtaggcggatcgatcagtcaggggtgaaatcccagagctcaactctggaactgcctttgatactgtcgatctggagtatggaagaggtgagtggaattccgagtgtagaggtgaaattcgtagatattcggaggaacaccagtggcgaaggcggctcactggtccattactgacgctgaggtgcgaaagcgtggggagcaaacaggattagataccctggtagtccacgccgtaaacgatgaatgttagccgtcgggcagtatactgttcggtggcgcagctaacgcattaaacattccgcctggggagtacggtcgcaagattaaaactcaaaggaattgacgggggcccgcacaagcggtggagcatgtggtttaattcgaagcaacgcgcagaaccttaccagcccttgacatcctcggacagctgcagagatgcagtctccacttcggtggccgagagacaggtgctgcatggctgtcgtcagctcgtgtcgtgagatgttgggttaagtcccgcaacgagcgcaaccctcgcccttagttgccagcatttagttgggcactctaaggggactgccggtgataagccgagaggaaggtggggatgacgtcaagtcctcatggcccttacgggctgggctacacacgtgctacaatggtggtgacagtgggcagcgagaccgcgaggtcgagctaatctccaaaagccatctcagttcggattgcactctgcaactcgagtgcatgaagttggaatcgctagtaatcgcggatcagcatgccgcggtgaatacgttcccgggccttgtacacaccgcccgtcacaccatgggagttggttttacccgaaggtagtgtgctaaccgcaaggaggcagctaaccacggtagggtcagcgactggggtg

SEQ ID NO: 2895 - DNA, 1403 bp, Rhizobium miluonense
  source 1..1403: mol_type = unassigned DNA
aacgaacgctggcggcaggcttaacacatgcaagtcgagcgccccgcaaggggagcggcagacgggtgagtaacgcgtgggaatctaccttttgctacggaataacgcagggaaacttgtgctaataccgtatgtgtccttcgggagaaagatttatcggcaagagatgagcccgcgttggattagctagttggtggggtaaaggcctaccaaggcgacgatccatagctggtctgagaggatgatcagccacattgggactgagacacggcccaaactcctacgggaggcagcagtggggaatattggacaatgggcgcaagcctgatccagccatgccgcgtgagtgatgaaggccctagggttgtaaagctctttcaccggagaagataatgacggtatccggagaagaagccccggctaacttcgtgccagcagccgcggtaatacgaagggggctagcgttgttcggaattactgggcgtaaagcgcacgtaggcggatcgatcagtcaggggtgaaatcccagggctcaaccctggaactgcctttgatactgtcgatctggagtatggaagaggtgagtggaattccgagtgtagaggtgaaattcgtagatattcggaggaacaccagtggcgaaggcggctcactggtccattactgacgctgaggtgcgaaagcgtggggagcaaacaggattagataccctggtagtccacgccgtaaacgatgaatgttagccgtcgggcagtatactgttcggtggcgcagctaacgcattaaacattccgcctggggagtacggtcgcaagattaaaactcaaaggaattgacgggggcccgcacaagcggtggagcatgtggtttaattcgaagcaacgcgcagaaccttaccagcccttgacatcctgtgttacccgtagagatatggggtccacttcggtggcgcagagacaggtgctgcatggctgtcgtcagctcgtgtcgtgagatgttgggttaagtcccgcaacgagcgcaaccctcgcccttagttgccagcatttagttgggcactctaaggggactgccggtgataagccgagaggaaggtggggatgacgtcaagtcctcatggcccttacgggctgggctacacacgtgctacaatggtggtgacagtgggcagcgagcacgcgagtgtgagctaatctccaaaagccatctcagttcggattgcactctgcaactcgagtgcatgaagttggaatcgctagtaatcgcggatcagcatgccgcggtgaatacgttcccgggccttgtacacaccgcccgtcacaccatgggagttggttttacccgaaggtagtgcgctaaccgcaaggaggcagctaaccacggtagggtcagcgactggggtg

SEQ ID NO: 2896 - DNA, 1403 bp, Rhizobium mongolense
  source 1..1403: mol_type = unassigned DNA
aacgaacgctggcggcaggcttaacacatgcaagtcgagcgccccgcaaggggagcggcagacgggtgagtaacgcgtgggaacgtaccctttactacggaataacgcagggaaacttgtgctaataccgtatgtgcccttcgggggaaagatttatcggtaagggatcggcccgcgttggattagctagttggtggggtaaaggcctaccaaggcgacgatccatagctggtctgagaggatgatcagccacattgggactgagacacggcccaaactcctacgggaggcagcagtggggaatattggacaatgggcgcaagcctgatccagccatgccgcgtgagtgatgaaggccctagggttgtaaagctctttcaccggagaagataatgacggtatccggagaagaagccccggctaacttcgtgccagcagccgcggtaatacgaagggggctagcgttgttcggaattactgggcgtaaagcgcacgtaggcggacatttaagtcaggggtgaaatcccagagctcaactctggaactgcctttgatactgggtgtctggagtatggaagaggtgagtggaattccgagtgtagaggtgaaattcgtagatattcggaggaacaccagtggcgaaggcggctcactggtccattactgacgctgaggtgcgaaagcgtggggagcaaacaggattagataccctggtagtccacgccgtaaacgatgaatgttagccgtcggcaagtttacttgtcggtggcgcagctaacgcattaaacattccgcctggggagtacggtcgcaagattaaaactcaaaggaattgacgggggcccgcacaagcggtggagcatgtggtttaattcgaagcaacgcgcagaaccttaccagcccttgacatgcccggccacctacagagatgtagggttcccttcggggaccgggacacaggtgctgcatggctgtcgtcagctcgtgtcgtgagatgttgggttaagtcccgcaacgagcgcaaccctcgcccttagttgccagcattcagttgggcactctaaggggactgccggtgataagccgagaggaaggtggggatgacgtcaagtcctcatggcccttacgggctgggctacacacgtgctacaatggtggtgacagtgggcagcgagcacgcgagtgtgagctaatctccaaaagccatctcagttcggattgcactctgcaactcgagtgcatgaagttggaatcgctagtaatcgcggatcagcatgccgcggtgaatacgttcccgggccttgtacacaccgcccgtcacaccatgggagttggttttacccgaaggtagtgcgctaaccgcaaggaggcagctaaccacggtagggtcagcgactggggtg

SEQ ID NO: 2897 - DNA, 1403 bp, Rhizobium multihospitium; identical to SEQ ID NO: 2883
  source 1..1403: mol_type = unassigned DNA

SEQ ID NO: 2898 - DNA, 1407 bp, unidentified
  source 1..1407: mol_type = unassigned DNA; note = Rhizobium nepotum
aacgaacgctggcggcaggcttaacacatgcaagtcgaacgccccgcaaggggagtggcagacgggtgagtaacgcgtgggaatctaccgtgccctgcggaatagctctgggaaactggaattaataccgcatacgccctacgggggaaagatttatcggggtatgatgagcccgcgttggattagctagttggtggggtaatggcctaccaaggcgacgatccatagctggtctgagaggatgatcagccacattgggactgagacacggcccaaactcctacgggaggcagcagtggggaatattggacaatgggcgcaagcctgatccagccatgccgcgtgagtgatgaaggccttagggttgtaaagctctttcaccggagaagataatgacggtatccggagaagaagccccggctaacttcgtgccagcagccgcggtaatacgaagggggctagcgttgttcggaattactgggcgtaaagcgcacgtaggcggatatttaagtcaggggtgaaatcccagagctcaactctggaactgcctttgatactgggtatcttgagtatggaagaggtaagtggaattccgagtgtagaggtgaaattcgtagatattcggaggaacaccagtggcgaaggcggcttactggtccattactgacgctgaggtgcgaaagcgtggggagcaaacaggattagataccctggtagtccacgccgtaaacgatgaatgttagccgtcgggcagtatactgttcggtggcgcagctaacgcattaaacattccgcctggggagtacggtcgcaagattaaaactcaaaggaattgacgggggcccgcacaagcggtggagcatgtggtttaattcgaagcaacgcgcagaaccttaccagctcttgacattcggggtttgggcagtggagacattgtccttcagttaggctggccccagaacaggtgctgcatggctgtcgtcagctcgtgtcgtgagatgttgggttaagtcccgcaacgagcgcaaccctcgcccttagttgccagcatttagttgggcactctaaggggactgccggtgataagccgagaggaaggtggggatgacgtcaagtcctcatggcccttacgggctgggctacacacgtgctacaatggtggtgacagtgggcagcgagacagcgatgtcgagctaatctccaaaagccatctcagttcggattgcactctgcaactcgagtgcatgaagttggaatcgctagtaatcgcagatcagcatgctgcggtgaatacgttcccgggccttgtacacaccgcccgtcacaccatgggagttggttttacccgaaggtagtgcgctaaccgcaaggaggcagctaaccacggtagggtcagcgactggggtg

SEQ ID NO: 2899 - DNA, 1425 bp, Rhizobium oryzae
  source 1..1425: mol_type = unassigned DNA
cgaacgctggcggcaggcttaacacatgcaagtcgagcgcgtagcaatacgagcggcagacgggtgagtaacgcgtgggaacgtaccctttactacggaatagctccgggaaactggaattaataccgtatgtgccctttgggggaaagatttatcggtaaaggatcggcccgcgttggattagctagttggtggggtaaaggcctaccaaggcgacgatccatagctggtctgagaggatgatcagccacattgggactgagacacggcccaaactcctacgggaggcagcagtggggaatattggacaatgggcgcaagcctgatccagccatgccgcgtgagtgatgaaggccttagggttgtaaagctctttcaccggagaagataatgacggtatccggagaagaagccccggctaacttcgtgccagcagccgcggtaatacgaagggggctagcgttgttcggaattactgggcgtaaagcgcacgtaggcggacatttaagtcaggggtgaaatcccggggctcaaccccggaactgcctttgatactgggtgtcttgagtgtggaagaggtgagtggaattgcgagtgtagaggtgaaattcgtagatattcgcaggaacaccagtggcgaaggcggctcactggtccacaactgacgctgaggtgcgaaagcgtggggagcaaacaggattagataccctggtagtccacgccgtaaacgatgaatgctagccgtcgggcagtttactgttcggtggcgccgctaacgctttaagcattccgcctggggagtacggtcgcaagattaaaactcaaaggaattgacgggggcccgcacaagcggtggagcatgtggtttaattcgaagcaacgcgcagaaccttaccagcccttgacatcccgtgaccggtgcagagatgcacttttcccttcggggacgcggagacaggtgctgcatggctgtcgtcagctcgtgtcgtgagatgttgggttaagtcccgcaacgagcgcaaccctcgcccttagttgccagcatttggttgggcactctaaggggactgccggtgataagccgagaggaaggtggggatgacgtcaagtcctcatggcccttacgggctgggctacacacgtgctacaatggtggtgacagtgggcagcgagcgcgcgagcgtgagctaatctccaaaagccatctcagttcggattgcactctgcaactcgagtgcatgaagttggaatcgctagtaatcgcggatcagcatgccgcggtgaatacgttcccgggccttgtacacaccgcccgtcacaccatgggagttggttttacccgaaggtcgtgcgctaaccgcaaggaggcagcgaaccacggtagggtcagcgactggggtgaagtcgtaacaaggtaaaccgtaa

SEQ ID NO: 2900 - DNA, 1405 bp, unidentified
  source 1..1405: mol_type = unassigned DNA; note = Rhizobium oryziradicis
aacgaacgctggcggcaggcttaacacatgcaagtcgaacgcatccttcggggtgagtggcagacgggtgagtaacgcgtgggaatctaccgtaccctacggaatagctctgggaaactggaagtaataccgtatacgcccgcaaggggaaagatttatcggggtatgatgagcccgcgttggattagctagttggtggggtaaaggcctaccaaggcgacgatccatagctggtctgagaggatgatcagccacattgggactgagacacggcccaaactcctacgggaggcagcagtggggaatattggacaatgggcgcaagcctgatccagccatgccgcgtgagtgatgaaggtcttaggattgtaaagctctttcaccggagaagataatgacggtatccggagaagaagccccggctaacttcgtgccagcagccgcggtaatacgaagggggctagcgttgttcggaattactgggcgtaaagcgcacgtaggcgggtatttaagtcaggggtgaaatcccagagctcaactctggaactgcctttgatactgggtatcttgagtatggaagaggtaagtggaattgcgagtgtagaggtgaaattcgtagatattcgcaggaacaccagtggcgaaggcggcttactggtccattactgacgctgaggtgcgaaagcgtggggagcaaacaggattagataccctggtagtccacgccgtaaacgatgaatgttagccgtcggcaagttgacttgtcggtggcgcagctaacgcattaaacattccgcctggggagtacggtcgcaagattaaaactcaaaggaattgacgggggcccgcacaagcggtggagcatgtggtttaattcgaagcaacgcgcagaaccttaccagctcttgacatcctacgcccgctacagagatgtagttttcccttcggggacgtagagacaggtgctgcatggctgtcgtcagctcgtgtcgtgagatgttgggttaagtcccgcaacgagcgcaaccctcgcccttagttgccagcattaggttgggcactctaaggggactgccggtgataagccgagaggaaggtggggatgacgtcaagtcctcatggcccttacgggctgggctacacacgtgctacaatggtggtgacagtgggcagcgagaccgcgaggtcgagctaatctccaaaagccatctcagttcggattgcactctgcaactcgagtgcatgaagttggaatcgctagtaatcgcagatcagcatgctgcggtgaatacgttcccgggccttgtacacaccgcccgtcacaccatgggagttggttttacccgaaggtcgtgcgctaaccgcaaggaggcagcgaaccacggtagggtcagcgactggggtg

SEQ ID NO: 2901 - DNA, 1403 bp, Rhizobium phaseoli
  source 1..1403: mol_type = unassigned DNA
aacgaacgctggcggcaggcttaacacatgcaagtcgagcgccccgcaaggggagcggcagacgggtgagtaacgcgtgggaacgtaccctttactacggaataacgcagggaaacttgtgctaataccgtatgtgcccttcgggggaaagatttatcggtaaaggatcggcccgcgttggattagctagttggtggggtaaaggcctaccaaggcgacgatccatagctggtctgagaggatgatcagccacattgggactgagacacggcccaaactcctacgggaggcagcagtggggaatattggacaatgggcgcaagcctgatccagccatgccgcgtgagtgatggaggccctagggttgtaaagctctttcaccggagaagataatgacggtatccggagaagaagccccggctaacttcgtgccagcagccgcggtaatacgaagggggctagcgttgttcggaattactgggcgtaaagcgcacgtaggcggatcgatcagtcaggggtgaaatcccagggctcaaccctggaactgcctttgatactgtcgatctggagtatggaagaggtgagtggaattccgagtgtagaggtgaaattcgtagatattcggaggaacaccagtggcgaaggcggctcactggtccattactgacgctgaggtgcgaaagcgtggggagcaaacaggattagataccctggtagtccacgccgtaaacgatgaatgttagccgtcgggcagtatactgttcggtggcgcagctaacgcattaaacattccgcctggggagtacggtcgcaagattaaaactcaaaggaattgacgggggcccgcacaagcggtggagcatgtggtttaattcgaagcaacgcgcagaaccttaccagcccttgacatgcccggctacttgcagagatgcaaggttcccttcggggaccgggacacaggtgctgcatggctgtcgtcagctcgtgtcgtgagatgttgggttaagtcccgcaacgagcgcaaccctcgcccttagttgccagcattcagttgggcactctaaggggactgccggtgataagccgagaggaaggtggggatgacgtcaagtcctcatggcccttacgggctgggctacacacgtgctacaatggtggtgacagtgggcagcgagcacgcgagtgtgagctaatctccaaaagccatctcagttcggattgcactctgcaactcgagtgcatgaagttggaatcgctagtaatcgcggatcagcatgccgcggtgaatacgttcccgggccttgtacacaccgcccgtcacaccatgggagttggttttacccgaaggtagtgcgctaaccgcaaggaggcagctaaccacggtagggtcagcgactggggtg

SEQ ID NO: 2902 - DNA, 1403 bp, Rhizobium pisi
  source 1..1403: mol_type = unassigned DNA
aacgaacgctggcggcaggcttaacacatgcaagtcgagcgccccgcaaggggagcggcagacgggtgagtaacgcgtgggaacgtaccctttactacggaataacgcagggaaacttgtgctaataccgtatgtgccctttgggggaaagatttatcggtaaaggatcggcccgcgttggattagctagttggtggggtaaaggcctaccaaggcgacgatccatagctggtctgagaggatgatcagccacattgggactgagacacggcccaaactcctacgggaggcagcagtggggaatattggacaatgggcgcaagcctgatccagccatgccgcgtgagtgatgaaggccctagggttgtaaagctctttcaccggagaagataatgacggtatccggagaagaagccccggctaacttcgtgccagcagccgcggtaatacgaagggggctagcgttgttcggaattactgggcgtaaagcgcacgtaggcggatcgatcagtcaggggtgaaatcccagggctcaaccctggaactgcctttgatactgtcgatctggagtatggaagaggtgagtggaattccgagtgtagaggtgaaattcgtagatattcggaggaacaccagtggcgaaggcggctcactggtccattactgacgctgaggtgcgaaagcgtggggagcaaacaggattagataccctggtagtccacgccgtaaacgatgaatgttagccgtcgggcagtatactgttcggtggcgcagctaacgcattaaacattccgcctggggagtacggtcgcaagattaaaactcaaaggaattgacgggggcccgcacaagcggtggagcatgtggtttaattcgaagcaacgcgcagaaccttaccagcccttgacatgcccggctacttgcagagatgcaaggttcccttcggggaccgggacacaggtgctgcatggctgtcgtcagctcgtgtcgtgagatgttgggttaagtcccgcaacgagcgcaaccctcgcccttagttgccagcattcagttgggcactctaaggggactgccggtgataagccgagaggaaggtggggatgacgtcaagtcctcatggcccttacgggctgggctacacacgtgctacaatggtggtgacagtgggcagcgagcacgcgagtgtgagctaatctccaaaagccatctcagttcggattgcactctgcaactcgagtgcatgaagttggaatcgctagtaatcgcggatcagcatgccgcggtgaatacgttcccgggccttgtacacaccgcccgtcacaccatgggagttggttttacccgaaggtagtgcgctaaccgcaaggaggcagctaaccacggtagggtcagcgactggggtg

SEQ ID NO: 2903 - DNA, 1407 bp, Rhizobium pusense
  source 1..1407: mol_type = unassigned DNA
aacgaacgctggcggcaggcttaacacatgcaagtcgaacgccccgcaaggggagtggcagacgggtgagtaacgcgtgggaacataccctttcctgcggaatagctccgggaaactggaattaataccgcatacgccctacgggggaaagatttatcggggaaggattggcccgcgttggattagctagttggtggggtaaaggcctaccaaggcgacgatccatagctggtctgagaggatgatcagccacattgggactgagacacggcccaaactcctacgggaggcagcagtggggaatattggacaatgggcgcaagcctgatccagccatgccgcgtgagtgatgaaggccttagggttgtaaagctctttcaccgatgaagataatgacggtagtcggagaagaagccccggctaacttcgtgccagcagccgcggtaatacgaagggggctagcgttgttcggaattactgggcgtaaagcgcacgtaggcggatatttaagtcaggggtgaaatcccgcagctcaactgcggaactgcctttgatactgggtatcttgagtatggaagaggtaagtggaattccgagtgtagaggtgaaattcgtagatattcggaggaacaccagtggcgaaggcggcttactggtccattactgacgctgaggtgcgaaagcgtggggagcaaacaggattagataccctggtagtccacgccgtaaacgatgaatgttagccgtcgggcagtatactgttcggtggcgcagctaacgcattaaacattccgcctggggagtacggtcgcaagattaaaactcaaaggaattgacgggggcccgcacaagcggtggagcatgtggtttaattcgaagcaacgcgcagaaccttaccagctcttgacattcggggtatgggcattggagacgatgtccttcagttaggctggccccagaacaggtgctgcatggctgtcgtcagctcgtgtcgtgagatgttgggttaagtcccgcaacgagcgcaaccctcgcccttagttgccagcatttagttgggcactctaaggggactgccggtgataagccgagaggaaggtggggatgacgtcaagtcctcatggcccttacgggctgggctacacacgtgctacaatggtggtgacagtgggcagcgagacagcgatgtcgagctaatctccaaaagccatctcagttcggattgcactctgcaactcgagtgcatgaagttggaatcgctagtaatcgcagatcagcatgctgcggtgaatacgttcccgggccttgtacacaccgcccgtcacaccatgggagttggttttacccgaaggtagtgcgctaaccgcaaggaggcagctaaccacggtagggtcagcgactggggtg

SEQ ID NO: 2904 - DNA, 1407 bp, Rhizobium radiobacter
  source 1..1407: mol_type = unassigned DNA
aacgaacgctggcggcaggcttaacacatgcaagtcgaacgccccgcaaggggagtggcagacgggtgagtaacgcgtgggaacataccctttcctgcggaatagctccgggaaactggaattaataccgcatacgccctacgggggaaagatttatcggggaaggattggcccgcgttggattagctagttggtggggtaaaggcctaccaaggcgacgatccatagctggtctgagaggatgatcagccacattgggactgagacacggcccaaactcctacgggaggcagcagtggggaatattggacaatgggcgcaagcctgatccagccatgccgcgtgagtgatgaaggccttagggttgtaaagctctttcaccggagaagataatgacggtatccggagaagaagccccggctaacttcgtgccagcagccgcggtaatacgaagggggctagcgttgttcggaattactgggcgtaaagcgcacgtaggcggatatttaagtcaggggtgaaatcccagagctcaactctggaactgcctttgatactgggtatcttgagtatggaagaggtaagtggaattccgagtgtagaggtgaaattcgtagatattcggaggaacaccagtggcgaaggcggcttactggtccattactgacgctgaggtgcgaaagcgtggggagcaaacaggattagataccctggtagtccacgccgtaaacgatgaatgttagccgtcgggcagtatactgttcggtggcgcagctaacgcattaaacattccgcctggggagtacggtcgcaagattaaaactcaaaggaattgacgggggcccgcacaagcggtggagcatgtggtttaattcgaagcaacgcgcagaaccttaccagctcttgacattcggggtttgggcagtggagacattgtccttcagttaggctggccccagaacaggtgctgcatggctgtcgtcagctcgtgtcgtgagatgttgggttaagtcccgcaacgagcgcaaccctcgcccttagttgccagcatttagttgggcactctaaggggactgccggtgataagccgagaggaaggtggggatgacgtcaagtcctcatggcccttacgggctgggctacacacgtgctacaatggtggtgacagtgggcagcgagacagcgatgtcgagctaatctccaaaagccatctcagttcggattgcactctgcaactcgagtgcatgaagttggaatcgctagtaatcgcagatcagcatgctgcggtgaatacgttcccgggccttgtacacaccgcccgtcacaccatgggagttggttttacccgaaggtagtgcgctaaccgcaaggaggcagctaaccacggtagggtcagcgactggggtg

SEQ ID NO: 2905 - DNA, 1403 bp, unidentified
  source 1..1403: mol_type = unassigned DNA; note = Rhizobium rhizosphaerae
aacgaacgctggcggcaggcttaacacatgcaagtcgagcgcgtagcaatacgagcggcagacgggtgagtaacgcgtgggaacgtaccctttactacggaatagctccgggaaactggaattaataccgtatgtgccctttgggggaaagatttatcggtaaaggatcggcccgcgttggattagctagttggtggggtaaaggcctaccaaggcgacgatccatagctggtctgagaggatgatcagccacattgggactgagacacggcccaaactcctacgggaggcagcagtggggaatattggacaatgggcgcaagcctgatccagccatgccgcgtgagtgatgaaggccttagggttgtaaagctctttcaccggagaagataatgacggtatccggagaagaagccccggctaacttcgtgccagcagccgcggtaatacgaagggggctagcgttgttcggaattactgggcgtaaagcgcacgtaggcggacatttaagtcaggggtgaaatcccggggctcaaccccggaactgcctttgatactgggtgtcttgagtgtggaagaggtgagtggaattgcgagtgtagaggtgaaattcgtagatattcgcaggaacaccagtggcgaaggcggctcactggtccacaactgacgctgaggtgcgaaagcgtggggagcaaacaggattagataccctggtagtccacgccgtaaacgatgaatgctagccgtcgggcagtttactgttcggtggcgccgctaacgctttaagcattccgcctggggagtacggtcgcaagattaaaactcaaaggaattgacgggggcccgcacaagcggtggagcatgtggtttaattcgaagcaacgcgcagaaccttaccagcccttgacatcccgagaccggtccagagatggactttccacttcggtggctcggagacaggtgctgcatggctgtcgtcagctcgtgtcgtgagatgttgggttaagtcccgcaacgagcgcaaccctcgcccttagttgccagcatttggttgggcactctaaggggactgccggtgataagccgagaggaaggtggggatgacgtcaagtcctcatggcccttacgggctgggctacacacgtgctacaatggtggtgacagtgggcagcgagaccgcgaggtcgagctaatctccaaaagccatctcagttcggattgcactctgcaactcgagtgcatgaagttggaatcgctagtaatcgcggatcagcatgccgcggtgaatacgttcccgggccttgtacacaccgcccgtcacaccatgggagttggttttacccgaaggcgctgcgctaaccgcaaggaggcaggcgaccacggtagggtcagcgactggggtg

SEQ ID NO: 2906 - DNA, 1409 bp, Rhizobium selenitireducens
  source 1..1409: mol_type = unassigned DNA
aacgaacgctggcggcaggcttaacacatgcaagtcgagcgccccgcaaggggagcggcagacgggtgagtaacgcgtgggaatctaccgagccctacggaataacgcatggaaacgtgtgctaataccgtatacgccctacgggggaaagatttatcggggtttgatgagcccgcgttggattagctagttggtggggtaaaggcctaccaaggcgacgatccatagctggtctgagaggatgatcagccacattgggactgagacacggcccaaactcctacgggaggcagcagtggggaatattggacaatgggcgcaagcctgatccagccatgccgcgtgagtgatgaaggtcttaggattgtaaagctctttcaccggagaagataatgacggtatccggagaagaagccccggctaacttcgtgccagcagccgcggtaatacgaagggggctagcgttgttcggaattactgggcgtaaagcgcacgtaggcggatatttaagtcaggggtgaaatcccagagctcaactctggaactgcctttgatactgggtatctagagtatggaagaggtgagtggaattccgagtgtagaggtgaaattcgtagatattcggaggaacaccagtggcgaaggcggctcactggtccattactgacgctgaggtgcgaaagcgtggggagcaaacaggattagataccctggtagtccacgccgtaaacgatgaatgttagccgtcgggcagcttgctgttcggtggcgcagctaacgcattaaacattccgcctggggagtacggtcgcaagattaaaactcaaaggaattgacgggggcccgcacaagcggtggagcatgtggtttaattcgaagcaacgcgcagaaccttaccagctcttgacattcggggtatgggcagtggagacattgtccttcagttcggctggccccagaacaggtgctgcatggctgtcgtcagctcgtgtcgtgagatgttgggttaagtcccgcaacgagcgcaaccctcgcccttagttgccagcattcagttgggcactctaaggggactgccggtgataagccgagaggaaggtggggatgacgtcaagtcctcatggcccttacgggctgggctacacacgtgctacaatggtggtgacagtgggcagcgagaccgcgaggtcgagctaatctccaaaagccatctcagttcggattgcactctgcaactcgagtgcatgaagttggaatcgctagtaatcgcagatcagcatgctgcggtgaatacgttcccgggccttgtacacaccgcccgtcacaccatgggagttggttttacccgaaggtagtgcgctaacccgcaagggaggcagctaaccacggtagggtcagcgactggggtg

SEQ ID NO: 2907 - DNA, 1336 bp, unidentified
  source 1..1336: mol_type = unassigned DNA; note = Rhizobium smilacinae
tgcaagtcgagcgcctcgcaagaggagcggcagacgggtgagtaacacgtgggaacataccctttactacggaacaactccgggaaactggagctaataccgtatgtgcccttcgggggaaagatttatcggtaaaggattggcccgcgttggattagctagttggtggggtaaaggcctaccaaggcgacgatccatagctggtctgagaggatgatcagccacattgggactgagacacggcccaaactcctacgggaggcagcagtggggaatattggacaatgggcgcaagcctgatccagccatgccgcgtgtgtgatgaaggccttagggttgtaaagcactttcaccgatgaagataatgacggtagtcggagaagaagccccggctaacttcgtgccagcagccgcggtaatacgaagggggctagcgttgttcggaattactgggcgtaaagcgcacgtaggcggatatttaagtcaggggtgaaatcccgcagctcaactgcggaactgcctttgatactgggtatcttgagtatggaagaggttagtggaattgcgagtgtagaggtgaaattcgtagatattcgcaggaacaccagtggcgaaggcggctaactggtccataactgacgctgaggtgcgaaagcgtggggagcaaacaggattagataccctggtagtccacgccgtaaacgatgaatgttagccgtcggcaagtttacttgtcggtggcgcagctaacgcattaaacattccgcctggggagtacggtcgcaagattaaaactcaaaggaattgacgggggcccgcacaagcggtggagcatgtggtttaattcgaagcaacgcgcagaaccttaccagcccttgacatgccctgacagccagagagatttggtttccacttcggtggcagggacacaggtgctgcatggctgtcgtcagctcgtgtcgtgagatgttgggttaagtcccgcaacgagcgcaaccctcgcccttagttgccagcattcagttgggcactctaaggggactgccggtgataagccgagaggaaggtggggatgacgtcaagtcctcatggcccttacgggctgggctacacacgtgctacaatggtggtgacagtgggcagcgaaggagcgatcccgagctaatctccaaaagccatctcagttcggattgcactctgcaactcgagtgcatgaagttggaatcgctagtaatcgcggatcagcacgccgcggtgaatacgttcccgggccttgtacacaccgcccgtcacaccatgggagttggttttacccgaaggtagtgcgctaaccgca

SEQ ID NO: 2908 - DNA, 1362 bp, unidentified
  source 1..1362: mol_type = unassigned DNA; note = Rhizobium sophoriradicis
aacatgcaagtcgagcgccccgcaaggggagcggcagacgggtgagtaacgcgtgggaacgtaccctttactacggaataacgcagggaaacttgtgctaataccgtatgtgcccttcgggggaaagatttatcggtaaaggatcggcccgcgttggattagctagttggtggggtaaaggcctaccaaggcgacgatccatagctggtctgagaggatgatcagccacattgggactgagacacggcccaaactcctacgggaggcagcagtggggaatattggacaatgggcgcaagcctgatccagccatgccgcgtgagtgatgaaggccctagggttgtaaagctctttcaccggagaagataatgacggtatccggagaagaagccccggctaacttcgtgccagcagccgcggtaatacgaagggggctagcgttgttcggaattactgggcgtaaagcgcacgtaggcggatcgatcagtcaggggtgaaatcccagggctcaaccctggaactgcctttgatactgtcgatctggagtatggaagaggtgagtggaattccgagtgtagaggtgaaattcgtagatattcggaggaacaccagtggcgaaggcggctcactggtccattactgacgctgaggtgcgaaagcgtggggagcaaacaggattagataccctggtagtccacgccgtaaacgatgaatgttagccgtcgggcagtatactgttcggtggcgcagctaacgcattaaacattccgcctggggagtacggtcgcaagattaaaactcaaaggaattgacgggggcccgcacaagcggtggagcatgtggtttaattcgaagcaacgcgcagaaccttaccagcccttgacatgcccggcgacctgcagagatgcagggttcccttcggggaccgggacacaggtgctgcatggctgtcgtcagctcgtgtcgtgagatgttgggttaagtcccgcaacgagcgcaaccctcgcccttagttgccagcatttagttgggcactctaaggggactgccggtgataagccgagaggaaggtggggatgacgtcaagtcctcatggcccttacgggctgggctacacacgtgctacaatggtggtgacagtgggcagcgagcacgcgagtgtgagctaatctccaaaagccatctcagttcggattgcactctgcaactcgagtgcatgaagttggaatcgctagtaatcgcggatcagcatgccgcggtgaatacgttcccgggccttgtacacaccgcccgtcacaccatgggagttggttttacccgaaggtagtgcgctaaccgcaaggaggcagctaaccacgtagt

SEQ ID NO: 2909 - DNA, 1405 bp, unidentified
  source 1..1405: mol_type = unassigned DNA; note = Rhizobium straminoryzae
aacgaacgctggcggcaggcttaacacatgcaagtcgagcgcatccttcggggtgagcggcagacgggtgagtaacgcgtgggaacgtacccttatcttcggaatagctccgggaaactggaattaataccgaatgtgccctttgggggaaagatttatcggataaggatcggcccgcgttggattagctagttggtggggtaaaggcctaccaaggcgacgatccatagctggtctgagaggatgatcagccacattgggactgagacacggcccaaactcctacgggaggcagcagtggggaatattggacaatgggcgcaagcctgatccagccatgccgcgtgagtgatgaaggccctagggttgtaaagctctttcagtagggaagataatgacggtacctacagaagaagccccggctaacttcgtgccagcagccgcggtaatacgaagggggctagcgttgttcggaattactgggcgtaaagcgcacgtaggcggacatttaagtcaggggtgaaatcccggggctcaacctcggaactgcctttgatactgggtgtcttgagtgtggaagaggtcagtggaattgcgagtgtagaggtgaaattcgtagatattcgcaggaacaccagtggcgaaggcggctgactggtccacaactgacgctgaggtgcgaaagcgtggggagcaaacaggattagataccctggtagtccacgccgtaaacgatgaatgttagccgtcgggcagtttactgttcggtggcgccgctaacgcattaaacattccgcctggggagtacggtcgcaagattaaaactcaaaggaattgacgggggcccgcacaagcggtggagcatgtggtttaattcgaagcaacgcgcagaaccttaccagcccttgacatcctacgatcgctgcagagatgcagttttcccttcggggacgtagagacaggtgctgcatggctgtcgtcagctcgtgtcgtgagatgttgggttaagtcccgcaacgagcgcaaccctcgcccttagttgccagcatttggttgggcactctaaggggactgccggtgataagccgagaggaaggtggggatgacgtcaagtcctcatggcccttacgggctgggctacacacgtgctacaatggtggtgacagtgggcagcgagcacgcgagtgtgagctaatctccaaaagccatctcagttcggattgcactctgcaactcgagtgcatgaagttggaatcgctagtaatcgcggatcagcacgccgcggtgaatacgttcccgggccttgtacacaccgcccgtcacaccatgggagttggttttacccgaaggcgctgcgctaaccgcaagggggcaggcgaccacggtagggtcagcgactggggtg

SEQ ID NO: 2910 - DNA, 1403 bp, Rhizobium sullae
  source 1..1403: mol_type = unassigned DNA
aacgaacgctggcggcaggcttaacacatgcaagtcgagcgccccgcaaggggagcggcagacgggtgagtaacgcgtgggaacgtaccctttactacggaataacgcatggaaacgtgtgctaataccgtatgtgcccttcgggggaaagatttatcggtaagggatcggcccgcgttggattagctagttggtggggtaaaggcctaccaaggcgacgatccatagctggtctgagaggatgatcagccacattgggactgagacacggcccaaactcctacgggaggcagcagtggggaatattggacaatgggcgcaagcctgatccagccatgccgcgtgagtgatgaaggccctagggttgtaaagctctttcaccggagaagataatgacggtatccggagaagaagccccggctaacttcgtgccagcagccgcggtaatacgaagggggctagcgttgttcggatttactgggcgtaaagcgcacgtaggcggacatttaagtcaggggtgaaatcccagagctcaactctggaactgcctttgatactgggtgtctggagtatggaagaggtgagtggaattccgagtgtagaggtgaaattcgtagatattcggaggaacaccagtggcgaaggcggctcactggtccattactgacgctgaggtgcgaaagcgtggggagcaaacaggattagataccctggtagtccacgccgtaaacgatgaatgttagccgtcgggcagtttactgttcggtggcgcagctaacgcattaaacattccgcctggggagtacggtcgcaagattaaaactcaaaggaattgacgggggcccgcacaagcggtggagcatgtggtttaattcgaagcaacgcgcagaaccttaccagcccttgacatgcccggctacttgcagagatgcaaggttcccttcggggaccgggacacaggtgctgcatggctgtcgtcagctcgtgtcgtgagatgttgggttaagtcccgcaacgagcgcaaccctcgcccttagttgccagcattcagttgggcactctaaggggactgccggtgataagccgagaggaaggtggggatgacgtcaagtcctcatggcccttacgggctgggctacacacgtgctacaatggtggtgacagtgggcagcgagcacgcgagtgtgagctaatctccaaaagccatctcagttcggattgcactctgcaactcgagtgcatgaagttggaatcgctagtaatcgcggatcagcatgccgcggtgaatacgttcccgggccttgtacacaccgcccgtcacaccatgggagttggttttacccgaaggtagtgcgctaaccgcaaggaggcagctaaccacggtagggtcagcgactggggtg

SEQ ID NO: 2911 - DNA, 1324 bp, Rhizobium taibaishanense
  source 1..1324: mol_type = unassigned DNA
ggcagacgggtgagtaacgcgtgggaatctaccgtaccctacggaatagctccgggaaactggaattaataccgtatacgcccttcgggggaaagatttatcggggtatgatgagcccgcgttggattagctagttggtggggtaaaggcctaccaaggcgacgatccatagctggtctgagaggatgatcagccacattgggactgagacacggcccaaactcctacgggaggcagcagtggggaatattggacaatgggcgcaagcctgatccagccatgccgcgtgagtgatgaaggtcttaggattgtaaagctctttcaccgatgaagataatgacggtagtcggagaagaagccccggctaacttcgtgccagcagccgcggtaatacgaagggggctagcgttgttcggaattactgggcgtaaagcgcacgtaggcggataattaagtcaggggtgaaatcccgcagctcaactgcggaactgcctttgatactggttatcttgagtatggaagaggtaagtggaattgcgagtgtagaggtgaaattcgtagatattcgcaggaacaccagtggcgaaggcggcttactggtccattactgacgctgaggtgcgaaagcgtggggagcaaacaggattagataccctggtagtccacgccgtaaacgatgaatgttagccgtcggcaagttgacttgtcggtggcgcagctaacgcattaaacattccgcctggggagtacggtcgcaagattaaaactcaaaggaattgacgggggcccgcacaagcggtggagcatgtggtttaattcgaagcaacgcgcagaaccttaccagctcttgacatcctgtgaccgctacggagacgtagttttcccttcggggacacagagacaggtgctgcatggctgtcgtcagctcgtgtcgtgagatgttgggttaagtcccgcaacgagcgcaaccctcgcccttagttgccagcatttagttgggcactctaaggggactgccggtgataagccgagaggaaggtggggatgacgtcaagtcctcatggcccttacgggctgggctacacacgtgctacaatggtggtgacagtgggcagcgagacggcgacgtcgagctaatctccaaaagccatctcagttcggattgcactctgcaactcgagtgcatgaagttggaatcgctagtaatcgcagatcagcatgctgcggtgaatacgttcccgggccttgtacacaccgcccgtcacaccatgggagttggttttacccgaaggtagtgcgctaaccgcaaggaggcagctaacca

SEQ ID NO: 2912 - DNA, 1403 bp, Rhizobium tibeticum
  source 1..1403: mol_type = unassigned DNA
aacgaacgctggcggcaggcttaacacatgcaagtcgagcgccccgcaaggggagcggcagacgggtgagtaacgcgtgggaacgtaccctttactacggaataacgcatggaaacgtgtgctaataccgtatgtgccctttgggggaaagatttatcggtaaaggatcggcccgcgttggattagctagttggtggggtaaaggcctaccaaggcgacgatccatagctggtctgagaggatgatcagccacattgggactgagacacggcccaaactcctacgggaggcagcagtggggaatattggacaatgggcgcaagcctgatccagccatgccgcgtgagtgatgaaggccctagggttgtaaagctctttcaccggtgaagataatgacggtaaccggagaagaagccccggctaacttcgtgccagcagccgcggtaatacgaagggggctagcgttgttcggatttactgggcgtaaagcgcacgtaggcggatcgatcagtcaggggtgaaatcccagagctcaactctggaactgcctttgatactgtcgatctggagtatggaagaggtgagtggaattccgagtgtagaggtgaaattcgtagatattcggaggaacaccagtggcgaaggcggctcactggtccattactgacgctgaggtgcgaaagcgtggggagcaaacaggattagataccctggtagtccacgccgtaaacgatgaatgttagccgtcgggcagtatactgttcggtggcgcagctaacgcattaaacattccgcctggggagtacggtcgcaagattaaaactcaaaggaattgacgggggcccgcacaagcggtggagcatgtggtttaattcgaagcaacgcgcagaaccttaccagcccttgacatgcccggccagctacagagatgtagtgttcccttcggggaccgggacacaggtgctgcatggctgtcgtcagctcgtgtcgtgagatgttgggttaagtcccgcaacgagcgcaaccctcgcccttagttgccagcattcagttgggcactctaaggggactgccggtgataagccgagaggaaggtggggatgacgtcaagtcctcatggcccttacgggctgggctacacacgtgctacaatggtggtgacagtgggcagcgagacagcgatgtcgagctaatctccaaaagccatctcagttcggattgcactctgcaactcgagtgcatgaagttggaatcgctagtaatcgcggatcagcatgccgcggtgaatacgttcccgggccttgtacacaccgcccgtcacaccatgggagttggttttacccgaaggtagtgtgctaaccgcaaggaggcagctaaccacggtagggtcagcgactggggtg

SEQ ID NO: 2913 - DNA, 1403 bp, Rhizobium tropici
  source 1..1403: mol_type = unassigned DNA
aacgaacgctggcggcaggcttaacacatgcaagtcgagcgccccgcaaggggagcggcagacgggtgagtaacgcgtgggaatctaccttttgctacggaataacgcagggaaacttgtgctaataccgtatgtgtccttcgggagaaagatttatcggcaagagatgagcccgcgttggattagctagttggtggggtaaaggcctaccaaggcgacgatccatagctggtctgagaggatgatcagccacattgggactgagacacggcccaaactcctacgggaggcagcagtggggaatattggacaatgggcgcaagcctgatccagccatgccgcgtgagtgatgaaggccctagggttgtaaagctctttcaccggagaagataatgacggtatccggagaagaagccccggctaacttcgtgccagcagccgcggtaatacgaagggggctagcgttgttcggaattactgggcgtaaagcgcacgtaggcggatcgatcagtcaggggtgaaatcccagggctcaaccctggaactgcctttgatactgtcgatctggagtatggaagaggtgagtggaattccgagtgtagaggtgaaattcgtagatattcggaggaacaccagtggcgaaggcggctcactggtccattactgacgctgaggtgcgaaagcgtggggagcaaacaggattagataccctggtagtccacgccgtaaacgatgaatgttagccgtcgggcagtatactgttcggtggcgcagctaacgcattaaacattccgcctggggagtacggtcgcaagattaaaactcaaaggaattgacgggggcccgcacaagcggtggagcatgtggtttaattcgaagcaacgcgcagaaccttaccagcccttgacatcctgtgttacctctagagatagggggtccacttcggtggcgcagagacaggtgctgcatggctgtcgtcagctcgtgtcgtgagatgttgggttaagtcccgcaacgagcgcaaccctcgcccttagttgccagcattcagttgggcactctaaggggactgccggtgataagccgagaggaaggtggggatgacgtcaagtcctcatggcccttacgggctgggctacacacgtgctacaatggtggtgacagtgggcagcgagcacgcgagtgtgagctaatctccaaaagccatctcagttcggattgcactctgcaactcgagtgcatgaagttggaatcgctagtaatcgcggatcagcatgccgcggtgaatacgttcccgggccttgtacacaccgcccgtcacaccatgggagttggttttacccgaaggtagtgcgctaaccgcaaggaggcagctaaccacggtagggtcagcgactggggtg

SEQ ID NO: 2914 - DNA, 1360 bp, Rhizobium tubonense
  source 1..1360: mol_type = unassigned DNA
acatgcaagtcgagcgcctcgcaagaggagcggcagacgggtgagtaacgcgtgggaatctacccatccttacggaacaactccgggaaactggagctaataccgtatacgcccttcgggggaaagatttatcgaggatggatgagcccgcgttggattagctagttggtggggtaaaggcctaccaaggcgacgatccatagctggtctgagaggatgatcagccacattgggactgagacacggcccaaactcctacgggaggcagcagtggggaatattggacaatgggcgcaagcctgatccagccatgccgcgtgagtgatgaaggccctagggttgtaaagctctttcaccggagaagataatgacggtatccggagaagaagccccggctaacttcgtgccagcagccgcggtaatacgaagggggctagcgttgttcggatttactgggcgtaaagcgcacgtaggcggatcgatcagtcaggggtgaaatcccagagctcaactctggaactgcctttgatactgtcgatctggagtatggaagaggtgagtggaattccgagtgtagaggtgaaattcgtagatattcggaggaacaccagtggcgaaggcggctcactggtccattactgacgctgaggtgcgaaagcgtggggagcaaacaggattagataccctggtagtccacgccgtaaacgatgaatgttagccgtcgggcagtatactgttcggtggcgcagctaacgcattaaacattccgcctggggagtacggtcgcaagattaaaactcaaaggaattgacgggggcccgcacaagcggtggagcatgtggtttaattcgaagcaacgcgcagaaccttaccagcccttgacatgcccggccagccacagagatgtggtgttcccttcggggaccgggacacaggtgctgcatggctgtcgtcagctcgtgtcgtgagatgttgggttaagtcccgcaacgagcgcaaccctcgcccttagttgccagcattcagttgggcactctaaggggactgccggtgataagccgagaggaaggtggggatgacgtcaagtcctcatggcccttacgggctgggctacacacgtgctacaatggtggtgacagtgggcagcgagcgcgcgagcgtgagctaatctccaaaagccatctcagttcggattgcactctgcaactcgagtgcatgaagttggaatcgctagtaatcgcggatcagcatgccgcggtgaatacgttcccgggccttgtacacaccgcccgtcacaccatgggagttggttttacccgaaggtagtgcgctaaccgcaaggaggcagctaaccacggta

SEQ ID NO: 2915 - DNA, 1378 bp, Rhizobium vallis
  source 1..1378: mol_type = unassigned DNA
acatgcaagtcgagcgccccgcaaggggagcggcagacgggtgagtaacgcgtgggaacgtaccctttactacggaataacgcagggaaacttgtgctaataccgtatgtgccctttgggggaaagatttatcggtaaaggatcggcccgcgttggattagctagttggtggggtaaaggcctaccaaggcgacgatccatagctggtctgagaggatgatcagccacattgggactgagacacggcccaaactcctacgggaggcagcagtggggaatattggacaatgggcgcaagcctgatccagccatgccgcgtgagtgatgaaggccctagggttgtaaagctctttcaccggagaagataatgacggtatccggagaagaagccccggctaacttcgtgccagcagccgcggtaatacgaagggggctagcgttgttcggaattactgggcgtaaagcgcacgtaggcggatcgatcagtcaggggtgaaatcccagggctcaaccctggaactgcctttgatactgtcgatctggagtatggaagaggtgagtggaattccgagtgtagaggtgaaattcgtagatattcggaggaacaccagtggcgaaggcggctcactggtccattactgacgctgaggtgcgaaagcgtggggagcaaacaggattagataccctggtagtccacgccgtaaacgatgaatgttagccgtcgggcagtatactgttcggtggcgcagctaacgcattaaacattccgcctggggagtacggtcgcaagattaaaactcaaaggaattgacgggggcccgcacaagcggtggagcatgtggtttaattcgaagcaacgcgcagaaccttaccagcccttgacatcctgtgttacccagagagatttggggtccacttcggtggcgcagagacaggtgctgcatggctgtcgtcagctcgtgtcgtgagatgttgggttaagtcccgcaacgagcgcaaccctcgcccttagttgccagcatttagttgggcactctaaggggactgccggtgataagccgagaggaaggtggggatgacgtcaagtcctcatggcccttacgggctgggctacacacgtgctacaatggtggtgacagtgggcagcgagcacgcgagtgtgagctaatctccaaaagccatctcagttcggattgcactctgcaactcgagtgcatgaagttggaatcgctagtaatcgcggatcagcatgccgcggtgaatacgttcccgggccttgtacacaccgcccgtcacaccatgggagttggttttacccgaaggtagtgcgctaaccgcaaggaggcagctaaccacggtagggtcagcgactggggtg

SEQ ID NO: 2916 - DNA, 1409 bp, unidentified
  source 1..1409: mol_type = unassigned DNA; note = Rhizorhabdus dicambivorans
aacgaacgctggcggcatgcctaacacatgcaagtcgaacgaacctttcggggttagtggcgcacgggtgcgtaacgcgtgggaatctgccttcaggtacggaataactcatggaaacgtgtgctaataccgtatgatgtctacggaccaaagatttatcgcctggagatgagcccgcgttggattagctagttggtggggtaaaggcctaccaaggcgacgatccatagctggtctgagaggatgatcagccacactgggactgagacacggcccagactcctacgggaggcagcagtggggaatattggacaatgggcgcaagcctgatccagcaatgccgcgtgagtgatgaaggccttagggttgtaaagctcttttacccgggaagataatgactgtaccgggagaataagccccggctaactccgtgccagcagccgcggtaatacggagggggctagcgttgttcggaattactgggcgtaaagcgcacgtaggcggctttgtaagttagaggtgaaagcccggggctcaaccccggaactgcctttaagactgcatcgcttgaacgtcggagaggtgagtggaattccgagtgtagaggtgaaattcgtagatattcggaagaacaccagtggcgaaggcggctcactggacgactgttgacgctgaggtgcgaaagcgtggggagcaaacaggattagataccctggtagtccacgccgtaaacgatgataactagctgtccgggcacttggtgcttgggtggcgcagctaacgcattaagttatccgcctggggagtacggccgcaaggttaaaactcaaagaaattgacgggggcctgcacaagcggtggagcatgtggtttaattcgaagcaacgcgcagaaccttaccaacgtttgacatccctagtatggattttggagacaatttccttcagttcggctggctaggtgacaggtgctgcatggctgtcgtcagctcgtgtcgtgagatgttgggttaagtcccgcaacgagcgcaaccctcgcctttagttgccatcatttagttgggtactctaaaggaaccgccggtgataagccggaggaaggtggggatgacgtcaagtcctcatggcccttacgcgttgggctacacacgtgctacaatggcaactacagtgggcagcgaactcgcgagggtgagctaatctccaaaagttgtctcagttcggattgttctctgcaactcgagagcatgaaggcggaatcgctagtaatcgcggatcagcatgccgcggtgaatacgttcccaggccttgtacacaccgcccgtcacaccatgggagttggattcacccgaaggcgctgcgctaaccgcaaggaggcaggcgaccacggtgggtttagcgactggggtg

SEQ ID NO: 2917 - DNA, 1467 bp, unidentified
  source 1..1467: mol_type = unassigned DNA; note = Rhodanobacter denitrificans
attgaacgctggcggcatgcctaacacatgcaagtcgaacggcagcacagcagtagcaatactgtgggtggcgagtggcggacgggtgagtaatgcatcgggatctaccctgacgtgggggataacctcgggaaaccgggactaataccgcatacgtcctacgggagaaagcgggggaccttcgggcctcgcgcggcaggacgaaccgatgtgcgattagctagttggcggggtaatggcccaccaaggcgacgatcgctagctggtctgagaggatgatcagccacactgggactgagacacggcccagactcctacgggaggcagcagtggggaatattggacaatgggcgcaagcctgatccagcaatgccgcgtgtgtgaagaaggccttcgggttgtaaagcacttttatcaggagcgaaataccacgggttaataccctatggggctgacggtacctgaggaataagcaccggctaacttcgtgccagcagccgcggtaatacgaagggtgcaagcgttaatcggaattactgggcgtaaagggtgcgtaggcggttacttaagtctgtcgtgaaatccccgggctcaacctgggaatggcgatggatactgggtggctagagtgtgtcagaggatggtggaattcccggtgtagcggtgaaatgcgtagagatcgggaggaacatcagtggcgaaggcggccatctgggacaacactgacgctgaagcacgaaagcgtggggagcaaacaggattagataccctggtagtccacgccctaaacgatgcgaactggatgttggtctcaactcggagatcagtgtcgaagctaacgcgttaagttcgccgcctggggagtacggtcgcaagactgaaactcaaaggaattgacgggggcccgcacaagcggtggagtatgtggtttaattcgatgcaacgcgaagaaccttacctggccttgacatgtccggaatcctgcagagatgcgggagtgccttcgggaatcggaacacaggtgctgcatggctgtcgtcagctcgtgtcgtgagatgttgggttaagtcccgcaacgagcgcaacccttgtccttagttgccagcacgtaatggtgggaactctaaggagactgccggtgacaaaccggaggaaggtggggatgacgtcaagtcatcatggcccttacggccagggctacacacgtactacaatggtcggtacagagggttgcaataccgcgaggtggagccaatcccagaaagccgatcccagtccggattggagtctgcaactcgactccatgaagtcggaatcgctagtaatcgcggatcagctatgccgcggtgaatacgttcccgggccttgtacacaccgcccgtcacaccatgggagtgggttgctccagaaggcgttagtctaaccgcaagggggacgacgcccacggagtggtccatgactggggtg

SEQ ID NO: 2918 - DNA, 1467 bp, Rhodanobacter fulvus
  source 1..1467: mol_type = unassigned DNA
attgaacgctggcggcatgcctaacacatgcaagtcgaacggcagcacagaggagcttgctccttgggtggcgagtggcggacgggtgagtaatgcatcgggacctacccagacgtgggggataacctcgggaaaccgggactaataccgcatacgtcctacgggagaaagcgggggaccttcgggcctcgcgcggttggacggaccgatgtgcgattagctagttggtaaggtaatggcttaccaaggcgacgatcgctagctggtctgagaggatgatcagccacactgggactgagacacggcccagactcctacgggaggcagcagtggggaatattggacaatgggcgaaagcctgatccagcaatgccgcgtgtgtgaagaaggccctcgggttgtaaagcacttttatcaggaacgaaataccacgggttaataacctatggggctgacggtacctgaggaataagcaccggctaacttcgtgccagcagccgcggtaatacgaagggtgcaagcgttaatcggaattactgggcgtaaagggtgcgtaggcggttgtttaagtctgtcgtgaaatccccgggctcaacctgggaatggcgatggatactgggcagctagagtgtgtcagaggatggtggaattcccggtgtagcggtgaaatgcgtagagatcgggaggaacatcagtggcgaaggcggccatctgggacaacactgacgctgaagcacgaaagcgtggggagcaaacaggattagataccctggtagtccacgccctaaacgatgcgaactggatgttggtctcaactcggagatcagtgtcgaagctaacgcgttaagttcgccgcctggggagtacggtcgcaagactgaaactcaaaggaattgacgggggcccgcacaagcggtggagtatgtggtttaattcgatgcaacgcgaagaaccttacctggccttgacatgtccggaatccttgagagatcgaggagtgccttcgggaatcggaacacaggtgctgcatggctgtcgtcagctcgtgtcgtgagatgttgggttaagtcccgcaacgagcgcaacccttgtccttagttgccagcacgtaatggtgggaactctaaggagactgccggtgacaaaccggaggaaggtggggatgacgtcaagtcatcatggcccttacggccagggctacacacgtactacaatggtcggtacagagggttgcaataccgcgaggtggagccaatcccagaaagccgatcccagtccggatcggagtctgcaactcgactccgtgaagtcggaatcgctagtaatcgcggatcagctatgccgcggtgaatacgttcccgggccttgtacacaccgcccgtcacaccatgggagtgggttgctccagaaggcgttagtctaaccgcaaggaggacgacgcccacggagtggtccatgactggggtg

SEQ ID NO: 2919 - DNA, 1467 bp, unidentified
  source 1..1467: mol_type = unassigned DNA; note = Rhodanobacter glycinis
attgaacgctggcggcatgcctaacacatgcaagtcgaacggcagcacagcagagcttgctctgtgggtggcgagtggcggacgggtgagtaatgcatcgggacctacccagacgtgggggataacgtagggaaacttacgctaataccgcatacgtcctacgggagaaagcgggggaccttcgggcctcgcgcggttggatggaccgatgttcgattagctagttggtagggtaatggcctaccaaggcgacgatcgatagctggtctgagaggatgatcagccacactgggactgagacacggcccagactcctacgggaggcagcagtggggaatattggacaatgggcgcaagcctgatccagcaatgccgcgtgtgtgaagaaggccttcgggttgtaaagcacttttatcaggagcgaaatactatcggttaataaccggtggggctgacggtacctgaggaataagcaccggctaacttcgtgccagcagccgcggtaatacgaagggtgcaagcgttaatcggaattactgggcgtaaagggtgcgtaggcggttagttaagtctgttgtgaaatccccgggctcaacctgggaatggcaatggatactggctagctagagtgtgtcagaggatggtggaattcccggtgtagcggtgaaatgcgtagagatcgggaggaacatcagtggcgaaggcggccatctgggacaacactgacgctgaagcacgaaagcgtggggagcaaacaggattagataccctggtagtccacgccctaaacgatgcgaactggatgttggtctcaactcggagatcagtgtcgaagctaacgcgttaagttcgccgcctggggagtacggtcgcaagactgaaactcaaaggaattgacgggggcccgcacaagcggtggagtatgtggtttaattcgatgcaacgcgaagaaccttacctggccttgacatgtccggaatccagcagagatgcaggagtgccttcgggaatcggaacacaggtgctgcatggctgtcgtcagctcgtgtcgtgagatgttgggttaagtcccgcaacgagcgcaacccttgtccttagttgccagcacgtaatggtgggaactctaaggagactgccggtgacaaaccggaggaaggtggggatgacgtcaagtcatcatggcccttacggccagggctacacacgtactacaatggtcggtacagagggttgcgataccgcgaggtggagccaatcccagaaagccgatcccagtccggatcgaagtctgcaactcgacttcgtgaagtcggaatcgctagtaatcgcggatcagctatgccgcggtgaatacgttcccgggccttgtacacaccgcccgtcacaccatgggagtgagttgctccagaagccgttagtctaaccgcaagggggacgacgaccacggagtggttcatgactggggtg

SEQ ID NO: 2920 - DNA, 1467 bp, Rhodanobacter spathiphylli
  source 1..1467: mol_type = unassigned DNA
attgaacgctggcggcatgcctaacacatgcaagtcgaacggcagcacagcagagcttgctctgtgggtggcgagtggcggacgggtgagtaatgcatcgggacctacccagacgtgggggataacgtagggaaacttacgctaataccgcatacgtcctacgggagaaagcaggggaccttcgggccttgcgcggttggacggaccgatgtgcgattagctagttggtagggtaatggcctaccaaggcgacgatcgctagctggtctgagaggatgatcagccacactgggactgagacacggcccagactcctacgggaggcagcagtggggaatattggacaatgggcgcaagcctgatccagcaatgccgcgtgtgtgaagaaggccctcgggttgtaaagcacttttatcaggaacgaaataccacgggttaataccctatggggctgacggtacctgaggaataagcaccggctaacttcgtgccagcagccgcggtaatacgaagggtgcaagcgttaatcggaattactgggcgtaaagggtgcgtaggcggttcgttaagtctgtcgtgaaatccccgggctcaacctgggaatggcgatggatactggcgagctagagtgtgtcagaggatggtggaattcccggtgtagcggtgaaatgcgtagagatcgggaggaacatcagtggcgaaggcggccatctgggacaacactgacgctgaagcacgaaagcgtggggagcaaacaggattagataccctggtagtccacgccctaaacgatgcgaactggatgttggtctcaactcggagatcagtgtcgaagctaacgcgttaagttcgccgcctggggagtacggtcgcaagactgaaactcaaaggaattgacgggggcccgcacaagcggtggagtatgtggtttaattcgatgcaacgcgaagaaccttacctggccttgacatgtccggaatccttgagagatcgaggagtgccttcgggaatcggaacacaggtgctgcatggctgtcgtcagctcgtgtcgtgagatgttgggttaagtcccgcaacgagcgcaacccttgtccttagttgccagcacgtaatggtgggaactctaaggagactgccggtgacaaaccggaggaaggtggggatgacgtcaagtcatcatggcccttacggccagggctacacacgtactacaatggtcggtacagagggttgcaataccgcgaggtggagccaatcccagaaagccgatcccagtccggatcggagtctgcaactcgactccgtgaagtcggaatcgctagtaatcgcggatcagctatgccgcggtgaatacgttcccgggccttgtacacaccgcccgtcacaccatgggagtgggttgctccagaaggcgttagtctaaccgcaagggggacgacgcccacggagtggtccatgactggggtg

SEQ ID NO: 2921 - DNA, 1467 bp, Rhodanobacter thiooxydans
  source 1..1467: mol_type = unassigned DNA
attgaacgctggcggcatgcctaacacatgcaagtcgaacggcagcacagtcgtagcaatacgatgggtggcgagtggcggacgggtgagtaatgcatcgggatctaccctgacgtgggggataacctcgggaaaccgggactaataccgcatacgtcctacgggagaaagcgggggaccttcgggcctcgcgcggcaggacgaaccgatgtgcgattagctagttggcggggtaatggcccaccaaggcgacgatcgctagctggtctgagaggatgatcagccacactgggactgagacacggcccagactcctacgggaggcagcagtggggaatattggacaatgggcgcaagcctgatccagcaatgccgcgtgtgtgaagaaggccttcgggttgtaaagcacttttatcaggagcgaaataccacgggttaataccctatggggctgacggtacctgaggaataagcaccggctaacttcgtgccagcagccgcggtaatacgaagggtgcaagcgttaatcggaattactgggcgtaaagggtgcgtaggcggttgtttaagtctgccgtgaaatccccgggctcaacctgggaatggcggtggatactgggcagctagagtgtgtcagaggatggtggaattcccggtgtagcggtgaaatgcgtagagatcgggaggaacatcagtggcgaaggcggccatctgggacaacactgacgctgaagcacgaaagcgtggggagcaaacaggattagataccctggtagtccacgccctaaacgatgcgaactggatgttggtctcaactcggagatcagtgtcgaagctaacgcgttaagttcgccgcctggggagtacggtcgcaagactgaaactcaaaggaattgacgggggcccgcacaagcggtggagtatgtggtttaattcgatgcaacgcgaagaaccttacctggccttgacatgtccggaatcctgcagagatgtgggagtgccttcgggaatcggaacacaggtgctgcatggctgtcgtcagctcgtgtcgtgagatgttgggttaagtcccgcaacgagcgcaacccttgtccttagttgccagcacgtaatggtgggaactctaaggagactgccggtgacaaaccggaggaaggtggggatgacgtcaagtcatcatggcccttacggccagggctacacacgtactacaatggtcggtacagagggttgccataccgcgaggtggagccaatcccagaaagccgatcccagtccggattggagtctgcaactcgactccatgaagtcggaatcgctagtaatcgcggatcagctatgccgcggtgaatacgttcccgggccttgtacacaccgcccgtcacaccatgggagtgggttgctccagaaggcgttagtctaaccgcaagggggacgacgcccacggagtggtccatgactggggtg

SEQ ID NO: 2922 - DNA, 1409 bp, Rhodoblastus acidophilus
  source 1..1409: mol_type = unassigned DNA
aacgaacgctggcggcaggcctaacacatgcaagtcgaacgggcatagcaatatgtcagtggcagacgggtgaggaacacgtgggaacatgccctttggttcggaacaactcagggaaacttgagctaataccggataagcctttcgagggaaagatttatcgccgaaggagtggcccgcgtccgattagctagttggtgaggtaatggctcaccaaggcgacgatcggtagctggtctgagaggatgatcagccacattgggactgagacacggcccaaactcctacgggaggcagcagtggggaatattggacaatgggcgcaagcctgatccagccatgccgcgtgagtgatgacggccctagggttgtaaagctctttcacccacgacgataatgacggtagtgggagaagaagccccggctaacttcgtgccagcagccgcggtaatacgaagggggctagcgttgttcggatttactgggcgtaaagcgcacgtaggcggatctttaagtcaggggtgaaatgccggagctcaacttcggaactgcctttgatactggagatcttgagttcgagagaggtgagtggaactgcgagtgtagaggtgaaattcgtagatattcgcaagaacaccagtggcgaaggcggctcactggctcgatactgacgctgaggtgcgaaagcgtggggagcaaacaggattagataccctggtagtccacgccgtaaacgatggatgctagccgttaggcagcttgctgcttagtggcgcagctaacgctttaagcatcccgcctggggagtacggtcgcaagattaaaactcaaaggaattgacgggggcccgcacaagcggtggagcatgtggtttaattcgaagcaacgcgcagaaccttaccagcttttgacatgtcttggacggatagcagagatgttatcttctcttcggagccgagaacacaggtgctgcatggctgtcgtcagctcgtgtcgtgagatgttgggttaagtcccgcaacgagcgcaacccacgtccttagttgccatcattaagttgggcactctagggagactgccggtgataagccgagaggaaggtgtggatgacgtcaagtcctcatggcccttacaggctgggctacacacgtgctacaatggcggtgacaatgggaagcgaaagggcgacctctagcaaatctcaaaaaaccgtctcagttcggattgtactctgcaactcgagtgcatgaaggtggaatcgctagtaatcgcagatcagaacgctgcggtgaatacgttcccgggccttgtacacaccgcccgtcacaccatgggagttggctttacccgaaggcgtttcgctaaccgcaaggaggcagacgaccacggtagggtcagcgactggggtg

SEQ ID NO: 2923 - DNA, 1406 bp, Rhodoblastus sphagnicola
  source 1..1406: mol_type = unassigned DNA
aacgaacgctggcggcaggcctaacacatgcaagtcgaacggatgtagcaatacatcagtggcagacgggtgaggaacacgtgggaacataccctttggttcggaataactcagggaaacttgagctaataccggataagtcggcaacgagaaagattcatcgccgaaggaatggcccgcgtccgattagctagttggtgaggtaacggctcaccaaggcgacgatcggtagctggtctgagaggatgatcagccacattgggactgagacacggcccaaactcctacgggaggcagcagtggggaatattggacaatgggcgcaagcctgatccagccatgccgcgtgagtgatgacggccttagggttgtaaagctctttcacccacgacgataatgacggtagtgggagaagaagccccggctaacttcgtgccagcagccgcggtaatacgaagggggctagcgttgttcggatttactgggcgtaaagcgcacgtaggcggatctttaagtcaggggtgaaatgccggagctcaacttcggaactgcctttgatactggagatcttgagttcgagagaggtgagtggaactgcgagtgtagaggtgaaattcgtagatattcgcaagaacaccagtggcgaaggcggctcactggctcgatactgacgctgaggtgcgaaagcgtggggagcaaacaggattagataccctggtagtccacgccgtaaacgatggatgctagccgttaggcagcttgctgcttagtggcgcagctaacgctttaagcatcccgcctggggagtacggtcgcaagattaaaactcaaaggaattgacgggggcccgcacaagcggtggagcatgtggtttaattcgaagcaacgcgcagaaccttaccagcttttgacatgtcctggacggtttccagagatggattcctctcttcggagccaggaacacaggtgctgcatggctgtcgtcagctcgtgtcgtgagatgttgggttaagtcccgcaacgagcgcaacccacgtccttagttgccatcatttagttgggcactctagggagactgccggtgataagccgagaggaaggtgtggatgacgtcaagtcctcatggcccttacaggctgggctacacacgtgctacaatggcggtgacaatgggatgcgaaggggcgacccttagcaaatctcaaaaatccgtctcagttcggattgttctctgcaactcgagagcatgaaggtggaatcgctagtaatcgcagatcagaacgctgcggtgaatacgttcccgggccttgtacacaccgcccgtcacaccatgggagttggctttacccgaaggcgtttcgctaaccgcaaggaggcagacgaccacggtagggtcagcgactggg

SEQ ID NO: 2924 - DNA, 1440 bp, Rhodococcus qingshengii
  source 1..1440: mol_type = unassigned DNA
gacgaacgctggcggcgtgcttaacacatgcaagtcgagcggtaaggcctttcggggtacacgagcggcgaacgggtgagtaacacgtgggtgatctgccctgcacttcgggataagcctgggaaactgggtctaataccggatatgacctcctatcgcatggtgggtggtggaaagatttatcggtgcaggatgggcccgcggcctatcagcttgttggtggggtaatggcctaccaaggcgacgacgggtagccgacctgagagggtgaccggccacactgggactgagacacggcccagactcctacgggaggcagcagtggggaatattgcacaatgggcgaaagcctgatgcagcgacgccgcgtgagggatgacggccttcgggttgtaaacctctttcagcagggacgaagcgcaagtgacggtacctgcagaagaagcaccggctaactacgtgccagcagccgcggtaatacgtagggtgcaagcgttgtccggaattactgggcgtaaagagttcgtaggcggtttgtcgcgtcgtttgtgaaaaccagcagctcaactgctggcttgcaggcgatacgggcagacttgagtactgcaggggagactggaattcctggtgtagcggtgaaatgcgcagatatcaggaggaacaccggtggcgaaggcgggtctctgggcagtaactgacgctgaggaacgaaagcgtgggtagcgaacaggattagataccctggtagtccacgccgtaaacggtgggcgctaggtgtgggttccttccacggaatccgtgccgtagctaacgcattaagcgccccgcctggggagtacggccgcaaggctaaaactcaaaggaattgacgggggcccgcacaagcggcggagcatgtggattaattcgatgcaacgcgaagaaccttacctgggtttgacatataccggaaagctgcagagatgtggccccccttgtggtcggtatacaggtggtgcatggctgtcgtcagctcgtgtcgtgagatgttgggttaagtcccgcaacgagcgcaacccctatcttatgttgccagcacgttatggtggggactcgtaagagactgccggggtcaactcggaggaaggtggggacgacgtcaagtcatcatgccccttatgtccagggcttcacacatgctacaatggccagtacagagggctgcgagaccgtgaggtggagcgaatcccttaaagctggtctcagttcggatcggggtctgcaactcgaccccgtgaagtcggagtcgctagtaatcgcagatcagcaacgctgcggtgaatacgttcccgggccttgtacacaccgcccgtcacgtcatgaaagtcggtaacacccgaagccggtggcttaaccccttgtgggagggagccgtcgaaggtgggatcggcgattgggacg

SEQ ID NO: 2925 - DNA, 1441 bp, Rhodococcus wratislaviensis
  source 1..1441: mol_type = unassigned DNA
gacgaacgctggcggcgtgcttaacacatgcaagtcgagcggtaaggcccttcggggtacacgagcggcgaacgggtgagtaacacgtgggtgatctgccctgcacttcgggataagcctgggaaactgggtctaataccggatatgaccttcggctgcatggctgagggtggaaaggtttactggtgcaggatgggcccgcggcctatcagcttgttggtggggtaatggcctaccaaggcgacgacgggtagccgacctgagagggtgaccggccacactgggactgagacacggcccagactcctacgggaggcagcagtggggaatattgcacaatgggcgaaagcctgatgcagcgacgccgcgtgagggatgacggccttcgggttgtaaacctctttcagcagggacgaagcgaaagtgacggtacctgcagaagaagcaccggccaactacgtgccagcagccgcggtaatacgtagggtgcaagcgttgtccggaattactgggcgtaaagagctcgtaggcggtttgtcgcgtcgtctgtgaaaactcgaggctcaacctcgagcttgcaggcgatacgggcagacttgagtactgcaggggagactggaattcctggtgtagcggtgaaatgcgcagatatcaggaggaacaccggtggcgaaggcgggtctctgggcagtaactgacgctgaggagcgaaagcgtgggtagcgaacaggattagataccctggtagtccacgccgtaaacggtgggcgctaggtgtgggtttccttccacgggatccgtgccgtagctaacgcattaagcgccccgcctggggagtacggccgcaaggctaaaactcaaaggaattgacgggggcccgcacaagcggcggagcatgtggattaattcgatgcaacgcgaagaaccttacctgggtttgacatataccggaaagccgtagagatacggccccccttgtggtcggtatacaggtggtgcatggctgtcgtcagctcgtgtcgtgagatgttgggttaagtcccgcaacgagcgcaacccttgtcttatgttgccagcacgtaatggtggggactcgtaagagactgccggggtcaactcggaggaaggtggggacgacgtcaagtcatcatgccccttatgtccagggcttcacacatgctacaatggccggtacagagggctgcgataccgtgaggtggagcgaatcccttaaagccggtctcagttcggatcggggtctgcaactcgaccccgtgaagtcggagtcgctagtaatcgcagatcagcaacgctgcggtgaatacgttcccgggccttgtacacaccgcccgtcacgtcatgaaagtcggtaacacccgaagccggtggcctaaccccttgtgggagggagccgtcgaaggtgggatcggcgattgggacg

SEQ ID NO: 2926 - DNA, 1470 bp, unidentified
  source 1..1470: mol_type = unassigned DNA; note = Rhodoferax ferrireducens
agagtttgatcctggctcagattgaacgctggcggcatgccttacacatgcaagtcgaacggcagcacgggagcaatcctggtggcgagtggcgaacgggtgagtaatatatcggaacgtgcccagtcgtgggggataacgcagcgaaagctgtgctaataccgcatacgatctctggatgaaagcgggggactcgcaagggcctcgcgcgattggagcggccgatatcagattagctagttggtggggtaaaagcccaccaaggcgacgatctgtagctggtctgagaggacgaccagccacactggaactgagacacggtccagactcctacgggaggcagcagtggggaattttggacaatgggcgcaagcctgatccaacaatgccgcgtgcaggatgaaggccttcgggttgtaaactgcttttgtacggaacgaaacggcctgccctaatacggtgggctaatgacggtaccgtaagaataagcaccggctaactacgtgccagcagccgcggtaatacgtagggtgcgagcgttaatcggaattactgggcgtaaagcgtgcgcaggcggttatataagacagatgtgaaatccccgggctcaacctgggacctgcatttgtgactgtatagctagagtacggtagagggggatggaattccgcgtgtagcagtgaaatgcgtagatatgcggaggaacaccgatggcgaaggcaatcccctggacctgtactgacgctcatgcacgaaagcgtggggagcaaacaggattagataccctggtagtccacgccctaaacgatgtcaactggttgttgggtcttcactgactcagtaacgaagctaacgcgtgaagttgaccgcctggggagtacggccgcaaggttgaaactcaaaggaattgacggggacccgcacaagcggtggatgatgtggtttaattcgatgcaacgcgaaaaaccttacccacctttgacatgtacggaatcctttagagatagaggagtgctcgaaagagagccgtaacacaggtgctgcatggctgtcgtcagctcgtgtcgtgagatgttgggttaagtcccgcaacgagcgcaacccttgtcattagttgctacatttagttgggcactctaatgagactgccggtgacaagccggaggaaggtggggatgacgtcaagtcctcatggcccttataggtggggctacacacgtcatacaatggctggtacaaagggttgccaacccgcgagggggagctaatcccacaaagccagtcgtagtccggatcgtagtctgcaactcgactacgtgaagtcggaatcgctagtaatcgtggatcagaatgtcacggtgaatacgttcccgggtcttgtacacaccgcccgtcacaccatgggagcgggttctgccagaagtagttagcctaaccgcaaggagggcgattaccacggcagggttcgta

SEQ ID NO: 2927 - DNA, 1403 bp, unidentified
  source 1..1403: mol_type = unassigned DNA; note = Rhodomicrobium udaipurense
aacgaacgctggcggcaggcttaacacatgcaagtcgaacgcaccgcaaggtgagtggcagacgggtgagtaacgcgtgggaaccttccctttggtacggaataacttcgggaaaccgaagctaataccgtatatctcctccgggagaaagatttatcgccaaaggatgggcccgcgttggattagctagttggtgtggtaaaggcgcaccaaggcgacgatccatagctggtctgagaggatgatcagccacactgggactgagacacggcccagactcctacgggaggcagcagtggggaatcttggacaatgggggcaaccctgatccagccatgccgcgtgagtgaagaaggccttagggttgtaaagctcttttggcggggacgataatgacggtacccgcagaataagccccggctaacttcgtgccagcagccgcggtaatacgaagggggctagcgttgttcggaatcactgggcgtaaagcgtacgcaggcggatagataagtcaggggtgaaatcccggggctcaacctcggaattgcctttgatactgtctatcttcgagttcgggagaggttggcggaattcctagtgtagaggtgaaattcgtagatattaggaagaacaccagtggcgaaggcggccaactggcccgatactgacgctcatgtacgaaagcgtggggagcaaacaggattagataccctggtagtccacgctgtaaactatggatgctagccgttggggagcttgctcttcagtggcgcagctaacgtcttaagcatcccgcctggggagtacggtcgcaagattaaaactcaaaggaattgacgggggcccgcacaagcggtggagcatgtggtttaattcgaggcaacgcgaagaaccttaccagctcttgacatgtcgtgctacgtggagagattcacggttcccttcggggacgcgaacacaggtgctgcatggctgtcgtcagctcgtgtcgtgagatgttgggttaagtcccgcaacgagcgcaaccctcgcccttagttgctaccatttagttgagcactctaaggggaccgccggtgataagccggaggaaggtggggatgacgtcaagtcatcatggcccttacgggctgggctacacacgtgctacaatggcggtgacagtgggcagcgacacagcgatgtgatgctaatcccaaaaagccgtctcagttcagattgcactctgcaactcgagtgcatgaagtcggaatcgctagtaatcgcggatcagcatgccgcggtgaatacgttcccgggccttgtacacaccgcccgtcacaccatgggagttggttttacccgaaggcgttacgctaaccgcaaggaggcagacgaccacggtaaggtcagcgactggggtg

SEQ ID NO: 2928 - DNA, 1402 bp, Rhodomicrobium vannielii
  source 1..1402: mol_type = unassigned DNA
aacgaacgctggcggcaggcttaacacatgcaagtcgaacgcaccgcaaggtgagtggcagacgggtgagtaacgcgtgggaaccttccctttggtacggaataacttcgggaaaccgaagctaataccgtatatctcctccgggagaaagatttatcgccaaaggatgggcccgcgttggattagctagttggtgtggtaaaggcgcaccaaggcgacgatccatagctggtctgagaggatgatcagccacactgggactgagacacggcccagactcctacgggaggcagcagtggggaatcttggacaatgggggcaaccctgatccagccatgccgcgtgagtgaagaaggccttagggttgtaaagctcttttggcggggacgataatgacggtacccgcagaataagccccggctaacttcgtgccagcagccgcggtaatacgaagggggctagcgttgttcggaatcactgggcgtaaagcgtacgcaggcggatagataagtcaggggtgaaatcccggggctcaacctcggaattgcctttgatactgtctatcttgagttcgggagaggttggcggaattcctagtgtagaggtgaaattcgtagatattaggaagaacaccagtggcgaaggcggccaactggcccgatactgacgctcatgtacgaaagcgtggggagcaaacaggattagataccctggtagtccacgctgtaaactatggatgctagccgttggggagcttgctcttcagtggcgcagctaacgtcttaagcatcccgcctggggagtacggtcgcaagattaaaactcaaaggaattgacgggggcccgcacaagcggtggagcatgtggtttaattcgaggcaacgcgaagaaccttaccagctcttgacatgtcgtgctacgtggagagattcacggttcccttcggggacgcgaacacaggtgctgcatggctgtcgtcagctcgtgtcgtgagatgttgggttaagtcccgcaacgagcgcaaccctcgcccttagttgctaccatttagttgagcactctaaggggaccgccggtgataagccggaggaaggtggggatgacgtcaagtcatcatggcccttacgggctgggctacacacgtgctacaatggcggtgacagtgggcagcgacacagcgatgtgatgctaatcccaaaaagccgtctcagttcagattgcactctgcaactcgagtgcatgaagtcggaatcgctagtaatcgcggatcagcatgccgcggtgaatacgttcccgggccttgtacacaccgcccgtcacaccatgggagttggttttacccgaaggcgttacgctaaccgcaaggaggcagacgaccacggtaaggtcagcgactggggtg

SEQ ID NO: 2929 - DNA, 1457 bp, unidentified
  source 1..1457: mol_type = unassigned DNA; note = Rhodopirellula bahusiensis
aatgaacgttggcggcatggattaggcatgcaagtcgcacgagaagctgagtagcttgctacaaagcggacagtggcgaaagggagagtaacgtgtggttacgtgccctcgagaccgggatagcgtcgggaaactggcagtaataccggataatatctacggatcaaatggtgagattccgctcgaggattggaccgcatactattagcttgttggtgaggtaatggctcaccaaggctgcgatggttaccgggtgtgagagcatggcccggctcactgggactgagacactgcccagacacctacgggtggctgcagtcgagaatcttcggcaatggacgaaagtctgaccgagcgatgccgcgtgcgggatgaaggccctcgggttgtaaaccgctgtcagttgttaggaaatgcatggtggttatccatcatgtttgaccgatcttcagaggaaggacgggctaagtacgtgccagcagccgcggtaacacgtaccgtccaaacgttattcggtatcactgggcttaaagcgttcgtaggcggcctagaaggtgagatgtgaaagcccacggctcaaccgtggaattgcgtttcaaaccactaggcttgaggaagacaggggtgatgggaacttatggtggagcggtgaaatgcgttgatatcatagggaacaccggtggcgaaagcgcatcactgggtcttttctgacgctgaggaacgaaagctagggtagcgaacgggattagataccccggtagtcctagccgtaaacgatgagcactaggctgagggaacttccacattctctcggccgcagggaaaccattaagtgctccgcctggggagtatggtcgcaaggctgaaactcaaaggaattgacgggggctcacacaagcggtggaggatgtggcttaattcgaggctacgcgaagaaccttatcctagacttgacatgcttgagaatccctatgaaagtagagagtgcccttcggggagctcttgcacaggtgctgcatggctgtcgtcagctcgtgtcgtgagatgtcgggttaagtcccttaacgagcgaaacccttatctttagttgccagcgggtaatgccggggactctaaagagactgccggtgtcaaaccggaggaaggtggggatgacgtcaagtcctcatggcctttatgtctagggctgcacacgtcctacaatggcacggacaaacggacgcaataccgcgaggtggagcaaatcctagaaaccgtgcctcagttcggattgcaggctgcaactcgcctgcatgaagccggaatcgctagtaatcgtaggtcagcatactacggtgaatgtgttcctgagccttgtacacaccgcccgtcaagccacgaaagttgggagggcccgaagtcaccaagctaacccgcaagggaggcaggtgccgaaggtcagctcgacaattgggact

SEQ ID NO: 2930 - DNA, 1457 bp, Rhodopirellula baltica; identical to SEQ ID NO: 2929
  source 1..1457: mol_type = unassigned DNA

SEQ ID NO: 2931 - DNA, 1407 bp, Rhodoplanes elegans
  source 1..1407: mol_type = unassigned DNA
agcgaacgctggcggcaggcttaacacatgcaagtcgagcgccccgcaaggggagcggcagacgggtgagtaacacgtgggaacgtaccctttggttcggaacaacccagggaaacttgggctaataccggataagtccgcgaggagaaagatttatcgccgaaggatcggcccgcgtctgattagctagttggtgtggtaacggcgcaccaaggcgacgatcagtagctggtctgagaggatgatcagccacactgggactgagacacggcccagactcctacgggaggcagcagtggggaatattggacaatgggggcaaccctgatccagccatgccgcgtgagtgatgaaggccctagggttgtaaagctctttcggtggggaagataatgacggtacccacagaagaagccccggctaacttcgtgccagcagccgcggtaatacgaagggggctagcgttgctcggaatcactgggcgtaaagcgcacgtaggcggctttctaagtcaggggtgaaatcccggagctcaactccggaactgcctttgatactgggaggctcgagtccgggagaggtgagtggaactgcgagtgtagaggtgaaattcgtagatattcgcaagaacaccagtggcgaaggcggctcactggcccggtactgacgctgaggtgcgaaagcgtggggagcaaacaggattagataccctggtagtccacgccgtaaacgatggatgctagccgttggcgagcttgctcgtcagtggcgcagctaacgccttaagcatcccgcctggggagtacggtcgcaagattaaaactcaaaggaattgacgggggcccgcacaagcggtggagcatgtggtttaattcgaagcaacgcgcagaaccttaccagctcttgacatgccacgacggtttccggagacggactcctccccgcaaggggcgtggacacaggtgctgcatggctgtcgtcagctcgtgtcgtgagatgttgggttaagtcccgcaacgagcgcaaccctcgcccttagttgccaccattcagttgggcactctaaggggactgccggtgataagccgcgaggaaggtggggatgacgtcaagtcctcatggcccttacgggctgggctacacacgtgctacaatggcggtgacagtgggacgcgaaggggtgacccttagcaaatctcaaaaagccgtctcagttcggattgggctctgcaactcgagcccatgaagttggaatcgctagtaatcgcagatcagcacgctgcggtgaatacgttcccgggccttgtacacaccgcccgtcacaccatgggagttggctttacctgaaggcgttgcgctaacccgcaagggaggcaggcgaccacggtagggtcagcgactggggtg

SEQ ID NO: 2932 - DNA, 1383 bp, unidentified
  source 1..1383: mol_type = unassigned DNA; note = Rhodoplanes piscinae
  misc_difference 136..139: note = n is a, c, g, or t
catgcaagtcgaacgggcgcagcaatgcgtcagtggcagacgggtgagtacacgtgggaacgtgcctttcggttcggaacaactgagggaaacttcagctaataccggatacgcccgcaaggggaaagatttatcnnnnaaagatcggcccgcgtctgattagctagttggtggggtaatggcccaccaaggcgacgatcagtagctggtctgagaggatgatcagccacactgggactgagacacggcccagactcctacgggaggcagcagtggggaatattggacaatgggggaaaccctgatccagccatgccgcgtgagtgatgaaggccctagggttgtaaagctctttcggtggggaagataatgacggtacccacagaagaagccccggctaacttcgtgccagcagccgcggtaatacgaagggggctagcgttgctcggaatcactgggcgtaaagcgcacgtaggcggctttctaagtcaggggtgaaatcccggagctcaactccggaactgcctttgatactggaaagctcgagtccgggagaggtgagtggaactgcgagtgtagaggtgaaattcgtagatattcgcaagaacaccagtggcgaaggcggctcactggcccggtactgacgctgaggtgcgaaagcgtggggagcaaacaggattagataccctggtagtccacgccgtaaacgatggatgctagccgttggcgagcttgctcgtcagtggcgcagctaacgccttaagcatcccgcctggggagtacggtcgcaagattaaaactcaaaggaattgacgggggcccgcacaagcggtggagcatgtggtttaattcgaagcaacgcgcagaaccttaccagcccttgacatgccacgacggtttccagagatggactcctccccgcaaggggcgtggacacaggtgctgcatggctgtcgtcagctcgtgtcgtgagatgttgggttaagtcccgcaacgagcgcaaccctcgcccttagttgccaccattcagttgggcactctaaggggactgccggtgataagccgcgaggaaggtggggatgacgtcaagtcctcatggcccttacgggctgggctacacacgtgctacaatggcggtgacagtgggacgcgaaggggtgacccttagcaaatctcaaaaagccgtctcagttcggattgggctctgcaactcgagcccatgaagtcggaatcgctagtaatcgcagatcagcacgctgcggtgaatacgttcccgggccttgtacacaccgcccgtcacaccatgggagttggctttacctgaagacggtgcgctaaccggaaagggggcagccggccacggtagggtcagcgactggggtg

SEQ ID NO: 2933 - DNA, 1413 bp, Rhodoplanes roseus
  source 1..1413: mol_type = unassigned DNA
  misc_difference 786: note = n is a, c, g, or t
agcgaacgctggcggcaggcttaacacatgcaagtcgagcgcccgtagcaatacgggagcggcagacgggtgagtaacacgtgggaacgtaccctttggttcggaacaacccagggaaacttgggctaataccggataagtccgcgaggagaaagatttatcgccgaaggatcggcccgcgtctgattagctagttggtgtggtaacggcgcaccaaggcgacgatcagtagctggtctgagaggatgatcagccacactgggactgagacacggcccagactcctacgggaggcagcagtggggaatattggacaatgggggaaaccctgatccagccatgccgcgtgagtgatgaaggccttagggttgtaaagctctttcagtggggaagataatgacggtacccacagaagaagccccggctaacttcgtgccagcagccgcggtaatacgaagggggctagcgttgctcggaatcactgggcgtaaagcgcacgtaggcggctttctaagtcaggggtgaaatcccggagctcaactccggaactgcccttgatactggagagctcgagtccgggagaggtgagtggaactgcgagtgtagaggtgaaattcgtagatattcgcaagaacaccagtggcgaaggcggctcactggcccggtactgacgctgaggtgcgaaagcgtggggagcaaacaggattagataccctggtagtccacgccgtaaacgatggatgctagccgttgggcagcttgctgctcagtggcgcagctaacgcnttaagcatcccgcctggggagtacggtcgcaagattaaaactcaaaggaattgacgggggcccgcacaagcggtggagcatgtggttcaattcgaagcaacgcgcagaaccttaccagctcttgacatgccacgacggtttccggagacggactcctccccgcaaggggcgtggacacaggtgctgcatggctgtcgtcagctcgtgtcgtgagatgttgggttaagtcccgcaacgagcgcaaccctcgcccttagttgccatcattcagttgggcactctaaggggactgccggtgataagccgcgaggaaggtggggatgacgtcaagtcctcatggcccttacgggctgggctacacacgtgctacaatggcggtgacagtgggacgcgaaggggcaacccttagcaaatctcaaaaagccgtctcagttcggattggggtctgcaactcgaccccatgaagtcggaatcgctagtaatcgcagatcagcacgctgcggtgaatacgttcccgggccttgtacacaccgcccgtcacaccatgggagttggttttacctgaaggcgctgcgctaactcagcaatgagaggcaggcgaccacggtagggtcagcgactggggtg

SEQ ID NO: 2934 - DNA, 1411 bp, Rhodopseudomonas faecalis
  source 1..1411: mol_type = unassigned DNA
agcgaacgctggcggcaggcttaacacatgcaagtcgaacgggcgtagcaatacgtcagtggcagacgggtgagtaacgcgtgggaacgtaccttttggttcggaacaactgagggaaacttcagctaataccggataagcccttacggggaaagatttatcgccgaaagatcggcccgcgtctgattagctagttggtgrggtaatggcycaccaaggcgacgatcagtagctggtctgagaggatgatcagccacattgggactgagacacggcccaaactcctacgggaggcagcagtggggaatattggacaatgggsgaaascctgatccagccatgccgcgtgagtgatgaaggccctagggttgtaaagctcttttgtgcgggaagataatgacggtaccgcaagaataagccccggctaacttcgtgccagcagccgcggtaatacgaagggggctagcgttgctcggaatcactgggcgtaaagggtgcgtaggcgggtttctaagtcagaggtgaaagcctggagctcaactccagaactgcctttgatactggaagtcttgagtatggcagaggtgagtggaactgcgagtgtagaggtgaaattcgtagatattcgcaagaacaccagtggcgaaggcggctcactgggccattactgacgctgaggcacgaaagcgtggggagcaaacaggattagataccctggtagtccacgccgtaaacgatgaatgccagccgttagtgggtttactcactagtggcgcagctaacgctttaagcattccgcctggggagtacggtcgcaagattaaaactcaaaggaattgacgggggcccgcacaagcggtggagcatgtggtttaattcgacgcaacgcgcagaaccttaccagcccttgacatgtccaggaccggtcgcagagatgtgaccttctcttcggagcctggagcacaggtgctgcatggctgtcgtcagctcgtgtcgtgagatgttgggttaagtcccgcaacgagcgcaacccccgtccttagttgctaccatttagttgagcactctaaggagactgccggtgataagccgcgaggaaggtggggatgacgtcaagtcctcatggcccttacgggctgggctacacacgtgctacaatggcggtgacaatgggatgctaaggggcgacccctcgcaaatctcaaaaagccgtctcagttcggattgggctctgcaactcgagcccatgaagttggaatcgctagtaatcgtggatcagcatgccacggtgaatacgttcccgggccttgtacacaccgcccgtcacaccatgggagttggttttacctgaaggtagtgcgctaacccgcaagggaggcagctaaccacggtagggtcagcgactggggtg

SEQ ID NO: 2935 - DNA, 1412 bp, Rhodopseudomonas palustris
  source 1..1412: mol_type = unassigned DNA
agcgaacgctggcggcaggcttaacacatgcaagtcgaacgggcgtagcaatacgtcagtggcagacgggtgagtaacgcgtgggaacgtaccttttggttcggaacaacacagggaaacttgtgctaataccggataagcccttacggggaaagatttatcgccgaaagatcggcccgcgtctgattagctagttggtgaggtaatggctcaccaaggcgacgatcagtagctggtctgagaggatgatcagccacattgggactgagacacggcccaaactcctacgggaggcagcagtggggaatattggacaatgggggaaaccctgatccagccatgccgcgtgagtgatgaaggccctagggttgtaaagctcttttgtgcgggaagataatgacggtaccgcaagaataagccccggctaacttcgtgccagcagccgcggtaatacgaagggggctagcgttgctcggaatcactgggcgtaaagggtgcgtaggcgggtttctaagtcagaggtgaaagcctggagctcaactccagaactgcctttgatactggaagtcttgagtatggcagaggtgagtggaactgcgagtgtagaggtgaaattcgtagatattcgcaagaacaccagtggcgaaggcggctcactgggccattactgacgctgaggcacgaaagcgtggggagcaaacaggattagataccctggtagtccacgccgtaaacgatgaatgccagccgttagtgggtttactcactagtggcgcagctaacgctttaagcattccgcctggggagtacggtcgcaagattaaaactcaaaggaattgacgggggcccgcacaagcggtggagcatgtggtttaattcgacgcaacgcgcagaaccttaccagcccttgacatgtccaggaccggtcgcagagacgcgaccttctcttcggagcctggagcacaggtgctgcatggctgtcgtcagctcgtgtcgtgagatgttgggttaagtcccgcaacgagcgcaacccccgtccttagttgctaccatttagttgagcactctaaggagactgccggtgataagccgcgaggaaggtggggatgacgtcaagtcctcatggcccttacgggctgggctacacacgtgctacaatggcggtgacaatgggaagctaaggggcgacccttcgcaaatctcaaaaagccgtctcagttcggattgggctctgcaactcgagcccatgaagttggaatcgctagtaatcgtggatcagcatgccacggtgaatacgttcccgggccttgtacacaccgcccgtcacaccatgggagttggctttacctgaagacggtgcgctaaccagcaagtgggggcagccggccacggtagggtcagcgactggggtg

SEQ ID NO: 2936 - DNA, 1370 bp, unidentified
  source 1..1370: mol_type = unassigned DNA; note = Rhodopseudomonas pentothenatexigens
gggcgtagcaatacgtcagtggcagacgggtgagtaacgcgtgggaacgtaccttttggttcggaacaacacagggaaacttgtgctaataccggataagcccttacggggaaagatttatcgccgaaagatcggcccgcgtctgattagctagttggtgaggtaatggctcaccaaggcgacgatcagtagctggtctgagaggatgatcagccacattgggactgagacacggcccaaactcctacgggaggcagcagtggggaatattggacaatgggggcaaccctgatccagccatgccgcgtgagtgatgaaggccctagggttgtaaagctcttttgtgcgggaagataatgacggtaccgcaagaataagccccggctaacttcgtgccagcagccgcggtaatacgaagggggctagcgttgctcggaatcactgggcgtaaagggtgcgtaggcgggtttctaagtcagaggtgaaagcctggagctcaactccagaactgcctttgatactggaagtcttgagtatggcagaggtgagtggaactgcgagtgtagaggtgaaattcgtagatattcgcaagaacaccagtggcgaaggcggctcactgggccattactgacgctgaggcacgaaagcgtggggagcaaacaggattagataccctggtagtccacgccgtaacgatgaatgccagccgttagtgggtttactcactagtggcgcagctaacgctttaagcattccgcctggggagtacggtcgcaagattaaaactcaaaggaattgacgggggcccgcacaagcggtggagcatgtggtttaattcgacgcaacgcgcagaaccttaccagcccttgacatgtccaggaccggtcgcagagacgtgaccttctcttcggagcctggagcacaggtgctgcatggctgtcgtcagctcgtgtcgtgagatgttgggttaagtcccgcaacgagcgcaacccccgtccttagttgctaccatttagttgagcactctaaggagactgccggtgataagccgcgaggaaggtggggatgacgtcaagtcctcatggcccttacgggctgggctacacacgtgctacaatggcggtgacaatgggaagctaaggggcgacccttcgcaaatctcaaaaagccgtctcagttcggattgggctctgcaactcgagcccatgaagttggaatcgctagtaatcgtggatcagcatgccacggtgaatacgttcccgggccttgtacacaccgcccgtcacaccatgggagttggctttacctgaagacggtgcgctaacccgcaaggggggcagccggccacggtagggtcagcgactggggtg

SEQ ID NO: 2937 - DNA, 1411 bp, unidentified
  source 1..1411: mol_type = unassigned DNA; note = Rhodopseudomonas pseudopalustris
agcgaacgctggcggcaggcttaacacatgcaagtcgaacgggcatagcaatatgtcagtggcagacgggtgagtaacgcgtgggaacgtaccttttggttcggaacaactgagggaaacttcagctaataccggataagcccttacggggaaagatttatcgccgaaagatcggcccgcgtctgattagctagttggtgtggtaaaggcgcaccaaggcgacgatcagtagctggtctgagaggatgatcagccacattgggactgagacacggcccaaactcctacgggaggcagcagtggggaatattggacaatgggcgaaagcctgatccagccatgccgcgtgagtgatgaaggccctagggttgtaaagctcttttgtgcgggaagataatgacggtaccgcaagaataagccccggctaacttcgtgccagcagccgcggtaatacgaagggggctagcgttgctcggaatcactgggcgtaaagggtgcgtaggcgggtctttaagtcagaggtgaaagcctggagctcaactccagaactgcctttgatactgaggatcttgagtatgggagaggtgagtggaactgcgagtgtagaggtgaaattcgtagatattcgcaagaacaccagtggcgaaggcggctcactggcccataactgacgctgaggcacgaaagcgtggggagcaaacaggattagataccctggtagtccacgccgtaaacgatgaatgccagccgttagtgggtttactcactagtggcgcagctaacgctttaagcattccgcctggggagtacggtcgcaagattaaaactcaaaggaattgacgggggcccgcacaagcggtggagcatgtggtttaattcgacgcaacgcgcagaaccttaccagcccttgacatgtccaggaccggtcgcagagatgtgaccttctcttcggagcctggagcacaggtgctgcatggctgtcgtcagctcgtgtcgtgagatgttgggttaagtcccgcaacgagcgcaacccccgtccttagttgctaccatttagttgagcactctaaggagactgccggtgataagccgcgaggaaggtggggatgacgtcaagtcctcatggcccttacgggctgggctacacacgtgctacaatggcggtgacaatgggacgctaaggggcaacccttcgcaaatctcaaaaaaccgtctcagttcggattggagtctgcaactcgactccatgaagttggaatcgctagtaatcgtggatcagcatgccacggtgaatacgttcccgggccttgtacacaccgcccgtcacaccatgggagttggttctacctgaaggcagtgcgctaacccgcaagggaggcagctgaccacggtagggtcagcgactggggtg

SEQ ID NO: 2938 - DNA, 1406 bp, Rhodospirillum rubrum
  source 1..1406: mol_type = unassigned DNA
gacgaacgctggcggcaggcctaacacatgcaagtcgaacgcatccttcgggatgagtggcgcacgggtgagtaacacgtgggaacgtaccttggagtgcggaataatctttggaaacgaggactaataccgcatacgcccttagggggaaagatttatcgctccaagatcggcccgcgtccgattagctagttggcggggtaatggcccaccaaggcgacgatcggtagctggtctgagaggatggccagccacactgggactgagacacggcccagactcctacgggaggcagcagtggggaatattgcgcaatgggggcaaccctgacgcagccatgccgcgtgagtgaagaaggccttcgggttgtaaagctctttcgggtgtgaagatgatgacggtaacaccagaagaagccccggctaacttcgtgccagcagccgcggtaatacgaagggggcaagcgttgttcggaattactgggcgtaaagagcgcgtaggcggtctgattagtcagaggtgaaatcccagagctcaactttggaactgcctttgatactgttagactagaatccgtgagagggtggtggaattcccagtgtagaggtgaaattcgtagatattgggaggaacaccagtggcgaaggcggccacctggcgcggtattgacgctgaggcgcgaaagcgtggggagcaaacaggattagataccctggtagtccacgccgtaaacgatgagtgctagatgtcggggtacatgtacctcggtgtcgcagctaacgcattaagcactccgcctggggagtacggccgcaaggttaaaactcaaaggaattgacgggggcccgcacaagcggtggagcatgtggtttaattcgaagcaacgcgcagaaccttaccagcccttgacatcccgtgacacttccagagatggaaggttcccttcggggacacggtgacaggtgctgcatggctgtcgtcagctcgtgtcgtgagatgttgggttaagtcccgcaacgagcgcaaccctcatcttcagttgccagcaagtaacgttgggcactctgaagagactgccggtgacaagccggaggaaggtggggatgacgtcaagtcctcatggcccttacgggctgggctacacacgtgctacaatggcgcctacaatgggcagcgacctcgcgaggggaagctaatctccaaaaggcgtctcagttcggattgcactctgcaactcgggtgcatgaagtcggaatcgctagtaatcgtggatcagcatgccacggtgaatacgttcccgggccttgtacacaccgcccgtcacaccatgggagttggttctacccgaagacggtacgctaaccgcaaggaggcagccggccacggtagggtcagcgactggggtg

SEQ ID NO: 2939 - DNA, 1407 bp, Rhodothalassium salexigens
  source 1..1407: mol_type = unassigned DNA
aacgaacgctggcggcaggcctaacacatgcaagtcgagcgcacccttcggggtgagcggcggacgggtgagtaacgcgtgggaacctgctcagggctctgggataactgctggaaacggcagctaataccggatacgccgtattgggaaagaaattcggccttggatgggcccgcgttggattagctagatggtggggtaacggcctaccatggcgacgatccatagctggtttgagaggatgatcagccacactgggactgagacacggcccagactcctacgggaggcagcagtggggaatcttagacaatgggggcaaccctgatctagccatgccgcgtgagtgatgaaggccttagggttgtaaagctctttcagcagggaagataatgactgtacctgcagaagaagctccggctaactccgtgccagcagccgcggtaatacggagggggctagcgttgttcggaattactgggcgtaaagcgcgcgtaggcggatcggtcagttgggggtgaaagcccggggctcaacctcggaactgccctcaaaactaccgatctagagttcgggagaggtaagcggaattcccagtgtagaggtgaaattcgtagatattgggaagaacaccagtggcgaaggcggcttactggaccgatactgacgctgaggtgcgaaagcgtggggagcaaacaggattagataccctggtagtccacgccgtaaacgatgggtgctagatgtcggggctcttagagtttcggtgtcgcagttaacgcattaagcaccccgcctggggagtacggccgcaaggttaaaactcaaaggaattgacgggggcccgcacaagcggtggagcatgtggtttaattcgaagcaacgcgcagaaccttaccagctcttgacatcccgggacgacttccagagatggattttttcacttcggtgacccggtgacaggtgctgcatggctgtcgtcagctcgtgtcgtgagatgttgggttaagtcccgcaacgagcgcaaccctcgcccttagttgccagcatttggttggggactctaagggaactgccggtgataagccggaggaaggtggggatgacgtcaagtcctcatggcccttatgggctgggctacacacgtgctacaatggcggtgacagagggcagcgagcctgcgagggtgagcgaatctctaaaagccgtctcagttcggattgttctctgcaactcgagagcatgaaggtggaatcgctagtaatcgcggatcagcatgccgcggtgaatacgttcccgggccttgtacacaccgcccgtcacaccatgggagttggtttgacccgaagacggtgagctaacccgaaaggggggcagccggccacggtcaggtcagcgactggggtg

SEQ ID NO: 2940 - DNA, 1462 bp, Rhodothermus marinus
  source 1..1462: mol_type = unassigned DNA
ggcgaacgctggcggcgggcctaacacatgcaagtcgtacgcggggttctccttcgggagaactgccgagtggcgaacgggtgcgtaacgcgtaggtaacctgccctcgagtgggggataactccgggaaaccggggctaataccgcatattgtcccgggaccgcatggctccgggatgaaagccctctgggcgctcgaggatgggcctgcgtcggattagctagttggtggggtaacggcccaccaaggcgacgatccgtagctggtctgagaggacgaccagccacactggcactgagacacgggccagactcctacgggaggcagcagtggggaatcttgggcaatgggcgaaagcctgacccagccacgccgcgtggaggatgaagcccttcggggtgtaaactccttttctgggggaagaaatcccggctctggtcgggactgacggtaccccaggaataagcgccggctaactccgtgccagcagccgcggtaatacggagggcgcaagcgttgcccggaatcactgggtgtaaagggtgcgtaggcggggctgtaagtcagaggtgaaagcctccggctcaaccggagaattgcctctgatactgcagctcttgagtcccggagaggccgctggaattcctggtgtagcggtgaaatgcgtagatatcaggaggaacaccggaggcgaaggcgggcggctggacggggactgacgctgaggcacgaaagcgtggggagcaaacaggattagataccctggtagtccacgccgtaaacgatggatgctcggcgttgccgccttcgggcggcagtgcctaagctaacgcggtaagcatcccacctggggagtacggccgcaaggttgaaactcaaaggaattgacgggggcccgcacaagcggtggagcatgtggcttaattcgatgctacgcgaggaaccttacctgggctcgaacaccaccggacagcccccgaaagggggtctcccgcaagggctggtggtgaggtgctgcatggctgtcgtcagctcgtgccgtgaggtgttgggttaagtcccgcaacgagcgcaacccctaccgccagttaccagcgggtaatgccggggactctggcgggactgcctgcgcaagcaggaggaaggtggggatgacgtcaagtcatcatggcccttacgcccagggctgcacacgtgctacaatggccggtacaatgggcagccaccccgcgagggggagcgaatccctaaagccggtctcagttcggattggagtctgcaactcgactccatgaagccggaatcgctagtaatcgcgcatcagctacggcgcggtgaatacgttcccgggccttgtacacaccgcccgtcaacccatgggagccgggggcgcccgaagtccgtgacccaacctgcttcggcgggagggagcggcctaaggcgaacccggtgactgggggt

SEQ ID NO: 2941 - DNA, 1462 bp, Rhodothermus profundi
  source 1..1462: mol_type = unassigned DNA
ggcgaacgctggcggcgggcctaacacatgcaagtcgtacgcggggccctccttcgggagggctgccgagtggcgaacgggtgagtaacgcgtaggtaacctgccctcgagtgggggataaccccgggaaaccggggctaataccgcatattgtcccggggccgcatggtgccgggatgaaagccctctgggcgctcgaggatgggcctgcgtcggattagctagttggtggggtaacggcccaccaaggcgacgatccgtagctggtctgagaggacggccagccacactggcactgagacacgggccagactcctacgggaggcagcagtggggaatcttgggcaatgggcgaaagcctgacccagccacgccgcgtggaggatgaagcccttcggggtgtaaactccttttctgggggaagaaaccccgactctggtcggggctgacggtaccccaggaataagcgccggctaactccgtgccagcagccgcggtaatacggagggcgcaagcgttgcccggaatcactgggtgtaaagggtgcgtaggcggggctgtaagtcagaggtgaaagccctcggctcaaccgaggaattgcctctgatactgcagctcttgagtcccggagaggccgctggaattcctggtgtagcggtgaaatgcgtagatatcaggaggaacaccggaggcgaaggcgggcggctggacggggactgacgctgaggcacgaaagcgtggggagcaaacaggattagataccctggtagtccacgccgtaaacgatggatgctcggcgttgccgccttcgggcggcagtgcctaagctaacgcggtaagcatcccacctggggagtacggccgcaaggttgaaactcaaaggaattgacgggggcccgcacaagcggtggagcatgtggcttaattcgatgctacgcgaggaaccttacctgggctcgaacaccaccggacagcccccgaaagggggtctcccgaaagggctggtggtgaggtgctgcatggctgtcgtcagctcgtgccgtgaggtgttgggttaagtcccgcaacgagcgcaacccctgccgccagttaccagcgggtaatgccggggactctggcgggactgcctgcgcaagcaggaggaaggtggggacgacgtcaagtcatcatggcccttatgcccagggctgcacacgtgctacaatggccggtacaatgggcagccaccccgcgagggggagcgaatccctaaagccggtctcagttcggattggagtctgcaactcgactccatgaagccggaatcgctagtaatcgcgcatcagctacggcgcggtgaatacgttcccgggccttgtacacaccgcccgtcaacccatgggagccgggggcacccgaagtccgtaacccaacccgcttcggcgggagggagcggcctaaggtgaacccggtgactgggggt

SEQ ID NO: 2942 - DNA, 1412 bp, unidentified
  source 1..1412: mol_type = unassigned DNA; note = Richelia intracellularis
gatgaacgctggcggtatgcattacacatgcaagtcgaacggactcttcggagttagtggcggacgggtgagtaacacgtgagaatctggctctaggtcggggacaacagttggaaacgactgctaataccggatatgccgaaaggtgaaagatttattgccgagagatgagctcgcgtctgattagttagttggtggggtaatagcctaccaagacatcgatcagtagctggtctgagaggatgatcagccacactgggactgagacacggcccagactcctacgggaggcagcagtggggaattttccgcaatgggcgaaagcctgacggagcaataccgcgtgagggaggaaggcttttgggttgtaaacctcttttcttaaggaagaatacaatgacggtacttaaggaataagcatcggctaactccgtgccagcagccgcggtaatacggaggatgcaagcgttatccggaataattgggcgtaaagcgtccgcaggtggttttgtaagtctgctgttaaagcgtgaggcttaacctcataacggcggtggaaactacaagacttgagtgcgttcggggcagagggaattcctggtgtagcggtgaaatgcgtagatatcaggaagaacaccggtggcgaaagcgctctgctaggccgtaactaacactgagggacgaaagctaggggagcgaatgggattagataccccagtagtcctagccgtaaacgatggatactaggcgttgtctgtatcgacccggacagtgccgtagctaacgcgttaagtatcccgcctggggagtacgcacgcaagtgtgaaactcaaaggaattgacgggggcccgcacaagcggtggagtatgtggtttaattcgatgcaacgcgaagaaccttaccagggtttgacatgtcgcgaacttcctggaaacgggaaggtgccttcgggagcgcgaacacaggtggtgcatggctgtcgtcagctcgtgtcatgagatgttgggttaagtcccgcaacgagcgcaaccctcgtttttagttgccatcacttagggtgggcactctagagagactgccggtgacaaaccggaggaaggtggggatgacgtcaagtcatcatgccccttacatcctgggctacacacgtactacaatgctatagacaaagggcagccaactcgcaagagtgagcaaatctcataaactatggctcagttcagatcgcaggctgcaactcgcctgtgtgaaggaggaatcgctagtaattgcaggtcagcatactgcagtgaattcgttcccgggccttgtacacaccgcccgtcacaccatggaagctggtcacgcccgaagtcattaccctaaccttattaggagggggatgccgaaggtaggactggtgactggggtg

SEQ ID NO: 2943 - DNA, 1421 bp, Rickettsia africae
  source 1..1421: mol_type = unassigned DNA
aacgaacgctatcggtatgcttaacacatgcaagtcgaacgaactaattggggcttgctccaattagttagtggcagacgggtgagtaacacgtgggaatctacccattagtacggaataacttttagaaataaaagctaataccgtatattctctgcggaggaaagatttatcgctgatggatgagcccgcgtcagattaggtagttggtgaggtaatggctcaccaagccgacgatctgtagctggtctgagaggatgatcagccacactgggactgagacacggcccagactcctacgggaggcagcagtggggaatattggacaatgggcgaaagcctgatccagcaataccgagtgagtgatgaaggccttagggttgtaaagctcttttagcaaggaagataatgacgttacttgcagaaaaagccccggctaactccgtgccagcagccgcggtaagacggagggggctagcgttgttcggaattactgggcgtaaagagtgcgtaggcggtttagtaagttggaagtgaaagcccggggcttaacctcggaattgctttcaaaactactaatctagagtgtagtaggggatgatggaattcctagtgtagaggtgaaattcttagatattaggaggaacaccggtggcgaaggcggtcatctgggctacaactgacgctgatgcacgaaagcgtggggagcaaacaggattagataccctggtagtccacgccgtaaacgatgagtgctagatatcggaagattctctttcggtttcgcagctaacgcattaagcactccgcctggggagtacggtcgcaagattaaaactcaaaggaattgacgggggctcgcacaagcggtggagcatgcggtttaattcgatgttacgcgaaaaaccttaccaacccttgacatggtggtcgtggatcgcagagatgcttttcttcagctcggctggaccacacacaggtgttgcatggctgtcgtcagctcgtgtcgtgagatgttgggttaagtcccgcaacgagcgcaaccctcattcttatttgccagcgggtaatgccgggaactataagaaaactgccggtgataagccggaggaaggtggggacgacgtcaagtcatcatggcccttacgggttgggctacacgcgtgctacaatggtgtttacagagggaagcaagacggcgacgtggagcaaatccctaaaagacatctcagttcggattgttctctgcaactcgagagcatgaagttggaatcgctagtaatcgcggatcagcatgccgcggtgaatacgttctcgggccttgtacacactgcccgtcacgccatgggagttagttttacctgaaggtggtgagctaacgcaagaggcagccaaccacggtaaaattagcgactggggtg

SEQ ID NO: 2944 - DNA, 1405 bp, Rickettsia akari
  source 1..1405: mol_type = unassigned DNA
atgcttaacacatgcaagtcggacggactgattggggttttctccagttagtgagtggcgaacgggtgagtaacacgtgggaatctgcccatcagtacggaataacttttagaaataaaagctaataccgtatattctctacggaggaaagatttatcgctgatggatgagcccgcgtcggattaggtagttggtgaggtaacggctcaccaagccgacgatctgtagttggtctgagaggatgatcagccacactgggactgagacacggcccagactcctacgggaggcagcagtggggaatattggacaatgggcgaaagcctgatccagcaataccgagtgagtgatgaaggccctagggttgtaaagctcttttagcaaggaagataatgacgttacttgcagaaaaagccccggctaactccgtgccagcagccgcggtaagacggagggggctagcgttgttcggaattactgggcgtaaagagtgcgtaggcggtttagtaagttggaagtgaaagcccggggcttaacctcggaattgctttcaaaactactaatctagagtgtagtaggggatgatggaattcctagtgtagaggtgaaattcttagatattaggaggaacaccggtggcgaaggcggtcatctgggctacgactgacgctgatgcacgaaagcgtggggagcaaacaggattagataccctggtagtccacgccgtaaacgatgagtgctagatatcggaagagtctctttcggtttcgcagctaacgcattaagcactccgcctggggagtacggtcgcaagattaaaactcaaaggaattgacgggggctcgcacaagcggtggagcatgcggtttaattcgatgttacgcgaaaaaccttaccaacctttgacatggtggttgcggatcgcagagatgctttccttcagttcggctggaccacacacaggtgttgcatggctgtcgtcagctcgtgtcgtgagatgttgggttaagtcccgcaacgagcgcaaccctcattcttatttgccagcgggtaatgccgggaactataagaaaactgccggtgataagccggaggaaggtggggacgacgtcaagtcatcatggcccttatgggttgggctacacgcgtgctacaatggtgtttacagagggaagcaagacggtaacgtggagcaaatccctaaaagacatctcagttcggattgttctctgcaactcgagagcatgaagttggaatcgctagtaatcgcggatcagcatgccgcggtgaatacgttctcgggccttgtacacactgcccgtcacgccatgggagttggttttacctgaaggtggtgagctaacgcaagaggcagccaaccacggtagaattagcgactggggtg

SEQ ID NO: 2945 - DNA, 1421 bp, unidentified
  source 1..1421: mol_type = unassigned DNA; note = Rickettsia amblyommatis
aacgaacgctatcggtatgcttaacacatgcaagtcgaacggactaattggggcttgctccaattagttagtggcagacgggtgagtaacacgtgggaatctacccatcagtacggaataacttttagaaataaaagctaataccgtatattctctacggaggaaagatttatcgctgatggatgagcccgcgtcagattaggtagttggtgaggtaatggctcaccaagccgacgatctgtagctggtttgagaggatgatcagccacactgggactgagacacggcccagactcctacgggaggcagcagtggggaatattggacaatgggcgaaagcctgatccagcaataccgagtgagtgatgaaggccttagggttgtaaaactcttttagcaaggaagataatgacgttacttgcagaaaaagccccggctaactccgtgccagcagccgcggtaagacggggggggctagcgttgttcggaattactgggcgtaaagagtgcgtaggcggtttagtaagttggaagtgaaagcccggggcttaacctcggaattgctttcaaaactactaatctagagtgtagtaggggatgatggaattcctagtgtagaggtgaaattcttagatattaggaggaacaccggtggcgaaggcggtcatctgggctacaactgacgctaatgcacgaaagcgtggggagcaaacaggattagataccctggtagtccacgccgtaaacgatgagtgctagatatcggaagattatctttcggtttcgcagctaacgcattaagcactccgcctggggagtacggtcgcaagattaaaactcaaaggaattgacgggggctcgcacaagcggtggagcatgcggtttaattcgatgttacgcgaaaaaccttaccaacccttgacatggtggtcgcggatcgcagagatgcttttcttcagcttggctggaccacacacaggtgttgcatggctgtcgtcagctcgtgtcgtgagatgttgggttaagtcccgcaacgagcgcaaccctcattcttatttgccagcgggtaatgccgggaactataagaaaactgccggtgataagccggaggaaggtggggacgacgtcaagtcatcatggcccttacgggttgggctacacgcgtgctacaatggtgtttacagagggaagcaagacggcgacgtggagcaaatccctaaaagacatctcagttcggattgttctctgcaactcgagagcatgaagttggaatcgctagtaatcgcggatcagcatgccgcggtgaatacgttctcgggccttgtacacactgcccgtcacgccatgggagttggttttacctgaaggtggtgagctaacgcaagaggcagccaaccacggtaaaattagcgactggggtg

SEQ ID NO: 2946 - DNA, 1421 bp, unidentified
  source 1..1421: mol_type = unassigned DNA; note = Rickettsia asembonensis
aacgaacgctatcggtatgcttaacacatgcaagtcggacggactaattggggcttgctccaattagttagtggcagacgggtgagtaacacgtgggaatctgcccatcagtacggaataacttttagaaataaaagctaataccgtatattctctacggaggaaagatttatcgctgatggatgagcccgcgtcagattaggtagttggtgaggtaacggctcactaagccgacgatctgtagctggtctgagaggatgatcagccacactgggactgagacacggcccagactcctacgggaggcagcagtggggaatattggacaatgggcgaaagcctgatccagcaataccgagtgagtgatgaaggccttagggttgtaaagctcttttagcaaggaagataatgacgttacttgcagaaaaagccccggctaactccgtgccagcagccgcggtaagacggagggggctagcgttgttcggaattactgggcgtaaagagtgcgtaggcggtttagtaagttggaagtgaaagcccggggcttaacctcggaattgctttcaaaactactaatctagagtgtagtaagggatgatggaattcctagtgtagaggtgaaattcttagatattaggaggaacaccggtggcgaaggcggtcatctgggctacaactgacgctgatgcacgaaagcgtggggagcaaacaggattagataccctggtagtccacgccgtaaacgatgagtgctagatatcggaagattctctttcggtttcgcagctaacgcattaagcactccgcctggggagtacggtcgcaagattaaaactcaaaggaattgacgggggctcgcacaagcggtggagcatgcggtttaattcgatgttacgcgaaaaaccttaccaacccttgacatggtggttgcggatcgcagagatgctttccttcagctcggctggaccacacacaggtgttgcatggctgtcgtcagctcgtgtcgtgagatgttgggttaagtcccgcaacgagcgcaaccctcattcttatttgccagcgggtaatgccgggaactataagaaaactgccggtgataagctggaggaaggtggggacgacgtcaagtcatcatggcccttacgggttgggctacacgcgtgctacaatggtgtttacagagggaagcaagacggcgacgtggagtaaatccctaaaagacatctcagttcggattgttctctgcaactcgagagcatgaagttggaatcgctagtaatcgcggatcagcatgccgcggtgaatacgttctcgggccttgtacacactgcccgtcacgccatgggagttggttttacctgaaggtggtgagctaacgcaagaggcagccaaccacggtaaaattagcgactggggtg

SEQ ID NO: 2947 - DNA, 1421 bp, Rickettsia asiatica
  source 1..1421: mol_type = unassigned DNA
aacaaacgctatcggtatgcttaacacatgcaagtcgaacggactaattggggcttgctccaattagttagtggcagacgggtgagtaacacgtgggaatctacccatcagtacggaataacttttagaaataaaagctaataccatatattctctatggaggaaagatttatcgctgatggatgagcccgcgtcagattaggtagttggtgaggtaacggctcaccaagccaacgatctgtagctggtctgagaggatgatcagccacactgggactgagacacggcccatactcctacgggaggcagcagtggggaatattggacaatgggcgaaagcctgatccagcaataccgagtgagtgatgaaggccttaaggttgtaaagctcttttagcaaggaagataatgacgttacttgcagaaaaagtcccggctaactccgtgccagcagccgcggtaatacggagggggctagcgttgttcggaattactgggcgtaaagagtgcgtaggcggtttagtaagttggaagtgaaagcccggggcttaacctcggaattgctttcaaaactactaatctagagtgtagtaggggatgatggaattcctagtgtagaggtgaaattcttagatattaggaggaacaccggtggcgaaggcgatcatctgggctacaactgacgctgatgcacgaaagcgtggggagcaaacaggattagataccctggtagtccacgccgtaaacgatgagtgctagatatcggaagattctctttcggtttcgcagctaacgcattaagcactccgcctggggagtacggtcgcaagattaaaactcaaaggaattgacgggggctcgcacaagcggtggagcatgcggtttaattcgatgttacgcgaaaaaccttaccaacccttgacatggtggttgcggatcgcagagatgctttccttcagctcggctggaccacacacaggtgttgcatggctgtcgtcagctcgtgtcgtgagatgttgggttaagtcccgcaacgagcgcaaccctcgttcttatttgccagcgggtaatgccgggaactataagaaaactgccggtgataagccggaggaaggtggggatgacgtcaagtcatcatggcccttacgggttgggctacacgcgtgctacaatggtgtttacagagggaagcaagacggcgacgtggagcaaatccctaaaagacatctcagttcggattgttctctgcaactcgagagcatgaagttggaatcgctagtaatcgcggatcagcatgccgcggtgaatacgttctcgggccttgtacacactgcccgtcacgccaagggaattggttttacctgaaggtggtgagctaacgcaagaggcagccaaccacggtaaaattagcgactggggtg

SEQ ID NO: 2948 - DNA, 1422 bp, Rickettsia australis
  source 1..1422: mol_type = unassigned DNA
aacgaacgctatcggtatgcttaacacatgcaagtcggacggactaattgggggtttactctaattagttagtggcagacgggtgagtaacacgtgggaatctgcccatcagtacggaataacttttagaaataaaagctaataccgtatattctctacggaggaaagatttatcgctgatggatgagcccgcgtcagattaggtagttggtgaggtaacggctcaccaagccgacgatctgtagctggtctgagaggatgatcagccacactgggactgagacacggcccagactcctacgggaggcagcagtggggaatattggacaatgggcgaaagcctgatccagcaataccgagtgagtgatgaaggccctagggttgtaaagctcttttagcaaggaagataatgacgttacttgcagaaaaagccccggctaactccgtgccagcagccgcggtaagacggagggggctagcgttgttcggaattactgggcgtaaagagtgcgtaggcggtttagtaagttggaagtgaaagcccggggcttaacctcggaattgctttcaaaactactaatctagagtgtagtaggggatgatggaattcctagtgtagaggtgaaattcttagatattaggaggaacaccggtggcgaaggcggtcatctgggctacaactgacgctgatgcacgaaagcgtggggagcaaacaggattagataccctggtagtccacgccgtaaacgatgagtgctagatatcggaagattttctttcggtttcgcagctaacgcattaagcactccgcctggggagtacggtcgcaagattaaaactcaaaggaattgacgggggctcgcacaagcggtggagcatgcggtttaattcgatgttacgcgaagaaccttaccaacccttgacatggtggttgcggatcgcagagatgctttccttcagctcggctggaccacacacaggtgttgcatggctgtcgtcagctcgtgtcgtgagatgttgggttaagtcccgcaacgagcgcaaccctcattcttatttgccagcgggtaatgccgggaactataagaaaactgccggtgataagccggaggaaggtggggacgacgtcaagtcatcatggcccttacgggttgggctacacgcgtgctacaatggtgtttacagagggaagcaagacggcgacgtggagcaaatccctaaaagacatctcagttcggattgttctctgcaactcgagagcatgaagttggaatcgctagtaatcgcggatcagcatgccgcggtgaatacgttctcgggccttgtacacactgcccgtcacgccatgggagttggttttacctgaaggtggtgagctaacgcaagaggcagccaaccacggtaaaattagcgactggggtg

SEQ ID NO: 2949 - DNA, 1421 bp, Rickettsia bellii
  source 1..1421: mol_type = unassigned DNA
aacgaacgctatcggtatgcttaacacatgcaagtcgaacggactaattggggcttgctccaattagttagtggcagacgggtgagtaacacgtgggaatctgcccatcagtacggaataacttttagaaataaaagctaataccgtatattctctacggaggaaagatttatcgctgatggatgagcccgcgtcagattaggtagttggtgaggtaatggctcaccaagcctacgatctgtagctggtctgagaggatgatcagccacactgggactgagacacggcccagactcctacgggaggcagcagtggggaatattggacaatgggcgaaagcctgatccagcaataccgagtgagtgatgaaggccctagggttgtaaagctcttttagcaaggaagataatgacgttacttgcagaaaaagccccggctaactccgtgccagcagccgcggtaagacggagggggctagcgttgttcggaattactgggcgtaaagagtgcgtaggcggtttagtaagttggaagtgaaagcccggggcttaacctcggaattgctttcaaaactactaatctagagtgtagtaggggatgatggaattcctagtgtagaggtgaaattcttagatattaggaggaacaccggtggcgaaggcggtcatctgggctacaactgacgctgatgcacgaaagcgtggggagcaaacaggattagataccctggtagtccacgccgtaaacgatgagtgctagatattgggagattttctctcggtttcgcagctaacgcattaagcactccgcctggggagtacggtcgcaagattaaaactcaaaggaattgacgggggctcgcacaagcggtggagcatgcggtttaattcgatgttacgcgaaaaaccttaccaacccttgacatggtggtcgcggatcgcagagatgctttccttcagttcggctggaccacacacaggtgttgcatggctgtcgtcagctcgtgtcgtgagatgttgggttaagtcccgcaacgagcgcaaccctcattcttatttgccagcgggtaatgccgggaactataagaaaactgccggtgataagccggaggaaggtggggacgacgtcaagtcatcatggcccttacgggttgggctacacgcgtgctacaatggtgtttacagagggaagcaagacggcgacgtggagcaaatccctaaaagacatctcagttcggattgttctctgcaactcgagagcatgaagttggaatcgctagtaatcgcggatcagcatgccgcggtgaatacgttctcgggccttgtacacactgcccgtcacgccatgggagttggttttacctgaaggtggtgagctaacgcaagaggcagccaaccacggtaaaattagcgactggggtg

SEQ ID NO: 2950 - DNA, 1421 bp, unidentified
  source 1..1421: mol_type = unassigned DNA; note = Rickettsia buchneri
aacgaacgctatcggtatgcttaacacatgcaagtcgaacggactaattggggcttgctccaattagttagtggcagacgggtgagtaacacgtgggaatctacccatcagtacggaataacttttagaaataaaagctaataccgtatattctctacggaagaaagatttatcgctgatggatgagcccgcgtcagattaggtcgttggtgaggtaacggctcaccaagccgacgatctgtagctggtctgagaggatgatcagccacactgggactgagacacggcccagactcctacgggaggcagcagtggggaatattggacaatgggcgaaagcctgatccagcaataccgagtgagtgatgaaggccttagggttgtaaagctcttttagcaaggaagataatgacgttacttgcagaaaaagccccggctaactccgtgccagcagccgcggtaagacggagggggctagcgttgttcggaattactgggcgtaaagagtgcgtaggcggtttagtaagttggaagtgaaagcccggggcttaacctcggaattgctttcaaaactactaatctagagtgtagtaggggatgatggaattcctagtgtagaggtgaaattcttagatattaggaggaacaccggtggcgaaggcggtcatctgggctacaactgacgctaatgcacgaaagcgtggggagcaaacaggattagataccctggtagtccacgccgtaaacgatgagtgctagatatcggaagattctctttcggtttcgcagctaacgcattaagcactccgcctggagagtacggtcgcaagattaaaactcaaaggaattgacgggggctcgcacaagcggtggagcatgcggtttaattcgatgttacgcgaaaaaccttaccaacccttgacatggtggtcgcggattgcagagatacttttcttcagctcggctggaccacacacaggtgttgcacggctgtcgtcagctcgtgtcgtgagatgttgggttaagtcccgcaacgagcgcaaccctcattcttatttgccagcgggtaatgccgggaactataagaaaactgctggtgataagccagaggaaggtggggacgacgtcaagtcatcatggcccttacgggttgggctacacgcgtgctacaatggtgtttacagagggaagcaagacggcgacgtggagcaaatccctaaaagacatctcagttcggattgttctctgcaactcgagagcatgaagttggaatcgctagtaatcgcggatcagcatgccgcggtgaatacgttctcgggccttgtacacactgcccgtcacgccatgggagttggttttacctgaaggtggtgagctaacgcaagaggcagccaaccacggtaaaattagcgactggggtg

SEQ ID NO: 2951 - DNA, 1421 bp, Rickettsia canadensis
  source 1..1421: mol_type = unassigned DNA
aacgaacgctatcggtatgcttaacacatgcaagtcgaacggactaattagggcttgctctaattagttagtggcagacgggtgagtaacacgtgggaatctgcccatcagtacggaataacttttagaaataaaagctaataccgtatattctctacagaggaaagatgtatcgctgatggatgagcccgcgtcagattaggtagttggtgaggtaatggctcaccaagccaacgatctgtagctggtctgagaggatgatcagccacactgggactgagacacggcccagactcctacgggaggcagcagtggggaatattggacaatgggcgaaagcctgatccagcaataccgagtgagtgatgaaggccttagggttgtaaagctcttttagcaaggaagataatgacgttacttgcagaaaaagccccggctaactccgtgccagcagccgcggtaagacggagggggctagcgttgttcggaattactgggcgtaaagagtgcgtaggcggtttagtaagttggaagtgaaagcccggggcttaacctcggaattgctttcaaaactactaatctagagtgtagtaggggatgatggaattcctagtgtagaggtgaaattcttagatattaggaggaacaccggtggcgaaggcgatcatctaggctataactgacgctgatgcacgaaagcgtggggagcaaacaggattagataccctggtagtccacgccgtaaacgatgagtgctagatatcgggagaatatctctcggtttcgcagctaacgcattaagcactccgcctggggagtacggtcgcaagattaaaactcaaaggaattgacgggggctcgcacaagcggtggagcatgcggtttaattcgatgttacgcgaaaaaccttaccaacccttgacatggtggtcgcggattgcagagatgctttccttcagttcggctggaccacacacaggtgttgcatggctgtcgtcagctcgtgtcgtgagatgttgggttaagtcccgcaacgagcgcaaccctcattcttatttgccagcggataatgccgggaactataagaaaactgccagtgataagctggaggaaggtggggacgacgtcaagtcatcatggcccttacgggttgggctacacgcgtgctacaatggtgtttacagagggaagcaaaacggcgacgtggagcaaatccctaaaagacatctcagttcggattgttctctgcaactcgagagcatgaagttggaatcgctagtaatcgcggatcagcatgccgcggtgaatacgttctcgggccttgtacacactgcccgtcacgccatgggagttggttttacctgaaggtggtgagctaacgcaagaggcagccaaccacggtaaaattagcgactggggtg

SEQ ID NO: 2952 - DNA, 1421 bp, Rickettsia conorii
  source 1..1421: mol_type = unassigned DNA
aacgaacgctatcggtatgcttaacacatgcaagtcgaacggactaattggggcttgctccagttagttagtggcagacgggtgagtaacacgtgggaatctacccattagtacggaataacttttagaaataaaagctaataccgtatattctctgcggaggaaagatttatcgctgatggatgagcccgcgtcagattaggtagttggtgaggtaatggctcaccaagccgacgatctgtagctggtctgagaggatgatcagccacactgggactgagacacggcccagactcctacgggaggcagcagtggggaatattggacaatgggcgaaagcctgatccagcaataccgagtgagtgatgaaggccttagggttgtaaagctcttttagcaaggaagataatgacgttacttgcagaaaaagccccggctaactccgtgccagcagccgcggtaagacggagggggctagcgttgttcggaattactgggcgtaaagagtgcgtaggcggtttagtaagttggaagtgaaagcccggggcttaacctcggaattgctttcaaaactactaatctagagtgtagtaggggatgatggaattcctagtgtagaggtgaaattcttagatattaggaggaacaccggtggcgaaggcggtcatctgggctacaactgacgctgatgcacgaaagcgtggggagcaaacaggattagataccctggtagtccacgccgtaaacgatgagtgctagatatcggaagattctctttcggtttcgcagctaacgcattaagcactccgcctggggagtacggtcgcaagattaaaactcaaaggaattgacgggggctcgcacaagcggtggagcatgcggtttaattcgatgttacgcgaaaaaccttaccaacccttgacatggtggtcgcggatcgcagagatgcttttcttcagctcggctggaccacacacaggtgttgcatggctgtcgtcagctcgtgtcgtgagatgttgggttaagtcccgcaacgagcgcaaccctcattcttatttgccagcgggtaatgccgggaactataagaaaactgccggtgataagccggaggaaggtggggacgacgtcaagtcatcatggcccttacgggttgggctacacgcgtgctacaatggtgtttacagagggaagcaagacggcgacgtggagcaaatccctaaaagacatctcagttcggattgttctctgcaactcgagagcatgaagttggaatcgctagtaatcgcggatcagcatgccgcggtgaatacgttctcgggccttgtacacactgcccgtcacgccatgggagttagttttacctgaaggtggtgagctaacgcaagaggcagccaaccacggtaaaattagcgactggggtg

SEQ ID NO: 2953 - DNA, 1421 bp, Rickettsia felis
  source 1..1421: mol_type = unassigned DNA
aacgaacgctatcggtatgcttaacacatgcaagtcggacggactaattggggcttgctccaattagttagtggcagacgggtgagtaacacgtgggaatctgcccatcagtacggaataacttttagaaataaaagctaataccgtatattctctacagaggaaagatttatcgctgatggatgagcccgcgtcagattaggtagttggtgaggtaacggctcaccaagccgacgatctgtagctggtctgagaggatgatcagccacactgggactgagacacggcccagactcctacgggaggcagcagtggggaatattggacaatgggcgaaagcctgatccagcaataccgagtgagtgatgaaggccctagggttgtaaagctcttttagcaaggaagataatgacgttacttgcagaaaaagccccggctaactccgtgccagcagccgcggtaagacggagggggctagcgttgttcggaattactgggcgtaaagagtgcgtaggcggtttagtaagttggaagtgaaagcccggggcttaacctcggaattgctttcaaaactactaatctagagtgtagtaggggatgatggaattcctagtgtagaggtgaaattcttagatattaggaggaacaccggtggcgaaggcggtcatctgggctacaactgacgctgatgcacgaaagcgtggggagcaaacaggattagataccctggtagtccacgccgtaaacgatgagtgctagatatcggaagattctctttcggtttcgcagctaacgcattaagcactccgcctggggagtacggtcgcaagattaaaactcaaaggaattgacgggggctcgcacaagcggtggagcatgcggtttaattcgatgttacgcgaaaaaccttaccaacccttgacatggtggtcgcggatcgcagagatgctttccttcagctcggctggaccacacacaggtgttgcatggctgtcgtcagctcgtgtcgtgagatgttgggttaagtcccgcaacgagcgcaaccctcattcttatttgccagcgggtaatgccgggaactataagaaaactgccggtgataagccggaggaaggtggggacgacgtcaagtcatcatggcccttacgggttgggctacacgcgtgctacaatggtgtttacagagggaagcaagacggcgacgtggagcaaatccctaaaagacatctcagttcggattgttctctgcaactcgagagcatgaagttggaatcgctagtaatcgcggatcagcatgccgcggtgaatacgttctcgggccttgtacacactgcccgtcacgccatgggagttggttttacctgaaggtggtgagctaacgcaagaggcagccaaccacggtaaaattagcgactggggtg

SEQ ID NO: 2954 - DNA, 1421 bp, Rickettsia heilongjiangensis
  source 1..1421: mol_type = unassigned DNA
aacgaacgctatcggtatgcttaacacatgcaagtcgaacggactaattggggcttgctccaattagttagtggcagacgggtgagtaacacgtgggaatctacccatcagtacggaataacttttagaaataaaagctaataccgtatattctctgcggaggaaagatttattgctgatggatgagcccgcgtcagattaggtagttggtgaggtaatggctcaccaagccgacgatctgtagctggtctgagaggatgatcagccacactgggactgagacacggcccagactcctacgggaggcagcagtggggaatattggacaatgggcgaaagcctgatccagcaataccgagtgagtgatgaaggccttagggttgtaaagctcttttagcaaggaagataatgacgttacttgcagaaaaagccccggctaactccgtgccagcagccgcggtaagacggagggggctagcgttgttcggaattactgggcgtaaagagtgcgtaggcggtttagtaagttggaagtgaaagcccggggcttaacctcggaattgctttcaaaactactaatctagagtgtagtaggggatgatggaattcctagtgtagaggtgaaattcttagatattaggaggaacaccggtggcgaaggcgatcatctgggctacaactgacgctgatgcacgaaagcgtggggagcaaacaggattagataccctggtagtccacgccgtaaacgatgagtgctagatatcggaagattctctttcggtttcgcagctaacgcattaagcactccgcctggggagtacggtcgcaagattaaaactcaaaggaattgacgggggctcgcacaagcggtggagcatgcggtttaattcgatgttacgcgaaaaaccttaccaacccttgacatggtggtcgcggatcgcagagatgcttttcttcagctcggctggatcacacacaggtgttgcatggctgtcgtcagctcgtgtcgtgagatgttgggttaagtcccgcaacgagcgcaaccctcattcttatttgccagcgggtaatgccgggaactataagaaaactgccggtgataagccggaggaaggtggggacgacgtcaagtcatcatggcccttacgggttgggctacacgcgtgctacaatggtgtttacagagggaagcaagacggtgacgtggagcaaatccctaaaagacatctcagttcggattgttctctgcaactcgagagcatgaagttggaatcgctagtaatcgcggatcagcatgccgcggtgaatacgttctcgggccttgtacacactgcccgtcacgccatgggagttggttttacctgaaggtggtgagctaacgcaagaggcagccaaccacggtaaaattagcgactggggtg

SEQ ID NO: 2955 - DNA, 1421 bp, Rickettsia helvetica
  source 1..1421: mol_type = unassigned DNA
aacaaacgctatcggtatgcttaacacatgcaagtcgaacggactaattggggcttgttccagttagttagtggcagacgggtgagtaacacgtgggaatctacccatcagtatggaataacttttagaaataaaagctaataccatatattctctatggaggaaagatttatcgctgatggatgagcccgcgtcagattaggtagttggtgaggtaacggctcaccaagccgacgatctgtagctggtctgagaggatgatcagccacactgggactgagacacggcccagactcctacgggaggcagcagtggggaatattggacaatgggcgaaagcctgatccagcaataccgagtgagtgatgaaggccttagggttgtaaagctcttttagcaaggaagataatgacgttacttgcagaaaaagccccggctaactccgtgccagcagccgcggtaagacggagggggctagcgttgttcggaattactgggcgtaaagagtgcgtaggcggtttagtaagttggaagtgaaagcccggggcttaacctcggaattgctttcaaaactactaatctagagtgtagtaggggatgatggaattcctagtgtagaggtgaaattcttagatattaggaggaacaccggtggcgaaggcgatcatctgggctacaactgacgctgatgcacgaaagcgtggggagcaaacaggattagataccctggtagtccacgccgtaaacgatgagtgctagatatcggaagattctctttcggtttcgcagctaacgcattaagcactccgcctggggagtacggtcgcaagattaaaactcaaaggaattgacgggggctcgcacaagcggtggagcatgcggtttaattcgatgttacgcgaaaaaccttaccaacccttgacatggtggtcgcggatcgcagagatgctttccttcagctcggctggaccacacacaggtgttgcatggctgtcgtcagctcgtgtcgtgagatgttgggttaagtcccgcaacgagcgcaaccctcattcttatttgccagcgggtaatgccaggaactataagaaaactgccggtgataagccggaggaaggtggggacgacgtcaagtcatcatggcccttacgggttgggctacacgcgtgctacaatggtgtttacagagggaagcaagacggcgacgtggagcaaatccctaaaagacatctcagttcggattgttctctgcaactcgagagcatgaagttggaatcgctagtaatcgcggatcagcatgccgcggtgaatacgttctcgggccttgtacacactgcccgtcacgccatgggagttggttttacctgaaggtggtgagctaacgcaagaggcagccaaccacggtaaaattagcgactggggtg

SEQ ID NO: 2956 - DNA, 1421 bp, Rickettsia honei
  source 1..1421: mol_type = unassigned DNA
aacgaacgctatcggtatgcttaacacatgcaagtcgaacggattaattggggcttgctccaattagttagtggcagacgggtgagtaacacgtgggaatctacccatcagtacggaataacttttagaaataaaagctaataccgtatattctctgcggaggaaagatttatcgctgatggatgagcccgcgtcagattaggtagttggtgaggtaatggctcaccaagccgacgatctgtagctggtctgagaggatgatcagccacactgggactgagacacggcccagactcctacgggaggcagcagtggggaatattggacaatgggcgaaagcctgatccagcaataccgagtgagtgatgaaggccttagggttgtaaagctcttttagcaaggaagataatgacgttacttgcagaaaaagccccggctaactccgtgccagcagccgcggtaagacggagggggctagcgttgttcggaattactgggcgtaaagagtgcgtaggcggtttagtaagttggaagtgaaagcccggggcttaacctcggaattgctttcaaaactactagtctagagtgtagtaggggatgatggaattcctagtgtagaggtgaaattcttagatattaggaggaacaccagtggcgaaggcggtcatctgggctacaactgacgctgatgcacgaaagcgtggggagcaaacaggattagataccctggtagtccacgccgtaaacgatgagtgctagatatcggaagattctctttcggtttcgcagctaacgcattaagcactccgcctggggagtacggtcgcaagattaaaactcaaaggaattgacgggggctcgcacaagcggtggagcatgcggtttaattcgatgttacgcgaaaaaccttaccaacccttgacatggtggtcgcggatcgcagagatgcttttcttcagctcggctggaccacacacaggtgttgcatggctgtcgtcagctcgtgtcgtgagatgttgggttaagtcccgcaacgagcgcaaccctcattcttatttgccagcgggtaatgccgggaactataagaaaactgccggtgataagccggaggaaggtggggacgacgtcaagtcatcatggcccttacgggttgggctacacgcgtgctacaatggtgtttacagagggaagcaagacggcgacgtggagcaaatccctaaaagacatctcagttcggattgttctctgcaactcgagagcatgaagttggaatcgctagtaatcgcggatcagcatgccgcggtgaatacgttctcgggccttgtacacactgcccgtcacgccatgggagttagttttacctgaaggtggtgagctaacgcaagaggcagccaaccacggtaaaattagcgactggggtg

SEQ ID NO: 2957 - DNA, 1421 bp, Rickettsia japonica
  source 1..1421: mol_type = unassigned DNA
aacgaacgctatcggtatgcttaacacatgcaagtcgaacggactaattggggcttgctccaattagttagtggcagacgggtgagtaacacgtgggaatctacccatcagtacggaataacttttagaaataaaagctaataccgtatattctctgcggaggaaagatttattgctgatggatgagcccgcgtcagattaggtagttggtgaggtaatggctcaccaagccgacgatctgtagctggtctgagaggatgatcagccacactgggactgagacacggcccagactcctacgggaggcagcagtggggaatattggacaatgggcgaaagcctgatccagcaataccgagtgagtgatgaaggccttagggttgtaaagctcttttagcaaggaagataatgacgttacttgcagaaaaagccccggctaactccgtgccagcagccgcggtaagacggagggggctagcgttgttcggaattactgggcgtaaagagtgcgtaggcggtttagtaagttggaagtgaaagcccggggcttaacctcggaattgctttcaaaactactaatctagagtgtagtaggggatgatggaattcctagtgtagaggtgaaattcttagatattaggaggaacaccggtggcgaaggcgatcatctgggctacaactgacgctgatgcacgaaagcgtggggagcaaacaggattagataccctggtagtccacgccgtaaacgatgagtgctagatatcggaagattctctttcggtttcgcagctaacgcattaagcactccgcctggggagtacggtcgcaagattaaaactcaaaggaattgacgggggctcgcacaagcggtggagcatgcggtttaattcgatgttacgcgaaaaaccttaccaacccttgacatggtggtcgcggatcgcagagatgcttttcttcagctcggctggatcacacacaggtgttgcatggctgtcgtcagctcgtgtcgtgagatgttgggttaagtcccgcaacgagcgcaaccctcattcttatttgccagcgggtaatgccgggaactataagaaaactgccggtgataagccggaggaaggtggggacgacgtcaagtcatcatggcccttacgggttgggctacacgcgtgctacaatggtgtttacagagggaagcaagacggcgacgtggagcaaatccctaaaagacatctcagttcggattgttctctgcaactcgagagcatgaagttggaatcgctagtaatcgcggatcagcatgccgcggtgaatacgttctcgggccttgtacacactgcccgtcacgccatgggagttggttttacctgaaggtggtgagctaacgcaagaggcagccaaccacggtaaaattagcgactggggtg

SEQ ID NO: 2958 - DNA, 1421 bp, Rickettsia massiliae
  source 1..1421: mol_type = unassigned DNA
aacgaacgctatcggtatgcttaacacatgcaagtcgaacggactaattggggcttgctctaattagttagtggcagacgggtgagtaacacgtgggaatctacccatcagtacggaataacttttagaaataaaagctaataccgtatattctctacggaggaaagatttatcgctgatggatgagcccgcgtcagattaggtagttggtgaggtaatggctcaccaagccgacgatctgtagctggtctgagaggatgatcagccacactgggactgagacacggcccagactcctacgggaggcagcagtggggaatattggacaatgggcgaaagcctgatccagcaataccgagtgagtgatgaaggccttagggttgtaaagctcttttagcaaggaagataatgacgttacttgcagaaaaagccccggctaactccgtgccagcagccgcggtaagacggagggggctagcgttgttcggaattactgggcgtaaagagtgcgtaggcggtttagtaagttggaagtgaaagcccggggcttaacctcggaattgctttcaaaactactaatctagagtgtagtaggggatgatggaattcctagtgtagaggtgaaattcttagatattaggaggaacaccggtggcgaaggcggtcatctgggctacaactgacgctgatgcacgaaagcgtggggagcaaacaggattagataccctggtagtccacgccgtaaacgatgagtgctagatatcggaagattctctttcggtttcgcagctaacgcattaagcactccgcctggggagtacggtcgcaagattaaaactcaaaggaattgacgggggctcgcacaagcggtggagcatgcggtttaattcgatgttacgcgaaaaaccttaccaacccttgacatggtggtcgcggatcgcagagatgcttttcttcagctcggctggaccacacacaggtgttgcatggctgtcgtcagctcgtgtcgtgagatgttgggttaagtcccgcaacgagcgcaaccctcattcttatttgccagcgggtaatgccgggaactataagaaaactgccggtgataagccggaggaaggtggggatgacgtcaagtcatcatggcccttacgggttgggctacacgcgtgctacaatggtgtttacagagggaagcaagacggcgacgtggagcaaatccctaaaagacatctcagttcggattgttctctgcaactcgagagcatgaagttggaatcgctagtaatcgcggatcagcatgccgcggtgaatacgttctcgggccttgtacacactgcccgtcacgccatgggagttggttttacctgaaggtggtgagctaacgcaagaggcagccaaccacggtaaaattagcgactggggtg

SEQ ID NO: 2959 - DNA, 1421 bp, unidentified
  source 1..1421: mol_type = unassigned DNA; note = Rickettsia monacensis
aacgaacgctatcggtatgcttaacacatgcaagtcgaacggactaattggggcttgctccaattagttagtggcagacgggtgagtaacacgtgggaatctacccatcagtacggaataacttttagaaataaaagctaataccgtatattctctacggaaaaaagatttatcgctgatggatgagcccgcgtcagattaggtagttggtgaggtaacggctcaccaagccgacgatctgtagctggtctgagaggatgatcagccacactgggactgagacacggcccagactcctacgggaggcagcagtggggaatattggacaatgggcgaaagcctgatccagcaataccgagtgagtgatgaaggccttagggttgtaaagctcttttagcaaggaagataatgacgttacttgcagaaaaagccccggctaactccgtgccagcagccgcggtaagacggagggggctagcgttgttcggaattactgggcgtaaagagtgcgtaggcggtttagtaagttggaagtgaaagcccggggcttaacctcggaattgctttcaaaactactaatctagagtgtagtaggggatgatggaattcctagtgtagaggtgaaattcttagatattaggaggaacaccggtggcgaaggcggtcatctgggctacaactgacgctaatgcacgaaagcgtggggagcaaacaggattagataccctggtagtccacgccgtaaacgatgagtgctagatatcggaagattctctttcggtttcgcagctaacgcattaagcactccgcctggagagtacggtcgcaagattaaaactcaaaggaattgacgggggctcgcacaagcggtggagcatgcggtttaattcgatgttacgcgaaaaaccttaccaacccttgacatggtggtcgcggatcgcagagatgctttccttcagctcggctggaccgcacacaggtgttgcacggctgtcgtcagctcgtgtcgtgagatgttgggttaagtcccgcaacgagcgcaaccctcattcttatttgccagcgggtaatgccgggaactataagaaaactgctggtgataagccagaggaaggtggggacgacgtcaagtcatcatggcccttacgggttgggctacacgcgtgctacaatggtgtttacagagggaagcaagacggcgacgtggagcaaatccctaaaagacatctcagttcggattgttctctgcaactcgagagcatgaagttggaatcgctagtaatcgcggatcagcatgccgcggtgaatacgttctcgggccttgtacacactgcccgtcacgccatgggagttggttttacctgaaggtggtgagctaacgcaagaggcagccaaccacggtaaaattagcgactggggtg

SEQ ID NO: 2960 - DNA, 1421 bp, Rickettsia montanensis
  source 1..1421: mol_type = unassigned DNA
aacgaacgctatcggtatgcttaacacatgcaagtcgaacggactaattggagcttgctccaattagttagtggcagacgggtgagtaacgcgtgggaatctacccatcagtacggaataacttttagaaataaaagctaataccgtatattctctacggaggaaaggtttatcgctgatggatgagcccgcgtcagattaggtagttggtgaggtaatggctcaccaagccgacgatctgtagctggtctgagaggatgatcagccacactgggactgagacacggcccagactcctacgggaggcagcagtggggaatattggacaatgggcgaaagcctgatccagcaataccgagtgagtgatgaaggccttagggttgtaaagctcttttagcagggaagataatgacgttacttgcagaaaaagccccggctaactccgtgccagcagccgcggtaagacggagggggctagcgttgttcggaattactgggcgtaaagagtgcgtaggcggtttagtaagttggaagtgaaagcccggggcttaacctcggaattgctttcaaaactactaatctagagtgtagtaggggatgatggaattcctagtgtagaggtgaaattcttagatattaggaggaacaccggtggcgaaggcggtcatctgggctgcaactgacgctgatgcacgaaagcgtggggagcaaacaggattagataccctggtagtccacgccgtaaacgatgagtgctagatatcggaagattctctttcggtttcgcagctaacgcattaagcactccgcctggggagtacggtcgcaagattaaaactcaaaggaattgacgggggctcgcacaagcggtggagcatgcggtttaattcgatgttacgcgaaaaaccttaccaacccttgacatggtggtcgtgaatcgcagagatgcttttcttcagctcggctggaccacacacaggtgttgcatggctgtcgtcagctcgtgtcgtgagatgttgggttaagtcccgcaacgagcgcaaccctcattcttatttgccagcgggtaatgccgggaactataagaaaactgccggtgataagccggaggaaggtggggacgacgtcaagtcatcatggcccttacgggttgggctacacgcgtgctacaatggtgtttacagagggaagcaagacggcgacgtggagcaaatccctaaaagacatctcagttcggattgttctctgcaactcgagagcatgaagttggaatcgctagtaatcgcggatcagcatgccgcggtgaatacgttctcgggccttgtacacactgcccgtcacgccatgggagttggttttacctgaaggtggtgagctaacgcaagaggcagccaaccacggtaaaattagcgactggggtg

SEQ ID NO: 2961 - DNA, 1422 bp, Rickettsia parkeri
  source 1..1422: mol_type = unassigned DNA
  misc_difference 790: note = n is a, c, g, or t
  misc_difference 829: note = n is a, c, g, or t
  misc_difference 954: note = n is a, c, g, or t
aacgaacgctatcggtatgcttaacacatgcaagtcgaacggactaatttggggcttgctccaattagttagtggcagacgggtgagtaacacgtgggaatctacccattagtacggaataacttttagaaataaaagctaataccgtatattctctgcggaggaaagatttatcgctgatggatgagcccgcgtcagattaggtagttggtgaggtaatagctcaccaagccgacgatctgtagctggtctgagaggatgatcagccacactgggactgagacacggcccagactcctacgggaggcagcagtggggaatattggacaatgggcgaaagcctgatccagcaataccgagtgagtgatgaaggccttagggttgtaaagctcttttagcaaggaagataatgacgttacttgcagaaaaagccccggctaactccgtgccagcagccgcggtaagacggagggggctagcgttgttcggaattactgggcgtaaagagtgcgtaggcggtttagtaagttggaagtgaaagcccggggcttaacctcggaattgctttcaaaactactaatctagagtgtagtaggggatgatggaattcctagtgtagaggtgaaattcttagatattaggaggaacaccggtggcgaaggcggtcgtctgggctacaactgacgctgatgcacgaaagcgtggggagcaaacaggattagataccctggtagtccacgccgtaaacgatgagtgctagatatcggaagattctctttcggtttcgcanctaacgcattaagcactccgcctggggagtacggtcgcnagattaaaactcaaaggaattgacgggggctcgcacaagcggtggagcatgcggtttaattcgatgttacgcgaaaaaccttaccaacccttgacatggtggtcgcggatygcagagatgctttnyttcagctcggctggaccacacacaggtgttgcatggctgtcgtcagctcgtgtcgtgagatgttgggttaagtcccgcaacgagcgcaaccctcattcttatttgccagcgggtaatgccgggaactataagaaaactgccggtgagaagccggaggaaggtggggacgacgtcaagtcatcacggcccttacgggttgggctacacgcgtgctacaatggtgtttacagagggaagcaagacggcgacgtggagcaaatccctaaaagacatctcagttcggattgttctctgcaactcgagagcatgaagttggaatcgctagtaatcgcggatcagcatgccgcggtgaatacgttctcgggccttgtacacactgcccgtcacgccatgggagttagttttacctgaaggtggtgagctaacgcaagaggcagccaaccacggtaaaattagcgactggggtg

SEQ ID NO: 2962 - DNA, 1421 bp, Rickettsia peacockii
  source 1..1421: mol_type = unassigned DNA
aacgaacgctatcggtatgcttaacacatgcaagtcgaacggactaattggggcttgctccaattagttagtggcagacgggtgagtaacacgtgggaatctacccatcagtacggaataacttttagaaataaaagctaataccgtatattctctgcggaggaaagatttatcgctgatggatgagcccgcgtcagattaggtagttggtgaggtaatggctcaccaagccgacgatctgtagctggtctgagaggatgatcagccacactgggactgagacacggcccagactcctacgggaggcagcagtggggaatattggacaatgggcgaaagcctgatccagcaataccgagtgagtgatgaaggccttagggttgtaaagctcttttagcaaggaagataatgacgttacttgcagaaaaagccccggctaactccgtgccagcagccgcggtaagacggagggggctagcgttgttcggaattactgggcgtaaagagtgcgtaggcggtttagtaagttggaagtgaaagcccggggcttaacctcggaattgctttcaaaactactaatctagagtgtagtaggggatgatggaattcctagtgtagaggtgaaattcttagatattaggaggaacaccggtggcgaaggcggtcatctgggctacaactgacgctgatgcacgaaagcgtggggagcaaacaggattagataccctggtagtccacgccgtaaacgatgagtgctagatatcggaagattctctttcggtttcgcagctaacgcattaagcactccgcctggggagtacggtcgcaagattaaaactcaaaggaattgacgggggctcgcacaagcggtggagcatgcggtttaattcgatgttacgcgaaaaaccttaccaacccttgacatggtggttgcggatcgcagagatgcttttcttcagctcggctggaccacacacaggtgttgcatggctgtcgtcagctcgtgtcgtgagatgttgggttaagtcccgcaacgagcgcaaccctcattcttatttgccagcgggtaatgccgggaactataagaaaactgccggtgataagccggaggaaggtggggacgacgtcaagtcatcatggcccttacgggttgggctacacgcgtgctacaatggtgtttacagagggaagcaagacggcgacgtggagcaaatccctaaaagatatctcagttcggattgttctctgcaactcgagagcatgaagttggaatcgctagtaatcgcggatcagcatgccgcggtgaatacgttctcgggccttgtacacactgcccgtcacgccatgggagttagttttacctgaaggtggtgagctaacgcaagaggcagccaaccacggtaaaattagcgactggggtg

SEQ ID NO: 2963 - DNA, 1421 bp, Rickettsia prowazekii
  source 1..1421: mol_type = unassigned DNA
aacgaacgctatcggtatgcttaacacatgcaagtcgaacggattaactagagctcgctttagttaattagtggcagacgggtgagtaacacgtgggaatctacccatcagtacggaataacttttagaaataaaagctaataccgtatattctctacggaggaaagatttatcgctgatggatgggcccgcgtcagattaggtagttggtgaggtaatggctcaccaagccgacgatctgtagctggtctgagaggatgatcagccacactgggactgagacacggcccagactcctacgggaggcagcagtggggaatattggacaatgggcgaaagcctgatccagcaataccgagtgagtgatgaaggccttagggttgtaaagctcttttagcaaggaagataatgacgttacttgcagaaaaagccccggctaactccgtgccagcagccgcggtaagacggagggggctagcgttgttcggaattactgggcgtaaagagtgcgtaggcggtttagtaagttggaagtgaaagcccggggcttaacctcggaattgctttcaaaactactaatctagagtgtagtaggggatgatggaattcctagtgtagaggtgaaattcttagatattaggaggaacaccggtggcgaaggcggtcatctgggctacaactgacgctgatgcacgaaagcgtggggagcaaacaggattagataccctggtagtccacgccgtaaacgatgagtgctagatatcggaggattctctttcggtttcgcagctaacgcattaagcactccgcctggggagtacggtcgcaagattaaaactcaaaggaattgacgggggctcgcacaagcggtggagcatgcggtttaattcgatgttacgcgaaaaaccttaccaacccttgacatggtggttacggattgcagagatgctttccttcagttcggctgggccacacacaggtgttgcatggctgtcgtcagctcgtgtcgtgagatgttgggttaagtcccgcaacgagcgcaacccttattcttatttgccagtgggtaatgccgggaactataagaaaactgccggtgataagccggaggaaggtggggacgacgtcaagtcatcatggcccttacgggttgggctacacgcgtgctacaatggtgtttacagagggaagcaatacggtgacgtggagcaaatccctaaaagacatctcagttcggattgttctctgcaactcgagagcatgaagttggaatcgctagtaatcgcggatcagcatgccgcggtgaatacgttctcgggccttgtacacactgcccgtcacgccatgggagttggttttacctgaaggtggtgagctaacgcaagaggcagccaaccacggtaaaattagcgactggggtg

SEQ ID NO: 2964 - DNA, 1421 bp, Rickettsia raoultii
  source 1..1421: mol_type = unassigned DNA
aacgaacgctatcggtatgcttaacacatgcaagtcgaacggactaattggggcttgctccaattagttagtggcagacgggtgagtaacacgtgggaatctacccatcagtacggaataacttttagaaataaaagctaataccgcatattctctacggaggaaagatttatcgctgatggatgagcccgcgtcagattaggtagttggtgaggtaatggcttaccaagccgacgatctgtagctggtctgagaggatgatcagccacactgggactgagacacggcccagactcctacgggaggcagcagtggggaatattggacaatgggcgaaagcctgatccagcaataccgagtgagtgatgaaggccttagggttgtaaagctcttttagcaaggaagataatgacgttacttgcagaaaaagccccggctaactccgtgccagcagccgcggtaagacggagggggctagcgttgttcggaattactgggcgtaaagagtgcgtaggcggtttagtaagttggaagtgaaagcccggggcttaacctcggaattgctttcaaaactactaatctagagtgtagtaggggatgatggaattcctagtgtagaggtgaaattcttagatattaggaggaacaccggtggcgaaggcgatcatctgggctacaactgacgctgatgcacgaaagcgtggggagcaaacaggattagataccctggtagtccacgccgtaaacgatgagtgctagatatcggaagattctctttcggtttcgcagctaacgcattaagcactccgcctggggagtacggtcgcaagattaaaactcaaaggaattgacgggggctcgcacaagcggtggagcatgcggtttaattcgatgttacgcgaaaaaccttaccaacccttgacatggtggtcgcggatcgcagagatgcttttcttcagctcggctggaccacacacaggtgttgcatggctgtcgtcagctcgtgtcgtgagatgttgggttaagtcccgcaacgagcgcaaccctcattcttatttgccagcgggtaatgccgggaactataagaaaactgccggtgataagccggaggaaggtggggacgacgtcaagtcatcatggcccttacgggttgggctacacgcgtgctacaatggtgtttacagagggaagcaagacggcgacgtggagcaaatccctaaaagacatctcagttcggattgttctctgcaactcgagagcatgaagttggaatcgctagtaatcgcggatcagcatgccgcggtgaatacgttctcgggccttgtacacactgcccgtcacgccatgggagttggttttacctgaaggtggtgagctaacgcaagaggcagccaaccacggtaaaattagcgactggggtg

SEQ ID NO: 2965 - DNA, 1421 bp, Rickettsia rhipicephali
  source 1..1421: mol_type = unassigned DNA
aacgaacgctatcggtatgcttaacacatgcaagtcgaacgggctaattggggcttgctccaattagttagtggcagacgggtgagtaacacgtgggaatctacccatcagtacggaataacttttagaaataaaagctaataccgtatattctctacggaggaaagatttatcgctgatggatgagcccgcgtcagattaggtagttggtgaggtaatggctcaccaagccgacgatctgtagctggtctgagaggatgatcagccacactgggactgagacacggcccagactcctacgggaggcagcagtggggaatattggacaatgggcgaaagcctgatccagcaataccgagtgagtgatgaaggccttagggttgtaaagctcttttagcaaggaagataatgacgttacttgcagaaaaagccccggctaactccgtgccagcagccgcggtaagacggagggggctagcgttgttcggaattactgggcgtaaagagtgcgtaggcggtttagtaagttggaagtgaaagcccggggcttaacctcggaattgctttcaaaactactaatctagagtatagtaggggatgatggaattcctagtgtagaggtgaaattcttagatattaggaggaacaccggtggcgaaggcggtcatctgggctacaactgacgctgatgcacgaaagcgtggggagcaaacaggattagataccctggtagtccacgccgtaaacgatgagtgctagatatcggaagattctctttcggtttcgcagctaacgcattaagcactccgcctggggagtacggtcgcaagattaaaactcaaaggaattgacgggggctcgcacaagcggtggagcatgcggtttaattcgatgttacgcgaaaaaccttaccaacccttgacatggtggtcgcggatcgcagagatgcttttcttcagctcggctggaccacacacaggtgttgcatggctgtcgtcagctcgtgtcgtgagatgttgggttaagtcccgcaacgagcgcaaccctcattcttatttgccagcgggtaatgccgggaactataagaaaactgccggtgataagccggaggaaggtggggacgacgtcaagtcatcatggcccttacgggttgggctacacgcgtgctacaatggtgtttacagagggaagcaagacggcgacgtggagcaaatccctaaaagacatctcagttcggattgttctctgcaactcgagagcatgaagttggaatcgctagtaatcgcggatcagcatgccgcggtgaatacgttctcgggccttgtacacactgcccgtcacgccatgggagttggttttacctgaaggtggtaagctaacgcaagaggcagccaaccacggtaaaattagcgactggggtg

SEQ ID NO: 2966 - DNA, 1421 bp, Rickettsia rickettsii
  source 1..1421: mol_type = unassigned DNA
aacgaacgctatcggtatgcttaacacatgcaagtcgaacggactaattggggcttgctccaattagttagtggcagacgggtgagtaacacgtgggaatctacccatcagtacggaataacttttagaaataaaagctaataccgtatattctctgcggaggaaagatttatcgctgatggatgagcccgcgtcagattaggtagttggtgaggtaatggctcaccaagccgacgatctgtagctggtctgagaggatgatcagccacactgggactgagacacggcccagactcctacgggaggcagcagtggggaatattggacaatgggcgaaagcctgatccagcaataccgagtgagtgatgaaggccttagggttgtaaagctcttttagcaaggaagataatgacgttacttgcagaaaaagccccggctaactccgtgccagcagccgcggtaagacggagggggctagcgttgttcggaattactgggcgtaaagagtgcgtaggcggtttagtaagttggaagtgaaagcccggggcttaacctcggaattgctttcaaaactactaatctagagtgtagtaggggatgatggaattcctagtgtagaggtgaaattcttagatattaggaggaacaccggtggcgaaggcggtcatctgggctaccactgacgctgatgcacgaaagcgtggggagcaaacaggattagataccctggtagtccacgccgtaaacgatgagtgctagatatcggaagattctctttcggtttcgcagctaacgcattaagcactccgcctggggagtacggtcgcaagattaaaactcaaaggaattgacgggggctcgcacaagcggtggagcatgcggtttaattcgatgttacgcgaaaaaccttaccaacccttgacatggtggttgcggatcgcagagatgcttttcttcagctcggctggaccacacacaggtgttgcatggctgtcgtcagctcgtgtcgtgagatgttgggttaagtcccgcaacgagcgcaaccctcattcttatttgccagcgggtaatgccgggaactataagaaaactgccggtgataagccggaggaaggtggggacgacgtcaagtcatcatggcccttacgggttgggctacacgcgtgctacaatggtgtttacagagggaagcaagacggcgacgtggagcaaatccctaaaagacatctcagttcggattgttctctgcaactcgagagcatgaagttggaatcgctagtaatcgcggatcagcatgccgcggtgaatacgttctcgggccttgtacacactgcccgtcacgccatgggagttagttttacctgaaggtggtgagctaacgcaagaggcagccaaccacggtaaaattagcgactggggtg

SEQ ID NO: 2967 - DNA, 1422 bp, Rickettsia sibirica
  source 1..1422: mol_type = unassigned DNA
aacgaacgctatcggtatgcttaacacatgcaagtcgaacggactaatttggggcttgctcaatttagttagtggcagacgggtgagtaacacgtgggaatctacccattagtacggaataacttttagaaataaaagctaataccgtatattctctgcggaggaaagatttatcgctgatggatgagcccgcgtcagattaggtagttggtgaggtaatggctcaccaagccgacgatctgtagctggtctgagaggatgatcagccacactgggactgagacacggcccagactcctacgggaggcagcagtggggaatattggacaatgggcgaaagcctgatccagcaataccgagtgagtgatgaaggccttagggttgtaaagctcttttagcaaggaagataatgacgttacttgcagaaaaagccccggctaactccgtgccagcagccgcggtaagacggagggggctagcgttgttcggaattactgggcgtaaagagtgcgtaggcggtttagtaagttgggagtgaaagcccggggcttaacctcggaattgctttcaaaactactaatctagagtgtagtaggggatgatggaattcctagtgtagaggtgaaattcttagatattaggaggaacaccggtggcgaaggcggtcatctgggctacaactgacgctgatgcacgaaagcgtggggagcaaacaggattagataccctggtagtccacgccgtaaacgatgagtgctagatatcggaagattctctttcggtttcgcagctaacgcattaagcactccgcctggggagtacggtcgcaagattaaaactcaaaggaattgacgggggctcgcacaagcggtggagcatgcggtttaattcgatgttacgcgaaaaaccttaccaacccttgacatggtggtcgcggatcgcagagatgcttttcttcagctcggctggaccacacacaggtgttgcatggctgtcgtcagctcgtgtcgtgagatgttgggttaagtcccgcaacgagcgcaaccctcattcttatttgccagcgggtaatgccgggaactataagaaaactgccggtgataagccggaggaaggtggggacgacgtcaagtcatcatggcccttacgggttgggctacacgcgtgctacaatggtgtttacagagggaagcaagacggcgacgtggagcaaatccctaaaagacatctcagttcggattgttctctgcaactcgagagcatgaagttggaatcgctagtaatcgcggatcagcatgccgcggtgaatacgttctcgggccttgtacacactgcccgtcacgccatgggagttagttttacctgaaggtggtgagctaacgcaagaggcagccaaccacggtaaaattagcgactggggtg

SEQ ID NO: 2968 - DNA, 1421 bp, Rickettsia slovaca
  source 1..1421: mol_type = unassigned DNA
aacgaacgctatcggtatgcttaacacatgcaagtcgaacggactaattggggcttgctccaattagttagtggcagacgggtgagtaacacgtgggaatctacccatcagtacggaataacttttagaaataaaagctaataccgtatattctctgcggaggaaagatttatcgctgatggatgagcccgcgtcagattaggtagttggtgaggtaatggctcaccaagccgacgatctgtagctggtctgagaggatgatcagccacactgggactgagacacggcccagactcctacgggaggcagcagtggggaatattggacaatgggcgaaagcctgatccagcaataccgagtgagtgatgaaggccttagggttgtaaagctcttttagcaaggaagataatgacgttacttgcagaaaaagccccggctaactccgtgccagcagccgcggtaagacggagggggctagcgttgttcggaattactgggcgtaaagagtgcgtaggcggtttagtaagttggaagtgaaagcccggggcttaacctcggaattgctttcaaaactactaatctagagtgtagtaggggatgatggaattcctagtgtagaggtgaaattcttagatattaggaggaacaccggtggcgaaggcggtcatctgggctacaactgacgctgatgcacgaaagcgtggggagcaaacaggattagataccctggtagtccacgccgtaaacgatgagtgctagatatcggaagattctctttcggtttcgtagctaacgcattaagcactccgcctggggagtacggtcgcaagattaaaactcaaaggaattgacgggggctcgcacaagcggtggagcatgcggtttaattcgatgttacgcgaaaaaccttaccaacccttgacatggtggtcgcggatcgcagagatgcttttcttcagctcggctggaccacacacaggtgttgcatggctgtcgtcagctcgtgtcgtgagatgttgggttaagtcccgcaacgagcgcaaccctcattcttatttgccagcgggtaatgccgggaactataagaaaactgccggtgataagccggaggaaggtggggacgacgtcaagtcatcatggcccttacgggttgggctacacgcgtgctacaatggtgtttacagagggaagcaagacggcgacgtggagcaaatccctaaaagacatctcagttcggattgttctctgcaactcgagagcatgaagttggaatcgctagtaatcgcggatcagcatgccgcggtgaatacgttctcgggccttgtacacactgcccgtcacgccatgggagttagttttacctgaaggtggtgagctaacgcaagaggcagccaaccacggtaaaattagcgactggggtg

SEQ ID NO: 2969 - DNA, 1421 bp, Rickettsia typhi
  source 1..1421: mol_type = unassigned DNA
aacgaacgctatcggtatgcttaacacatgcaagtcgaacggattaattagagcttgctctagttaattagtggcagacgggtgagtaacacgtgggaatctacccatcagtacggaataacttttagaaataaaagctaataccgtatattctctacggaggaaagatttatcgctgatggatgggcccgcgtcagattaggtagttggtgtggtaatggctcaccaagccgacgatctgtagctggtctgagaggatgatcagccacactgggactgagacacggcccagactcctacgggaggcagcagtggggaatattggacaatgggcgaaagcctgatccagcaataccgagtgagtgatgaaggccttagggttgtaaagctcttttagcaaggaagataatgacgttacttgcagaaaaagccccggctaactccgtgccagcagccgcggtaagacggagggggctagcgttgttcggaattactgggcgtaaagagtgcgtaggtggtttagtaagttggaagtgaaagcccggggcttaacctcggaattgctttcaaaactactaatctagagtgtagtaggggatgatggaattcctagtgtagaggtgaaattcttagatattaggaggaacaccggtggcgaaggcggtcatctgggctacaactgacgctgatgcacgaaagcgtggggagcaaacaggattagataccctggtagtccacgccgtaaacgatgagtgctagatatcggaggattctctttcggtttcgcagctaacgcattaagcactccgcctggggagtacggtcgcaagattaaaactcaaaggaattgacgggggctcgcacaagcggtggagcatgcggtttaattcgatgttacgcgaaaaaccttaccaacccttgacatggtggttatggattgcagagatgctttccttcagttcggctgggccacacacaggtgttgcatggctgtcgtcagctcgtgtcgtgagatgttgggttaagtcccgcaacgagcgcaacccttattcttatttgccagcgggtaatgccgggaactataagaaaactgccggtgataagccggaggaaggtggggacgacgtcaagtcatcatggcccttacgggttgggctacacgcgtgctacaatggtgtttacagagggaagcaagacggtgacgtggagcaaatccctaaaagacatctcagttcggattgttctctgcaactcgagagcatgaagttggaatcgctagtaatcgcggatcagcatgccgcggtgaatacgttctcgggccttgtacacactgcccgtcacgccatgggagttggttttacctgaaggtggtgagctaacgcaagaggcagccaaccacggtaaaattagcgactggggtg

SEQ ID NO: 2970 - DNA, 1453 bp, Rivibacter subsaxonicus
  source 1..1453: mol_type = unassigned DNA
  misc_difference 10: note = n is a, c, g, or t
attgaacgcnggcggcatgccttacacatgcaagtcgaacggcagcacgggagcaatcctggtggcgagtggcgaacgggtgagtaatacatcggaacgtgcccagtagtgggggatagcccggcgaaagccggattaataccgcatacgacctgagggtgaaagcgggggatcgcaagacctcgcgctattggagcggccgatgtcggattagctagttggtggggtaaaggctcaccaaggcaacgatccgtagctggtctgagaggacgaccagccacactgggactgagacacggcccagactcctacgggaggcagcagtggggaattttggacaatgggcgcaagcctgatccagccatgccgcgtgcgggaagaaggccttcgggttgtaaaccgcttttgtcagggaagaaacgcgctgggttaataccttggcgtaatgacggtacctgaagaataagcaccggctaactacgtgccagcagccgcggtaatacgtagggtgcaagcgttaatcggaattactgggcgtaaagcgtgcgcaggcggtcatacaagacagatgtgaaatccccgggctcaacctgggaactgcatttgtgactgtatgactggagtgcggcagagggggatggaattccgcgtgtagcagtgaaatgcgtagatatgcggaggaacaccgatggcgaaggcaatcccctgggcctgcactgacgctcatgcacgaaagcgtggggagcaaacaggattagataccctggtagtccacgccctaaacgatgtcaactagttgttggacggcttgctgttcagtaacgaagctaacgcgtgaagttgaccgcctggggagtacggccgcaaggttgaaactcaaaggaattgacggggacccgcacaagcggtggatgatgtggtttaattcgatgcaacgcgaaaaaccttacctacccttgacatgtcaagaagttaccagagatggtttcgtgctcgaaagagagcttgaacacaggtgctgcatggccgtcgtcagctcgtgtcgtgagatgttgggttaagtcccgcaacgagcgcaacccttgtcattagttgctacgaaagggcactctaatgagactgccggtgacaaaccggaggaaggtggggatgacgtcaggtcctcatggcccttatgggtagggctacacacgtcatacaatggctggtacagagggttgccaacccgcgagggggagccaatcccagaaaaccagtcgtagtccggatcgcagtctgcaactcgactgcgtgaagtctgaatcgctagtaatcgcggatcagcttgccgcggtgaatacgttcccgggtcttgtacacaccgcccgtcacaccatgggagcgggttctgccagaagtagtcagcctaaccgcaaggagggcgattaccactgcagggttcgtgactggggtg

SEQ ID NO: 2971 - DNA, 1424 bp, unidentified
  source 1..1424: mol_type = unassigned DNA; note = Rivicola pingtungensis
tgcaagtcgaacggcagcggggacttcggtccgccggcgagtggcgaacgggtgagtaatgcatcggaacgtgcctatcagtgggggataacgcttcgaaaggagtgctaataccgcatattctccgaggaggaaagcaggggaccttagggccttgcgctgatagagcggccgatgtcggattagctagttggtgaggtaaaggctcaccaaggcgacgatccgtagcgggtctgagaggatgatccgccacactgggactgagacacggcccagactcctacgggaggcagcagtggggaattttggacaatgggcgaaagcctgatccagccatgccgcgtgagtgaagaaggccttcgggttgtaaagctcttttgtccgggaggaaatcctggcctctaatacaggtcggggatgacagtactggaagaataagcaccggctaactacgtgccagcagccgcggtaatacgtagggtgcaagcgttaatcggaattactgggcgtaaagcgtgcgcaggcggttttgtaagccagatgtgaaatccccgagcttaacttgggaactgcgtttggaactacaagactagagtgtgtcagaggggggtagaattccacgtgtagcagtgaaatgcgtagagatgtggaggaataccgatggcgaaggcagccccctgggataacactgacgctcatgcacgaaagcgtggggagcaaacaggattagataccctggtagtccacgccctaaacgatgtctactagttgtcgggagaggaatctcttggtaacgcagctaacgcgtgaagtagaccgcctggggagtacggtcgcaagattaaaactcaaaggaattgacgggggcccgcacaagcggtggatgatgtggattaattcgatgcaacgcgaaaaaccttacctggtcttgacatgtagcgaatcctgcagagacgcaggagtgcccgaaagggagcgctaacacaggtgctgcatggctgtcgtcagctcgtgtcgtgagatgttgggttaagtcccgcaacgagcgcaacccttgccattagttgccatcattaagttgggcactttaatgggactgccggtgacaaaccggaggaaggtggggatgacgtcaagtcctcatggcccttatgaccagggcttcacacgtcatacaatggtcggtacagagggttgccaagccgcgaggtggagctaatctcataaaaccgatcgtagtccggatcgcagtctgcaactcgactgcgtgaagtcggaatcgctagtaatcgcggatcagcatgtcgcggtgaatacgttcccgggccttgtacacaccgcccgtcacaccatgggagtgggggataccagaagtgggtaggctaaccgcaaggaggccgcttaccacggtatgcttcatgact

SEQ ID NO: 2972 - DNA, 1453 bp, unidentified
  source 1..1453: mol_type = unassigned DNA; note = Robbsia andropogonis
attgaacgctggcggcatgccttacacatgcaagtcgaacggtaacagggagcttgctccgctgacgagtggcgaacgggtgagtaatacatcggaacgtgtcctgtagtgggggatagcccggcgaaagccggattaataccgcatacgatctaaggatgaaagcgggggatcttcggacctcgcgctataggggcggccgatggcagattagctagttggtggggtaaaggcctaccaaggcgacgatctgtagctggtctgagaggacgaccagccacactgggactgagacacggcccagactcctacgggaggcagcagtggggaattttggacaatgggcgcaagcctgatccagcaatgccgcgtgtgtgaagaaggccttcgggttgtaaagcacttttgttcgggaagaaaaggcgagggctaatatcctttgctgatgacggtaccggaagaataagcaccggctaactacgtgccagcagccgcggtaatacgtagggtgcaagcgttaatcggaattactgggcgtaaagcgtgcgcaggcggtttgttaagacagatgtgaaatccccgggcttaacctgggaactgcatttgtgactggcaggctagagtgtggcagaggggggtggaattccgcgtgtagcagtgaaatgcgtagatatgcggaggaacatcgatggcgaaggcagccccctgggccaacactgacgctcatgcacgaaagcgtggggagcaaacaggattagataccctggtagtccacgccctaaacgatgtcaactagttgttggggattcatttccttagtaacgtagctaacgcgtgaagttgaccgcctggggagtacggtcgcaagattaaaactcaaaggaattgacggggacccgcacaagcggtggatgatgtggattaattcgatgcaacgcgaaaaaccttacctacccttgacatggtcggaacccttgagagatcagggggtgctcgaaagagaaccgatacacaggtgctgcatggctgtcgtcagctcgtgtcgtgagatgttgggttaagtcccgcaacgagcgcaacccttgtccttagttgctacgcaagggcactctaaggagactgccggtgacaaaccggaggaaggtggggatgacgtcaagtcctcatggcccttatgggtagggcttcacacgtcatacaatggtcggaacagagggctgccaacccgcgagggggagctaatcccagaaaaccgatcgtagtccggattgcactctgcaactcgagtgcatgaagttggaatcgctagtaatcgcggatcagcatgccgcggtgaatacgttcccgggtcttgtacacaccgcccgtcacaccatgggagcgggtttcaccagaagtaggtagcttaaccgcaaggagggcgcttaccacggtgggattcgtgactggggtg

SEQ ID NO: 2973 - DNA, 1446 bp, Robiginitalea myxolifaciens
  source 1..1446: mol_type = unassigned DNA
gatgaacgctagcggcaggcctaacacatgcaagtcgaacggtaacatagaaaagcttgcttttctgatgacgagtggcgcacgggtgcgtaacgcgtatagaacctaccttttgcagggggatagcccggagaaattcggattaataccccgtagtattatcgattggcatcgattgataattagagattcatcggcaaaagatggctatgcgtcctattagctagatggtgaggtaacggctcaccatggctacgataggtaggggccctgagagggggatcccccacactggtactgagacacggaccagactcctacgggaggcagcagtgaggaatattggacaatggtcgagagactgatccagccatgccgcgtgcaggaagacggccctacgggttgtaaactgcttttatacgggaagaataaggggcacgtgtgccctgatgacggtaccgtaagaataaggaccggctaactccgtgccagcagccgcggtaatacggagggtccgagcgttatccggaatcattgggtttaaagggtccgcaggcgggtcagtaagtcagaggtgaaagtttgcggctcaaccgtaaaattgcctttgatactgctggtcttgagttacagtgaagtggctggaatatgtggtgtagcggtgaaatgcatagagatcacatagaacaccgattgcgaaggcaggtcactaactgtatactgacgctgatggacgaaagcgtggggagcgaacgggattagataccccggtagtccacgccgtaaacgatggacactagctgtcgggcattagctcggtggccaagcgaaagtgataagtgtcccacctggggagtacgtcggcaacgatgaaactcaaaggaattgacgggggcccgcacaagcggtggagcatgtggtttaattcgatgatacgcgaggaaccttaccagggcttaaatggggagtgacaggcttagagataggcttttcttcggacactcttcaaggtgctgcatggttgtcgtcagctcgtgccgtgaggtgtcaggttaagtcctataacgagcgcaacccctaccgttagttgccagcatgtcaagatggggactctaacggaactgccggtgcaaaccgtgaggaaggtggggatgacgtcaaatcatcacggcccttacgtcctgggctacacacgtgctacaatggccggtacaatgagcagccactacgcaagtaggagcgaatctataaaaccggtcacagttcggatcgaggtctgcaacccgacctcgtgaagctggaatcgctagtaatcggatatcagccatgatccggtgaatacgttcccgggccttgtacacaccgcccgtcaagccatggaagccgggagtgcctgaagtccgtcaccgcaaggagcggcctagggcaagatcggtaactagggct

SEQ ID NO: 2974 - DNA, 1456 bp, unidentified
  source 1..1456: mol_type = unassigned DNA; note = Rodentibacter heidelbergensis
attgaacgctggcggcaggcttaacacatgcaagtcgaacggtagcaggagaaagcttgctttcttgctgacgagtggcggacgggtgagtaatgcttgggaatctggcttacggagggggataactgcgggaaactgcagctaataccgcgtataatcgagagatgaaagggggcgaaagctcttgccgtgagatgagcccaagtgggattaggtagttggtggggtaatggcctaccaagcctgcgatctctagctggtctgagaggatggccagccacaccgggactgagacacggcccggactcctacgggaggcagcagtggggaatattgcgcaatggggggaaccctgacgcagccatgccgcgtgaatgaagaaggccttcgggttgtaaagttctttcggtgatgaggaaggtaacattgctaataccaatgttaattgacgttaattacagaagaagcaccggctaactccgtgccagcagccgcggtaatacggagggtgcgagcgttaatcggaataactgggcgtaaagggcacgcaggcggatttttaagtgaggtgtgaaagccccgggcttaacctgggaattgcatttcagactgggaatctagagtactttagggaggggtagaattccacgtgtagcggtgaaatgcgtagagatgtggaggaataccgaaggcgaaggcagccccttgggaatgtactgacgctcatgtgcgaaagcgtggggagcaaacaggattagataccctggtagtccacgctgtaaacgctgtcgatttgggggttgggctttaagcttggcgcccgtagctaacgtgataaatcgaccgcctggggagtacggccgcaaggttaaaactcaaatgaattgacgggggcccgcacaagcggtggagcatgtggtttaattcgatgcaacgcgaagaaccttacctactcttgacatccagagaagaactcagagatgagtttgtgccttcgggagctttgagacaggtgctgcatggctgtcgtcagctcgtgttgtgaaatgttgggttaagtcccgcaacgagcgcaacccttatcctttgttgccagcacttcgggtgggaactcaaaggagactgccggtgataaaccggaggaaggtggggatgacgtcaagtcatcatggcccttacgagtagggctacacacgtgctacaatggcgtatacagagggaagcgaagcagcgatgtggagcgaatctcataaagtgcgtctaagtccggattggagtctgcaactcgactccatgaagtcggaatcgctagtaatcgcgaatcagaatgtcgcggtgaatacgttcccgggccttgtacacaccgcccgtcacaccatgggagtgggttgtaccagaagtagatagcttaaccgagaggggggcgtttaccacggtatgattcatgactggggtg

SEQ ID NO: 2975 - DNA, 1456 bp, unidentified
  source 1..1456: mol_type = unassigned DNA; note = Rodentibacter heylii
ataaacgcgggcggcattcttaacacatgcaagtcgaacggtagcaggaaggaagcttgctttctttgctgacgagtggcggacgggtgagtaatgcttgggaatctggcttatggagggggataactgcgggaaactgcagctaataccgcgtaaagtctttggactaaagggggcgtttgctcttgccataagatgagcccaagtgggattaggtagttggtggggtaatggctcaccaagccgtcgatctctagctggtctgagaggatgaccagccacaccgggactgagacacggcccggactcctacgggaggcagcagtggggaatattgcgcaatggggggaaccctgacgcagccatgccgcgtgaatgaagaaggccttcgggttgtaaagttctttcggtgatgaggaaggcagtttggttaatagccaagctgattgacgttagtcacagaagaagcaccggctaactccgtgccagcagccgcggtaatacggagggtgcgagcgttaatcggaataactgggcgtaaagggcacgcaggcggatttttaagtgaggtgtgaaagccccgggcttaacctgggaattgcatttcagactgggaatctagagtactttagggaggggtagaattccacgtgtagcggtgaaatgcgtagagatgtggaggaataccgaaggcgaaggcagccccttgggaatgtactgacgctcatgtgcgaaagcgtggggagcaaacaggattagataccctggtagtccacgctgtaaacgctgtcgatttgggggttggggtttaactctggcgcccgtagctaacgtgataaatcgaccgtctggggagtacggccgcaaggttaaaactcaatgaattgacgggggcccgcacaagcggtggagcatgtggtttaattcgatgcaacgcgaagaacctaacctactcttgacatccagagaatcctgtagagatacgggagtgccttagggagctttgagacaggtgctgcatggctgtcgtcagctcgtgttgtgaaatgttgggttaagtcccgcaacgagcgcaacccttatcctttgttgccagcgatacggtcgggaactcaaaggagactgccggtgataaaccggaggaaggtggggatgacgtcaagtcatcatggcccttacgagtagggctacacacgtgctacaatggcgtatacagagggaggcgaagcagcgatgtggagcgaatctcacaaagtacgtctaagtccggattggagtctgcaactcgactccatgaagtcggaatcgctagtaatcgcgaatcagaatgtcgcggtgaatacgttcccgggccttgtacacaccgcccgtcacaccatgggagtgggttgtaccagaagtagatagcttaaccgtaaggggggcgtttaccacggtatgattcatgactggggtg

SEQ ID NO: 2976 - DNA, 1456 bp, unidentified
  source 1..1456: mol_type = unassigned DNA; note = Rodentibacter mrazii
attgaacgctggcggcaggcttaacacatgcaagtcgaacggtaacaggagaaagcttgctttcttgctgacgagtggcggacgggtgagtaatgcttgggaatctggcttacggagggggataactgcgggaaactgcagctaataccgcgtattatcgggagatgaaagggggcgaaagctcctgccgtgagatgagcccaagtgggattaggtagttggtgaggtaaaggctcaccaagcctgcgatctctagctggtctgagaggatggccagccacaccgggactgagacacggcccggactcctacgggaggcagcagtggggaatattgcgcaatggggggaaccctgacgcagccatgccgcgtgaatgaagaaggccttcgggttgtaaagttctttcggtgacgaggaaggtgcttaggttaataccctaagtaattgacgttaatcacagaagaagcaccggctaactccgtgccagcagccgcggtaatacggagggtgcgagcgttaatcggaataactgggcgtaaagggcacgcaggcggatttttaagtgaggtgtgaaagccccgggcttaacctgggaatagcatttcagactgggaatctagagtactttagggaggggtagaattccacgtgtagcggtgaaatgcgtagagatgtggaggaataccgaaggcgaaggcagccccttggggatgtactgacgctcatgtgcgaaagcgtggggagcaaacaggattagataccctggtagtccacgctgtaaacgctgtcgatttgggggttgggctttgagcttggcgcccgtagctaacgtgataaatcgaccgcctggggagtacggccgcaaggttaaaactcaaatgaattgacgggggcccgcacaagcggtggagcatgtggtttaattcgatgcaacgcgaagaaccttacctactcttgacatccagagaatccgatagagatattggagtgccttagggaactttgagacaggtgctgcatggctgtcgtcagctcgtgttgtgaaatgttgggttaagtcccgcaacgagcgcaacccttatcctttgttgccagcacttcgggtgggaactcaaaggagactgccggtgataaaccggaggaaggtggggatgacgtcaagtcatcatggcccttacgagtagggctacacacgtgctacaatggcgtatacagagggaagcgaagcagcgatgtggagcgaatctcacaaagtgcgtctaagtccggattggagtctgcaactcgactccatgaagtcggaatcgctagtaatcgcgaatcagaatgtcgcggtgaatacgttcccgggccttgtacacaccgcccgtcacaccatgggagtgggttgtaccagaagtggatagcttaaccgagaggggggcgtttaccacggtatgattcatgactggggtg

SEQ ID NO: 2977 - DNA, 1358 bp, unidentified
  source 1..1358: mol_type = unassigned DNA; note = Rodentibacter myodis
attgaacgctggcggcaggcttaacacatgcaagtcgaacggtaacgggaaggagcttgctcctttgctgacgagtggcggacgggtgagtaatgcttgggaatctggcttatggagggggataactgcgggaaactgcggctaataccgcgtaatatcgaragattaaagggggctttatagctcttgccataggatgagcccaagtgggattaggtagttggtggggtaaaggcctaccaagcctacgatctctagctggtctgagaggatggccagccacaccgggactgagacacggcccggactcctacgggaggcagcagtggggaatattgcgcaatggggggaaccctgacgcagccatgccgcgtgaatgaagaaggccttcgggttgtaaagttctttcggtggtgaggaaggtgtaatggttaatacccattacaattgacgttaatcacagaagaagcaccggctaactccgtgccagcagccgcggtaatacggagggtgcgagcgttaatcggaataactgggcgtaaagggcacgcaggcggacttttaagtgaggtgtgaaagccccgggcttaacctgggaatagcatttcagactgggggtctagagtactttagggaggggtagaattccacgtgtagcggtgaaatgcgtagagatgtggaggaataccgaaggcgaaggcagccccttggggatgtactgacgctcatgtgcgaaagcgtggggagcaaacaggattagataccctggtagtccacgctgtaaacgctgtcgatttgggggttgggctttaagcttggcgcccgtagctaacgtgataaatcgaccgcctggggagtacggccgcaaggttaaaactcaaatgaattgacgggggcccgcacaagcggtggagcatgtggtttaattcgatgcaacgcgaagaaccttacctactcttgacatcctaagaagagctcagagatgagcttgtgccttcgggaacttagagacaggtgctgcatggctgtcgtcagctcgtgttgtgaaatgttgggttaagtcccgcaacgagcgcaacccttatcctttgttgccagcgattaggtcgggaactcaaaggagactgccggtgataaaccggaggaaggtggggatgacgtcaagtcatcatggcccttacgagtagggctacacacgtgctacaatggcgtatacagagggaggcgaagcagcgatgtggagcgaatctcagaaagtgcgtctaagtccggattggagtctgcaactcgactccatgaagtcggaatcgctagtaatcgcgaatcagaatgtcgcggtgaatacgttcccgggcctt

SEQ ID NO: 2978 - DNA, 1456 bp, unidentified
  source 1..1456: mol_type = unassigned DNA; note = Rodentibacter pneumotropicus
attgaacgctggcggcaggcttaacacatgcaagtcgaacggtaacaggagaaagcttgctttcttgctgacgagtggcggacgggtgagtaatgcttgggaatctggcttatggagggggataactactggaaacggtagctaataccgcataaggtctaaggacaaaagggggcgtaagctcttgccataagatgagcccaagtgggattaggtagttggtgaggtaatggctcaccaagcctgcgatctctagctggtctgagaggatgaccagccacaccgggactgagacacggcccggactcctacgggaggcagcagtggggaatattgcgcaatggggggaaccctgacgcagccatgccgcgtgaatgaagaaggccttcgggttgtaaagttctttcggtgatgaggaaggtgataaggttaatacccttattaattgacgttagtcacagaagaagcaccggctaactccgtgccagcagccgcggtaatacggagggtgcgagcgttaatcggaataactgggcgtaaagggcacgcaggcggatttttaagtgaggtgtgaaagccccgggcttaacctgggaattgcatttcagactgggaatctagagtactttagggaggggtagaattccacgtgtagcggtgaaatgcgtagagatgtggaggaataccgaaggcgaaggcagccccttgggaatgtactgacgctcatgtgcgaaagcgtggggagcaaacaggattagataccctggtagtccacgctgtaaacgctgtcgatttgggggttgggctttaagcttggcgcccgtagctaacgtgataaatcgaccgcctggggagtacggccgcaaggttaaaactcaaatgaattgacgggggcccgcacaagcggtggagcatgtggtttaattcgatgcaacgcgaagaaccttacctactcttgacatccagagaagagactagagatagttttgtgccttagggaactctgagacaggtgctgcatggctgtcgtcagctcgtgttgtgaaatgttgggttaagtcccgcaacgagcgcaacccttatcctttgttgccagcgatacggtcgggaactcaaaggagactgccggtgataaaccggaggaaggtggggatgacgtcaagtcatcatggcccttacgagtagggctacacacgtgctacaatggcgtatacagagggaagcgaagcagcgatgtggagcgaatctcataaagtgcgtctaagtccggattggagtctgcaactcgactccatgaagtcggaatcgctagtaatcgcgaatcagaatgtcgcggtgaatacgttcccgggccttgtacacaccgcccgtcacaccatgggagtgggttgtaccagaagtggatagcttaaccgaagggggggcgttcaccacggtatgattcatgactggggtg

SEQ ID NO: 2979 - DNA, 1454 bp, unidentified
  source 1..1454: mol_type = unassigned DNA; note = Rodentibacter rarus
  misc_difference 179: note = n is a, c, g, or t
  misc_difference 246: note = n is a, c, g, or t
  misc_difference 588: note = n is a, c, g, or t
  misc_difference 638: note = n is a, c, g, or t
  misc_difference 757: note = n is a, c, g, or t
  misc_difference 810: note = n is a, c, g, or t
  misc_difference 1057: note = n is a, c, g, or t
  misc_difference 1134: note = n is a, c, g, or t
attgaacgctggcggcaggcttaacacatgcaagtcgaacggtaacaggagaaagcttgctttcttgctgacgagtggcggacgggtgagtaatgcttgggaatctggcttacggagggggataactgcgggaaactgcagctaataccgcgtataatcgagagatgaaagggggcgtnagctcctgccgtgagatgagcccaagtgggattaggtagttggtggggtaatggcctaccaagcctncgatctctagctggtctgagaggatgaccagccacaccggaactgagacacggtccggactcctacgggaggcagcagtggggaatattgcacaatggggggaaccctgacgcagccatgccgcgtgaatgaagaaggccttcgggttgtaaagttctttcggtgacgaggaaggtgataaggttaatacccttattaattgacgttaatcacagaagaagcaccggctaactccgtgccagcagcagcggtaatacggagggtgcgagcgttaatcggaataactgggcgtaaagggcacgcaggcggatttttaagtgaggtgtgaaagccccgggcttnacctgggaatagcatttcagactgggaatctagagtactttagggagggntagaattccacgtgtagcggtgaaatgcgtagagatgtggaggaataccgaaggcgaaggcagccccttgggaatgtactgacgctcatgtgcgaaagcgtggggagcaaacaggattngataccctggtagtccacgctgtaaacgctgtcgatttgggggttgggctttnagcttggcgcccgtagctaacgtgataaatcgaccgcctggggagtacggccgcaaggttaaaactcaaatgaattgacgggggcccgcacaagcggtggagcatgtggtttaattcgatgcaacgcgaagaaccttacctactcttgacatcctcagaagaactcagagatgagtttgtgcctttgggaactgagagacaggtgctgcatggctgtcgtcagctcgtgttgtgaaatgttgggttnagtcccgcaacgagcgcaacccttatcctttgttgccagcacttcgggtgggaactcaaaggagactgccggtgatnaaccggaggaaggtggggatgacgtcaagtcatcatggcccttacgagtagggctacacacgtgctacaatggcgtatacagaggggtgcgaagcagcgatgtggagcgaatctcataaagtgcgtctaagtccggattggagtctgcaactcgactccatgaagtcggaatcgctagtaatcgcgaatcagaatgtcgcggtgaatacgttcccgggccttgtacacaccgcccgtcacaccatgggagtgggttgtaccagaagtagatagcttaaccttcgggagggcgtttaccacggtatgattcatgactgggg

SEQ ID NO: 2980 - DNA, 1457 bp, unidentified
  source 1..1457: mol_type = unassigned DNA; note = Rodentibacter ratti
attgaacgctggcggcaggcttaacacatgcaagtcgaacggtaacaggagaaagcttgctttcttgctgacgagtggcggacgggtgagtaatgcttgggaatctggcttacggagggggataactgcgggaaactgcagctaataccgcgtagaatcgagagatgaaaggggggcgaaagctcctgccgtgagatgagcccaagtgggattaggtagttggtgaggtaatggctcaccaagcctgcgatctctagctggtctgagaggatggccagccacaccgggactgagacacggcccggactcctacgggaggcagcagtggggaatattgcgcaatggggggaaccctgacgcagccatgccgcgtgaatgaagaaggccttcgggttgtaaagttctttcggtgacgaggaaggtgcttaggttaataccctaagtaattgacgttaatcacagaagaagcaccggctaactccgtgccagcagccgcggtaatacggagggtgcgagcgttaatcggaataactgggcgtaaagggcacgcaggcggatttttaagtgaggtgtgaaagccccgggcttaacctgggaattgcatttcagactgggaatctagagtactttagggaggggtagaattccacgtgtagcggtgaaatgcgtagagatgtggaggaataccgaaggcgaaggcagccccttgggaatgtactgacgctcatgtgcgaaagcgtggggagcaaacaggattagataccctggtagtccacgctgtaaacgctgtcgatttgggggttgggctttgagcttggcgcccgtagctaacgtgataaatcgaccgcctggggagtacggccgcaaggttaaaactcaaatgaattgacgggggcccgcacaagcggtggagcatgtggtttaattcgatgcaacgcgaagaaccttacctactcttgacatccaaagaagagactagagatagtcttgtgccttcgggaactttgagacaggtgctgcatggctgtcgtcagctcgtgttgtgaaatgttgggttaagtcccgcaacgagcgcaacccttatcctttgttgccagcacttcgggtgggaactcaaaggagactgccggtgataaaccggaggaaggtggggatgacgtcaagtcatcatggcccttacgagtagggctacacacgtgctacaatggcgtatacagagggaagcgaagcagcgatgtggagcgaatctcataaagtgcgtctaagtccggattggagtctgcaactcgactccatgaagtcggaatcgctagtaatcgcgaatcagaatgtcgcggtgaatacgttcccgggccttgtacacaccgcccgtcacaccatgggagtgggttgtaccagaagtagatagcttaaccgcaaggggggcgtttaccacggtatgattcatgactggggtg

SEQ ID NO: 2981 - DNA, 1456 bp, unidentified
  source 1..1456: mol_type = unassigned DNA; note = Rodentibacter trehalosifermentans
attgaacgctggcggcaggcttaacacatgcaagtcgaacggtagcaggagaaagcttgctttcttgctgacgagtggcggacgggtgagtaatgcttgggaatctggcttacggagggggataactgcgggaaactgcagctaataccgcgtagaatcttaggattaaagggggcgaaagctcttgccgtgagatgagcccaagtgggattaggtagttggtggggtaatggcctaccaagcctgcgatctctagctggtctgagaggatggccagccacaccgggactgagacacggcccggactcctacgggaggcagcagtggggaatattgcgcaatggggggaaccctgacgcagccatgccgcgtgaatgaagaaggccttcgggttgtaaagttctttcggtgacgaggaaggtgataaggttaatacccttattaattgacgttaatcacagaagaagcaccggctaactccgtgccagcagccgcggtaatacggagggtgcgagcgttaatcggaataactgggcgtaaagggcacgcaggcggatttttaagtgaggtgtgaaagccccgggcttaacctgggaatagcatttcagactgggaatctagagtactttagggaggggtagaattccacgtgtagcggtgaaatgcgtagagatgtggaggaataccgaaggcgaaggcagccccttgggaatgtactgacgctcatgtgcgaaagcgtggggagcaaacaggattagataccctggtagtccacgctgtaaacgctgtcgatttggggattgggctttaagcttggtgcccgtagctaacgtgataaatcgaccgcctggggagtacggccgcaaggttaaaactcaaatgaattgacgggggcccgcacaagcggtggagcatgtggtttaattcgatgcaacgcgaagaaccttacctactcttgacatcctaagaagaactcagagatgagtttgtgccttcgggaacttagagacaggtgctgcatggctgtcgtcagctcgtgttgtgaaatgttgggttaagtcccgcaacgagcgcaacccttatcctttgttgccagcgacttggtcgggaactcaaaggagactgccggtgataaaccggaggaaggtggggatgacgtcaagtcatcatggcccttacgagtagggctacacacgtgctacaatggcgtatacagagggaggcgaagcagcgatgtggagcgaatctcataaagtgcgtctaagtccggattggagtctgcaactcgactccatgaagtcggaatcgctagtaatcgcgaatcagaatgtcgcggtgaatacgttcccgggccttgtacacaccgcccgtcacaccatgggagtgggttgtaccagaagtagatagcttaaccgaaaggggggcgtttaccacggtatgattcatgactggggtg

SEQ ID NO: 2982 - DNA, 1451 bp, Roseateles aquatilis
  source 1..1451: mol_type = unassigned DNA
attgaacgctggcggcatgccttacacatgcaagtcgaacggtaacgcggggcaacctggcgacgagtggcgaacgggtgagtaatatatcggaacgtgcccagtcgtgggggataactgctcgaaagagcagctaataccgcatacgacctgagggtgaaagcgggggatcttcggacctcgcgcgattggagcggccgatatcagattaggtagttggtggggtaaaggcctaccaagccgacgatctgtagctggtctgagaggacgaccagccacactgggactgagacacggcccagactcctacgggaggcagcagtggggaattttggacaatgggggcaaccctgatccagccatgccgcgtgcgggaagaaggccttcgggttgtaaaccgcttttgtcagggaagaaatcctttgggctaataactcggagggatgacggtacctgaagaataagcaccggctaactacgtgccagcagccgcggtaatacgtagggtgcaagcgttaatcggaattactgggcgtaaagcgtgcgcaggcggttatgcaagacagatgtgaaatccccgggctcaacctgggaactgcatttgtgactgcatggctagagtacggtagagggggatggaattccgcgtgtagcagtgaaatgcgtagatatgcggaggaacaccgatggcgaaggcaatcccctggacctgtactgacgctcatgcacgaaagcgtggggagcaaacaggattagataccctggtagtccacgccctaaacgatgtcaactggttgttgggagggtttcttctcagtaacgtagctaacgcgtgaagttgaccgcctggggagtacggccgcaaggttgaaactcaaaggaattgacggggacccgcacaagcggtggatgatgtggtttaattcgatgcaacgcgaaaaaccttacctacccttgacatgtcaggaattctgcagagatgcggaagtgctcgaaagagaacctgaacacaggtgctgcatggccgtcgtcagctcgtgtcgtgagatgttgggttaagtcccgcaacgagcgcaacccttgtcattagttgctacgaaagggcactctaatgagactgccggtgacaaaccggaggaaggtggggatgacgtcaggtcatcatggcccttatgggtagggctacacacgtcatacaatggccgggacagagggctgccaacccgcgagggggagctaatcccagaaacccggtcgtagtccggatcgcagtctgcaactcgactgcgtgaagtcggaatcgctagtaatcgcggatcagcttgccgcggtgaatacgttcccgggtcttgtacacaccgcccgtcacaccatgggagcgggttctgccagaagtagttagcctaaccgcaaggagggcgattaccacggcagggttcgtgactggggtg

SEQ ID NO: 2983 - DNA, 1451 bp, Roseateles depolymerans
  source 1..1451: mol_type = unassigned DNA
attgaacgctggcggcatgccttacacatgcaagtcgaacggtaacgcggggcaacctggcgacgagtggcgaacgggtgagtaatgtatcggaacgtgcccagttgtgggggataactgctcgaaagagcagctaataccgcatacgacctgagggtgaaagcgggggatcgcaagacctcgcgcaattggagcggccgatatcagattaggtagttggtggggtaaaggcctaccaagcctacgatctgtagctggtctgagaggacgaccagccacactgggactgagacacggcccagactcctacgggaggcagcagtggggaattttggacaatgggggcaaccctgatccagccatgccgcgtgcgggaagaaggccttcgggttgtaaaccgcttttgtcagggaagaaatcctttgagctaatacctcggagggatgacggtacctgaagaataagcaccggctaactacgtgccagcagccgcggtaatacgtagggtgcaagcgttaatcggaattactgggcgtaaagcgtgcgcaggcggttatgcaagacagatgtgaaatccccgggctcaacctgggaactgcatttgtgactgcatagctagagtacggtagagggggatggaattccacgtgtagcagtgaaatgcgtagatatgtggaggaacaccgatggcgaaggcaatcccctggacctgtactgacgctcatgcacgaaagcgtggggagcaaacaggattagataccctggtagtccacgccctaaacgatgtcaactggttgttgggagggtttcttctcagtaacgtagctaacgcgtgaagttgaccgcctggggagtacggccgcaaggttgaaactcaaaggaattgacggggacccgcacaagcggtggatgatgtggtttaattcgatgcaacgcgaaaaaccttacctacccttgacatgccaggaatcttgcagagatgtgagagtgctcgaaagagaacctggacacaggtgctgcatggccgtcgtcagctcgtgtcgtgagatgttgggttaagtcccgcaacgagcgcaacccttgtcattagttgctacgaaagggcactctaatgagactgccggtgacaaaccggaggaaggtggggatgacgtcaggtcatcatggcccttatgggtagggctacacacgtcatacaatggccgggacagagggctgccaacccgcgagggggagctaatcccagaaacccggtcgtagtccggatcgcagtctgcaactcgactgcgtgaagtcggaatcgctagtaatcgcggatcagcttgccgcggtgaatacgttcccgggtcttgtacacaccgcccgtcacaccatgggagcgggttctgccagaagtagttagcctaaccgcaaggagggcgattaccacggcagggttcgtgactggggtg

SEQ ID NO: 2984 - DNA, 1403 bp, Roseibium hamelinense
  source 1..1403: mol_type = unassigned DNA
aacgaacgctggcggcaggcttaacacatgcaagtcgaacggtccttcgggacagtggcagacgggtgagtaacgcgtgggaatatacctttcggtacggaatagctccgggaaactggaattaataccgtatgcgccctatgggggaaagatttatcgccgaaggattagcccgcgttggattagctagttggtggggtaatggcctaccaaggcgacgatccatagctggtctgagaggatgatcagccacactgggactgagacacggcccagactcctacgggaggcagcagtggggaatattggacaatgggggcaaccctgatccagccatgccgcgtgagtgatgaaggccctagggttgtaaagctctttcagcgaggaggataatgacgttactcgcagaagaagccccggctaacttcgtgccagcagccgcggtaatacgaagggggctagcgttgttcggaatcactgggcgtaaagcgcacgtaggcggactgatcagtcaggggtgaaatcccggggctcaaccccggaactgcctttgatactgtcagtcttgagtccgagagaggtgagtggaactccgagtgtagaggtgaaattcgtagatattcggaagaacaccagtggcgaaggcggctcactggctcggtactgacgctgaggtgcgaaagcgtggggagcaaacaggattagataccctggtagtccacgccgtaaacgatggaagctagccgtcaggtagcatgctatttggtggcgcagctaacgcattaagcttcccgcctggggagtacggtcgcaagattaaaactcaaaggaattgacgggggcccgcacaagcggtggagcatgtggtttaattcgaagcaacgcgcagaaccttaccagcccttgacatttggtgctacatcgggagaccgatggttcccttcggggacgccaggacaggtgctgcatggctgtcgtcagctcgtgtcgtgagatgttgggttaagtcccgcaacgagcgcaaccctcgcccttagttgccagcattcagttgggcactctagggggactgccggtgataagccgagaggaaggtggggatgacgtcaagtcctcatggcccttacgggctgggctacacacgtgctacaatggcggtgacaatgggcagcgaacccgcgagggggagctaatctcaaaaagccgtctcagttcggattgttctctgcaactcgagagcatgaagttggaatcgctagtaatcgcgtaacagcatgacgcggtgaatacgttcccgggccttgtacacaccgcccgtcacaccatgggagttgggtttacccgaaggcagtgcgctaaccgcaagggggcagctgaccacggtaggctcagcgactggggtg

SEQ ID NO: 2985 - DNA, 1451 bp, unidentified
  source 1..1451: mol_type = unassigned DNA; note = Roseimaritima ulvae
aatgaacgttggcggcgtggattaggcatgcaagtcgcgcgagaaacctccttcgggaggcggacagcggcggaagggagagtaatgcgtggttacgtgccctgaggaccgggatagtgcgaggaaactttcagtaataccggataatatctcaggatcaaatggtgtgattccgccttgggatcggaccacgtgctattagctagttggcggggtaatggcccaccaaggctacgatggctaccgggtgtgagagcatgacccggctcactgggactgagacactgcccagacatctacggatggctgcagtcgagaatcttcggcaatggacgaaagtctgaccgagcgacgccgcgtgcgggatgaaggccttcgggttgtaaaccgctgtcagttgggaggaaatgcataagagtcatctcttatgcttgaccgatcttcagaggaaggacgggctaagttcgtgccagcagccgcggtaagacgaaccgtccaaacgttattcggtatcactgggcttaaagcgtgcgtaggcggcttggtaggtgagatgtgaaagcccacggctcaaccgtggaattgcgtttcaaaccaccaagcttgaggatggcaggggtgatgggaactgatggtggagcggtgaaatgcgttgatatcatcaggaacaccggtggcgaaggcgcatcactgggccatttctgacgctgaggcacgaaagctagggtagcgaacgggattagataccccggtagtcctagccgtaaacgatgagcactgggttggggggactctcacatcctcccggccgtagcgaaagcgttaagtgctccgcctggggagtatggtcgcaaggctgaaactcaaaggaattgacgggggctcacacaagcggtggaggatgtggcttaattcgaggctacgcgaagaaccttatcctagatttgacatgcttgagaacctcttggaaacttgagggtgcccttcggggagctcttgcacaggtgctgcatggctgtcgtcagctcgtgtcgtgagatgtcgggttaagtcccttaacgagcgaaacccttatctttagttgccagcgggtaatgccggggactctaaagagactgccggtgtcaaaccggaggaaggtggggatgacgtcaagtcctcatggcctttatgtctagggctgcacacgtcctacaatggtacggacaaatggacgcaataccgcgaggtggagctaatcccaaaaaccgtgcctcagttcggattgcaggctgcaactcgcctgcatgaagccggaatcgctagtaatcgtaggtcagcatactacggtgaatgtgttcctgagccttgtacacaccgcccgtcaagccacgaaagttgggagggcccgaagtcactgagctaacccgcaagggaggcaagtgccgaaggtcagctcgacgattgggact

SEQ ID NO: 2986 - DNA, 1457 bp, unidentified
  source 1..1457: mol_type = unassigned DNA; note = Roseimicrobium gellanilyticum
aacgaacgctggcggcgtggataagacatgcaagtcgaacgggatattttggtagcaatatcggaatattcagtggcgaacgggtgcgtaacacgtgggtaacatgccgggaagaggagaatagcccagggaaacttggattaatgctccatgtggtcgcaagactaaagacggggtaacctgtcgcttcctgattggcccgcggcctatcagctagttggtgaggtaacggctcaccaaggctacgacgggtagctggtctgagaggatgaccagccacactggaactgagacacggtccagacacctacgggtggcagcagtcgagaatctttcacaatgggggcaaccctgatggagcgacgccgcgtggaggataaggtcttcggattgtaaactcctgtcatgcgagagtaaggcccatgcgttaactgcgtgtgggattgacagtaccgcaagaggaagagacggctaactctgtgccagcagccgcggtaatacagaggtctcaagcgttgttcggaattactgggcgtaaagggtgcgtaggctgcgcagaaagtcagatgtgaaatccgggagctcaacttccgaattgcatccgatactcctgtgctagaggactggagaggagcttggaattctcggtgtagcagtgaaatgcgtagagatcgagaggaacactagtggcgaaggctgggctctggacagtatctgacgctgaggcacgaaggtcaggggagcaaacgggattagataccccggtagtcctgacagtaaacggtgcacgcttggtgtgggaagtgaccctttccgtgccgaagctaacgcgataagcgtgccgcctgggaagtacgatcgcaagattaaaactcaaagaaattgacggggacccgcacaagcggtggagtatgtggcttaattcgatgcaacgcgaagaaccttacctggccttgacatgcattgtgtcgttggtgaaagccagctagtgtagcaatacacgctttgcacaggtgctgcatggctgtcgtcagctcgtgtcgtgagatgttgggttaagtcccgcaacgagcgcaacccctgtagtccgttgccaccggttttaccgagcacttggactagactgcccagatcaactgggaggaaggtggggatgacgtcaagtccgtatggcccttacggccagggctgcacacgtactacaatgcccagcacaaagtgaaccgagaccgcgaggtggaggaaatcgagaaagctgggctcagttcagattgcaggctgcaactcgcctgcatgaagttggaatcgctagtaatggcgcatcagctacggcgccgtgaatacgttcccgggtcttgtacacaccgcccgtcacatcatggaagctggcttcgcccaaagatcgtgcgccaaccgcaaggaggcatcggtttaaggcaaggctggtaactgggatg

SEQ ID NO: 2987 - DNA, 1391 bp, Roseinatronobacter monicus
  source 1..1391: mol_type = unassigned DNA
aacgaacgctggcggcaggcttaacacatgcaagtcgaacgaaatcttcggacttagtggcggacgggtgagtaacgcgtgggaacgtgccctttgctacggaatagtccctggaaacggggtttaataccgtatattctctccggaggaaagatttatcggcaaaggatcggcccgcgttggattaggtagttggtggggtaatggcctaccaagcccgcgatccatagctggtttgagaggatgatcagccacactgggactgagacacggcccagactcctacgggaggcagcagtggggaatcttagacaatgggggaaaccctgatctagccatgccgcgtgagcgatgaaggccttagggttgtaaagctctttcgctggggaagataatgacggtacccagtaaagaagccccggctaactccgtgccagcagccgcggtaatacggagggggctagcgttgttcggaattactgggcgtaaagcgcgcgtaggcggattggaaagttgggggtgaaatcccggggctcaaccccggaactgcctccaaaactatcagtctggagttcgagagaggtgagtggaattgcgagtgtagaggtgaaattcgtagatattcgcaggaacaccagtggcgaaggcggctcactggctcgatactgacgctgaggtgcgaaagtgtggggagcaaacaggattagataccctggtagtccacaccgtaaacgatgaatgccagacgtcggcaagcatgcttgtcggtgtcacacctaacggattaagcattccgcctggggagtacggtcgcaagattaaaactcaaaggaattgacgggggcccgcacaagcggtggagcatgtggtttaattcgaagcaacgcgcagaaccttaccaacccttgacatggatatcgcgggaccagagatggttctttcagttcggctggatatcacacaggtgctgcatggctgtcgtcagctcgtgtcgtgagatgttcggttaagtccggcaacgagcgcaacccacgtccttagttgccagcaggttaagctgggcactctaaggaaactgccgatgataagtcggaggaaggtgtggatgacgtcaagtcctcatggcccttacgggttgggctacacacgtgctacaatggtagtgacagtgggataatcccaaaaagctatctcagttcggattggggtctgcaactcgaccccatgaagtcggaatcgctagtaatcgcggaacagcatgccgcggtgaatacgttcccgggccttgtacacaccgcccgtcacaccatgggagttgggtctacccgaaggtggtgcgctaacctcgcaagaggaggcagccaaccacggtaggctcagcgactggggtg

SEQ ID NO: 2988 - DNA, 1391 bp, Roseinatronobacter thiooxidans
  source 1..1391: mol_type = unassigned DNA
aacgaacgctggcggcaggcttaacacatgcaagtcgaacgaagccttcgggcttagtggcggacgggtgagtaacgcgtgggaacgtgccctttgctacggaatagtcccgggaaactgggtttaataccgtatattctctacggaggaaagatttatcggcaaaggatcggcccgcgttggattaggtagttggtggggtaatggcctaccaagcccgcgatccatagctggtttgagaggatgatcagccacactgggactgagacacggcccagactcctacgggaggcagcagtggggaatcttagacaatgggggaaaccctgatctagccatgccgcgtgagcgatgaaggccttagggttgtaaagctctttcgctggggaagataatgacggtacccagtaaagaagccccggctaactccgtgccagcagccgcggtaatacggagggggctagcgttgttcggaattactgggcgtaaagcgcgcgtaggcggattggaaagttgggggtgaaatcccggggctcaaccccggaactgcctccaaaactatcagtctggagttcgagagaggtgagtggaattgcgagtgtagaggtgaaattcgtagatattcgcaggaacaccagtggcgaaggcggctcactggctcgatactgacgctgaggtgcgaaagtgtggggagcaaacaggattagataccctggtagtccacaccgtaaacgatgaatgccagtcgtcggcaagcatgcttgtcggtgacacacctaacggattaagcattccgcctggggagtacggtcgcaagattaaaactcaaaggaattgacgggggcccgcacaagcggtggagcatgtggtttaattcgaagcaacgcgcagaaccttaccaacccttgacatgggtatcgcgggacgagagatcgtcctttcagttcggctggataccacacaggtgctgcatggctgtcgtcagctcgtgtcgtgagatgttcggttaagtccggcaacgagcgcaacccacgtccttagttgccagcaggtcaagctgggcactctaaggaaactgccgatgataagtcggaggaaggtgtggatgacgtcaagtcctcatggcccttacgggttgggctacacacgtgctacaatggtagtgacagtgggataatcccaaaaagctatctcagttcggattggggtctgcaactcgaccccatgaagtcggaatcgctagtaatcgcggaacagcatgccgcggtgaatacgttcccgggccttgtacacaccgcccgtcacaccatgggagttgggtctacccgaagatggtgcgctaacccagcaatgggaggcagccagccacggtaggctcagcgactggggtg

SEQ ID NO: 2989 - DNA, 1465 bp, unidentified
  source 1..1465: mol_type = unassigned DNA; note = Rosenbergiella nectarea
attgaacgctggcggcaggcctaacacatgcaagtcgaacggtaacagagagtagcttgctactctgctgacgagtggcggacgggtgagtaatgtctggggatctgcctgatggagggggataactactggaaacggtagctaataccgcataatgtcgcaagaccaaagcgggggactttcgggcctcgcaccatcagatgaacccagatgggattagctagtaggtagggtaatggcttacctaggcgacgatccctagctggtctgagaggatgaccagccacactggaactgagacacggtccagactcctacgggaggcagcagtggggaatattgcacaatgggcgcaagcctgatgcagccatgccgcgtgtatgaagaaggccttcgggttgtaaagtactttcagtcaggaggaagggtgtgaaattaatactttcatgcattgacgttactgacagaagaagcaccggctaactccgtgccagcagccgcggtaatacggagggtgcaagcgttaatcggaattactgggcgtaaagcgcacgcaggcggtttgttaagtcagatgtgaaatccccgggctcaacctgggaactgcatttgaaactggcaagcttgagtcttgtagaggggggtagaattccaggtgtagcggtgaaatgcgtagagatctggaggaataccggtggcgaaggcggccccctggacaaagactgacgctcaggtgcgaaagcgtggggagcaaacaggattagataccctggtagtccacgccgtaaacgatgtcgacttggaggctgttcccttgaggagtggcttccggagctaacgcgttaagtcgaccgcctggggagtacggccgcaaggttaaaactcaaatgaattgacgggggcccgcacaagcggtggagcatgtggtttaattcgatgcaacgcgaagaaccttacctactcttgacatccagagaatttagcagagatgctttagtgccttcgggaactctgagacaggtgctgcatggctgtcgtcagctcgtgttgtgaaatgttgggttaagtcccgcaacgagcgcaacccttatcctttgttgccagcacgtaatggtgggaactcaaaggagactgccggtgataaaccggaggaaggtggggatgacgtcaagtcatcatggcccttacgagtagggctacacacgtgctacaatggcgcatacaaagagaagcgacctcgcgagagcaagcggacctcataaagtgcgtcgtagtccggattggagtctgcaactcgactccatgaagtcggaatcgctagtaatcgtaaatcagaatgttacggtgaatacgttcccgggccttgtacacaccgcccgtcacaccatgggagtgggttgcaaaagaagtagatagcttaaccttcgggagggcgtttaccactttgtgattcatgactggggtg

SEQ ID NO: 2990 - DNA, 1388 bp, Roseomonas aestuarii
  source 1..1388: mol_type = unassigned DNA
acacatgcaagtcgcacgggcagcaatgtcagtggcggacgggtgagtaacgcgtagggaagtgtccagaggtgggggacaaccccgggaactggggctaataccgcatatggcctgagggccaaagcagtgatgcgcctttggagttacctgcgtccgattaggtagttggtggggtaaaggcctaccaagccgacgatcggtagctggtctgagaggacgaccagccacactgggactgagacacggcccagactcctacgggaggcagcagtggggaatattggacaatgggcgcaagcctgatccagcaatgccgcgtgggtgaagaaggtcttcggatcgtaaagccctttcggcggggacgatgatgacggtacccgcagaagaagccccggctaacttcgtgccagcagccgcggtaatacgaagggggctagcgttactcggaattactgggcgtaaagggcgcgtaggcggcgttccaagtcaggcgtgaaagccctgggctcaacctggggactgcgcttgatactggagtgcttgaggatggaagagggttgtggaattcccagtgtagaggtgaaattcgtagatattgggaagaacaccggtggcgaaggcggcaacctggtccatttctgacgctgaggcgcgatagcgtggggagcaaacaggattagataccctggtagtccacgccgtaaacgatgtgcgctgggatgttgggtgacctagtcactcagtgtcgtagctaacgcggtaagcgcaccgcctggggagtacggccgcaaggttgaaactcaaaggaattgacgggggcccgcacaagcggtggagcatgtggtttaattcgaagcaacgcgcagaaccttaccagcccttgacatgggtaggaccgacgcagagatgcgtctttcccgcaagggacctactgcacaggtgctgcatggctgtcgtcagctcgtgtcgtgagatgttgggttaagtcccgcaacgagcgcaaccctcgcctttagttgccagcacgtttgggtgggcactctagaggaactgccggtgacaagccggaggaaggtggggatgacgtcaagtcctcatggcccttatgggctgggctacacacgtgctacaatggcggtgacagtgggaagccaggcagcgatgtcgagccgatcccaaaaagccgtctcagttcagatcgcagcctgcaactcggctgcgtgaaggtggaatcgctagtaatcgcggatcagcacgccgcggtgaatacgttcccgggccttgtacacaccgcccgtcacaccatgggagttggttctaccttaagcaggtgcgcgaacccgcaagggatgtagcttgccacggtagggtcagcgactggggtg

SEQ ID NO: 2991 - DNA, 1409 bp, Roseomonas cervicalis
  source 1..1409: mol_type = unassigned DNA
agcgaacgctggcggcatgcttaacacatgcaagtcgcacgggcagcaatgtcagtggcggacgggtgagtaacgcgtagggatgtgtccaggggtgggggataactccgggaaactggagctaataccgcatatggcctgagggccaaagcagcgatgcgcctttggagtaacctgcgtccgattagctagttggtggggtaaaggcctaccaaggcgacgatcggtagctggtctgagaggacgaccagccacactgggactgagacacggcccagactcctacgggaggcagcagtggggaatattggacaatgggcgcaagcctgatccagcaatgccgcgtgggtgaagaaggtcttcggatcgtaaagccctttcggcggggacgatgatgacggtacccgcagaagaagccccggctaacttcgtgccagcagccgcggtaatacgaagggggctagcgttactcggaattactgggcgtaaagggcgcgtaggcggcgctccaagttaggcgtgaaagccctgggctcaacctggggactgcgcttaagactggagtgctagaggatggaagagggttgtggaattcccagtgtagaggtgaaattcgtagatattgggaagaacaccggtggcgaaggcggcaacctggtccatttctgacgctgaggcgcgatagcgtggggagcaaacaggattagataccctggtagtccacgccgtaaacgatgtgcgctgaatgttggggttcctagaacctcagtgttgtagctaacgcggtaagcgcaccgcctggggagtacggccgcaaggttgaaactcaaaggaattgacgggggcccgcacaagcggtggagcatgtggtttaattcgaagcaacgcgcagaaccttaccagcccttgacatggccacgaccggttcagagatgaacttttcccgcaagggacgtggtgcacaggtgctgcatggctgtcgtcagctcgtgtcgtgagatgttgggttaagtcccgcaacgagcgcaaccctcgcctttagttgccagcacgtttgggtgggcactctagaggaactgccggtgacaagccggaggaaggtggggatgacgtcaagtcctcatggcccttatgggctgggctacacacgtgctacaatggcggtgacaatgggaagccaggcagcgatgtcgagccgatcccaaaaagccgtctcagttcagatcgcagcctgcaactcggctgcgtgaaggtggaatcgctagtaatcgcggatcagcacgccgcggtgaatacgttcccgggccttgtacacaccgcccgtcacaccatgggagttggttctaccttaagcaggtgcggtaaccgcaaggagctagcctgccacggtagggtcagtgactggggtg

SEQ ID NO: 2992 - DNA, 1426 bp, unidentified
  source 1..1426: mol_type = unassigned DNA; note = Roseomonas deserti
ctcagagtgaacgctggcggcatgcttaacacatgcaagtcgcgcgggtggtttcggccatcagcggcggacgggtgagtaacgcgtagggatgtgtccagaggtgggggacaactccgggaaactggagctaataccgcatatggcctgagggccaaagcagtgatgcgcctttggagtaacctgcgtccgattagctagttggtggggtaaaggcctaccaaggcgacgatcggtagctggtctgagaggacgaccagccacactgggactgagacacggcccagactcctacgggaggcagcagtggggaatattggacaatgggcgcaagcctgatccagcaatgccgcgtgggtgaagaaggtcttcggatcgtaaagccctttcggcggggacgatgatgacggtacccgcagaagaagccccggctaacttcgtgccagcagccgcggtaatacgaagggggctagcgttactcggaattactgggcgtaaagggcgcgtaggcggcgttccaagttaggcgtgaaagtcctgggctcaacctgggaactgcgcttaagactggagtgcttgaggatggaagagggtcgtggaattcccagtgtagaggtgaaattcgtagatattgggaagaacaccggtggcgaaggcggcgacctggtccatttctgacgctgaggcgcgatagcgtggggagcaaacaggattagataccctggtagtccacgccgtaaacgatgtgcgctggatgttggggctcctagagcttcagtgtcgtagctaacgcggtaagcgcaccgcctggggagtacggccgcaaggttgaaactcaaaggaattgacgggggcccgcacaagcggtggagcatgtggtttaattcgaagcaacgcgcagaaccttaccagcccttgacatggtcaggaccggcgcagagatgcgctttccccgcaaggggcctgatgcacaggtgctgcatggctgtcgtcagctcgtgtcgtgagatgttgggttaagtcccgcaacgagcgcaaccctcgcctttagttgccagcacgtctgggtgggcactctagaggaactgccggtgacaagccggaggaaggtggggatgacgtcaagtcctcatggcccttatgggctgggctacacacgtgctacaatggcggtgacagtgggacgccaggcagcgatgtcgagccgatcccaaaaagccgtctcagttcagatcgcagcctgcaactcggctgcgtgaaggtggaatcgctagtaatcgcggatcagcacgccgcggtggaataccgttccccgggccttgtacacaccgcccgtcacaccatggggagttggttctaccttaagcaggtgcgctaacccgcaaggggggtagcttgccacggtaggatcagtgactggggtgaa

SEQ ID NO: 2993 - DNA, 1413 bp, unidentified
  source 1..1413: mol_type = unassigned DNA; note = Roseomonas nepalensis
agcgaacgctggcggcatgcttaacacatgcaagtcgcacgggcgccttcgggtgtcagtggcggacgggtgagtaacgcgtaggaacatgtccaggggtgggggataacgctgggaaactggcgctaataccgcatgtgagctgaggctcaaagccgcgaggcgcctttggagtggcctgcgtccgattagcttgttggtggggtaatggcttaccaaggcttcgatcggtagctggtctgagaggacgaccagccacactgggactgagacacggcccagactcctacgggaggcagcagtggggaatattggacaatgggcgcaagcctgatccagcaatgccgcgtgggtgaagaaggtcttcggatcgtaaagccctttcgacggggacgatgatgacggtacccgtagaagaagccccggctaacttcgtgccagcagccgcggtaatacgaagggggctagcgttgctcggaattactgggcgtaaagggcgcgtaggcggtcattttagtcaggcgtgaaattcccgggcttaacctggggactgcgcttgatactgggtgactagagggtggaagagggtcgtggaattcccagtgtagaggtgaaattcgtagatattgggaagaacaccggtggcgaaggcggcgacctggtccattactgacgctgaggcgcgacagcgtggggagcaaacaggattagataccctggtagtccacgccgtaaacgatgtgcgctggatgttgggtgacctagtcactcagtgtcgtagccaacgcggtaagcgcaccgcctggggagtacggccgcaaggttgaaactcaaaggaattgacgggggcccgcacaagcggtggagcatgtggtttaattcgaagcaacgcgcagaaccttaccagctcttgacatggacaggaccggtgtggagacacactttccccgcaaggggcctgttgcacaggtgctgcatggctgtcgtcagctcgtgtcgtgagatgttgggttaagtcccgcaacgagcgcaaccctcgccactagttgccagcacgtttgggtgggcactctagtggaactgccggtgacaagccggaggaaggtggggatgacgtcaagtcctcatggcccttatgggctgggctacacacgtgctacaatggcggtgacagtgggaagccaggtcgcgaggccgagccgatccccaaaagccgtctcagttcggattgcaccctgcaactcgggtgcatgaaggtggaatcgctagtaatcgtggatcagcacgccacggtgaatacgttcccgggccttgtacacaccgcccgtcacaccatgggagttggttctaccttaagtggctgcgctaaccgcaagggggcaggtcaccacggtagggtcagcgactggggtg

SEQ ID NO: 2994 - DNA, 1385 bp, unidentified
  source 1..1385: mol_type = unassigned DNA; note = Roseomonas oryzae
atgcagtcgcacgggtggtttcggccatcagtggcggacgggtgagtaacgcgtagggaagtgtccagaggtgggggacaaccccgggaaactggggctaataccgcatatgtcctgagggacaaagcagtgatgcgcctttggagttacctgcgtccgattagctagttggtggggtaaaggcctaccaaggcgacgatcggtagctggtctgagaggacgaccagccacactgggactgagacacggcccagactcctacgggaggcagcagtggggaatattggacaatgggcgcaagcctgatccagcaatgccgcgtgggtgaagaaggtcttcggatcgtaaagccctttcggcggggacgatgatgacggtacccgcagaagaagccccggctaacttcgtgccagcagccgcggtaatacgaagggggctagcgttactcggaattactgggcgtaaagggcgcgtaggcggcgctgcaagttaggcgtgaaagccctgggctcaacctggggactgcgcttaagactgtggtgcttgaggatggaagaggctcgtggaattcccagtgtagaggtgaaattcgtagatattgggaagaacaccggtggcgaaggcggcgagctggtccattactgacgctgaggcgcgatagcgtggggagcaaacaggattagataccctggtagtccacgccgtaaacgatgtgcgctggatgttgggtgacctagtcactcagtgtcgtagccaacgcggtaagcgcaccgcctggggagtacggccgcaaggttgaaactcaaaggaattgacgggggcccgcacaagcggtggagcatgtggtttaattcgaagcaacgcgcagaaccttaccagcccttgacatggtcaggaccggcgcagagatgcgctttccccgcaaggggcctgatgcacaggtgctgcatggctgtcgtcagctcgtgtcgtgagatgttgggttaagtcccgcaacgagcgcaaccctcgcctttagttgccagcacgtttgggtgggcactctagaggaactgccggtgacaagccggaggaaggtggggatgacgtcaagtcctcatggcccttatgggctgggctacacacgtgctacaatggcggtgacaatgggaagccaggcagcaatgtcgagccgatcccaaaaagccgtctcagttcagatcgcggcctgcaactcggccgcgtgaaggtggaatcgctagtaatcgcggatcagcacgccgcggtgaatacgttcccgggccttgtacacaccgcccgtcacaccatgggagttggttctaccttaagcaggtgcgctaaccgcaaggaggtagcctgccacggtagggtcagcgactggggtg

SEQ ID NO: 2995 - DNA, 1409 bp, unidentified
  source 1..1409: mol_type = unassigned DNA; note = Roseomonas rhizosphaerae
agtgaacgctggcggcatgcttaacacatgcaagtcgcacgggcagcaatgtcagtggcggacgggtgagtaacgcgtagggaagtgtccagaggtgggggacaaccctgggaaactggggctaataccgcatatggcctgagggccaaagcagcgatgcgcctttggagttacctgcgtccgattagctagttggtggggtaaaggcctaccaaggcgacgatcggtagctggtctgagaggacgaccagccacactgggactgagacacggcccagactcctacgggaggcagcagtggggaatattggacaatgggcgcaagcctgatccagcaatgccgcgtgggtgaagaaggtcttcggatcgtaaagccctttcggcggggacgatgatgacggtacccgcagaagaagccccggctaacttcgtgccagcagccgcggtaatacgaagggggctagcgttactcggaattactgggcgtaaagggcgcgtaggcggcgttccaagttaggcgtgaaagccctgggctcaacctggggactgcgcttaagactggaatgcttgaggatggaagagggttgtggaattcccagtgtagaggtgaaattcgtagatattgggaagaacaccggtggcgaaggcggcaacctggtccatttctgacgctgaggcgcgatagcgtggggagcaaacaggattagataccctggtagtccacgccgtaaacgatgtgcgctggatgttgggtgacctagtcactcagtgtcgtagctaacgcggtaagcgcaccgcctggggagtacggccgcaaggttgaaactcaaaggaattgacgggggcccgcacaagcggtggagcatgtggtttaattcgaagcaacgcgcagaaccttaccagcccttgacatggccacgaccggttcagagatggactttccccgcaaggggcgtggtgcacaggtgctgcatggctgtcgtcagctcgtgtcgtgagatgttgggttaagtcccgcaacgagcgcaaccctcgcctttagttgccagcatgtttgggtgggcactctagaggaactgccggtgacaagccggaggaaggtggggatgacgtcaagtcctcatggcccttatgggctgggctacacacgtgctacaatggcggtgacaacgggaagccaggcagcgatgtcgagccgatcccgaaaagccgtctcagttcagatcgcagcctgcaactcggctgcgtgaaggtggaatcgctagtaatcgcggatcagcacgccgcggtgaatacgttcccgggccttgtacacaccgcccgtcacaccatgggagttggttctaccttaagcaggtgcgctaaccgcaagggggtagcctgccacggtagggtcagcgactggggtg

SEQ ID NO: 2996 - DNA, 1409 bp, unidentified
  source 1..1409: mol_type = unassigned DNA; note = Roseomonas rosea
agcgaacgctggcggcatgcttaacacatgcaagtcgcacgggcagcaatgtcagtggcggacgggtgagtaacgcgtaggaacatgtcctgaggtgggggacaaccctgggaaactggggctaataccgcatatcggctgaggccgaaagccttcgggcgcctttggagtggcctgcgttcgattagcttgttggtggggtaatggcctaccaaggctacgatcgatagctggtctgagaggacgaccagccacactgggactgagacacggcccagactcctacgggaggcagcagtggggaatattggacaatgggcgcaagcctgatccagcaatgccgcgtgggtgaagaaggtcttcggattgtaaagccctttcgacagggacgatgatgacggtacctgtagaagaagccccggctaacttcgtgccagcagccgcggtaatacgaagggggctagcgttgctcggaattactgggcgtaaagggcgcgtaggcggcttcattagtcaggcgtgaaaatcctgggcttaacctggggactgcgcttgatacggtgaggcttgaggatggaagaggctcgtggaattcccagtgtagaggtgaaattcgtagatattgggaagaacaccggtggcgaaggcggcgagctggtccattactgacgctgaggcgcgacagcgtggggagcaaacaggattagataccctggtagtccacgccgtaaacgatgtgcgctggatgttgggtggcctagccactcagtgtcgtagccaacgcgataagcgcaccgcctggggagtacggccgcaaggttgaaactcaaaggaattgacgggggcccgcacaagcggtggagcatgtggtttaattcgaagcaacgcgcagaaccttaccagcccttgacatggccacgaccggtccagagatggatctttcccgcaagggacgtggcgcacaggtgctgcatggctgtcgtcagctcgtgtcgtgagatgttgggttaagtcccgcaacgagcgcaaccctcgcctctagttgccagcatgtttgggtgggcactctagaggaactgccggtgacaagccggaggaaggtggggatgacgtcaagtcctcatggcccttatgggctgggctacacacgtgctacaatggcggtgacagagggaagccaggtcgcgaggccgagccgatcccgaaaagccgtctcagttcagattgcaccctgcaactcgggtgcatgaaggtggaatcgctagtaatcgcggatcagcacgccgcggtgaatacgttcccgggccttgtacacaccgcccgtcacaccatgggagttggttctaccttaagtggctgcgctaaccgcaagggggcaggtcaccacggtagggtcagcgactggggtg

SEQ ID NO: 2997 - DNA, 1409 bp, Roseomonas stagni
  source 1..1409: mol_type = unassigned DNA
agtgaacgctggcggcatgcttaacacatgcaagtcgcacggtcagcaatggcagtggcggacgggtgaggaacgcgtagggatgtgtccaggggtgggggataacgttgggaaactgacgctaataccgcattcgaactgaggttcaaagccgtgaggcgcctttggagcaacctgcgtccgattaggtagttggtggggtaatggcttaccaagcctgcgatcggtagctggtctgagaggacgaccagccacactgggactgagacacggcccagactcctacgggaggcagcagtggggaatattggacaatgggcgcaagcctgatccagcaatgccgcgtggatgaagaaggtcttcggattgtaaagtcctttcgacggggacgatgatgacggtacccgtagaagaagccccggctaacttcgtgccagcagccgcggtaatacgaagggggctagcgttactcggaattactgggcgtaaagggcgcgtaggcggctctgtaagtcaggcgtgaaattcctgggctcaacctgggggctgcgcttgagactgtggggctagaggatggaagagggtcgtggaattcccagtgtagaggtgaaattcgtagatattgggaagaacaccggtggcgaaggcggcgacctggtccattactgacgctgaggcgcgacagcgtggggagcaaacaggattagataccctggtagtccacgccgtaaacgatgtgcgctggatgttggggcccttagggtctcagtgtcgtagctaacgcggtaagcgcaccgcctggggagtacggccgcaaggttgaaactcaaaggaattgacgggggcccgcacaagcggtggagcatgtggtttaattcgaagcaacgcgcagaaccttaccagctcttgacatggacaggaccgacgcagagatgcgttttccccgcaaggggcctgttgcacaggtgctgcatggctgtcgtcagctcgtgtcgtgagatgttgggttaagtcccgcaacgagcgcaaccctcgcctccagttgccagcacgtctgggtgggcactctggaggaactgccggtgacaagccggaggaaggtggggatgacgtcaagtcctcatggcccttatgggctgggctacacacgtgctacaatggcggtgacagagggaagccaggtcgcgaggccgagccgatccctaaaagccgtctcagttcagatcgtaccctgcaactcgggtacgtgaaggtggaatcgctagtaatcgcggatcagcacgccgcggtgaatacgttcccgggccttgtacacaccgcccgtcacaccatgggagttggttctaccttaagtggctgcgggaaccgcaaggacctaggtcaccacggtagggtcagcgactggggtg

SEQ ID NO: 2998 - DNA, 1388 bp, Roseovarius aestuarii
  source 1..1388: mol_type = unassigned DNA
aacgaacgctggcggcaggcctaacacatgcaagtcgagcgcaccttcgggtgagcggcggacgggttagtaacgcgtgggaacgtacccttttctacggaatagccattggaaacgatgagtaataccgtatacgcccttcgggggaaagatttatcggagaaggatcggcccgcgttagattagatagttggtggggtaatggcctaccaagtctacgatctatagctggttttagaggatgatcagcaacactgggactgagacacggcccagactcctacgggaggcagcagtggggaatcttagacaatgggcgcaagcctgatctagccatgccgcgtgagtgatgaaggccttagggtcgtaaagctctttcgccagggatgataatgacagtacctggtaaagaaaccccggctaactccgtgccagcagccgcggtaatacggagggggttagcgttgttcggaattactgggcgtaaagcgtacgtaggcggattagaaagttaggggtgaaatcccagggctcaaccctggaactgcctctaaaactactagtctagagttcgagagaggtgagtggaactccgagtgtagaggtgaaattcgtagatattcggaagaacaccagtggcgaaggcggctcactggctcgatactgacgctgaggtacgaaagtgtggggagcaaacaggattagataccctggtagtccacaccgtaaacgatgaatgccagtcgtcgggcagtatactgttcggtgacacacctaacggattaagcattccgcctggggagtacggtcgcaagattaaaactcaaaggaattgacgggggcccgcacaagcggtggagcatgtggtttaattcgaagcaacgcgcagaaccttaccaacccttgacatcctgatcgcggttaccggagacggtttccttcagttcggctggatcagtgacaggtgctgcatggctgtcgtcagctcgtgtcgtgagatgttcggttaagtccggcaacgagcgcaacccacatccctagttgccagcagttcggctgggcactctatggaaactgcccgtgataagcgggaggaaggtgtggatgacgtcaagtcctcatggcccttacgggttgggctacacacgtgctacaatggcagtgacaatgggttaatcccaaaaaactgtctcagttcggattggggtctgcaactcgaccccatgaagtcggaatcgctagtaatcgcgtaacagcatgacgcggtgaatacgttcccgggccttgtacacaccgcccgtcacaccatgggagttgggtttacccgaaggccgtgcgccaacctttcgagggggcagcggaccacggtgagctcagcgactggggtg

SEQ ID NO: 2999 - DNA, 1389 bp, unidentified
  source 1..1389: mol_type = unassigned DNA; note = Roseovarius albus
aacgaacgctggcggcaggcctaacacatgcaagtcgagcgcgcccttcggggtgagcggcggacgggttagtaacgcgtgggaacgtacccagatctacggaatagcctttggaaacgaagagtaataccgtatacgcccttcgggggaaagatttatcggatttggatcggcccgcgttagattagatagttggtggggtaatggcctaccaagtctacgatctatagctggttttagaggatgatcagcaacactgggactgagacacggcccagactcctacgggaggcagcagtggggaatcttagacaatgggcgcaagcctgatctagccatgccgcgtgagtgatgaaggccctagggtcgtaaagctctttcgccagagatgataatgacagtatctggtaaagaaaccccggctaactccgtgccagcagccgcggtaatacggagggggttagcgttgttcggaattactgggcgtaaagcgcgcgtaggcggaccagaaagttgggggtgaaatcccggggctcaaccccggaactgcctccaaaactcctgatctagagttcgagagaggtgagtggaactccgagtgtagaggtgaaattcgtagatattcggaagaacaccagtggcgaaggcggctcactggctcgatactgacgctgaggtgcgaaagtgtggggagcaaacaggattagataccctggtagtccacaccgtaaacgatgaatgccagtcgtcgggtagtatactattcggtgacacacctaacggattaagcattccgcctggggagtacggtcgcaagattaaaactcaaaggaattgacgggggcccgcacaagcggtggagcatgtggtttaattcgaagcaacgcgcagaaccttaccaacccttgacatcctgatcgcggatactggagacagtttccttcatttagttggatcagtgacaggtgctgcatggctgtcgtcagctcgtgtcgtgagatgttcggttaagtccggcaacgagcgcaacccacatccctagttgccagcagttcggctgggcactctatggaaactgcccgtgataagcgggaggaaggtgtggatgacgtcaagtcctcatggcccttacgggttgggctacacacgtgctacaatggcagtgacaatgggttaatcccaaaaaactgtctcagttcggattggggtctgcaactcgaccccatgaagtcggaatcgctagtaatcgcgtaacagcatgacgcggtgaatacgttcccgggccttgtacacaccgcccgtcacaccatgggagttgggtttacccgaaggccgtgcgccaacctttcgagggggcagcggaccacggtgagctcagcgactggggtg

SEQ ID NO: 3000 - DNA, 1391 bp, unidentified
  source 1..1391: mol_type = unassigned DNA; note = Roseovarius atlanticus
aacgaacgctggcggcaggcctaacacatgcaagtcgagcgagaacttcggttctagcggcggacgggttagtaacgcgtgggaacgtgcccttcactacggaatagtcccgggaaactgggtttaataccgtatacgcccttcgggggaaagaatttcggtgaaggatcggcccgcgttagattagatagttggtggggtaatggcctaccaagtctacgatctatagctggttttagaggatgatcagcaacactgggactgagacacggcccagactcctacgggaggcagcagtggggaatcttagacaatgggcgcaagcctgatctagccatgccgcgtgagtgatgaaggccttagggtcgtaaagctctttcgccagggatgataatgacagtacctggtaaagaaaccccggctaactccgtgccagcagccgcggtaatacggagggggttagcgttgttcggaattactgggcgtaaagcgcgcgtaggcggattagaaagttgggggtgaaatcccagggctcaaccctggaactgcctccaaaactactagtctagagttcgagagaggtgagtggaactccgagtgtagaggtgaaattcgtagatattcggaagaacaccagtggcgaaggcggctcactggctcgatactgacgctgaggtgcgaaagtgtggggagcaaacaggattagataccctggtagtccacaccgtaaacgatgaatgccagtcgtcggcgcgcatgcgtgtcggtgacacacctaacggattaagcattccgcctggggagtacggtcgcaagattaaaactcaaaggaattgacgggggcccgcacaagcggtggagcatgtggtttaattcgaagcaacgcgcagaaccttaccaacccttgacatcctgatcgcggtttctcgagagagattccttcagttcggctggatcagtgacaggtgctgcatggctgtcgtcagctcgtgtcgtgagatgttcggttaagtccggcaacgagcgcaacccacatccctagttgccagcagttcggctgggcactctatggaaactgcccgtgataagcgggaggaaggtgtggatgacgtcaagtcctcatggcccttacgggttgggctacacacgtgctacaatggtggtaacagagggttaatccctaaaaaccatctcagttcggattgttctctgcaactcgagagcatgaagtcggaatcgctagtaatcgcgtaacagcatgacgcggtgaatacgttcccgggccttgtacacaccgcccgtcacaccatgggagttgggtttacccgaagacggtgcgccaacctgttcgcagggggcagctggccacggtaagctcagcgactggggtg

SEQ ID NO: 3001 - DNA, 1392 bp, unidentified
  source 1..1392: mol_type = unassigned DNA; note = Roseovarius azorensis
aacgaacgctggcggcaggcctaacacatgcaagtcgagcgcgcccttcggggtgagcggcggacgggtgagtaacgcgtgggaacgtacccttttctgcggaatagcctctggaaacggagagtaataccgcatacgcccttttggggaaagatttatcggggaaggatcggcccgcgttagattaggtagttggtggggtaatggcctaccaagcctacgatctatagctggttttagaggatgatcagccacactgggactgagacacggcccagactcctacgggaggcagcagtggggaatcttagacaatgggcgcaagcctgatctagccatgccgcgtgagtgacgaaggccttagggtcgtaaagctctttcgcctgtgatgataatgacagtagcaggtaaagaaaccccggctaactccgtgccagcagccgcggtaatacggagggggttagcgttgttcggaattactgggcgtaaagcgcacgtaggcggatcagaaagttgggggtgaaatcccggggctcaaccccggaacggcctccaaaactcctgatctggagttcgagagaggtgagtggaattccgagtgtagaggtgaaattcgtagatattcggaggaacatcagtggcgaaggcggctcactggctcgatactgacgctgaggtgcgaaagtgtggggagcaaacaggattagataccctggtagtccacaccgtaaacgatgaatgccagtcgtcggatagtatactattcggtgacacacctaacggattaagcattccgcctggggagtacggtcgcaagattaaaactcaaaggaattgacgggggcccgcacaagcggtggagcatgtggtttaattcgaagcaacgcgcagaaccttaccaacccttgacatactcgtcgtagttaccagagatggtttcgtcagttcggctggacgagatacaggtgctgcatggctgtcgtcagctcgtgtcgtgagatgttcggttaagtccggcaacgagcgcaacccacatccccagttgccagcaggtcatgctgggcactctgtggaaactgcccgtgataagcgggaggaaggtgtggatgacgtcaagtcctcatggcccttacgggttgggctacacacgtgctacaatggtggtgacaatgggttaatccccaaaagccatctcagttcggattggggtctgcaactcgaccccatgaagtcggaatcgctagtaatcgcgtaacagcatgacgcggtgaatacgttcccgggccttgtacacaccgcccgtcacaccatgggagttggttttacccgaaggtggtgcgccaacctgttcgcaggaggcagccaaccacggtaggatcagcgactggggtg

SEQ ID NO: 3002 - DNA, 1391 bp, unidentified
  source 1..1391: mol_type = unassigned DNA; note = Roseovarius gaetbuli
aacgaacgctggcggcaggcctaacacatgcaagtcgagcgagaccttcgggtctagcggcggacgggttagtaacgcgtgggaacgtacccttctctaaggaatagccactggaaacggtgagtaataccttatacgcccttcgggggaaagatttatcggagaaggatcggcccgcgtaagattagatagttggtggggtaatggcctaccaagtctacgatctttagctggttttagaggatgatcagcaacactgggactgagacacggcccagactcctacgggaggcagcagtggggaatcttagacaatgggcgcaagcctgatctagccatgccgcgtgtgtgacgaaggccttagggtcgtaaagcactttcgcctgtgatgataatgacagtagcaggtaaagaaaccccggctaactccgtgccagcagccgcggtaatacggagggggttagcgttgttcggaattactgggcgtaaagcgcacgtaggcggattggaaagtatggggtgaaatcccagggctcaaccctggaactgcctcataaacttccagtctagagttcgagagaggtgagtggaattccgagtgtagaggtgaaattcgtagatattcggaggaacaccagtggcgaaggcggctcactggctcgatactgacgctgaggtgcgaaagtgtggggagcaaacaggattagataccctggtagtccacaccgtaaacgatgaatgccagtcgtcggcaagcatgcttgtcggtgacacacctaacggattaagcattccgcctggggagtacggtcgcaagattaaaactcaaaggaattgacgggggcccgcacaagcggtggagcatgtggtttaattcgaagcaacgcgcagaaccttaccaacccttgacatactcatcgtcgctccagagatggagctttcagttcggctggatgagatacaggtgctgcatggctgtcgtcagctcgtgtcgtgagatgttcggttaagtccggcaacgagcgcaacccacatccctagttgccagcaggttaagctgggcactctatggaaactgcccgtgataagcgggaggaaggtgtggatgacgtcaagtcctcatggcccttacgggttgggctacacacgtgctacaatggtggtgacaatgggttaatcccaaaaagccatctcagttcggattggggtctgcaactcgaccccatgaagtcggaatcgctagtaatcgcgtaacagcatgacgcggtgaatacgttcccgggccttgtacacaccgcccgtcacaccatgggagttggatctacccgaaggccgtgcgccaacctcttcggagggggcagcggaccacggtgggttcagcgactggggtg

SEQ ID NO: 3003 - DNA, 1389 bp, Roseovarius halotolerans
  source 1..1389: mol_type = unassigned DNA
aacgaacgctggcggcaggcctaacacatgcaagtcgaacgagaccttcgggtctagtggcggacgggttagtaacgcgtgggaacgtgcctttcactacggaatagtcccgggaaactgggtttaataccgtatacgcccttcgggggaaagaatttcggtgaaagatcggcccgcgttagattaggtagttggtggggtaatggcctaccaagcctacgatctatagctggttttagaggatgatcagcaacactgggactgagacacggcccagactcctacgggaggcagcagtggggaatcttggacaatgggcgcaagcctgatccagccatgccgcgtgagtgatgaaggccttagggtcgtaaagctctttcgccagggatgataatgacagtacctggtaaagaaaccccggctaactccgtgccagcagccgcggtaatacggagggggttagcgttgttcggaattactgggcgtaaagcgcacgtaggcggattggaaagttgggggtgaaatcccagggctcaaccctggaactgcctccaaaactaccagtctagagttcgagagaggtgagtggaattccgagtgtagaggtgaaattcgtagatattcggaggaacaccagtggcgaaggcggctcactggctcgatactgacgctgaggtgcgaaagtgtggggagcaaacaggattagataccctggtagtccacaccgtaaacgatgaatgccagtcgtcggatagcatgctattcggtgacacacctaacggattaagcattccgcctggggagtacggtcgcaagattaaaactcaaaggaattgacgggggcccgcacaagcggtggagcatgtggtttaattcgaagcaacgcgcagaaccttaccaacccttgacatcctgatcgcggttacgagagatcgtttccttcagttcggctggatcagtgacaggtgctgcatggctgtcgtcagctcgtgtcgtgagatgttcggttaagtccggcaacgagcgcaacccacatccctagttgccagcagttcggctgggcactctatggaaactgcccgtgataagcgggaggaaggtgtggatgacgtcaagtcctcatggcccttacgggttgggctacacacgtgctacaatggcagtgacaatgggttaatcccaaaaaactgtctcagttcggattggggtctgcaactcgaccccatgaagtcggaatcgctagtaatcgcgtaacagcatgacgcggtgaatacgttcccgggccttgtacacaccgcccgtcacaccatgggagttgggtttacccgaaggcggtgcgccaacctttcgagggggcagccgaccacggtaagctcagcgactggggtg

SEQ ID NO: 3004 - DNA, 1389 bp, Roseovarius indicus
  source 1..1389: mol_type = unassigned DNA
aacgaacgctggcggcaggcttaacacatgcaagtcgaacgagatcttcggatctagtggcggacgggtgagtaacgcgtgggaacatgcccttcactacggaatagtcccgggaaactgggtttaataccgtatacgcccttcgggggaaagaatttcggtgaaggattggcccgcgttagattaggtagttggtggggtaatggcctaccaagcctacgatctatagctggttttagaggatgatcagccacactgggactgagacacggcccagactcctacgggaggcagcagtggggaatcttagacaatgggcgaaagcctgatctagccatgccgcgtgagtgacgaaggccttagggtcgtaaagctctttcgccagggatgataatgacagtacctggtaaagaaaccccggctaactccgtgccagcagccgcggtaatacggagggggttagcgttgttcggaattactgggcgtaaagcgcgcgtaggcggattggaaagttgggggtgaaatcccagggctcaaccctggaactgcctccaaaactactagtctagagttcgagagaggtgagtggaactccgagtgtagaggtgaaattcgtagatattcggaagaacaccagtggcgaaggcggctcactggctcgatactgacgctgaggtgcgaaagtgtggggagcaaacaggattagataccctggtagtccacaccgtaaacgatgaatgccagtcgtcggatagcatgctattcggtgacacacctaacggattaagcattccgcctggggagtacggccgcaaggttaaaactcaaagaaattgacgggggcccgcacaagcggtggagcatgtggtttaattcgaagcaacgcgcagaaccttaccaacccttgacatcctgatcgcggttacgagagatcgtttccttcagttcggctggatcagtgacaggtgctgcatggctgtcgtcagctcgtgtcgtgagatgttcggttaagtccggcaacgagcgcaacccacatccctagttgccagcagttcggctgggcactctatggaaactgcccgtgataagcgggaggaaggtgtggatgacgtcaagtcctcatggcccttacgggttgggctacacacgtgctacaatggtggtgacagtgggttaatccccaaaagccatctcagttcggattgtcgtctgcaactcgacggcatgaagtcggaatcgctagtaatcgcgtaacagcatgacgcggtgaatacgttcccgggccttgtacacaccgcccgtcacaccatgggagttgggtttacccgaagacggtgcgccaacctttatagggggcagctggccacggtaagctcagcgactggggtg

SEQ ID NO: 3005 - DNA, 1389 bp, unidentified
  source 1..1389: mol_type = unassigned DNA; note = Roseovarius litoreus
aacgaacgctggcggcaggcctaacacatgcaagtcgaacgagaccttcgggtctagtggcggacgggttagtaacgcgtgggaacgtgcctttcactacggaatagtcccgggaaactgggtttaataccgtatacgcccttcgggggaaagaatttcggtgaaagatcggcccgcgttagattaggtagttggtggggtaatggcctaccaagcctacgatctatagctggttttagaggatgatcagcaacactgggactgagacacggcccagactcctacgggaggcagcagtggggaatcttggacaatgggcgcaagcctgatccagccatgccgcgtgagtgatgaaggccttagggtcgtaaagctctttcgccagggatgataatgacagtacctggtaaagaaaccccggctaactccgtgccagcagccgcggtaatacggagggggttagcgttgttcggaattactgggcgtaaagcgcgcgtaggcggattggaaagttgggggtgaaatcccagggctcaaccctggaacggcctccaaaactcccagtcttgagttcgagagaggtgagtggaattccgagtgtagaggtgaaattcgtagatattcggaggaacaccagtggcgaaggcggctcactggctcgatactgacgctgaggtgcgaaagtgtggggagcaaacaggattagataccctggtagtccacaccgtaaacgatgaatgccagtcgtcggatagcatgctattcggtgacacacctaacggattaagcattccgcctggggagtacggtcgcaagattaaaactcaaaggaattgacgggggcccgcacaagcggtggagcatgtggtttaattcgaagcaacgcgcagaaccttaccaacccttgacatccctgtcgcgggagccggagacggttcctttcagttcggctggacaggtgacaggtgctgcatggctgtcgtcagctcgtgtcgtgagatgttcggttaagtccggcaacgagcgcaacccacatccctagttgccagcagttcggctgggcactctatggaaactgcccgtgataagcgggaggaaggtgtggatgacgtcaagtcctcatggcccttacgggttgggctacacacgtgctacaatggcagtgacaatgggttaatcccaaaaagctgtctcagttcggattggggtctgcaactcgaccccatgaagtcggaatcgctagtaatcgcgtaacagcatgacgcggtgaatacgttcccgggccttgtacacaccgcccgtcacaccatgggagttgggtttacccgaaggcggtgcgccaacctttcgaggaggcagccgaccacggtaagctcagcgactggggtg

SEQ ID NO: 3006 - DNA, 1392 bp, unidentified
  source 1..1392: mol_type = unassigned DNA; note = Roseovarius lutimaris
aacgaacgctggcggcaggcctaacacatgcaagtcgagcgagaccttcgggtctagcggcggacgggttagtaacgcgtgggaacgtacccttttctaaggaatagccactggaaacggtgagtaataccttatacgcccttcgggggaaagatttatcggagaaggatcggcccgcgtaagattagatagttggtggggtaatggcctaccaagtctacgatctttagctggttttagaggatgatcagcaacactgggactgagacacggcccagactcctacgggaggcagcagtggggaatcttagacaatgggcgcaagcctgatctagccatgccgcgtgagtgacgaaggccttagggtcgtaaagctctttcgcctgtgatgataatgacagtagcaggtaaagaaaccccggctaactccgtgccagcagccgcggtaatacggagggggttagcgttgttcggaattactgggcgtaaagcgcacgtaggcggattggaaagttgggggtgaaatcccagggctcaaccctggaactgcctccaaaacttccagtctagagttcgagagaggtgagtggaattccgagtgtagaggtgaaattcgtagatattcggaggaacaccagtggcgaaggcggctcactggctcgatactgacgctgaggtgcgaaagtgtggggagcaaacaggattagataccctggtagtccacaccgtaaacgatgaatgccagtcgtcggcaagcatgcttgtcggtgacacacctaacggattaagcattccgcctggggagtacggtcgcaagattaaaactcaaaggaattgacgggggcccgcacaagcggtggagcatgtggtttaattcgaagcaacgcgcagaaccttaccaacccttgacatactcatcatactttccagagatggatcggtcagttcggctggatgagatacaggtgctgcatggctgtcgtcagctcgtgtcgtgagatgttcggttaagtccggcaacgagcgcaacccacatccctagttgccagcaggttaagctgggcactctatggaaactgcccgtgataagcgggaggaaggtgtggatgacgtcaagtcctcatggcccttacgggttgggctacacacgtgctacaatggtggtgacaatgggttaatcccaaaaagccatctcagttcggattggggtctgcaactcgaccccatgaagtcggaatcgctagtaatcgcgtaacagcatgacgcggtgaatacgttcccgggccttgtacacaccgcccgtcacaccatgggagttgggtttacccgaaggccgtgcgccaacctcttcggagggggcagcggaccacggtgagctcagcgactggggtg

SEQ ID NO: 3007 - DNA, 1391 bp, unidentified; identical to SEQ ID NO: 3002
  source 1..1391: mol_type = unassigned DNA; note = Roseovarius marisflavi

SEQ ID NO: 3008 - DNA, 1390 bp, Roseovarius mucosus
  source 1..1390: mol_type = unassigned DNA
aacgaacgctggcggcaggcctaacacatgcaagtcgagcgaaccttcgggttagcggcggacgggtgagtaacgcgtgggaacgtaccctcttctgcgggatagccactggaaacggtgagtaataccgcatacgcccttcgggggaaagatttatcggaggaggatcggcccgcgttggattaggtagttggtggggtaatggcctaccaagcctacgatccatagctggttttagaggatgatcagccacactgggactgagacacggcccagactcctacgggaggcagcagtggggaatcttagacaatgggcgcaagcctgatctagccatgccgcgtgagtgacgaaggccttagggtcgtaaagctctttcgccagagatgataatgacagtatctggtaaagaaaccccggctaactccgtgccagcagccgcggtaatacggagggggttagcgttgttcggaattactgggcgtaaagcgcacgtaggcggattggaaagttgggggtgaaatcccagggctcaaccctggaactgcctccaaaactcccagtctggagttcgagagaggtgagtggaattccgagtgtagaggtgaaattcgtagatattcggaggaacaccagtggcgaaggcggctcactggctcgatactgacgctgaggtgcgaaagtgtggggagcaaacaggattagataccctggtagtccacaccgtaaacgatgaatgccagtcgtcggcaagcatgcttgtcggtgacacacctaacggattaagcattccgcctggggagtacggtcgcaagattaaaactcaaaggaattgacgggggcccgcacaagcggtggagcatgtggtttaattcgaagcaacgcgcagaaccttaccaacccttgacatggatatcgtagttaccagagatggtttcgtcagttcggctggatatcacacaggtgctgcatggctgtcgtcagctcgtgtcgtgagatgttcggttaagtccggcaacgagcgcaacccacatccctagttgccagcaggttaagctgggcactctatggaaactgcccgtgataagcgggaggaaggtgtggatgacgtcaagtcctcatggcccttacgggttgggctacacacgtgctacaatggtggtgacaatgggttaatcccaaaaagccatctcagttcggattggggtctgcaactcgaccccatgaagtcggaatcgctagtaatcgcgtaacagcatgacgcggtgaatacgttcccgggccttgtacacaccgcccgtcacaccatgggagttgggtctacccgacgacggtgcgctaacctcgcaagaggaggcagccggccacggtaggctcagcgactggggtg

SEQ ID NO: 3009 - DNA, 1389 bp, Roseovarius nanhaiticus
  source 1..1389: mol_type = unassigned DNA
aacgaacgctggcggcaggcttaacacatgcaagtcgagcgcaccttcgggtgagcggcggacgggttagtaacgcgtgggaacgtgcccttctctacggaatagtctcgggaaactgagggtaataccgtatacgcccttcgggggaaagatttatcggagaaggatcggcccgcgttagattagatagttggtggggtaatggcctaccaagtctacgatctatagctggttttagaggatgatcagcaacactgggactgagacacggcccagactcctacgggaggcagcagtggggaatcttagacaatgggcgcaagcctgatctagccatgccgcgtgagtgatgaaggtcttaggatcgtaaagctctttcgccagggatgataatgacagtacctggtaaagaaaccccggctaactccgtgccagcagccgcggtaatacggagggggttagcgttgttcggaattactgggcgtaaagcgcgcgtaggcggattagaaagtatggggtgaaatcccagggctcaaccctggaactgcctcataaactactagtctagagttcgagagaggtgagtggaattgtgagtgtagaggtgaaattcgtagatattcacaggaacaccagtggcgaaggcggctcactggctcgatactgacgctgaggtgcgaaagtgtggggagcaaacaggattagataccctggtagtccacaccgtaaacgatgaatgccagtcgtcgggcagtatactgttcggtgacacacctaacggattaagcattccgcctggggagtacggtcgcaagattaaaactcaaaggaattgacgggggcccgcacaagcggtggagcatgtggtttaattcgaagcaacgcgcagaaccttaccaacccttgacatggacatcatactttcgagagatcgatcggtcagttcggctggatgtcacacaggtgctgcatggctgtcgtcagctcgtgtcgtgagatgttcggttaagtccggcaacgagcgcaacccacatccctagttgccagcagttcggctgggcactctatggaaactgcccgtgataagcgggaggaaggtgtggatgacgtcaagtcctcatggcccttacgggttgggctacacacgtgctacaatggcagtgacaatgggttaatccccaaaagctgtctcagttcggattggggtctgcaactcgaccccatgaagtcggaatcgctagtaatcgcgtaacagcatgacgcggtgaatacgttcccgggccttgtacacaccgcccgtcacaccatgggagttgggcctacccgacggccgtgcgctaacctcttcggaggaggcagcggaccacggtaagctcagcgactggggtg

SEQ ID NO: 3010 - DNA, 1388 bp, Roseovarius nubinhibens
  source 1..1388: mol_type = unassigned DNA
aacgaacgctggcggcaggcctaacacatgcaagtcgagcgcaccttcgggtgagcggcggacgggttagtaacgcgtgggaacgtacccagatctaaggaatagccactggaaacggtgagtaataccttatacgcccttcgggggaaagatttatcggatttggatcggcccgcgttagattaggtagttggtggggtaatggcctaccaagcctacgatctatagctggttttagaggatgatcagcaacactgggactgagacacggcccagactcctacgggaggcagcagtggggaatcttagacaatgggggcaaccctgatctagccatgccgcgtgagtgaagaaggtcttaggatcgtaaagctctttcgccagggatgataatgacagtacctggtaaagaaaccccggctaactccgtgccagcagccgcggtaatacggagggggttagcgttgttcggaattactgggcgtaaagcgcgcgtaggcggatcagaaagttgggggtgaaatcccagggctcaaccctggaactgcctccaaaactcctggtcttgagttcgagagaggtgagtggaactccgagtgtagaggtgaaattcgtagatattcggaagaacaccagtggcgaaggcggctcactggctcgatactgacgctgaggtgcgaaagtgtggggagcaaacaggattagataccctggtagtccacaccgtaaacgatgaatgccagtcgtcgggtagtatactattcggtgacacacctaacggattaagcattccgcctggggagtacggtcgcaagattaaaactcaaaggaattgacgggggcccgcacaagcggtggagcatgtggtttaattcgaagcaacgcgcagaaccttaccaacccttgacatcctgatcgcggatcgtagagatactttccttcagttcggctggatcagtgacaggtgctgcatggctgtcgtcagctcgtgtcgtgagatgttcggttaagtccggcaacgagcgcaacccacatccctagttgccagcagttcggctgggcactctatggaaactgcccgtgataagcgggaggaaggtgtggatgacgtcaagtcctcatggcccttacgggttgggctacacacgtgctacaatggcagtgacaatgggttaatcccaaaaaactgtctcagttcggattggggtctgcaactcgaccccatgaagtcggaatcgctagtaatcgcgtaacagcatgacgcggtgaatacgttcccgggccttgtacacaccgcccgtcacaccatgggagttgggtttacccgaaggccgtgcgccaacctttcgagggggcagcggaccacggtgagctcagcgactggggtg

SEQ ID NO: 3011 - DNA, 1389 bp, Roseovarius pacificus
  source 1..1389: mol_type = unassigned DNA
aacgaacgctggcggcaggcctaacacatgcaagtcgaacgaagccttcgggcttagtggcggacgggttagtaacgcgtgggaacgtgcctttcactacggaatagtcccgggaaactgggtttaataccgtatacgcccttcgggggaaagaatttcggtgaaagatcggcccgcgttagattaggtagttggtggggtaatggcctaccaagcctacgatctatagctggttttagaggatgatcagcaacactgggactgagacacggcccagactcctacgggaggcagcagtggggaatcttggacaatgggcgcaagcctgatccagccatgccgcgtgagtgatgaaggccttagggtcgtaaagctctttcgccagggatgataatgacagtacctggtaaagaaaccccggctaactccgtgccagcagccgcggtaatacggagggggttagcgttgttcggaattactgggcgtaaagcgcgcgtaggcggatcggaaagttgggggtgaaatcccggggctcaaccccggaactgcctccaaaactatcggtctagagttcgagagaggtgagtggaattccgagtgtagaggtgaaattcgtagatattcggaggaacaccagtggcgaaggcggctcactggctcgatactgacgctgaggtgcgaaagtgtggggagcaaacaggattagataccctggtagtccacaccgtaaacgatgaatgccagtcgtcgggcagtatactgttcggtgacacacctaacggattaagcattccgcctggggagtacggtcgcaagattaaaactcaaaggaattgacgggggcccgcacaagcggtggagcatgtggtttaattcgaagcaacgcgcagaaccttaccaacccttgacatcctgatcgcggttacgagagatcgtttccttcagttcggctggatcagtgacaggtgctgcatggctgtcgtcagctcgtgtcgtgagatgttcggttaagtccggcaacgagcgcaacccacatccctagttgccagcagttcggctgggcactctatggaaactgcccgtgataagcgggaggaaggtgtggatgacgtcaagtcctcatggcccttacgggttgggctacacacgtgctacaatggcagtgacaatgggttaatccccaaaaactgtctcagttcggattggggtctgcaactcgaccccatgaagtcggaatcgctagtaatcgcgtaacagcatgacgcggtgaatacgttcccgggccttgtacacaccgcccgtcacaccatgggagttgggtttacccgaaggcggtgcgccaacctttcgagggggcagccgaccacggtaagctcagcgactggggtg

SEQ ID NO: 3012 - DNA, 1392 bp, Roseovarius tolerans
  source 1..1392: mol_type = unassigned DNA
aacgaacgctggcggcaggcctaacacatgcaagtcgagcgaacccttcggggttagcggcggacgggtgagtaacgcgtgggaacgtaccctcttctgcggaatagccactggaaacggtgagtaataccgcatacgcccttcgggggaaagatttatcggaggaggatcggcccgcgttggattaggtagttggtggggtaatggcctaccaagcctacgatccatagctggttttagaggatgatcagccacactgggactgagacacggcccagactcctacgggaggcagcagtggggaatcttagacaatgggcgcaagcctgatctagccatgccgcgtgtgtgacgaaggccttagggtcgtaaagcactttcgcctgtgatgataatgacagtagcaggtaaagaaaccccggctaactccgtgccagcagccgcggtaatacggagggggttagcgttgttcggaattactgggcgtaaagcgcacgtaggcggatcagaaagttgggggtgaaatcccggggctcaaccccggaactgcctccaaaacttctggtctggagttcgagagaggtgagtggaattgcgagtgtagaggtgaaattcgtagatattcgcaggaacaccagtggcgaaggcggctcactggctcgatactgacgctgaggtgcgaaagtgtggggagcaaacaggattagataccctggtagtccacaccgtaaacgatgaatgccagtcgtcggcaagcatgcttgtcggtgacacacctaacggattaagcattccgcctggggagtacggtcgcaagattaaaactcaaaggaattgacgggggcccgcacaagcggtggagcatgtggtttaattcgaagcaacgcgcagaaccttaccaacccttgacatcctgatcgcggatcgcggagacgctttccttcagttcggctggatcagtgacaggtgctgcatggctgtcgtcagctcgtgtcgtgagatgttcggttaagtccggcaacgagcgcaacccacatccctagttgccagcagttcggctgggcactctatggaaactgcccgtgataagcgggaggaaggtgtggatgacgtcaagtcctcatggcccttacgggttgggctacacacgtgctacaatggtggtgacaatgggttaatccccaaaaaccatctcagttcggattggggtctgcaactcgaccccatgaagtcggaatcgctagtaatcgcgtaacagcatgacgcggtgaatacgttcccgggccttgtacacaccgcccgtcacaccatgggagttgggtttacccgacggccgtgcgctaacctcttcggaggaggcagcggaccacggtaagctcagcgactggggtg

SEQ ID NO: 3013 - DNA, 1465 bp, unidentified
  source 1..1465: mol_type = unassigned DNA; note = Rouxiella badensis
attgaacgctggcggcaggcctaacacatgcaagtcgagcggtagcacgggagagcttgctctctgggtgacgagcggcggacgggtgagtaatgtctgggaaactgcctgatggagggggataactactggaaacggtagctaataccgcatgatgtcgcaagaccaaagtgggggaccttcgggcctcacgccatcggatgtgcccagatgggattagctagtaggtggggtaatggctcacctaggcgacgatccctagctggtctgagaggatgaccagccacactggaactgagacacggtccagactcctacgggaggcagcagtggggaatattgcacaatgggcgcaagcctgatgcagccatgccgcgtgtgtgaagaaggccttagggttgtaaagcactttcagcgaggaggaaggcgttgtagttaataactgcaacgattgacgttactcgcagaagaagcaccggctaactccgtgccagcagccgcggtaatacggagggtgcaagcgttaatcggaattactgggcgtaaagcgcacgcaggcggtttgttaagtcagatgtgaaatccccgagcttaacttgggaactgcatttgaaactggcaagctagagtcttgtagaggggggtagaattccaggtgtagcggtgaaatgcgtagagatctggaggaataccggtggcgaaggcggccccctggacaaagactgacgctcaggtgcgaaagcgtggggagcaaacaggattagataccctggtagtccacgctgtaaacgatgtcgacttggaggttgtgcccttgaggcgtggcttccggagctaacgcgttaagtcgaccgcctggggagtacggccgcaaggttaaaactcaaatgaattgacgggggcccgcacaagcggtggagcatgtggtttaattcgatgcaacgcgaagaaccttacctactcttgacatccagagaatttgctagagatagcttagtgccttcgggaactctgagacaggtgctgcatggctgtcgtcagctcgtgttgtgaaatgttgggttaagtcccgcaacgagcgcaacccttatcctttgttgccagcacgtaatggtgggaactcaaaggagactgccggtgataaaccggaggaaggtggggatgacgtcaagtcatcatggcccttacgagtagggctacacacgtgctacaatggcgtatacaaagagaagcgaactcgcgagagcaagcggacctcataaagtacgtcgtagtccggattggagtctgcaactcgactccatgaagtcggaatcgctagtaatcgtagatcagaatgctacggtgaatacgttcccgggccttgtacacaccgcccgtcacaccatgggagtgggttgcaaaagaagtaggtagcttaaccttcgggagggcgcttaccactttgtgattcatgactggggtg

SEQ ID NO: 3014 - DNA, 1465 bp, unidentified
  source 1..1465: mol_type = unassigned DNA; note = Rouxiella silvae
attgaacgctggcggcaggcctaacacatgcaagtcgagcggtagcacgggagagcttgctctctgggtgacgagcggcggacgggtgagtaatgtctgggaaactgcctgatggagggggataactactggaaacggtagctaataccgcatgatgtcgcaagaccaaagtgggggaccttcgggcctcacgccatcggatgtgcccagatgggattagctagtaggtggggtaatggctcacctaggcgacgatccctagctggtctgagaggatgaccagccacactggaactgagacacggtccagactcctacgggaggcagcagtggggaatattgcacaatgggcgcaagcctgatgcagccatgccgcgtgtgtgaagaaggccttagggttgtaaagcactttcagcgaggaggaaggcgttgcagttaataactgcaacgattgacgttactcgcagaagaagcaccggctaactccgtgccagcagccgcggtaatacggagggtgcaagcgttaatcggaattactgggcgtaaagcgcacgcaggcggtttgttaagtcagatgtgaaatccccgagcttaacttgggaactgcatttgaaactggcaagctagagtcttgtagaggggggtagaattccaggtgtagcggtgaaatgcgtagagatctggaggaataccggtggcgaaggcggccccctggacaaagactgacgctcaggtgcgaaagcgtggggagcaaacaggattagataccctggtagtccacgctgtaaacgatgtcgacttggaggttgtgcccttgaggcgtggcttccggagctaacgcgttaagtcgaccgcctggggagtacggccgcaaggttaaaactcaaatgaattgacgggggcccgcacaagcggtggagcatgtggtttaattcgatgcaacgcgaagaaccttacctactcttgacatccacggaattcgctagagatagcttagtgccttcgggaaccgtgagacaggtgctgcatggctgtcgtcagctcgtgttgtgaaatgttgggttaagtcccgcaacgagcgcaacccttatcctttgttgccagcacgtaatggtgggaactcaaaggagactgccggtgataaaccggaggaaggtggggatgacgtcaagtcatcatggcccttacgagtagggctacacacgtgctacaatggcatatacaaagagaagcaaactcgcgagagcaagcggacctcataaagtatgtcgtagtccggattggagtctgcaactcgactccatgaagtcggaatcgctagtaatcgtagatcagaatgctacggtgaatacgttcccgggccttgtacacaccgcccgtcacaccatgggagtgggttgcaaaagaagtaggtagcttaaccttcgggagggcgcttaccactttgtgattcatgactggggtg

SEQ ID NO: 3015 - DNA, 1389 bp, unidentified
  source 1..1389: mol_type = unassigned DNA; note = Rubellimicrobium roseum
aacgaacgctggcggcaggcttaacacatgcaagtcgagcgggcccttcggggtcagcggcggacgggttagtaacgcgtgggaacgtgccttttgcttcggaatagccctgggaaactgggggtaataccggatgtgccctgagggggaaagatttatcggcaagagatcggcccgcgtctgattaggtagttggtggggtaatggcccaccaagccgacgatcggtagctggtttgagaggatgatcagcaacactgggactgagacacggcccagactcctacgggaggcagcagtggggaatcttagacaatgggcgcaagcctgatctagccatgccgcgtgggtgatgaaggccttagggtcgtaaagccctttcgccggggaagataatgacggtacccggtaaagaaaccccggctaactccgtgccagcagccgcggtaatacggagggggttagcgttgttcggaatgactgggcgtaaagcgcgcgtaggcggatcatcaagtcgggggtgaaatcccggggctcaaccccggaatggccttcgagactggtggtcttgagttcgagagaggtgagtggaattccgagtgtagaggtgaaattcgtagatattcggaggaacaccagtggcgaaggcggctcactggctcgatactgacgctgaggtgcgaaagcgtggggagcaaacaggattagataccctggtagtccacgccgtaaacgatgaatgccagacgtcggagggcttgcccttcggtgtcacacctaacggattaagcattccgcctggggagtacggtcgcaagattaaaactcaaaggaattgacgggggcccgcacaagcggtggagcatgtggtttaattcgaagcaacgcgcagaaccttaccaacccttgacatcccctgaccgccggtgagagccggttttcccgcaagggacagggagacaggtgctgcatggctgtcgtcagctcgtgtcgtgagatgttcggttaagtccggcaacgagcgcaacccacacccttggttgccagcaggtcaaactgggcactttaggggaactgcccgtgataagcgggaggaaggtgtggatgacgtcaagtcctcatggcccttacgggttgggctacacacgtgctacaatggtggtgacagagggtttatccccaaaagccatctcagttcggattgtcgtctgcaactcgacggcatgaagtcggaatcgctagtaatcgcgtaacagcacgacgcggtgaatacgttcccgggccttgtacacaccgcccgtcacaccatgggagttgggttgacccgaagacggtgcgccgacctcgcaagagggggcagccggccacggtcagctcagcgactggggtg

SEQ ID NO: 3016 - DNA, 1411 bp, unidentified
  source 1..1411: mol_type = unassigned DNA; note = Rubidibacter lacunae
gatgaacgctggcggtcggcctaacacatgcaagtcgaacgaagtcttcggacttagtggcggacgggtgagtaacacgtgagaatctgccctctggagggggacaaccgttggaaacggcggctaataccccatatgccttcgggtgaaacgctccggcgccagaggaggagctcgcggccgattagctagttggtggggtaacggcctaccaaggcagcgatcggtagctggtctgagaggacgagcagccacactgggactgagacacggcccagactcctacgggaggcagcagtggggaattttccgcaatgggcgaaagcctgacggagccagaccgcgtgcgggaagaaggcctttgggttgtaaaccgcttttctcagggaagaagacagtgacggtacctgaggaatcagcctcggctaactccgtgccagcagccgcggtaatacggaggaggcaagcgttatccggaattattgggcgtaaagcgttcgcaggcggcctgacaagtctgctgtcaaagcccgcggcttaaccgcggagaggcagtggaaactgccaggctagagtgcggtaggggtagggggaattcccagtgtagcggtgaaatgcgtagagattgggaagaacaccagtggcgaaagcgccctactggaccgcaactgacgctcagggacgaaagctagggtagcgaaagggattagatacccctgtagtcctagccgtaaacgatggagactaggtgtggctcgtatcgacccgagccgtgccgtagctaacgcgttaagtctcccgcctggggagtacgcgcgcaagcgtgaaactcaaaggaattgacgggggcccgcacaagcggtggaggatgtggtttaattcgatgcaacgcgaagaaccttaccagggcttgacatccggcgaacctttgggaaaccgaagggtgccttcgggagcgccgtgacaggtggtgcatggctgtcgtcagctcgtgtcgtgagatgttgggttaagtcccgcaacgagcgcaaccctcgtccttagttgccagcatttagttgggcactctaaggagactgctggtgacaaaccggaggaaggtggggacgacgtcaagtcagcatgccccttatgccctgggctacacacgtcctacaatggtcgggacaacgggcagcgaacccgcgagggcgagcgaatcccagcaaacccggtctcagttcagattgcaggctgcaactcgcctgcatgaaggaggaatcgctagtaatcgcaggtcagcatactgcggtgaattcgttcccgggccttgtacacaccgcccgtcacaccatggaagctggccacgcccgaagtcgttactctaacctacgggaggagggcgccgaaggcagggttggtgactggggtg

SEQ ID NO: 3017 - DNA, 1422 bp, unidentified
  source 1..1422: mol_type = unassigned DNA; note = Rubinisphaera brasiliensis
aatgaacgttggcggcatggattaggcatgcaagtcgagcgagaagctctcttcggagagtggacagcggcaaacggggtagtaaggcgtcgatatgaaccctcaggtctggaatagccattggaaacgatgggtaatgccggataatccctccggggtaaaggtccgccgcctgaggaccggtcgacgtgatactaggtagttggtgaggtaatggctcaccaagcctacgatgtctagggggtgtgagagcatggcccccaccactgggactgagacactgcccagacacctacgggtggctgcagtcgagaatctttggcaatgggcgaaagcctgaccaagcgatgccgcgtgcgggatgaaggccttcgggttgtaaaccgctgtcaggggggatgaaacttcggttgacagagccccagaggaagcacgggctaagtacgtgccagcagccgcggtaacacgtactgtgcgaacgttattcggaatcactgggcttaaagggtgcgtaggcggcctggatagtcagatgtgaaatcccacggctcaaccgtggaactgcatttgaaactgccaggcttgagtgagacaggggtgtgtggaacttctcgtggagcggtgaaatgtgttgatatgagaaggaacaccggtggcgaaagcgacacactgggtcttaactgacgctgaggcacgaaagccaggggagcgaacgggattagataccccggtagtcctggctgtaaacgttgagtactagttggtgggaacttcggttctcacggacgtagcaaaagtgttaagtactccgcctggggagtatggtcgcaaggctgaaactcaaaggaattgacgggggctcacacaagcggtggagcatgtggcttaattcgaggcaacgcgaagaaccttatcctagacttgacatgcatggattagctggctgaaaggtcagtgacgccttcgggtggaacatgcacaggtgctgcatggctgtcgtcagctcgtgccgtgaggtgttgggttaagtccttgaacgagcgcaacccctgtcgccagttgccagcaagtaatgttggggactctggcgagaccgccggtgttaaaccggaggaaggtggggacgacgtcaagtcatcatggcctttatgtctagggctgcacacgtgctacaatgcggcgtacaaagggaagccaacccgcgagggggagcaaatctcagaaagcgccgctcagttcggattgtaggctgcaactcgcctacatgaagctggaatcgctagtaatcgcaggtcagcaatactgcggtgaatgtgttcctgagccttgtacacaccgcccgtcaagccacgaaaggggggggcatcctaagtcactgagctaatctggcaggtgcctaagatgaactccctgattgggact

SEQ ID NO: 3018 - DNA, 1455 bp, Rubricoccus marinus
  source 1..1455: mol_type = unassigned DNA
gacgaacgctggcggcgggcttaacacatgcaagtcgaacgagaacggacccttcggggtcttagtaaagtggcgcacgggtgagtaacgcgtagacaacctgcccttaggtggggaataactacgggaaaccgtagctaataccgcataatgtcagatggccgcatggccgcctgatcaaagctttatgcgcctaaggatgggtctgcgttggattagctagttggtgaggtaatagctcaccaaggcaacgatccatagcgggtctgagaggatgatccgccacactggcactgagacacgggccagactcctacgggaggcagcagtgaggaatattgcgcaatggacgaaagtctgacgcagccacgccgcgtgcaggaagacacccctcaggggcgtaaactgcttttatacgggaagaatgccctggtttccagggagtgacggtaccgtacgaataaggaccggctaactccgtgccagcagccgcggtaatacggagggtccaagcgttgtccggaatcactgggtgtaaagggtgcgcaggcgggcgtgtaagtcaggggtgaaagccaccggcctaaccggtgaactgcccttgatactgcacgtcttgaatctcggagaggctatcggaattcgtggtgtagcggtgaaatgcgtaaatatcacgaggaacaccggatgcgtaggcggatagctggacgagtattgacgctcaggcacgaaagcgtggggagcgaacaggattagataccctggtagtccacgccgtaaacgatggatgctcggcgtcacttcactttagaagtggtgcccaagctaacgcgttaagcatcccacctggggagtacgaccgcaaggttgaaactcaaaggaattgacgggggcccgcacaagcggtggagcatgtggattaattcgatgcaacgcgaagaaccttacccaggctcgaacgctaggggacaggtcccgaaaaggacccttcttcggactcctagtgaggtgctgcatggctgtcgtcagctcgtgtcgtgagatgttgggttaagtcccgcaacgagcgcaacccctatcgttagttaccagcggattatgccggggactctaacgagactgcctgcgcaagcagtgaggaaggtggggacgacgtcaagtcatcatggcccttacgcctggggcttcacacgtgctacaatggacggtacagagggcagccaccccgcgagggggagcgaatccttaaagccgttctcagttcggatcggagtctgcaactcgactccgtgaagctggaatcgctagtaatcgcgtatcagcaatgacgcggtgaatacgttcccgggccttgtacacaccgcccgtcaagccatggaagttgagggggcccgaagtccgtgacccaacccgcaagggagggagcggccgaaggtcaactcagtaactggggct

SEQ ID NO: 3019 - DNA, 1461 bp, unidentified
  source 1..1461: mol_type = unassigned DNA; note = Rubripirellula obstinata
aatgaacgttggcggcgtggattaggcatgcaagtcgcacgagaagtctcaattagcttgctatgagagacggacagtggcgtaagggagagtaacgcgtggttacgtacctcaaagaccaggatagtagcgggaaactgctagtaatactggatgatatcttcggatcaaatggtgtgattccgctttgagatcggaccgcgtactattagtttgttggtgaggtaatggctcaccaagactgcgatggttaccgggtgtgagagcatgacccggctcactgggactgagacactgcccagacatctacggatggctgcagtcgagaatctttgtcaatgggcgaaagcctgaacaagcgacgccgcgtgcgggatgaaggccctcgggttgtaaaccgctgtcagaagctaggaaatgctaggtggttatccatctagtttgaccgaccttcagaggaaggacgggctaagttcgtgccagcagccgcggtaagacgaaccgtccaaacgttattcggtatcactgggcttaaagcgtgcgtaggcggcttggtaggtgagatgtgaaagcccacggctcaaccgtggaattgcgtttcaaacccccaagctcgagtaagataggggtgatgggaacttatggtggagcggtgaaatgcgttgatatcatagggaacaccggtggcgaaagcgcatcactggatctttactgacgctgaggcacgaaagctagggtagcgaacgggattagataccccggtagtcctagccgtaaacgatgaatactgggttgaggggactctcacatcctctcggccgtagcgaaagcgttaagtattccgcctggggagtatggtcgcaaggctgaaactcaaaggaattgacgggggctcacacaagcggtggaggatgtggcttaattcgaggctacgcgaagaaccttatcctagatttgacatgcttgagaatccctatgaaaatagagagtgctcttcggagagctcttgcacaggtgctgcatggctgtcgtcagctcgtgtcgtgagatgtcgggttaagtcccttaacgagcgaaacccttatctttagttgccagcgggtcatgccggggactctaaagagactgccggtgtcaaaccggaggaaggtggggatgacgtcaagtcctcatggcctttatgtctagggctgcacacgtcctacaatggtacggacaaacggacgcaataccgcgaggtggagcaaatcctagaaaccgtgcctcagttcggattgcaggctgcaactcgcctgcatgaagccggaatcgctagtaatcgtaggtcagcatactacggtgaatgtgttcctgagccttgtacacaccgcccgtcaagccacgaaagttggaagggcccgaagtcactaagctaactcgcaagagaggcaggtgccgaaggtcagttcgacaattgggact

SEQ ID NO: 3020 - DNA, 1457 bp, unidentified
  source 1..1457: mol_type = unassigned DNA; note = Rubrivirga marina
gacgaacgctggcggcgggcttaacacatgcaagtcgaacgagaaaggggccttcgggccctgagtaaagtggcgcacgggtgagtaacgcgtaggcaatctgccctcaggcggggaataaccacgggaaaccgtggctaataccacataacgtcggaggtccgcatggaccaccgaccaaaggcttcggccacctgaggatgagcctgcgtcggattagctagttggtgggataacagcccaccaaggcaacgatccgtagcgggtctgagaggatgatccgccacactggcactgagacacgggccagactcctacgggaggcagcagtgaggaatattgcgcaatggaggaaactctgacgcagccacgccgcgtgcaggaagacacccctcaggggcgtaaactgcttttgtacgggaagaacacctcctctcggggaggtctgacggtaccgtacgaataaggaccggctaactccgtgccagcagccgcggtaatacggagggtccaagcgttgtccggaatcactgggtgtaaagggtgcgcaggcgggcttgtaagtcaggggtgaaagccaccggcctaaccggtgaattgcccttgatactgcaagtcttgagtcccggagaggctatcggaattcgtggtgtagcggtgaaatgcgtaaatatcacgaggaacacctaatgcgtaggcagatagctggacgggtactgacgctcaggcacgaaagcgtggggagcgaacaggattagataccctggtagtccacgccgtaaacgatggatgctcgatgttgcaccgcttcaggtgcagtgtctaagctaacgcgttaagcatcccacctggggagtacgatcgcaaggttgaaactcaaaggaattgacgggggcccgcacaagcggtggagcatgtggattaattcgatgcaacgcgaagaaccttacccaggctcgaacgctaccggacaggtcctgaaagggacccttcttcggactggtagcgaggtgctgcatggctgtcgtcagttcgtgtcgtgagatgttgggttaagtcccgcaacgaacgcaacccctatcgctagttaccagcgggttatgccggggactctagcgagactgcctgcgcaagcagtgaggaaggtggggacgacgtcaagtcatcatggcccttacgcctggggcttcacacgtgctacaatggccggtacaatgggcagccactccgcgaggaggagcgaatccataaagccggtctcagttcggatcggagtctgcaacccgactccgtgaagctggaatcgctagtaatcgcgtatcagcaacgacgcggtgaatacgttcccgggccttgtacacaccgcccgtcaagccatggaagttgagggcgcccgaagtccgtgacccaacccctcggggagggagcggccgaaggtgaactcagtgactggggct

SEQ ID NO: 3021 - DNA, 1467 bp, Rudaea cellulosilytica
  source 1..1467: mol_type = unassigned DNA
agtgaacgctggcggcatgcctaacacatgcaagtcgaacggcagcacagcagtagcaatactgtgggtggcgagtggcggacgggtgaggaatacatcggaatttgccctgtcgtgggggataacgtagggaaacttacgctaataccgcatacgacctaacggtgaaagcgggggatcgcaagacctcgcgcggctggagaagccgatgtcagattagctagttggcggggtaaaggcccaccaaggcgacgatctgtagctggtctgagaggatgatcagccacactgggactgagacacggcccagactcctacgggaggcagcagtggggaatattggacaatgggcgcaagcctgatccagcaatgccgcgtgtgtgaagaaggccttcgggttgtaaagcacttttatctggagcgaaatctgcagggctaatacccatgcagtctgacggtaccagaggaataagcaccggctaacttcgtgccagcagccgcggtaatacgaagggtgcaagcgttactcggaattactgggcgtaaagcgtgagtaggtggtttcttaagtctgctgtgaaagccccgggctcaacctgggaattgcagtggatactgggaagctagagtgcggtagagggtagtggaattcccggtgtagcggtgaaatgcgtagagatcgggaggaacaccagtggcgaaggcggctacctggaccagcactgacactgagtcacgaaagcgtggggagcaaacaggattagataccctggtagtccacgccctaaacgatgcgaactggatgttgggtgcaacttggcactcagtatcgaagctaacgcgttaagttcgccgcctggggagtacggtcgcaagactgaaactcaaaggaattgacgggggcccgcacaagcggtggagtatgtggtttaattcgatgcaacgcgaagaaccttacctggccttgacatgtccggaatcctgcagagatgcgggagtgccttcgggaatcggaacacaggtgctgcatggctgtcgtcagctcgtgtcgtgagatgttgggttaagtcccgcaacgagcgcaacccttgtccttagttgccagcacgtaatggtgggaactctaaggagaccgccggtgacaaaccggaggaaggtggggatgacgtcaagtcatcatggcccttacggccagggctacacacgtactacaatgggaggtacagagggttgcgaagccgcgaggcgaagccaatcccagaaaacctctctcagtccggatcgtagtctgcaactcgactacgtgaagtcggaatcgctagtaatcgcgaatcagcattgtcgcggtgaatacgttcccgggccttgtacacaccgcccgtcacaccatgggagttggttgctccagaagcaggtagtctaaccgcaagggggacgcttgccacggagtggtcaatgactggggtg

SEQ ID NO: 3022 - DNA, 1382 bp, Ruegeria atlantica
  source 1..1382: mol_type = unassigned DNA
aacgaacgctggcggcaggcttaacacatgcaagtcgagcgcaccttcgggtgagcggcggacgggttagtaacgcgtgggaacataccctttggtacggaatagcctctggaaacggagagtaataccgtatgagcccttcgggggaaagatttatcgccaaaggattggcccgcgttagattaggtagttggtggggtaatggcctaccaagcctacgatctatagctggttttagaggatgatcagcaacactgggactgagacacggcccagactcctacgggaggcagcagtggggaatcttggacaatgggggcaaccctgatccagccatgccgcgtgagtgatgaaggccttagggtcgtaaagctctttcgcctgtgaagataatgacggtagcaggtaaagaaaccccggctaactccgtgccagcagccgcggtaatacggagggggttagcgttgttcggaattactgggcgtaaagcgcacgtaggcggactggaaagttgggggtgaaatcccagggctcaaccctggaactgcctccaaaactatcagtctagagttcgagagaggtgagtggaattccgagtgtagaggtgaaattcgtagatattcggaggaacaccagtggcgaaggcggctcactggctcgatactgacgctgaggtgcgaaagtgtggggagcaaacaggattagataccctggtagtccacaccgtaaacgatgaatgccagtcgtcgggtagcatgctattcggtgacacacctaacggattaagcattccgcctggggagtacggtcgcaagattaaaactcaaaggaattgacgggggcccgcacaagcggtggagcatgtggtttaattcgaagcaacgcgcagaaccttaccaacccttgacatcctaggaccggcccagagatgggtctttcacttcggtgacctagtgacaggtgctgcatggctgtcgtcagctcgtgtcgtgagatgttcggttaagtccggcaacgagcgcaacccacatccttagttgccagcagttcggctgggcactctagggaaactgcccgtgataagcgggaggaaggtgtggatgacgtcaagtcctcatggcccttacgggttgggctacacacgtgctacaatggcagtgacaatgggttaatcccaaaaaactgtctcagttcggattggggtctgcaactcgaccccatgaagtcggaatcgctagtaatcgcgtaacagcatgacgcggtgaatacgttcccgggccttgtacacaccgcccgtcacaccatgggagttggttctacccgacgacgctgcgctaaccttcggggggcaggcggccacggtaggatcagcgactggggtg

SEQ ID NO: 3023 - DNA, 1386 bp, unidentified
  source 1..1386: mol_type = unassigned DNA; note = Ruegeria intermedia
aacgaacgctggcggcaggcctaacacatgcaagtcgagcgcgcccttcggggtgagcggcggacgggttagtaacgcgtgggaacgtgccctttggtacggaatagcctctggaaacggagagtaataccgtatgagcccttcgggggaaagatttatcgccaaaggatcggcccgcgttagattaggtagttggtggggtaatggcctaccaagcctacgatctatagctggttttagaggatgatcagcaacactgggactgagacacggcccagactcctacgggaggcagcagtggggaatcttggacaatgggggcaaccctgatccagccatgccgcgtgagtgatgaaggccctagggtcgtaaagctctttcgcctgtgaagataatgacggtagcaggtaaagaaaccccggctaactccgtgccagcagccgcggtaatacggagggggttagcgttgttcggaattactgggcgtaaagcgcgcgtaggcggactattaagtcaggggtgaaatcccggggctcaaccccggaactgcctttgatactggtagtctagagttcgagagaggtgagtggaattccgagtgtagaggtgaaattcgtagatattcggaggaacaccagtggcgaaggcggctcactggctcgatactgacgctgaggtgcgaaagtgtggggagcaaacaggattagataccctggtagtccacaccgtaaacgatgaatgccagacgtcgggcagcatgctgttcggtgtcacacctaacggattaagcattccgcctggggagtacggtcgcaagattaaaactcaaaggaattgacgggggcccgcacaagcggtggagcatgtggtttaattcgaagcaacgcgcagaaccttaccaacccttgacatcccgggaccgcgccagagatggcgtttccacttcggtggctcggtgacaggtgctgcatggctgtcgtcagctcgtgtcgtgagatgttcggttaagtccggcaacgagcgcaacccacgtccttagttgccagcagttcggctgggcactctaaggaaactgcccgtgataagcgggaggaaggtgtggatgacgtcaagtcctcatggcccttacgggttgggctacacacgtgctacaatggtagtgacaatgggttaatcccaaaaagctatctcagttcggattgtcgtctgcaactcgacggcatgaagtcggaatcgctagtaatcgcgtaacagcatgacgcggtgaatacgttcccgggccttgtacacaccgcccgtcacaccatgggagttggttctacccgacgacgctgcgctaacccttcggggaggcaggcggccacggtaggatcagcgactggggtg

SEQ ID NO: 3024 - DNA, 1399 bp, unidentified
  source 1..1399: mol_type = unassigned DNA; note = Ruegeria litorea
catgcaagtcgagcgcgcccttcggggtgagcggcggacgggttagtaacgcgtgggaatatacccaaaggtagggaatagcctctggaaacggagagtaataccctatgtgcccttcgggggaaagatttatcgcctttggattagcccgcgttagattaggtagttggtggggtaatggcctaccaagcctacgatctatagctggttttagaggatgatcagcaacactgggactgagacacggcccagactcctacgggaggcagcagtggggaatcttggacaatgggcgcaagcctgatccagccatgccgcgtgagtgatgaaggccttagggtcgtaaagctctttcgccagggatgataatgacagtacctggtaaagaaaccccggctaactccgtgccagcagccgcggtaatacggagggggttagcgttgttcggaattactgggcgtaaagcgcgcgtaggcggatcagaaagtaaggggtgaaatcccagggctcaaccctggaactgcctcttaaactcctggtcttgagttcgagagaggtgagtggaattccgagtgtagaggtgaaattcgtagatattcggaggaacaccagtggcgaaggcggctcactggctcgatactgacgctgaggtgcgaaagtgtggggagcaaacaggattagataccctggtagtccacaccgtaaacgatgaatgccagtcgtcggcaagcatgcttgtcggtgacacacctaacggattaagcattccgcctggggagtacggtcgcaagattaaaactcaaaggaattgacgggggcccgcacaagcggtggagcatgtggtttaattcgaagcaacgcgcagaaccttaccaacccttgacatcctaggacaactccagagatggagccttccttcgggacctagtgacaggtgctgcatggctgtcgtcagctcgtgtcgtgagatgttcggttaagtccggcaacgagcgcaacccacatccttagttgccagcagttcggctgggcactctagggaaactgcccgtgataagcgggaggaaggtgtggatgacgtcaagtcctcatggcccttacgggttgggctacacacgtgctacaatggcaactacagtgggttaatccccaaaagttgtctcagttcggattggggtctgcaactcgaccccatgaagtcggaatcgctagtaatcgcgtaacagcatgacgcggtgaatacgttcccgggccttgtacacaccgcccgtcacaccatgggagttgggtttacccgaaggccgtgcgccaacctttcgagggggcagcggaccacggtgagctcagcgactggggtgaagtcgtaacaaggtagccgtaggggaaccagcggctggac

SEQ ID NO: 3025 - DNA, 1386 bp, Ruegeria marina
  source 1..1386: mol_type = unassigned DNA
aacgaacgctggcggcaggcctaacacatgcaagtcgagcgcgcccttcggggtgagcggcggacgggttagtaacgcgtgggaacgtgcccttctctacggaatagtcccgggaaactgggggtaataccgtatacgccctttgggggaaagatttatcggagaaggatcggcccgcgttagattaggtagttggtggggtaatggcctaccaagcctacgatctatagctggttttagaggatgatcagcaacactgggactgagacacggcccagactcctacgggaggcagcagtggggaatcttggacaatgggggcaaccctgatccagccatgccgcgtgagtgaagaaggccctagggtcgtaaagctctttcgcctgtgaagataatgacggtagcaggtaaagaaaccccggctaactccgtgccagcagccgcggtaatacggagggggttagcgttgttcggaattactgggcgtaaagcgcgcgtaggcggattggaaagttgggggtgaaatcccagggctcaaccctggaactgcctccaaaactcccagtcttgagttcgagagaggtgagtggaattccgagtgtagaggtgaaattcgtagatattcggaggaacaccagtggcgaaggcggctcactggctcgatactgacgctgaggtgcgaaagtgtggggagcaaacaggattagataccctggtagtccacaccgtaaacgatgaatgccagtcgtcgggtagcatgctgctcggtgacacacctaacggattaagcattccgcctggggagtacggccgcaaggttaaaactcaaaggaattgacgggggcccgcacaagcggtggagcatgtggtttaattcgaagcaacgcgcagaaccttaccaacccttgacatcctcggaccgttccagagatggttctttcccttcggggaccgagtgacaggtgctgcatggctgtcgtcagctcgtgtcgtgagatgttcggttaagtccggcaacgagcgcaacccacacccttagttgccagcagttcggctgggcactctaggggaactgcccgtgataagcgggaggaaggtgtggatgacgtcaagtcctcatggcccttacgggttgggctacacacgtgctacaatggtagtgacaatgggttaatcccaaaaagctatctcagttcggattgtcgtctgcaactcgacggcatgaagtcggaatcgctagtaatcgcgtaacagcatgacgcggtgaatacgttcccgggccttgtacacaccgcccgtcacaccatgggagttgggtctacccgaagacggtgcgccaacctttcgaggaggcagctggccacggtaggctcagcgactggggtg

SEQ ID NO: 3026 - DNA, 1386 bp, unidentified
  source 1..1386: mol_type = unassigned DNA; note = Ruegeria marisrubri
aacgaacgctggcggcaggcctaacacatgcaagtcgagcgcgcccttcggggtgagcggcggacgggttagtaacgcgtgggaacgtgccctttggtacggaatagcctctggaaacggagagtaataccgtatgagccctacgggggaaagatttatcgccaaaggatcggcccgcgttagattaggtagttggtggggtaatggcctaccaagcctacgatctatagctggttttagaggatgatcagcaacactgggactgagacacggcccagactcctacgggaggcagcagtggggaatcttggacaatgggggcaaccctgatccagccatgccgcgtgagtgatgaaggccctagggtcgtaaagctctttcgcctgtgaagataatgacggtagcaggtaaagaaaccccggctaactccgtgccagcagccgcggtaatacggagggggttagcgttgttcggaattactgggcgtaaagcgcgcgtaggcggactggaaagttgggggtgaaatcccggggctcaaccccggaactgcctccaaaactatcagtctagagttcgagagaggtgagtggaattccgagtgtagaggtgaaattcgtagatattcggaggaacaccagtggcgaaggcggctcactggctcgatactgacgctgaggtgcgaaagtgtggggagcaaacaggattagataccctggtagtccacaccgtaaacgatgaatgccagacgtcgggcagcatgctgttcggtgtcacacctaacggattaagcattccgcctggggagtacggtcgcaagattaaaactcaaaggaattgacgggggcccgcacaagcggtggagcatgtggtttaattcgaagcaacgcgcagaaccttaccaacccttgacatcccgggaccgcgccagagatggcgtttccacttcggtggctcggtgacaggtgctgcatggctgtcgtcagctcgtgtcgtgagatgttcggttaagtccggcaacgagcgcaacccacgtccttagttgccagcagttcggctgggcactctaaggaaactgcccgtgataagcgggaggaaggtgtggatgacgtcaagtcctcatggcccttacgggttgggctacacacgtgctacaatggtggtgacagtgggttaatccccaaaagccatctcagttcggattgtcgtctgcaactcgacggcatgaagtcggaatcgctagtaatcgcgtaacagcatgacgcggtgaatacgttcccgggccttgtacacaccgcccgtcacaccatgggagttgggtctacccgaagacggtgcgccaacctttcgagggggcagctggccacggtaggctcagcgactggggtg

SEQ ID NO: 3027 - DNA, 1419 bp, unidentified
  source 1..1419: mol_type = unassigned DNA; note = Ruegeria mediterranea
ggcggcaggcctaacacatgcaagtcgagcgcgcccttcggggtgagcggcggacgggttagtaacgcgtgggaatatacccaaaggtagggaatagcctctggaaacggagagtaataccctatgagcccttcgggggaaagatttatcgcctttggattagcccgcgttagattaggtagttggtggggtaatggcctaccaagcctacgatctatagctggttttagaggatgatcagcaacactgggactgagacacggcccagactcctacgggaggcagcagtggggaatcttggacaatgggcgcaagcctgatccagccatgccgcgtgagtgatgaaggccttagggtcgtaaagctctttcgccagggatgataatgacagtacctggtaaagaaaccccggctaactccgtgccagcagccgcggtaatacggagggggttagcgttgttcggaattactgggcgtaaagcgcgcgtaggcggatcagaaagttgggggtgaaatcccggggctcaaccccggaactgcctccaaaactcctggtcttgagttcgagagaggtgagtggaattccgagtgtagaggtgaaattcgtagatattcggaggaacaccagtggcgaaggcggctcactggctcgatactgacgctgaggtgcgaaagtgtggggagcaaacaggattagataccctggtagtccacaccgtaaacgatgaatgccagtcgtcagcaagcatgcttgttggtgacacacctaacggattaagcattccgcctggggagtacggtcgcaagattaaaactcaaaggaattgacgggggcccgcacaagcggtggagcatgtggtttaattcgaagcaacgcgcagaaccttaccaacccttgacatcctaggacaactccagagatggagccttccttcgggacctagtgacaggtgctgcatggctgtcgtcagctcgtgtcgtgagatgttcggttaagtccggcaacgagcgcaacccacatccttagttgccagcagttcggctgggcactctagggaaactgcccgtgataagcgggaggaaggtgtggatgacgtcaagtcctcatggcccttacgggttgggctacacacgtgctacaatggcaactacagtgggttaatccccaaaagttgtctcagttcggattggggtctgcaactcgaccccatgaagtcggaatcgctagtaatcgcgtaacagcatgacgcggtgaatacgttcccgggccttgtacacaccgcccgtcacaccatgggagttgggtttacccgaaggccgtgcgccaacctttcgagggggcagcggaccacggtgagctcagcgactggggtgaagtcgtaacaaggtagccgtaagggaacctgcggctggatcact

SEQ ID NO: 3028 - DNA, 1385 bp, Ruegeria pomeroyi
  source 1..1385: mol_type = unassigned DNA
aacgaacgctggcggcaggcctaacacatgcaagtcgagcgcgcccttcggggtgagcggcggacgggttagtaacgcgtgggaacgtaccctttggtagggaatagccactggaaacggtgagtaataccctatgagcccttcgggggaaagatttatcgccaaaggatcggcccgcgttagattaggtagttggtggggtaatggcctaccaagcctacgatctatagctggttttagaggatgatcagcaacactgggactgagacacggcccagactcctacgggaggcagcagtggggaatcttggacaatgggggcaaccctgatccagccatgccgcgtgagtgaagaaggccttagggtcgtaaagctctttcgcctgtgaagataatgacggtagcaggtaaagaaaccccggctaactccgtgccagcagccgcggtaatacggagggggttagcgttgttcggaattactgggcgtaaagcgcgcgtaggcggaccagaaagttgggggtgaaatcccggggctcaaccccggaactgcctccaaaactcctggtcttgagttcgagagaggtgagtggaattccgagtgtagaggtgaaattcgtagatattcggaggaacaccagtggcgaaggcggctcactggctcgatactgacgctgaggtgcgaaagtgtggggagcaaacaggattagataccctggtagtccacaccgtaaacgatgaatgccagtcgtcgggtagcatgctgctcggtgacacacctaacggattaagcattccgcctggggagtacggccgcaaggttaaaactcaaaggaattgacgggggcccgcacaagcggtggagcatgtggtttaattcgaagcaacgcgcagaaccttaccaacccttgacatcctcggaccgtcccagagatgggtctttcacttcggtgaccgagtgacaggtgctgcatggctgtcgtcagctcgtgtcgtgagatgttcggttaagtccggcaacgagcgcaacccacacccttagttgccagcattcagttgggcactctaggggaactgcccgtgataagcgggaggaaggtgtggatgacgtcaagtcctcatggcccttacgggttgggctacacacgtgctacaatggcagtgacaatgggttaatcccaaaaaactgtctcagttcggattggggtctgcaactcgaccccatgaagtcggaatcgctagtaatcgcgtaacagcatgacgcggtgaatacgttcccgggccttgtacacaccgcccgtcacaccatgggagttgggtctacccgaagacggtgcgccaacctttcgaggaggcagctggccacggtaggctcagcgactggggtg

SEQ ID NO: 3029 - DNA, 1451 bp, Rugamonas rubra
  source 1..1451: mol_type = unassigned DNA
attgaacgctggcggcatgccttacacatgcaagtcgaacggcagcgcggggcaacctggcggcgagtggcgaacgggtgagtaatatatcggaacgtaccctggagtgggggataacgtagcgaaagttacgctaataccgcatacgatctaaggatgaaagtgggggatcgcaagacctcatgctcctggagcggccgatatctgattagctagttggtggggtaaaggcctaccaaggcatcgatcagtagctggtctgagaggacgaccagccacactggaactgagacacggtccagactcctacgggaggcagcagtggggaattttggacaatgggcgaaagcctgatccagcaatgccgcgtgagtgaagaaggccttcgggttgtaaagctcttttgtcagggaagaaacggtgggttctaatacagcctgctaatgacggtacctgaagaataagcaccggctaactacgtgccagcagccgcggtaatacgtagggtgcaagcgttaatcggaattactgggcgtaaagcgtgcgcaggcggttttgtaagtctgtcgtgaaatccccgggctcaacctgggaatggcgatggagactgcaaggctagagtttggcagaggggggtagaattccacgtgtagcagtgaaatgcgtagatatgtggaggaacaccgatggcgaaggcagccccctgggtcaagactgacgctcatgcacgaaagcgtggggagcaaacaggattagataccctggtagtccacgccctaaacgatgtctactagttgtcgggtcttaattgacttggtaacgcagctaacgcgtgaagtagaccgcctggggagtacggtcgcaagattaaaactcaaaggaattgacggggacccgcacaagcggtggatgatgtggattaattcgatgcaacgcgaaaaaccttacctacccttgacatggctggaatccttgagagatcagggagtgctcgaaagagaaccagtacacaggtgctgcatggctgtcgtcagctcgtgtcgtgagatgttgggttaagtcccgcaacgagcgcaacccttgtcattagttgctacgaaagggcactctaatgagactgccggtgacaaaccggaggaaggtggggatgacgtcaagtcctcatggcccttatgggtagggcttcacacgtcatacaatggtacatacagagcgccgccaacccgcgagggggagctaatcgcagaaagtgtatcgtagtccggattgtagtctgcaactcgactgcatgaagttggaatcgctagtaatcgcggatcagcatgtcgcggtgaatacgttcccgggtcttgtacacaccgcccgtcacaccatgggagcgggttttaccagaagtaggtagcttaaccgcaaggagggcgcttaccacggtaggattcgtgactggggtg

SEQ ID NO: 3030 - DNA, 1490 bp, unidentified
  source 1..1490: mol_type = unassigned DNA; note = Rugosibacter aromaticivorans
attgaacgctggcggaatgctttacacatgcaagtcgaacggcagcacgggagcttgctcctggtggcgagtggcgaacgggtgagtaatgtatcggaacgtaccccgtcgtgggggataactctccgaaaggagagctaataccgcatacgacccgagggtgaaagcgggggacctggggtaacctgggcctcgcgcgatgggagcggccgatatcggattagctagttggtggggtaaaggcctaccaaggcgacgatccgtagcgggtctgagaggacgacccgccacactggaactgagacacggtccagactcctacgggaggcagcagtggggaattttggacaatgggcgcaagcctgatccagccattccgcgtgagtgaagaaggccttcgggttgtaaagctctttcagcaggaacgaaacggtgggtcttaatacggcctgctaatgacggtacctgcagaagaagcaccggctaactacgtgccagcagccgcggtaatacgtagggtgcgagcgttaatcggaattactgggcgtaaagcgtgcgcaggcggcgacataagacagatgtgaaatccccgggctcaacctgggaacggcgtttgtgactgtgtggctagagtgtagcagaggggggtggaattccacgtgtagcagtgaaatgcgtagagatgtggaggaacaccgatggcgaaggcagccccctgggttaacactgacgctcatgcacgaaagcgtggggagcaaacaggattagataccctggtagtccacgccctaaacgatgccaactaggtgttgggggaggagacttccttagtaccgtagctaacgcgtgaagttggccgcctggggagtacggtcgcaagattaaaactcaaaggaattgacggggacccgcacaagcggtggatgatgtggattaattcgatgcaacgcgaaaaaccttacctacccttgacatgtccggaatcccgaagagatttgggagtgctcgaaagagagccggaacacaggtgctgcatggctgtcgtcagctcgtgtcgtgagatgttgggttaagtcccgcaacgagcgcaacccttatcattagttgccatcattgagttgggcactctaatgagactgccggtgacaaaccggaggaaggtggggatgacgtcaagtcctcatggcccttatgggtagggcttcacacgtcatacaatggtcggtacagagggttgccaacccgcgagggggagctaatctcacaaagccgatcgtagtccggatcgcagtctgcaactcgactgcgtgaagtcggaatcgctagtaatcgtggatcagcatgtcacggtgaatacgttcccgggtcttgtacacaccgcccgtcacaccatgggagtgggttccaccagaagtaggtagtctaaccgcgcaccggcgtaagttggcgtgcggagggcgcttaccacggtggggttcatgactggggtg

SEQ ID NO: 3031 - DNA, 1491 bp, unidentified
  source 1..1491: mol_type = unassigned DNA; note = Ruminiclostridium papyrosolvens
  misc_difference 28: note = n is a, c, g, or t
  misc_difference 46: note = n is a, c, g, or t
  misc_difference 153..154: note = n is a, c, g, or t
  misc_difference 197: note = n is a, c, g, or t
gctggcggcgtgcctaacacatgcaagncgagcggagtagagtgtnagctttcttgtgagtaacttagcggcggacgggtgagtaacgcgtgggcaacctgcctgttacagggggataacacagggaaacttgtgctaataccgcataacacnncgagaaagcagttttcttgttgtcaaaggagcaatccggtaanagatgggcccgcgtccaattagctagttggtgatgtaacggaccaccaaggcgacgattggtagccgaactgagaggttgatcggccacattgggactgagacacggcccagactcctacgggaggcagcagtggggaatattgcacaatgggggaaaccctgatgcagcaacgccgcgtgaaggatgaaggttttcggattgtaaacttctttagtcagggacgaataaatgacggtacctgaagaataagccacggctaactacgtgccagcagccgcggtaatacgtaggtggcaagcgttgtccggaattactgggtgtaaagggcgtgtaggcgggaatgtaagtcagatgtgaaatcccagagcttaactctggagctgcatctgaaactatgtttcttgagtgccggagaggaaagcggaattcctagtgtagcggtgaaatgcgtagatattaggaggaacaccagtggcgaaggcggctttctggacggtaactgacgctgaggcgcgaaagcgtggggagcaaacaggattagataccctggtagtccacgctgtaaacgatggatactaggtgtaggaggtatcgaccccttctgtgccggagttaacacaataagtatcccacctggggagtacggccgcaaggttgaaactcaaaggaattgacgggggcccgcacaagcagtggagtatgtggtttaattcgaagcaacgcgaagaaccttaccaaggcttgacataatagtgaatacggtagagatatcgtagtccttcgggacactattacaggtggtgcatggttgtcgtcagctcgtgtcgtgagatgttgggttaagtcccgcaacgagcgcaacccctgttgctagttgataacattaagatgatcactctagcgagactgccggtgataaatcggaggaaggtggggacgacgtgaaatcatcatgccccttatgtcttgggctacacacgtactacaatggctataacagagggaagctaagctgcaaagtggagcaaatccccaaaaatagtcccagttcagattgtgggctgcaacccgcccacatgaagtcggaattgctagtaatggcaggtcagcatactgccgtgaatacgttcccgggccttgtacacaccgcccgtcacaccatgagagtctgcaacacccgaagtcgatagtctaaccgcaaggaggacgtcgccgaaggtggggccgatgattggggtgaagtcgtaacaaggtagccgtatcggaaggtgcggctggatcacctcctttct

SEQ ID NO: 3032 - DNA, 1436 bp, unidentified
  source 1..1436: mol_type = unassigned DNA; note = Ruminiclostridium sufflavum
tttgaagcagcatacataaccggagtattgagtgttgaacatgaggtagcggcggacgggtgagtaacgcgtgggcaacctgcctttcacagggggataacacagggaaacttgtgctaataccgcataacacatcgaggtagcattaccatgatgtcaaaggagcaatccggtgaaagatgggcccgcgtccaattagctagttggtgatgtaacggaccaccaaggcgacgattggtagccgaactgagaggttgatcggccacattgggactgagacacggcccagactcctacgggaggcagcagtggggaatattgcacaatggggggaaccctgatgcagcaacgccgcgtgaaggatgaaggttttcggattgtaaacttctttagtcagggacgaaaaaaatgacggtacctgaagaataagccacggctaactacgtgccagcagccgcggtaatacgtaggtggcgagcgttgtccggaattactgggtgtaaagggcgtgtaggcgggaatgtaagtcagatgtgaaatcccagggcttaactctggagctgcatctgaaactatgtttcttgagtgccggagaggaaagcggaattcctagtgtagcggtgaaatgcgtagatattaggaggaacaccagtggcgaaggcggctttctggacggtaactgacgctgaggcgcgaaagcgtggggagcaaacaggattagataccctggtagtccacgctgtaaacgatggatactaggtgtaggaggtatcgaccccttctgtgccggagttaacacaataagtatcccacctggggagtacggccgcaaggttgaaactcaaaggaattgacgggggcccgcacaagcagtggagtatgtggtttaattcgaagcaacgcgaagaaccttaccaaggcttgacataatattgaatatggcagagatgtcatagtccttcgggacagtattacaggtggtgcatggttgtcgtcagctcgtgtcgtgagatgttgggttaagtcccgcaacgagcgcaacccctgttgttagttgataacattaagatgatcactctaacgagactgccggtgataaatcggaggaaggtggggacgacgtcaaatcatcatgccccttatgtcttgggctacacacgtactacaatggctattacaatgagaagcgaagctgtaaagtggagcaaatctataaaaatagtctcagttcagattgtgggctgcaacccgcccacatgaagtcggaattgctagtaatggcaggtcagcatactgccgtgaatacgttcccgggccttgtacacaccgcccgtcacaccatgagagtctgcaacacccgaagtcgatagtctaaccgcaaggaggacgttgccgaaggtggggccgatgattggggtgaagtcgtaacaaggtag

SEQ ID NO: 3033 - DNA, 1475 bp, Saccharibacillus kuerlensis
  source 1..1475: mol_type = unassigned DNA
gacgaacgctggcggcatgcctaatacatgcaagtcgagcggagttgacgagaagcttgcttctctgatacttagcggcggacgggtgagtaacacgtaggcaacctgcctttcagcctgggataacttccggaaacggatgctaataccggatacatcattttctggcatcagagaatgaggaaagacggcgcaagctgtcactgagagatgggcctgcggcgcattagctagttggtggggtaacggctcaccaaggcgacgatgcgtagccgacctgagagggtgaacggccacactgggactgagacacggcccagactcctacgggaggcagcagtagggaatcttccacaatgggcgaaagcctgatggagcaatgccgcgtgagtgatgaaggttttcggatcgtaaagctctgttgccagggaagaacgtccagtagagtaactgctactggagtgacggtacctgagaagaaagccccggctaactacgtgccagcagccgcggtaatacgtagggggcaagcgttgtccggaattattgggcgtaaagcgcgtgcaggcggcttgttaagtcggatgtttaagatcggggctcaaccccgattcgcatccgaaactggcaagcttgagtgtaggagaggaaagtggaattccacgtgtagcggtgaaatgcgtagagatgtggaggaacaccagtggcgaaggcgactttctggcctataactgacgctgaggcgcgaaagcgtggggagcaaacaggattagataccctggtagtccacgctgtaaacgatgagtgctaggtgttcggggtttcgataccctgggtgccgaagttaacgcattaagcactccgcctggggagtacggtcgcaagactgaaactcaaaggaattgacggggacccgcacaagcagtggagtatgtggtttaattcgaagcaacgcgaagaaccttaccaggtcttgacatcggaatgaccggcttagagataggcctttccttcgggacattccagacaggtggtgcatggttgtcgtcagctcgtgtcgtgagatgttgggttaagtcccgcaacgagcgcaacccttgactttagttgccagcattttaagatgggcactctagagtgactgccggtgacaaaccggaggaaggcggggatgacgtcaaatcatcatgccccttatgacctgggctacacacgtactacaatggtcggtacagagggttgcgaagccgcgaggtgaagccaatcccagaaagccgatctcagttcggattgtaggctgcaactcgcctgcatgaagtcggaattgctagtaatcgcggatcagcatgccgcggtgaatacgttcccgggtcttgtacacaccgcccgtcacaccacgagagtttacaacacccgaagtcggtgaggtaaccgcaaggagccagccgccgaaggtggggtagatgattggggtg

SEQ ID NO: 3034 - DNA, 1406 bp, Saccharibacter floricola
  source 1..1406: mol_type = unassigned DNA
agcgaacgctggcggcatgcttaacacatgcaagtcgcacgaacctttcggggttagtggcggacgggtgagtaacgcgtaggaacctatccagaggtgggggataacaccgggaaactggtgctaataccgcatgatacctgagggttaaaggcttttgttgcctttggaggggcctgcgtttgattagctagttggttgggtaaaggctgaccaaggcgatgatcaatagctggtttgagaggatgatcagccacactgggactgagacacggcccagactcctacgggaggcagcagtggggaatattggacaatgggggcaaccctgatccagcaatgccgcgtgtgtgaagaaggtcttcggattgtaaagcactttcactagggaagatgatgacggtacctagagaagaagccccggctaacttcgtgccagcagccgcggtaatacgaagggggctagcgttgctcggaatgactgggcgtaaagggcgcgtaggcggtttatacagtcagatgtgaaatccccgggcttaacctgggaactgcatttgatacgtatagactagagtccgagagaggattgcggaattcccagtgtagaggtgaaattcgtagatattgggaagaacaccagttgcgaaggcggcaatctggctcggaactgacgctgaggcgcgaaagcgtggggagcgaacaggattagataccctggtagtccacgctgtaaacgatgtgtgctggatgttgggaaacttagtttttcagtgtcgaagctaacgtgttaagcacaccgcctggggagtacgaccgcaaggttgaaactcaaagaaattgacgggggcccgcacaagcggtggagcatgtggtttaattcgaagcaacgcgcagaaccttaccaggtcttgtatggggaggacgtgctcagagatgagtatttcttcggacctcccgcacaggtgctgcatggctgtcgtcagctcgtgtcgtgagatgttgggttaagtcccgcaacgagcgcaacccctgtctttagttgccatcacgtttgggtgggcactctagagagactgccggtgacaagccggaggaaggtggggatgacgtcaagtcctcatggcccttatgacctgggctacacacgtgctacaatggcggtgacaatgggaagctacatggtgacatgatgccgatctcaaaaaaccgtctcagttcggattgcactctgcaactcgagtgcatgaaggtggaatcgctagtaatcgtggatcagcatgccacggtgaatacgttcccgggccttgtacacaccgcccgtcacaccatgggagttggtttgaccttaagccggtgagcgaaccgcaagggcgcagccgaccacggtcgggtcagcgactggggtg

SEQ ID NO: 3035 - DNA, 1444 bp, unidentified
  source 1..1444: mol_type = unassigned DNA; note = Saccharicrinis carchari
gatgaacgctagcgacaggcctaacacatgcaagtcgaggggtaacattgtagcttgctacagatgacgaccggcgcacgggtgagtaacgcgtatgaaacctaccttttacagggggacagcccagagaaatttggattaataccccatagtctttaaatagcacatgttattaaaagtaaagcttcggcggtaaaagatggtcatgcgtgacattagatagttggtgaggtaacggctcaccaagtctgcgatgtctaggggttctgagaggaaggtcccccacactggtactgagacacggaccagactcctacgggaggcagcagtgaggaatattggtcaatgggcgatagcctgaaccagccatgtcgcgtgcaggaagacggccctacgggttgtaaactgcttttgtacgggaagaattgtacctacgtgtaggtatttgccggtaccgtacgaataaggatcggctaactccgtgccagcagccgcggtaatacggaggatccgagcgttatccggatttattgggtttaaagggtgcgtaggcggactgataagtcagcggtgaaattttgcggctcaaccgtaacactgccgttgaaactgtttgtcttgaatttagttgaagtaggcggaatgtgttgtgtagcggtgaaatgcttagatataacacggaacaccgattgcgaaggcagcttactaagctataattgacgctgatgcacgaaagcgtgggtagcgaacaggattagataccctggtagtccacgccgtaaacgatgattactcgttgtcggccatacatcgtcggcgaccgagcgaaagcattaagtaatccacctggggagtacgttggcaacaatgaaactcaaaggaattgacgggggcccgcacaagcggaggaacatgtggtttaattcgatgatacgcgaggaaccttacctggacttaaatgtaggatgcatggagcagagatgttcctttcttcggacttcttacaaggtgctgcatggttgtcgtcagctcgtgccgtgaggtgtcgggttaagtcccataacgagcgcaacccctatctttagttaccagcacgtagtggtggggactctaaagagactgccggtgtaaaccgtgaggaaggtggggatgacgtcaaatcagcacggcccttacgtccagggctacacacgtgttacaatggccggtacaaagggcagctacctagcgataggatgctaatccccaaacccggtctcagttcggatcggagtctgcaactcgactccgtgaagctggattcgctagtaatcgcgcatcagccatggcgcggtgaatacgttcccgggccttgtacacaccgcccgtcaaaccatggaagccgggggtacctgaagtccgttaccgcaaggagcggcctagggtaaaactggtaactagggtt

SEQ ID NO: 3036 - DNA, 1444 bp, unidentified
  source 1..1444: mol_type = unassigned DNA; note = Saccharicrinis fermentans
gatgaacgctagcgacaggcctaacacatgcaagtcgaggggtaacattgtagcttgctacagatgacgaccggcgcacgggtgcgtaacgcgtatgaaacctaccttttacaggggaatagcccggagaaatttggattaatgccccatggttatactttaccgcatggtaaattatataaagcttcggcggtaaaagatggtcatgcgtgacattagctagttggtaaggtaacggcttaccaaggcgacgatgtctaggggttctgagaggaaggtcccccacactggtactgagacacggaccagactcctacgggaggcagcagtgaggaatattggtcaatggccgcaaggctgaaccagccatgtcgcgtgcaggaagacggccctatgggttgtaaactgcttttgtacgggaagaaacgtatctacgagtagatatttgccggtaccgtacgaataagcatcggctaactccgtgccagcagccgcggtaatacggaggatgcgagcgttatccggatttattgggtttaaagggtgcgtaggcggactaataagtcagtggtgaaatcttgcggctcaaccgtaaaactgccattgatactgttagtcttgaatttagttgaggtaggcggaatgtgttgtgtagcggtgaaatgcatagatataacacagaacaccgattgcgaaggcagcttactaagctataattgacgctgatgcacgaaagcgtgggtagcgaacaggattagataccctggtagtccacgccgtaaacgatgattactcgttgttggcaatacatggtcagcgactgagcgaaagcattaagtaatccacctggggagtacgttggcaacaatgaaactcaaaggaattgacgggggcccgcacaagcggaggaacatgtggtttaattcgatgatacgcgaggaaccttacctggacttaaatgtaggctgcatagagtagagatattcttttcttcggactgcttacaaggtgctgcatggttgtcgtcagctcgtgccgtgaggtgtcgggttaagtcccataacgagcgcaacccctattgttagttaccagcacgtaaaggtggggactctaacaagactgccggtgtaaaccgcgaggaaggtggggatgacgtcaaatcagcacggcccttacgtccagggctacacacgtgttacaatggccggtacaaagggcagctacatggcgacatgatgctaatccctaaacccggtctcagttcggatcggagtctgcaactcgactccgtgaagctggattcgctagtaatcgcatatcagccatgatgcggtgaatacgttcccgggccttgtacacaccgcccgtcaaaccatggaagccgagggtacctgaagtccgttaccgcaaggagcggcctagggtaaaactggtaactagggtt

SEQ ID NO: 3037 - DNA, 1456 bp, Saccharophagus degradans
  source 1..1456: mol_type = unassigned DNA
attgaacgctggcggcaggcctaacacatgcaagtcgagcgagaaagccttcgggtgagtatagcggcggacgggtgagtaacgcgtgggaatctacccagtagtgggggacaacagttggaaacgactgctaataccgcatacgtcctatgggagaaaggtggcctctatttataagctatcgctactggatgagcccgcgtcggattagctagtaggtggggtaatggcccacctaggcgacgatccgtagctggtctgagaggatgatcagccacactggaactgagacacggtccagactcctacgggaggcagcagtggggaatattgcacaatgggcgaaagcctgatgcagccatgccgcgtgtgtgaagaaggctttcgggttgtaaagcactttcagtagggaggaaaggttagtagttaatacctgctagctgtgacgttacctacagaagaagcaccggctaactccgtgccagcagccgcggtaatacggagggtgcaagcgttaatcggaattactgggcgtaaagcgcgcgtaggcggttagctaagctagatgtgaaagcccagggcttaaccttggaactgcatttagaactggttgactagagtatggtagaggggtgtggaatttcaggtgtagcggtgaaatgcgtagagatctgaaggaacatcagtggcgaaggcgacaccctggaccaatactgacgctgaggtgcgaaagcgtggggagcaaacaggattagataccctggtagtccacgccgtaaacgatgtctactagccgttggggtccttgaggccttagtggcgcagctaacgcactaagtagaccgcctggggagtacggccgcaaggttaaaactcaaatgaattgacgggggcccgcacaagcggtggagcatgtggtttaattcgaagcaacgcgaagaaccttaccaggtcttgacatccagagaacttactagaaatagtttggtgccttcgggaactctgagacaggtgctgcatggctgtcgtcagctcgtgtcgtgagatgttgggttaagtcccgtaacgagcgcaacccttgtccttagttgctagcaggtaatgctgagaactctaaggagactgccggtgacaaaccggaggaaggtggggacgacgtcaagtcatcatggcccttacgacctgggctacacacgtgctacaatggtcagtacaaagggttgccaagccgcgaggtggagctaatcccataaaactgatcgtagtccggattggagtctgcaactcgactccatgaagtcggaatcgctagtaatcgtgaatcagaatgtcacggtgaatacgttcccgggccttgtacacaccgcccgtcacaccatgggagtgggttgcaccagaagtagctagtctaaccttcggggggacggttaccacggtgtgattcatgactggggtg

SEQ ID NO: 3038 - DNA, 1491 bp, Salimicrobium flavidum
  source 1..1491: mol_type = unassigned DNA
gacgaacgctggcggcgtgcctaatacatgcaagtcgagcgcgggaagcgaccggaagcccttcggggtggaaggtcgtggaacgagcggcggacgggtgagtaacacgtgggcaacctacctgtaagaccggaataaccccgggaaaccggggctaatgccgggtaatcgatcggttcacctgaaccgattgtaaaaggatggcttcttgctatcgcttacagatgggcccgcggcgcattagctagttggtaaggtaacggcttaccaaggcgacgatgcgtagccgacctgagagggtgatcggccacactgggactgagacacggcccagactcctacgggaggcagcagtagggaatcttccgcaatggacgaaagtctgacggagcaacgccgcgtgaatgatgaaggtcttcggatcgtaaaattctgttgtgagggaagaacaaggaccgtgcgaacagaacggtcccttgacggtacctcacgaggaagccccggctaactacgtgccagcagccgcggtaatacgtagggggcaagcgttgtccggaattattgggcgtaaagggcacgcaggcggttccttaagtctgatgtgaaagcccgtggctcaaccacggatggccattggaaactggggaacttgagaactgaagaggagagtggaattccacgtgtagcggtgaaatgcgtagatatgtggaggaacaccagtggcgaaggcgactctctggtcggtttctgacgctgaggtgcgaaagcgtgggtagcaaacaggattagataccctggtagtccacgccgtaaacgctgagtgctaggtgttagggggcttccaccccttagtgctgaagttaacgcattaagcactccgcctggggagtacggccgcaaggctgaaactcaaaggaattgacgggggcccgcacaagcggtggagcatgtggtttaattcgaagcaacgcgaagaaccttaccaggtcttgacatccttggacacttccagagatggaaggttcccttcggggaccaagtgacaggtggtgcatggttgtcgtcagctcgtgtcgtgagatgttgggttaagtcccgcaacgagcgcaacccctaatcttagttgccagcattcagttgggcactctaaggtgactgccggtgacaaaccggaggaaggcggggacgacgtcaaatcatcatgccccttatgacctgggctacacacgtgctacaatggatgggacaaacggatgcgaacccgcgaggggtagccaatccgagaaacccattctcagttcggattgcaggctgcaactcgcctgcatgaagccggaatcgctagtaatcgcagatcagcatgctgcggtgaatacgttcccgggccttgtacacaccgcccgtcacaccacgagagttggcaacacccgaagccggtgaggtaacctttacaggagccagccgtcgaaggtggggccaatgattggggtg

SEQ ID NO: 3039 - DNA, 1425 bp, Salimicrobium halophilum
  source 1..1425: mol_type = unassigned DNA
tggcggcgtgcctaatacatgcaagtcgagcgcgggaagcgagctgaagcccttcggggtggacgctcgtggaacgagcggcggacgggtgagtaacacgtgggcaacctacctgtaagaccggaataaccccgggaaaccggggctaatgccgggtaaccgaacggttctcctgaaccgaacgtaaaaggatggcttcttgctatcgcttacagatgggcccgcggcgcattagctagttggtaaggtaacggcttaccaaggcgacgatgcgtagccgacctgagagggtgatcggccacactgggactgagacacggcccagactcctacgggaggcagcagtagggaatcttccgcaatggacgaaagtctgacggagcaacgccgcgtgaacgatgaaggctttcgggtcgtaaagttctgttgtgagggaagaacaaggatcgtgcgaacacagcggtcccttgacggtacctcacgaggaagccccggctaactacgtgccagcagccgcggtaatacgtagggggcaagcgttgtccggaattattgggcgtaaagcgcacgcaggcggttccttaagtctgatgtgaaagcccgtggctcaaccacggagggccattggaaactggggaacttgagaactgaagaggagagtggaattccacgtgtagcggtgaaatgcgtagatatgtggaggaacaccagtggcgaaggcgactctctggtcggtttctgacgctgaggtgcgaaagcgtgggtagcaaacaggattagataccctggtagtccacgccgtaaacgatgagtgctaggtgttagggggcttccaacccttagtgctgaagttaacgcattaagcactccgctggggagtacggccgcaaggctgaaactcaaaggaattgacgggggcccgcacaagcggtggagcatgtggtttaattcgaagcaacgcgaagaaccttaccaggtcttgacatccttggctacttctagagatagaaggttcccttcggggaccaagtgacaggtggtgcatggttgtcgtcagctcgtgtcgtgagatgttgggttaagtcccgcaacgagcgcaacccctaatcttagttgccagcattcagttgggcactctaaggtgactgccggtgacaaaccggaggaaggcggggatgacgtcaaatcatcatgccccttatgacctgggctacacacgtgctacaatggatgggacaaacggaagcgaacccgtgaggggtagccaatccgagaaacccattctcagttcggattgcaggctgcaactcgcctgcatgaagccggaatcgctagtaatcgcagatcagcatgctgcggtgaatacgttcccgggccttgtacacaccgcccgtcacaccacgagagttggcaacacccgaagcc

SEQ ID NO: 3040 - DNA, 1468 bp, Salinibacillus aidingensis
  source 1..1468: mol_type = unassigned DNA
gacgctggcggcgtgcctaatactgcaagtcgagcgcgtgaaacaagttgattccttcgggatgaaacttgtggaacgagcggcggacgggtgagtaacacgtgggcaacctgcctgtaagatcgggataactccgggaaaccggggctaataccggataacacctccgaccgcatggtcggaagttgaaagacggcttttatgctgtcacttacagatgggcccgcggcgcattagctagttggtgaggtaagagctcaccaaggcaacgatgcgtagccgacctgagagggtgatcggccacactgggactgagacacggcccagactcctacgggaggcagcagtagggaatcttccgcaatggacgaaagtctgacggagcaacgccgcgtgagtgatgaaggtcttcggatcgtaaagctctgttgtcagggaagaacaagtacaagaggaactgcttgtaccttgacggtacctgaccagaaagccacggctaactacgtgccagcagccgcggtaatacgtaggtggcaagcgttgtccggaattattgggcgtaaagcgcgcgcaggcggtttcttaagtctgatgtgaaagcccacggcttaaccgtggagggtcattggaaactgggaggcttgagtgcaggagaggagagtggaattccacgtgtagcggtgaaatgcgtagatatgtggaggaacaccagtggcgaaggcgactctctggcctgtaactgacgctgaggcgcgaaagcgtggggagcgaacaggattagataccctggtagtccacgccgtaaacgttgagtgctaggtgttagggggtttccgccccttagtgctgaagttaacgcattaagcactccgcctggggagtacggccgcaaggctgaaactcaaaggaattgacgggggcccgcacaagcggtggagcatgtggtttaattcgaagcaacgcgaagaaccttaccaggtcttgacatcctctgctacctctagagatagagggttcccttcggggacagagtgacaggtggtgcatggttgtcgtcagctcgtgtcgtgagatgttgggttaagtcccgcaacgagcgcaacccttgaccttagttgccagcattaagttgggcactctagggtgactgccggtgacaaaccggaggaaggtggggatgacgtcaaatcatcatgccccttatgacctgggctacacacgtgctacaatggatggtacaaagggcagcgaagccgcgaggtgaagctaatcccataaaaccattctcagttcggattgcaggctgcaactcgcctgtatgaagccggaatcgctagtaatcgcggatcagcatgccgcggtgaatacgttcccgggccttgtacacaccgcccgtcacaccacgagagttggcaacacccgaagtcggtggggtaaccttttggagccagccgcctaaggtggggcc

SEQ ID NO: 3041 - DNA, 1453 bp, Salinicoccus alkaliphilus
  source 1..1453: mol_type = unassigned DNA
aatacatgcaagtcgagcgcgtcttcatgggagcttgctcccgtggcgacgagcggcggacgggtgagtaacacgtgggcaacctgcccatcagacggggataaccgcgggaaaccgtggctaataccggataatccttttccacgcaggtgggaaagttgaaaggcggcttcggctgccgctgatggatgggcctgcggcgcattagctggttggtggggtaacggcccaccaaggcgacgatgcgtagccgacctgagagggtgatcggccacactgggactgagacacggcccagactcctacgggaggcagcagtagggaatcttccgcaatggacgcaagtctgacggagcaacgccgcgtgagtgacgaagggtttcggctcgtaaaactctgttgtcagggaagaacgtccccgtgagtaactgcacggggagtgacggtacctgaccagaaagccacggctaactacgtgccagcagccgcggtaatacgtaggtggcaagcgttatccggaattattgggcgtaaagcgcgcgtaggcggtttcttaagtctgatgtgaaagcccccggctcaaccggggagggtcattggaaactggggaacttgagtgcagaagaggagagtggaattccatgtgtagcggtgaaatgcgcagagatatggaggaacaccagtggcgaaggcggctctctggtctgtaactgacgctgatgtgcgaaagcgtggggatcaaacaggattagataccctggtagtccacgccgtaaacgatgagtgctaagtgttagggggtttccgccccttagtgctgcagctaacgcattaagcactccgcctggggagtacggccgcaaggttgaaactcaaaggaattgacggggacccgcacaagcggtggagcatgtggtttaattcgaagcaacgcgaagaaccttaccaaatcttgacatcctctgaaccccctggagacagggcttcccttcggggcagagtgacaggtggtgcatggttgtcgtcagctcgtgtcgtgagatgttgggttaagtcccgcaacgagcgcaacccttaaacttagttgccagcattcagttgggcactctaagttgactgccggtgacaaaccggaggaaggtggggatgacgtcaaatcatcatgccccttatgatttgggctacacacgtgctacaatggacaggtgacaaagggcagctacgccgtgaggccaagcgaatcccataaaactgttctcagttcggattggagtctgcaactcgactccatgaagctggaatcgctagtaatcgtggatcagcatgccacggtgaatacgttcccgggtcttgtacacaccgcccgtcacaccacgaaagtcagtaacacctgaagccggtgggccaaccttcatggaggcagccgtcgaaggtgggattgatgattggggtg

SEQ ID NO: 3042 - DNA, 1474 bp, Salinicoccus carnicancri
  source 1..1474: mol_type = unassigned DNA
gatgaacgctggcggcgtgcctaatacatgcaagtcgaacgcgagaagagggagcttggctccctcggatcgagtggcggacgggtgagtaacacgtaggcaacctgcccatcagccggggataactgcgggaaaccgtggctaataccggataatcctttccaccgcggggtggagagttgaaagacggtttcggctgtcgctgatggatgggcctgcggcgcattagctggttggtggggtaacggcccaccaaggcgacgatgcgtagccgacctgagagggtgatcggccacactgggactgagacacggcccagactcctacgggaggcagcagtagggaatcttccgcaatggacgcaagtctgacggagcaacgccgcgtgagtgaagaagggtttcggctcgtaaaactctgttgttgaggaagaacgacaggtagagtaactgctacctgtgtgacggtactcaaccagaaagccacggctaactacgtgccagcagccgcggtaatacgtaggtggcaagcgttatccggaattattgggcgtaaagcgcgcgtaggcggtctgttaagtctgatgtgaaagcccccggctcaaccggggagggtcattggaaactgggagacttgagtgcagaagaggagagtggaattccatgtgtagcggtgaaatgcgcagagatatggaggaacaccagtggcgaaggcggctctctggtctgtaactgacgctgatgtgcgaaagcgtggggatcaaacaggattagataccctggtagtccacgccgtaaacgatgagtgctaagtgttagggggtttccgccccttagtgctgcagcaaacgcattaagcactccgcctggggagtacggccgcaaggctgaaactcaaaggaattgacggggacccgcacaagcggtggagcatgtggtttaattcgaagcaacgcgaagaaccttaccaaatcttgacatcctctgaccgccctggagacagggcttcccttcggggcagagtgacaggtggtgcatggttgtcgtcagctcgtgtcgtgagatgttgggttaagtcccgcaacgagcgcaacccttatgactagttgccagcattgagttgggcactctagtgagactgccggtgacaaaccggaggaaggtggggatgacgtcaaatcatcatgccccttatgatttgggctacacacgtgctacaatggacaggaacaaagggcagcgagaccgcgaggttgagcgaatcccataaaactgttctcagttcggattggagtctgcaactcgactccatgaagctggaatcgctagtaatcgtggatcagaatgccacggtgaatacgttcccgggtcttgtacacaccgcccgtcacaccacgaaagtcagtaacacctgaagccggtgggccaacccttacgggaggcagccgtcgaaggtgggaccgatgattggggtg

SEQ ID NO: 3043 - DNA, 1474 bp, Salinicoccus halodurans
  source 1..1474: mol_type = unassigned DNA
gatgaacgctggcggcgtgcctaatacatgcaagtcgaacgcgagaaggaggagcttgctcctccggatcgagtggcggacgggtgagtaacacgtaggcaacctgcccatcagccggggataactgcgggaaaccgtggctaataccggataatcccgactgtcgatggacggttggttgaaaggcggcctttggctgccgctgatggatgggcctgcggcgcattagctagttggtggggtaagggcccaccaaggcgacgatgcgtagccgacctgagagggtgatcggccacactgggactgagacacggcccagactcctacgggaggcagcagtagggaatcttccgcaatggacgcaagtctgacggagcaacgccgcgtgagtgaagaagggtttcggctcgtaaaactctgttgttaaggaagaatgacaggcagagtaactgctgcctgtgtgacggtacttaaccagaaagccacggctaactacgtgccagcagccgcggtaatacgtaggtggcaagcgttatccggaattattgggcgtaaagcgcgcgtaggcggttttttaagtctgatgtgaaagcccccggctcaaccggggagggtcattggaaactggggaacttgagtgcagaagaggagagtggaattccatgtgtagcggtgaaatgcgcagagatatggaggaacaccagtggcgaaggcggctctctggtctgtaactgacgctgatgtgcgaaagcgtggggatcaaacaggattagataccctggtagtccacgccgtaaacgatgagtgctaagtgttagggggtttccgccccttagtgctgcagcaaacgcattaagcactccgcctggggagtacggccgcaaggctgaaactcaaaggaattgacggggacccgcacaagcggtggagcatgtggtttaattcgaagcaacgcgaagaaccttaccaaatcttgacatcctctgacagccatggagacatggtttcccttcggggcagagtgacaggtggtgcatggttgtcgtcagctcgtgtcgtgagatgttgggttaagtcccgcaacgagcgcaacccttattactagttgccagcattcagttgggcactctagtgagactgccggtgacaaaccggaggaaggtggggatgacgtcaaatcatcatgccccttatgatttgggctacacacgtgctacaatgggcaggaacaaagggcagcgagaccgcgaggttcagcgaatcccataaaactgctctcagttcggattggagtctgcaactcgactccatgaagctggaatcgctagtaatcgtggatcagaatgccacggtgaatacgttcccgggtcttgtacacaccgcccgtcacaccacgaaagtcagtaacacctgaagccggtgggccaacccttttgggaggcagccgtcgaaggtgggaccgatgattggggtg

SEQ ID NO: 3044 - DNA, 1474 bp, unidentified
  source 1..1474: mol_type = unassigned DNA; note = Salinicoccus kekensis
aacgaacgctggcggcgtgcctaatacatgcaagtcgagcgcgtcttttgggggcttgcccccataaagacgagcggcggacgggtgagtaacacgtgggcaacctgcccatcagaccgggataaccacgggaaaccgtggctaataccggataatcctttgccacgcaggtggcaaagttgaaagacggtttcggctgtcactgatggatgggcctgcggcgcattagctggttggtggggtaacggcccaccaaggcgacgatgcgtagccgacctgagagggtgatcggccacactgggactgagacacggcccagactcctacgggaggcagcagtagggaatcttccgcaatggacgcaagtctgacggagcaacgccgcgtgagtgacgaagggtttcggctcgtaaaactctgttgttaaggaagaacgtccccgtgagtaactgcacggggagtgacggtacttaaccagaaagccacggctaactacgtgccagcagccgcggtaatacgtaggtggcaagcgttatccggaattattgggcgtaaagcgcgcgtaggcggtttcttaagtctgatgtgaaagcccccggctcaaccggggagggtcattggaaactggggaacttgagtgcagaagaggagagtggaattccatgtgtagcggtgaaatgcgcagagatatggaggaacaccagtggcgaaggcggctctctggtctgcaactgacgctgatgtgcgaaagcgtggggatcaaacaggattagataccctggtagtccacgccgtaaacgatgagtgctaagtgttagggggtttccgccccttagtgctgcagctaacgcattaagcactccgcctggggagtacggccgcaaggttgaaactcaaaggaattgacggggacccgcacaagcggtggagcatgtggtttaattcgaagcaacgcgaagaaccttaccaaatcttgacatcctctgaccgccctggagacagggcttcccttcggggcagagtgacaggtggtgcatggttgtcgtcagctcgtgtcgtgagatgttgggttaagtcccgcaacgagcgcaacccttaagcttagttgccagcattcagttgggcactctaagttgactgccggtgacaaaccggaggaaggtggggatgacgtcaaatcatcatgccccttatgatttgggctacacacgtgctacaatggacaggtgacaaagggcagctacgccgtgaggccaagcgaatcccataaaactgttctcagttcggattggagtctgcaactcgactccatgaagctggaatcgctagtaatcgtggatcagcatgccacggtgaatacgttcccgggtcttgtacacaccgcccgtcacaccacgaaagtccgtaacacctgaagccggtgggccaacctttatggaggcagccgtcgaaggtgggattgatgattggggtg

SEQ ID NO: 3045 - DNA, 1406 bp, Salinicoccus qingdaonensis
  source 1..1406: mol_type = unassigned DNA
tcgagcgcgagattggggagcttgctccccatgatcgagcggcggacgggtgagtaacacgtaggcaacctacccatcagactgggataaccgcgggaaaccgtggctaataccggatgaccctttatgacaccggtcgtaaagttgaaaggcgcttatggtgccgctgatggatgggcctgcggcgcattagctggttggtggggtaacggcccaccaaggcgacgatgcgtagccgacctgagagggtgatcggccacactgggactgagacacggcccagactcctacgggaggcagcagtagggaatcttccgcaatggacgcaagtctgacggagcaacgccgcgtgagtgaagaagggtttcggctcgtaaaactctgttgttaaggaagaatgtcatgtatttaactgatatgtgagtgacggtacttaaccagaaagccacggctaactacgtgccagcagccgcggtaatacgtaggtggcaagcgttatccggaattattgggcgtaaagcgcgcgtaggcggtttcttaagtctgatgtgaaagcccccggctcaaccggggagggtcattggaaactggggaacttgagtgcagaagaggagagtggaattccatgtgtagcggtgaaatgcgcagagatatggaggaacaccagtggcgaaggcggctctctggtctgtaactgacgctgatgtgcgaaagcgtggggatcaaacaggattagataccctggtagtccacgccgtaaacgatgagtgctaagtgttagggggtttccgccccttagtgctgcagctaacgcattaagcactccgcctggggagtacgaccgcaaggttgaaactcaaaggaattgacggggacccgcacaagcggtggagcatgtggtttaattcgaagcaacgcgaagaaccttaccaaatcttgacatcctctgaccgccctggagacagggcttcccttcggggcagagagacaggtggtgcatggttgtcgtcagctcgtgtcgtgagatgttgggttaagtcccgcaacgagcgcaacccttaagcttagttgccagcattcagttgggcactctaagttgactgccggtgacaaaccggaggaaggtggggatgacgtcaaatcatcatgccccttatgatttgggctacacacgtgctacaatggacggtacaaagggcagcgacgccgcaaggccaagcgaatcccataaaactgttctcagttcggattggagtctgcaactcgactccatgaagctggaatcgctagtaatcgtggatcagcatgccacggtgaatacgttcccgggtcttgtacacaccgcccgtcacaccacgaaagtcagtaacacctgaagccggtgggccaaccattatggaggcagc

SEQ ID NO: 3046 - DNA, 1470 bp, Salinicoccus roseus
  source 1..1470: mol_type = unassigned DNA
gatgaacgctggcggcgtgcctaatacatgcaagtcgaacgcgcggatcaggagcttgctcctgtgacgcgagtggcggacgggtgagtaacacgtaggcaacctgcccatcagactgggataaccacgggaaaccgtggctaataccggataacccttttccacacaggtggaaaagttgaaaggcggcttcggctgtcactgatggatgggcctgcggcgcattagctggttggtggggtaacggcccaccaaggcgacgatgcgtagccgacctgagagggtgatcggccacactgggactgagacacggcccagactcctacgggaggcagcagtagggaatcttccgcaatggacgaaagtctgacggagcaacgccgcgtgagtgaagaagggtttcggctcgtaaaactctgttgtcagggaagaacgccgacgggagtaactgcccgtcgggtgacggtacctgaccagaaagccacggctaactacgtgccagcagccgcggtaatacgtaggtggcaagcgttatccggaattattgggcgtaaagcgcgcgtaggcggttcgttaagtctgatgtgaaagcccccggctcaaccggggagggtcattggaaactggcggacttgagtgcagaagaggagagtggaattccatgtgtagcggtgaaatgcgcagagatatggaggaacaccagtggcgaaggcggctctctggtctgcaactgacgctgaggtgcgaaagcgtggggatcaaacaggattagataccctggtagtccacgccgtaaacgatgagtgctaagtgttagggggtttccgccccttagtgctgcagctaacgcattaagcactccgcctggggagtacggccgcaaggttgaaactcaaaggaattgacggggacccgcacaagcggtggagcatgtggtttaattcgaagcaaggcgaagaaccttaccaaatcttgacatcctctgaccaccctggagacagggtttccttcggggcagagtgacaggtggtgcatggttgtcgtcagctcgtgtcgtgagatgttgggttaagtcccgcaacgagcgcaacccttatcattagttgccagcattcagttgggcactctaatgagactgccggtgacaaaccggaggaaggtggggatgacgtcaaatcatcatgccccttatgatttgggctacacacgtgctacaatggacaggtacaaagggcagctaagccgcgaggccaagcgaatcccataaaactgttctcagttcggattggagtctgcaactcgactccatgaagctggaatcgctagtaatcgtggatcagaatgccacggtgaatacgttcccgggtcttgtacacaccgcccgtcacaccacgaaagtcggtaacacctgaagccggtgggccaacctcttggaggcagccgtcgaaggtgggaccgatgattggggtg

SEQ ID NO: 3047 - DNA, 1445 bp, unidentified
  source 1..1445: mol_type = unassigned DNA; note = Salinicoccus sediminis
gatgaacgctggcggcgtgcctaatacatgcaagtcgaacgcgagaggagggagcttgctccctctgatcgagtggcggacgggtgagtaacacgtaggcaacctgcccatcagtccgggataaccgcgggaaaccgtggctaataccggatgatcctctccaccgcggggtggggagttgaaagacggtttcggctgtcgctgatggatgggcctgcggcgcattagctggttggcggggtaacggcccaccaaggcaacgatgcgtagccgacctgagagggtgatcggccacactgggactgagacacggcccagactcctacgggaggcagcagtagggaatcttccgcaatggacgcaagtctgacggagcaacgccgcgtgagtgaagaagggtttcggctcgtaaaactctgttgttaaggaagaacgacaggtagagtaactgctacctgtgtgacggtacttaaccagaaagccacggctaactacgtgccagcagccgcggtaatacgtaggtggcaagcgttatccggaattattgggcgtaaagcgcgcgtaggcggtcttttaagtctgatgtgaaagcccccggctcaaccggggagggtcattggaaactgggagacttgagtgcagaagaggagagtggaattccatgtgtagcggtgaaatgcgcagagatatggaggaacaccagtggcgaaggcggctctctggtctgtaactgacgctgatgtgcgaaagcgtggggatcaaacaggattagataccctggtagtccacgccgtaaacgatgagtgctaagtgttagggggtttccgccccttagtgctgcagcaaacgcattaagcactccgcctggggagtacggccgcaaggctgaaactcaaaggaattgacggggacccgcacaagcggtggagcatgtggtttaattcgaagcaacgcgaagaaccttaccaaatcttgacatcctctgacccccctggagacaggggttcccttcggggcagagtgacaggtggtgcatggttgtcgtcagctcgtgtcgtgagatgttgggttaagtcccgcaacgagcgcaacccttatgactagttgccagcattgagttgggcactctagtgagactgccggtgacaaaccggaggaaggtggggatgacgtcaaatcatcatgccccttatgatttgggctacacacgtgctacaatggacaggtacaaagggcagcgagaccgcgaggttgagcgaatcccataaaactgttctcagttcggattggagtctgcaactcgactccatgaagctggaatcgctagtaatcgtggatcagaatgccacggtgaatacgttcccgggtcttgtacacaccgcccgtcacaccacgaaagtcagtaacacctgaagccggtgggccaacccttctgggaggcagcc

SEQ ID NO: 3048 - DNA, 1463 bp, Salinicola socius
  source 1..1463: mol_type = unassigned DNA
attgaacgctggcggcaggcctaacacatgcaagtcgagcggcagcacggggagcttgctccctggtggcgagcggcggacgggtgagtaatgcataggaatctgcccgatagtgggggataacgtggggaaacccacgctaataccgcatatgtcctacgggagaaagcggaggatcttcggacttcgcgctatcggatgagcctatgtcggattagctagttggtaaggtaacggcttaccaaggcgacgatccgtagctggtctgagaggatgatcagccacactgggactgagacacggcccagactcctacgggaggcagcagtggggaatattggacaatgggcgaaagcctgatccagccatgccgcgtgtgtgaagaaggctttcgggttgtaaagcactttcagcgaggaagaaagcctttgggttaataccccagaggaaggacatcactcgcagaagaagcaccggctaactccgtgccagcagccgcggtaatacggagggtgcgagcgttaatcggaattactgggcgtaaagcgcgcgtaggtggcttggcacgccggttgtgaaagccccgggctcaacctgggaactgcatccggaacggccaggctagagtgcaggagaggaaggtagaattcccggtgtagcggtgaaatgcgtagagatcgggaggaataccagtggcgaaggcggccttctggcctgacactgacactgaggtgcgaaagcgtgggtagcaaacaggattagataccctggtagtccacgccgtaaacgatgtcgactagccgttgggacctttaaggacttagtggcgcagttaacgcgataagtcgaccgcctggggagtacggccgcaaggttaaaactcaaatgaattgacgggggcccgcacaagcggtggagcatgtggtttaattcgatgcaacgcgaagaaccttacctacccttgacatccagagaactttccagagatggattggtgccttcgggaactctgagacaggtgctgcatggctgtcgtcagctcgtgttgtgaaatgttgggttaagtcccgtaacgagcgcaacccttgtccttatttgccagcacgtaatggtgggaactctaaggagactgccggtgacaaaccggaggaaggtggggacgacgtcaagtcatcatggcccttacgggtagggctacacacgtgctacaatggccggtacaaagggttgcgagatcgcgagatggagcgaatcccagaaagccggcctcagttcggatcggagtctgcaactcgactccgtgaagtcggaatcgctagtaatcgtgaatcagaatgtcacggtgaatacgttcccgggccttgtacacaccgcccgtcacaccatgggagtggactgcaccagaagtggttagcttaaccttcgggagagcgatcaccacggtgtggttcatgactggggtg

SEQ ID NO: 3049 - DNA, 1407 bp, Salinimonas chungwhensis
  source 1..1407: mol_type = unassigned DNA
cgctggcggcaggcctaacacatgcaagtcgagcggtagcatttctagcttgctagaagatgacgagcggcggacgggtgagtaatgcttgggaacttgcctttgcgagggggataaccactggaaacggtggctaataccgcataatgtctacggaccaaagggggctttcgggctcctgcgcaaagagaggcccaagtgagattagctagttggtggggtaaaggctcaccaaggcaacgatctctagctgttctgagaggaagatcagccacactgggactgagacacggcccagactcctacgggaggcagcagtggggaatattggacaatgggcgcaagcctgatccagccatgccgcgtgtgtgaagaaggccttcgggttgtaaagcactttcagcggggaggaaggccaagtagttaatacctgcttggattgacgttacccgcagaagaagcaccggctaactccgtgccagcagccgcggtaatacggagggtgcaagcgttaatcggaattactgggcgtaaagcgcacgcaggcggtttgttaagctagatgtgaaagccccgggctcaacctgggacggtcatttagaactggcagactagagtcttggagaggggagtggaattccaggtgtagcggtgaaatgcgtagatatctggaggaacatcagtggcgaaggcgactccctggccaaagactgacgctcatgtgcgaaagtgtgggtagcgaacaggattagataccctggtagtccacaccgtaaacgctgtctactagctgtacgcgactataagttgtgtgtagcgaagctaacgcgataagtagaccgcctggggagtacggccgcaaggttaaaactcaaatgaattgacgggggcccgcacaagcggtggagcatgtggtttaattcgatgcaacgcgaagaaccttacctacacttgacatgcagagaactttccagagatggataggtgccttcgggaactctgacacaggtgctgcatggctgtcgtcagctcgtgtcgtgagatgttgggttaagtcccgtaacgagcgcaacccttgtccttagttgccagccttaagttgggcactctaaggagaccgccggtgacaaaccggaggaaggtggggacgacgtcaagtcatcatggcccttacgggatgggctacacacgtgctacaatggcgcatacaaagggcagcaagccagcgatggtgagcggaccccttaaagaatatcgtagtccggatcggagtctgcaactcgactccgtgaagtcggaatcgctagtaatcgcaggtcagaatactgcggtgaatacgttcccgggccttgtacacgccgcccgtcacaccatgggagtgggatgcaaaagaagtggttagcctaa

SEQ ID NO: 3050 - DNA, 1373 bp, Salinisphaera hydrothermalis
  source 1..1373: mol_type = unassigned DNA
cggcaggcctaacacatgcaagtcgagcggcagcagcaccaagcttgcttggtggctggcgagcggcggacgggtgagtaatgcgtagaaatctgcccttttgtggaggataacctggggaaactcaggctaatactgcataatctctacggagcaaagcggggctcttcgaccctcgcgcgaaaggatgagtctacgtctgattagctagttggtgcggtaacggcgtaccaaggcgacgatcagtagctggtctgagaggatgatcagccacaccgggactgagacacggcccggactcctacgggaggcagcagtggggaatattggacaatgggcgaaagcctgatccagccatgccgcgtgtgtgaagaaggccttagggttgtaaagcactttaagcaggaaagaaaagcgccgggttaatacctcgagacgtattgacggtacctagaataagcaccggctaactccgtgccagcagccgcggtaatacggagggtgcaagcgttaatcggaattactgggcgtaaagcgagtgcaggcggtcgcgtgtgtcgggtgtgaaagcccagggctcaaccttggaattgcactcgaaactgcgtgactagaatgtggtagaggaagacggaattccacgtgtagcggtgaaatgcgtagatatgtggaggaacaccaatggcgaaggcagtcttctgggccaacattgacgctgaggctcgaaagcgtgggtagcaaacaggattagataccctggtagtccacgccgtaaacgatgagaactagacgttggttgacatagtcgaccagtgtcgcagctaacgcgttaagttctccgcctggggagtacggccgcaaggttgaaactcaaaggaattgacgggggcccgcacaagcggtggagcatgtggtttaattcgatgcaacgcgaagaaccttacctgcccttgacatcctcggaatttggcagagatgccttagtgccttcgggaaccgagtgacaggtgctgcatggctgtcgtcagctcgtgtcgtgagatgttgggttaagtcccgcaacgagcgcaacccctatccttagttgccagcattcagttgggcactctaaggagactgccggtgacaaaccggaggaaggtggggatgacgtcaagtcatcatggcccttatgggcagggctacacacgtgctacaatggcaagtacaaagagttgcgaacccgcgaggggtagccaatctcataaagcttgtcccagtccggattgtagtctgcaactcgactacatgaagtcggaatcgctagtaatcgcagatcagcaatgctgcggtgaatacgttcccgggccttgtacacaccgcccgtcacacca

SEQ ID NO: 3051 - DNA, 1462 bp, unidentified
  source 1..1462: mol_type = unassigned DNA; note = Salinisphaera japonica
attgaacgctggcggcaggcctaacacatgcaagtcgagcggaaacgacatcttcggatgggcgtcgagcggcggacgggtgagtaatgcgtagatatctgccttttagtggaggataacctggggaaactcaggctaatactgcataatctctacggagcaaagcggaggatcttcggacttcgcgctattagatgagtctacgtctgattagctagttggtgcggtaacggcgtaccaaggcgacgatcagtagctggtctgagaggatggtcagccacaccgggactgagacacggcccggactcctacgggaggcagcagtggggaatattggacaatgggcgaaagcctgatccagccatgccgcgtgtgtgaagaaggccttagggttgtaaagcactttaagcaggaaagaaaagcgccgggttaataccccgagcgtattgacggtacctgcagaataagcaccggctaactccgtgccagcagccgcggtaatacggagggtgcaagcgttaatcggaattactgggcgtaaagcgagtgcaggcggtcgcgtgtgtcgggtgtgaaagccccgggctcaacctgggaattgcatccgaaactgcgtgactagaatatggtagaggaagacggaattccacgtgtagcggtgaaatgcgtagatatgtggaggaacaccaatggcgaaggcagtcttctgggccaatattgacgctgaggctcgaaagcgtgggtagcaaacaggattagataccctggtagtccacgccgtaaacgctgagaactagacgttggatgacatagtcgttcagtgtcgcagctaacgcgttaagttctccgcctggggagtacggccgcaaggttgaaactcaaaggaattgacgggggcccgcacaagcggtggagcatgtggtttaattcgatgcaacgcgaagaaccttacctgcccttgacatcctgtgaacctcttggagacgagagggtgctttcgagaacacagtgacaggtgctgcatggctgtcgtcagctcgtgtcgtgagatgttgggttaagtcccgcaacgagcgcaacccctatccttagttgccagcattaagttgggcactctaaggagactgccggtgacaaaccggaggaaggtggggacgacgtcaagtcatcatggcccttatgggcagggctacacacgtgctacaatggcaagtacaaagggtatgcgaactcgcgagagggtgccaatcccataaagcttgtcccagtccggatcgcagtctgcaactcgactgcgtgaagtcggaatcgctagtaatcgcagatcagcaatgctgcggtgaatacgttcccgggccttgtacacaccgcccgtcacaccatggaagtcggctgcaccagaagtggctagtctaactcttcggagaggacggtcaccacggtgtggtcgatgactggggtg

SEQ ID NO: 3052 - DNA, 1421 bp, unidentified
  source 1..1421: mol_type = unassigned DNA; note = Salinisphaera orenii
gctacacatgcagtcgagcggcagcagcaggagcttgctcctggctggcgagcggcggacgggtgagtaatgcctaggaatctgcccttttgtggaggataacccggggaaactcgggctaatactgcataatctctacggagcaaagcggggctcttcgaccctcgcgcagaaggatgagcctaggtctgattagcttgttggtggggtaacggcctaccaaggcaacgatcagtagctggtctgagaggatgatcagccacaccgggactgagacacggcccggactcctacgggaggcagcagtggggaatattggacaatgggcgaaagcctgatccagccatgccgcgtgtgtgaagaaggccttagggttgtaaagcactttaagcaggaaagaaaagcgccgagttaatagctcgagcgtgttgacggtacctgcagaataagcaccggctaactccgtgccagcagccgcggtaatacggagggtgcaagcgttaatcggaattactgggcgtaaagcgagtgcaggcggttgcgtatgtcggatgtgaaagccccgggctcaacctgggaattgcattcgaaactgcgtaactagaatatggtagaggaagacggaattccacgtgtagcggtgaaatgcgtagatatgtggaggaacaccaatggcgaaggcagtcttctgggccaatattgacgctgaggctcgaaagcgtgggtagcaaacaggattagataccctggtagtccacgccgtaaacgatgagaactagacgttgggcgacatagtcgctcagtgtcgcagcaaacgcgttaagttctccgcctggggagtacggccgcaaggttgaaactcaaaggaattgacgggggcccgcacaagcggtggagcatgtggtttaattcgatgcaacgcgaagaaccttacctgcccttgacatcctgtgaacccttcggagacgaaggggtgctttcgagaacacagtgacaggtgctgcatggctgtcgtcagctcgtgtcgtgagatgttgggttaagtcccgcaacgagcgcaacccctatccttagttgccagcattaagttgggcactctaaggagactgccggtgacaaaccggaggaaggtggggatgacgtcaagtcatcatggcccttatgggcagggctacacacgtgctacaatggcaagtacaaagggttgctaagccgcgaggtggtgctaatctcataaagcttgtcttagtccggattgcagtctgcaactcgactgcatgaagtcggaatcgctagtaatcgcagatcagcaatgctgcggtgaatacgttcccgggccttgtacacaccgcccgtcacaccatggaagtcggttgcaccagaagaggctagtctaaccttcgggaggacggtctccacgg

SEQ ID NO: 3053 - DNA, 1458 bp, Salinisphaera shabanensis
  source 1..1458: mol_type = unassigned DNA
attgaacgctggcggcaggcctaacacatgcaagtcgagcggaaacgacatcttcggatgggcgtcaagcggcggacgggtgagtaatgcctaggaatctgcccttttgtggaggataacccggggaaactcgggctaatactgcataatctctacggagcaaagcggggctcttctaccctcgcgcaaaaggatgagcctaggtctgattagcttgttggtggggtaacggcctaccaaggcgacgatcagtagctggtctgagaggatgatcagccacaccgggactgagacacggcccggactcctacgggaggcagcagtggggaatattggacaatgggcggaagcctgatccagccatgccgcgtgtgtgaagaaggccttagggttgtaaagcactttaagcaggaaagaaaagcgccggattaatactccgagcgtgttgacggtacctgcagaataagcaccggctaactccgtgccagcagccgcggtaatacggagggtgcaagcgttaatcggaattactgggcgtaaagcgtgcgtaggcggttgcgtgtgtcggatgtgaaagccccgggctcaacctgggaattgcattcgaaactgcgcaactagaatgtggtagaggaagatggaattccacgtgtagcggtgaaatgcgtagatatgtggaggaacaccaatggcgaaggcaatcttctgggccaacattgacgctgaggtacgaaagcgtgggtagcaaacaggattagataccctggtagtccacgccgtaaacgatgagaactagacgttggttgacatagtcgatcagtgtcgcagcaaacgcgttaagttctccgcctggggagtacggccgcaaggttgaaactcaaaggaattgacgggggcccgcacaagcggtggagcatgtggtttaattcgatgcaacgcgaagaaccttacctgcccttgacatcctgtgaaccctccggagacggaggggtgctttcgagaacacagtgacaggtgctgcatggctgtcgtcagctcgtgtcgtgagatgttgggttaagtcccgcaacgagcgcaacccctatccttagttgccagcattaagttgggcactctaaggagactgccggtgacaaaccggaggaaggtggggatgacgtcaagtcatcatggcccttatgggcagggctacacacgtgctacaatggcaagtacaaagggttgcgaaccagcgatggggtgctaatctcataaagcttgtcttagtccggattgcagtctgcaactcgactgcatgaagtcggaatcgctagtaatcgcagatcagcaatgctgcggtgaatacgttcccgggccttgtacacaccgcccgtcacaccatggaagtcggttgcaccagaagaggctagtctaaccttagggaggacggtctccacggtgtgatcgatgactggggtg

SEQ ID NO: 3054 - DNA, 1557 bp, unidentified
  source 1..1557: mol_type = unassigned DNA; note = Salinivibrio kushneri
agagtttgatcatggctcagattgaacgctggcggcaggcctaacacatgcaagtcgagcggaaacggcagcattgaagcttcggtggatttgctggacgtcgagcggcggacgggtgagtaacggctgggaacctgccctgacgcgggggataaccgttggaaacgacggctaataccgcataatgtcttagttcattacgagctgggaccaaaggtggcctctacatgtaagctatcgcgttgggatgggcccagttaggattagctagttggtaaggtaatggcttaccaaggcaacgatccttagctggtttgagaggatgatcagccacactgggactgagacacggcccagactcctacgggaggcagcagtggggaatattgcacaatgggggagaccctgatgcagccatgccgcgtgtgtgaagaaggccttcgggttgtaaagcactttcagcagtgaggaaggtggtgtacttaataagtgcatggcttgacgttagctgcagaagaagcaccggctaactccgtgccagcagccgcggtaatacggagggtgcgagcgttaatcggaattactgggcgtaaagcgcatgcaggcggtttgttaagtcagatgtgaaagcccggggctcaacctcggaaccgcatttgaaactggcaggctagagtcttgtagaggggggtagaatttcaggtgtagcggtgaaatgcgtagagatctgaaggaataccagtggcgaaggcggccccctggacaaagactgacgctcagatgcgaaagcgtgggtagcaaacaggattagataccctggtagtccacgccgtaaacgctgtctacttggaggttgaggtttagactttggctttcggcgctaacgcattaagtagaccgcctggggagtacggccgcaaggttaaaactcaaatgaattgacgggggcccgcacaagcggtggagcatgtggtttaattcgatgcaacgcgaagaaccttacctactcttgacatccagcgaatcctttagagatagaggcgtgccttcgggagcgctgagacaggtgctgcatggctgtcgtcagctcgtgttgtgaaatgttgggttaagtcccgcaacgagcgcaacccttatccttgtttgccagcacataatggtgggaactccagggagactgccggtgataaaccggaggaaggtggggacgacgtcaagtcatcatggcccttacgagtagggctacacacgtgctacaatggcagatacagagggcagcgaagctgcgaagtggagcgaatcccttaaagtctgtcgtagtccggattggagtctgcaactcgactccatgaagtcggaatcgctagtaatcgtggatcagaatgccacggtgaatacgttcccgggccttgtacacaccgcccgtcacaccatgggagtgggctgcaccagaagtagatagcttaaccttcgggagggcgtttaccacggtgtggttcatgactggggtgaagtcgtaacaaggtagccctaggggaacctggggctggatcacct

SEQ ID NO: 3055 - DNA, 1377 bp, Salinivibrio sharmensis
  source 1..1377: mol_type = unassigned DNA
gctggacgtcgagcggcggacgggtgagtaacggctgggaacctgccctgacgagggggataaccgttggaaacgacggctaataccgcataatgtcttcggaccaaaggtggcctctacatgtaagctatcgcgttgggatgggaccagttaggattagctagttggtaaggtaatggcttaccaaggcgacgatccttagctggtttgagaggatgatcagccacactgggactgagacacggcccagactcctacgggaggcagcagtggggaatattgcacaatgggggagaccctgatgcagccatgccgcgtgtgtgaagaaggccttcgggttgtaaagcactttcagcagtgaggaaggtggtgtacttaatacgtgcattgcttgacgttagctgcagaagaagcaccggctaactccgtgccagcagccgcggtaatacggagggtgcgagcgttaatcggaattactgggcgtaaagcgcatgcaggcggtttgttaagtcagatgtgaaagcccggggctcaacctcggaaccgcatttgaaactggcaggctagagtcttgtagaggggggtagaatttcaggtgtagcggtgaaatgcgtagagatctgaaggaataccagtggcgaaggcggccccctggacaaagactgacgctcagatgcgaaagcgtgggtagcaaacaggattagataccctggtagtccacgccgtaaacgctgtctacttggaggttgaggtttaagactttggctttcggcgctaacgcattaagtagaccgcctggggagtacggccgcaaggttaaaactcaaatgaattgacgggggcccgcacaagcggtggagcatgtggtttaattcgatgcaacgcgaagaaccttacctactcttgacatccagagaactttccagagatggattggtgccttcgggarctctgagacaggtgctgcatggctgtcgtcagctcgtgttgtgaaatgttgggttaagtcccgcaacgagcgcaacccttatccttgtttgccagcacataatggtgggaactccagggagactgccggtgataaaccggaggaaggtggggacgacgtcaagtcatcatggcccttacgagtagggctacacacgtgctacaatggcagatacagagggcagcgaagctgcgaagtggagcgaatcccttaaagtctgtcgtagtccggattggagtctgcaactcgactccatgaagtcggaatcgctagtaatcgtggatcagaatgccacggtgaatacgttcccgggccttgtacacaccgcccgtcacaccatgggagtgggctgcaccagaagtagatagcttaaccttcgggagggcgtt

SEQ ID NO: 3056 - DNA, 1446 bp, unidentified
  source 1..1446: mol_type = unassigned DNA; note = Salinivirga cyanobacteriivorans
gatgaacgctagcggcaggcttaacacatgcaagtcgaggggtaacaggttccttcgggaatgctgacgaccggcgcacgggtgagtaacgcgtatgcaaccttcctgtatcaggaggataggccttggaaacgaggattaatactgcgtaaaattattgtatcgcatggtataataatcaaatctacggaggatacagatgggcatgcgtgccattagctagatggtaaggtaacggcttaccatggccatgatggctaggggttctgcaaggaagatcccccacactggtactgagacacggaccagactcctacgggaggcagcagtgaggaatattggtcaatggaggcaactctgaaccagccaagccgcgtgaaggaagactgttctatgaattgtaaacttcttttgtgacagagtaaagatagctacgagtagttatttgcaagtatgtcatgaataagcatcggctaactccgtgccagcagccgcggtaatacggaggatgcaggcgttatccggatttattaggtttaaagggtgttcaggctgtctggtaagtcagaggtgaaagtcggttgcttaacgatcgaattgcctttgaaactgtcagacttgagtatggatgtggtaggcggaatgtgtagtgtagcggtgaaatgcatagatattacacagaactccaattgcgaaagcagcttaccaaaccagcactgacgctgaagcacgaaagcgtgggtagcgaacaggattagataccctggtagtccacgcagtaaacgatgctcactcgctgttggcaatacaccgtcagcggctaagggaaaccgataagtgagccacctggggagtacgatcgcaagattgaaactcaaaggaattgacgggggcccgcacaagcggtggaacatgtggtttaattcgatgatacgcgaggaaccttacctgggcttaaatgtgaagtgcattgtttggaaacagacatttccttcgggactctttacaaggtgctgcatggttgtcgtcagctcgtgccgtgaggtgtcgggttaagtcccataacgagcgcaacccctattgttagttaccagcgcgtgatggcggggactctaacgagactgccggtgtaaaccgcgaggaaggtggggatgacgtcaaatcagcacggcccttatgtccagggctacacacgtgttacaatggtcggtacagagggcagctaggcagcgatgtcaagcgaatctcgaaagccgatcccagttcggattggagtctgcaacccgactccatgaaggtggaatcgctagtaatcgcgcatcagccatggcgcggtgaatacgttcccgggccttgtacacaccgcccgtcaagccatggaagtctggggtgcctgaaggccgtaaccgcaaggagcggtctagggtaaaacagatgactggggct

SEQ ID NO: 3057 - DNA, 1491 bp, unidentified
  source 1..1491: mol_type = unassigned DNA; note = Salipaludibacillus aurantiacus
gacgaacgctggcggcgtgcctaatacatgcaagtcgagcgcaggaagcaagctgatcccttcggggtgacgcttgtggaatgagcggcggacgggtgagtaacacgtgggcaacctgccttgcagactgggataaccccgggaaaccggggctaataccggatgaccatccggatcgcatgatccgggtgtaaaagtggggaatttattcctcacactgcaagatgggcccgcggcgcattagctagttggtaaggtaacggcttaccaaggcgacgatgcgtagccgacctgagagggtgatcggccacactgggactgagacacggcccagactcctacgggaggcagcagtagggaatcatccgcaatgggcgaaagcctgacggtgcaacgccgcgtgaacgatgaaggttttcggatcgtaaagttctgttatgagggaagaacaagtgccggtcgaacaggccggcgccttgacggtacctcacgagaaagccccggctaactacgtgccagcagccgcggtaatacgtagggggcaagcgttgtccggaattattgggcgtaaagcgcgcgcaggcggtctcttaagtctgatgtgaaagcccacggctcaaccgtggagggtcattggaaactgggagacttgagtgtaggagaggaaagtggaattccacgtgtagcggtgaaatgcgtagatatgtggaggaacaccagtggcgaaggcgactttctggcctacaactgacgctgaggcgcgaaagcgtggggagcaaacaggattagataccctggtagtccacgccgtaaacgttgagtgctaggtgttaggggtttcgatgcccttagtgccgaagttaacacattaagcactccgcctggggagtacggccgcaaggctgaaactcaaaggaattgacgggggcccgcacaagcagtggagcatgtggtttaattcgaagcaacgcgaagaaccttaccaggtcttgacatcctctgaccaccctggagacagggctttccccttcgggggacagagtgacaggtggtgcatggttgtcgtcagctcgtgtcgtgagatgttgggttaagtcccgcaacgagcgcaacccttaatcttagttgccagcattcagttgggcactctaaggtgactgccggtgacaaaccggaggaaggtggggacgacgtcaaatcatcatgccccttatgacctgggctacacacgtgctacaatggatggtacaaagggcagcgagaccgcgaggttaagcgaatcccataaagccattctcagttcggattgcaggctgcaactcgcctgcatgaagccggaattgctagtaatcgcggatcagcatgccgcggtgaatacgttcccgggccttgtacacaccgcccgtcacaccacgagagtttgtaacacccgaagtcggtgaggtaaccttttggagccagccgccgaaggtgggacagatgattggggtg

SEQ ID NO: 3058 - DNA, 1470 bp, unidentified
  source 1..1470: mol_type = unassigned DNA; note = Salipaludibacillus neizhouensis
ctaatacatgcaagtcgagcgcaggaaacaagttgatcccttcggggtgacgcttgtggaatgagcggcggacgggtgagtaacacgtgggcaacctgccttgtagactgggataactccgggaaaccggagctaataccggatgaccaacggaatcgcatgattctgttgtaaaagtggggatttatcctcacactacgagatgggcccgcggcgcattagctagttggtaaggtaatggcttaccaaggcaacgatgcgtagccgacctgagagggtgatcggccacactggaactgagacacggtccagactcctacgggaggcagcagtagggaatcatccgcaatgggcgaaagcctgacggtgcaacgccgcgtgaacgatgaaggttttcggatcgtaaagttctgttatgagggaagaacaagtgccgttcgaatagggcggcaccttgacggtacctcacgagaaagccccggctaactacgtgccagcagccgcggtaatacgtagggggcaagcgttgtccggaattattgggcgtaaagcgcgcgcaggcggtctcttaagtctgatgtgaaagcccacggctcaaccgtggagggtcattggaaactgggggacttgagtgtaggagaggaaagtggaattccacgtgtagcggtgaaatgcgtagatatgtggaggaacaccagtggcgaaggcgactttctggcctataactgacgctgaggtgcgaaagcgtggggagcaaacaggattagataccctggtagtccacgccgtaaacgatgagtgctaggtgttaggggtttcgatgcccttagtgccgaagttaacacattaagcactccgcctggggagtacgaccgcaaggttgaaactcaaaggaattgacgggggcccgcacaagcagtggagcatgtggtttaattcgaagcaacgcgaagaaccttaccaggtcttgacatcctctgaccacccaagagattgggatttccccttcgggggacagagtgacaggtggtgcatggttgtcgtcagctcgtgtcgtgagatgttgggttaagtcccgcaacgagcgcaacccttgatcttagttgccagcattcagttgggcactctaaggtgactgccggtgataaaccggaggaaggtggggatgacgtcaaatcatcatgccccttatgacctgggctacacacgtgctacaatggatggtacaaagggctgcaagaccgcgaggtcaagcgaatcccataaagccattctcagttcggattgcaggctgcaactcgcctgcatgaagccggaattgctagtaatcgcggatcagcatgccgcggtgaatacgttcccgggccttgtacacaccgcccgtcacaccacgagagtttgtaacacccgaagtcggtgaggtaacctttttggagccagccgccgaaggtgggacagatgattggggtg

SEQ ID NO: 3059 - DNA, 1369 bp, unidentified
  source 1..1369: mol_type = unassigned DNA; note = Salipiger thiooxidans
gctggcggcaggcctaacacatgcaagtcgagcgcaccttcgggtgagcggcggacgggtgagtaacgcgtgggaacgtgcccttctctgcggaatagccactggaaacggtgagtaataccgcatacgcccttcgggggaaagatttatcggagaaggatcggcccgcgttagattaggtagttggtggggtaatggcctaccaagcctacgatctatagctggtttgagaggatgatcagccacactgggactgagacacggcccagactcctacgggaggcagcagtggggaatcttagacaatgggcgcaagcctgatctagccatgccgcgtgagtgatgaaggccttagggtcgtaaagctctttcgctggggaagataatgactgtacccagtaaagaaaccccggctaactccgtgccagcagccgcggtaatacggagggggttagcgttgttcggaattactgggcgtaaagcgcgcgtaggcggatcagaaagttgggggtgaaatcccggggctcaacctcggaactgcctccaaaactcctggtcttgagttcgagagaggtgagtggaattccgagtgtagaggtgaaattcgtagatattcggaggaacaccagtggcgaaggcggctcactggctcgatactgacgctgaggtgcgaaagtgtggggagcaaacaggattagataccctggtagtccacaccgtaaacgatgaatgccagtcgtcggcaagcatgcttgtcggtgacacacctaacggattaagcattccgcctggggagtacggtcgcaaggttaaaactcaaaggaattgacgggggcccgcacaagcggtggagcatgtggtttaattcgaagcaacgcgcagaaccttaccaacccttgacatcctaggaccgccagagagatttggctttcacttcggtgacctagtgacaggtgctgcatggctgtcgtcagctcgtgtcgtgagatgttcggttaagtccggcaacgagcgcaacccacatcttcagttgccagcagttcggctgggcactctggagaaactgcccgtgataagcgggaggaaggtgtggatgacgtcaagtcctcatggcccttacgggttgggctacacacgtgctacaatggtgcctacagtgggttaatccccaaaaggcatctcagttcggattgtcgtctgcaactcgacggcatgaagtcggaatcgctagtaatcgcgtaacagcatgacgcggtgaatacgttcccgggccttgtacacaccgcccgtcacaccatgggagttgggtctacccgaagacggtgcgccaacctttcgagggggcagctggccacggtaggctcagcga

SEQ ID NO: 3060 - DNA, 1464 bp, Salmonella bongori
  source 1..1464: mol_type = unassigned DNA
attgaacgctggcggcaggcctaacacatgcaagtcgaacggtaacaggaagcagcttgctgcttcgctgacgagtggcggacgggtgagtaatgtctgggaaactgcctggtggagggggataactactggaaacggtggctaataccgcataacgtcgcaagaccaaagagggggaccttcgggcctcttgccatcagatgtgcccagatgggattagcttgttggtggggtaacggcccaccaaggcgacgatccctagctggtctgagaggatgaccagccacactggaactgagacacggtccagactcctacgggaggcagcagtggggaatattgcacaatgggcgcaagcctgatgcagccatgccgcgtgtatgaagaaggccttcgggttgtaaagtactttcagcggggaggaaggcghcaaggttaataaccttgttgattgacgttacccgcagaagaagcaccggctaactccgtgccagcagccgcggtaatacggagggtgcaagcgttaatcggaattactgggcgtaaagcgcacgcaggcggtctgtcaagtcggatgtgaaatccccgggctcaacctgggaactgcatccgaaactggcaggcttgagtctcgtagaggggggtagaattccaggtgtagcggtgaaatgcgtagagatctggaggaataccggtggcgaaggcggccccctggacgaagactgacgctcaggtgcgaaagcgtggggagcaaacaggattagataccctggtagtccacgccgtaaacgatgtcgacttggaggttgtgcccttgaggcgtggcttccggagctaacgcgttaagtcgaccgcctggggagtacggccgcaaggttaaaactcaaatgaattgacgggggcccgcacaagcggtggagcatgtggtttaattcgatgcaacgcgaagaaccttacctggtcttgacatccacagaaccttgtagagatacgagggtgccttcgggaactgtgagacaggtgctgcatggctgtcgtcagctcgtgttgtgaaatgttgggttaagtcccgcaacgagcgcaacccttatcctttgttgccagcgattaggtcgggaactcaaaggagactgccagtgataaactggaggaaggtggggatgacgtcaagtcatcatggcccttacgaccagggctacacacgtgctacaatggcgcatacaaagagaagcgacctcgcgagagcaagcggacctcataaagtgcgtcgtagtccggattggagtctgcaactcgactccatgaagtcggaatcgctagtaatcgtggatcagaatgccacggtgaatacgttcccgggccttgtacacaccgcccgtcacaccatgggagtgggttgcaaaagaagtaggtagcttaaccttcgggagggcgcttaccactttgtgattcatgactggggtg

SEQ ID NO: 3061 - DNA, 1438 bp, Salsuginibacillus halophilus
  source 1..1438: mol_type = unassigned DNA
acatgcagtcgagcgcgtgaaaccagttgattcccttcggggatgacgctggtggatcgagcggcggacgggtgagtaacacgtgggcaacctgccctgcagatcgggataaccccgggaaaccggggctaataccgaatgaccggaagaatcgcctgattctttcgtaaaagctgggatttatcctagcactgcaggatgggcccgcggcgcattagttagttggtgaggtaatggctcaccaaggcgacgatgcgtagccgacctgagagggtgatcggccacactgggactgagacacggcccagactcctacgggaggcagcagtagggaatcatccgcaatggacgaaagtctgacggtgcaacaccgcgtgagtgacgaaggcctcagggtcgtaaagctctgttatcaaggaagaaaacgtactgtgcgaatagagcagtaccttgccggtacttgatcagaaagccccggctaactacgtgccagcagccgcggtaacacgtagggggcgagcgttgtccggaattattgggcgtaaagggcacgcaggcggccttttaagtctgatgtgaaagcccgtggctcaaccacggaatggcattggaaactgaaaggcttgagtgcagaagaggagagcggaattccacgtgtagcggtgaaatgcgtagatatgtggaggaacaccagtggcgaaggcggctctctggtctgtaactgacgctgaggtgcgaaagcgtggggagcgaacaggattagataccctggtagtccacgccgtaaacgttgagtgctaggtgttaggggtttcgatacccttagtgccgaagtaaacacattaagcactccgcctggggagtacgaccgcaaggttgaaactcaaaggaattgacgggggcctgcacaagcggtggagcatgtggtttaattcgatgcaacgcgaagaaccttaccaggtcttgacatcttttgcccgctctggagacagagttttcccttcggggacaaaatgacaggtggtgcatggttgtcgtcagctcgtgtcgtgagatgttgggttaagtcccgcaacgagcgcaacccttgaccttagttgccagcattcagttgggcactctagggtgactgccggtgacaaaccggaggaaggtggggatgacgtcaaatcatcatgccccttatgacctgggctacacacgtgctacaatggatggtacaaagggttgcgaggccgcgaggccgagccaatcccaaaaagccattctcagttcggattgttctctgcaactcgagaacatgaagccggaatcgctagtaatcgcggatcagaatgccgcggtgaatacgttcccaggccttgtacacaccgcccgtcacaccacgagagcttgcaacgcccgaagtcggtcaggtaacctttttaggagccagccg

SEQ ID NO: 3062 - DNA, 1477 bp, Salsuginibacillus kocurii
  source 1..1477: mol_type = unassigned DNA
gacgaacgctggcggcatgcctaatacatgcaagtcgagcgcgtgaagcaggttgatcccttcggggtgacacctgtggatcgagcggcggacgggtgagtaacacgtgggcaacctgccctgtcgatcggaataaccccgggaaaccggggctaatgccgaataccacttggaaccacatggttccaggttgaaagttggcctctggctaacacgacaggatgggcccgcggcgcattagttagttggtgaggtaatggctcaccaaggcgacgatgcgtagccgacctgagagggtgatcggccacactgggactgagacacggcccagactcctacgggaggcagcagtagggaatcatccgcaatgggcgaaagcctgacggtgcaatgccgcgtgagtgatgaaggtcttcggatcgtaaagctctgttataagggaagaaccggtgccgtgcgaatagagcggtaccttgacggtaccttatcagaaagccccggctaactacgtgccagcagccgcggtaacacgtagggggcaagcgttgtccggaattattgggcgtaaagggcacgcaggcggcttcttaagtctgatgtgaaagcccgtggctcaaccacggaatcgcattggaaactgaggagcttgagtgcaggagaggagagcggaattccacgtgtagcggtgaaatgcgtagatatgtggaggaacaccagtggcgaaggcggctctctggcctgtaactgacgctgaggtgcgaaagcgtggggagcgaacaggattagataccctggtagtccacgccgtaaacgttgagtgctaggtgttaggggtttcgatacccttagtgccgaagtcaacacattaagcactccgcctggggagtacgaccgcaaggttgaaactcaaaggaattgacgggggcccgcacaagcggtggagcatgtggtttaattcgatgcaacgcgaagaaccttaccaggtcttgacatcttctgaccgctttggagacaaagctttcccttcggggacagaatgacaggtggtgcatggttgtcgtcagctcgtgtcgtgagatgttgggttaagtcccgcaacgagcgcaacccctaaacttagttgccagcattcagttgggcactctaggttgactgccggtgacaaaccggaggaaggtggggatgacgtcaaatcatcatgccccttatgacctgggctacacacgtgctacaatggacggtacagagggttgcaagaccgcgaggtcaagccaatcccaaaaagccgttctcagttcggattgttctctgcaactcgagagcatgaagccggaatcgctagtaatcgcggatcagaatgccgcggtgaatacgttcccgggccttgtacacaccgcccgtcacaccacgagagcttgcaacacccgaagtcggttcggtaacccttttgggatgcctagccgccgaaggtggggca

SEQ ID NO: 3063 - DNA, 1464 bp, Samsonia erythrinae
  source 1..1464: mol_type = unassigned DNA
attgaacgctggcggcaggcctaacacatgcaagtcgagcggcagcgggaagtagcttgctactttgccggcgagcggcggacgggtgagtaatgtctgggaaactgcctgatggcgggggataactactggaaacggtagctaataccgcataatgtcttcggaccaaagagggggaccttcgggcctcttgccatcggatgtgcccagatgggattagctggtaggtgaggtaacggctcacctaggcgacgatccctagctggtctgagaggatgaccagccacactggaactgagacacggtccagactcctacgggaggcagcagtggggaatattgcacaatgggcgcaagcctgatgcagccatgccgcgtgtgtgaagaaggccttcgggttgtaaagcactttcagcggggaggaaggggataaggcgaatacccttattcattgacgttacccgcagaagaagcaccggctaactccgtgccagcagccgcggtaatacggagggtgcaagcgttaatcggaatgactgggcgtaaagcgcacgcaggcggtctgttaagtcagatgtgaaatccccgggcttaacctgggaactgcatttgaaactggcaggctagagtcttgtagaggggggtagaattccaggtgtagcggtgaaatgcgtagagatctggaggaataccggtggcgaaggcggccccctggacaaagactgacgctcaggtgcgaaagcgtggggagcaaacaggattagataccctggtagtccacgctgtaaacgatgtcgatttggaggctgtggtcttgaaccgtggcttccggagctaacgcgttaaatcgaccgcctggggagtacggccgcaaggttaaaactcaaatgaattgacgggggcccgcacaagcggtggagcatgtggtttaattcgatgcaacgcgaagaaccttacctactcttgacatcctcagaagagactggagacagtcttgtgccttcgggaactgagagacaagtgctgcatggctgtcgtcagctcgtgttgtgaaatgttgggttaagtcccgcaacgagcgcaacccttatcctttgttgccagcgatacggtcgggaactcaaaggagactgccggtgataaaccggaggaaggtggggatgacgtcaagtcatcatggcccttacgagtagggctacacacgtgctacaatggcgtatacaaagagaagcgacctcgcgagagcaagcggacctcataaagtacgtcgtagtccggattggagtctgcaactcgactccatgaagtcggaatcgctagtaatcgtagatcagaatgctacggtgaatacgttcccgggccttgtacacaccgcccgtcacaccatgggagtgggttgcaaaagaagtaggtagcttaaccttcgggggggcgcttaccactttgtgattcatgactggggtg

SEQ ID NO: 3064 - DNA, 1479 bp, unidentified
  source 1..1479: mol_type = unassigned DNA; note = Sandarakinorhabdus cyanobacteriorum
ttgagagtttgatcctggctcagaacgaacgctggcggcatgcctaacacatgcaagtcgaacgaagccttcgggcttagtggcgcacgggtgcgtaacgcgtgggaatctgccttcaggtacggaataactcagggaaacttgtgctaataccgtatgatgacttcggtccaaagatttatcgcctgaagatgagcccgcgtaggattagctagttggtggggtaaaggcctaccaaggcgacgatccttagctggtctgagaggatgatcagccacactgggactgagacacggcccagactcctacgggaggcagcagtggggaatattggacaatgggcgaaagcctgatccagcaatgccgcgtgagtgaagaaggccttcgggttgtaaagctcttttacccgggatgataatgaccgtaccgggagaataagccccggctaactccgtgccagcagccgcggtaatacggagggggctagcgttgttcggaatcactgggcgtaaagcgtgcgtaggcggctattcaagtcagaggtgaaagcctggggctcaaccccagaactgcctttgaaactaggtagcttgaacacgggagaggtgagtggaattccgagtgtagaggtgaaattcgtagatattcggaagaacaccagtggcgaaggcggctcactggaccgttgttgacgctgaggcacgaaagcgtggggagcaaacaggattagataccctggtagtccacgccgtaaacgatgacaactagctgtcggggctcttggagctccggtggcgcagctaacgcattaagttgtccgcctggggagtacggtcgcaagattaaaactcaaaggaattgacgggggcctgcacaagcggtggagcatgtggtttaattcgaagcaacgcgcagaaccttaccagcgtttgacatcgcaggacgatttccagagatggatttcttctcgcaagagacttgcagacaggtgctgcatggctgtcgtcagctcgtgtcgtgagatgttgggttaagtcccgcaacgagcgcaaccctcgcctttagttaccatcattcagttggggactctaaaggaaccgccggtgataagccggaggaaggtggggatgacgtcaagtcctcatggcccttacgcgctgggctacacacgtgctacaatggcggtgacaatgggctgcaaacccgcgagggggagctaatctcaaaaagccgtctcagttcggattgttctctgcaactcgagagcatgaaggcggaatcgctagtaatcgcggatcagcatgccgcggtgaatacgttcccaggccttgtacacaccgcccgtcacaccatgggagttggattgacccgaaggcagtgggctaaccgcaaggaggcagctgaccacggtcggttcagtgactggggtgaagtcgtaacaaggtagccgtaggggaacctgcggctggatcacctcct

SEQ ID NO: 3065 - DNA, 1453 bp, Schlegelella thermodepolymerans
  source 1..1453: mol_type = unassigned DNA
attgaacgctggcggcatgctttacacatgcaagtcgaacggcagcgcgggcttcggcctggcggcgagtggcgaacgggtgagtaatgcatcggaacgtgcccagtagtgggggatagcccggcgaaagccggattaataccgcatacgacctgagggtgaaagcgggggaccgaaaggcctcgcgctattggagcggccgatgtcggattagctagttggtggggtaaaggcctaccaaggcgacgatccgtagctggtctgagaggacgaccagccacactgggactgagacacggcccagactcctacgggaggcagcagtggggaattttggacaatgggggcaaccctgatccagccatgccgcgtgcgggaagaaggccttcgggttgtaaaccgcttttgtcagggaagaaatcctctgggctaataccccggggggatgacggtacctgaagaataagcaccggctaactacgtgccagcagccgcggtaatacgtagggtgcgagcgttaatcggaattactgggcgtaaagcgtgcgcaggcggttgtgcaagacagatgtgaaatccccgggcttaacctgggaactgcatttgtgactgcacggctagagtgcggcagaggggagtggaattccgcgtgtagcagtgaaatgcgtagatatgcggaggaacaccgatggcgaaggcagctccctgggcctgcactgacgctcatgcacgaaagcgtggggagcaaacaggattagataccctggtagtccacgccctaaacgatgtcgactagttgttggacggttcgctgttcagtaacgtagctaacgcgtgaagtcgaccgcctggggagtacggccgcaaggttgaaactcaaaggaattgacggggacccgcacaagcggtggatgatgtggtttaattcgatgcaacgcgaaaaaccttacctacccttgacatgccaggaatcctgcagagatgtgggagtgctcgaaagagaacctggacacaggtgctgcatggccgtcgtcagctcgtgtcgtgagatgttgggttaagtcccgcaacgagcgcaacccttgccattagttgctacgaaagggcactctaatgggactgccggtgacaaaccggaggaaggtggggatgacgtcaggtcctcatggcccttatgggtagggctacacacgtcatacaatggccggtacagagggcagccaacccgcgagggggagccaatcccagaaagccggtcgtagtccggatcgcagtctgcaactcgactgcgtgaagtcggaatcgctagtaatcgcggatcagcatgtcgcggtgaatacgttcccgggtcttgtacacaccgcccgtcacaccatgggagcgggttctgccagatgtgggtagcctaaccgcaaggagggcgcttaccacggcagggttcgcgactggggtg

SEQ ID NO: 3066 - DNA, 1461 bp, Schlesneria paludicola
  source 1..1461: mol_type = unassigned DNA
aatgaacgttggcggcgtggattaggcatgcaagtcgagggagaacccgcaagggggacaccggcgaacggggtaggatcacgtaggtgacgtacccccagggcgaggatagccacgggaaactgtgggtaatactcgataatcttcccgatcgtgatggttgggaagcaatgggtgtgattccacctggggagcggcttacgcagtatcagctagttggtgaggtaacggctcaccaaggctttgacgcttagggggtgtgagagcatggcccccaccactggcactgagacactggccagacacctacgggtggctgcagtcgagaatcttcggcaatggacgaaagtctgaccgagcgacgccgcgtgcgggatgaaggtcttcggattgtaaaccgctgtcagaggggatgaagtatacgagagctatctcttgtatttgacagagcctcagaggaagcacgggctaagttcgtgccagcagccgcggtaatacgaactgtgcgaacgttattcggaatcactgggcttaaagggtgcgtaggtggttttctaagtcacgtgtgaaatcttctggctcaaccagaaaactgcgcgtgatactggaggacttgagtgaggtaggggtgtgtggaacttccggtggagcggtgaaatgtgtagagatcggaaggaacgccagcagcgaaagcggcacactgggccttttctgacactgaggcacgaaagctaggggagtgaacgggattagataccccggtaatcctagccgtaaacactgaacactggaggaagggggcttcggccttctttctcgtagcgaaagcgttaagtgttccgcctggggagtatggtcgcaaggctgaaactcaaaggaattgacgggggctcacacaagcggtggagcatgtggcttaattcgaggcaacgcgaagaaccttatcctgggtttgacatgcatggattaaccctgtgaaagcagggccacgctcgcaagagtggaacatgcacaggtgctgcatggctgtcgtcagctcgtgtcgtgagatgtcgcgttaagtcgctaaacgagcgaaacccttatccttagttgccagcgagttatgtcggggactctagggagactgccggtgtcaaaccggaggaaggcggggatgacgtcaagtcctcatggcctttatgcccagggctgcacacgtgctacaatggggcgtacaaagcgctgcaagcctgcgaaggcaagcgaatcgcaaaaagcgtcccccagttcggattgcaggctgcaactcgcctgcatgaagccggaatcgctagtaatcgcagatcagcattgctgcggtgaatgtgttcctgagccttgtacacaccgcccgtcaagccacgaaagcggggggcatccgaagtcgctgcgtgaaccgcaaggacacaggtgccgaagatgaactccgtgattgggact

SEQ ID NO: 3067 - DNA, 1459 bp, Schwartzia succinivorans
  source 1..1459: mol_type = unassigned DNA
gacgaacgctggcggcgtgcttaacacatgcaagtcgaacgggcgatttgaaaagcttgcttttgatgagcctagtggcaaacgggtgagtaacgcgtaggcaacctgccctcaggatggggacaacggcccgaaaggaccgctaataccgaatgacgtatcgggatcgcatgatcctgataccaaaggcggagcaatccgtcacctgaggatgggcctgcgtctgattaggtagttggtgaggtaacggcccaccaagccgacgatcagtagccggtctgagaggatgaacggccacattgggactgagacacggcccagactcctacgggaggcagcagtggggaatcttccgcaatgggcgaaagcctgacggagcaacgccgcgtgagtgaagaaggtcttcggatcgtaaagctctgttgtcggggacgaaggggcagatcaggaaatgggtctgcttagacggtacctgacgaggaagccacggctaactacgtgccagcagccgcggtaatacgtaggcggcaagcgttgtccggaatcattgggcgtaaagggagcgcaggtgggacggtaagtctttcttaaaagtgcggggctcacccccgtgaggggaaagaaactatcgttcttgagtgcaggagaggaaagcggaattcctagtgtagcggtgaaatgcgtagatattaggaagaacaccagtggcgaaggcggctttctggactgtaactgacactgaggctcgaaagccaggggagcgaacgggattagataccccggtagtcctggccgtaaacgatggatactaggtgtaggaggtatcgaccccttctgtgccggagttaacgcaataagtatcccgcctggggagtacggtcgcaagattgaaactcaaaggaattgacgggggcccgcacaagcggtggagtatgtggtttaattcgacgcaacgcgaagaaccttaccagggcttgacattgatcgaaagcgccagagatggtgccctctcttcggagacgagaaaacaggtggtgcatggctgtcgtcagctcgtgtcgtgagatgttgggttaagtcccgcaacgagcgcaacccctatgctttgttgccagcacgtaaaggtgggcactcaaaggagactgccgcggagaacgcggaggaaggcggggatgacgtcaagtcatcatgccccttatgtcctgggctacacacgtactacaatgggatggacagagagcagcgaccccgcgagggtaagcgaacctcataaaccatctcccagttcggattgcaggctgaaacccgcctgcatgaagttggaatcgctagtaatcgcaggtcagcatactgcggtgaatacgttcccgggccttgtacacaccgcccgtcacaccacggaagtcattcacacccgaagccggcgcagccgtctaaggtgggggcgatgactggggtg

SEQ ID NO: 3068 - DNA, 1445 bp, unidentified
  source 1..1445: mol_type = unassigned DNA; note = Scopulibacillus darangshiensis
tgcctaatacatgcaagtcgagcgcgggaagcagctgatcccttcggggtgacgcttgtggaacgagcggcggacgggtgagtaacacgtgggtaacctgcctgtaagactgggataactccgggaaaccggggctaataccgggtaatccaacgcaccgcatggtgcgacggtaaaagatggttctgccatcacttacagatgggcccgcggcgcattagttagttggtgaggtaacggctcaccaagaccgcgatgcgtagccgacctgagagggtgatcggccacactgggactgagacacggcccagactcctacgggaggcagcagtagggaatcttccgcaatggacgaaagtctgacggagcaacgccgcgtgagtgatgaaggttttcggatcgtaaagctctgttgttagagaagaacaggtgccataggaaatgatggtgctttgacggtatctaaccagaaagccacggctaactacgtgccagcagccgcggtaatacgtaggtggcaagcgttgtccggaattattgggcgtaaagcgcgcgcaggcggcttcttaagtctgatgtgaaagcccacggctcaaccgtggagggtcattggaaactggggagcttgagtacaggagaggagagtggaattccacgtgtagcggtgaaatgcgtagatatgtggaggaacaccagtggcgaaggcggctctctggcctgtaactgacgctgaggcgcgaaagcgtggggagcgaacaggattagataccctggtagtccacgccgtaaacgatgagtgctaggtgttagggggtccaacccttagtgctgaagtcaacacattaagcactccgcctggggagtacgaccgcaaggttgaaactcaaaggaattgacgggggcccgcacaagcagtggagcatgtggtttaattcgaagcaacgcgaagaaccttaccaggtcttgacatcctctgacacctctagagatagagttttccccttcgggggacagagtgacaggtggtgcatggttgtcgtcagctcgtgtcgtgagatgttgggttaagtcccgcaacgagcgcaacccttgatcttagttgccagcattcagttgggcactctaaggtgactgccggtgacaaaccggaggaaggtggggatgacgtcaaatcatcatgccccttatgacctgggctacacacgtgctacaatgggcggtacaaagggcagcgaaaccgcgaggttaagcgaatcccataaagccgctctcagttcggattgcaggctgcaactcgcctgcatgaagccggaattgctagtaatcgcggatcagcatgccgcggtgaatccgttcccgggccttgtacacaccgcccgtcacaccacgagagtttgtaacacccgaagtcggtgaggtaacctttggaaccagccgccgaaggt

SEQ ID NO: 3069 - DNA, 1400 bp, unidentified
  source 1..1400: mol_type = unassigned DNA; note = Scytonema hofmanni
  misc_difference 1378..1382: note = n is a, c, g, or t
ggtatgcttaacacatgcaagtcgaacggaacccttaggggtttagtggcggacgggtgagtaacgcgtgagaatctggcttcaggtctgggacaacagttggaaacggctgctaataccggatgtgcccatgggtgaaaggttaactgcctgaagatgagctcgcgtccgattagttagttggtgtggtaagagcgcaccaagacggcgatcggtagctggtctgagaggacgatcagccacactggaactgagacacggtccagactcctacgggaggcagcagtggggaattttccgcaatgggcgaaagcctgacggagcaataccgcgtgagggaggaaggctcttgggttgtaaacctcttttctcagggaataaaaaaatgaaggtacttgaggaataagcatcggctaactccgtgccagcagccgcggtaatacggaggatgcaagcgttatccggaatgattgggcgtaaagcgtccgcaggtggtttatcaagtcggctgtcaaagcgtctggctcaactagataagggcagtggaaactgagagactagagtaaggtaggggtagagggaattcctggtgtagcggtgaaatgcgtagagatcaggaagaacaccggtggcgaaagcgctctgctggactattactgacactgagggacgaaagctaggggagcgaatgggattagataccccagtagtcctagccgtaaacgatggatactaggcgttacgcgtatcgacccgcgtagtgccggagccaacgcgttaagtatcccgcctggggagtacgccggcaacggtgaaactcaaaggaattgacgggggcccgcacaagcggtggagtatgtggtttaattcgatgcaacgcgaagaaccttaccagggcttgacatgtcgcgaatcccgatgaaagttgggagtgccttagggagcgcgaacacaggtggtgcatggctgtcgtcagctcgtgtcgtgagatgttgggttaagtcccgcaacgagcgcaaccctcgtacttagttgccatcattaagttgggaactctaaggagactgccggtgacaaaccggaggaaggtggggatgacgtcaagtcagcatgccccttacgtcctgggctacacacgtactacaatgctatggacagagggcagcaagcatgtgaatgcaagcaaatctcacaaaccatggctcagttcagatcgcaggctgcaactcgcctgcgtgaaggtggaatcgctagtaattgcaggtcagcatactgcagtgaattcgttcccgggccttgtacacaccgcccgtcacaccatggaagctggtagtgcccgaagtcgttactctaaccattcgtggaggaggatgccgannnnnggactggtgactggggtg

SEQ ID NO: 3070 - DNA, 1148 bp, Scytonema hofmannii
  source 1..1148: mol_type = unassigned DNA
gaatctggcttcaggtctgggacaacagttggaaacggctgctaataccggatgtgcctgtgggtgaaaggttaactgcctgaagatgagctcgcgtccgattagttagttggtgtggtaagagcgcaccaagacggcgatcggtagctggtctgagaggacgatcagccacactggaactgagacacggtccagactcctacgggaggcagcagtggggaattttccgcaatgggcgaaagcctgacggagcaataccgcgtgagggaggaaggctcttgggttgtaaacctcttttctcagggaataaaaaaatgaaggtacttgaggaataagcatcggctaactccgtgccagcagccgcggtaatacggaggatgcaagcgttatccggaatgattgggcgtaaagcgtccgcaggtggtttatcaagtcggctgtcaaagcgtctggctcaactagataagggcagtggaaactgagagactagagtaaggtaggggtagagggaattcctggtgtagcggtgaaatgcgtagagatcaggaagaacaccggtggcgaaagcgctctgctggactattactgacactgagggacgaaagctaggggagcgaatgggattagataccccagtagtcctagccgtaaacgatggatactaggcgttacgcgtatcgacccgcgtagtgccggagccaacgcgttaagtatcccgcctggggagtacgccggcaacggtgaaactcaaaggaattgacgggggcccgcacaagcggtggagtatgtggtttaattcgatgcaacgcgaagaaccttaccagggcttgacatgtcgcgaatcccgatgaaagttgggagtgccttagggagcgcgaacacaggtggtgcatggctgtcgtcagctcgtgtcgtgagatgttgggttaagtcccgcaacgagcgcaaccctcgtacttagttgccatcattaagttgggaactctaaggagactgccggtgacaaaccggaggaaggtggggatgacgtcaagtcagcatgccccttacgtcctgggctacacacgtactacaatgctatggacagagggcagcaagcatgcgaatgcaagcaaatctcacaaaccatggctcagttcagatcgcag

SEQ ID NO: 3071 - DNA, 1413 bp, Scytonema tolypothrichoides
  source 1..1413: mol_type = unassigned DNA
gatgaacgctggcggtatgcttaacacatgcaagtcgaacggagttcttcggaacttagtggcggacgggtgagtaacgcgtgagaatctggcttcaggttcgggacaacagttggaaacggctgctaataccggatgtgccttagggtgaaagatttatcacctgaagatgagctcgcgtctgattagctagtaggtgtggtaagagcgcacctaggcgacgatcagtagctggtctgagaggatgaccagccacactgggactgagacacggcccagactcctacgggaggcagcagtggggaattttccgcaatgggcgaaagcctgacggagcaataccgcgtgagggaggaaggctcttgggttgtaaacctcttttctcagggaataagtactgaaggtacctgaggaatcagcatcggctaactccgtgccagcagccgcggtaatacggaggatgcaagcgttatccggaatgattgggcgtaaagcgtccgcaggtggtttttcaagtctgctgtcaaagagtctggctcaaccagataaaggcagtggaaactgagagactagagtatggtaggggtagagggaattcctggtgtagcggtgaaatgcgtagagatcaggaagaacaccggtggcgaaagcgctctgctggaccataactgacactgagggacgaaagctaggggagcgaatgggattagataccccagtagtcctagccgtaaacgatggatactaggcgttgcccgtatcgacccgggcagtgtcgtagccaacgcgttaagtatcccgcctggggagtacgcacgcaagtgtgaaactcaaaggaattgacgggggcccgcacaagcggtggagtatgtggtttaattcgatgcaacgcgaagaaccttaccagggcttgacatgtccggaatctcttggaaacgagagagtgccttcgggagccggaacacaggtggtgcatggctgtcgtcagctcgtgtcgtgagatgttgggttaagtcccgcaacgagcgcaaccctcgttcttagttgccagcaattcggttgggcactctagggagactgccggtgacaaaccggaggaaggtggggatgacgtcaagtcagcatgccccttacgtcctgggctacacacgtactacaatgctatggacaaagggcagcaagctagcaatagcaagcaaatcccataaaccatggctcagttcagatcgcaggctgcaactcgcctgcgtgaaggaggaatcgctagtaattgcaggtcagcatactgcagtgaattcgttcccgggccttgtacacaccgcccgtcacaccatggaagctggtcacgcccgaagtcgttaccctaacccctcggggagggggacgccgaaggtaggactggtgactggggtg

SEQ ID NO: 3072 - DNA, 1466 bp, Sedimenticola selenatireducens
  source 1..1466: mol_type = unassigned DNA
attgaacgctggcggtatgcttaacacatgcaagtcgaacggcagcacgagagagcttgctctcttggtggcgagtggcggacgggtgagtaacgcgtaagaatctgcctagtagtgggggataactcggggaaactcgagctaataccgcatacgccctacgggggaaagtgggggaccttcgggcctcacgctattagatgagcttgcgttggattagctagttggtagggtaatggcctaccaaggcgacgatccatagctggtctgagaggacgatcagccacactgggactgagacacggcccagactcctacgggaggcagcagtggggaatattggacaatgggcgcaagcctgatccagcaataccgcgtgtgtgaagaaggcctgcgggttgtaaagcactttcaattgtgaagaaaagcggaaggctaatacccttctgtcttgacgttaactttagaagaagcaccggctaactctgtgccagcagccgcggtaatacagagggtgcgagcgttaatcggaattactgggcgtaaagcgtgcgtaggcggtttagtaagtcagatgtgaaagccctgggcttaacctgggaactgcatttgaaactgctgaactagagtgtggtagagggaagtggaattccgggtgtagcggtgaaatgcgtagatatccggaggaacaccagtggcgaaggcgacttcctggaccaacactgacgctgaggtacgaaagcgtgggtagcaaacaggattagataccctggtagtccacgccgtaaacgatgtcaactagttgttgggagcatcttggctcttagtaacgtagctaacgcgataagttgaccgcctggggagtacggccgcaaggttaaaactcaaaggaattgacgggggcccgcacaagcggtggagcatgtggtttaattcgatgcaacgcgaagaaccttaccagcccttgacatcctgcgaactttctagagatagattggtgccttcgggaacgcagagacaggtgctgcatggctgtcgtcagctcgtgtcgtgagatgttgggttaagtcccgtaacgagcgcaacccttgcccttagttgccagcacgtaatggtgggaactctagggggactgccggtgataaaccggaggaaggtggggatgacgtcaagtcatcatggcccttatgggctgggctacacacgtgctacaatggccggtacagagggccgcaaacccgcgagggggagcaaatctcacaaaaccggtcgtagtccggatcggagtctgcaactcgactccgtgaagttggaatcgctagtaatcgcgaatcagaatgtcgcggtgaatacgttcccgggccttgtacacaccgcccgtcacaccatgggagtgggttgcaaaagaagtaggtagtctaaccttcgggaggacgcttaccactttgtgattcatgactggggtg

SEQ ID NO: 3073 - DNA, 1464 bp, unidentified
  source 1..1464: mol_type = unassigned DNA; note = Sedimenticola thiotaurini
attgaacgctggcggtatgcttaacacatgcaagtcgaacggtaacagcaggagcttgctcctggctgacgagtggcggacgggtgagtaacgcgtaagaatctgcctagtagtgggggataactcggggaaactcgagctaataccgcatacgccctacgggggaaagtgggggaccttcgggcctcacgctattagatgagcttgcgttggattagctagttggtgaggtaatggctcaccaaggcgacgatccatagctggtctgagaggacgatcagccacactgggactgagacacggcccagactcctacgggaggcagcagtggggaatattggacaatgggcgcaagcctgatccagcaataccgcgtgtgtgaagaaggcctgcgggttgtaaagcactttcaattgtgaagaaaagcttggggttaatagccccgagtcttgacgttaactttagaagaagcaccggctaactctgtgccagcagccgcggtaatacagagggtgcgagcgttaatcggaattactgggcgtaaagcgtgcgtaggcggtttagtaagtcagatgtgaaagccctgggcttaacctgggaactgcatttgaaactgctgaactagagtgtggtagagggaagtggaattccgggtgtagcggtgaaatgcgtagatatccggaggaacaccagtggcgaaggcgacttcctggaccaacactgacgctgaggtacgaaagcgtgggtagcaaacaggattagataccctggtagtccacgccgtaaacgatgtcaactagttgttgggagcattctggcttttagtaacgtagctaacgcgataagttgaccgcctggggagtacggccgcaaggttaaaactcaaaggaattgacgggggcccgcacaagcggtggagcatgtggtttaattcgatgcaacgcgaagaaccttaccagcccttgacatcctgcgaactttctagagatagattggtgccttcgggaacgcagagacaggtgctgcatggctgtcgtcagctcgtgtcgtgagatgttgggttaagtcccgtaacgagcgcaacccttgtccttagttgccagcacgtaaaggtgggaactctagggagactgccggtgataaaccggaggaaggtggggatgacgtcaagtcatcatggcccttatgggctgggctacacacgtgctacaatggccggtacagagggcggcgaacccgcgaggggaagcaaatctcacaaaaccggtcgtagtccggatcgcagtctgcaactcgactgcgtgaagttggaatcgctagtaatcgcgaatcagaatgtcgcggtgaatacgttcccgggccttgtacacaccgcccgtcacaccatgggagtgggttgcaaaagaagtaggtagtctaaccttcgggaggacgcttaccactttgtgattcatgactggggtg

SEQ ID NO: 3074 - DNA, 1535 bp, unidentified
  source 1..1535: mol_type = unassigned DNA; note = Sedimentisphaera cyanobacteriorum
aaattgaagagtttgatcctggctcagaacgaacgctggcggcgtggttaagacatgcaagtcgcacgagcctttcatggctagtggcgaaaggatgagtaacggataggtaacgtacccgatgcacaggtatagcgtcgagagcttgctctctaccgaaaggggcggtaatacctgataacattgccagctgcagggcaggcaatcaaagatttatcggcatcggagcggcctattccctatcagttagttggtgaggtaacggctcaccaaggcaacgacgggtagcgggactgagaggttggtccgccatatcgggactgagacactgcccggacctccacggagggctgcagtaacgaatcttgggcaatgatcgaaagattgacccagcgacgccgcgtgcaggaagaagcccctcggggtgtaaactgctgtcaagagcaagtaagcgcaagcagaactactctaaaggaagtcacggctaacttcgtgccagcagccgcggtaatacgaaggtggcgagcgttgttcggaatcactgggcttaaagcgtacgcaggcggttttctaagcgttctctgaaatcccccggctcaaccggggaattggggggcgaactggaaaacttgaggcatacaggggcgggtggaactcttcgtggagcggtggaatgcgtagatatgaagaggaacgccagaggtgaaaacggcccgctgggtatgacctgacgctgaggtacgaaagcatgggtagcgaacgggattagataccccggtagtccatgccgtaaacgatgtgcactggttcgcagtaattctgacattattgcgggcgtagcaaaagtgttaagtgcaccgcctggggagtacggtcgcaaggctaaaactcaaaggaattgacgggggctcacacaagcggtggagcatgtggattaattcgaagcaacgcgcagaaccttacctgggtttgacatgtttggatgccttcctggaaacaggaccgggctgctctcttcggagagtgaaacttacacaggtgctgcatggctgtcgtcagctcgtgtcgtgagatgttgggttaagtccttgaacgagcgaaacccttgccgttagttgccagcaggttaagctggggactctaacgggactgccggtgttaaaccggaggaaggcggggatgacgtcaagtcctcatggcctttatgcccagggcttcacacgtgctacaatggcagatacagatcgacgcaaagccgtgaggttgagcaaatcgcacaaagtctgcctcagttcggattgttctctggcaactcgagaacatgaagttggaatcgctagtaatcgcgtatcagcaatgacgcggtgaatatgttcctgagccttgtacacaccgcccgtcaagtcatggaaatcgggagcacccgaagtcggcttgtcaactcttcggagagacggctgcctacggtgaactcggtaactgggactaagtcgtaacaaggtagccgtaggggaacctgcggctggatcacctcc

SEQ ID NO: 3075 - DNA, 1518 bp, unidentified
  source 1..1518: mol_type = unassigned DNA; note = Sedimentisphaera salicampi
tggctcagaacgaacgctggcggcgtggttaagacatgcaagtcgcacgagcctttcatggctagtggcgaaaggatgagtaacggataggtaacgtacccgatgcacaggtatagcgtcgagagcttgctctctaccgaaaggggcggtaatacctgataatattgcgagctgcagggctggcaatcaaagatttatcggcatcggagcggcctattccctatcagttagttggtgaggtaacggctcaccaaggcaacgacgggtagcgggactgagaggttggtccgccatatcgggactgagacactgcccggacctccacggagggctgcagtaacgaatcttgggcaatgatcgaaagattgacccagcgacgccgcgtgcaggaagaagcccctcggggtgtaaactgctgtcaagagcaagtaagcgcaagcagaactactctaaaggaagtcacggctaacttcgtgccagcagccgcggtaatacgaaggtggcaagcgttgttcggaatcactgggcttaaagcgtacgcaggcggttttttaagcgttctctgaaatcccccggctcaaccggggaattggggggcgaactggaaaacttgaggcatacaggggcgggtggaactcttcgtggagcggtggaatgcgtagatatgaagaggaacgccagaggtgaaaacggcccgctgggtatgacctgacgctgaggtacgaaagcatgggtagcgaacgggattagataccccggtagtccatgccgtaaacgatgtgcactggttcgtggtaattctgacattatcacgggcgtagcaaaagtgttaagtgcaccgcctggggagtacggtcgcaaggctaaaactcaaaggaattgacgggggctcacacaagcggtggagcatgtggattaattcgaagcaacgcgcagaaccttacctgggtttgacatgtttgtatgcctttctggaaacagagtctggctgctctcttcggagagtgaaacttacacaggtgctgcatggctgtcgtcagctcgtgtcgtgagatgttgggttaagtccttgaacgagcgaaacccttgccgttagttgccagcaggttaagctggggactctaacgggactgccggtgttaaaccggaggaaggcggggatgacgtcaagtcctcatggcctttatgcccagggcttcacacgtgctacaatggtagatacagatcgacgcaaagccgtgaggttgagcaaatcgcacaaagtctgcctcagttcggattgttctctggcaactcgagaacatgaagttggaatcgctagtaatcgcgtatcagcaatgacgcggtgaatatgttcctgagccttgtacacaccgcccgtcaagtcatggaaatcgggagcacccgaagtcggcttgtcaactcttcggagagacggctgcctacggtgaactcggtaactgggactaagtcgtaacaaggtagccgtaggggaacctgcggctggatcacctcctt

SEQ ID NO: 3076 - DNA, 1470 bp, Sediminibacillus albus
  source 1..1470: mol_type = unassigned DNA
tgctatacatgcaagtcgagcgcgtgaagcagccggatcccttcggggtgaaagctgtggaacgagcggcggacgggtgagtaacacgtgggcaacctgcctgtaagactgggataaccccgggaaaccggggctaataccgggtaatacttttcttcgcatgaagggaagttgaaaggcggcttttcggagctgtcacttacagatgggcccgcggcgcattagctagttggtagggtaatggcctaccaaggcaacgatgcgtagccgacctgagagggtgatcggccacactgggactgagacacggcccagactcctacgggaggcagcagtagggaatcttccgcaatggacgaaagtctgacggagcaacgccgcgtgaacgatgaaggttttcggatcgtaaagttctgttgttagggaagaacaagtaccgtttgaataaggcggtaccttgacggtacctaacgaggaagccccggctaactacgtgccagcagccgcggtaatacgtagggggcaagcgttgtccggaattattgggcgtaaagcgcgcgcaggcggttccttaagtctgatgtgaaagcccacggcttaaccgtggagggtcattggaaactggggaacttgagtacagaagaggagagcggaattccacgtgtagcggtgaaatgcgtagatatgtggaggaacaccagtggcgaaggcggctctctggtctgtaactgacgctgaggcgcgaaagcgtggggagcgaacaggattagataccctggtagtccacgccgtaaacgatgagtgctaggtgttagggggtttccgccccttagtgctgaagttaacgcattaagcactccgcctggggagtacggccgcaaggctgaaactcaaaagaattgacgggggcccgcacaagcggtggagcatgtggtttaattcgaagcaacgcgaagaaccttaccaggtcttgacatcctctgatccctctagagatagaggtttcccttcggggacagagtgacaggtggtgcatggttgtcgtcagctcgtgtcgtgagatgttgggttaagtcccgcaacgagcgcaacccttgaccttagttgccagcattcagttgggcactctagggtgactgccggtgacaaaccggaggaaggtggggatgacgtcaaatcatcatgccccttatgacctgggctacacacgtgctacaatggatggtacaaagggacgcgaaaccgcgaggtgaagcaaatcccataaaaccattctcagttcggattgcaggctgcaactcgcctgcatgaagccggaatcgctagtaatcgcggatcagcatgccgcggtgaatacgttcccgggccttgtacacaccgcccgtcacaccacgagagttggcaacacccgaagtcggtgaggtaacctttttggagccagccgccgaaggtggggccaatgattggggg

SEQ ID NO: 3077 - DNA, 1445 bp, Sediminibacillus halophilus
  source 1..1445: mol_type = unassigned DNA
  misc_difference 411: note = n is a, c, g, or t
  misc_difference 466: note = n is a, c, g, or t
gacgaacgctggcggcgtgcctaatacatgcaagtcgagcgcgggaagcaggcggatcccttcggggtgaagcctgtggaacgagcggcggacgggtgagtaacacgtgggcaacctgcctgtaagatcgggataactccgggaaaccggggctaataccgggtaataccttcctccgcatggaggaaggttgaaaggcggccttttggctgtcacttacagatgggcccgcggcgcattagctagttggtagggtaatggcctaccaaggcaacgatgcgtagccgacctgagagggtgatcggccacactgggactgagacacggcccagactcctacgggaggcagcagtagggaatcttccgcaatggacgaaagtctgacggagcaacgccgcgtgaacgatgaangtcttcggatcgtaaagttctgttgtcagggaagaacaagtaccgtttgaataangcggtaccttgacggtacctgacgaggaagccccggctaactacgtgccagcagccgcggtaatacgtagggggcaagcgttgtccggaattattgggcgtaaagcgcgcgcaggcggttccttaagtctgatgtgaaagcccacggcttaaccgtggagggtcattggaaactggggaacttgagtacagaagaggagagcggaattccacgtgtagcggtgaaatgcgtagatatgtggaggaacaccagtggcgaaggcggctctctggtctgtaactgacgctgaggcgcgaaagcgtggggagcgaacaggattagataccctggtagtccacgccgtaaacgatgagtgctaggtgttagggggtttccgccccttagtgctgaagttaacgcattaagcactccgcctggggagtacggccgcaaggctgaaactcaaaagaattgacgggggcccgcacaagcggtggagcatgtggtttaattcgaagcaacgcgaagaaccttaccaggtcttgacatcctctgacccctctagagatagaggtttcccttcggggacagagtgacaggtggtgcatggttgtcgtcagctcgtgtcgtgagatgttgggttaagtcccgcaacgagcgcaacccttgaccttagttgccagcattcagttgggcactctagggtgactgccggtgacaaaccggaggaaggtggggatgacgtcaaatcatcatgccccttatgacctgggctacacacgtgctacaatggatggtacaaagggaagcgaaaccgcgaggtgaagcaaatcccataaaaccattctcagttcggattgcaggctgcaactcgcctgcatgaagccggaatcgctagtaatcgcggatcagcatgccgcggtgaatacgttcccgggccttgtacacaccgcccgtcacaccacgagagttggcaacacccgaagtcggtgaggtaacc

SEQ ID NO: 3078 - DNA, 1468 bp, Seinonella peptonophila
  source 1..1468: mol_type = unassigned DNA
gacgaacgctggcggcgtgcctaatacatgcaagtcgagcgcgggaagcctcttcggaggtggaacgagcggcgaacgggtgagtaacacgtgggcaacctgcccgcaagactgggatagctccgggaaaccggaattaataccagataarcatcttttccgcatggaaaagatgagaaaggtggcttcggctgctacttgyggatgggcccgcggcgcattagctagtaggtgaggtaaaggctcacctaggcaacgatgcgtagccgacctgagagggtgatcggccacactgggactgagacacggcccagactcctacgggaggcagcagtagggaattttccgcaatgggcgaaagcctgacggagcaacgccgcgtgagtgaggacggtcttcggattgtaaagctctgttctgtaggaagaagtcctcgtgttgaatagatacgaggrgtgacgttactacagcagaaagccccggctaactacgtgccagcagccgcggtaatacgtagggggcaagcgttgtccggaatcattgggcgtaaagcgcgcgtaggcggcttcataagtccgatgtcaaaggcagtggctcaaccactgtacgcatcggaaactgtggagcttgagtgcaggagaggggagtggaattctcggtgtagcggtggaatgcgtagagatcgggaggaacaccagtggcgaaggcgactctctggcctgtaactgacgctgaggtgcgaaagcgtggggagcgaacaggattagataccctggtagtccacgccgtaaacgatgagtgctaggtgttggggggtttccgcccttcagtgccgaagttaacacattaagcactccgcctggggagtacgaccgcaaggttgaaactcaaaggaattgacgggggcccgcacaagcggtggagcatgtggtttaattcgaagcaacgcgaagaaccttaccagggcttgacatcccgctgacagatctagagatagatcctttcttcggaacagcggtgacaggtggtgcatggttgtcgtcagctcgtgtcgtgagatgttgggttcagtcccgcaacgagcgcaacccttatctttagttgccagcaggtaatgctgggcactctagagagacagccgatgaaagtcggaggaaggtggggatgacgtcaaatcatcatgccccttatgtcctgggctacacacgtgctacaatggctggaacaatgggaagcgagaccgcgaggtggagccaatcccaaaaaaccagtctcagttcggatcgcaggctgcaactcgcctgcgtgaagttggaatcgctagtaatcgcggatcagcatgccgcggtgaatacgttcccgggccttgtacacaccgcccgtcacaccacgggagtttgcaacacccgaagtcggtgagagaaccgttaggactcagctgccgaaggtggggtagatgactggggtg

SEQ ID NO: 3079 - DNA, 1388 bp, Selenihalanaerobacter shriftii
  source 1..1388: mol_type = unassigned DNA
  misc_difference 1323..1324: note = n is a, c, g, or t
gacgaacgctggcggcgtgcttaacacatgcaagttgtgcgagaaagctaccttcgggtagttagtaaagcagcggacgggtgagtaacgcgtgagtaatctacctttaagttagggataactattcgaaagagtagctaatacctaatattatatcatcaccataaggcgatgatatgaaagatggccttgctatcgcttaaagatgagctcgcgtcccattagctagttggtaagataacagcttaccaaggccacaatgggtagccgacctgagagggtgatcggccacactgggactgagacacggcccagactcctacgggaggctgcagtggggaatcttccgcaatgggcgaaagcctgacggagcaacgccgcgtgagtgatgaaggccttcgggtcgtaaagctctgtcctcagggaagaacaccctagtcgtaaataacggctaggtttgacggtacctgtggaggaagctccggctaactacgtgccagcagccgcggtaatacgtagggagcaagcgttgtccggaattattgggcgtaaagggtgtgtaggcggtctagtaagtcaaatgtgaaattcatcggctcaaccgatgaactgcctttgaaactactagacttgagggtaagagaagagagtagaattcctagtgtagcggtgaaatgcgtagatattaggaagaataccagtggcgaaagcgactctctggcttactcctgacgctgagacacgaaagctagggtatcaaaccggattagatacccgggtagtcctagccgtaaacgctggatactaggtgttggaggttcgactccttcggtgccgaagttaacgcaataagtatcccgcctggggattacgaccgcaaggttgaaactcaaaggaattgacgggggcccgcacaagcggcggagcatgtggtttaattcgaagcaacgcgaagaaccttaccagggtttgacatcccgtgaccacctatgaaagtaggatttgatcttttgatcacacggagacaggtggtgcatggctgtgtcagctcgtgtcgtgagatgttgggttaagtcccgcaacgagcgcaacccttattcttagttgccagcacttttaggtggggactctaaggagactgccagtcaaaaaactggaggaaggtggggatgacgtcaagtcatcatgccccttatactctgggctacacacgtgctacaatggactgtacagagggtcgctacaccgcaaggtgatgctaatctctaaaacagttcccagttcggattgcaggctgcaactcgcctgcatgaagttggagtnnctagtaatcgtggatcagaatgccgcggtgaatacgttcccgggccttgtacacaccttcccgt

SEQ ID NO: 3080 - DNA, 1466 bp, Selenomonas artemidis
  source 1..1466: mol_type = unassigned DNA
  misc_difference 113: note = n is a, c, g, or t
  misc_difference 754: note = n is a, c, g, or t
gacgaacgctggcggcgtgcttaacacatgcaagtcgaacggagcgaatgaaagcttgcttttatgagcttagtggcaaacgggtgagtaacacgtagacaacctgccgatcngatggggacaacattccgaaaggaatgctaataccgaatggcgtgtaggggaggcatcttccctacatgaaagatggcctctatatataagctatcactgatcgatgggtctgcgtctgattagctagtaggtaaggtaacggcttacctaggcgacgatcagtagccggtctgagaggatgaacggccacattgggactgagacacggcccagactcctacgggaggcagcagtggggaatcttccgcaatgggcgcaagcctgacggagcaacgccgcgtgagtgaagaaggtcttcggatcgtaaagctctgttgaaggggacgaacgatcgaggggcgaacaggctctcggtatgacggtaccttttgaggaagccacggctaactacgtgccagcagccgcggtaatacgtaggtggcgagcgttgtccggaatcattgggcgtaaagggagcgcaggcggccatgtaagtcttgcttaaaagttcggggctcaaccccgtgatgggcaagaaactatatggcttgagtgcaggagaggaaagcggaattcccagtgtagcggtgaaatgcgtagatattgggaggaacaccagtggcgaaggcggctttctggactgcaactgacgctgaggctngaaagccaggggagcgaacgggattagataccccggtagtcctggccgtaaacgatggatactaggtgtgggaggtatcgacccctaccgtgccggagttaacgcaataagtatcccgcctggggagtacggtcgcaagactgaaactcaaaggaattgacggggacccgcacaagcggtggagtatgtggtttaattcgaagcaacgcgaagaaccttaccaggtcttgacattgattgaaagacgtagagatacgtccttctcttcggagacaagaaaacaggtggtgcatggctgtcgtcagctcgtgtcgtgagatgttgggttaagtcccgcaacgagcgcaacccctgtcctttgttgccagcatgtagtggtgggcactcaaaggagactgccgcggagaacgcggaggaaggcggggatgacgtcaagtcatcatgccccttatgacctgggctacacacgtactacaatgggacggacagagagcagcgagagggcgaccttaagcgaacctcaaaaaccgtttctcagttcggattgcaggctgcaactcgcctgcatgaagtcggaatcgctagtaatcgcaggtcagcatactgcggtgaatacgttcccgggtcttgtacacaccgcccgtcacaccacggaagtcgttcacacccgaagccggcgcagccgtctaaggtggggaaggtgactggggtg

SEQ ID NO: 3081 - DNA, 1485 bp, Selenomonas bovis
  source 1..1485: mol_type = unassigned DNA
gacgaacgctggcggcgtgcttaacacatgcaagtcgaacgagacgatttagaagcttgcttttattgagtcgagtggcaaacgggtgagtaacgcgtagacaacctgccgcaaagatggggacaacagtccgaaaggactgctaataccgaatgttgtatctcctccgcatggaagagatattaaagatggcctctacttgtaagctatcgctttgcgatgggtctgcgtctgattagctagttggtggggcaacggcctaccaaggcgacgatcagtagccggtctgagaggatgaacggccacattggaactgagacacggtccagactcctacgggaggcagcagtggggaatcttccgcaatgggcgaaagcctgacggagcaacgccgcgtgagtgaagaaggtcttcggattgtaaagctctgttgtcggggacgaatgttgaggcctagaacataggcttcaaatgacggtacctgacgaggaagccacggctaactacgtgccagcagccgcggtaatacgtaggtggcgagcgttgtccggaattattgggcgtaaagggagcgcaggcgggaaggtaagtctatcttaaaagtgcggggctcaaccccgtgaggggatagaaactatcattcttgagtgcaggagaggaaagcggaattcctagtgtagcggtgaaatgcgtagatattaggaggaacaccagtggcgaaggcggctttctggactgtaactgacgctgaggctcgaaagccaggggagcgaacgggattagataccccggtagtcctggccgtaaacgatgaatgctaggtgtaggaggtatcgacccctcctgtgccggagttaacgcaataagcattccgcctggggagtacggccgcaaggctgaaactcaaaggaattgacgggggcccgcacaagcggtggagtatgtggtttaattcgacgcaacgcgaagaaccttaccagggcttgacattgagtgaaaaggctagagacagcctcctcccttcggggacacgaaaacaggtggtgcatggctgtcgtcagctcgtgtcgtgagatgttgggttaagtcccgcaacgagcgcaacccctatctcttggtgccagcacggaaaggtgggaactcaagagagactgccgcggacaacgcggaggaaggcggggatgacgtcaagtcatcatgccccttatgtcctgggctacacacgtactacaatgggatggacagagagcagcgaagccgtgaggcagagcgaaccccataaaccatctcccagttcggattgcaggctgcaacccgcctgcatgaagtcggaatcgctagtaatcgcaggtcagcatactgcggtgaatacgttcccgggccttgtacacaccgcccgtcacaccacggaagtcattcacacccgaagccggtggggtaaccgcaagggaccagccgtctaaggtgggggcgatgactggggtg

SEQ ID NO: 3082 - DNA, 1462 bp, Selenomonas flueggei
  source 1..1462: mol_type = unassigned DNA
  misc_difference 56: note = n is a, c, g, or t
  misc_difference 61: note = n is a, c, g, or t
  misc_difference 68: note = n is a, c, g, or t
  misc_difference 194: note = n is a, c, g, or t
  misc_difference 196: note = n is a, c, g, or t
  misc_difference 552: note = n is a, c, g, or t
  misc_difference 571: note = n is a, c, g, or t
  misc_difference 580: note = n is a, c, g, or t
  misc_difference 635: note = n is a, c, g, or t
  misc_difference 709: note = n is a, c, g, or t
  misc_difference 759: note = n is a, c, g, or t
  misc_difference 799: note = n is a, c, g, or t
  misc_difference 924: note = n is a, c, g, or t
  misc_difference 926: note = n is a, c, g, or t
  misc_difference 997: note = n is a, c, g, or t
  misc_difference 1126: note = n is a, c, g, or t
  misc_difference 1136: note = n is a, c, g, or t
  misc_difference 1283: note = n is a, c, g, or t
gacgaacgctggcggcgtgcttaacacatgcaagtcgaacggagcgaatgaaagcntgcanttatgancttagtggcaaacgggtgagtaacacgtagacaacctgccgacaggatggggacaacattccgaaaggaatgctaataccgaatgaagcggaggagaggcatctctcttccgtgaaagatggccantntttatgctatcacctgttgatgggtctgcgtctgattagctggtaggtgaggtaacggctcacctaggcgacgatcagtagccggtctgagaggatgaacggccacattgggactgagacacggcctagactcctacgggaggcagcagtggggaatcttccgcaatgggcgcaagcctgacggagcaacgccgcgtgagtgaagaaggtcttcggatcgtaaagctctgttgttcgggacgaacgtgcgtgatgcgaacagtgtcatgcaatgacggtacctgtcgaggaagccacggctaactacgtgccagcagccgcggtaatacgtaggtggctagcgttgtccggaatcnttgggcgtaaagggagcgnaggcgggcnagtaagtctttcttaaaagtgcggggctcaaccccgtgatgggaaagaaactacntgtcttgagtacgggagaggaaagcggaattcccagtgtagcggtgaaatgcgtagatattgggaggaacgccngtggcgaaggcggctttctggactgcgactgacgctgaggctcgaaagcnaggggagcgaacgggattagataccccggtagtcctggcngtaaacgatggatactaggtgtgggaggtatcgacccctaccgtgccggagttaacgcaataagtatcccgcctggggagtacggccgcaaggctgaaactcaaaggaattgacggggacccgcncnagcggtggagtatgtggtttaattcgaagcaacgcgaacaaccttaccaggccttgacattgactgaaagngctagagatagctccctctcttcggagacaggaaaacaggtggtgcatggctgtcgtcagctcgtgtcgtgagatgttgggttaagtcccgcaacgagcgcaacccctgtcctttgttgccatcacgtnaaggtgggcnctcaaaggagactgccgcggagaacgcggaggaaggcggggatgacgtcaagtcatcatgccccttatgctctgggctacacacgtactacaatggaacggacagagagcagcgaacccgcgagggcaagcgaacctcaaaaaccgnttcccagttcggattgcaggctgcaacccgcctgcatgaagtcggaatcgctagtaatcgcaggtcagcatactgcggtgaatacgttcccgggtcttgtacacaccgcccgtcacaccacggaagtcattcacacccgaagccggctargccgtctaaggtggggaaggtgactgggg

SEQ ID NO: 3083 - DNA, 1466 bp, Selenomonas infelix
  source 1..1466: mol_type = unassigned DNA
gacgaacgctggcggcgtgcttaacacatgcaagtcgaacggagcgaatgaaagcttgcttttatgagcttagtggcaaacgggtgagtaacacgtagacaacctgccgacaggatggggacaacattccgaaaggaatgctaataccgaatgaagcggaggagaggcatctctcctccgtgaaagatggcctctatttataagctatcacctgtcgatgggtctgcgtctgattagctagttggtgaggtaacggctcaccaaggcgacgatcagtagccggtctgagaggatgaacggccacattgggactgagacacggcccagactcctacgggaggcagcagtggggaatcttccgcaatgggcgcaagcctgacggagcaacgccgcgtgagtgaagaaggtcttcggatcgtaaagctctgttgatggggacgaacgtgcgaagggtgaataatcctttgcaatgacggtacctatcgaggaagccacggctaactacgtgccagcagccgcggtaatacgtaggtggcgagcgttgtccggaatcattgggcgtaaagggagcgcaggcgggcaagtaagtctttcttaaaagttcggggctcaaccccgtgatgggaaagaaactacatgtcttgagtacaggagaggaaagcggaattcccagtgtagcggtgaaatgcgtagatattgggaggaacaccagtggcgaaggcggctttctggactgcaactgacgctgaggctcgaaagccaggggagcgaacgggattagataccccggtagtcctggccgtaaacgatggatactaggtgtgggaggtatcgacccctaccgtgccggagttaacgcaataagtatcccgcctggggagtacggtcgcaagactgaaactcaaaggaattgacggggacccgcacaagcggtggagtatgtggtttaattcgaagcaacgcgaagaaccttaccaggccttgacattgactgtaagagctagagatagctccctctcttcggagacaggaaaacaggtggtgcatggctgtcgtcagctcgtgtcgtgagatgttgggttaagtcccgcaacgagcgcaacccctgttctttgttgccatcacgtaaaggtgggcactcaaaggagactgccgcggagaacgcggaggaaggcggggatgacgtcaagtcatcatgccccttatggtctgggctacacacgtactacaatggaacggacagagagcagcgaacccgcgagggcaagcgaacctcaaaaaccgtttcccagttcggattgcaggctgcaactcgcctgcatgaagtcggaatcgctagtaatcgcaggtcagcatactgcggtgaatacgttcccgggtcttgtacacaccgcccgtcacaccacggaagtcgttcacacccgaagccggcgcagccgtctaaggtggggaaggtgactggggtg

SEQ ID NO: 3084 - DNA, 1464 bp, Selenomonas noxia
  source 1..1464: mol_type = unassigned DNA
gacgaacgctggcggcgtgcttaacacatgcaagtcgaacggagcgaatgaaagcttgcttttataagcttagtggcaaacgggtgagtaacacgtaggcaacctgccgacaggatggggacaacattccgaaaggaatgctaataccgaatgaagcgcaggagaggcatctctcctgcgtgaaagatggcctctatatataagctatcacctgtcgatgggcctgcgtctgattagctggtaggtgaggtaacggctcacctaggcgacgatcagtagccggtctgagaggatgaacggccacattgggactgagacacggcccagactcctacgggaggcagcagtggggaatcttccgcaatgggcgcaagcctgacggagcaacgccgcgtgagtgaagaaggtcttcggatcgtaaagctctgttgatggggacgaacgtgcctaatgcgaatagtattaggtaatgacggtacccatcgaggaagccacggctaactacgtgccagcagccgcggtaatacgtaggtggcgagcgttgtccggaatcattgggcgtaaagggagcgcaggcgggcatgtaagtctttcttaaaagtgcggggctcaaccccgtgatgggaaagaaactatgtgtcttgagtacaggagaggaaagcggaattcccagtgtagcggtgaaatgcgtagatattgggaggaacaccagtggcgaaggcggctttctggactgcaactgacgctgaggctcgaaagccaggggagcgaacgggattagataccccggtagtcctggccgtaaacgatggatactaggtgtgggaggtatcgacccctaccgtgccggagttaacgcaataagtatcccgcctggggagtacggccgcaaggctgaaactcaaaggaattgacggggacccgcacaagcggtggagtatgtggtttaattcgaagcaacgcgaagaaccttaccaggccttgacattgactgaaagagctagagatagctccctctcttcggagacaggaaaacaggtggtgcatggctgtcgtcagctcgtgtcgtgagatgttgggttaagtcccgcaacgagcgcaacccctgttctttgttgccagcatgtaaagatgggcactcaaaggagactgccgcggagaacgcggaggaaggcggggatgacgtcaagtcatcatgccccttatggtctgggctacacacgtactacaatgggacggacagagggcagcgagagagtgatcttaagcgaatctcaaaaaccgtttctcagttcggattgcaggctgcaactcgcctgcatgaagtcggaatcgctagtaatcgcaggtcagcatactgcggtgaatacgttcccgggtcttgtacacaccgcccgtcacaccacggaagtcattcacacccgaagccggctaggccgtctaaggtggggaaggtgactgggg

SEQ ID NO: 3085 - DNA, 1417 bp, unidentified
  source 1..1417: mol_type = unassigned DNA; note = Serpentinicella alkaliphila
gagatgcgggtgctaccatgcagtcgagcgaggaggaggaagcttgcttccaatcctagcggcggacgggtgagtaacgcgtgggcaacctaccctatgcagggggataacattgggaaaccagtgctaataccgcataaagccgattaggggcatccctaaatggtcaaagaacttcggcataggatgggcccgcgtctgattagttagttggtaaggtaatggcttaccaagacgatgatcagtagccgacctgagagggtgaccggccacactggaactgagacacggtccagactcctacgggaggcagcagtggggaatattgcacaatgggggaaaccctgatgcagcaacgccgcgtgagcgaagaaggccttcgggtcgtaaagctctgtcctaagggaagataatgacggtaccttaggaggaagccccggctaactacgtgccagcagccgcggtaatacgtagggggcaagcgttatccggaatcactgggcgtaaagggtgcgtaggcggccaaacaagtcaggggtgaaaggctacggctcaaccgtagtaagcctttgaaactgtttggcttgagtgcaggagaggagagtggaattcctagtgtagcggtgaaatgcgtagatattaggaggaacaccagtggcgaaggcgactctctggactgtaactgacgctgaggcacgaaagcgtggggagcaaacaggattagataccctggtagtccacgccgtaaacgatgagtgctaggtgttggagggagaccttcagtgccggagctaacgcattaagcactccgcctggggagtacgctcgcaagagtgaaactcaaaggaatatacgggggcccgcacaaaaagcggagcatgtggtttaattcgaagcgacgagaagaaccttacatggacttgacatccttttgacagaaccttaaccggttccttctcttcggagactgaagtgacaggtggtgcatggttgtcgtcagctcgtgtcgtgagatgttgggttaagtcccgcaacgagcgcaacccttatctttagttgccagcacttagggtgggcactctagagagactgccggggataactcggaggaaggtggggatgacgtcaaatcatcatgccccttatgttcagggctacacacgtgctacaatggccgatacaaagggcagcaagagagtgatcttaagcaaatcccataaagtcggtcccagttcggattgtgggctgaaactcgcccacatgaagctggagttgctagtaatcgcgaatcagaatgtcgcggtgaatgcgttcccgggtcttgtacacaccgcccgtcacaccatgggagtcggaagcacccgaagccagctacttaaccagaaatggagagagcttcgaaggaagtcgactgccg

SEQ ID NO: 3086 - DNA, 1464 bp, Serratia ficaria
  source 1..1464: mol_type = unassigned DNA
attgaacgctggcggcaggcctaacacatgcaagtcgagcggtagcacaggagagcttgctctctgggtgacgagcggcggacgggtgagtaatgtctgggaaactgcctgatggagggggataactactggaaacggtagctaataccgcataacgtctacggaccaaagtgggggaccttcgggcctcacgccatcagatgtgcccagatgggattagctagtaggtggggtaatggctcacctaggcgacgatccctagctggtctgagaggatgaccagccacactggaactgagacacggtccagactcctacgggaggcagcagtggggaatattgcacaatgggcgcaagcctgatgcagccatgccgcgtgtgtgaagaaggccttcgggttgtaaagcactttcagcgaggaggaagggcgatgtcttaatacggcagcgcattgacgttactcgcagaagaagcaccggctaactccgtgccagcagccgcggtaatacggagggtgcaagcgttaatcggaattactgggcgtaaagcgcacgcaggcggtttgttaagtcagatgtgaaatccccgcgcttaacgtgggaactgcatttgaaactggcaagctagagtctcgtagaggggggtagaattccaggtgtagcggtgaaatgcgtagagatctggaggaataccggtggcgaaggcggccccctggacgaagactgacgctcaggtgcgaaagcgtggggagcaaacaggattagataccctggtagtccacgctgtaaacgatgtcgatttggaggttgtgcccttgaggcgtggcttccggagctaacgcgttaaatcgaccgcctggggagtacggccgcaaggttaaaactcaaatgaattgacgggggcccgcacaagcggtggagcatgtggtttaattcgatgcaacgcgaagaaccttacctactcttgacatccagagaacttagcagagatgctttggtgccttcgggaactctgagacaggtgctgcatggctgtcgtcagctcgtgttgtgaaatgttgggttaagtcccgcaacgagcgcaacccttatcctttgttgccagcgattcggtcgggaactcaaaggagactgccggtgataaaccggaggaaggtggggatgacgtcaagtcatcatggcccttacgagtagggctacacacgtgctacaatggcgtatacaaagagaagcgaactcgcgagagcaagcggacctcataaagtacgtcgtagtccggattggagtctgcaactcgactccatgaagtcggaatcgctagtaatcgtagatcagaatgctacggtgaatacgttcccgggccttgtacacaccgcccgtcacaccatgggagtgggttgcaaaagaagtaggtagcttaaccttcgggagggcgcttaccactttgtgattcatgactggggtg

SEQ ID NO: 3087 - DNA, 1463 bp, Serratia fonticola
  source 1..1463: mol_type = unassigned DNA
attgaacgctggcggcaggcctaacacatgcaagtcgagcggtagcacaaggagcttgctcctgggtgacgagcggcggacgggtgagtaatgtctgggaaactgcccgatggagggggataactactggaaacggtagctaataccgcataacgtcttcggaccaaagtgggggaccttcgggcctcacaccatcggatgtgcccagatgggattagctagtaggtgaggtaatggctcacctaggcgacgatccctagctggtctgagaggatgaccagccacactggaactgagacacggtccagactcctacgggaggcagcagtggggaatattgcacaatgggcgcaagcctgatgcagccatgccgcgtgtgtgaagaaggccttcgggttgtaaagcactttcagcgaggaggaagggttcagtgttaatagcaccgttcattgacgttactcgcagaagaagcaccggctaactccgtgccagcagccgcggtaatacggagggtgcaagcgttaatcggaattactgggcgtaaagcgcacgcaggcggtttgttaagtcagatgtgaaatccccgagcttaacttgggaactgcatttgaaactggcaagctagagtcttgtagaggggggtagaattccaggtgtagcggtgaaatgcgtagagatctggaggaataccggtggcgaaggcggccccctggacaaagactgacgctcaggtgcgaaagcgtggggagcaaacaggattagataccctggtagtccacgctgtaaacgatgtcgacttggaggttgtgcccttgaggcgtggcttccggagctaacgcgttaagtcgaccgcctggggagtacggccgcaaggttaaaactcaaatgaattgacgggggcccgcacaagcggtggagcatgtggtttaattcgatgcaacgcgaagaaccttacctactcttgacatccacagaactttccagagatggattggtgccttcgggaactgtgagacaggtgctgcatggctgtcgtcagctcgtgttgtgaaatgttgggttaagtcccgcaacgagcgcaacccttatcctttgttgccagcacgtaatggtgggaactcaaaggagactgccggtgataaaccggaggaaggtggggatgacgtcaagtcatcatggcccttacgagtagggctacacacgtgctacaatggcatatacaaagagaagcgaactcgcgagagcaagcggacctcataaagtatgtcgtagtccggatcggagtctgcaactcgactccgtgaagtcggaatcgctagtaatcgtagatcagaatgctacggtgaatacgttcccgggccttgtacacaccgcccgtcacaccatgggagtgggttgcaaaagaagtaggtagcttaaccttcgggagggcgcttaccactttgtgattcatgactggggtg

SEQ ID NO: 3088 - DNA, 1465 bp, Serratia liquefaciens
  source 1..1465: mol_type = unassigned DNA
attgaacgctggcggcaggcctaacacatgcaagtcgagcggtagcacaagagagcttgctctctgggtgacgagcggcggacgggtgagtaatgtctgggaaactgcctgatggagggggataactactggaaacggtagctaataccgcataacgtcttcggaccaaagtgggggaccttcgggcctcatgccatcagatgtgcccagatgggattagctagtaggtggggtaatggctcacctaggcgacgatccctagctggtctgagaggatgaccagccacactggaactgagacacggtccagactcctacgggaggcagcagtggggaatattgcacaatgggcgcaagcctgatgcagccatgccgcgtgtgtgaagaaggccttcgggttgtaaagcactttcagcgaggaggaagggttcagtgttaatagcactgttcattgacgttactcgcagaagaagcaccggctaactccgtgccagcagccgcggtaatacggagggtgcaagcgttaatcggaattactgggcgtaaagcgcacgcaggcggtttgttaagtcagatgtgaaatccccgcgcttaacgtgggaactgcatttgaaactggcaagctagagtcttgtagaggggggtagaattccaggtgtagcggtgaaatgcgtagagatctggaggaataccggtggcgaaggcggccccctggacaaagactgacgctcaggtgcgaaagcgtggggagcaaacaggattagataccctggtagtccacgctgtaaacgatgtcgacttggaggttgtgcccttgaggcgtggcttccggagctaacgcgttaagtcgaccgcctggggagtacggccgcaaggttaaaactcaaatgaattgacgggggcccgcacaagcggtggagcatgtggtttaattcgatgcaacgcgaagaaccttacctactcttgacatccagagaattcgctagagatagcttagtgccttcgggaactctgagacaggtgctgcatggctgtcgtcagctcgtgttgtgaaatgttgggttaagtcccgcaacgagcgcaacccttatcctttgttgccagcgcgtaatggcgggaactcaaaggagactgccggtgataaaccggaggaaggtggggatgacgtcaagtcatcatggcccttacgagtagggctacacacgtgctacaatggcgtatacaaagagaagcgaactcgcgagagcaagcggacctcataaagtacgtcgtagtccggatcggagtctgcaactcgactccgtgaagtcggaatcgctagtaatcgtagatcagaatgctacggtgaatacgttcccgggccttgtacacaccgcccgtcacaccatgggagtgggttgcaaaagaagtaggtagcttaaccttcgggagggcgcttaccactttgtgattcatgactggggtg

SEQ ID NO: 3089 - DNA, 1464 bp, Serratia nematodiphila
  source 1..1464: mol_type = unassigned DNA
attgaacgctggcggcaggcttaacacatgcaagtcgagcggtagcacaggggagcttgctccccgggtgacgagcggcggacgggtgagtaatgtctgggaaactgcctgatggagggggataactactggaaacggtagctaataccgcataacgtcgcaagaccaaagagggggaccttcgggcctcttgccatcagatgtgcccagatgggattagctagtaggtggggtaatggctcacctaggcgacgatccctagctggtctgagaggatgaccagccacactggaactgagacacggtccagactcctacgggaggcagcagtggggaatattgcacaatgggcgcaagcctgatgcagccatgccgcgtgtgtgaagaaggccttcgggttgtaaagcactttcagcgaggaggaaggtggtgaacttaatacgttcatcaattgacgttactcgcagaagaagcaccggctaactccgtgccagcagccgcggtaatacggagggtgcaagcgttaatcggaattactgggcgtaaagcgcacgcaggcggtttgttaagtcagatgtgaaatccccgggctcaacctgggaactgcatttgaaactggcaagctagagtctcgtagaggggggtagaattccaggtgtagcggtgaaatgcgtagagatctggaggaataccggtggcgaaggcggccccctggacgaagactgacgctcaggtgcgaaagcgtggggagcaaacaggattagataccctggtagtccacgctgtaaacgatgtcgatttggaggttgtgcccttgaggcgtggcttccggagctaacgcgttaaatcgaccgcctggggagtacggccgcaaggttaaaactcaaatgaattgacgggggcccgcacaagcggtggagcatgtggtttaattcgatgcaacgcgaagaaccttacctactcttgacatccagagaactttccagagatggattggtgccttcgggaactctgagacaggtgctgcatggctgtcgtcagctcgtgttgtgaaatgttgggttaagtcccgcaacgagcgcaacccttatcctttgttgccagcggttcggccgggaactcaaaggagactgccagtgataaactggaggaaggtggggatgacgtcaagtcatcatggcccttacgagtagggctacacacgtgctacaatggcgtatacaaagagaagcgacctcgcgagagcaagcggacctcataaagtacgtcgtagtccggattggagtctgcaactcgactccatgaagtcggaatcgctagtaatcgtagatcagaatgctacggtgaatacgttcccgggccttgtacacaccgcccgtcacaccatgggagtgggttgcaaaagaagtaggtagcttaaccttcgggagggcgcttaccactttgtgattcatgactggggtg

SEQ ID NO: 3090 - DNA, 1464 bp, Serratia odorifera
  source 1..1464: mol_type = unassigned DNA
attgaacgctggcggcaggcctaacacatgcaagtcgagcggtagcacaggagagcttgctctctgggtgacgagcggcggacgggtgagtaatgtctgggaaactgcccgatggagggggataaccactggaaacggtggctaataccgcataacgtctacggaccaaagagggggaccttcgggcctcttgccatcggatgtgcccagatgggattagctagtaggtggggtaacggctcacctaggcgacgatccctagctggtctgagaggatgaccagccacactggaactgagacacggtccagactcctacgggaggcagcagtggggaatattgcacaatgggcgcaagcctgatgcagccatgccgcgtgtgtgaagaaggccttcgggttgtaaagcactttcagcgaggaggaaggccaatagcttaatacgctgttggattgacgttactcgcagaagaagcaccggctaactccgtgccagcagccgcggtaatacggagggtgcaagcgttaatcggaattactgggcgtaaagcgcacgcaggcggtttgttaagtcagatgtgaaatccccgcgcttaacgtgggaactgcatttgaaactggcaagctagagtctcgtagaggggggtagaattccaggtgtagcggtgaaatgcgtagagatctggaggaataccggtggcgaaggcggccccctggacgaagactgacgctcaggtgcgaaagcgtggggagcaaacaggattagataccctggtagtccacgctgtaaacgatgtcgatttggaggttgtgcccttgaggcgtggcttccggagctaacgcgttaaatcgaccgcctggggagtacggccgcaaggttaaaactcaaatgaattgacgggggcccgcacaagcggtggagcatgtggtttaattcgatgcaacgcgaagaaccttacctactcttgacatccagagaactttccagagatggaagggtgccttcgggaactctgagacaggtgctgcatggctgtcgtcagctcgtgttgtgaaatgttgggttaagtcccgcaacgagcgcaacccttatcctttgttgccagcggttcggccgggaactcaaaggagactgccagtgataaactggaggaaggtggggatgacgtcaagtcatcatggcccttacgagtagggctacacacgtgctacaatggcgtatacaaagagaagcgaacttgcgagagtaagcggacctcataaagtacgtcgtagtccggattggagtctgcaactcgactccatgaagtcggaatcgctagtaatcgtagatcagaatgctacggtgaatacgttcccgggccttgtacacaccgcccgtcacaccatgggagtgggttgcaaaagaagtaggtagcttaaccttcgggagggcgcttaccactttgtgattcatgactggggtg

SEQ ID NO: 3091 - DNA, 1464 bp, unidentified
  source 1..1464: mol_type = unassigned DNA; note = Serratia oryzae
attgaacgctggcggcaggcctaacacatgcaagtcgagcggcagcggaaagtagcttgctactttgccggcgagcggcggacgggtgagtaatgtctgggaaactgcctgatggagggggataactactggaaacggtggctaataccgcataacgtcgcaagaccaaagtgggggaccttcgggcctcacgccatcggatgtgcccagatgggattagctagtaggtggggtaatggctcacctaggcgacgatccctagctggtctgagaggatgaccagccacactggaactgagacacggtccagactcctacgggaggcagcagtggggaatattgcacaatgggcgcaagcctgatgcagccatgccgcgtgtgtgaagaaggccttcgggttgtaaagcactttcagcgaggaggaaggcatcacacttaatacgtgtggtgattgacgttactcgcagaagaagcaccggctaactccgtgccagcagccgcggtaatacggagggtgcgagcgttaatcggaattactgggcgtaaagcgcacgcaggcggtttgttaagtcagatgtgaaatccccgcgcttaacgtgggaactgcatttgaaactggcaagctagagtcttgtagaggggggtagaattccaggtgtagcggtgaaatgcgtagagatctggaggaataccggtggcgaaggcggccccctggacaaagactgacgctcaggtgcgaaagcgtggggagcaaacaggattagataccctggtagtccacgctgtaaacgatgtcgacttggaggttgtgcccttgaggcgtggcttccggagctaacgcgttaagtcgaccgcctggggagtacggccgcaaggttaaaactcaaatgaattgacgggggcccgcacaagcggtggagcatgtggtttaattcgatgcaacgcgaagaaccttacctactcttgacatccacggaacttgccagagatggcttggtgccttcgggaaccgtgagacaggtgctgcatggctgtcgtcagctcgtgttgtgaaatgttgggttaagtcccgcaacgagcgcaacccttatcctttgttgccagcacttcgggtgggaactcaaaggagactgccggtgataaaccggaggaaggtggggatgacgtcaagtcatcatggcccttacgagtagggctacacacgtgctacaatggcgtatacaaagagaagcaaactcgcgagagccagcggacctcataaagtacgtcgtagtccggattggagtctgcaactcgactccatgaagtcggaatcgctagtaatcgtagatcagaatgctacggtgaatacgttcccgggccttgtacacaccgcccgtcacaccatgggagtgggttgcaaaagaagtaggtagcttaaccttcgggagggcgcttaccactttgtgattcatgactggggtg

SEQ ID NO: 3092 - DNA, 1464 bp, Serratia plymuthica
  source 1..1464: mol_type = unassigned DNA
attgaacgctggcggcaggcctaacacatgcaagtcgagcggtagcacaggagagcttgctctctgggtgacgagcggcggacgggtgagtaatgtctgggaaactgcctgatggagggggataactactggaaacggtagctaataccgcataacgtctacggaccaaagtgggggaccttcgggcctcacgccatcagatgtgcccagatgggattagctagtaggtggggtaatggctcacctaggcgacgatccctagctggtctgagaggatgaccagccacactggaactgagacacggtccagactcctacgggaggcagcagtggggaatattgcacaatgggcgcaagcctgatgcagccatgccgcgtgtgtgaagaaggccttagggttgtaaagcactttcagcgaggaggaagggcagtgtgttaatagcacattgcattgacgttactcgcagaagaagcaccggctaactccgtgccagcagccgcggtaatacggagggtgcaagcgttaatcggaattactgggcgtaaagcgcacgcaggcggtttgttaagtcagatgtgaaatccccgcgcttaacgtgggaactgcatttgaaactggcaagctagagtcttgtagaggggggtagaattccaggtgtagcggtgaaatgcgtagagatctggaggaataccggtggcgaaggcggccccctggacaaagactgacgctcaggtgcgaaagcgtggggagcaaacaggattagataccctggtagtccacgctgtaaacgatgtcgatttggaggttgtgcccttgaggcgtggcttccggagctaacgcgttaaatcgaccgcctggggagtacggccgcaaggttaaaactcaaatgaattgacgggggcccgcacaagcggtggagcatgtggtttaattcgatgcaacgcgaagaaccttacctactcttgacatccagagaattcgctagagatagcttagtgccttcgggaactctgagacaggtgctgcatggctgtcgtcagctcgtgttgtgaaatgttgggttaagtcccgcaacgagcgcaacccttatcctttgttgccagcgattcggtcgggaactcaaaggagactgccggtgataaaccggaggaaggtggggatgacgtcaagtcatcatggcccttacgagtagggctacacacgtgctacaatggcgtatacaaagagaagcgaactcgcgagagcaagcggacctcataaagtacgtcgtagtccggattggagtctgcaactcgactccatgaagtcggaatcgctagtaatcgtagatcagaatgctacggtgaatacgttcccgggccttgtacacaccgcccgtcacaccatgggagtgggttgcaaaagaagtaggtagcttaaccttcgggagggcgcttaccactttgtgattcatgactggggtg

SEQ ID NO: 3093 - DNA, 1465 bp, Serratia proteamaculans
  source 1..1465: mol_type = unassigned DNA
attgaacgctggcggcaggcctaacacatgcaagtcgagcggtagcacaggagagcttgctctctgggtgacgagcggcggacgggtgagtaatgtctgggaaactgcctgatggagggggataactactggaaacggtagctaataccgcataacgtcttcggaccaaagtgggggaccttcgggcctcacgccatcagatgtgcccagatgggattagctagtaggtggggtaatggctcacctaggcgacgatccctagctggtctgagaggatgaccagccacactggaactgagacacggtccagactcctacgggaggcagcagtggggaatattgcacaatgggcgcaagcctgatgcagccatgccgcgtgtgtgaagaaggccttcgggttgtaaagcactttcagcgaggaggaagggttcagtgttaatagcactgtgcattgacgttactcgcagaagaagcaccggctaactccgtgccagcagccgcggtaatacggagggtgcaagcgttaatcggaattactgggcgtaaagcgcacgcaggcggtttgttaagtcagatgtgaaatccccgcgcttaacgtgggaactgcatttgaaactggcaagctagagtcttgtagaggggggtagaattccaggtgtagcggtgaaatgcgtagagatctggaggaataccggtggcgaaggcggccccctggacaaagactgacgctcaggtgcgaaagcgtggggagcaaacaggattagataccctggtagtccacgctgtaaacgatgtcgacttggaggttgtgcccttgaggcgtggcttccggagctaacgcgttaagtcgaccgcctggggagtacggccgcaaggttaaaactcaaatgaattgacgggggcccgcacaagcggtggagcatgtggtttaattcgatgcaacgcgaagaaccttacctactcttgacatccacagaattcgctagagatagcttagtgccttcgggaactctgagacaggtgctgcatggctgtcgtcagctcgtgttgtgaaatgttgggttaagtcccgcaacgagcgcaacccttatcctttgttgccagcacgtaatggtgggaactcaaaggagactgccggtgataaaccggaggaaggtggggatgacgtcaagtcatcatggcccttacgagtagggctacacacgtgctacaatggcgtatacaaagagaagcgaactcgcgagagccagcggacctcataaagtacgtcgtagtccggatcggagtctgcaactcgactccgtgaagtcggaatcgctagtaatcgtagatcagaatgctacggtgaatacgttcccgggccttgtacacaccgcccgtcacaccatgggagtgggttgcaaaagaagtaggtagcttaaccttcgggagggcgcttaccactttgtgattcatgactggggtg

SEQ ID NO: 3094 - DNA, 1360 bp, Serratia quinivorans
  source 1..1360: mol_type = unassigned DNA
  misc_difference 30: note = n is a, c, g, or t
caggcctaacacatgcaagtcgagcggtanacaagagagcttgctctctgggtgacgagcggcggacgggtgagtaatgtctgggaaactgcctgatggagggggataactactggaaacggtagctaataccgcataacgtcttcggaccaaagtgggggaccttcgggcctcacgccatcagatgtgcctagatgggattagctagtaggtggggtaatggctcacctaggcgacgatccctagctggtctgagaggatgaccagccacactggaactgagacacggtccagactcctacgggaggcagcagtggggaatattgcacaatgggcgcaagctgatgcagccatgccgcgtgtgtgaagaaggccttcgggttgtaaagcactttcagcgaggaggaagggtagtgtgttaatagcacattacattgacgttactcgcagaagaagcaccggctaactccgtgccagcagccgcggtaatacggagggtgcaagcgttaatcggaattactgggcgtaaagcgcacgcaggcggtttgttaagtcagatgtgaaatccccgcgcttaacgtgggaactgcatttgaaactggcaagctagagtcttgtagaggggggtagaattccaggtgtagcggtgaaatgcgtagagatctggaggaataccggtggcgaaggcggccccctggacaaagactgacgctcaggtgcgaaagcgtggggagcaaacaggattagataccctggtagtccacgctgtaaacgatgtcgacttggaggttgtgcccttgaggcgtggcttccggagctaacgcgttaagtcgaccgcctggggagtacggccgcaaggttaaaactcaaatgaattgacgggggcccgcacaagcggtggagcatgtggtttaattcgatgcaacgcgaagaaccttacctactcttgacatccagagaattcgctagagatagcttagtgcttcgggaactctgagacaggtgctgcatggctgtcgtcagctcgtgttgtgaaatgttgggttaagtcccgcaacgagcgcaacccttatcctttgttgccagcacgtaatggtgggaactcaaaggagactgccggtgataaaccggaggaaggtggggatgacgtcaagtcatcatggcccttacgagtagggctacacacgtgctacaatggcgtatacaaagagaagcgaactcgcgagagccagcggacctcataaagtacgtcgtagtccggatcggagtctgcaactcgactccgtgaagtcggaatcgctagtaatcgtagatcagaatgctacggtgaatacgttcccgggccttgtacactccgccc

SEQ ID NO: 3095 - DNA, 1442 bp, Serratia rubidaea
  source 1..1442: mol_type = unassigned DNA
acgctggcggcaggcctaacacatgcaagtcgagcggcagcgggaggaagcttgcttcctcgccggcgagcggcggacgggtgagtaatgtctggggatctgcccgatggagggggataaccactggaaacggtggctaataccgcataacgtcgcaagaccaaagtgggggaccttcgggcctcacaccatcggatgaacccagatgggattagctagtaggtggggtaatggctcacctaggcgacgatccctagctggtctgagaggatgaccagccacactggaactgagacacggtccagactcctacgggaggcagcagtggggaatattgcacaatgggcgcaagcctgatgcagccatgccgcgtgtgtgaagaaggccttcgggttgtaaagcactttcagcgaggaggaaggtggtgagcttaatacgctcatcaattgacgttactcgcagaagaagcaccggctaactccgtgccagcagccgcggtaatacggagggtgcaagcgttaatcggaattactgggcgtaaagcgcacgcaggcggtttgttaagtcagatgtgaaatccccgagcttaacttgggaactgcatttgaaactggcaagctagagtctcgtagaggggggtagaattccaggtgtagcggtgaaatgcgtagagatctggaggaataccggtggcgaaggcggccccctggacgaagactgacgctcaggtgcgaaagcgtggggagcaaacaggattagataccctggtagtccacgccgtaaacgatgtcgatttggaggttgtgcccttgaggcgtggcttccggagctaacgcgttaaatcgaccgcctggggagtacggccgcaaggttaaaactcaaatgaattgacgggggcccgcacaagcggtggagcatgtggtttaattcgatgcaacgcgaagaaccttacctactcttgacatccagagaactttccagagatggattggtgccttcgggaactctgagacaggtgctgcatggctgtcgtcagctcgtgttgtgaaatgttgggttaagtcccgcaacgagcgcaacccttatcctttgttgccagcggttcggccgggaactcaaaggagactgccagtgataaactggaggaaggtggggatgacgtcaagtcatcatggcccttacgagtagggctacacacgtgctacaatggcgtatacaaagagaagcgaacctgcgagggcaagcggacctcataaagtacgtcgtagtccggattggagtctgcaactcgactccatgaagtcggaatcgctagtaatcgtagatcagaatgctacggtgaatacgttcccgggccttgtacacaccgcccgtcacaccatgggagtgggttgcaaaagaagtaggtagcttaaccttcgggagggcgcttaccactttgt

SEQ ID NO: 3096 - DNA, 1464 bp, Serratia symbiotica
  source 1..1464: mol_type = unassigned DNA
attgaacgctggcggcaggcctaacacatgcaagtcgagcggtagcacaagagagcttgctctctgggtgacgagcggcggacgggtgagtaatgtctgggaaactgcctgatggcgggggataactagtggaaacggtagctaataccgcataacgtcgcaagaccaaagtgggggaccttcgggcctcacgccatcagatgtgcccaggtgggattagctggtaggtggggtaacggctcacctaggcgacgatccctagctggtctgagaggatgaccagccacactggaactgagacacggtccagactcctacgggaggcagcagtggggaatattgcacaatgggcgcaagcctgatgcagccatgccgcgtgtgtgaagaaggccttcgggttgtaaagcactttcagcgaggagaaagggtaatgtgttaataagacattgcattgacgttactcgcagaagaagcaccggctaactccgtgccagcagccgcggtaatacggagggtgcaagcgttaatcggaattactgggcgtaaagcgcacgcaggcggtttgttaagtcagatgtgaaatccccgcgctcaacgtgggaacggcatttgagactggcaagctagagtcttgtagaggggggtagaattccaggtgtagcggtgaaatgcgtagagatctggaggaataccggtggcgaaggcggccccctggacaaagactgacgctcaggtgcgaaagcgtggggagcaaacaggattagataccctggtagtccacgctgtaaacgatgtcgatttggaggttgcgcccttgaggggtggcttccgtagctaacgcgttaaatcgaccgcctggggagtacggccgcaaggttaaaactcaaatgaattgacgggggcccgcacaagcggtggagcatgtggtttaattcgatgcaacgcgaagaaccttacctactcttgacatccagagaactttccagagatggagaggtgccttcgggagctctgagacaggtgctgcatggctgtcgtcagctcgtgttgtgaaatgttgggttaagtcccgcaacgagcgcaacccttatcctttgttgccagcgataaagtcgggaactcaaaggagactgccggtgataaaccggaggaaggtggggatgacgtcaagtcatcatggcccttacgagtagggctacacacgtgctacaatggcgtatacaaagagaagcgacctcgcgagagcaagcggacctcacaaagtacgtagtagtccggattggagtctgcaactcgactccatgaagtcggaatcgctagtaatcgtagatcagaatgctgcggtgaatacgttcccgggccttgtacacaccgcccgtcacaccatgggagtgggttgcaaaagaagtaggtagcttaaccttcgggagggcgcttaccactttgtgattcatgactggggtg

SEQ ID NO: 3097 - DNA, 1467 bp, Shewanella algae
  source 1..1467: mol_type = unassigned DNA
attgaacgctggcggcaggcctaacacatgcaagtcgagcggtaacatttcaaaagcttgcttttgaagatgacgagcggcggacgggtgagtaatgcctgggaatttgcccatttgtgggggataacagttggaaacgactgctaataccgcatacgccctacgggggaaagcaggggaccttcgggccttgcgctgatggataagcccaggtgggattagctagtaggtgaggtaaaggctcacctaggcgacgatccctagctggtctgagaggatgatcagccacactgggactgagacacggcccagactcctacgggaggcagcagtggggaatattgcacaatgggggaaaccctgatgcagccatgccgcgtgtgtgaagaaggccttcgggttgtaaagcactttcagcgaggaggaaagggtgtaagttaataccttacatctgtgacgttactcgcagaagaagcaccggctaactccgtgccagcagccgcggtaatacggagggtgcgagcgttaatcggaattactgggcgtaaagcgtgcgcaggcggtttgttaagcgagatgtgaaagccccgggctcaacctgggaaccgcatttcgaactggcaaactagagtcttgtagaggggggtagaattccaggtgtagcggtgaaatgcgtagagatctggaggaataccggtggcgaaggcggccccctggacaaagactgacgctcaggcacgaaagcgtggggagcaaacaggattagataccctggtagtccacgccgtaaacgatgtctactcggagtttggtgtcttgaacactgggctctcaagctaacgcattaagtagaccgcctggggagtacggccgcaaggttaaaactcaaatgaattgacgggggcccgcacaagcggtggagcatgtggtttaattcgatgcaacgcgaagaaccttacctactcttgacatccacagaacttttcagagatgaattggtgccttcgggaactgtgagacaggtgctgcatggctgtcgtcagctcgtgttgtgaaatgttgggttaagtcccgcaacgagcgcaacccctatccttacttgccagcgggtaatgccgggaactttagggagactgccggtgataaaccggaggaaggtggggacgacgtcaagtcatcatggcccttacgagtagggctacacacgtgctacaatggtcagtacagagggttgcgaagccgcgaggtggagctaatcccataaagctggtcgtagtccggattggagtctgcaactcgactccatgaagtcggaatcgctagtaatcgtggatcagaatgccacggtgaatacgttcccgggccttgtacacaccgcccgtcacaccatgggagtgggctgcaccagaagtagatagcttaaccttcgggagggcgtttaccacggtgtggttcatgactggggtg

SEQ ID NO: 3098 - DNA, 1467 bp, Shewanella amazonensis
  source 1..1467: mol_type = unassigned DNA
attgaacgctggcggcaggcctaacacatgcaagtcgagcggcagcgggaagatagcttgctatctttgccggcgagcggcggacgggtgagtaatacctggggatctgcccaatcgagggggataacagttggaaacgactgctaataccgcatacgccctacgggggaaaggaggggctcttcggaccttccgcgattggatgaacccaggcgggattagctagtaggtgaggtaatggctcacctaggcgacgatccctagctgttctgagaggatggacagccacactgggactgagacacggcccagactcctacgggaggcagcagtggggaatattggacaatgggggaaaccctgatccagccatgccgcgtgtgtgaagaaggccttcgggttgtaaagcactttcagtggggaggaaaggttgtaggttaataccctatagctgtgacgttacccacagaagaagcaccggctaactccgtgccagcagccgcggtaatacggagggtgcaagcgttaatcggaattactgggcgtaaagcgtgcgcaggcggtctgttaagcgagatgtgaaagccccgggctcaacctgggaactgcatttcgaactggcagactagagtcttgtagaggggggtagaattccaggtgtagcggtgaaatgcgtagagatctggaggaataccggtggcgaaggcggccccctggacaaagactgacgctcaggcacgaaagcgtggggagcaaacaggattagataccctggtagtccacgccgtaaacgatgtctactcggagtttggtgtcttgaacactgggctctcaagctaacgcattaagtagaccgcctggggagtacggccgcaaggttaaaactcaaatgaattgacgggggcccgcacaagcggtggagcatgtggtttaattcgatgcaacgcgaagaaccttacctactcttgacatccagagaattcgctagagatagcttagtgcctttgggaactctgagacaggtgctgcatggctgtcgtcagctcgtgttgtgaaatgttgggttaagtcccgcaacgagcgcaacccttatccttatttgccagcgggtagtgccgggaactttagggagactgccggtgataaaccggaggaaggtggggacgacgtcaagtcatcatggcccttacgagtagggctacacacgtgctacaatggcgagtacagagggttgcgaagccgcgaggtggagctaatctcataaagctcgtcgtagtccggattggagtctgcaactcgactccatgaagtcggaatcgctagtaatcgtggatcagaatgccacggtgaatacgttcccgggccttgtacacaccgcccgtcacaccatgggagtgggctgcaccagaagtagatagcttaaccttcgggagggcgtttaccacggtgtggttcatgactggggtg

SEQ ID NO: 3099 - DNA, 1295 bp, Shewanella atlantica
  source 1..1295: mol_type = unassigned DNA
  misc_difference 1290: note = n is a, c, g, or t
cttgctactttgctgtcgagcggcggacgggtgagtaatgcctagatatctgcctagtcgtgggggataacagttggaaacgactgctaataccgcatacgccctacgggggaaaggaggggaccttcgggcctttcgcgattagatgagtctaggtgggattagctagtaggtgaggtaatggctcacctaggcgacgatccctagctgttctgagaggatgatcagccacactgggactgagacacggcccagactcctacgggaggcagcagtggggaatattgcacaatgggcgaaagcctgatgcagccatgccgcgtgtgtgaagaaggccttcgggttgtaaagcactttcagcgaggaggaaaggttggtagttaataactgccagctgtgacgttactcgcagaagaagcaccggctaacttcgtgccagcagccgcggtaatacgaggggtgcaagcgttaatcggaattactgggcgtaaagcgtacgcaggcggtttgttaagccagatgtgaaagccccgggctcaacctgggaattgcatttggaactggcaaactagagtcttgtagaggggggtagaatttcaggtgtagcggtgaaatgcgtagagatctgaaggaataccggtggcgaaggcggccccctggacaaagactgacgctcaggtacgaaagcgtggggagcaaacaggattagataccctggtagtccacgccgtaaacgatgtctactcggaatttggtgtcttgaacactgggttctcaagctaacgcattaagtagaccgcctggggagtacggccgcaaggttaaaactcaaatgaattgacgggggcccgcacaagcggtggagcatgtggtttaattcgatgcaacgcgaagaaccttacctactcttgacatccagagaattcgctagagatagcttagtgccttcgggagctctgagacaggtgctgcatggctgtcgtcagctcgtgttgtgaaatgttgggttaagtcccgcaacgagcgcaacccttatccttatttgccagcacgtaatggtgggaactttagggagactgccggtgataaaccggaggaaggtggggacgacgtcaagtcatcatggcccttacgagtagggctacacacgtgctacaatggtcggtacagagggttgcgaagccgcgaggtgaagctaatcccagaaagccggtcgtagtccggatcggagtctgcaactcgactccgtgaagtcggaatcgctagtaatcgtggatcagaatgccacgnaaacg

SEQ ID NO: 3100 - DNA, 1467 bp, Shewanella baltica
  source 1..1467: mol_type = unassigned DNA
attgaacgctggcggcaggcctaacacatgcaagtcgagcggcagcgggaagatagtttactatctttgccggcgagcggcggacgggtgagtaatgcctagggatctgcccagtcgagggggataacagttggaaacgactgctaataccgcatacgccctacgggggaaaggaggggaccttcgggccttccgcgattggatgaacctaggtgggattagctagttggtgaggtaatggctcaccaaggcgacgatccctagctgttctgagaggatgatcagccacactgggactgagacacggcccagactcctacgggaggcagcagtggggaatattgcacaatgggggaaaccctgatgcagccatgccgcgtgtgtgaagaaggccttcgggttgtaaagcactttcagtagggaggaaaggtaatagtttaatacgctattactgtgacgttacctacagaagaaggaccggctaactccgtgccagcagccgcggtaatacggagggtccgagcgttaatcggaattactgggcgtaaagcgtgcgcaggcggtttgttaagcgagatgtgaaagccccgggctcaacctgggaattgcatttcgaactggcgaactagagtcttgtagaggggggtagaattccaggtgtagcggtgaaatgcgtagagatctggaggaataccggtggcgaaggcggccccctggacaaagactgacgctcaggcacgaaagcgtggggagcaaacaggattagataccctggtagtccacgccgtaaacgatgtctactcggagtttggtgtcttgaacactgggctctcaagctaacgcattaagtagaccgcctggggagtacggccgcaaggttaaaactcaaatgaattgacgggggcccgcacaagcggtggagcatgtggtttaattcgatgcaacgcgaagaaccttacctactcttgacatccacagaagccagtagagatacaggtgtgccttcgggaactgtgagacaggtgctgcatggctgtcgtcagctcgtgttgtgaaatgttgggttaagtcccgcaacgagcgcaacccctatccttatttgccagcacgtaatggtgggaactctagggagactgccggtgataaaccggaggaaggtggggacgacgtcaagtcatcatggcccttacgagtagggctacacacgtgctacaatggcgagtacagagggttgcaaagccgcgaggtggagctaatctcacaaagctcgtcgtagtccggattggagtctgcaactcgactccatgaagtcggaatcgctagtaatcgtggatcagaatgccacggtgaatacgttcccgggccttgtacacaccgcccgtcacaccatgggagtgggctgcaaaagaagtgggtagcttaaccttcgggggggcgctcaccactttgtggttcatgactggggtg

SEQ ID NO: 3101 - DNA, 1438 bp, Shewanella benthica
  source 1..1438: mol_type = unassigned DNA
  misc_difference 610..611: note = n is a, c, g, or t
  misc_difference 802: note = n is a, c, g, or t
  misc_difference 804: note = n is a, c, g, or t
  misc_difference 816..818: note = n is a, c, g, or t
  misc_difference 1421: note = n is a, c, g, or t
ttgaacgctggcggcaggcctaacacatgcaagtcgagcggaaacagaaagtagcttgctactttgctgtcgagcggcggacgggtgagtaatgcctagggaactgcccagtcgagggggataacagttggaaacgactgctaataccgcatacgccctacgggggaaaggaggggaccttcgggcctttcgcgattggatgtacctaggtgggattagctagttggtaaggtaatagcttaccaaggcgacgatccctagctggtctgagaggatgatcagccacactggaactgagacacggtccagactcctacgggaggcagcagtggggaatattgcacaatgggcgaaagcctgatgcagccatgccgcgtgtgtgaagaaggccttcgggttgtaaagcactttcagcgaggaggaaaggttgtagtttaataaactgcagctgtgacgttactcgcagaagaagcaccggctaacttcgtgccagcagccgcggtaatacgaggggtgcaagcgttaatcggaattactgggcgtaaagcgtacgcaggcggtttgttaagcaagatgtgaaagccccgggctcaacctgggaattgcattnngaactggcaaactagagtcttgtagaggggggtagaattccaggtgtagcggtgaaatgcgtagagatctgaaggaataccggtggcgaaggcggccccctggacaaagactgacgctcaggtacgaaagcgtggggagcaaacaggattagataccctggtagtccacgccgtaaacgatgtctactcgnantttggtgtcttnnncactgggttctcaagctaacgcattaagtagaccgcctggggagtacggccgcaaggttaaaactcaaatgaattgacgggggccgcacaagcggtggagcatgtggtttaattcgatgcaacgcgaagaaccttacctactcttgacatccacagaactcgctagagatagcttggtgccttcgggaactgtgagacaggtgctgcatggctgtcgtcagctcgtgttgtgaaatgttgggttaagtcccgcaacgagcgcaacccttatccttatttgccagcacgtaatggtgggaactttagggagactgccggtgataaaccggaggaaggtggggacgacgtcaagtcatcatggcccttacgagtagggctacacacgtgctacaatggtcggtacagagggtcgcaaagccgcgaggtctagctaatcccacaaagccggtcgtagtccggatcggagtctgcaactcgactccgtgaagtcggaatcgctagtaatcgtgaatcagaatgtcacggtgaatacgttcccgggccttgtacacaccgcccgtcacaccatgggagtgggctgcaccagaagtagatagcttaacntcggggagggcgtttac

SEQ ID NO: 3102 - DNA, 1284 bp, Shewanella canadensis
  source 1..1284: mol_type = unassigned DNA
ttgctatcagacgtcgagcggcggacgggtgagtaatgcctagatatctgcctagtcgtgggggataacagttggaaacgactgctaataccgcatacgccctacgggggaaaggaggggaccttcgggcctttcgcgattagatgagtctaggtgggattagctagtaggtgaggtaatggctcacctaggcgacgatccctagctgttctgagaggatgatcagccacactgggactgagacacggcccagactcctacgggaggcagcagtggggaatattgcacaatgggcgaaagcctgatgcagccatgccgcgtgtgtgaagaaggccttcgggttgtaaagcactttcagcgaggaggaaaggttggtagttaatagctgccagctgtgacgttactcgcagaagaagcaccggctaacttcgtgccagcagccgcggtaatacgaggggtgcaagcgttaatcggaattactgggcgtaaagcgtacgcaggcggtttgttaagccagatgtgaaagccccgggctcaacctgggaattgcatttggaactggcaaactagagtcttgtagaggggggtagaatttcaggtgtagcggtgaaatgcgtagagatctgaaggaataccggtggcgaaggcggccccctggacaaagactgacgctcatgtacgaaagcgtggggagcaaacaggattagataccctggtagtccacgccgtaaacgatgtctactcggagtttggtaacttagttactgggctcccaagctaacgcattaagtagaccgcctggggagtacggccgcaaggttaaaactcaaatgaattgacgggggcccgcacaagcggtggagcatgtggtttaattcgatgcaacgcgaagaaccttacctactcttgacatccagagaattcgctagagatagcttagtgccttcgggagctctgagacaggtgctgcatggctgtcgtcagctcgtgttgtgaaatgttgggttaagtcccgcaacgagcgcaacccttatccttatttgccagcacgtaatggtgggaactttagggagactgccggtgataaaccggaggaaggtggggacgacgtcaagtcatcatggcccttacgagtagggctacacacgtgctacaatggtcggtacagagggtcgcaaagccgcgaggtggagctaatcccacaaagccggtcgtagtccggatcggagtctgcaactcgactccgtgaagtcggaatcgctagtaatcgagatcagaatgtac

SEQ ID NO: 3103 - DNA, 1441 bp, Shewanella chilikensis
  source 1..1441: mol_type = unassigned DNA
catgcaagtcgagcggtacatttcaaaagcttgcttttgaagatgacgagcggcggacgggtgagtaatgcctgggaatttgcccatttgtgggggataacagttggaaacgactgctaataccgcatacgccctacgggggaaagcaggggaacttcggtccttgcgctgatggataagcccaggtgggattagctagtaggtgaggtaatggctcacctaggcaacgatccctagctggtctgagaggatgatcagccacactgggactgagacacggcccagactcctacgggaggcagcagtggggaatattgcacaatgggggaaaccctgatgcagccatgccgcgtgtgtgaagaaggccttcgggttgtaaagcactttcagcgaggaggaaaggttagtagttaatacctgctagctgtgacgttactcgcagaagaagcaccggctaactccgtgccagcagccgcggtaatacggagggtgcgagcgttaatcggaattactgggcgtaaagcgtgcgcaggcggtttgttaagcgagatgtgaaagccccgggctcaacctgggaaccgcatttcgaactggcaaactagagtcttgtagaggggggtagaattccaggtgtagcggtgaaatgcgtagagatctggaggaataccggtggcgaaggcggccccctggacaaagactgacgctcaggcacgaaagcgtggggagcaaacaggattagataccctggtagtccacgccgtaaacgatgtctactcggagtttggtgtcttgaacactgggctctcaagctaacgcattaagtagaccgcctggggagtacggccgcaaggttaaaactcaaatgaattgacgggggcccgcacaagcggtggagcatgtggtttaattcgatgcaacgcgaagaaccttacctactcttgacatcctcagaagccagcggagacgcaggtgtgccttcggggaactgagagacaggtgctgcatggctgtcgtcagctcgtgttgtgaaatgttgggttaagtcccgcaacgagcgcaacccctatccttacttgccagcgggtaatgccgggaactttagggagactgccggtgataaaccggaggaaggtggggacgacgtcaagtcatcatggcccttacgagtagggctacacacgtgctacaatggtcggtacagagggttgcgaagccgcgaggtggagctaatctcataaagccggtcgtagtccggattggagtctgcaactcgactccatgaagtcggaatcgctagtaatcgtggatcagaatgccacggtgaatacgttcccgggccttgtacacaccgcccgtcacaccatgggagtgggctgcaccagaagtagatagcttaaccttcgggagggcgtttaccacggtgtggttcatgactggggtg

SEQ ID NO: 3104 - DNA, 1465 bp, Shewanella colwelliana
  source 1..1465: mol_type = unassigned DNA
attgaacgctggcggcaggcctaacacatgcaagtcgagcggtaacaggaattagcttgctaatttgctgacgagcggcggacgggtgagtaatgcctagggaactgcccagtcgagggggataacagttggaaacgactgctaataccgcatacgccctacgggggaaaagaggggaccttcgggccttctgcgattggatgtacctaggtgggattagctagttggtgaggtaatggctcaccaaggcgacgatccctagctgttctgagaggatgatcagccacactgggactgagacacggcccagactcctacgggaggcagcagtggggaatattgcacaatgggcgcaagcctgatgcagccatgccgcgtgtgtgaagaaggccttcgggttgtaaagcactttcagcgaggaggaaagcttaagcgttaatagcgtttaggtgtgacgttactcgcagaagaaggaccggctaacttcgtgccagcagccgcggtaatacgaggggtccaagcgttaatcggaattactgggcgtaaagcgtacgcaggcggtttgttaagcgagatgtgaaagccccgggctcaacctgggaactgcatttcgaactggcaaactagagtcttgtagaggggggtagaatttcaggtgtagcggtgaaatgcgtagagatctgaaggaataccggtggcgaaggcggccccctggacaaagactgacgctcatgtacgaaagcgtggggagcaaacaggattagataccctggtagtccacgccgtaaacgatgtctactcggaatttggtgtcttgaacactgggttctcaagctaacgcattaagtagaccgcctggggagtacggccgcaaggttaaaactcaaatgaattgacgggggcccgcacaagcggtggagcatgtggtttaattcgatgcaacgcgaagaaccttacctactcttgacatccagagaattcgctagagatagcttagtgccttcgggaactctgagacaggtgctgcatggctgtcgtcagctcgtgttgtgaaatgttgggttaagtcccgcaacgagcgcaacccttatccttatttgccagcacgtaatggtgggaactttagggagactgccggtgataaaccggaggaaggtggggacgacgtcaagtcatcatggcccttacgagtagggctacacacgtgctacaatggcaagtacagagggttgcgaagccgcgaggtggagctaatctcacaaagcttgtcgtagtccggattggagtctgcaactcgactccatgaagtcggaatcgctagtaatcgtggatcagaatgccacggtgaatacgttcccgggccttgtacacaccgcccgtcacaccatgggagtgggctgcaccagaagtagatagcttaaccttcgggagggcgtttaccacggtgtggttcatgactggggtg

SEQ ID NO: 3105 - DNA, 1465 bp, Shewanella decolorationis
  source 1..1465: mol_type = unassigned DNA
attgaacgctggcggcaggcctaacacatgcaagtcgagcggcagcacaagtgagtttactcatgaggtggcgagcggcggacgggtgagtaatgcctagggatctgcccagtcgagggggataacagttggaaacgactgctaataccgcatacgccctacgggggaaaggaggggaccttttggccttccgcgattggatgaacctaggtgggattagctagttggtgaggtaatggctcaccaaggcgacgatccctagctgttctgagaggatgatcagccacactgggactgagacacggcccagactcctacgggaggcagcagtggggaatattgcacaatgggggaaaccctgatgcagccatgccgcgtgtgtgaagaaggccttcgggttgtaaagcactttcagtagggaggaaaggttgtaagttaataccttgcagctgtgacgttacctacagaagaaggaccggctaactccgtgccagcagccgcggtaatacggagggtccaagcgttaatcggaattactgggcgtaaagcgtgcgcaggcggtttgttaagcgagatgtgaaagccccgggctcaacctgggaattgcatttcgaactggcaaactagagtcttgtagaggggggtagaattccaggtgtagcggtgaaatgcgtagagatctggaggaataccggtggcgaaggcggccccctggacaaagactgacgctcaggcacgaaagcgtggggagcaaacaggattagataccctggtagtccacgccgtaaacgatgtctactcggagtttggtgtcttgaacactgggctctcaagctaacgcattaagtagaccgcctggggagtacggccgcaaggttaaaactcaaatgaattgacgggggcccgcacaagcggtggagcatgtggtttaattcgatgcaacgcgaagaaccttacctactcttgacatccagagaactttccagagatggattggtgccttcgggaactctgagacaggtgctgcatggctgtcgtcagctcgtgttgtgaaatgttgggttaagtcccgcaacgagcgcaacccctatccttatttgccagcgcgtaatggcgggaactctagggagactgccggtgataaaccggaggaaggtggggacgacgtcaagtcatcatggcccttacgagtagggctacacacgtgctacaatggcgagtacagagggttgcaaagccgcgaggtggagctaatctcacaaagctcgtcgtagtccggattggagtctgcaactcgactccatgaagtcggaatcgctagtaatcgtaaatcagaatgttacggtgaatacgttcccgggccttgtacacaccgcccgtcacaccatgggagtgggctgcaaaagaagtgggtagcttaaccttcgggagggcgctcaccactttgtggttcatgactggggtg

SEQ ID NO: 3106 - DNA, 1467 bp, Shewanella denitrificans
  source 1..1467: mol_type = unassigned DNA
attgaacgctggcggcaggcctaacacatgcaagtcgagcggcagcgggaaggtagtttactacctttgccggcgagcggcggacgggtgagtaatgcctagggatctgcccagtcgtgggggataacagttggaaacgactgctaataccgcatacgccctacgggggaaaggaggggaccttcgggcctttcgcgattggatgaacctaggtgggattagctagttggtgaggtaatggctcaccaaggcgacgatccctagctggtctgagaggatgatcagccacactggaactgagacacggtccagactcctacgggaggcagcagtggggaatattgcacaatgggggaaaccctgatgcagccatgccgcgtgtgtgaagaaggccttcgggttgtaaagcactttcagtcaggaggaaaggtagcgtgttaatagcacgttactgtgacgttactgacagaagaaggaccggctaactccgtgccagcagccgcggtaatacggagggtccgagcgttaatcggaattactgggcgtaaagcgtgcgcaggcggtttgttaagccagatgtgaaagccccgggctcaacctgggaattgcatttggaactggcgaactagagtcttgtagagggaggtagaatttcaggtgtagcggtgaaatgcgtagatatctgaaggaataccggtggcgaaggcggcctcctggacaaagactgacgctcatgcacgaaagcgtggggagcaaacaggattagataccctggtagtccacgccgtaaacgatgtctactcggagtttggtgccttgagcactgggctcccaagctaacgcattaagtagaccgcctggggagtacggccgcaaggttaaaactcaaatgaattgacgggggcccgcacaagcggtggagcatgtggtttaattcgatgcaacgcgaagaaccttacctactcttgacatccacagaagccagcagagatgcaggtgtgccttcgggaactgtgagacaggtgctgcatggctgtcgtcagctcgtgttgtgaaatgttgggttaagtcccgcaacgagcgcaacccctatccttatttgccagcacgtaatggtgggaactctagggagactgccggtgataaaccggaggaaggtggggacgacgtcaagtcatcatggcccttacgagtagggctacacacgtgctacaatggcgagtacagagggttgcaaagccgcgaggtggagctaatctcacaaagctcgtcgtagtccggatcggagtctgcaactcgactccgtgaagtcggaatcgctagtaatcgtgaatcagaatgtcacggtgaatacgttcccgggccttgtacacaccgcccgtcacaccatgggagtgggctgcaaaagaagtgggtagtctaaccttcgggaggacgctcaccactttgtggttcatgactggggtg

SEQ ID NO: 3107 - DNA, 1444 bp, Shewanella fodinae
  source 1..1444: mol_type = unassigned DNA
cctacacatgcaagtcgagcggcagcggggagtagcttgctactctgccggcgagcggcggacgggtgagtaatgcctgggaatttgcccattcgagggggataacagttggaaacgactgctaataccgcatacgccctaagggggaaagcaggggaacttaggtccttgcgcgaatggataagcccaggtgggattagctagttggtgaggtaagggctcaccaaggcgacgatctctagctggtctgagaggatgatcagccacactggaactgagacacggtccagactcctacgggaggcagcagtggggaatattgcacaatgggggaaaccctgatgcagccatgccgcgtgtgtgaagaaggccttcgggttgtaaagcactttcagtcaggaggaaggtggtgtagctaatatctgcaccaattgacgttactgacagaagaagcaccggctaactccgtgccagcagccgcggtaatacggagggtgcgagcgttaatcggaattactgggcgtaaagcgtgcgcaggcggtttgttaagcgagatgtgaaagccccgggctcaacctgggatggtcatttcgaactggcaagctagagtctcgtagaggggggtagaattccaggtgtagcggtgaaatgcgtagagatctggaggaataccggtggcgaaggcggccccctggacgaagactgacgctcaggcacgaaagcgtggggagcaaacaggattagataccctggtagtccacgccgtaaacgatgtctactcggagtttggcgtctagaacgctgggctctcaagctaacgcattaagtagaccgcctggggagtacggccgcaaggttaaaactcaaatgaattgacgggggcccgcacaagcggtggagcatgtggtttaattcgatgcaacgcgaagaaccttacctactcttgacatccagagaacttggcagagatgccttggtgccttcgggaactctgagacaggtgctgcatggctgtcgtcagctcgtgttgtgaaatgttgggttaagtcccgcaacgagcgcaacccttatccttacttgccagcgggtgatgccgggaactgtagggagactgccggtgataaaccggaggaaggtggggacgacgtcaagtcatcatggcccttacgagtagggctacacacgtgctacaatggacagtacagagggaagcaaagcggcgacgtggagcggaaccaaaaagctgttcgtagtccggattggagtctgcaactcgactccatgaagtcggaatcgctagtaatcgtggatcagaatgccacggtgaatacgttcccgggccttgtacacaccgcccgtcacaccatgggagtggtttgcaaaagaagtagctagcttaaccttcgggggggcggttaccactttgtggatcatgactggggtg

SEQ ID NO: 3108 - DNA, 1464 bp, Shewanella frigidimarina
  source 1..1464: mol_type = unassigned DNA
  misc_difference 49: note = n is a, c, g, or t
  misc_difference 817: note = n is a, c, g, or t
  misc_difference 829: note = n is a, c, g, or t
  misc_difference 1123: note = n is a, c, g, or t
  misc_difference 1257: note = n is a, c, g, or t
attgaacgctggcggcaggcctaacacatgcaagtcgagcggtaacacnagggagcttgctcctgaggtgacgagcggcggacgggtgagtaatgcctagggatctgcccagtcgagggggataacagttggaaacgactgctaataccgcatacgccctacgggggaaaggaggggaccttcgggccttccgcgattggatgaacctaggtgggattagctagttggtgaggtaatggctcaccaaggcgacgatccctagctgttctgagaggatgatcagccacactgggactgagacacggcccagactcctacgggaggcagcagtggggaatattgcacaatgggggaaaccctgatgcagccatgccgcgtgtgtgaagaaggccttcgggttgtaaagcactttcagtagggaggaaaggtaatagtttaataaaatattgctgtgacgttacctacagaagaagcaccggctaacttcgtgccagcagccgcggtaatacgaggggtgcaagcgttaatcggaattactgggcgtaaagcgtgcgcaggcggtttgttaagccagatgtgaaatccccgggctcaacctgggaattgcatttggaactggcgaactagagtcttgtagaggggggtagaattccaggtgtagcggtgaaatgcgtagatatctggaggaataccggtggcgaaggcggccccctggacaaagactgacgctcatgcacgaaagcgtggggagcaaacaggattagataccctggtagtccacgccgtaaacgatgtctactcggagtttggtgacttngtcactgggttnccaagctaacgcattaagtagaccgcctggggagtacggccgcaaggttaaaactcaaatgaattgacgggggcccgcacaagcggtggagcatgtggtttaattcgatgcaacgcgaagaaccttacctactcttgacatccacagaagagaccagagatggacttgtgccttcgggaactgtgagacaggtgctgcatggctgtcgtcagctcgtgttgtgaaatgttgggttaagtcccgcaacgagcgcaacccctatccttatttgccagcacgtaatggtgggaactntagggagactgccggtgataaaccggaggaaggtggggacgacgtcaagtcatcatggcccttacgagtagggctacacacgtgctacaatggcgtatacagagggttgcaaagccgcgaggtggagctaatcncacaaagtacgtcgtagtccggatcggagtctgcaactcgactccgtgaagtcggaatcgctagtaatcgtggatcagaatgccacggtgaatacgttcccgggccttgtacacaccgcccgtcacaccatgggagtgggctgcaaaagaagtgggtagtttaacttcgggagaacgctcaccactttgtggttcatgactggggtg

SEQ ID NO: 3109 - DNA, 1465 bp, Shewanella halifaxensis
  source 1..1465: mol_type = unassigned DNA
attgaacgctggcggcaggcctaacacatgcaagtcgagcggtaacacaagggagcttgctcctgaggtgacgagcggcggacgggtgagtaatgcctaggtatctgcccagtcgagggggataacagttggaaacgactgctaataccgcatacgccctacgggggaaaggaggggaccttcgggccttccgcgattggatgaacctaggtgggattagctagttggtggggtaatggctcaccaaggcgacgatccctagctggtctgagaggatgatcagccacactggaactgagacacggtccagactcctacgggaggcagcagtggggaatattgcacaatgggcgaaagcctgatgcagccatgccgcgtgtgtgaagaaggccttcgggttgtaaagcactttcagcgaggaggaaagctcaagcgttaatagcgtttgggtgtgacgttactcgcagaagaagcaccggctaacttcgtgccagcagccgcggtaatacgaggggtgcaagcgttaatcggaattactgggcgtaaagcgtacgcaggcggtttgttaagcaagatgtgaaagccccgggctcaacctgggaactgcattttgaactggcaaactagagtcttgtagaggggggtagaatttcaggtgtagcggtgaaatgcgtagagatctgaaggaataccggtggcgaaggcggccccctggacaaagactgacgctcaggtacgaaagcgtggggagcaaacaggattagataccctggtagtccacgccgtaaacgatgtctactcggagtttggtgtcttgaacactgggctctcaagctaacgcattaagtagaccgcctggggagtacggccgcaaggttaaaactcaaatgaattgacgggggcccgcacaagcggtggagcatgtggtttaattcgatgcaacgcgaagaaccttacctactcttgacatccagagaattcgctagagatagcttagtgccttcgggaactctgagacaggtgctgcatggctgtcgtcagctcgtgttgtgaaatgttgggttaagtcccgcaacgagcgcaacccttatccttatttgccagcacgtaatggtgggaactttagggagactgccggtgataaaccggaggaaggtggggacgacgtcaagtcatcatggcccttacgagtagggctacacacgtgctacaatggtcggtacagagggttgcgaagccgcgaggtggagctaatctcacaaagccggtcgtagtccggatcggagtctgcaactcgactccgtgaagtcggaatcgctagtaatcgtagatcagaatgctacggtgaatacgttcccgggccttgtacacaccgcccgtcacaccatgggagtgggctgcaccagaagtagatagcttaaccttcgggagggcgtttaccacggtgtggttcatgactggggtg

SEQ ID NO: 3110 - DNA, 1414 bp, Shewanella hanedai
  source 1..1414: mol_type = unassigned DNA
  misc_difference 460: note = n is a, c, g, or t
gcaagtcgagcggaaacaggaargtagcttgctactttccggctgtcgagcggcggacgggtgagtaatgcctagatatctgcctagtcgtgggggataacagttggaaacgactgctaataccgcatacgccctacgggggaaaggaggggaccttcgggcctttcgcgattagatgagtctaggtgggattagctagtaggtgaggtaatggctcacctaggcgacgatccctagctggtctgagaggatgatcagccacactggaactgagacacggtccagactcctacgggaggcagcagtggggaatattgcacaatgggcgaaagcctgatgcagccatgccgcgtgtgtgaagaaggccttcgggttgtaaagcactttcagcgaggaggaaaggtaggtagttaataactgcttactgtgacgttactcgcagaagaagcaccggctaacntcgtgccagcagccgcggtaatacgaggggtgcaagcgttaatcggaattactgggcgtaaagcgtacgcaggcggtttgttaagccagatgtgaaagccctgggctcaacctaggaattgcatttggaactgacagactagagtcttgtagaggggggtagaatttcaggtgtagcggtgaaatgcgtagagatctgaaggaataccggtggcgaaggcggccccctggacaaagactgacgctcatgtacgaaagcgtggggagcaaacaggattagataccctggtagtccacgccgtaaacgatgtctactcggagtttggtaacttagttactgggctcccaagctaacgcattaagtagaccgcctggggagtacggccgcaaggttaaaactcaaatgaattgacgggggccgcacaagcggtggagcatgtggtttaattcgatgcaacgcgaagaaccttacctactcttgacatccacagaacttaccagagatggtttggtgccttcgggaactgtgagacaggtgctgcatggctgtcgtcagctcgtgttgtgaaatgttgggttaagtcccgcaacgagcgcaacccttatccttatttgccagcgagttatgtcgggaactttagggagactgccggtgataaaccggaggaaggtggggacgacgtcaagtcatcatggcccttacgagtagggctacacacgtgctacaatggtcggtacagagggtcgcaaagccgcgaggtggagctaatcccacaaagccggtcgtagtccggatcggagtctgcaactcgactccgtgaagtcggaatcgctagtaatcgtggatcagaatgccacggtgaatacgttcccgggccttgtacacaccgcccgtcacaccatgggagtgggctgcaccagaagtagatagcttaacctttcggggagggcgttt

SEQ ID NO: 3111 - DNA, 1465 bp, Shewanella livingstonensis
  source 1..1465: mol_type = unassigned DNA
attgaacgctggcggcaggcctaacacatgcaagtcgagcggtaacacaagggagcttgcttctgaggtgacgagcggcggacgggtgagtaatgcctagggatctgcccagtcgagggggataacagttggaaacgactgctaataccgcatacgccctacgggggaaaggaggggaccttcgggccttccgcgattggatgaacctaggtgggattagctagttggtgaggtaatggctcaccaaggcgacgatccctagctgttctgagaggatgatcagccasactgggactgagacacggcccagactcctacgggaggcagcagtggggaatattgcacaatgggggaaaccctgatgcagccatgccgcgtgtgtgaagaaggccttcgggttgtaaagcactttcagtagggaggaaaggtgatgtgttaatagcacattgctgtgacgttacctacagaagaaggaccggctaactccgtgccagcagccgcggtaatacggagggtccgagcgttaatcggaattactgggcgtaaagcgtgcgcaggcggtttgttaagccagatgtgaaatccccgggctcaacctgggaattgcatttggaactggcgaactagagtcttgtagaggggggtagaattccaggtgtagcggtgaaatgcgtagatatctggaggaataccggtggcgaaggcggccccctggacaaagactgacgctcatgcacgaaagcgtggggagcaaacaggattagataccctggtagtccacgccgtaaacgatgtctactcggagtttggtgacttagtcactgggctcccaagctaacgcattaagtagaccgcctggggagtacggccgcaaggttaaaactcaaatgaattgacgggggcccgcacaagcggtggagcatgtggtttaattcgatgcaacgcgaagaaccttacctactcttgacatccacagaagagaccagagatggacttgtgccttcgggaactgtgagacaggtgctgcatggctgtcgtcagctcgtgttgtgaaatgttgggttaagtcccgcaacgagcgcaacccctatccttatttgccagcacgtaatggtgggaactctagggagactgccggtgataaaccggaggaaggtggggacgacgtcaagtcatcatggcccttacgagtagggctacacacgtgctacaatggcgtatacagagggttgcaaagccgcgaggtggagctaatctcacaaagtacgtcgtagtccggatcggagtctgcaactcgactccgtgaagtcggaatcgctagtaatcgtggatcagaatgccacggtgaatacgttcccgggccttgtacacaccgcccgtcacaccatgggagtgggctgcaaaagaagtgggtagtttaaccttcgggagaacgctcaccactttgtggttcatgactggggtg

SEQ ID NO: 3112 - DNA, 1467 bp, Shewanella loihica
  source 1..1467: mol_type = unassigned DNA
attgaacgctggcggcaggcctaacacatgcaagtcgagcggtaacatttcaaaagcttgcttttgaagatgacgagcggcggacgggtgagtaatgcctagggaactgcccagtcgagggggataacagttggaaacgactgctaataccgcatacgccctacgggggaaaagaggggatcttcggaccttctgcgattggatgtacctaggtgggattagctagtaggtgaggtaatggctcacctaggcgacgatccctagctgttctgagaggatgatcagccacactgggactgagacacggcccagactcctacgggaggcagcagtggggaatattgcacaatgggcgcaagcctgatgcagccatgccgcgtgtgtgaagaaggccttcgggttgtaaagcactttcagcgaggaggaaaggttaacggttaatacccgttagctgtgacgttactcgcagaagaagcaccggctaacttcgtgccagcagccgcggtaatacgaggggtgcaagcgttaatcggaattactgggcgtaaagcgtacgcaggcggttgattaagcgagatgtgaaagccccgggcttaacctgggaactgcatttcgaactggtcaactagagtcttgtagaggggggtagaatttcaggtgtagcggtgaaatgcgtagagatctgaaggaataccggtggcgaaggcggccccctggacaaagactgacgctcaggtacgaaagcgtggggagcaaacaggattagataccctggtagtccacgccgtaaacgatgtctactcggaatttggtgtcttgaacactgggttctcaagctaacgcattaagtagaccgcctggggagtacggccgcaaggttaaaactcaaatgaattgacgggggcccgcacaagcggtggagcatgtggtttaattcgatgcaacgcgaagaaccttacctactcttgacatccagagaacttttcagagatgaattggtgccttcgggaactctgagacaggtgctgcatggctgtcgtcagctcgtgttgtgaaatgttgggttaagtcccgcaacgagcgcaacccttatccttacttgccagcgggtaatgccgggaactttagggagactgccggtgataaaccggaggaaggtggggacgacgtcaagtcatcatggcccttacgagtagggctacacacgtgctacaatggtcggtacagagggttgcgaagccgcgaggtggagctaatctcacaaagccggtcgtagtccggattggagtctgcaactcgactccatgaagtcggaatcgctagtaatcgtggatcagaatgccacggtgaatacgttcccgggccttgtacacaccgcccgtcacaccatgggagtgggctgcaccagaagtagatagcttaaccttcgggagggcgtttaccacggtgtggttcatgactggggtg

SEQ ID NO: 3113 - DNA, 1465 bp, unidentified
  source 1..1465: mol_type = unassigned DNA; note = Shewanella mangrovi
attgaacgctggcggcaggcctaacacatgcaagtcgagcggtaacaggaagtagcttgctactttgctgacgagcggcggacgggtgagtaatgcctgggaacttgcccatttgagggggataacagttggaaacgactgctaataccgcatacgccctacgggggaaaggaggggctcttcggaccttccgcgaatggataggcccaggtgggattagctagttggtaaggtaacggcttaccaaggcgacgatctctagctggtttgagaggatgatcagccacactggaactgagacacggtccagactcctacgggaggcagcagtggggaatattgcacaatgggggaaaccctgatgcagccatgccgcgtgtgtgaagaaggccttcgggttgtaaagcactttcagcgaggaggaaaggttagtagttaatacctgctagctgtgacgttactcgcagaagaagcaccggctaactccgtgccagcagccgcggtaatacggagggtgcgagcgttaatcggaattactgggcgtaaagcgtgcgcaggcggtttgttaagcaagatgtgaaagccccgggctcaacctgggaatcgcattttgaactggcaagctagagtcttgtagaggggggtagaatttcaggtgtagcggtgaaatgcgtagagatctgaaggaataccggtggcgaaggcggccccctggacaaagactgacgctcatgcacgaaagcgtggggagcaaacaggattagataccctggtagtccacgccgtaaacgatgtctactcggagtttggtgtcttgaacactgggttctcaagctaacgcattaagtagaccgcctggggagtacggccgcaaggttaaaactcaaatgaattgacgggggcccgcacaagcggtggagcatgtggtttaattcgatgcaacgcgaagaaccttacctactcttgacatccacagaatctggtagagatacctcagtgccttcgggaactgtgagacaggtgctgcatggctgtcgtcagctcgtgttgtgaaatgttgggttaagtcccgcaacgagcgcaacccttatccttacttgccagcgggtaatgccgggaactttagggagactgccggtgataaaccggaggaaggtggggacgacgtcaagtcatcatggcccttacgagtagggctacacacgtgctacaatggtcagtacagagggacgcgaagccgcgaggtggagccaatctcttaaagctggtcgtagtccggatcggagtctgcaacccgactccgtgaagtcggaatcgctagtaatcgcaaatcagaatgttgcggtgaatacgttcccgggccttgtacacaccgcccgtcacaccatgggagtgggttgcaccagaagtagatagcttaaccttcgggggggcgtttaccacggtgtgattcatgactggggtg

SEQ ID NO: 3114 - DNA, 1467 bp, Shewanella marisflavi
  source 1..1467: mol_type = unassigned DNA
attgaacgctggcggcaggcctaacacatgcaagtcgagcggtaacaggaagaaagcttgctttctttgctgacgagcggcggacgggtgagtaatgcctagggaactgcccagtcgagggggataacagttggaaacgactgctaataccgcatacgccctacgggggaaaagaggggaccttcgggccttctgcgattggatgtacctaggtgggattagctagtaggtgaggtaatggctcacctaggcgacgatccctagctgttctgagaggatgatcagccacactgggactgagacacggcccagactcctacgggaggcagcagtggggaatattgcacaatgggcgcaagcctgatgcagccatgccgcgtgtgtgaagaaggccttcgggttgtaaagcactttcagcgaggaggaaaggttaagtgttaatagcgcttagctgtgacgttactcgcagaagaagcaccggctaacttcgtgccagcagccgcggtaatacgaggggtgcaagcgttaatcggaattactgggcgtaaagcgtacgcaggcggtttgttaagcgagatgtgaaagccccgggctcaacctgggaactgcatttcgaactggcaaactagagtcttgtagaggggggtagaatttcaggtgtagcggtgaaatgcgtagagatctgaaggaataccggtggcgaaggcggccccctggacaaagactgacgctcaggtacgaaagcgtggggagcaaacaggattagataccctggtagtccacgccgtaaacgatgtctactcggaatttggtgtcttgaacactgggttctcaagctaacgcattaagtagaccgcctggggagtacggccgcaaggttaaaactcaaatgaattgacgggggcccgcacaagcggtggagcatgtggtttaattcgatgcaacgcgaagaaccttacctactcttgacatccagagaattcgctagagatagcttagtgccttcgggaactctgagacaggtgctgcatggctgtcgtcagctcgtgttgtgaaatgttgggttaagtcccgcaacgagcgcaacccttatccttacttgccagcgggtcatgccgggaactttagggagactgccggtgataaaccggaggaaggtggggacgacgtcaagtcatcatggcccttacgagtagggctacacacgtgctacaatggcgagtacagagggttgcgaagccgcgaggtggagctaatctcagaaagctcgtcgtagtccggattggagtctgcaactcgactccatgaagtcggaatcgctagtaatcgtggatcagaatgccacggtgaatacgttcccgggccttgtacacaccgcccgtcacaccatgggagtgggctgcaccagaagtagatagcttaaccttcgggagggcgtttaccacggtgtggttcatgactggggtg

SEQ ID NO: 3115 - DNA, 1426 bp, Shewanella morhuae
  source 1..1426: mol_type = unassigned DNA
ggctacacatgcaagtcgagcggcagcgcaagggagtttactcctgaggcggcgagcggcggacgggtgagtaatacctagggatctgcccagtcgagggggataacagttggaaacgactgctaataccgcatacgccctacgggggaaagaaggggaccttcgggcctttcgcgattggatgaacctaggtgggattagctagttggtgaggtaatggctcaccaaggcgacgatccctagctgttctgagaggatgatcagccacactgggactgagacacggcccagactcctacgggaggcagcagtggggaatattggacaatgggggcaaccctgatccagccatgccgcgtgtgtgaagaaggccttcgggttgtaaagcactttcagtagggaggaaaggtagcgtgttaatagcacgttactgtgacgttacctacagaagaaggaccggctaactccgtgccagcagccgcggtaatacggagggtccgagcgttaatcggaattactgggcgtaaagcgtgcgcaggcggtttgttaagcaagatgtgaaagccccgggctcaacctgggaattgcattttgaactggcgaactagagtcttgtagaggggggtagaattccaggtgtagcggtgaaatgcgtagagatctggaggaataccggtggcgaaggcggccccctggacaaagactgacgctcaggcacgaaagcgtggggagcaaacaggattagataccctggtagtccacgccgtaaacgatgtctactcggagtttggtgtcttgaacactgggctctcaagctaacgcattaagtagaccgcctggggagtacggccgcaaggttaaaactcaaatgaattgacgggggcccgcacaagcggtggagcatgtggtttaattcgatgcaacgcgaagaaccttacctactcttgacatccacagaagagaccagagatggacttgtgccttcgggaactgtgagacaggtgctgcatggctgtcgtcagctcgtgttgtgaaatgttgggttaagtcccgcaacgagcgcaacccctatccttatttgccagcacgtaatggtgggaactctagggagactgccggtgataaaccggaggaaggtggggacgacgtcaagtcatcatggcccttacgagtagggctacacacgtgctacaatggcgagtacagagggttgcaaagccgcgaggtggagctaatctcacaaagctcgtcgtagtccggattggagtctgcaactcgactccatgaagtcggaatcgctagtaatcgtgaatcagaatgtcacggtgaatacgttcccgggccttgtacacaccgcccgtcacaccatgggagtgggctgcaaaagaagtgggtagcttaaccttcgggggggcgctcaccactt

SEQ ID NO: 3116 - DNA, 1465 bp, Shewanella oneidensis
  source 1..1465: mol_type = unassigned DNA
attgaacgctggcggcaggcctaacacatgcaagtcgagcggcagcacaagtgagtttactcatgaggtggcgagcggcggacgggtgagtaatgcctagggatctgcccagtcgagggggataacagttggaaacgactgctaataccgcatacgccctacgggggaaagagggggactttcgggcctctcgcgattggatgaacctaggtgggattagctagttggtgaggtaatggctcaccaaggcgacgatccctagctgttctgagaggatgatcagccacactgggactgagacacggcccagactcctacgggaggcagcagtggggaatattgcacaatgggggaaaccctgatgcagccatgccgcgtgtgtgaagaaggccttcgggttgtaaagcactttcagtagggaggaaagggtaagtcctaatacgacttatctgtgacgttacctacagaagaaggaccggctaactccgtgccagcagccgcggtaatacggagggtccgagcgttaatcggaattactgggcgtaaagcgtgcgcaggcggtttgttaagcgagatgtgaaagccctgggctcaacctaggaatcgcatttcgaactgaccaactagagtcttgtagaggggggtagaattccaggtgtagcggtgaaatgcgtagagatctggaggaataccggtggcgaaggcggccccctggacaaagactgacgctcatgcacgaaagcgtggggagcaaacaggattagataccctggtagtccacgccgtaaacgatgtctactcggagtttggtgtcttgaacactgggctctcaagctaacgcattaagtagaccgcctggggagtacggccgcaaggttaaaactcaaatgaattgacgggggcccgcacaagcggtggagcatgtggtttaattcgatgcaacgcgaagaaccttacctactcttgacatccacggaagactgcagagatgcggttgtgccttcgggaaccgtgagacaggtgctgcatggctgtcgtcagctcgtgttgtgaaatgttgggttaagtcccgcaacgagcgcaacccctatccttatttgccagcacgtaatggtgggaactctagggagactgccggtgataaaccggaggaaggtggggacgacgtcaagtcatcatggcccttacgagtagggctacacacgtgctacaatggcgagtacagagggttgcaaagccgcgaggtggagctaatctcacaaagctcgtcgtagtccggattggagtctgcaactcgactccatgaagtcggaatcgctagtaatcgtggatcagaatgccacggtgaatacgttcccgggccttgtacacaccgcccgtcacaccatgggagtgggctgcaaaagaagtgggtagcttaaccttcgggggggcgctcaccactttgtggttcatgactggggtg

SEQ ID NO: 3117 - DNA, 1465 bp, Shewanella pealeana
  source 1..1465: mol_type = unassigned DNA
attgaacgctggcggcaggcctaacacatgcaagtcgagcggtaacacaagggagcttgctcctgaggtgacgagcggcggacgggtgagtaatgcctaggtatctgcccagtcgagggggataacagttggaaacgactgctaataccgcatacgccctacgggggaaaggaggggaccttcgggccttccgcgattggatgaacctaggtgggattagctagttggtgaggtaatggctcaccaaggcgacgatccctagctggtctgagaggatgatcagccacactggaactgagacacggtccagactcctacgggaggcagcagtggggaatattgcacaatgggcgaaagcctgatgcagccatgccgcgtgtgtgaagaaggccttcgggttgtaaagcactttcagcgaggaggaaagctcaagcgttaatagcgtttgggtgtgacgttactcgcagaagaagcaccggctaacttcgtgccagcagccgcggtaatacgaggggtgcaagcgttaatcggaattactgggcgtaaagcgtacgcaggcggtttgttaagcaagatgtgaaagccccgggctcaacctgggaactgcattttgaactggcaaactagagtcttgtagaggggggtagaatttcaggtgtagcggtgaaatgcgtagagatctgaaggaataccggtggcgaaggcggccccctggacaaagactgacgctcaggtacgaaagcgtggggagcaaacaggattagataccctggtagtccacgccgtaaacgatgtctactcggagtttggtgtcttgaacactgggctctcaagctaacgcattaagtagaccgcctggggagtacggccgcaaggttaaaactcaaatgaattgacgggggcccgcacaagcggtggagcatgtggtttaattcgatgcaacgcgaagaaccttacctactcttgacatccagagaattcgctagagatagcttagtgccttcgggaactctgagacaggtgctgcatggctgtcgtcagctcgtgttgtgaaatgttgggttaagtcccgcaacgagcgcaacccttatccttatttgccagcacgtaatggtgggaactttagggagactgccggtgataaaccggaggaaggtggggacgacgtcaagtcatcatggcccttacgagtagggctacacacgtgctacaatggtcggtacagagggttgcgaagccgcgaggtggagctaatctcacaaagccggtcgtagtccggatcggagtctgcaactcgactccgtgaagtcggaatcgctagtaatcgtagatcagaatgctacggtgaatacgttcccgggccttgtacacaccgcccgtcacaccatgggagtgggctgcaccagaagtagatagcttaaccttcgggagggcgtttaccacggtgtggttcatgactggggtg

SEQ ID NO: 3118 - DNA, 1465 bp, Shewanella piezotolerans
  source 1..1465: mol_type = unassigned DNA
attgaacgctggcggcaggcctaacacatgcaagtcgagcggtaacacaagggagcttgctcctgaggtgacgagcggcggacgggtgagtaatgcctaggtatctgcccagtcgagggggataacagttggaaacgactgctaataccgcatacgccctacgggggaaaggaggggaccttcgggcctttcgcgattggatgaacctaggtgggattagctagtaggtggggtaatggctcacctaggcaacgatccctagctggtctgagaggatgatcagccacactggaactgagacacggtccagactcctacgggaggcagcagtggggaatattgcacaatgggcgaaagcctgatgcagccatgccgcgtgtatgaagaaggccttcgggttgtaaagtactttcagcgaggaggaaaggttgttggttaataaccaacagctgtgacgttactcgcagaagaagcaccggctaacttcgtgccagcagccgcggtaatacgaggggtgcaagcgttaatcggaattactgggcgtaaagcgtacgcaggcggtttgttaagcgagatgtgaaagccccgggctcaacctgggaactgcatttcgaactggcaaactagagtcttgtagaggggggtagaatttcaggtgtagcggtgaaatgcgtagagatctgaaggaataccggtggcgaaggcggccccctggacaaagactgacgctcaggtacgaaagcgtggggagcaaacaggattagataccctggtagtccacgccgtaaacgatgtctactcggaatttggtgtcttgaacactgggttctcaagctaacgcattaagtagaccgcctggggagtacggccgcaaggttaaaactcaaatgaattgacgggggcccgcacaagcggtggagcatgtggtttaattcgatgcaacgcgaagaaccttacctactcttgacatccacagaatttaccagagatggattagtgccttcgggaactgtgagacaggtgctgcatggctgtcgtcagctcgtgttgtgaaatgttgggttaagtcccgcaacgagcgcaacccttatccttatttgccagcacgtaatggtgggaactttagggagactgccggtgataaaccggaggaaggtggggacgacgtcaagtcatcatggcccttacgagtagggctacacacgtgctacaatggtcggtacagagggttgcaaagccgcgaggtggagctaatctcacaaagccggtcgtagtccggattggagtctgcaactcgactccatgaagtcggaatcgctagtaatcgtagatcagaatgctacggtgaatacgttcccgggccttgtacacaccgcccgtcacaccatgggagtgggctgcaccagaagtagatagcttaaccttcgggagggcgtttaccacggtgtggttcatgactggggtg

SEQ ID NO: 3119 - DNA, 1467 bp, Shewanella psychrophila
  source 1..1467: mol_type = unassigned DNA
attgaacgctggcggcaggcctaacacatgcaagtcgagcggaaacaggaagtagcttgctactttgctgtcgagcggcggacgggtgagtaatgcctagggaactgcccagtcgagggggataacagttggaaacgactgctaataccgcatacgccctacgggggaaaggaggggaccttcgggcctttcgcgattggatgtacctaggtgggattagctagttggtaaggtaatggcttaccaaggcaacgatccctagctggtctgagaggatgatcagccacactggaactgagacacggtccagactcctacgggaggcagcagtggggaatattgcacaatgggcgaaagcctgatgcagccatgccgcgtgtgtgaagaaggccttcgggttgtaaagcactttcagcgaggaggaaagggtagtagttaataactgctatctgtgacgttactcgcagaagaagcaccggctaacttcgtgccagcagccgcggtaatacgaggggtgcaagcgttaatcggaattactgggcgtaaagcgtacgcaggcggtttgttaagcaagatgtgaaagccccgggctcaacctgggaattgcattttgaactggcaaactagagtcttgtagaggggggtagaatttcaggtgtagcggtgaaatgcgtagagatctgaaggaataccggtggcgaaggcggccccctggacaaagactgacgctcaggtacgaaagcgtggggagcaaacaggattagataccctggtagtccacgccgtaaacgatgtctactcggaatttggtgtcttgaacactgggttctcaagctaacgcattaagtagaccgcctggggagtacggccgcaaggttaaaactcaaatgaattgacgggggcccgcacaagcggtggagcatgtggtttaattcgatgcaacgcgaagaaccttacctactcttgacatccacagaactttccagagatggattggtgccttcgggaactgtgagacaggtgctgcatggctgtcgtcagctcgtgttgtgaaatgttgggttaagtcccgcaacgagcgcaacccttatccttatttgccagcacgtaatggtgggaactttagggagactgccggtgataaaccggaggaaggtggggacgacgtcaagtcatcatggcccttacgagtagggctacacacgtgctacaatggtcggtacagagggtcgcaaagccgcgaggtcaagctaatcccacaaagccggtcgtagtccggatcggagtctgcaactcgactccgtgaagtcggaatcgctagtaatcgtagatcagaatgctacggtgaatacgttcccgggccttgtacacaccgcccgtcacaccatgggagtgggctgcaccagaagtagatagcttaacctttcggggagggcgtttaccacggtgtggttcatgactggggtg

SEQ ID NO: 3120 - DNA, 1463 bp, Shewanella putrefaciens
  source 1..1463: mol_type = unassigned DNA
attgaacgctggcggcaggcctaacacatgcaagtcgagcggcagcacaagggagtttacttctgaggtggcgagcggcggacgggtgagtaatgcctagggatctgcccagtcgagggggataacagttggaaacgactgctaataccgcatacgccctacgggggaaaggaggggaccttcgggccttccgcgattggatgaacctaggtgggattagctagttggtgaggtaatggctcaccaaggcgacgatccctagctgttctgagaggatgatcagccacactgggactgagacacggcccagactcctacgggaggcagcagtggggaatattgcacaatgggggaaaccctgatgcagccatgccgcgtgtgtgaagaaggccttcgggttgtaaagcactttcagtagggaggaaagggtgtagcttaatacgctatatctgtgacgttacctacagaagaaggaccggctaactccgtgccagcagccgcggtaatacggagggtccgagcgttaatcggaattactgggcgtaaagcgtgcgcaggcggtttgttaagcgagatgtgaaagccctgggctcaacctaggaatagcatttcgaactggcgaactagagtcttgtagaggggggtagaattccaggtgtagcggtgaaatgcgtagagatctggaggaataccggtggcgaaggcggccccctggacaaagactgacgctcatgcacgaaagcgtggggagcaaacaggattagataccctggtagtccacgccgtaaacgatgtctactcggagtttggtgtcttgaacactgggctctcaagctaacgcattaagtagaccgcctggggagtacggccgcaaggttaaaactcaaatgaattgacgggggcccgcacaagcggtggagcatgtggtttaattcgatgcaacgcgaagaaccttacctactcttgacatccacagaacttccagagatggattgtgccttcgggaactgtgagacaggtgctgcatggctgtcgtcagctcgtgttgtgaaatgttgggttaagtcccgcaacgagcgcaacccctatccttatttgccagcacgtaatggtgggaactctagggagactgccggtgataaaccggaggaaggtggggacgacgtcaagtcatcatggcccttacgagtagggctacacacgtgctacaatggcgagtacagagggttgcaaagccgcgaggtggagctaatctcacaaagctcgtcgtagtccggattggagtctgcaactcgactccatgaagtcggaatcgctagtaatcgtggatcagaatgccacggtgaatacgttcccgggccttgtacacaccgcccgtcacaccatgggagtgggctgcaaaagaagtgggtagcttaaccttcgggggggcgctcaccactttgtggttcatgactggggtg

SEQ ID NO: 3121 - DNA, 1465 bp, Shewanella sediminis
  source 1..1465: mol_type = unassigned DNA
attgaacgctggcggcaggcctaacacatgcaagtcgagcggaaacggagatagcttgctatcagacgtcgagcggcggacgggtgagtaatgcctagatatctgcctagtcgtgggggataacagttggaaacgactgctaataccgcatacgccctacgggggaaaggaggggaccttcgggcctttcgcgattagatgagtctaggtgggattagctagtaggtgaggtaatggctcacctaggcgacgatccctagctgttctgagaggatgatcagccacactgggactgagacacggcccagactcctacgggaggcagcagtggggaatattgcacaatgggcgaaagcctgatgcagccatgccgcgtgtgtgaagaaggccttcgggttgtaaagcactttcagcgaggaggaaaggtaggtagttaataactgcttgctgtgacgttactcgcagaagaagcaccggctaacttcgtgccagcagccgcggtaatacgaggggtgcaagcgttaatcggaattactgggcgtaaagcgtacgcaggcggtttgttaagccagatgtgaaagccccgggctcaacctgggaattgcatttggaactggcaaactagagtcttgtagaggggggtagaatttcaggtgtagcggtgaaatgcgtagagatctgaaggaataccggtggcgaaggcggccccctggacaaagactgacgctcatgtacgaaagcgtggggagcaaacaggattagataccctggtagtccacgccgtaaacgatgtctactcggagtttggtaacttagttactgggctcccaagctaacgcattaagtagaccgcctggggagtacggccgcaaggttaaaactcaaatgaattgacgggggcccgcacaagcggtggagcatgtggtttaattcgatgcaacgcgaagaaccttacctactcttgacatccagagaattcgctagagatagcttagtgccttcgggagctctgagacaggtgctgcatggctgtcgtcagctcgtgttgtgaaatgttgggttaagtcccgcaacgagcgcaacccttatccttatttgccagcacgtaatggtgggaactttagggagactgccggtgataaaccggaggaaggtggggacgacgtcaagtcatcatggcccttacgagtagggctacacacgtgctacaatggtcggtacagagggtcgcaaagccgcgaggtggagctaatcccacaaagccggtcgtagtccggatcggagtctgcaactcgactccgtgaagtcggaatcgctagtaatcgtagatcagaatgctacggtgaatacgttcccgggccttgtacacaccgcccgtcacaccatgggagtgggctgcaccagaagtagatagcttaacctttcggggagggcgtttaccacggtgtggttcatgactggggtg

SEQ ID NO: 3122 - DNA, 1467 bp, Shewanella violacea
  source 1..1467: mol_type = unassigned DNA
attgaacgctggcggcaggcctaacacatgcaagtcgagcggaaacagaaagtagcttgctactttgctgtcgagcggcggacgggtgagtaatgcctagggaactgcccagtcgagggggataacagttggaaacgactgctaataccgcatacgccctacgggggaaaggaggggaccttcgggcctttcgcgattggatgtacctaggtgggattagctagttggtaaggtaatggcttaccaaggcgacgatccctagctggtctgagaggatgatcagccacactggaactgagacacggtccagactcctacgggaggcagcagtggggaatattgcacaatgggcgaaagcctgatgcagccatgccgcgtgtgtgaagaaggccttcgggttgtaaagcactttcagcgaggaggaaaggtaggtagttaataactgcttactgtgacgttactcgcagaagaagcaccggctaacttcgtgccagcagccgcggtaatacgaggggtgcaagcgttaatcggaattactgggcgtaaagcgtacgcaggcggtttgttaagcaagatgtgaaagccccgggctcaacctgggaattgcattttgaactggcaaactagagtcttgtagaggggggtagaatttcaggtgtagcggtgaaatgcgtagagatctgaaggaataccggtggcgaaggcggccccctggacaaagactgacgctcaggtacgaaagcgtggggagcaaacaggattagataccctggtagtccacgccgtaaacgatgtctactcggaatttggtgtcttgaacactgggttcccaagctaacgcattaagtagaccgcctggggagtacggccgcaaggttaaaactcaaatgaattgacgggggcccgcacaagcggtggagcatgtggtttaattcgatgcaacgcgaagaaccttacctactcttgacatccatagaactcgctagagatagcttggtgccttcgggaactatgagacaggtgctgcatggctgtcgtcagctcgtgttgtgaaatgttgggttaagtcccgcaacgagcgcaacccttatccttatttgccagcacgtaatggtgggaactttagggagactgccggtgataaaccggaggaaggtggggacgacgtcaagtcatcatggcccttacgagtagggctacacacgtgctacaatggtcggtacagagggtcgcaacgccgcgaggtcaagctaatcccacaaagccggtcgtagtccggatcggagtctgcaactcgactccgtgaagtcggaatcgctagtaatcgtgaatcagaatgtcacggtgaatacgttcccgggccttgtacacaccgcccgtcacaccatgggagtgggctgcaccagaagtagatagcttaacccttcggggagggcgtttaccacggtgtggttcatgactggggtg

SEQ ID NO: 3123 - DNA, 1464 bp, Shewanella woodyi
  source 1..1464: mol_type = unassigned DNA
attgaacgctggcggcaggcctaacacatgcaagtcgagcggaaacagaaagtagcttgctactttgctgtcgagcggcggacgggtgagtaatgcctagatatctgcctagtcgtgggggataacagttggaaacgactgctaataccgcatacgccctacgggggaaaggaggggaccttcgggcctttcgcgattagatgagtctaggtgggattagctagtaggtgaggtaatggctcacctaggcgacgatccctagctgttctgagaggatgatcagccacactgggactgagacacggcccagactcctacgggaggcagcagtggggaatattgcacaatgggcgaaagcctgatgcagccatgccgcgtgtgtgaagaaggccttcgggttgtaaagcactttcagcgaggaggaaaggttaacggttaataaccgttagctgtgacgttactcgcagaagaagcaccggctaacttcgtgccagcagccgcggtaatacgaggggtgcaagcgttaatcggaattactgggcgtaaagcgtacgcaggcggtttgttaagccagatgtgaaagccccgggctcaacctgggaattgcatttggaactggcaaactagagtcttgtagaggggggtagaatttcaggtgtagcggtgaaatgcgtagagatctgaaggaataccggtggcgaaggcggccccctggacaaagactgacgctcaggtacgaaagcgtggggagcaaacaggattagataccctggtagtccacgccgtaaacgatgtctactcggagtttggtaacttagttactgggctcccaagctaacgcattaagtagaccgcctggggagtacggccgcaaggttaaaactcaaatgaattgacgggggcccgcacaagcggtggagcatgtggtttaattcgatgcaacgcgaagaaccttacctactcttgacatccacagaacttttcagagatgaattggtgccttcgggaactgtgagacaggtgctgcatggctgtcgtcagctcgtgttgtgaaatgttgggttaagtcccgcaacgagcgcaacccttatccttatttgccagcacttcgggtgggaactttagggagactgccggtgataaaccggaggaaggtggggacgacgtcaagtcatcatggcccttacgagtagggctacacacgtgctacaatggtcggtacagagggttgcgaagccgcgaggtggagctaatcccagaaagccggtcgtagtccggattggagtctgcaactcgactccatgaagtcggaatcgctagtaatcgtggatcagaatgccacggtgaatacgttcccgggccttgtacacaccgcccgtcacaccatgggagtgggctgcaccagaagtagatagcttaaccttcgggagggcgtttaccacggtgtggttcatgactggggtg

SEQ ID NO: 3124 - DNA, 1382 bp, Shimia marina
  source 1..1382: mol_type = unassigned DNA
aacgaacgctggcggcaggcctaacacatgcaagtcgagcgcgcccttcggggtgagcggcggacgggttagtaacgcgtgggaacgtacccagatctacggaatagcctttggaaacgaagagtaataccgtatacgcccttcgggggaaagatttatcggatttggatcggcccgcgttagattagatagttggtggggtaacggcctaccaagtctacgatctatagctggttttagaggatgatcagcaacactgggactgagacacggcccagactcctacgggaggcagcagtggggaatcttggacaatgggcgcaagcctgatccagccatgccgcgtgagtgatgaaggccttagggtcgtaaagctctttcgccagggatgataatgacagtacctggtaaagaaaccccggctaactccgtgccagcagccgcggtaatacggagggggttagcgttgttcggaattactgggcgtaaagcgcgcgtaggcgggttgttaagttagaggtgaaatcccggggctcaaccccggaactgcctttaatactggcaacctagagttcgagagaggtgagtggaattccgagtgtagaggtgaaattcgtagatattcggaggaacaccagtggcgaaggcggctcactggctcgatactgacgctgaggtgcgaaagtgtggggagcaaacaggattagataccctggtagtccacaccgtaaacgatgaatgccagtcgtcgggtagcatgctattcggtgacacacctaacggattaagcattccgcctggggagtacggtcgcaagattaaaactcaaaggaattgacgggggcccgcacaagcggtggagcatgtggtttaattcgaagcaacgcgcagaaccttaccaacccttgacatcctaggacaactccagagatggagccttccttcgggacctagtgacaggtgctgcatggctgtcgtcagctcgtgtcgtgagatgttcggttaagtccggcaacgagcgcaacccacatccttagttgccagcagttcggctgggcactctagggaaactgcccgtgataagcgggaggaaggtgtggatgacgtcaagtcctcatggcccttacgggttgggctacacacgtgctacaatggcagtgacaatgggttaatccccaaaaactgtctcagttcggattggggtctgcaactcgaccccatgaagtcggaatcgctagtaatcgcgtaacagcatgacgcggtgaatacgttcccgggccttgtacacaccgcccgtcacaccatgggagttggttctacccgacggccgtgcgctaaccttttggaggcagcggaccacggtaggatcagcgactggggtg

SEQ ID NO: 3125 - DNA, 1464 bp, Shimwellia blattae
  source 1..1464: mol_type = unassigned DNA
attgaacgctggcggcaggcttaacacatgcaagtcgaacggtaacagaaatcagcttgctgatttgctgacgagtggcggacgggtgagtaatgtctgggaaactgcctgatggagggggataactactggaaacggtagctaataccgcataatgtcgcaagaccaaagtgggggaccttcgggcctcataccatcggatgtgcccagatgggattagctagtaggtggggtaacggctcacctaggcgacgatccctagctggtctgagaggatgaccagccacactggaactgagacacggtccagactcctacgggaggcagcagtggggaatattgcacaatgggcgcaagcctgatgcagccatgccgcgtgtatgaagaaggccttcgggttgtaaagtactttcagcggggaggaaggtgttgaggttaataacctcagcaattgacgttacccgcagaagaagcaccggctaactccgtgccagcagccgcggtaatacggagggtgcaagcgttaatcggaattactgggcgtaaagcgcacgcaggcggttgattaagtcagatgtgaaatccccgggcttaacctgggaactgcatttgaaactggtcagcttgagtctcgtagaggggggtagaattccaggtgtagcggtgaaatgcgtagagatctggaggaataccggtggcgaaggcggccccctggacgaagactgacgctcaggtgcgaaagcgtggggagcaaacaggattagataccctggtagtccacgccgtaaacgatgtcaacttggaagttgtgcccttgaggcgtggcttccggagctaacgcgttaagttgaccgcctggggagtacggccgcaaggttaaaactcaaatgaattgacgggggcccgcacaagcggtggagcatgtggtttaattcgatgcaacgcgaagaaccttacctggtcttgacatccatagaacttggcagagatgccttggtgccttcgggagctatgagacaggtgctgcatggctgtcgtcagctcgtgttgtgaaatgttgggttaagtcccgcaacgagcgcaacccctatcctctgttgccagcacttcgggtgggaactcaggggagactgccagtgataaactggaggaaggtggggatgacgtcaagtcatcatggcccttacgaccagggctacacacgtgctacaatggcgcatacaaagagaagcgacctcgcgagagcaagcggatctcataaagtgcgtcgtagtccggattggagtctgcaactcgactccatgaagtcggaatcgctagtaatcgtggatcagaatgccacggtgaatacgttcccgggccttgtacacaccgcccgtcacaccatgggagtgggttgcaaaagaagtaggtagcttaaccttcgggagggcgcttaccactttgtgattcatgactggggtg

SEQ ID NO: 3126 - DNA, 1464 bp, unidentified
  source 1..1464: mol_type = unassigned DNA; note = Siccibacter turicensis
attgaacgctggcggcaggcctaacacatgcaagtcgaacggtaacaggaagcagcttgctgcttcgctgacgagtggcggacgggtgagtaatgtctggggatctgcctgatggagggggataactactggaaacggtagctaataccgcataacgtcgcaagaccaaagagggggaccttcgggcctcttgccatcagatgaacccagatgggattagctagtaggtggggtaacggctcacctaggcgacgatccctagctggtctgagaggatgaccagccacactggaactgagacacggtccagactcctacgggaggcagcagtggggaatattgcacaatgggcgcaagcctgatgcagccatgccgcgtgtatgaagaaggccttcgggttgtaaagtactttcagcgaggaggaaggcggtaaggttaataaccttatcgattgacgttactcgcagaagaagcaccggctaactccgtgccagcagccgcggtaatacggagggtgcaagcgttaatcggaattactgggcgtaaagcgcacgcaggcggtctgtcaagtcggatgtgaaatccccgggctcaacctgggaactgcattcgaaactggcaggctagagtcttgtagaggggggtagaattccaggtgtagcggtgaaatgcgtagagatctggaggaataccggtggcgaaggcggccccctggacaaagactgacgctcaggtgcgaaagcgtggggagcaaacaggattagataccctggtagtccacgccgtaaacgatgtcgacttggaggttgttcccttgaggagtggcttccggagctaacgcgttaagtcgaccgcctggggagtacggccgcaaggttaaaactcaaatgaattgacgggggcccgcacaagcggtggagcatgtggtttaattcgatgcaacgcgaagaaccttacctggccttgacatccacggaatttggcagagatgccttagtgccttcgggaaccgtgagacaggtgctgcatggctgtcgtcagctcgtgttgtgaaatgttgggttaagtcccgcaacgagcgcaacccttatcctttgttgccagcgattcggtcgggaactcaaaggagactgccggtgataaaccggaggaaggtggggatgacgtcaagtcatcatggcccttacggccagggctacacacgtgctacaatggcgtatacaaagagaagcgaactcgcgagagcaagcggacctcataaagtacgtcgtagtccggatcggagtctgcaactcgactccgtgaagtcggaatcgctagtaatcgtggatcagaatgccacggtgaatacgttcccgggccttgtacacaccgcccgtcacaccatgggagtgggttgcaaaagaagtaggtagcttaaccttcgggagggcgcttaccactttgtgattcatgactggggtg

SEQ ID NO: 3127 - DNA, 1461 bp, unidentified
  source 1..1461: mol_type = unassigned DNA; note = Sideroxydans lithotrophicus
attgaacgctggcggcatgctttacacatgcaagtcgaacggcagcacggtgcttgcacctggtggcgagtggcgaacgggtgagtaatgtatcggaacatgtccggaagtgggggataacgtagcgaaagttacgctaataccgcatatgccctgagggggaaaggtggggatcgcaagacctatcgctttcggagtggccgatatcagattagctagttggtgaggtaaaggctcaccaaggcgacgatctgtagctggtctgagaggacgaccagccacactgggactgagacacggcccagactcctacgggaggcagcagtggggaattttggacaatgggcgcaagcctgatccagccatgccgcgtgagtgaagaaggccttcgggttgtaaagctctttcagacggaaagaaatcgtgcaggccaataccctgtatggatgacggtaccgtcagaagaagcaccggctaactacgtgccagcagccgcggtaatacgtagggtgcgagcgttaatcggaattactgggcgtaaagcgtgcgcaggcggttttgtaagacaggtgtgaaatccccgggcttaacctgggaactgcatttgtgactgcaaggctagagtatggcagaggggggtagaattccacgtgtagcagtgaaatgcgtagagatgtggaggaataccgatggcgaaggcagccccctgggtcaatactgacgctcatgcacgaaagcgtggggagcaaacaggattagataccctggtagtccacgccctaaacgatgtcaactaggtgttgggggaggagacttccttagtaccgcagctaacgcgtgaagttgaccgcctggggagtacggccgcaaggttgaaactcaaaggaattgacggggacccgcacaagcggtggattatgtggattaattcgatgcaacgcgaaaaaccttacctacccttgacatgccgagaatcctgaagagatttgggagtgcccgaaagggaacttggacacaggtgctgcatggctgtcgtcagctcgtgtcgtgagatgttgggttaagtcccgcaacgagcgcaacccttgtcattaattgccatcattcagttgggcactttaatgagactgccggtgataaaccggaggaaggtggggatgacgtcaagtcctcatggcccttatgggtagggcttcacacgtaatacaatggtcggtacagagggttgccaacccgcgagggggagccaatctcagaaagccgatcgtagtccggattgttctctgcaactcgagagcatgaagtcggaatcgctagtaatcgcggatcagcatgtcgcggtgaatacgttcccgggtcttgtacacaccgcccgtcacaccatgggagcgggttctgccagaagtagctagtctaaccgcaaggaggacggttaccacggcagggttcgtgactggggtg

SEQ ID NO: 3128 - DNA, 1463 bp, unidentified
  source 1..1463: mol_type = unassigned DNA; note = Silicibacter pomeroyi
taacttgagagtttgatcctggctcagaacgaacgctggcggcaggcctaacacatgcaagtcgagcgcgcccttcggggtgagcggcggacgggttagtaacgcgtgggaacgtaccctttggtagggaatagccactggaaacggtgagtaataccctatgagcccttcgggggaaagatttatcgccaaaggatcggcccgcgttagattaggtagttggtggggtaatggcctaccaagcctacgatctatagctggttttagaggatgatcagcaacactgggactgagacacggcccagactcctacgggaggcagcagtggggaatcttggacaatgggggcaaccctgatccagccatgccgcgtgagtgaagaaggccttagggtcgtaaagctctttcgcctgtgaagataatgacggtagcaggtaaagaaaccccggctaactccgtgccagcagccgcggtaatacggagggggttagcgttgttcggaattactgggcgtaaagcgcgcgtaggcggaccagaaagttgggggtgaaatcccggggctcaaccccggaactgcctccaaaactcctggtcttgagttcgagagaggtgagtggaattccgagtgtagaggtgaaattcgtagatattcggaggaacaccagtggcgaaggcggctcactggctcgatactgacgctgaggtgcgaaagtgtggggagcaaacaggattagataccctggtagtccacaccgtaaacgatgaatgccagtcgtcgggtagcatgctgctcggtgacacacctaacggattaagcattccgcctggggagtacggccgcaaggttaaaactcaaaggaattgacgggggcccgcacaagcggtggagcatgtggtttaattcgaagcaacgcgcagaaccttaccaacccttgacatcctcggaccgtcccagagatgggtctttcacttcggtgaccgagtgacaggtgctgcatggctgtcgtcagctcgtgtcgtgagatgttcggttaagtccggcaacgagcgcaacccacacccttagttgccagcattcagttgggcactctaggggaactgcccgtgataagcgggaggaaggtgtggatgacgtcaagtcctcatggcccttacgggttgggctacacacgtgctacaatggcagtgacaatgggttaatcccaaaaaactgtctcagttcggattggggtctgcaactcgaccccatgaagtcggaatcgctagtaatcgcgtaacagcatgacgcggtgaatacgttcccgggccttgtacacaccgcccgtcacaccatgggagttgggtctacccgaagacggtgcgccaacctttcgaggaggcagctggccacggtaggctcagcgactggggtgaagtcgtaacaaggtagccgtaggggaacctgcggctggatcacctccttt

SEQ ID NO: 3129 - DNA, 1461 bp, Simiduia agarivorans
  source 1..1461: mol_type = unassigned DNA
attgaacgctggcggcaggcctaacacatgcaagtcgagcggtaacaggggtgcttgcacccgctgacgagcggcggacgggtgagtaacgcgtgggaatctgcctagtagtgggggacaacagttggaaacgactgctaataccgcatacgccctacgggggaaaggaggggatcttcggacctttcgctattagatgagcccgcgtcagattagctagttggtggggtaaaggcctaccaaggcgacgatctgtagctggtctgagaggatgatcagccacactggaactgagacacggtccagactcctacgggaggcagcagtggggaatattggacaatgggggcaaccctgatccagccatgccgcgtgtgtgaagaaggccttagggttgtaaagcactttcagcgaggaggaaaggttgtaggttaataccctgcagctgtgacgttactcgcagaagaagcaccggctaactccgtgccagcagccgcggtaatacggagggtgcaagcgttaatcggaattactgggcgtaaagcgcgcgtaggcggctacctaagccagatgtgaaagccccgggctcaacctgggaactgcatttggaactgggtggctagagtgcagaagaggatagtggaattccaggtgtagcggtgaaatgcgtagatatctggaggaacatcagtggcgaaggcgactgtctggtctgacactgacgctgaggtgcgaaagcgtggggagcaaacaggattagataccctggtagtccacgccgtaaacgatgtctactagttgtcggggtccttgagactttggtaacgcagctaacgcactaagtagaccgcctggggagtacggtcgcaagattaaaactcaaatgaattgacgggggcccgcacaagcggtggagcatgtggtttaattcgaagcaacgcgaagaaccttacctggccttgacatgctgagaactttccagagatggattggtgccttcgggaactcagacacaggtgctgcatggctgtcgtcagctcgtgtcgtgagatgttgggttaagtcccgtaacgagcgcaacccttgtccttagttgccagcacgtaatggtgggaactctaaggagactgccggtgacaaaccggaggaaggtggggatgacgtcaagtcatcatggcccttacggccagggctacacacgtgctacaatggggcgtacaaagggttgccaagccgcgaggtggagctaatcccgtaaaacgtctcgtagtccggattgaagtctgcaactcgacttcatgaagtcggaatcgctagtaatcgtgaatcagaatgtcacggtgaatacgttcccgggccttgtacacaccgcccgtcacaccatgggagtgggttgcaccagaagtagctagtctaaccttcgggaggacggttaccacggtgtgattcatgactggggtg

SEQ ID NO: 3130 - DNA, 1465 bp, Simonsiella muelleri
  source 1..1465: mol_type = unassigned DNA
attgaacgctggcggcatgctttacacatgcaagtcggacggcagcggggtagtgcttgcattactgccggcgagtggcgaacgggtgagtataatattggaacgtaccgagtaatgggggataactatccgaaaggatggctaataccgcatacgtcctgagggagaaagcgggggacaggcaactgcctcgcgttatttgagcggccaatatcggattagctagttggtggggtaaaggcttaccaaggcgacgatccgtagcgggtctgagaggatgatccgccacactgggactgagacacggcccagactcctacgggaggcagcagtggggaattttggacaatggggggaaccctgatccagccatgtcgcgtgtatgaagaaggccttagggttgtaaagtacttttgttagggaagaaaaggcatttgctaatatcagatgctgatgacggtacctaaagaataagcaccggctaactacgtgccagcagccgcggtaatacgtagggtgcgagcgttaatcggaattactgggcgtaaagcgagcgcagacggttacttaagcaagatgtgaaatccccgagctcaacttgggaactgcgttttgaactgggtagctagagtgtgtcagaggggggtagaattccacgtgtagcagtgaaatgcgtagagatgtggaggaataccgatggcgaaggcagccccctgggatagcactgacgttcatgctcgaaagcgtgggtagcaaacaggattagataccctggtagtccacgccctaaacgatgtcaattagctgttggggcactagatgccttagtagcgaagctaacgcgtgaaattgaccgcctggggagtacggtcgcaagattaaaactcaaaggaattgacggggacccgcacaagcggtggatgatgtggattaattcgatgcaacgcgaagaaccttacctggtcttgacatgtacggaatctctcagagacgggagagtgccttcgggagccgtaacacaggtgctgcatggctgtcgtcagctcgtgtcgtgagatgttgggttaagtcccgcaacgagcgcaacccttgtcattagttgccatcatttggttgggcactctaatgagactgccggtgacaaaccggaggaaggtggggatgacgtcaagtcctcatggcccttatgaccagggcttcacacgtcatacaatggtcggtacagagggtagccaagccgcgaggtggagccaatcccaaaaaaccgatcgtagtccggattgcactctgcaactcgagtgcatgaagtcggaatcgctagtaatcgcaggtcagcatactgcggtgaatacgttcccgggtcttgtacacaccgcccgtcacaccatgggagtgggggataccagaagtaggtagaataaccgcgaggagttcgcttaccacggtatgcttcatgactggggtg

SEQ ID NO: 3131 - DNA, 1455 bp, Simplicispira metamorpha
  source 1..1455: mol_type = unassigned DNA
attgaacgctggcggcatgccttacacatgcaagtcgaacggtaacaggtcttcggatgctgacgagtggcgaacgggtgagtaatacatcggaacgtgcccgatcgtgggggataacgcagcgaaagctgtgctaataccgcatacgatctacggatgaaagcgggggatcgcaagacctcgcgcggacggagcggccgatggcagattaggtagttggtgggataaaagcttaccaagccgacgatctgtagctggtctgagaggacgaccagccacactgggactgagacacggcccagactcctacgggaggcagcagtggggaattttggacaatgggcgaaagcctgatccagcaatgccgcgtgcaggatgaaggccttcgggttgtaaactgcttttgtacggaacgaaaagactctggttaatacctggggttcatgacggtaccgtaagaataagcaccggctaactacgtgccagcagccgcggtaatacgtagggtgcaagcgttaatcggaattactgggcgtaaagcgtgcgcaggcggtgatgtaagacagatgtgaaatccccgggctcaacctgggaactgcattagtgactgcatcgctggagtgcggcagagggggatggaattccgcgtgtagcagtgaaatgcgtagatatgcggaggaacaccgatggcgaaggcaatcccctgggcctgcactgacgctcatgcacgaaagcgtggggagcaaacaggattagataccctggtagtccacgccctaaactatgtcaactggttgttgggaattcactttctcagtaacgaagctaacgcgtgaagttgaccgcctggggagtacggccgcaaggttgaaactcaaaggaattgacggggacccgcacaagcggtggatgatgtggtttaattcgatgcaacgcgaaaaaccttacccacctttgacatgtacggaagatcgcagagacgcgattgtgctcgaaagagagccgtaacacaggtgctgcatggctgtcgtcagctcgtgtcgtgagatgttgggttaagtcccgcaacgagcgcaacccttgccattagttgctacatttagttgagcactctaatgggactgccggtgacaaaccggaggaaggtggggatgacgtcaagtcctcatggcccttataggtggggctacacacgtcatacaatggctggtacaaagggttgccaacccgcgagggggagctaatcccataaagccagtcgtagtccggatcgcagtctgcaactcgactgcgtgaagtcggaatcgctagtaatcgtggatcagaatgtcacggtgaatacgttcccgggtcttgtacacaccgcccgtcacaccatgggagcgggttctgccagaagtagttagcctaaccgcaaggagggcgattaccacggcagggttcgtgactggggtg

SEQ ID NO: 3132 - DNA, 1436 bp, Singulisphaera acidiphila
  source 1..1436: mol_type = unassigned DNA
aatgaacgttggcggcgtggattaggcatgcaagtcgaacgggccgcaaggccagtggcgcaagggtgagtaaggcgacggtaaccaaccccaggattgggtatagccgcgggaaaccgcgggtaatccccagcgacgcaacgacaccggcatcggtgttttgccaaagcttcggcgtcgtgggacgggctgtcgtggtattagcttgttggcggggtaatggcccaccaaggctgtgatgcctaccgggcgtgcgagcgtggcccggcacactgggactgagacactgcccagactcctacgggaggctgcagtcgagaatcttcggcaatgggcgcaagcctgaccgagcgacgccgcgtggaggatgaaggccttcgggttgtaaactcctgtcgagggggaaaaagggctgaaaagccttgattgatccctggaggaagcacgggctaagttcgtgccagcagccgcggtaagacgaaccgtgcgaacgttattcggaatcattgggcttaaagcgcgtgtaggcggattcgtgcgtctgtcgctgaaatcccccggctcaaccggggaacgggcgtggatacgacgagtctggaggggcatagggggacctggaacttccggtggagcggtgaaatgcgttgagatcggaaggaacgcccgtggcgaaagcgaggtcctggatgcctactgacgctgagacgcgaaagccaggggagcgaacgggattagataccccggtagtcctggccgtaaacgatgggtactggatagggggctcgccgatgggctccctgtcgtagggaaaccgtgaagtaccccgcctggggagtatggtcgcaaggctgaaactcaaaggaattgacgggggctcacacaagcggtggagtatgtggcttaattcgaggctacgcgcaaaaccttatcccaggcttgacatgcacggattagccggcggaaacgtcggtgaggccgcaaggaacaacgtgcacaggtgctgcatggctgtcgtcagctcgtgccgtgaggtgttgggttaagtcccctaacgagcgaaacccctgtgtctagttgccagcgggtaaagccgggaactctagacagaccgccggcgttaagccggaggaaggcggggatgacgtcaagtcctcatggcccttatgcttggggctgcacacgtactacaatggggcggacagagcgttgctaggctgcaaagtcatgctaatcgcaaaaaccgttcctcagttcggattgcgggctgcaacccgcccgcatgaagctggaatcgctagtaatcgcggatcagcatgccgcggtgaatgtgttcctgagccttgtacacaccgcccgtcaagccaccaaagcggggggcatccgaagtcgccggagccgcaaggcaggcgccgaagatgaaacccgtgatggggact

SEQ ID NO: 3133 - DNA, 1491 bp, Sinobaca qinghaiensis
  source 1..1491: mol_type = unassigned DNA
gacgaacgctggcggcgtgcctaatacatgcaagtcgagcgcatgcacccggcggacctcttcggagggaaaccggggaattgagcggcggacgggtgagtaacacgtgggcaacctgccctctagacggggataactccgggaaaccggagctaatacccgataatcaagcagatcacctgatctgcttgtaaaagcatggccttcgggccatgcactggaggatgggcccgcggcgtattagctagttggagaggtaagggctccccaaggcgacgatacgtagccgacctgagagggtgatcggccacactgggactgagacacggcccagactcctacgggagcrascartagggawtcatccgcaatggacgaaagtckgacggtgcaacgccgcgtgagtgatgaaggtttycggatcgtwaagctytgttgtgagggaagaacaaggggcgttttaacagccgcccccttgacggtacctcaccagaaarscccggctaactacgtgccagcagccgcggtaatacgtagggggcaagcgttgtccggaattattgggcgtaaagcgcgcgcaggcggttccttaagtctgatgtgaaagcccacggctcaaccgtggagggtcattggaaactggggaactggaatgcagaagaggagagtggaattccacgtgtagcggtgaaatgcgtagatatgtggaggaacaccagtggcgaaggcggctctctggtctgttattgacgctgaggcgcgaaagcgtggggagcaaacaggattagataccctggtagtccacgccgtaaacgatgagtgctaggtgttaggggtttcgatgcccttagtgccgaagctaacgcattaagcactccgcctggggagtacggccgcaaggctgaaactcaaaagaattgacgggggcccgcacaagcggtggagcatgtggtttaattcgacgcaacgcgaagaaccttaccaggtcttgacatcttttgctacttctggagacagaaggttccccttcgggggacaaaatgacaggtggtgcatggttgtcgtcagctcgtgtcgtgagatgttgggttaagtcccgcaacgagcgcaacccttaatcttagttgccagcatttggttgggcactctaaggtgactgccggtgacaaaccggaggaaggtggggacgacgtcaaatcatcatgccccttatgacctgggctacacacgtgctacaatggatggtacagagggatgcgaaaccgcgaggtggagccaatctcgcaaagccattctcagttcggattgcaggctgcaactcgcctgcatgaagccggaatcgctagtaatcgtggatcagcatgccacggtgaatacgttcccgggccttgtacacaccgcccgtcacaccacgagagtttgcaacacccgaagtcggtgaggtaaccctttgggagccagccgccgaaggtggggcagatgattggggtg

SEQ ID NO: 3134 - DNA, 1437 bp, Sinorhizobium americanum
  source 1..1437: mol_type = unassigned DNA
aacgaacgctggcggcaggcttaacacatgcaagtcgagcgccccgcaaggggagcggcagacgggtgagtaacgcgtgggaatctacccttttctacggaataacgcagggaaacttgtgctaataccgtatgagcccttcgggggaaagatttatcgggaaaggatgagcccgcgttggattagctagttggtggggtaaaggcctaccaaggcgacgatccatagctggtctgagaggatgatcagccacattgggactgagacacggcccaaactcctacgggaggcagcagtggggaatattggacaatgggcgcaagcctgatccagccatgccgcgtgagtgatgaaggccctagggttgtaaagctctttcaccggtgaagataatgacggtaaccggagaagaagccccggctaacttcgtgccagcagccgcggtaatacgaagggggctagcgttgttcggaattactgggcgtaaagcgcacgtaggcggacatttaagtcaggggtgaaatcccggggctcaaccccggaactgcctttgatactgggtgtctagagtccggaagaggtgagtggaattccgagtgtagaggtgaaattcgtagatattcggaggaacaccagtggcgaaggcggctcactggtccggtactgacgctgaggtgcgaaagcgtggggagcaaacaggattagataccctggtagtccacgccgtaaacgatgaatgttagccgtcgggcagtttactgttcggtggcgcagctaacgcattaaacattccgcctggggagtacggtcgcaagattaaaactcaaaggaattgacgggggcccgcacaagcggtggagcatgtggtttaattcgaagcaacgcgcagaaccttaccagcccttgacatcccgatcgcggatacgagagatcgtatccttcagttcggctggatcggagacaggtgctgcatggctgtcgtcagctcgtgtcgtgagatgttgggttaagtcccgcaacgagcgcaaccctcgcccttagttgccagcatttagttgggcactctaaggggactgccggtgataagccgagaggaaggtggggatgacgtcaagtcctcatggcccttacgggctgggctacacacgtgctacaatggtggtgacagtgggcagcgagaccgcgaggtcgagctaatctccaaaagccatctcagttcggattgcactctgcaactcgagtgcatgaagttggaatcgctagtaatcgcagatcagcatgctgcggtgaatacgttcccgggccttgtacacaccgcccgtcacaccatgggagttggttctacccgaaggtagtgcgctaaccgcaaggaggcagctaaccacggtagggtcagcgactggggtgaagtcgtaacaaggtagccgtaggggaacc

SEQ ID NO: 3135 - DNA, 1481 bp, unidentified
  source 1..1481: mol_type = unassigned DNA; note = Sinorhizobium fredii
  misc_difference 77..79: note = n is a, c, g, or t
aacttgagagtttgatcctggctcagaacgaacgctggcggcaggcttaacacatgcaagtcgagcgccccgcaagnnnagcggcagacgggtgagtaacgcgtgggaatctacccttttctacggaataacgcagggaaacttgtgctaataccgtatgagcccttcgggggaaagatttatcgggaaaggatgagcccgcgttggattagctagttggtggggtaaaggcctaccaaggcgacgatccatagctggtctgagaggatgatcagccacattgggactgagacacggcccaaactcctacgggaggcagcagtggggaatattggacaatgggcgcaagcctgatccagccatgccgcgtgagtgatgaaggccctagggttgtaaagctctttcaccggtgaagataatgacggtaaccggagaagaagccccggctaacttcgtgccagcagccgcggtaatacgaagggggctagcgttgttcggaattactgggcgtaaagcgcacgtaggcggacatttaagtcaggggtgaaatcccggggctcaaccccggaactgcctttgatactgggtgtctagagtccggaagaggtgagtggaattccgagtgtagaggtgaaattcgtagatattcggaggaacaccagtggcgaaggcggctcactggtccggtactgacgctgaggtgcgaaagcgtggggagcaaacaggattagataccctggtagtccacgccgtaaacgatgaatgttagccgtcgggcagtttactgttcggtggcgcacgtaacgcattaaacattccgcctggggagtacggtcgcaagattaaaactcaaaggaattgacgggggcccgcacaagcggtggagcatgtggtttaattcgaagcaacgcgcagaaccttaccagcccttgacatcccgatcgcggatacgagagatcgtatccttcagttcggctggatcggagacaggtgctgcatggctgtcgtcagctcgtgtcgtgagatgttgggttaagtcccgcaacgagcgcaaccctcgcccttagttgccagcatttagttgggcactctaaggggactgccggtgataagccgagaggaaggtggggatgacgtcaagtcctcatggcccttacgggctgggctacacacgtgctacaatggtggtgacagtgggcagcgagaccgcgaggtcgagctaatctccaaaagccatctcagttcggattgcactctgcaactcgagtgcatgaagttggaatcgctagtaatcgcagatcagcatgctgcggtgaatacgttcccgggccttgtacacaccgcccgtcacaccatgggagttggttctacccgaaggtagtgcgctaaccgcaaggaggcagctaaccacggtagggtcagcgactggggtgaagtcgtaacaaggtagccgtaggggaacctgcggctggatcacctcc

SEQ ID NO: 3136 - DNA, 1410 bp, unidentified
  source 1..1410: mol_type = unassigned DNA; note = Sinorhizobium medicae
aacgaacgctggcggcaggcttaacacatgcaagtcgagcgccccgcaaggggagcggcagacgggtgagtaacgcgtgggaatctacccttttctacggaataacgcagggaaacttgtgctaataccgtataagcccttcgggggaaagatttatcgggaaaggatgagcccgcgttggattagctagttggtggggtaaaggcctaccaaggcgacgatccatagctggtctgagaggatgatcagccacattgggactgagacacggcccaaactcctacgggaggcagcagtggggaatattggacaatgggcgcaagcctgatccagccatgccgcgtgagtgatgaaggccctagggttgtaaagctctttcaccggtgaagataatgacggtaaccggagaagaagccccggctaacttcgtgccagcagccgcggtaatacgaagggggctagcgttgttcggaattactgggcgtaaagcgcacgtaggcggattgttaagtgaggggtgaaatcccagggctcaaccctggaactgcctttcatactggcaatctagagtccagaagaggtgagtggaattccgagtgtagaggtgaaattcgtagatattcggaggaacaccagtggcgaaggcggctcactggtctggtactgacgctgaggtgcgaaagcgtggggagcaaacaggattagataccctggtagtccacgccgtaaacgatgaatgttagccgtcgggcagtttactgttcggtggcgcagctaacgcattaaacattccgcctggggagtacggtcgcaagattaaaactcaaaggaattgacgggggcccgcacaagcggtggagcatgtggtttaattcgaagcaacgcgcagaaccttaccagcccttgacatcccgatcgcggataggagagatcctatccttcagttcggctggatcggagacaggtgctgcatggctgtcgtcagctcgtgtcgtgagatgttgggttaagtcccgcaacgagcgcaaccctcgcccttagttgccagcattcagttgggcactctaaggggactgccggtgataagccgagaggaaggtggggatgacgtcaagtcctcatggcccttacgggctgggctacacacgtgctacaatggtggtgacagtgggcagcgagaccgcgaggtcgagctaatctccaaaagccatctcagttcggattgcactctgcaactcgagtgcatgaagttggaatcgctagtaatcgcagatcagcatgctgcggtgaatacgttcccgggccttgtacacaccgcccgtcacaccatgggagttggttctacccgaaggtagtgcgctaaccgcaaggaggcagctaaccacggtagggtcagcgactggggtgaag

SEQ ID NO: 3137 - DNA, 1437 bp, unidentified
  source 1..1437: mol_type = unassigned DNA; note = Sinorhizobium meliloti
aacgaacgctggcggcaggcttaacacatgcaagtcgagcgccccgcaaggggagcggcagacgggtgagtaacgcgtgggaatctacccttttctacggaataacgcagggaaacttgtgctaataccgtatgagcccttcgggggaaagatttatcgggaaaggatgagcccgcgttggattagctagttggtggggtaaaggcctaccaaggcgacgatccatagctggtctgagaggatgatcagccacattgggactgagacacggcccaaactcctacgggaggcagcagtggggaatattggacaatgggcgcaagcctgatccagccatgccgcgtgagtgatgaaggccctagggttgtaaagctctttcaccggtgaagataatgacggtaaccggagaagaagccccggctaacttcgtgccagcagccgcggtaatacgaagggggctagcgttgttcggaattactgggcgtaaagcgcacgtaggcggattgttaagtgaggggtgaaatcccagggctcaaccctggaactgcctttcatactggcaatctagagtccagaagaggtgagtggaattccgagtgtagaggtgaaattcgtagatattcggaggaacaccagtggcgaaggcggctcactggtctggaactgacgctgaggtgcgaaagcgtggggagcaaacaggattagataccctggtagtccacgccgtaaacgatgaatgttagccgtcgggcagtttactgttcggtggcgcagctaacgcattaaacattccgcctggggagtacggtcgcaagattaaaactcaaaggaattgacgggggcccgcacaagcggtggagcatgtggtttaattcgaagcaacgcgcagaaccttaccagcccttgacatcccgatcgcggatacgagagatcgtatccttcagttcggctggatcggagacaggtgctgcatggctgtcgtcagctcgtgtcgtgagatgttgggttaagtcccgcaacgagcgcaaccctcgcccttagttgccagcattcagttgggcactctaaggggactgccggtgataagccgagaggaaggtggggatgacgtcaagtcctcatggcccttacgggctgggctacacacgtgctacaatggtggtgacagtgggcagcgagaccgcgaggtcgagctaatctccaaaagccatctcagttcggattgcactctgcaactcgagtgcatgaagttggaatcgctagtaatcgcagatcagcatgctgcggtgaatacgttcccgggccttgtacacaccgcccgtcacaccatgggagttggttctacccgaaggtagtgcgctaaccgcaaggaggcagctaaccacggtagggtcagcgactggggtgaagtcgtaacaaggtagccgtaggggaacc

SEQ ID NO: 3138 - DNA, 1410 bp, unidentified
  source 1..1410: mol_type = unassigned DNA; note = Sinorhizobium saheli
aacgaacgctggcggcaggcttaacacatgcaagtcgagcgcgtggcaatacgagcggcagacgggtgagtaacgcgtgggaatctacccttttctacggaataacgcagggaaacttgtgctaataccgtatgagcccttcgggggaaagatttatcgggaaaggatgagcccgcgttggattagctagttggtggggtaaaggcctaccaaggcgacgatccatagctggtctgagaggatgatcagccacattgggactgagacacggcccaaactcctacgggaggcagcagtggggaatattggacaatgggcgcaagcctgatccagccatgccgcgtgagtgatgaaggccctagggttgtaaagctctttcaccggtgaagataatgacggtaaccggagaagaagccccggctaacttcgtgccagcagccgcggtaatacgaagggggctagcgttgttcggaattactgggcgtaaagcgcacgtaggcggacatttaagtcaggggtgaaatcccggggctcaaccccggaactgcctttgatactgggtgtctagagtccggaagaggtgagtggaattccgagtgtagaggtgaaattcgtagatattcggaggaacaccagtggcgaaggcggctcactggtccggaactgacgctgaggtgcgaaagcgtggggagcaaacaggattagataccctggtagtccacgccgtaaacgatgaatgttagccgtcgggcagtttactgttcggtggcgcagctaacgcattaaacattccgcctggggagtacggtcgcaagattaaaactcaaaggaattgacgggggcccgcacaagcggtggagcatgtggtttaattcgaagcaacgcgcagaaccttaccagcccttgacatcccggtcgcggatacgagagatcgtattcttcagttcggctggaccggagacaggtgctgcatggctgtcgtcagctcgtgtcgtgagatgttgggttaagtcccgcaacgagcgcaaccctcgcccttagttgccagcatttggttgggcactctaaggggactgccggtgataagccgagaggaaggtggggatgacgtcaagtcctcatggcccttacgggctgggctacacacgtgctacaatggtggtgacagtgggcagcgagaccgcgaggtcgagctaatctccaaaagccatctcagttcggattgcactctgcaactcgagtgcatgaagttggaatcgctagtaatcgcagatcagcatgctgcggtgaatacgttcccgggccttgtacacaccgcccgtcacaccatgggagttggttctacccgaaggtagtgcgctaaccgcaaggaggcagctaaccacggtagggtcagcgactggggtgaag

SEQ ID NO: 3139 - DNA, 1355 bp, Skermanella aerolata
  source 1..1355: mol_type = unassigned DNA
tgcaagtcgaacgagggcttcggccctagtggcgcacgggtgagtaacgcgtgggaacctgccctgtggtacggaataactccgggaaactggagctaataccgtatgtgtcctgcgggacaaagatttatcgccatgggatgggcccgcgtaggattagcttgttggtggggtaacggcctaccaaggcaacgatccttagctggtctgagaggatgatcagccacactgggactgagacacggcccagactcctacgggaggcagcagtggggaatattggacaatgggcgcaagcctgatccagcaatgccgcgtgagtgatgaaggccttcgggttgtaaagctctttcgcacgcgacgatgatgacggtagcgtgagaagaagccccggctaacttcgtgccagcagccgcggtaatacgaagggggctagcgttgttcggaattactgggcgtaaagggcgcgtaggcggtacttcaagtcaggcgtgaaagccccgggctcaacctgggaaccgcgcttgagactggagaactagagttcgggagaggatggtggaattcccagtgtagaggtgaaattcgtagatattgggaagaacaccgatggcgaaggcagccatctggaccgacactgacgctgaggcgcgaaagcgtggggagcaaacaggattagataccctggtagtccacgccgtaaacgatgagtgctagacgttggggcccttagggcttcggtgtcgcagctaacgcattaagcactccgcctggggagtacggccgcaaggttaaaactcaaaggaattgacgggggcccgcacaagcggtggagcatgtggtttaattcgaagcaacgcgcagaaccttaccagcccttgacatgggcgtcgcgggtccagagatggacctttcggttcggccggacgccgcacaggtgctgcatggctgtcgtcagctcgtgtcgtgagatgttgggttaagtcccgcaacgagcgcaacccccatcttcagttgccatcaggtaaagmtgggcactctggagaaaccgccggtgacaagccggaggaaggcggggatgacgtcaagtcctcatggcccttatgggctgggctacacacgtgctacaatggtggtgacagtgggcagcgagatcgcgagatcgagccaatctccaaaagccatctcagttcggatcgcactctgcaactcgggtgcgtgaagttggaatcgctagtaatcgcggatcagcacgccgcggtgaatacgttcccgggccttgtacacaccgcccgtcacaccatgggagttggttttacccgaagccggtgggctaaccgcaaggaggcagccga

SEQ ID NO: 3140 - DNA, 1408 bp, Skermanella stibiiresistens
  source 1..1408: mol_type = unassigned DNA
aacgaacgctggcggcatgcctaacacatgcaagtcgaacggtgccttcgggcatagtggcgcacgggtgagtaacgcgtgggaacctgccctgtggtacggaacaactccgggaaactggagctaataccgtatgtgtcctgcgggacaaagattcatcgccatgggatgggcccgcgtaggattagctagttggcggggtaacggcccaccaaggctacgatccttagctggtctgagaggatgatcagccacactgggactgagacacggcccagactcctacgggaggcagcagtggggaatattggacaatgggcgcaagcctgatccagcaatgccgcgtgagtgatgaaggccttcgggttgtaaagctctttcgcacgcgacgatgatgacggtagcgtgagaagaagccccggctgacttcgtgccagcagccgcggtaatacgaagggggctagcgttgttcggaattactgggcgtaaagggcgcgtaggcggtgtgtcaagtcaggcgtgaaagccccgggctcaacctgggaaccgcgcttgagactggcacgctagagttcgggagaggatggtggaattcccagtgtagaggtgaaattcgtagatattgggaagaacaccgatggcgaaggcagccatctggaccgacactgacgctgaggcgcgaaagcgtggggagcaaacaggatagataccctggtagtccacgccgtaaacgatgagtgctagacgtcggggtccctagggcttcggtgtcgcagctaacgcgttaagcactccgcctggggagtacggccgcaaggttaaaactcaaaggaattgacgggggcccgcacaagcggtggagcatgtggtttaattcgaagcaacgcgcagaaccttaccagcccttgacatgggcgtcgcgggtccagagatgggcctttcggttcggccggacgccacacaggtgctgcatggctgtcgtcagctcgtgtcgtgagatgttgggttaagtcccgcaacgagcgcaacccccatcctcagttgccagcatgtgatgatgggcactctggggaaaccgccggtgacaagccggaggaaggcggggatgacgacaagtcctcatggccctcatgggctgggccacacacgtgctacgatggtggtgacagtgggcagcgagatcgcgagatcgagccaatctccaaaagccatctcagttcggatcgcactctgcaactcgggtgcgtgaagttggaatcgctagtaatcgcggatcagcacgccgcggtgaatacgttcccgggccttgtacacaccgcccgtcacaccatgggagttggttttacccgaagccggtgcgctaaccgcaaggaggcagccgaccacggtcaggtcagcgactggggtg

SEQ ID NO: 3141 - DNA, 1461 bp, unidentified
  source 1..1461: mol_type = unassigned DNA; note = Snodgrassella alvi
attgaacgctggcggcatgctttacacatgcaagtcgaacggcagcacggagagcttgctctctggtggcgagtggcgaacgggtgagtaatgcatcggaacgtaccgagtaatgggggataactgtccgaaaggatggctaataccgcatacgccctgagggggaaagcgggggatcgaaagacctcgcgttatttgagcggccgatgttggattagctagttggtggggtaaaggcctaccaaggcgacgatccatagcgggtctgagaggatgatccgccacattgggactgagacacggcccaaactcctacgggaggcagcagtggggaattttggacaatggggggaaccctgatccagccatgccgcgtgtctgaagaaggccttcgggttgtaaaggacttttgttagggaagaaaagccgggtgttaataccacctggtgctgacggtacctaaagaataagcaccggctaactacgtgccagcagccgcggtaatacgtagggtgcgagcgttaatcggaattactgggcgtaaagcgagcgcagacggttaattaagtcagatgtgaaatccccgagctcaacttgggacgtgcatttgaaactggttaactagagtgtgtcagagggaggtagaattccacgtgtagcagtgaaatgcgtagagatgtggaggaataccgatggcgaaggcagcctcctgggataacactgacgttcatgctcgaaagcgtgggtagcaaacaggattagataccctggtagtccacgccctaaacgatgacaattagctgttgggacactagatgtcttagtagcgaagctaacgcgtgaaattgtccgcctggggagtacggtcgcaagattaaaactcaaaggaattgacggggacccgcacaagcggtggatgatgtggattaattcgatgcaacgcgaagaaccttacctggtcttgacatgtacggaatctcttagagataggagagtgccttcgggaaccgtaacacaggtgctgcatggctgtcgtcagctcgtgtcgtgagatgttgggttaagtcccgcaacgagcgcaacccttgtcattagttgccatcattaagttgggcactctaatgagactgccggtgacaaaccggaggaaggtggggatgacgtcaagtcctcatggcccttatgaccagggcttcacacgtcatacaatggtcggtacagagggtagcgaagccgcgaggtgaagccaatctcagaaagccgatcgtagtccggattgcactctgcaactcgagtgcatgaagtcggaatcgctagtaatcgcaggtcagcatactgcggtgaatacgttcccgggtcttgtacacaccgcccgtcacaccatgggagtgggggataccagaattgggtagactaaccgcaaggaggtcgcttaacacggtatgcttcatgactggggtg

SEQ ID NO: 3142 - DNA, 1464 bp, Sodalis glossinidius
  source 1..1464: mol_type = unassigned DNA
attgaacgctggcggcaggcctaacacatgcaagtcgagcggcagcggaaagaagcttgcttctttgccggcgagcggcggacgggtgagtaatgtctggggatctgcccgatggagggggataactactggaaacggtagctaataccgcataacgtcgcaagactaaagtgggggaccttcgggcctcacaccatcggatgaacccagatgggattagctagtaggtggggtaatggctcacctaggcgacgatccctagctggtctgagaggatgaccagccacactggaactgagacacggtccagactcctacgggaggcagcagtggggaatattgcacaatgggggaaaccctgatgcagccatgccgcgtgtgtgaagaaggccttcgggttgtaaagcactttcagcggggaagaaggcgttagcgttaacagcgctatcgattgacgttacctgcagaagaagcaccggctaactccgtgccagcagccgcggtaatacggagggtgcaagcgttaatcggaattactgggcgtaaagcgtacgcaggcggtctgttaagtcagatgtgaaatccccgggcttaacctgggaactgcatttgaaactggcaggctagagtctcgtagaggggggtagaattccaggtgtagcggtgaaatgcgtagagatctggaggaataccggtggcgaaggcggccccctggacgaagactgacgctcaggtacgaaagcgtggggagcaaacaggattagataccctggtagtccacgctgtaaacgatgtcgatttgaaggttgtggccttgagctgtggctttcggagctaacgcgttaaatcgaccgcctggggagtacggccgcaaggttaaaactcaaatgaattgacgggggcccgcacaagcggtggagcatgtggtttaattcgatgcaacgcgaagaaccttacctactcttgacatccagagaacttggcagagatgccttggtgccttcgggagctctgagacaggtgctgcatggctgtcgtcagctcgtgttgtgaaatgttgggttaagtcccgcaacgagcgcaacccttatcctttgttgccagcgatttggtcgggaactcaaaggagactgccggtgataaaccggaggaaggtggggatgacgtcaagtcatcatggcccttacgagtagggctacacacgtgctacaatggcgcatacaaagagaagcgatctcgcgagagtcagcggacctcacaaagtgcgtcgtagtccggattggagtctgcaactcgactccatgaagtcggaatcgctagtaatcgtggatcagaatgccacggtgaatacgttcctgggccttgtacacaccgcccgtcacaccatgggagtgggttgcaaaagaagtaggtagcttaaccttcgggagggcgcttaccactttgtgattcatgactggggtg

SEQ ID NO: 3143 - DNA, 1464 bp, unidentified
  source 1..1464: mol_type = unassigned DNA; note = Sodalis praecaptivus
attgaacgctggcggcaggcctaacacatgcaagtcgagcggcagcggaaagaagcttgcttctttgccggcgagcggcggacgggtgagtaatgtctggggatctgcccgatggagggggataactactggaaacggtagctaataccgcataacgtcgcaagaccaaagtgggggaccttcgggcctcacaccatcggatgaacccagatgggattagctagtaggtggggtaatggctcacctaggcgacgatccctagctggtctgagaggatgaccagccacactggaactgagacacggtccagactcctacgggaggcagcagtggggaatattgcacaatgggggaaaccctgatgcagccatgccgcgtgtgtgaagaaggccttcgggttgtaaagcactttcagcggggaggaaggcgatggcgtaaatagcgccatcgattgacgttacccgcagaagaagcaccggctaactccgtgccagcagccgcggtaatacggagggtgcgagcgttaatcggaattactgggcgtaaagcgtacgcaggcggtctgttaagtcagatgtgaaatccccgggctcaacctgggaactgcatttgaaactggcaggctagagtctcgtagaggggggtagaattccaggtgtagcggtgaaatgcgtagagatctggaggaataccggtggcgaaggcggccccctggacgaagactgacgctcaggtacgaaagcgtggggagcaaacaggattagataccctggtagtccacgctgtaaacgatgtcgatttgaaggttgtggccttgagccgtggctttcggagctaacgcgttaaatcgaccgcctggggagtacggccgcaaggttaaaactcaaatgaattgacgggggcccgcacaagcggtggagcatgtggtttaattcgatgcaacgcgaagaaccttacctactcttgacatccagagaacttggcagagatgccttggtgccttcgggagctctgagacaggtgctgcatggctgtcgtcagctcgtgttgtgaaatgttgggttaagtcccgcaacgagcgcaacccttatcctttgttgccagcgattcggtcgggaactcaaaggagactgccggtgataaaccggaggaaggtggggatgacgtcaagtcatcatggcccttacgagtagggctacacacgtgctacaatggcgcatacaaagagaagcgatctcgcgagagtcagcggacctcataaagtgcgtcgtagtccggattggagtctgcaactcgactccatgaagtcggaatcgctagtaatcgtggatcagaatgccacggtgaatacgttcccgggccttgtacacaccgcccgtcacaccatgggagtgggttgcaaaagaagtaggtagcttaaccttcgggagggcgcttaccactttgtgattcatgactggggtg

SEQ ID NO: 3144 - DNA, 1423 bp, unidentified
  source 1..1423: mol_type = unassigned DNA; note = Solibacter usitatus
aatcaacgctggcggcgcgcctaacacatgcaagtcgaacgagaaagtggagcaatccatgagtacagtggcgtacgggtgagtaacacgtgggtgatctacctcttagtgaggaataaccctgggaaaccggggctaataccgcataagcctgagaagggaaagcagcaatgcgctgagagaggagcccgcggccgattagctagttggtgaggtaagagcccaccaaggcagagatcggtagccggcctgagagggcacacggccacactggcactgaaacacgggccagactcctacgggaggcagcagtggggaatcttgcacaatgggggaaaccctgatgcagcgacgccgcgtgagcgatgaagcccttcggggtgtaaagctctttcgtcagggaagattatgacggtacctggagaagcagctgcggctaactacgtgccagcagccgcggtaatacgtaggcagcaagcgttgttcggagttactgggcgtaaagggtgtgtaggcggttctttaagtttggtgtgaaatctcccggctcaaccgggagggtgcgccgaatactgagggactagagtgtgggagaggaaagtggaattcctggtgtagcggtgaaatgcgtagatatcaggaggaacaccggtggtgtagacggctttctggaccataactgacgctgagacacgaaagcgtgggtagcaaacaggattagataccctggtagtccacgccctaaacgatgcatatttggtgtgggtcattcagttgatccgtgccggagctaacgcgttaaatatgccgcctggggagtacagtcgcaaggctgaaactcaaaggaattgacgggggcccgcacaagcggtggagcatgtggttcaattcgacgcaacgcgaagaaccttacctgggctcgaacggctggtcaacgccggtagaaataccggtaccccgcaagggggtccagtcgaggtgctgcatggctgtcgtcagctcgtgtcgtgagatgttgggttaagtcccgcaacgagcgcaacccttgtcctgtgttgccatcattcagttgggaactcgcaggagaccgccagcgataagctggaggaaggtggggatgacgtcaagtcctcatggcctttatgtccagggctacacacgtgctacaatggacggtacaaaccgcagcaaacccgcgagggggagccaatcggaaaaaaccgttctcagttcggattgcaggctgcaactcgcctgcatgaagctggaatcgctagtaatggcagatcagcacgctgccgtgaatacgttcccgggccttgtacacaccgcccgtcacatcacgaaagtggattgtactagaagtctgcaggctgacccgtaaggggggcagcggcccaaggtatgatccatgattggggtg

SEQ ID NO: 3145 - DNA, 1452 bp, Solimonas aquatica
  source 1..1452: mol_type = unassigned DNA
attgaacgctggcggcatgcctaacacatgcaagtcgcgcggggtgtagcaatacatctagcggcggacgggtgaggaacacataggaatttgcctttaggtgggggatagcccagggaaacttggagtaataccgcatgatgtcgagagaccaaagcaggggatcgcaagaccttgcgcctttagaggagcctatgtctgattagctagttggtagggtaatggcctaccaaggcgacgatcagtaactggtctgagaggacgatcagtcacaccggaactgagacacggtccggactcctacgggaggcagcagtggggaatattggacaatgggcgcaagcctgatccagcaatgccgcgtgtgtgaagaaggccttcgggttgtaaagcactttaggctgggaagaaaaagtcggagctaatatctccgaccttgacggtaccagaagaataagcaccggctaactctgtgccagcagccgcggtaatacagagggtgcaagcgttaatcggatttactgggcgtaaagcgtgtgtaggtggttattcaagtcggttgtgaaatccccgggctcaacctgggaactgcttccgagactgaaagactagagtacggtagagggcggtggaatttccggtgtagcggtgaaatgcgtagatatcggaaggaacatcaatggcgaaggcagccgcctgggcctgtactgacactgagacacgaaagcgtggggatcaaacaggattagataccctggtagtccacgccgtaaacgatgagaacttgacgtcggtttgctcagcaagtcggtgtcgcagctaacgcgataagttctccgcctggggagtacggccgcaaggttgaaactcaaaggaattgacgggggcccgcacaagcggtggagtatgtggtttaattcgatgcaacgcgaagaaccttacctgggcttgacatgctaggaatcctgcagagatgtgggagtgcccgcaagggaacctagacacaggtgctgcatggctgtcgtcagctcgtgtcgtgagatgttgggttaagtcccgcaacgagcgcaacccttgcccttagttgccaccatttagttgagcactctaaggggaccgccagtgacaaactggaggaaggtggggatgacgtcaagtcatcatggcccttatgcccagggctacacacgtactacaatggacagtacagagggtcgccaaaccgcaaggtggagctaatcccaaaaagctgttcgtagtccggatcgaggtctgcaactcgacctcgtgaagtcggaatcgctagtaatcgccgatcagcatttgcggcggtgaatacgttcccgggccttgtacacaccgcccgtcacaccatggaagtctgttgcaccagaagtaggtagtctaaccgcaaggggggcgcttaccacggtgtggccgatgactggggtg

SEQ ID NO: 3146 - DNA, 1430 bp, Sphaerobacter thermophilus
  source 1..1430: mol_type = unassigned DNA
gaacaacgctggcggcgtgcctaatgcatgcaagtcgtacgggagccgctttggcggtcgaccgtggcggacgggtgaggaacacgtgggtaacctgccccggcgcgggggataaccgcgggaaaccgtggctaataccccatgggctcggttgggggtgacctgatcgagcaaaggcggaagccgtgccgggaggggcctgcggcctatcagctagacggtggggtaatggcctaccgtggcgatgacgggtagctggtctgagaggacgatcagccacacggggactgagacacggccccgactcctacgggaggcagcagcaaggaattttccgcaatgggcgcaagcctgacggagcgacgccgcgtggaggatgacgcccttcggggtgtaaactccttttcggggggacgaaggcagtgacggtacccccggaagaagcaccggctaactacgtgccagcagccgcggtaagacgtagggtgcgagcgttgtccggagttactgggcgtaaagggcgcgtaggcggctgcccgcgtcgcacgtgaaagcccccggctcaaccggggagggtcgtgcgagacggggtggctagaggcagggagaggctggtggaattcccggtgtagcggtgaaatgcgtagagatcgggaggaacaccggtggcgaaggcggccagctggccctgacctgacgctgaggcgcgaaggcgcggggagcgaacgggattagataccccggtagtccgcgcagtaaacgctgtggactaggtgtgggaggtgttgaccccttccgtgccggcgctaacgcagtaagtccaccgcctggggagtacggccgcaaggctaaaactcaaaggaattgacgggggcccgcacaagcagcggagcgtgtggtttaattcgacgcaacgcgcagaaccttaccagggcttgacatccccggaacccctgggaaaccggggggtgcccttcggggagccgggagacaggtgctgcatggctgtcgtcagctcgtgtcgtgagatgttgggttaagtcccgcaacgagcgcaaccctcgtggctagttacggtggtgtctagccagactgccgggcacaacccggaggaagggggggatgacgtcaagtccgcatggccctgacgccctgggcgacacacacgctacaatggccgggacagcgggcggccaagcggcaacgcggagccaatccctcaaacccggtctcagttcggattgggggctgcaactcgcccccatgaaggcggagttgctagtaaccgcaggtcagccatactgcggtgaatatgttcccgggccttgtacacaccgcccgtcacgtcacgaaagccggcaacacctgaagccggtgggccaacccgatacgggaggcagccgtcgagggtggggctggtgattgggacg

SEQ ID NO: 3147 - DNA, 1409 bp, unidentified
  source 1..1409: mol_type = unassigned DNA; note = Sphaerospermopsis kisseleviana
gatgaacgctggcggtatgcttaacacatgcaagtcgaacggactcttaggagttagtggcggacgggtgagtaacgcgtgagaatttggcttcaggtcggggacaacagttggaaacgactgctaataccggatgtgccggaaggtgaaagatttatcgcctgaagataagctcgcgtctgattagctagttggtggtgtaagggactaccaaggcgacgatcagtagctggtctgagaggatgatcagccacactgggactgagacacggcccagactcctacgggaggcagcagtggggaattttccgcaatgggcgaaagcctgacggagcaataccgcgtgagggaggaaggctcttgggtcgtaaacctcttttctcaaggaagaatgcaatgacggtacttgaggaataagcatcggctaactccgtgccagcagccgcggtaatacggaggatgcaagcgttatccggaatgattgggcgtaaagggtctgtaggtggtactgaaagtctgctgttaaagagcaaggctcaaccttgtaagagcagtggaaactacagaactggagtgcggtaggggcaaaaggaattcctggtgtagcggtgaaatgcgtagatatcaggaagaacaccggtggcgaaagcgttttgctagaccgcaactgacactgagggacgaaagctaggggagcgaatgggattagataccccagtagtcctagccgtaaacgatggatactaggcgtggcttgtatcgacccgagccgtgccggagctaacgcgttaagtatcccgcctggggagtacgcacgcaagtgtgaaactcaaaggaattgacgggggcccgcacaagcggtggagtatgtggtttaattcgatgcaacgcgaagaaccttaccaagacttgacatcctgcgaattttcctgaaagggaaaagtgccttcgggagcgcagagacaggtggtgcatggctgtcgtcagctcgtgtcgtgagatgttgggttaagtcccgcaacgagcgcaaccctcgtttttagttgccagcattaagatgggcactctagagagactgccggtgacaaaccggaggaaggtgaggatgacgtcaagtcagcatgccccttacgtcttgggctacacacgtactacaatgctacggacaaagggcggctacacagcgatgtgatgcaaatctcagaaaccgtagctcagttcagatcgaaggctgcaactcgccttcgtgaaggaggaatcgctagtaattgcaggtcagcatactgcagtgaattcgttcccgggccttgtacacaccgcccgtcacaccatggaagttggtcacgcccgaagtcattaccccaaccgaaaggagggggatgcctaaggtaggactggtgactggggtg

SEQ ID NO: 3148 - DNA, 1404 bp, Sphaerotilus hippei
  source 1..1404: mol_type = unassigned DNA
ggtatgccttacacatgcaagtcgaacggtagggggagcaatcccctgagagtggcgaacgggtgagtaatacatcggaacgtgcccagtcgtgggggataacgtagcgaaagctacgctaataccgcatacgacctgagggtgaaagcgggggaccgtaaggcctcgcgcgattggagcggccgatggcagattaggtagttggtggggtaaaggcccaccaagcctgcgatctgtagctggtctgagaggacgaccagccacactgggactgagacacggcccagactcctacgggaggcagcagtggggaattttggacaatgggcgaaagcctgatccagccataccgcgtgcaggaagaaggccttcgggttgtaaactgcttttgtcagggaagaaatactctgggctaataccctggggtgatgacggtacctgaagaataagcaccggctaactacgtgccagcagccgcggtaatacgtagggtgcaagcgttaatcggaattactgggcgtaaagcgtgcgcaggcggttctataagacagatgtgaaatccccgggctcaacctgggaactgcatttgtgactgtagagctagagtacggtagagggggatggaattccgcgtgtagcagtgaaatgcgtagatatgcggaggaacaccgatggcgaaggcaatcccctggacctgtactgacgctcatgcacgaaagcgtggggagcaaacaggattagataccctggtagtccacgccctaaacgatgtcaactggttgttgggagggtttcttctcagtaacgaagctaacgcgtgaagttgaccgcctggggagtacggccgcaaggttgaaactcaaaggaattgacggggacccgcacaagcggtggatgatgtggtttaattcgatgcaacgcgaaaaaccttacctacccttgacatgtctggaatcccgaagagatttgggagtgctcgaaagagagccagaacacaggtgctgcatggccgtcgtcagctcgtgtcgtgagatgttgggttaagtcccgcaacgagcgcaacccttgtcattagttgctacgaaagggcactctaatgagactgccggtgacaaaccggaggaaggtggggatgacgtcaggtcctcatggcccttatgggtagggctacacacgtcatacaatggccggtacagagggctgccaacccgcgagggggagccaatcccagaaaaccggtcgtagtccggatcgcagtctgcaactcgactgcgtgaagtcggaatcgctagtaatcgcggatcagcttgccgcggtgaatacgttcccgggtcttgtacacaccgcccgtcacaccatgggagcgggttctgccagaagtagttagcctaaccgcaaggaggg

SEQ ID NO: 3149 - DNA, 1426 bp, Sphaerotilus natans
  source 1..1426: mol_type = unassigned DNA
tgccttacacatgcaagtcgaacggtagaggggcaacccttgagagtggcgaacgggtgagtaatacatcggaacgtgcccagtcgtgggggataacgtagcgaaagctacgctaataccgcatacgacctgagggtgaaagcgggggatcgcaagacctcgcgcgattggagcggccgatggcagattaggtagttggtggggtaaaggcctaccaagcctgcgatctgtagctggtctgagaggacgaccagccacactgggactgagacacggcccagactcctacgggaggcagcagtggggaattttggacaatgggcgcaagcctgatccagccataccgcgtgcgggaagaaggccttcgggttgtaaaccgcttttgtcagggaagaaatcttctgggctaatacctcgggaggatgacggtacctgaagaataagcaccggctaactacgtgccagcagccgcggtaatacgtagggtgcaagcgttaatcggaattactgggcgtaaagcgtgcgcaggcggttccataagacagatgtgaaatccccgggctcaacctgggaactgcatttgtgactgtggagctagagtacggtagagggggatggaattccgcgtgtagcagtgaaatgcgtagatatgcggaggaacaccaatggcgaaggcaatcccctggacctgtactgacgctcatgcacgaaagcgtggggagcaaacaggattagataccctggtagtccacgccctaaacgatgtcaactggttgttgggagggtttcttctcagtaacgaagctaacgcgtgaagttgaccgcctggggagtacggccgcaaggttgaaactcaaaggaattgacggggacccgcacaagcggtggatgatgtggtttaattcgatgcaacgcgaaaaaccttacctacccttgacatggcaggaatcccgcagagatgtgggagtgctcgaaagagaacctgcacacaggtgctgcatggccgtcgtcagctcgtgtcgtgagatgttgggttaagtcccgcaacgagcgcaacccttgtcatcagttgctacgaaagggcactctgatgagactgccggtgacaaaccggaggaaggtggggatgacgtcaggtcctcatggcccttatgggtagggctacacacgtcatacaatggccggtacagagggctgccaacccgcgagggggagccaatcccagaaaaccggtcgtagtccggatcgtagtctgcaactcgactgcgtgaagtcggaatcgctagtaatcgcggatcagaatgtcgcggtgaatacgttcccgggtcttgtacacaccgcccgtcacaccatgggagcgggttctgccagaagtagttagcctaaccgcaaggagggcgattaccacggcagggttcgtgactgg

SEQ ID NO: 3150 - DNA, 1413 bp, unidentified
  source 1..1413: mol_type = unassigned DNA; note = Sphingobium algicola
aacgaacgctggcggcatgcctaatacatgcaagtcgaacgagaccttcgggtctagtggcgcacgggtgcgtaacgcgtgggaatctgcccttgggttcggaataacgtcgggaaactgacgctaataccggatgatgacgaaagtccaaagatttatcgcccagggatgagcccgcgtaggattagctagttggtgaggtaaaggctcaccaaggctacgatccttagctggtctgagaggatgatcagccacactgggactgagacacggcccagactcctacgggaggcagcagtagggaatattggacaatgggggcaaccctgatccagcaatgccgcgtgagtgatgaaggccttagggttgtaaagctcttttacccgagatgataatgacagtatcgggagaataagctccggctaactccgtgccagcagccgcggtaatacggagggagctagcgttgttcggaattactgggcgtaaagcgcacgtaggcggcgatttaagtcagaggtgaaagcccggggctcaaccccggaactgcctttgagactggattgcttgaatcctggagaggtgagtggaattccgagtgtagaggtgaaattcgtagatattcggaagaacaccagtggcgaaggcggctcactggacaggtattgacgctgaggtgcgaaagcgtggggagcaaacaggattagataccctggtagtccacgccgtaaacgatgataactagctgccggggcacatggtgtttcggtggcgcagctaacgcattaagttatccgcctggggagtacggtcgcaagattaaaactcaaaggaattgacgggggcctgcacaagcggtggagcatgtggtttaattcgaagcaacgcgcagaaccttaccaacgtttgacatccctatcgcggatcgtggagacactttccttcagttcggctggataggtgacaggtgctgcatggctgtcgtcagctcgtgtcgtgagatgttgggttaagtcccgcaacgagcgcaaccctcgcctttagttgccatcatttagttgggtactctaaaggaaccgccggtgataagccggaggaaggtggggatgacgtcaagtcctcatggcccttacgcgttgggctacacacgtgctacaatggcgactacagtgggcagccacctcgcgagagggagctaatctccaaaagtcgtctcagttcggatcgttctctgcaactcgagagcgtgaaggcggaatcgctagtaatcgcggatcagcatgccgcggtgaatacgttcccaggccttgtacacaccgcccgtcacaccatggggagttggattcactcggaaggccgttgagcttaaccgcaaggaggcaggcgaccacagtgggtttagcgactggggtg

SEQ ID NO: 3151 - DNA, 1411 bp, Sphingobium amiense
  source 1..1411: mol_type = unassigned DNA
aacgaacgctggcggcatgcctaatacatgcaagtcgaacgagatcttcggatctagtggcgcacgggtgcgtaacgcgtgggaatctgcccttgggttcggaataacgtcgggaaactgacgctaataccggatgatgacgtaagtccaaagatttatcgcccagggatgagcccgcgtaggattagctagttggtggggtaaaggcctaccaaggcgacgatccttagctggtctgagaggatgatcagccacactgggactgagacacggcccagactcctacgggaggcagcagtagggaatattggacaatgggggcaaccctgatccagcaatgccgcgtgagtgatgaaggccttagggttgtaaagctcttttacccgggatgataatgacagtaccgggagaataagctccggctaactccgtgccagcagccgcggtaatacggagggagctagcgttgttcggaattactgggcgtaaagcgcacgtaggcggcgatttaagtcagaggtgaaagcccggggctcaaccccggaactgcctttgagactggattgcttgaatcctggagaggtgagtggaattccgagtgtagaggtgaaattcgtagatattcggaagaacaccagtggcgaaggcggctcactggacaggtattgacgctgaggtgcgaaagcgtggggagcaaacaggattagataccctggtagtccacgccgtaaacgatgataactagctgccggggcacatggtgtttcggtggcgcagctaacgcattaagttatccgcctggggagtacggtcgcaagattaaaactcaaaggaattgacgggggcctgcacaagcggtggagcatgtggtttaattcgaagcaacgcgcagaaccttaccaacgtttgacatccctatcgcggatcgtggagacactttccttcagttcggctggataggtgacaggtgctgcatggctgtcgtcagctcgtgtcgtgagatgttgggttaagtcccgcaacgagcgcaaccctcgcctttagttgccagcatttagttgggtactctaaaggaaccgccggtgataagccggaggaaggtggggatgacgtcaagtcctcatggcccttacgcgttgggctacacacgtgctacaatggcgactacagtgggcagcgacctcgcgaggggaagctaatctccaaaagtcgtctcagttcggattgttctctgcaactcgagagcatgaaggcggaatcgctagtaatcgcggatcagcatgccgcggtgaatacgttcccaggccttgtacacaccgcccgtcacaccatgggagttggattcactcgaaggcgttgagctaacccgcaagggaggcaggcgaccacagtgggtttagcgactggggtg

SEQ ID NO: 3152 - DNA, 1409 bp, unidentified
  source 1..1409: mol_type = unassigned DNA; note = Sphingobium baderi
aacgaacgctggcggcatgcctaatacatgcaagtcgaacgagatcttcggatctagtggcgcacgggtgcgtaacgcgtgggaatctgcccttgggttcggaataacagttggaaacgactgctaataccggatgatgacgtaagtccaaagatttatcgcccagggatgagcccgcgtaggattagctagttggtgaggtaaaggctcaccaaggcgacgatccttagctggtctgagaggatgatcagccacactgggactgagacacggcccagactcctacgggaggcagcagtagggaatattggacaatgggggcaaccctgatccagcaatgccgcgtgagtgatgaaggccttagggttgtaaagctcttttacccgggatgataatgacagtaccgggagaataagctccggctaactccgtgccagcagccgcggtaatacggagggagctagcgttgttcggaattactgggcgtaaagcgcacgtaggcggcgatttaagtcagaggtgaaagcccggggctcaaccccggaatagcctttgagactggattgcttgaatccgggagaggtgagtggaattccgagtgtagaggtgaaattcgtagatattcggaagaacaccagtggcgaaggcggctcactggaccggcattgacgctgaggtgcgaaagcgtggggagcaaacaggattagataccctggtagtccacgccgtaaacgatgataactagctgctggggcgcatggcgcttcggtggcgcagctaacgcattaagttatccgcctggggagtacggtcgcaagattaaaactcaaaggaattgacgggggcctgcacaagcggtggagcatgtggtttaattcgaagcaacgcgcagaaccttaccaacgtttgacatccctagtatggttagtggagacactttccttcagttcggctggctaggtgacaggtgctgcatggctgtcgtcagctcgtgtcgtgagatgttgggttaagtcccgcaacgagcgcaaccctcgcctttagttgccatcatttagttgggcactctaaaggaaccgccggtgataagccggaggaaggtggggatgacgtcaagtcctcatggcccttacgcgttgggctacacacgtgctacaatggcgactacagtgggcagcgaccgtgcgagcggaagctaatctccaaaagtcgtctcagttcggatcgttctctgcaactcgagagcgtgaaggcggaatcgctagtaatcgcggatcagcatgccgcggtgaatacgttcccaggccttgtacacaccgcccgtcacaccatgggagttggattcactcgaaggcgttgagctaaccgcaaggaggcaggcgaccacagtgggtttagcgactggggtg

SEQ ID NO: 3153 - DNA, 1409 bp, unidentified
  source 1..1409: mol_type = unassigned DNA; note = Sphingobium barthaii
aacgaacgctggcggcatgcctaatacatgcaagtcgaacgagcccttcggggttagtggcgcacgggtgcgtaacgcgtgggaatctgcccttgggttcggaataacgtctggaaacggacgctaataccggatgatgacgaaagtccaaagatttatcgcccagggatgagcccgcgtaggattagctagttggtgaggtaaaggctcaccaaggcgacgatccttagctggtctgagaggatgatcagccacactgggactgagacacggcccagactcctacgggaggcagcagtagggaatattggacaatgggggcaaccctgatccagcaatgccgcgtgagtgatgaaggccttagggttgtaaagctcttttacccgggatgataatgacagtaccgggagaataagccccggctaactccgtgccagcagccgcggtaatacggagggggctagcgttgttcggaattactgggcgtaaagcgcacgtaggcggcgatttaagtcagaggtgaaagcccggggctcaaccccggaatagcctttgagactggattgcttgaacatcggagaggtgagtggaattccgagtgtagaggtgaaattcgtagatattcggaagaacaccagtggcgaaggcggctcactggacgattgttgacgctgaggtgcgaaagcgtggggagcaaacaggattagataccctggtagtccacgccgtaaacgatgataactagctgctggggctcatggagtttcggtggcgcagctaacgcattaagttatccgcctggggagtacggtcgcaagattaaaactcaaaggaattgacgggggcctgcacaagcggtggagcatgtggtttaattcgaagcaacgcgcagaaccttaccaacgtttgacatcctcatcgcgatttccagagatggatttcttcagttcggctggatgagtgacaggtgctgcatggctgtcgtcagctcgtgtcgtgagatgttgggttaagtcccgcaacgagcgcaaccctcgcctttagttgccatcatttagttgggtactctaaaggaaccgccggtgataagccggaggaaggtggggatgacgtcaagtcctcatggcccttacgcgttgggctacacacgtgctacaatggcgactacagtgggcagcgaccatgcgagtggaagctaatctccaaaagtcgtctcagttcggattgttctctgcaactcgagagcatgaaggcggaatcgctagtaatcgcggatcagcatgccgcggtgaatacgttcccaggccttgtacacaccgcccgtcacaccatgggagttggtttcacccgaaggcagtgcgctaaccgcaaggaggcagctgaccacggtgggatcagcgactggggtg

SEQ ID NO: 3154 - DNA, 1410 bp, Sphingobium chinhatense
  source 1..1410: mol_type = unassigned DNA
aacgaacgctggcggcatgcctaatacatgcaagtcgaacgatcccttcggggatagtggcgcacgggtgcgtaacgcgtgggaatctgcccttgggttcggaataacgtctggaaacggacgctaataccggatgatgtcgataagaccaaagatttatcgcccagggatgagcccgcgtaggattagctagttggtggggtaaaggctcaccaaggcgacgatccttagctggtctgagaggatgatcagccacactgggactgagacacggcccagactcctacgggaggcagcagtagggaatattggacaatgggggcaaccctgatccagcaatgccgcgtgagtgatgaaggccttagggttgtaaagctcttttacccgggatgataatgacagtaccgggagaataagccccggctaactccgtgccagcagccgcggtaatacggagggggctagcgttgttcggaattactgggcgtaaagcgcacgtaggcggcgatttaagtcaggggtgaaagcccggtgctcaacaccggaactgcccttgagactggattgcttgaatcacggagaggtgggtggaattccgagtgtagaggtgaaattcgtagatattcggaagaacaccagtggcgaaggcggcccactggacgtgtattgacgctgaggtgcgaaagcgtggggagcaaacaggattagataccctggtagtccacgccgtaaacgatgataactagctgctggggcgcatggcgtttcagtggcgcagctaacgcattaagttatccgcctggggagtacggtcgcaagattaaaactcaaaggaattgacgggggcctgcacaagcggtggagcatgtggtttaattcgaagcaacgcgcagaaccttaccaacgtttgacatccctatcgcggtttccagagatggataccttcagttcggctggataggtgacaggtgctgcatggctgtcgtcagctcgtgtcgtgagatgttgggttaagtcccgcaacgagcgcaaccctcgcctttagttgccatcatttagttgggtactctaaaggaaccgccggtgataagccggaggaaggtggggatgacgtcaagtcctcatggcccttacgcgttgggctacacacgtgctacaatggcgactacagtgggcagccactccgcgaggaggagctaatctccaaaagtcgtctcagttcggatcgttctctgcaactcgagagcgtgaaggcggaatcgctagtaatcgcggatcagcatgccgcggtgaatacgttcccaggccttgtacacaccgcccgtcacaccatgggagttggattcactcgaaggcgttgagctaaccgcaaggaggcaggcgaccacagtgggtttagcgactggggtg

SEQ ID NO: 3155 - DNA, 1409 bp, Sphingobium chlorophenolicum
  source 1..1409: mol_type = unassigned DNA
aacgaacgctggcggcatgcctaatacatgcaagtcgaacgagaccttcgggtctagtggcgcacgggtgcgtaacgcgtgggaatctgcccttgggttcggaataacatcgggaaactgatgctaataccggatgatgacgtaagtccaaagatttatcgcccagggatgagcccgcgtaggattagctagttggtgaggtaaaggctcaccaaggcgacgatccttagctggtctgagaggatgatcagccacactgggactgagacacggcccagactcctacgggaggcagcagtagggaatattggacaatgggcgaaagcctgatccagcaatgccgcgtgagtgatgaaggccttagggttgtaaagctcttttacccgggatgataatgacagtaccgggagaataagccccggctaactccgtgccagcagccgcggtaatacggagggggctagcgttgttcggaattactgggcgtaaagcgcacgtaggcggcgatttaagtcaggggtgaaagcccggtgctcaacaccggaactgcccttgagactggattgcttgaatcacggagaggtgggtggaattccgagtgtagaggtgaaattcgtagatattcggaagaacaccagtggcgaaggcggcccactggacgtgtattgacgctgaggtgcgaaagcgtggggagcaaacaggattagataccctggtagtccacgccgtaaacgatgataactagctgctggggtgcatggcatttcagtggcgcagctaacgcattaagttatccgcctggggagtacggtcgcaagattaaaactcaaaggaattgacgggggcctgcacaagcggtggagcatgtggtttaattcgaagcaacgcgcagaaccttaccaacgtttgacatccctatcgcggttagtggagacactttccttcagttcggctggataggtgacaggtgctgcatggctgtcgtcagctcgtgtcgtgagatgttgggttaagtcccgcaacgagcgcaaccctcgcctttagttgccatcatttagttgggtactctaaaggaaccgccggtgataagccggaggaaggtggggatgacgtcaagtcctcatggcccttacgcgttgggctacacacgtgctacaatggcgactacagtgggcagccactccgcgaggaggagctaatctccaaaagtcgtctcagttcggatcgttctctgcaactcgagagcgtgaaggcggaatcgctagtaatcgcggatcagcatgccgcggtgaatacgttcccaggccttgtacacaccgcccgtcacaccatgggagttggattcactcgaaggcgttgagctaaccgcaaggaggcaggcgaccacagtgggtttagcgactggggtg

SEQ ID NO: 3156 - DNA, 1423 bp, Sphingobium chungbukense
  source 1..1423: mol_type = unassigned DNA
aacgaacgctggcggcatgcctaatacatgcaagtcgaacgagaccttcgggtctagtggcgcacgggtgcgtaacgcgtgggaatctgcccttgggttcggaataacgtttggaaacgaacgctaataccggatgatgacgccaaagagatttggagtccaaagatttatcgcccaaggatgagcccgcgtaggattagctagttggtaaggtaaaggcttaccaaggcgacgatccttagctggtctgagaggatgatcagccacactgggactgagacacggcccagactcctacgggaggcagcagtagggaatattggacaatgggggcaaccctgatccagcaatgccgcgtgagtgatgaaggccttagggttgtaaagctcttttacccgggatgataatgacagtaccgggagaataagccccggctaactccgtgccagcagccgcggtaatacggagggggctagcgttgttcggaattactgggcgtaaagcgcacgtaggcggcgatttaagtcaggggtgaaagcccagtgctcaacactggaactgcccttgagactggattgcttgaatcacggagaggtgggtggaattccgagtgtagaggtgaaattcgtagatattcggaagaacaccagtggcgaaggcggcccactggacgtgtattgacgctgaggtgcgaaagcgtggggagcaaacaggattagataccctggtagtccacgccgtaaacgatgataactagctgctggggtgcatggcatttcagtggcgcagctaacgcattaagttatccgcctggggagtacggtcgcaagattaaaactcaaaggaattgacgggggcctgcacaagcggtggagcatgtggtttaattcgaagcaacgcgcagaaccttaccaacgtttgacatccctatcgcggttaccagagatggtttccttcagttcggctggataggtgacaggtgctgcatggctgtcgtcagctcgtgtcgtgagatgttgggttaagtcccgcaacgagcgcaaccctcgcctttagttgccatcatttagttgggtactctaaaggaaccgccggtgataagccggaggaaggtggggatgacgtcaagtcctcatggcccttacgcgttgggctacacacgtgctacaatggcgactacagtgggcagccactccgcgaggaggagctaatctccaaaagtcgtctcagttcggattgttctctgcaactcgagagcatgaaggcggaatcgctagtaatcgcggatcagcatgccgcggtgaatacgttcccaggccttgtacacaccgcccgtcacaccatgggagttggattcactcgaaggcgttgagctaacccgcaagggaggcaggcgaccacagtgggtttagcgactggggtg

SEQ ID NO: 3157 - DNA, 1409 bp, Sphingobium cloacae
  source 1..1409: mol_type = unassigned DNA
aacgaacgctggcggcatgcctaatacatgcaagtcgaacgagatcttcggatctagtggcgcacgggtgcgtaacgcgtgggaatctgcccttgggttcggaataacatcgggaaactgatgctaataccggatgatgacgaaagtccaaagatttatcgcccagggatgagcccgcgtaggattagctagttggtggggtaaaggctcaccaaggcgacgatccttagctggtctgagaggatgatcagccacactgggactgagacacggcccagactcctacgggaggcagcagtagggaatattggacaatgggggcaaccctgatccagcaatgccgcgtgagtgatgaaggccttagggttgtaaagctcttttacccgggatgataatgacagtaccgggagaataagctccggctaactccgtgccagcagccgcggtaatacggagggagctagcgttgttcggaattactgggcgtaaagcgcacgtaggcggcgatttaagtcagaggtgaaagcccggggctcaaccccggaatagcctttgagactggattgcttgaatccgggagaggtgagtggaattccgagtgtagaggtgaaattcgtagatattcggaagaacaccagtggcgaaggcggctcactggaccggcattgacgctgaggtgcgaaagcgtggggagcaaacaggattagataccctggtagtccacgccgtaaacgatgataactagctgctggggctcatggagtttcggtggcgcagctaacgcattaagttatccgcctggggagtacggtcgcaagattaaaactcaaaggaattgacgggggcctgcacaagcggtggagcatgtggtttaattcgaagcaacgcgcagaaccttaccaacgtttgacatccctagtatggttaccagagatggtttccttcagttcggctggctaggtgacaggtgctgcatggctgtcgtcagctcgtgtcgtgagatgttgggttaagtcccgcaacgagcgcaaccctcgcctttagttgccatcatttagttgggtactctaaaggaaccgccggtgataagccggaggaaggtggggatgacgtcaagtcctcatggcccttacgcgttgggctgcacacgtgctacaatggcgactacagtgggcagcgacctcgcgaggggaagctaatctccaaaagtcgtctcagttcggattgttctctgcaactcgagagcatgaaggcggaatcgctagtaatcgcggatcagcatgccgcggtgaatacgttcccaggccttgtacacaccgcccgtcacaccatgggagttggattcactcgaaggcgttgagctaaccgcaaggaggcaggcgaccacagtgggtttagcgactggggtg

SEQ ID NO: 3158 - DNA, 1408 bp, unidentified
  source 1..1408: mol_type = unassigned DNA; note = Sphingobium cupriresistens
aacgaacgctggcggcatgcctaatacatgcaagtcgaacgagaccttcgggtctagtggcgcacgggtgcgtaacgcgtgggaatctgcccttgggttcggaataacgtcgggaactgacgctaataccggatgatatcgaaagatcaaagatttatcgcccagggatgagcccgcgtaggattagctagttggtggggtaaaggctcaccaaggctacgatccttagctggtctgagaggatgatcagccacactgggactgagacacggcccagactcctacgggaggcagcagtagggaatattggacaatgggggcaaccctgatccagcaatgccgcgtgagtgatgaaggccttagggttgtaaagctcttttacccgagatgataatgacagtatcgggagaataagctccggctaactccgtgccagcagccgcggtaatacggagggagctagcgttgttcggaattactgggcgtaaagcgcacgtaggcggcgatttaagtcagaggtgaaagcccggggcccaaccccggaactgcctttgagactggattgctagaatcttggagaggcgggtggaattccgagtgtagaggtgaaattcgtagatattcggaagaacaccagtggcgaaggcggcccgctggacaagtattgacgctgaggtgcgaaagcgtggggagcaaacaggattagataccctggtagtccacgccgtaaacgatgataactagctgccggggcacatggtgtttcggtggcgcagctaacgcattaagttatccgcctggggagtgcggtcgcaagattaaaactcaaaggaattgacgggggcctgcacaagcggtggagcatgtggtttaattcgaagcaacgcgcagaaccttaccagcgtttgacatcctcatcgcgatttccagagatggatatcttcagttcggcttgatgagtgacaggtgctgcatggctgtcgtcagctcgtgtcgtgagatgttgggttaagtcccgcaacgagcgcaaccctcgcctttagttgccagcatttggttgggtactctaaaggaaccgccggtgataagccggaggaaggtggggatgacgtcaagtcctcatggcccttacgcgctgggctacacacgtgctacaatggcgactacagtgggcagccactccgcgaggaggagctaatctccaaaagtcgtctcagttcggatcgttctctgcaactcgagagcgtgaaggcggaatcgctagtaatcgcggatcagcatgccgcggtgaatacgttcccaggccttgtacacaccgcccgtcacaccatgggagttggattcactcgaaggcgttgagctaaccgcaaggaggcaggcgaccacagtgggtttagcgactggggtg

SEQ ID NO: 3159 - DNA, 1409 bp, unidentified
  source 1..1409: mol_type = unassigned DNA; note = Sphingobium czechense
aacgaacgctggcggcatgcctaatacatgcaagtcgaacgagatcttcgggtctagtggcgcacgggtgcgtaacgcgtgggaatctgcccttgggttcggaataacgtcgggaaactgacgctaataccggatgatatcgaaagatcaaagatttatcgcccagggatgagcccgcgtaggattagctagttggtggggtaaaggctcaccaaggctacgatccttagctggtctgagaggatgatcagccacactgggactgagacacggcccagactcctacgggaggcagcagtagggaatattggacaatgggggcaaccctgatccagcaatgccgcgtgagtgatgaaggccttagggttgtaaagctcttttacccgagatgataatgacagtatcgggagaataagctccggctaactccgtgccagcagccgcggtaatacggagggagctagcgttgttcggaattactgggcgtaaagcgcacgtaggcggcgatttaagtcagaggtgaaagcccggggctcaaccccggaactgcctttgagactggattgctagaatcttggagaggcgggtggaattccgagtgtagaggtgaaattcgtagatattcggaagaacaccagtggcgaaggcggcccgctggacaagtattgacgctgaggtgcgaaagcgtggggagcaaacaggattagataccctggtagtccacgccgtaaacgatgataactagctgccggggcacatggtgtttcggtggcgcagctaacgcattaagttatccgcctggggagtacggtcgcaagattaaaactcaaaggaattgacgggggcctgcacaagcggtggagcatgtggtttaattcgaagcaacgcgcagaaccttaccagcgtttgacatcctcatcgcgatttccagagatggatatcttcagttcggctggatgagtgacaggtgctgcatggctgtcgtcagctcgtgtcgtgagatgttgggttaagtcccgcaacgagcgcaaccctcgcctttagttgccagcatttggttgggtactctaaaggaaccgccggtgataagccggaggaaggtggggatgacgtcaagtcctcatggcccttacgcgctgggctacacacgtgctacaatggcgactacagtgggcagccactccgcgaggaggagctaatctccaaaagtcgtctcagttcggatcgttctctgcaactcgagagcgtgaaggcggaatcgctagtaatcgcggatcagcatgccgcggtgaatacgttcccaggccttgtacacaccgcccgtcacaccatgggagttggattcactcgaaggcgttgagctaaccgcaaggaggcaggcgaccacagtgggtttagcgactggggtg

SEQ ID NO: 3160 - DNA, 1409 bp, Sphingobium faniae
  source 1..1409: mol_type = unassigned DNA
aacgaacgctggcggcatgcctaatacatgcaagtcgaacgagatcttcggatctagtggcgcacgggtgcgtaacgcgtgggaatctgcccttgggttcggaataacagttggaaacgactgctaataccggatgatgacgtaagtccaaagatttatcgcccagggatgagcccgcgtaggattagcttgttggtgaggtaaaggctcaccaaggcgacgatccttagctggtctgagaggatgatcagccacactgggactgagacacggcccagactcctacgggaggcagcagtagggaatattggacaatgggcgcaagcctgatccagcaatgccgcgtgagtgatgaaggccttagggttgtaaagctcttttacccgggatgataatgacagtaccgggagaataagctccggctaactccgtgccagcagccgcggtaatacggagggagctagcgttgttcggaattactgggcgtaaagcgcacgtaggcggcgatctaagtcaggggtgaaagcccggggctcaaccccggaatagcctttgagactggattgcttgaatccgggagaggtgagtggaattccgagtgtagaggtgaaattcgtagatattcggaagaacaccagtggcgaaggcggctcactggaccggcattgacgctgaggtgcgaaagcgtggggagcaaacaggattagataccctggtagtccacgccgtaaacgatgataactagctgctggggcgcatggcgcttcggtggcgcagctaacgcattaagttatccgcctggggagtacggtcgcaagattaaaactcaaaggaattgacgggggcctgcacaagcggtggagcatgtggtttaattcgaagcaacgcgcagaaccttaccaacgtttgacatccctagtatggtttccagagatggattccttcagttcggctggctaggtgacaggtgctgcatggctgtcgtcagctcgtgtcgtgagatgttgggttaagtcccgcaacgagcgcaaccctcgcctttagttgccatcattcagttgggtactctaaaggaaccgccggtgataagccggaggaaggtggggatgacgtcaagtcctcatggcccttacgcgttgggctacacacgtgctacaatggcgactacagtgggcagcgacaccgcgaggtgaagctaatctccaaaagtcgtctcagttcggattgttctctgcaactcgagagcatgaaggcggaatcgctagtaatcgcggatcagcatgccgcggtgaatacgttcccaggccttgtacacaccgcccgtcacaccatgggagttggattcactcgaaggcgttgagctaaccgcaaggaggcaggcgaccacagtgggtttagcgactggggtg

SEQ ID NO: 3161 - DNA, 1409 bp, Sphingobium francense
  source 1..1409: mol_type = unassigned DNA
aacgaacgctggcggcatgcctaatacatgcaagttgaacgagaccttcgggtttagtggcgcacgggtgcgtaacgcgtgggaatctgcccttgggttcggaataacgtctggaaacggacgctaataccggatgatgtcgtaagaccaaagatttatcgcccagggatgagcccgcgtaggattagctagttggtggggtaaaggctcaccaaggcgacgatccttagctggtctgagaggatgatcagccacactgggactgagacacggcccaaactcctacgggaggcagcagtagggaatattggacaatgggggcaaccctgatccagcaatgccgcgtgagtgatgaaggccttagggttgtaaagctcttttacccgggatgataatgacagtaccgggagaataagccccggctaactccgtgccagcagccgcggtaatacggagggggctagcgttgttcggaattactgggcgtaaagcgcacgtaggcggcgatttaagtcaggggtgaaagcccggtgctcaacaccggaactgcccttgagactggattgcttgaatcacggagaggtgggtggaattccgagtgtagaggtgaaattcgtagatattcggaagaacaccagtggcgaaggcggcccactggacgtgtattgacgctgaggtgcgaaagcgtggggagcaaacaggattagataccctggtagtccacgccgtaaacgatgataactagctgctggggcgcatggcgtttcagtggcgcagctaacgcattaagttatccgcctggggagtacggtcgcaagattaaaactcaaaggaattgacgggggcctgcacaagcggtggagcatgtggtttaattcgaagcaacgcgcagaaccttaccaacgtttgacatccctatcgcggtttccagagatggataccttcagttcggctggataggtgacaggtgctgcatggctgtcgtcagctcgtgtcgtgagatgttgggttaagtcccgcaacgagcgcaaccctcgcctttagttgccatcatttagttgggtactctaaaggaaccgccggtgataagccggaggaaggtggggatgacgtcaagtcctcatggcccttacgcgttgggctacacacgtgctacaatggcgactacagtgggcagccactccgcgaggaggagctaatctccaaaagtcgtctcagttcggatcgttctctgcaactcgagagcgtgaaggcggaatcgctagtaatcgcggatcagcatgccgcggtgaatacgttcccaggccttgtacacaccgcccgtcacaccatgggagttggattcactcgaaggcgttgagctaaccgcaaggaggcaggcgaccacagtgggtttagcgactggggtg

SEQ ID NO: 3162 - DNA, 1409 bp, Sphingobium fuliginis
  source 1..1409: mol_type = unassigned DNA
aacgaacgctggcggcatgcctaatacatgcaagtcgaacgagcctttcggggctagtggcgcacgggtgcgtaacgcgtgggaatctgcccttgggttcggaataacgtctggaaacggacgctaataccggatgatgacgaaagtccaaagatttatcgcccagggatgagcccgcgtaggattagctagttggtgaggtaaaggctcaccaaggcgacgatccttagctggtctgagaggatgatcagccacactgggactgagacacggcccagactcctacgggaggcagcagtagggaatattggacaatgggggcaaccctgatccagcaatgccgcgtgagtgatgaaggccttagggttgtaaagctcttttacccgggatgataatgacagtaccgggagaataagccccggctaactccgtgccagcagccgcggtaatacggagggggctagcgttgttcggaattactgggcgtaaagcgcacgtaggcggcgatttaagtcagaggtgaaagcccggggctcaaccccggaatagcctttgagactggattgcttgaacatcggagaggtgagtggaattccgagtgtagaggtgaaattcgtagatattcggaagaacaccagtggcgaaggcggctcactggacgattgttgacgctgaggtgcgaaagcgtggggagcaaacaggattagataccctggtagtccacgccgtaaacgatgataactagctgctggggctcatggagtttcggtggcgcagctaacgcattaagttatccgcctggggagtacggtcgcaagattaaaactcaaaggaattgacgggggcctgcacaagcggtggagcatgtggtttaattcgaagcaacgcgcagaaccttaccaacgtttgacatcctcatcgcgatttccagagatggatttcttcagttcggctggatgagtgacaggtgctgcatggctgtcgtcagctcgtgtcgtgagatgttgggttaagtcccgcaacgagcgcaaccctcgcctttagttgccatcatttagttgggtactctaaaggaaccgccggtgataagccggaggaaggtggggatgacgtcaagtcctcatggcccttacgcgttgggctacacacgtgctacaatggcgactacagtgggcagcgaccatgcgagtggaagctaatctccaaaagtcgtctcagttcggattgttctctgcaactcgagagcatgaaggcggaatcgctagtaatcgcggatcagcatgccgcggtgaatacgttcccaggccttgtacacaccgcccgtcacaccatgggagttggtttcacccgaaggcagtgcgctaaccgcaaggaggcagctgaccacggtgggatcagcgactggggtg

SEQ ID NO: 3163 - DNA, 1411 bp, Sphingobium herbicidovorans
  source 1..1411: mol_type = unassigned DNA
aacgaacgctggcggcatgcctaacacatgcaagtcgaacgagatcttcggatctagtggcgcacgggtgcgtaacgcgtgggaatctgcccttgggttcggaataacagtgagaaattactgctaataccggatgatgtcttcggaccaaagatttatcgcccagggatgagcccgcgtaggattaggtagttggtggggtaatggcctaccaagccgacgatccttagctggtctgagaggatgatcagccacactgggactgagacacggcccagactcctacgggaggcagcagtggggaatattggacaatgggcgaaagcctgatccagcaatgccgcgtgagtgatgaaggccttagggttgtaaagctcttttaccagggatgataatgacagtacctggagaataagctccggctaactccgtgccagcagccgcggtaatacggagggagctagcgttgttcggaattactgggcgtaaagcgcgcgtaggcggttactcaagtcagaggtgaaagcccggggctcaaccccggaactgcctttgaaactaggtgactagaatcttggagaggtcagtggaattccgagtgtagaggtgaaattcgtagatattcggaagaacaccagtggcgaaggcgactgactggacaagtattgacgctgaggtgcgaaagcgtggggagcaaacaggattagataccctggtagtccacgccgtaaacgatgataactagctgtccgggtacttggtacttgggtggcgcagctaacgcattaagttatccgcctggggagtacggtcgcaagattaaaactcaaaggaattgacgggggcctgcacaagcggtggagcatgtggtttaattcgaagcaacgcgcagaaccttaccagcgtttgacatgccggtcgcggatttgggagaccatttccttcagttcggctggaccgtgcacaggtgctgcatggctgtcgtcagctcgtgtcgtgagatgttgggttaagtcccgcaacgagcgcaaccctcgtccttagttgccagcatttggttgggcactctaaggaaactgccggtgataagccggaggaaggtggggatgacgtcaagtcctcatggcccttacacgctgggctacacacgtgctacaatggcggtgacagtgggcagcaagcacgcgagtgtgagctaatctccaaaagccgtctcagttcggattgttctctgcaactcgagagcatgaaggcggaatcgctagtaatcgcggatcagcatgccgcggtgaatacgttcccaggccttgtacacaccgcccgtcacaccatgggagttggattcactcgaaggcgttgagctaacccgcaagggaggcaggcgaccacagtgggtttagcgactggggtg

SEQ ID NO: 3164 - DNA, 1411 bp, unidentified
  source 1..1411: mol_type = unassigned DNA; note = Sphingobium hydrophobicum
aacgaacgctggcggcatgcctaatacatgcaagtcgaacgagaccttcgggtctagtggcgcacgggtgcgtaacgcgtgggaatctgcccttgggttcggaataacttcgggaaactgaagctaataccggatgatgacgaaagtccaaagatttatcgcccagggatgagcccgcgtaggattagctagttggtggggtaaaggctcaccaaggcaacgatccttagctggtctgagaggatgatcagccacactgggactgagacacggcccagactcctacgggaggcagcagtagggaatattggacaatgggcgaaagcctgatccagcaatgccgcgtgagtgatgaaggccttagggttgtaaagctcttttacccgagatgataatgacagtatcgggagaataagctccggctaactccgtgccagcagccgcggtaatacggagggagctagcgttgttcggaattactgggcgtaaagcgcacgtaggcggcgatttaagtcagaggtgaaagcccggggctcaaccccggaactgcctttgagactggattgctagaatcttggagaggcgagtggaattccgagtgtagaggtgaaattcgtagatattcggaagaacaccagtggcgaaggcggctcgctggacaagtattgacgctgaggtgcgaaagcgtggggagcaaacaggattagataccctggtagtccacgccgtaaacgatgataactagctgccggggcacatggtgtttcggtggcgcagctaacgcattaagttatccgcctggggagtacggtcgcaagattaaaactcaaaggaattgacgggggcctgcacaagcggtggagcatgtggtttaattcgaagcaacgcgcagaaccttaccagcgtttgacatcctcatcgcggatttcagagatgatttccttcagttcggctggatgagtgacaggtgctgcatggctgtcgtcagctcgtgtcgtgagatgttgggttaagtcccgcaacgagcgcaaccctcgcctttagttgccagcatttagttgggtactctaaaggaaccgccggtgataagccggaggaaggtggggatgacgtcaagtcctcatggcccttacgcgctgggctacacacgtgctacaatggcgactacagtgggctgcaaccgtgcgagcggtagctaatctccaaaagtcgtctcagttcggattgttctctgcaactcgagagcatgaaggcggaatcgctagtaatcgcggatcagcatgccgcggtgaatacgttcccaggccttgtacacaccgcccgtcacaccatgggatttggattcacccgaaggcactgcgttaacccgcaagggagacaggtgaccacggtgggtttagagactggggtg

SEQ ID NO: 3165 - DNA, 1410 bp, Sphingobium indicum
  source 1..1410: mol_type = unassigned DNA
aacgaacgctggcggcatgcctaatacatgcaagtcgaacgagaccttcgggtctagtggcgcacgggtgcgtaacgcgtgggaatctgcccttgggttcggaataacgtctggaaacggacgctaataccggatgatgtcgataagaccaaagatttatcgcccagggatgagcccgcgtaggattagctagttggtggggtaaaggctcaccaaggcgacgatccttagctggtctgagaggatgatcagccacactgggactgagacacggcccagactcctacgggaggcagcagtagggaatattggacaatgggggcaaccctgatccagcaatgccgcgtgagtgatgaaggccttagggttgtaaagctcttttacccgggatgataatgacagtaccgggagaataagccccggctaactccgtgccagcagccgcggtaatacggagggggctagcgttgttcggaattactgggcgtaaagcgcacgtaggcggcgatttaagtcaggggtgaaagcccggtgctcaacaccggaactgcccttgagactggattgcttgaatcacggagaggtgggtggaattccgagtgtagaggtgaaattcgtagatattcggaagaacaccagtggcgaaggcggcccactggacgtgtattgacgctgaggtgcgaaagcgtggggagcaaacaggattagataccctggtagtccacgccgtaaacgatgataactagctgctggggcgcatggcgtttcagtggcgcagctaacgcattaagttatccgcctggggagtacggtcgcaagattaaaactcaaaggaattgacgggggcctgcacaagcggtggagcatgtggtttaattcgaagcaacgcgcagaaccttaccaacgtttgacatccctatcgcggtttccagagatggataccttcagttcggctggataggtgacaggtgctgcatggctgtcgtcagctcgtgtcgtgagatgttgggttaagtcccgcaacgagcgcaaccctcgcctttagttgccatcatttagttgggtactctaaaggaaccgccggtgataagccggaggaaggtggggatgacgtcaagtcctcatggcccttacgcgttgggctacacacgtgctacaatggcgactacagtgggcagccactccgcgaggaggagctaatctccaaaagtcgtctcagttcggatcgttctctgcaactcgagagcgtgaaggcggaatcgctagtaatcgcggatcagcatgccgcggtgaatacgttcccaggccttgtacacaccgcccgtcacaccatgggagttggattcactcgaaggcgttgagctaaccgcaaggaggcaggcgaccacagtgggtttagcgactggggtg

SEQ ID NO: 3166 - DNA, 1409 bp, Sphingobium japonicum
  source 1..1409: mol_type = unassigned DNA
aacgaacgctggcggcatgcctaatacatgcaagtcgaacgagaccttcgggtctagtggcgcacgggtgcgtaacgcgtgggaatctgcccttgggttcggaataacgtctggaaacggacgctaataccggatgatgacgtaagtccaaagatttatcgcccagggatgagcccgcgtaggattagctagttggtgaggtaaaggctcaccaaggcgacgatccttagctggtctgagaggatgatcagccacactgggactgagacacggcccagactcctacgggaggcagcagtagggaatattggacaatgggggcaaccctgatccagcaatgccgcgtgagtgatgaaggccttagggttgtaaagctcttttacccgggatgataatgacagtaccgggagaataagccccggctaactccgtgccagcagccgcggtaatacggagggggctagcgttgttcggaattactgggcgtaaagcgcacgtaggcggcgatttaagtcaggggtgaaagcccggtgctcaacaccggaactgcccttgagactggattgcttgaatcacggagaggtgggtggaattccgagtgtagaggtgaaattcgtagatattcggaagaacaccagtggcgaaggcggcccactggacgtgtattgacgctgaggtgcgaaagcgtggggagcaaacaggattagataccctggtagtccacgccgtaaacgatgataactagctgctggggcgcatggcgtttcagtggcgcagctaacgcattaagttatccgcctggggagtacggtcgcaagattaaaactcaaaggaattgacgggggcctgcacaagcggtggagcatgtggtttaattcgaagcaacgcgcagaaccttaccaacgtttgacatccctatcgcggtttccagagatggataccttcagttcggctggataggtgacaggtgctgcatggctgtcgtcagctcgtgtcgtgagatgttgggttaagtcccgcaacgagcgcaaccctcgcctttagttgccatcatttagttgggtactctaaaggaaccgccggtgataagccggaggaaggtggggatgacgtcaagtcctcatggcccttacgcgttgggctacacacgtgctacaatggcgactacagtgggcagccactccgcgaggaggagctaatctccaaaagtcgtctcagttcggatcgttctctgcaactcgagagcgtgaaggcggaatcgctagtaatcgcggatcagcatgccgcggtgaatacgttcccaggccttgtacacaccgcccgtcacaccatgggagttggattcactcgaaggcgttgagctaaccgcaaggaggcaggcgaccacagtgggtttagcgactggggtg

SEQ ID NO: 3167 - DNA, 1422 bp, Sphingobium lactosutens
  source 1..1422: mol_type = unassigned DNA
aacgaacgctggcggcatgcctaatacatgcaagtcgaacgagatcttcggatctagtggcgcacgggtgcgtaacgcgtgggaatctgcccttgggttcggaataacagttggaaacgactgctaataccggatgatgacgccaaagagatttggagtccaaagatttatcgcccagggatgagcccgcgtaggattagctagttggtggggtaaaggcctaccaaggcgacgatccttagctggtctgagaggatgatcagccacactgggactgagacacggcccagactcctacgggaggcagcagtagggaatattggacaatgggggcaaccctgatccagcaatgccgcgtgagtgatgaaggccttagggttgtaaagctcttttaccagagatgataatgacagtatctggggaataagccccggctaactccgtgccagcagccgcggtaatacggagggggctagcgttgttcggaattactgggcgtaaagcgcacgtaggcggcgatttaagtcagaggtgaaagcccggggctcaaccccggaactgcctttgagactggattgcttgaatccgggagaggtgagtggaattccgagtgtagaggtgaaattcgtagatattcggaagaacaccagtggcgaaggcggctcactggaccggcattgacgctgaggtgcgaaagcgtggggagcaaacaggattagataccctggtagtccacgccgtaaacgatgataactagctgccggggcacatggtgtttcggtggcgcagctaacgcattaagttatccgcctggggagtacggtcgcaagattaaaactcaaaggaattgacgggggcctgcacaagcggtggagcatgtggtttaattcgaagcaacgcgcagaaccttaccagcgtttgacatcctcatcgcgatttccagagatggatttcttcagttcggctggatgagtgacaggtgctgcatggctgtcgtcagctcgtgtcgtgagatgttgggttaagtcccgcaacgagcgcaaccctcgcctttagttgccagcaagcaagttgggtactctaaaggaaccgccggtgataagccggaggaaggtggggatgacgtcaagtcctcatggcccttacgcgctgggctacacacgtgctacaatggcgactacagtgggcagcgacctcgcgagggggagctaatctccaaaagtcgtctcagttcggatcgttctctgcaactcgagagcgtgaaggcggaatcgctagtaatcgcggatcagcatgccgcggtgaatacgttcccaggccttgtacacaccgcccgtcacaccatgggagttggattcactcgaaggcgttgagctaaccgcaaggaggcaggcgaccacagtgggtttagcgactggggtg

SEQ ID NO: 3168 - DNA, 1409 bp, unidentified
  source 1..1409: mol_type = unassigned DNA; note = Sphingobium limneticum
aacgaacgctggcggcatgcctaatacatgcaagtcgaacgagaccttcgggtctagtggcgcacgggtgcgtaacgcgtgggaatctgcccttgggttcggaataacgtcgggaaactgacgctaataccggatgatgacgaaagtccaaagatttatcgcccagggatgagcccgcgtaggattagctagttggtgaggtaaaggctcaccaaggctacgatccttagctggtctgagaggatgatcagccacactgggactgagacacggcccagactcctacgggaggcagcagtagggaatattggacaatgggggcaaccctgatccagcaatgccgcgtgagtgatgaaggccttagggttgtaaagctcttttacccgagatgataatgacagtatcgggagaataagctccggctaactccgtgccagcagccgcggtaatacggagggagctagcgttgttcggaattactgggcgtaaagcgcacgtaggcggcgatttaagtcagaggtgaaagcccggggctcaaccccggaactgcctttgagactggattgcttgaatcctggagaggtgagtggaattccgagtgtagaggtgaaattcgtagatattcggaagaacaccagtggcgaaggcggctcactggacaggtattgacgctgaggtgcgaaagcgtggggagcaaacaggattagataccctggtagtccacgccgtaaacgatgataactagctgccggggcacatggtgtttcggtggcgcagctaacgcattaagttatccgcctggggagtacggtcgcaagattaaaactcaaaggaattgacgggggcctgcacaagcggtggagcatgtggtttaattcgaagcaacgcgcagaaccttaccaacgtttgacatccctatcgcggatcgtggagacactttccctcagttcggctggataggtgacaggtgctgcatggctgtcgtcagctcgtgtcgtgagatgttgggttaagtcccgcaacgagcgcaaccctcgcctttagttgccatcatttagttgggtactctaaaggaaccgccggtgataagccggaggaaggtggggatgacgtcaagtcctcatggcccttacgcgttgggctacacacgtgctacaatggcgactacagtgggcagccacctcgcgagagggagctaatctccaaaagtcgtctcagttcggatcgttctctgcaactcgagagcgtgaaggcggaatcgctagtaatcgcggatcagcatgccgcggtgaatacgttcccaggccttgtacacaccgcccgtcacaccatgggagttggattcactcgaaggcgttgagctaaccgcaaggaggcaggcgaccacagtgggtttagcgactggggtg

SEQ ID NO: 3169 - DNA, 1409 bp, unidentified
  source 1..1409: mol_type = unassigned DNA; note = Sphingobium paulinellae
aacgaacgctggcggcatgcctaatacatgcaagtcgaacgagaccttcgggtctagtggcgcacgggtgcgtaacgcgtgggaatctgcccttgggttcggaataacgtcgggaaactgacgctaataccggatgatgacgaaagtccaaagatttatcgcccagggatgagcccgcgtaggattagctagttggtgaggtaaaggctcaccaaggctacgatccttagctggtctgagaggatgatcagccacactgggactgagacacggcccagactcctacgggaggcagcagtagggaatattggacaatgggggcaaccctgatccagcaatgccgcgtgagtgatgaaggccttagggttgtaaagctcttttacccgagatgataatgacagtatcgggagaataagctccggctaactccgtgccagcagccgcggtaatacggagggagctagcgttgttcggaattactgggcgtaaagcgcacgtaggcggcgatttaagtcagaggtgaaagcccggggctcaaccccggaactgcctttgagactggattgcttgaatcctggagaggtgagtggaattccgagtgtagaggtgaaattcgtagatattcggaagaacaccagtggcgaaggcggctcactggacaggtattgacgctgaggtgcgaaagcgtggggagcaaacaggattagataccctggtagtccacgccgtaaacgatgataactagctgccggggcacatggtgtttcggtggcgcagctaacgcattaagttatccgcctggggagtacggtcgcaagattaaaactcaaaggaattgacgggggcctgcacaagcggtggagcatgtggtttaattcgaagcaacgcgcagaaccttaccaacgtttgacatccctatcgcggatcgtggagacactttccttcagttcggctggataggtgacaggtgctgcatggctgtcgtcagctcgtgtcgtgagatgttgggttaagtcccgcaacgagcgcaaccctcgcctttagttgccatcatttagttgggtactctaaaggaaccgccggtgataagccggaggaaggtggggatgacgtcaagtcctcatggcccttacgcgttgggctacacacgtgctacaatggcgactacagtgggcagccacctcgcgagagggagctaatctccaaaagtcgtctcagttcggatcgttctctgcaactcgagagcgtgaaggcggaatcgctagtaatcgcggatcagcatgccgcggtgaatacgttcccaggccttgtacacaccgcccgtcacaccatgggagttggattcactcgaaggcgttgagctaaccgcaaggaggcaggcgaccacagtgggtttagcgactggggtg

SEQ ID NO: 3170 - DNA, 1411 bp, Sphingobium quisquiliarum
  source 1..1411: mol_type = unassigned DNA
aacgaacgctggcggcatgcctaatacatgcaagtcgaacgatctcttcggagatagtggcgcacgggtgcgtaacgcgtgggaatctgcccttgggttcggaataacgtcgggaaactgacgctaataccggatgatgacgtaagtccaaagatttatcgcccagggatgagcccgcgtaggattagctagttggttgggtaaaggctgaccaaggcgacgatccttagctggtctgagaggatgatcagccacactgggactgagacacggcccagactcctacgggaggcagcagtagggaatattggacaatgggggcaaccctgatccagcaatgccgcgtgagtgatgaaggccttagggttgtaaagctcttttacccgggatgataatgacagtaccgggagaataagccccggctaactccgtgccagcagccgcggtaatacggagggggctagcgttgttcggaattactgggcgtaaagcgcacgtaggcggcgatttaagtcagaggtgaaagcccggggctcaaccccggaatagcctttgagactggattgcttgaacatcggagaggtgagtggaattccgagtgtagaggtgaaattcgtagatattcggaagaacaccagtggcgaaggcggctcactggacgattgttgacgctgaggtgcgaaagcgtggggagcaaacaggattagataccctggtagtccacgccgtaaacgatgataactagctgctggggtgcatggcatttcagtggcgcagctaacgcattaagttatccgcctggggagtacggtcgcaagattaaaactcaaaggaattgacgggggcctgcacaagcggtggagcatgtggtttaattcgaagcaacgcgcagaaccttaccaacgtttgacatccctatcgcggttagtggagacactttccttcagttcggctggataggtgacaggtgctgcatggctgtcgtcagctcgtgtcgtgagatgttgggttaagtcccgcaacgagcgcaaccctcgcctttagttgccatcatttagttgggtactctaaaggaaccgccggtgataagccggaggaaggtggggatgacgtcaagtcctcatggcccttacgcgttgggctacacacgtgctacaatggcgactacagtgggcagcgaccatgcgagtggaagctaatctccaaaagtcgtctcagttcggattgttctctgcaactcgagagcatgaaggcggaatcgctagtaatcgcggatcagcatgccgcggtgaatacgttcccaggccttgtacacaccgcccgtcacaccatgggagttggattcactcgaaggcgttgagctaacccgcaagggaggcaggcgaccacagtgggtttagcgactggggtg

SEQ ID NO: 3171 - DNA, 1411 bp, Sphingobium ummariense
  source 1..1411: mol_type = unassigned DNA
aacgaacgctggcggcatgcctaatacatgcaagtcgaacgaaggcttcggccttagtggcgcacgggtgcgtaacgcgtgggaatctgcccttgggttcggaataacgtctggaaacggacgctaataccggatgatgacgtaagtccaaagatttatcgcccagggatgagcccgcgtaggattagctagttggtgaggtaaaggctcaccaaggcgacgatccttagctggtctgagaggatgatcagccacactgggactgagacacggcccagactcctacgggaggcagcagtagggaatattggacaatgggcgaaagcctgatccagcaatgccgcgtgagtgatgaaggccttagggttgtaaagctcttttacccgggatgataatgacagtaccgggagaataagccccggctaactccgtgccagcagccgcggtaatacggagggggctagcgttgttcggaattactgggcgtaaagcgcacgtaggcggcgatttaagtcagaggtgaaagcccggggctcaaccccggaatagcctttgagactggattgcttgaatccgggagaggtgagtggaattccgagtgtagaggtgaaattcgtagatattcggaagaacaccagtggcgaaggcggctcactggaccggcattgacgctgaggtgcgaaagcgtggggagcaaacaggattagataccctggtagtccacgccgtaaacgatgataactagctgctggggctcatggagtttcagtggcgcagctaacgcattaagttatccgcctggggagtacggtcgcaagattaaaactcaaaggaattgacgggggcctgcacaagcggtggagcatgtggtttaattcgaagcaacgcgcagaaccttaccaacgtttgacatccctagtatggttaccagagatggtttccttcagttcggctggctaggtgacaggtgctgcatggctgtcgtcagctcgtgtcgtgagatgttgggttaagtcccgcaacgagcgcaaccctcgcctttagttgccatcattcagttgggtactctaaaggaaccgccggtgataagccggaggaaggtggggatgacgtcaagtcctcatggcccttacgcgttgggctacacacgtgctacaatggcgactacagtgggcagctatctcgcgagagtgcgctaatctccaaaagtcgtctcagttcggatcgttctctgcaactcgagagcgtgaaggcggaatcgctagtaatcgcggatcagcatgccgcggtgaatacgttcccaggccttgtacacaccgcccgtcacaccatgggagttggtttcacccgaaggcgctgcgctaactcgcaagagaggcaggcgaccacggtgggatcagcgactggggtg

SEQ ID NO: 3172 - DNA, 1409 bp, Sphingobium wenxiniae
  source 1..1409: mol_type = unassigned DNA
aacgaacgctggcggcatgcctaatacatgcaagtcgaacgagatcttcggatctagtggcgcacgggtgcgtaacgcgtgggaatctgcccttgggttcggaataacagttggaaacgactgctaataccggatgatgacgaaagtccaaagatttatcgcccagggatgagcccgcgtaggattagctagttggtgaggtaaaggctcaccaaggcgacgatccttagctggtctgagaggatgatcagccacactgggactgagacacggcccagactcctacgggaggcagcagtagggaatattggacaatgggggcaaccctgatccagcaatgccgcgtgagtgatgaaggccttagggttgtaaagctcttttacccgggatgataatgacagtaccgggagaataagctccggctaactccgtgccagcagccgcggtaatacggagggagctagcgttgttcggaattactgggcgtaaagcgcacgtaggcggcgatttaagtcagaggtgaaagcccggggctcaaccccggaatagcctttgagactggattgcttgaatccgggagaggtgagtggaattccgagtgtagaggtgaaattcgtagatattcggaagaacaccagtggcgaaggcggctcactggaccggcattgacgctgaggtgcgaaagcgtggggagcaaacaggattagataccctggtagtccacgccgtaaacgatgataactagctgctggggcgcatggcgcttcggtggcgcagctaacgcattaagttatccgcctggggagtacggtcgcaagattaaaactcaaaggaattgacgggggcctgcacaagcggtggagcatgtggtttaattcgaagcaacgcgcagaaccttaccaacgtttgacatccctagtatggttttcagagatggattccttcagttcggctggctaggtgacaggtgctgcatggctgtcgtcagctcgtgtcgtgagatgttgggttaagtcccgcaacgagcgcaaccctcgcctttagttgccatcatttagttgggcactctaaaggaaccgccggtgataagccggaggaaggtggggatgacgtcaagtcctcatggcccttacgcgttgggctacacacgtgctacaatggcgactacagtgggcagcgaccgtgcgagcggaagctaatctccaaaagtcgtctcagttcggatcgttctctgcaattcgagagcgtgaaggcggaatcgctagtaatcgcggatcagcatgccgcggtgaatacgttcccaggccttgtacacaccgcccgtcacaccatgggagttggattcactcgaaggcgttgagctaaccgcaaggaggcaggcgaccacagtgggtttagcgactggggtg

SEQ ID NO: 3173 - DNA, 1411 bp, Sphingobium xenophagum
  source 1..1411: mol_type = unassigned DNA
aacgaacgctggcggcatgcctaatacatgcaagtcgaacgagaccttcgggtctagtggcgcacgggtgcgtaacgcgtgggaatctgcccttgggttcggaataacttcgggaaactgaagctaataccggatgatgacgaaagtccaaagatttatcgcccagggatgagcccgcgtaggattagctagttggtggggtaaaggctcaccaaggcaacgatccttagctggtctgagaggatgatcagccacactgggactgagacacggcccagactcctacgggaggcagcagtagggaatattggacaatgggcgaaagcctgatccagcaatgccgcgtgagtgatgaaggccttagggttgtaaagctcttttacccgagatgataatgacagtatcgggagaataagctccggctaactccgtgccagcagccgcggtaatacggagggagctagcgttgttcggaattactgggcgtaaagcgcacgtaggcggcgatttaagtcagaggtgaaagcccggggctcaaccccggaactgcctttgagactggattgctagaatcttggagaggcgagtggaattccgagtgtagaggtgaaattcgtagatattcggaagaacaccagtggcgaaggcggctcgctggacaagtattgacgctgaggtgcgaaagcgtggggagcaaacaggattagataccctggtagtccacgccgtaaacgatgataactagctgccggggcacatggtgtttcggtggcgcagctaacgcattaagttatccgcctggggagtacggtcgcaagattaaaactcaaaggaattgacgggggcctgcacaagcggtggagcatgtggtttaattcgaagcaacgcgcagaaccttaccagcgtttgacatcctcatcgcggatttcagagatgatttccttcagttcggctggatgagtgacaggtgctgcatggctgtcgtcagctcgtgtcgtgagatgttgggttaagtcccgcaacgagcgcaaccctcgcctttagttgccagcatttggttgggtactctaaaggaaccgccggtgataagccggaggaaggtggggatgacgtcaagtcctcatggcccttacgcgctgggctacacacgtgctacaatggcgactacagtgggctgcaaccgtgcgagcggtagctaatctccaaaagtcgtctcagttcggattgttctctgcaactcgagagcatgaaggcggaatcgctagtaatcgcggatcagcatgccgcggtgaatacgttcccaggccttgtacacaccgcccgtcacaccatgggatttggattcacccgaaggcactgcgttaacccgcaagggagacaggtgaccacggtgggtttagagactggggtg

SEQ ID NO: 3174 - DNA, 1409 bp, Sphingobium yanoikuyae
  source 1..1409: mol_type = unassigned DNA
aacgaacgctggcggcatgcctaatacatgcaagtcgaacgagatcttcggatctagtggcgcacgggtgcgtaacgcgtgggaatctgcccttgggttcggaataacttctggaaacggaagctaataccggatgatgacgtaagtccaaagatttatcgcccaaggatgagcccgcgtaggattagctagttggtgaggtaaaggctcaccaaggcgacgatccttagctggtctgagaggatgatcagccacactgggactgagacacggcccagactcctacgggaggcagcagtagggaatattggacaatgggcgaaagcctgatccagcaatgccgcgtgagtgatgaaggccttagggttgtaaagctcttttacccgggatgataatgacagtaccgggagaataagctccggctaactccgtgccagcagccgcggtaatacggagggagctagcgttgttcggaattactgggcgtaaagcgcacgtaggcggctattcaagtcagaggtgaaagcccggggctcaaccccggaactgcctttgaaactagatagcttgaatccaggagaggtgagtggaattccgagtgtagaggtgaaattcgtagatattcggaagaacaccagtggcgaaggcggctcactggactggtattgacgctgaggtgcgaaagcgtggggagcaaacaggattagataccctggtagtccacgccgtaaacgatgataactagctgtcagggcacatggtgttttggtggcgcagctaacgcattaagttatccgcctggggagtacggtcgcaagattaaaactcaaaggaattgacgggggcctgcacaagcggtggagcatgtggtttaattcgaagcaacgcgcagaaccttaccaacgtttgacatccctatcgcggatcgtggagacactttccttcagttcggctggataggtgacaggtgctgcatggctgtcgtcagctcgtgtcgtgagatgttgggttaagtcccgcaacgagcgcaaccctcgcctttagttgccagcatttagttgggtactctaaaggaaccgccggtgataagccggaggaaggtggggatgacgtcaagtcctcatggcccttacgcgttgggctacacacgtgctacaatggcgactacagtgggcagccacctcgcgagagggagctaatctccaaaagtcgtctcagttcggatcgttctctgcaactcgagagcgtgaaggcggaatcgctagtaatcgcggatcagcatgccgcggtgaatacgttcccaggccttgtacacaccgcccgtcacaccatgggagttggattcactcgaaggcgttgagctaaccgtaaggaggcaggcgaccacagtgggtttagcgactggggtg

SEQ ID NO: 3175 - DNA, 1409 bp, Sphingomonas adhaesiva
  source 1..1409: mol_type = unassigned DNA
aacgaacgctggcggcatgcctaacacatgcaagtcgaacgaaggcttcggccttagtggcgcacgggtgcgtaacgcgtgggaatctgcccttgggttcggaataacagttggaaacgactgctaataccggatgatgtcgtaagaccaaagatttatcgcccagggatgagcccgcgtcggattaggtagttggtggggtaaaggcctaccaagccgacgatccgtagctggtctgagaggatgatcagccacactgggactgagacacggcccagactcctacgggaggcagcagtggggaatattggacaatgggcgaaagcctgatccagcaatgccgcgtgagtgatgaaggccttagggttgtaaagctcttttacccgggatgataatgacagtaccgggagaataagctccggctaactccgtgccagcagccgcggtaatacggagggagctagcgttgttcggaattactgggcgtaaagcgcacgtaggcggctttgtaagtcaggggtgaaagcctggagctcaactccagaactgcctttgagactgcatcgcttgaatccgggagaggtgagtggaattccgagtgtagaggtgaaattcgtagatattcggaagaacaccagtggcgaaggcggctcactggaccggtattgacgctgaggtgcgaaagcgtggggagcaaacaggattagataccctggtagtccacgccgtaaacgatgataactagctgtccgggcacttggtgcttgggtggcgcagctaacgcattaagttatccgcctggggagtacggccgcaaggttaaaactcaaaggaattgacgggggcctgcacaagcggtggagcatgtggtttaattcgaagcaacgcgcagaaccttaccagcgtttgacatgtccggacgatttccagagatggatctcttcccttcggggactggaacacaggtgctgcatggctgtcgtcagctcgtgtcgtgagatgttgggttaagtcccgcaacgagcgcaaccctcgcctttagttaccatcattcagttgggtactctaaaggaaccgccggtgataagccggaggaaggtggggatgacgtcaagtcctcatggcccttacgcgctgggctacacacgtgctacaatggcgactacagtgggctgcaatcccgcgagggtgagctaatctccaaaagtcgtctcagttcggattgctctctgcaactcgagagcatgaaggcggaatcgctagtaatcgcggatcagcatgccgcggtgaatacgttcccaggccttgtacacaccgcccgtcacaccatgggagttgggttcacccgaaggcgttgcgctaactcgcaagagaggcaggcgaccacggtgggcttagcgactggggtg

SEQ ID NO: 3176 - DNA, 1409 bp, Sphingomonas aquatilis
  source 1..1409: mol_type = unassigned DNA
aacgaacgctggcggcatgcctaacacatgcaagtcgaacgagatcttcgggtctagtggcgcacgggtgcgtaacgcgtgggaatctgccctttggttcggaataacagttggaaacgactgctaataccggatgatgacgaaagtccaaagatttatcgccagaggatgagcccgcgtaggattagctagttggtgtggtaaaggcgcaccaaggcgacgatccttagctggtctgagaggatgatcagccacactgggactgagacacggcccagactcctacgggaggcagcagtggggaatattggacaatgggcgaaagcctgatccagcaatgccgcgtgagtgatgaaggccttagggttgtaaagctcttttacccgggatgataatgacagtaccgggagaataagctccggctaactccgtgccagcagccgcggtaatacggagggagctagcgttgttcggaattactgggcgtaaagcgcacgtaggcggctttgtaagttagaggtgaaagcctggagctcaactccagaactgcctttaagactgcatcgcttgaatccaggagaggtgagtggaattccgagtgtagaggtgaaattcgtagatattcggaagaacaccagtggcgaaggcggctcactggactggtattgacgctgaggtgcgaaagcgtggggagcaaacaggattagataccctggtagtccacgccgtaaacgatgataactagctgtccggggacttggtctttgggtggcgcagctaacgcattaagttatccgcctggggagtacggccgcaaggttaaaactcaaatgaattgacgggggcctgcacaagcggtggagcatgtggtttaattcgaagcaacgcgcagaaccttaccagcgtttgacatgtccggacgatttccagagatggatctcttcccttcggggactggaacacaggtgctgcatggctgtcgtcagctcgtgtcgtgagatgttgggttaagtcccgcaacgagcgcaaccctcgcctttagttaccatcatttagttggggactctaaaggaaccgccggtgataagccggaggaaggtggggatgacgtcaagtcctcatggcccttacgcgctgggctacacacgtgctacaatggcggtgacagtgggcagcaaactcgcgagagtgcgctaatctccaaaagccgtctcagttcggattgttctctgcaactcgagagcatgaaggcggaatcgctagtaatcgcggatcagcatgccgcggtgaatacgttcccaggccttgtacacaccgcccgtcacaccatgggagttgggttcacccgaaggcgttgcgctaactcgcaagagaggcaggcgaccacggtgggcttagcgactggggtg

SEQ ID NO: 3177 - DNA, 1393 bp, Sphingomonas aurantiaca
  source 1..1393: mol_type = unassigned DNA
  misc_difference 1082: note = n is a, c, g, or t
  misc_difference 1185: note = n is a, c, g, or t
  misc_difference 1214: note = n is a, c, g, or t
  misc_difference 1270: note = n is a, c, g, or t
  misc_difference 1277: note = n is a, c, g, or t
  misc_difference 1288: note = n is a, c, g, or t
  misc_difference 1379: note = n is a, c, g, or t
aatgaacgctggcggcatgcctaacacatgcaagtcgaacgaaggcttcggccttagtggcgcacgggtgcgtaacgcgtgggaatctgccccttggttcggaataacagttggaaacgactgctaataccggatgatgacgtaagtccaaagatttatcgccgagggatgagcccgcgtaggattaggtagttggtgtggtaaaggcgcaccaagccgacgatccttagctggtctgagaggatgatcagccacactgggactgagacacggcccagactcctacgggaggcagcagtggggaatattggacaatgggcgaaagcctgatccagcaatgccgcgtgagtgatgaaggccttagggttgtaaagctcttttacccgggatgataatgacagtaccgggagaataagctccggctaactccgtgccagcagccgcggtaatacggagggagctagcgttattcggaattactgggcgtaaagcgcacgtaggcggctttgtaagtaagaggtgaaagcccagagctcaactctggaattgccttttagactgcatcgcttgaatcatggagaggtcagtggaattccgagtgtagaggtgaaattcgtagatattcggaagaacaccagtggcgaaggcggctgactggacatgtattgacgctgaggtgcgaaagcgtggggagcaaacaggattagataccctggtagtccacgccgtaaacgatgataactagctgtccggggacttggtctttgggtggcgcagctaacgcattaagttatccgcctggggagtacggccgcaaggttaaaactcaaatgaattgacgggggcctgcacaagcggtggagcatgtggtttaattcgaagcaacgcgcagaaccttaccagcgtttgacatggcaggacgacttccggagacggatttcttcccttcggggacctgcacacaggtgctgcatggctgtcgtcagctcgtgtcgtgagatgttgggttaagtcccgcaacgagcgcaaccctygcctttagttgccatcatttaattgggcactttaaaggaaccgccggngataagccggaggaaggtggggatgaccttaagtcctcatggcccttacgcgctgggctacacacgtgctacaatggcggtgacagtgggcagcaagcacgcnagtgtgagctaatctccaaaagccgtctnagttcggattgttctctgcaactcgagagcatgaaggcggaatcgctagtaatcgnggatcancatgccgcggngaatacgttcccaggccttgtacacaccgaccgtcacaccatgggagttggattcacccgaaggcgttgcgctaactcgtaagagaggcangcgaccacggtggg

SEQ ID NO: 3178 - DNA, 1399 bp, unidentified
  source 1..1399: mol_type = unassigned DNA; note = Sphingomonas carotinifaciens
aacgaacgctggcggcatgcctaacacatgcaagtcgaacgaaggcttcggccttagtggcgcacgggtgcgtaacgcgtgggaatctgcccttgggttcggaataacagcgggaaactgctgctaataccggatgatgtcgataagaccaaagatttatcgcctgaggatgagcccgcgttggattaggtagttggtggggtaaaggcctaccaagccgacgatccatagctggtctgagaggatgatcagccacactgggactgagacacggcccagactcctacgggaggcagcagtggggaatattggacaatgggcgaaagcctgatccagcaatgccgcgtgagtgatgaaggccttagggttgtaaagctcttttacccgggatgataatgacagtaccgggagaataagccccggctaactccgtgccagcagccgcggtaatacggagggggctagcgttgttcggaattactgggcgtaaagcgcacgtaggcggctttgtaagtcagaggtgaaagcctggagctcaactccagaactgcctttgagactgcatcgcttgaatccaggagaggtgagtggaattccgagtgtagaggtgaaattcgtagatattcggaagaacaccagtggcgaaggcggctcactggactggtattgacgctgaggtgcgaaagcgtggggagcaaacaggattagataccctggtagtccacgccgtaaacgatgataactagctgtccggggacatggtctttgggtggcgcagctaacgcattaagttatccgcctggggagtacggccgcaaggttaaaactcaaaggaattgacgggggcctgcacaagcggtggagcatgtggtttaattcgaagcaacgcgcagaaccttaccagcgtttgacatgtccggacgattcccagagatgggtctcttcccttcggggactggaacacaggtgctgcatggctgtcgtcagctcgtgtcgtgagatgttgggttaagtcccgcaacgagcgcaaccctcgcctttagttaccatcatttggttgggtactctaaaggaaccgccggtgataagccggaggaaggtggggatgacgtcaagtcctcatggcccttacgcgctgggctacacacgtgctacaatggcggtgacaaagggcagccactctgcgaggaggagctaatcccaaaaagccgtctcagttcggattgttctctgcaactcgagagcatgaaggcggaatcgctagtaatcgcggatcagcacgccgcggtgaatacgttcccaggccttgtacacaccgcccgtcacaccatgggagttggtttcacccgaaggcgttgcgctgacccggaaacgggaggcaggcgacccacggtgggtt

SEQ ID NO: 3179 - DNA, 1407 bp, Sphingomonas changbaiensis
  source 1..1407: mol_type = unassigned DNA
aacgaacgctggcggcatgcctaacacatgcaagtcgaacgagaccttcgggtctagtggcgcacgggtgcgtaacgcgtgggaatctgcccttgggttcggaataacttcgggaaactgaagctaataccggatgatgtcgtaagaccaaagatttatcgcccaaggatgagcccgcgtaggattagctagttggtgaggtaaaggctcaccaaggcgacgatccttagctggtctgagaggatgatcagccacactgggactgagacacggcccagactcctacgggaggcagcagtggggaatattggacaatgggcgaaagcctgatccagcaatgccgcgtgagtgatgaaggccctagggttgtaaagctcttttacccgggatgataatgacagtaccgggagaataagccccggctaactccgtgccagcagccgcggtaatacggagggggctagcgttgttcggaattactgggcgtaaagcgcacgtaggcggctttgtaagtcagaggtgaaagcccggagcttaactccggaattgcctttgagactgcatcgcttgaatccgggagaggtgagtggaattccgagtgtagaggtgaaattcgtagatattcggaagaacaccagtggcgaaggcggctcactggaccggtattgacgctgaggtgcgaaagcgtggggagcaaacaggattagataccctggtagtccacgccgtaaacgatgataactagctgtccgggcacttggtgcttgggtggcgcagctaacgcattaagttatccgcctggggagtacggccgcaaggttaaaactcaaaggaattgacgggggcctgcacaagcggtggagcatgtggtttaattcgaagcaacgcgcagaaccttaccagcgtttgacatggtaggacggtttctggagacagattccttcccttcggggacctacacacaggtgctgcatggctgtcgtcagctcgtgtcgtgagatgttgggttaagtcccgcaacgagcgcaaccctcgtccttagttgccatcatttagttgggtactctaaggaaaccgccggtgataagccggaggaaggtggggatgacgtcaagtcctcatggcccttacgcgctgggctacacacgtgctacaatggcggtgacaatgggcagcaatcccgcgagggtgagctaatctccaaaagccgtctcagttcggattgttctctgcaactcgagagcatgaaggcggaatcgctagtaatcgtggatcagcatgccacggtgaatacgttcccaggccttgtacacaccgcccgtcacaccatgggagttggattgacccgaagacagtgagctaaccgcaaggaggcagctggccacggtcggttcagcgactggggtg

SEQ ID NO: 3180 - DNA, 1408 bp, Sphingomonas desiccabilis
  source 1..1408: mol_type = unassigned DNA
aacgaacgctggcggcatgcctaacacatgcaagtcgaacgagaccttcgggtctagtggcgcacgggtgcgtaacgcgtgggaatctgcccttgggttcggaataacagttggaaacgactgctaataccggatgatgacgtaagtccaaagatttatcgcccagggatgagcccgcgtaggattagctagttggtggggtaaaggcctaccaaggcgacgatccttagctggtctgagaggatgatcagccacactgggactgagacacggcccagactcctacgggaggcagcagtggggaatattggacaatgggcgaaagcctgatccagcaatgccgcgtgagtgatgaaggccttagggttgtaaagctcttttacccgggatgataatgacagtaccgggagaataagccccggctaactccgtgccagcagccgcggtaatacggagggggctagcgttgttcggaattactgggcgtaaagcgcacgtaggcggctttgtaagttagaggtgaaagcctggagcttaactccagaactgcctttaagactgcatcgcttgaatccaggagaggtgagtggaattccgagtgtagaggtgaaattcgtagatattcggaagaacaccagtggcgaaggcggctcactggactggtattgacgctgaggtgcgaaagcgtggggagcaaacaggattagataccctggtagtccacgccgtaaacgatgataactagctgtccgggtgcttggcatttgggtggcgcagctaacgcattaagttatccgcctggggagtacggtcgcaagattaaaactcaaaggaattgacgggggcctgcacaagcggtggagcatgtggtttattcgaagcaacgcgcagaaccttaccagcgtttgacatgtccggacgatttccagagatggatctcttcccttcggggactggaacacaggtgctgcatggctgtcgtcagctcgtgtcgtgagatgttgggttaagtcccgcaacgagcgcaaccctcgcctttagttaccatcatttagttgggtactctaaaggaaccgccggtgataagccggaggaaggtggggatgacgtcaagtcctcatggcccttacgcgctgggctacacacgtgctacaatggcaactacagtgggcagcaatcccgcgagggtgagctaatctccaaaagttgtctcagttcggattgttctctgcaactcgagagcatgaaggcggaatcgctagtaatcgcggatcagcatgccgcggtgaatacgttcccaggccttgtacacaccgcccgtcacaccatgggagttggattcacccgaaggcgttgcgccaacccgcaagggaagcaggcgaccacggtgggttcagcgactggggtg

SEQ ID NO: 3181 - DNA, 1408 bp, Sphingomonas dokdonensis
  source 1..1408: mol_type = unassigned DNA
aacgaacgctggcggcatgcctaacacatgcaagtcgaacgagatcttcggatctagtggcgcacgggtgcgtaacgcgtgggaatctgcccttgggttcggaataacagttagaaatgactgctaataccggatgatgacgttaagtccaaagatttatcgcccgaggatgagcccgcgtaggattagctagttggtgtggtaagagcgcaccaaggcgacgatccttagctggtctgagaggatgatcagccacactgggactgagacacggcccagactcctacgggaggcagcagtggggaatattggacaatgggcgaaagcctgatccagcaatgccgcgtgagtgatgaaggccttagggttgtaaagctcttttacccgggatgataatgacagtaccgggagaataagctccggctaactccgtgccagcagccgcggtaatacggagggagctagcgttgttcggaattactgggcgtaaagcgcacgtaggcggctttgtaagttagaggtgaaagcctggagctcaactccagaattgcctttaagactgcatcgctcgaatccaggagaggtgagtggaattccgagtgtagaggtgaaattcgtagatattcggaagaacaccagtggcgaaggcggctcactggactggtattgacgctgaggtgcgaaagcgtggggagcaaacaggattagataccctggtagtccacgccgtaaacgatgataactagctgtccggggacttggtccttgggtggcgcagctaacgcattaagttatccgcctggggagtacggccgcaaggttaaaactcaaatgaattgacgggggcctgcacaagcggtggagcatgtggtttaattcgaagcaacgcgcagaaccttaccagcgtttgacatggtaggacggttttcagagatggattccttcccttcggggacctacacacaggtgctgcatggctgtcgtcagctcgtgtcgtgagatgttgggttaagtcccgcaacgagcgcaaccctcgcctttagttaccatcattcagttgggtactctaaaggaaccgccggtgataagccggaggaaggtggggatgacgtcaagtcctcatggcccttacgcgctgggctacacacgtgctacaatggcaactacagtgggcagcaatcccgcgagggtgagctaatctccaaaagttgtctcagttcggattgttctctgcaactcgagagcatgaaggcggaatcgctagtaatcgcggatcagcatgccgcggtgaatacgttcccaggccttgtacacaccgcccgtcacaccatgggagttggattcacccgaaggcgtcgcgctaaccgcaaggaggcaggcgaccacggtgggtttagcgactggggtg

SEQ ID NO: 3182 - DNA, 1375 bp, unidentified
  source 1..1375: mol_type = unassigned DNA; note = Sphingomonas endophytica
cgaacgatgctttcgggcatagtggcgcacgggtgcgtaacgcgtgggaatctgcccttgggtctgggataacagttggaaacgactgctaataccggatgatatcgcgagatcaaagatttatcgcccgaggatgagcccgcgtaggattagctagttggtggggtaaaggcctaccaaggcgacgatccttagctggtctgagaggatgatcagccacactgggactgagacacggcccagactcctacgggaggcagcagtggggaatattggacaatgggcgaaagcctgatccagcaatgccgcgtgagtgatgaaggccttagggttgtaaagctcttttacccgggatgataatgacagtaccgggagaataagccccggctaactccgtgccagcagccgcggtaatacggagggggctagcgttgttcggaattactgggcgtaaagcgcacgtaggcggctttgtaagtcaggggtgaaagcctggagctcaactccagaactgcctttgagactgcatcgcttgaatccgggagaggtaagtggaattccgagtgtagaggtgaaattcgtagatattcggaagaacaccagtggcgaaggcggcttactggaccgggattgacgctgaggtgcgaaagcgtggggagcaaacaggattagataccctggtagtccacgccgtaaacgatgataactagctgtccggggacctggtctttgggtggcgcagctaacgcattaagttatccgcctggggagtacggccgcaaggttaaaactcaaaggaattgacgggggcctgcacaagcggtggagcatgtggtttaattcgaagcaacgcgcagaaccttaccagcgtttgacatgtccggacgatttccagagatggatctcttcccttcggggactggaacacaggtgctgcatggctgtcgtcagctcgtgtcgtgagatgttgggttaagtcccgcaacgagcgcaaccctcgcctttagttaccatcatttagttgggtactctaaaggaaccgccggtgataagccggaggaaggtggggatgacgtcaagtcctcatggcccttacgcgctgggctacacacgtgctacaatggcgactacagtgggctgcaatcccgcgagggtgagctaatctccaaaagtcgtctcagttcggattgttctctgcaactcgagagcatgaaggcggaatcgctagtaatcgcggatcagcatgccgcggtgaatacgttcccaggccttgtacacaccgcccgtcacaccatgggagttgggttcacccgaaggcgttgcgctaacccgtaaggggaggcaggcgaccacggtgggcttagcgactggggtg

SEQ ID NO: 3183 - DNA, 1409 bp, Sphingomonas faeni
  source 1..1409: mol_type = unassigned DNA
  misc_difference 1110: note = n is a, c, g, or t
  misc_difference 1112: note = n is a, c, g, or t
  misc_difference 1120: note = n is a, c, g, or t
  misc_difference 1214: note = n is a, c, g, or t
  misc_difference 1270: note = n is a, c, g, or t
  misc_difference 1288: note = n is a, c, g, or t
  misc_difference 1379: note = n is a, c, g, or t
aatgaacgctggcggcatgcctaacacatgcaagtcgaacgaaggcttcggccttagtggcgcacgggtgcgtaacgcgtgggaatctgccccttggttcggaataacagttggaaacgactgctaataccggatgatgacgtaagtccaaagatttatcgccgagggatgagcccgcgtaggattaggtagttggtgtggtaaaggcgcaccaagccgacgatccttagctggtctgagaggatgatcagccacactgggactgagacacggcccagactcctacgggaggcagcagtggggaatattggacaatgggcgaaagcctgatccagcaatgccgcgtgagtgatgaaggccttagggttgtaaagctcttttacccgggatgataatgacagtaccgggagaataagctccggctaactccgtgccagcagccgcggtaatacggagggagctagcgttattcggaattactgggcgtaaagcgcacgtaggcggctttgtaagtaagaggtgaaagcccagagctcaactctggaattgccttttagactgcatcgcttgaatcatggagaggtcagtggaattccgagtgtagaggtgaaattcgtagatattcggaagaacaccagtggcgaaggcggctgactggacatgtattgacgctgaggtgcgaaagcgtggggagcaaacaggattagataccctggtagtccacgccgtaaacgatgataactagctgtccggacacttggtgtttgggtggcgcagctaacgcattaagttatccgcctggggagtacggccgcaaggttaaaactcaaatgaattgacgggggcctgcacaagcggtggagcatgtggtttaattcgaagcaacgcgcagaaccttaccagcgtttgacatggcaggacgacttccagagatggatttcttcccttcggggacctgcacacaggtgctgcatggctgtcgtcagctcgtgtcgtgagatgttgggttaagtcccgcaacgagcgcaaccctcgcctttagttgccatcatttagttgggcactttaaaggaaccgccggtgataagccggaggaaggtggggatgacntnaagtcctnatggcccttacgcgctgggctacacacgtgctacaatggcggtgacagtgggcagcaagcacgcgagtgtgagctaatctccaaaagccgtctnagttcggattgttctctgcaactcgagagcatgaaggcggaatcgctagtaatcgnggatcagcatgccgcggngaatacgttcccaggccttgtacacaccgaccgtcacaccatgggagttggattcacccgaaggcgttgcgctaactcgtaagagaggcangcgaccacggtgggtttagcgactggggtg

SEQ ID NO: 3184 - DNA, 1411 bp, Sphingomonas fennica
  source 1..1411: mol_type = unassigned DNA
aacgaacgctggcggcatgcctaacacatgcaagtcgaacgatgctttcgggcatagtggcgcacgggtgcgtaacgcgtgggaatctgcctttcggtacggaataactcagggaaacttgtgctaataccgtatgacgtcgcgagaccaaagatttatcgccgaaagatgagcccgcgtaggattagctagttggtggggtaaaggcctaccaaggcgacgatccttagctggtctgagaggatgatcagccacactgggactgagacacggcccagactcctacgggaggcagcagtggggaatattggacaatgggcgaaagcctgatccagcaatgccgcgtgagtgatgaaggccctagggttgtaaagctcttttacccgggaagataatgactgtaccgggagaataagccccggctaactccgtgccagcagccgcggtaatacggagggggctagcgttgttcggaattactgggcgtaaagcgtacgtaggcggctttgtaagttagaggtgaaagcctgatgctcaacatcagaattgcctttaagactgcatcgcttgaacgtcggagaggtgagtggaattccgagtgtagaggtgaaattcgtagatattcggaagaacaccagtggcgaaggcggctcactggacgactgttgacgctgaggtacgaaagcgtggggagcaaacaggattagataccctggtagtccacgccgtaaacgatgataactagctgtccgggcacttggtgcttgggtggcgcagctaacgcattaagttatccgcctggggagtacggccgcaaggttaaaactcaaagaaattgacgggggcctgcacaagcggtggagcatgtggtttaattcgaagcaacgcgcagaaccttaccaacgtttgacatccctatcgcggttaccagagatggtttccttcagttcggctggataggtgacaggtgctgcatggctgtcgtcagctcgtgtcgtgagatgttgggttaagtcccgcaacgagcgcaaccctcgcctttagttgccatcattaagttgggcactctaaaggaaccgccggtgataagccggaggaaggtggggatgacgtcaagtcctcatggcccttacgcgttgggctacacacgtgctacaatggcggtgacagtgggcagcaaaccggcgacggtgagctaatctccaaaagccgtctcagttcggattgttctctgcaactcgagagcatgaaggcggaatcgctagtaatcgcggatcagcatgccgcggtgaatacgttcccaggccttgtacacaccgcccgtcacaccatgggagttggattcacccgaaggcgctgctctaacccgcaagggaggaaggcgaccacggtgggtttagcgactggggtg

SEQ ID NO: 3185 - DNA, 1411 bp, unidentified
  source 1..1411: mol_type = unassigned DNA; note = Sphingomonas gei
aatgaacgctggcggcatgcctaacacatgcaagtcgaacgaagccttcgggtttagtggcgcacgggtgcgtaacgcgtgggaatctgccttggggttcggaataactccccgaaaggggtgctaataccggatgatgtcgaaagaccaaagatttatcgccctgagatgagcccgcgtaagattagctagttggtggggtaaaggcctaccaaggcgacgatctttagctggtctgagaggatgatcagccacactgggactgagacacggcccagactcctacgggaggcagcagtggggaatattggacaatgggcgaaagcctgatccagcaatgccgcgtgagtgatgaaggccttagggttgtaaagctcttttacccgggatgataatgacagtaccgggagaataagccccggctaactccgtgccagcagccgcggtaatacggagggggctagcgttattcggaattactgggcgtaaagcgcacgtaggcggctttgtaagtaagaggtgaaagcccggagctcaactccggaactgccttttagactgcatcgcttgaatccaggagaggtgagtggaattccgagtgtagaggtgaaattcgtagatattcggaagaacaccagtggcgaaggcggctcactggactggtattgacgctgaggtgcgaaagcgtggggagcaaacaggattagataccctggtagtccacgccgtaaacgatgataactagctgtctgggcacttggtgttcaggtggcgcagctaacgcattaagttatccgcctggggagtacggccgcaaggttaaaactcaaatgaattgacgggggcctgcacaagcggtggagcatgtggtttaattcgaagcaacgcgcagaaccttaccagcgtttgacatgcccggacgacttccagagatggatttcttcccttcggggactgggacacaggtgctgcatggctgtcgtcagctcgtgtcgtgagatgttgggttaagtcccgcaacgagcgcaaccctcgcctctagttaccatcatttagttgggtactttagaggaaccgccggtgataagccggaggaaggtggggatgacgtcaagtcctcatggcccttacgcgctgggctacacacgtgctacaatggcgactacagtgggcagcaaactcgcgagggtgagctaatctccaaaagtcgtctcagttcggattgcactctgcaactcgagtgcatgaaggcggaatcgctagtaatcgcggatcagcatgccgcggtgaatacgttcccaggccttgtacacaccgcccgtcacaccatgggagttggattcacccgaaggcgttgcgctaacttggcaacaagaggcaggcgaccacggtgggtttagcgactggggtg

SEQ ID NO: 3186 - DNA, 1409 bp, Sphingomonas ginsenosidimutans
  source 1..1409: mol_type = unassigned DNA
aacgaacgctggcggcatgcctaacacatgcaagtcgaacgaaggcttcggccttagtggcgcacgggtgcgtaacgcgtgggaatctgcccttgggttcggaataacagttggaaacgactgctaataccggatgatgtcgcgagaccaaagatttatcgcccagggatgagcccgcgtcggattaggtagttggtggggtaaaggcctaccaagccgacgatccgtagctggtctgagaggatgatcagccacactgggactgagacacggcccagactcctacgggaggcagcagtggggaatattggacaatgggcgaaagcctgatccagcaatgccgcgtgagtgatgaaggccttagggttgtaaagctcttttacccgggatgataatgacagtaccgggagaataagctccggctaactccgtgccagcagccgcggtaatacggagggagctagcgttgttcggaattactgggcgtaaagcgcacgtaggcggctttgtaagtcaggggtgaaagcctggagctcaactccagaactgcctttgagactgcatcgcttgaatccgggagaggtgagtggaattccgagtgtagaggtgaaattcgtagatattcggaagaacaccagtggcgaaggcggctcactggaccggtattgacgctgaggtgcgaaagcgtggggagcaaacaggattagataccctggtagtccacgccgtaaacgatgataactagctgtccgggcacttggtgcttgggtggcgcagctaacgcattaagttatccgcctggggagtacggccgcaaggttaaaactcaaaggaattgacgggggcctgcacaagcggtggagcatgtggtttaattcgaagcaacgcgcagaaccttaccagcgtttgacatgtccggacgattcccagagatgggtctcttcccttcggggactggaacacaggtgctgcatggctgtcgtcagctcgtgtcgtgagatgttgggttaagtcccgcaacgagcgcaaccctcgcctttagttaccatcattcagttgggtactctaaaggaaccgccggtgataagccggaggaaggtggggatgacgtcaagtcctcatggcccttacgcgctgggctacacacgtgctacaatggcgactacagtgggctgcaatcccgcgagggtgagctaatctccaaaagtcgtctcagttcggattgctctctgcaactcgagagcatgaaggcggaatcgctagtaatcgcggatcagcatgccgcggtgaatacgttcccaggccttgtacacaccgcccgtcacaccatgggagttgggttcacccgaaggcgttgcgctaactcgcaagagaggcaggcgaccacggtgggcttagcgactggggtg

SEQ ID NO: 3187 - DNA, 1411 bp, unidentified
  source 1..1411: mol_type = unassigned DNA; note = Sphingomonas ginsenosidivorax
aatgaacgctggcggcatgcctaacacatgcaagtcgaacgaagtccttcggggcttagtggcgcacgggtgcgtaacgcgtgggaatctgccctcaggttcggaataacttcgggaaactgaagctaataccggatgatgacgtaagtccaaagatttatcgcctggggatgagcccgcgtaggattagctagttggtgtggtaaaggcgcaccaaggcgacgatccttagctggtctgagaggatgatcagccacactgggactgagacacggcccagactcctacgggaggcagcagtggggaatattggacaatgggcgaaagcctgatccagcaatgccgcgtgagtgatgaaggccttagggttgtaaagctcttttacccgggatgataatgacagtaccgggagaataagctccggctaactccgtgccagcagccgcggtaatacggagggagctagcgttattcggaattactgggcgtaaagcgcacgtaggcggctttgtaagtaagaggtgaaagcccagagctcaactctggaattgccttttagactgcatcgcttgaatcatggagaggtcagtggaattccgagtgtagaggtgaaattcgtagatattcggaagaacaccagtggcgaaggcggctgactggacatgtattgacgctgaggtgcgaaagcgtggggagcaaacaggattagataccctggtagtccacgccgtaaacgatgataactagctgtccgggcacttggtgcctgggtggcgcagctaacgcattaagttatccgcctggggagtacggccgcaaggttaaaactcaaatgaattgacgggggcctgcacaagcggtggagcatgtggtttaattcgaagcaacgcgcagaaccttaccagcgtttgacatggcaggacgacttccagagatggatttcttcccttcggggacctgcacacaggtgctgcatggctgtcgtcagctcgtgtcgtgagatgttgggttaagtcccgcaacgagcgcaaccctcgaccttagttgccatcatttagttgggcactttaaggtaaccgccggtgataagccggaggaaggtggggatgacgtcaagtcctcatggcccttacgcgctgggctacacacgtgctacaatggcggtgacagtgggcagcaaactcgcaagggtgagctaatctccaaaagccgtctcagttcggattgttctctgcaactcgagagcatgaaggcggaatcgctagtaatcgcggatcagcatgccgcggtgaatacgttcccaggccttgtacacaccgcccgtcacaccatgggagttggattcacccgaaggcgttgcgctaactcgtaagagaggcaggcgaccacggtgggtttagcgactggggtg

SEQ ID NO: 3188 - DNA, 1407 bp, Sphingomonas glacialis
  source 1..1407: mol_type = unassigned DNA
aatgaacgctggcggcatgcctaacacatgcaagtcgaacgaaggcttcggccttagtggcgcacgggtgcgtaacgcgtgggaatctacccttaggttcggaataacagttggaaacgactgctaataccggatgatgacgtaagtccaaagatttatcgcctagggatgagcccgcgtaggattagctagttggtgtggtaaaagcgcaccaaggcgacgatccttagctggtctgagaggatgatcagccacactgggactgagacacggcccagactcctacgggaggcagcagtggggaatattggacaatgggcgaaagcctgatccagcaatgccgcgtgagtgatgaaggccttagggttgtaaagctcttttacccgggatgataatgacagtaccgggagaataagctccggctaactccgtgccagcagccgcggtaatacggagggagctagcgttattcggaattactgggcgtaaagcgcacgtaggcggctttgtaagtaagaggtgaaagcctggtgctcaacaccagaactgccttttagactgcatcgcttgaatccaggagaggtgagtggaattccgagtgtagaggtgaaattcgtagatattcggaagaacaccagtggcgaaggcggctcactggactggtattgacgctgaggtgcgaaagcgtggggagcaaacaggattagataccctggtagtccacgccgtaaacgatgataactagctgtcggggctcttagagcttcggtggcgcagctaacgcattaagttatccgcctggggagtacggccgcaaggttaaaactcaaatgaattgacgggggcctgcacaagcggtggagcatgtggtttaattcgaagcaacgcgcagaaccttaccagcgtttgacatgtccggacgatttcgggagaccgatctcttcccttcggggactggaacacaggtgctgcatggctgtcgtcagctcgtgtcgtgagatgttgggttaagtcccgcaacgagcgcaaccctcgcctttagttaccatcattcagttggggactctaaaggaaccgccggtgataagccggaggaaggtggggatgacgtcaagtcctcatggcccttacgcgctgggctacacacgtgctacaatggcggtgacagtgggcagcaatcctgcaagggtgagctaatctccaaaagccgtctcagttcggattgttctctgcaactcgagagcatgaaggcggaatcgctagtaatcgcggatcagcatgccgcggtgaatacgttcccaggccttgtacacaccgcccgtcacaccatgggagttggattcacccgaaggcagtgcgctaaccgcaaggaggcagctgaccacggtgggttcagcgactggggtg

SEQ ID NO: 3189 - DNA, 1411 bp, unidentified
  source 1..1411: mol_type = unassigned DNA; note = Sphingomonas guangdongensis
aacgaacgctggcggcatgcctaacacatgcaagtcgaacggatgctttcgggcattagtggcgcacgggtgcgtaacgcgtgggaatctgccctggggtctgggataacttctcgaaagggaagctaataccggatgatatcgcgagatcaaagatttatcgccctgggatgagcccgcgtccgattaggtagttggtggggtaaaggcctaccaagccgacgatcggtagctggtctgagaggatgatcagccacactgggactgagacacggcccagactcctacgggaggcagcagtggggaatattggacaatgggcgcaagcctgatccagcaatgccgcgtgagtgatgaaggccttagggttgtaaagctcttttacccgggatgataatgacagtaccgggagaataagccccggctaactccgtgccagcagccgcggtaatacggagggggctagcgttgttcggaattactgggcgtaaagcgcacgtaggcggctttgtaagttaggggtgaaagcctggtgctcaacaccagaactgcctttgatactgcatggcttgaatccgagagaggtgagtggaattccgagtgtagaggtgaaattcgtagatattcggaagaacaccagtggcgaaggcggctcactggctcggtattgacgctgaggtgcgaaagcgtggggagcaaacaggattagataccctggtagtccacgccgtaaacgatgataactagctgtcggggcacttggtgtttcggtggcgcagctaacgcattaagttatccgcctggggagtacggtcgcaagattaaaactcaaaggaattgacgggggcctgcacaagcggtggagcatgtggtttaattcgaagcaacgcgcagaaccttaccagcgtttgacatggtaggacgactggcagagatgcctttcttcccttcggggacctacacacaggtgctgcatggctgtcgtcagctcgtgtcgtgagatgttgggttaagtcccgcaacgagcgcaaccctcgcctttagttaccatcatttagttgggtactctaaaggaaccgccggtgataagccggaggaaggtggggatgacgtcaagtcctcatggcccttacgcgctgggctacacacgtgctacaatggcaagtacagtgggcagcaatcccgcgagggtgagctaatctccaaaacttgtctcagttcggattgttctctgcaactcgagagcatgaaggcggaatcgctagtaatcgcggatcagcatgccgcggtgaatacgttcccaggccttgtacacaccgcccgtcacaccatgggagttgggttcacccgaaggcgttgcgctaactcgtaagagaggcaggcgaccacggtgggcttagcgactggggtg

SEQ ID NO: 3190 - DNA, 1409 bp, Sphingomonas haloaromaticamans
  source 1..1409: mol_type = unassigned DNA
  misc_difference 60: note = n is a, c, g, or t
  misc_difference 89: note = n is a, c, g, or t
  misc_difference 220: note = n is a, c, g, or t
aacgaacgctggcggcatgcctaacacatgcaagtcgaacgaaggcttcggccttagtgncgcacgggtgcgtaacgcgtgggaatctncccttgggttcggaataacagtgagaaattactgctaataccgtatgatgtcgcgagaccaaagatttatctccaaaggatgagcccgcgtaggattagctagttggtggggtaaaggcccaccaaggcgncgatccttagctggtctgagaggatgatcagccacactgggactgagacacggcccagactcctacgggaggcagcagtggggaatattggacaatgggcgaaagcctgatccagcaatgccgcgtgagtgatgaaggccctagggttgtaaagctcttttacccgggaagataatgactgtaccgggagaataagccccggctaactccgtgccagcagccgcggtaatacggagggggctagcgttgttcggaattactgggcgtaaagcgcacgtaggcggcttggtaagttagaggtgaaagcccggagctcaactccggaatagcctttaagactgtctcgcttgaacgtcggagaggtgagtggaattccgagtgtagaggtgaaattcgtagatattcggaagaacaccagtggcgaaggcggctcactggacgactgttgacgctgaggtgcgaaagcgtggggagcaaacaggattagataccctggtagtccacgccgtaaacgatgataactagctgtccgggcacttgtgcttgggtggcgcagctaacgcattaagttatccgcctggggagtacggtcgcaaggttaaaactcaaagaaattgacgggggcctgcacaagcggtggagcatgtggtttaattcgaagcaacgcgcagaaccttaccaacgtttgacatccctatcgcggttagtggagacactttccttcagttcggctggataggtgacaggtgctgcatggctgtcgccagctcgtgtcgtgagatgttgggttaagtcccgcaacgagcgcaaccctcgcctttagttgccatcattaagttgggcactctaaaggaaccgccggtgataagccggaggaaggtggggatgacgtcaagtcctcatggcccttacgcgttgggctacacacgtgctacaatggcaactacagtgggcagcgaactcgcgagggtgagctaatctccaaaagttgtctcagttcggattgttctctgcaactcgagagcatgaaggcggaatcgctagtaatcgcggatcagcatgccgcggtgaatacgttcccaggccttgtacacaccgcccgtcacaccatgggagttggattcacccgaaggcgctgcgctaaccgcaagggaggcaggcgaccacggtgggtttagcgactggggtg

SEQ ID NO: 3191 - DNA, 1411 bp, unidentified
  source 1..1411: mol_type = unassigned DNA; note = Sphingomonas hengshuiensis
aatgaacgctggcggcatgcctaacacatgcaagtcgaacgaagtccttcggggcttagtggcgcacgggtgcgtaacgcgtgggaatctgccccttggttcggaataacagtgagaaattactgctaataccggataacgacgtaagtccaaagatttatcgccgagggatgagcccgcgtaggattagctagttggtgtggtaaaggcgcaccaaggcgacgatccttagctggtctgagaggatgatcagccacactgggactgagacacggcccagactcctacgggaggcagcagtggggaatattggacaatgggcgaaagcctgatccagcaatgccgcgtgagtgatgaaggccttagggttgtaaagctcttttacccgggatgataatgacagtaccgggagaataagctccggctaactccgtgccagcagccgcggtaatacggagggagctagcgttattcggaattactgggcgtaaagcgcacgtaggcggctttgtaagtaagaggtgaaagcccggagatcaactccggaactgccttttagactgcatcgcttgaatccaggagaggtgagtggaattccgagtgtagaggtgaaattcgtagatattcggaagaacaccagtggcgaaggcggctcactggactggtattgacgctgaggtgcgaaagcgtggggagcaaacaggattagataccctggtagtccacgccgtaaacgatgataactagctgtctgggtacttggtacttaggtggcgcagctaacgcattaagttatccgcctggggagtacggccgcaaggttaaaactcaaatgaattgacgggggcctgcacaagcggtggagcatgtggtttaattcgaagcaacgcgcagaaccttaccagcgtttgacatgtccggacgacttcgagagatcgatttcttcccttcggggactggaacacaggtgctgcatggctgtcgtcagctcgtgtcgtgagatgttgggttaagtcccgcaacgagcgcaaccctcgactttagttaccatcatttagttgggtactctaaagtaaccgccggtgataagccggaggaaggtggggatgacgtcaagtcctcatggcccttacgcgctgggctacacacgtgctacaatggcgactacagtgggctgcaaactcgcgagggtgagctaatctccaaaagtcgtctcagttcggattgcactctgcaactcgagtgcatgaaggcggaatcgctagtaatcgtggatcagcatgccacggtgaatacgttcccaggccttgtacacaccgcccgtcacaccatgggagttggattcacccgaaggcgttgcgctaactcgcaagagaggcaggcgaccacggtgggtttagcgactggggtg

SEQ ID NO: 3192 - DNA, 1409 bp, Sphingomonas histidinilytica
  source 1..1409: mol_type = unassigned DNA
aacgaacgctggcggcatgcctaacacatgcaagtcgaacgaaggcttcggccttagtggcgcacgggtgcgtaacgcgtgggaatctgcccttgggtacggaataactctccgaaaggagtgctaataccgtatgatgacgaaagtccaaagatttatcgcctgaggatgagcccgcgttggattagctagttggtggggtaaaggcctaccaaggcgacgatccatagctggtctgagaggatgatcagccacactgggactgagacacggcccagactcctacgggaggcagcagtggggaatattggacaatgggcgaaagcctgatccagcaatgccgcgtgagtgatgaaggccttagggttgtaaagctcttttacccgggaagataatgactgtaccgggagaataagccccggctaactccgtgccagcagccgcggtaatacggagggggctagcgttgttcggaattactgggcgtaaagcgcacgtaggcggctttgtaagttagaggtgaaagcccggggctcaaccccggaattgcctttaagactgcatcgcttgaacgtcggagaggtgagtggaattccgagtgtagaggtgaaattcgtagatattcggaagaacaccagtggcgaaggcggctcactggacgactgttgacgctgaggtgcgaaagcgtggggagcaaacaggattagataccctggtagtccacgccgtaaacgatgataactagctgtccgggcacttggtgcttgggtggcgcagctaacgcattaagttatccgcctggggagtacggccgcaaggttaaaactcaaagaaattgacgggggcctgcacaagcggtggagcatgtggtttaattcgaagcaacgcgcagaaccttaccaacgtttgacatccctagtatggttagtggagacactttccttcagttcggctggctaggtgacaggtgctgcatggctgtcgtcagctcgtgtcgtgagatgttgggttaagtcccgcaacgagcgcaaccctcgcctttagttgccatcattaagttgggtactctaaaggaaccgccggtgataagccggaggaaggtggggatgacgtcaagtcctcatggcccttacgcgttgggctacacacgtgctacaatggcaactacagtgggcagcaatcccgcgagggcgagctaatctccaaaagttgtctcagttcggattgttctctgcaactcgagagcatgaaggcggaatcgctagtaatcgcggatcagcatgccgcggtgaatacgttcccaggccttgtacacaccgcccgtcacaccatgggagttggattcacccgaaggcgctgcgctaaccgcaaggaggcaggcgaccacggtgggtttagcgactggggtg

SEQ ID NO: 3193 - DNA, 1409 bp, unidentified
  source 1..1409: mol_type = unassigned DNA; note = Sphingomonas indica
aacgaacgctggcggcatgcctaacacatgcaagtcgaacgagaccttcgggtctagtggcgcacgggtgcgtaacgcgtgggaatctgcccttcggttcggaataacagttagaaatgactgctaataccggatgatgtcttcggaccaaagatttatcgccgagggatgagcccgcgtaggattagcttgttggtgaggtaaaggctcaccaaggcgacgatccttagctggtctgagaggatgatcagccacactgggactgagacacggcccagactcctacgggaggcagcagtggggaatattggacaatgggcgaaagcctgatccagcaatgccgcgtgagtgatgaaggccttagggttgtaaagctcttttacccgggaagataatgactgtaccgggagaataagccccggctaactccgtgccagcagccgcggtaatacggagggggctagcgttgttcggaattactgggcgtaaagcgcgcgtaggcggctttgtaagttagaggtgaaagcctggagctcaactccagaactgcctttaagactgcatcgcttgaatccgggagaggtgagtggaattccgagtgtagaggtgaaattcgtagatattcggaagaacaccagtggcgaaggcggctcactggaccggcattgacgctgaggtgcgaaagcgtggggagcaaacaggattagataccctggtagtccacgccgtaaacgatgataactagctgtcgggggtcttagactttcggtggcgcagctaacgcattaagttatccgcctggggagtacggccgcaaggttaaaactcaaagaaattgacgggggcctgcacaagcggtggagcatgtggtttaattcgaagcaacgcgcagaaccttaccaacgtttgacatgtccagtatggttagtggagacactttccttcagttcggctggctggaacacaggtgctgcatggctgtcgtcagctcgtgtcgtgagatgttgggttaagtcccgcaacgagcgcaaccctcgaccttagttgccatcattaagttgggcactctaaggtaaccgccggtgataagccggaggaaggtggggatgacgtcaagtcctcatggcccttacgcgttgggctacacacgtgctacaatggcgactacagtgggcagcaaactcgcgagggtgagctaatctccaaaagtcgtctcagttcggattgcactctgcaactcgagtgcatgaaggcggaatcgctagtaatcgcggatcagcatgccgcggtgaatacgttcccaggccttgtacacaccgcccgtcacaccatgggagttggtttcacccgaaggctgtgcgctaaccgcaaggaggcagcagaccacggtgggatcagcgactggggtg

SEQ ID NO: 3194 - DNA, 1409 bp, unidentified
  source 1..1409: mol_type = unassigned DNA; note = Sphingomonas jatrophae
aacgaacgctggcggcatgcctaacacatgcaagtcgaacgaaggcttcggccttagtggcgcacgggtgcgtaacgcgtgggaatctgcccaaaggtacggaataactcctcgaaaggggtgctaataccgtatgatgtcgcaagaccaaagatttatcgcctttggatgagcccgcgtaggattagctagttggtggggtaaaggcctaccaaggcgacgatccttagctggtctgagaggatgatcagccacactgggactgagacacggcccagactcctacgggaggcagcagtggggaatattggacaatgggcgaaagcctgatccagcaatgccgcgtgagtgatgaaggccttagggttgtaaagctcttttacccgggaagataatgactgtaccgggagaataagccccggctaactccgtgccagcagccgcggtaatacggagggggctagcgttgttcggaattactgggcgtaaagcgcacgtaggcggctttgtaagtcaggggtgaaagcctggagctcaactccagaactgcctttgagactgcatcgcttgaatcatggagaggtcagtggaattccgagtgtagaggtgaaattcgtagatattcggaagaacaccagtggcgaaggcggctgactggacatgtattgacgctgaggtgcgaaagcgtggggagcaaacaggattagataccctggtagtccacgccgtaaacgatgagaactagctgtccgggcacttggtgcttgggtggcgcagctaacgcattaagttctccgcctggggagtacggccgcaaggttaaaactcaaagaaattgacgggggcctgcacaagcggtggagcatgtggtttaattcgaagcaacgcgcagaaccttaccaacgtttgacatgcccggacgacttccagagatggatttcttcccttcggggactgggacacaggtgctgcatggctgtcgtcagctcgtgtcgtgagatgttgggttaagtcccgcaacgagcgcaaccctcgcctttagttgccatcattaagttgggcactctaaaggaaccgccggtgataagccggaggaaggtggggatgacgtcaagtcctcatggcccttacgcgttgggctacacacgtgctacaatggcggtgacagtgggcagcaaactcgcgagggtgagctaatctccaaaagccgtctcagttcggattgcactctgcaactcgagtgcatgaaggcggaatcgctagtaatcgcggatcagcatgccgcggtgaatacgttcccaggccttgtacacaccgcccgtcacaccatgggagttggattcacccgaaggcgctgcgctaacccgcaagggaggcaggcgaccacggtgggtttagcgactggggtg

SEQ ID NO: 3195 - DNA, 1410 bp, unidentified
  source 1..1410: mol_type = unassigned DNA; note = Sphingomonas jeddahensis
aacgaacgctggcggcatgcctaacacatgcaagtcgaacgatgccttcgggcatagtggcgcacgggtgcgtaacgcgtgggaatctgccccttggttcggaataacagttagaaatgactgctaataccggatgatgacgttaagtccaaagatttatcgccgagggatgagcccgcgtaggattagctagttggtgtggtaagagcgcaccaaggcgacgatccttagctggtctgagaggatgatcagccacactgggactgagacacggcccagactcctacgggaggcagcagtggggaatattggacaatgggcgaaagcctgatccagcaatgccgcgtgagtgatgaaggccttagggttgtaaagctcttttacccgggatgataatgacagtaccgggagaataagctccggctaactccgtgccagcagccgcggtaatacggagggagctagcgttgttcggaattactgggcgtaaagcgcacgtaggcggctttgtaagttagaggtgaaagcctggagctcaactccagaattgcctttaagactgcatcgctcgaatccaggagaggtgagtggaattccgagtgtagaggtgaaattcgtagatattcggaagaacaccagtggcgaaggcggctcactggactggtattgacgctgaggtgcgaaagcgtggggagcaaacaggattagataccctggtagtccacgccgtaaacgatgataactagctgtccggggacttggtccttgggtggcgcagctaacgcattaagttatccgcctggggagtacggccgcaaggttaaaactcaaatgaattgacgggggcctgcacaagcggtggagcatgtggtttaattcgaagcaacgcgcagaaccttaccagcgtttgacatggtaggacggctccgggagaccggttccttcccttcggggacctacacacaggtgctgcatggctgtcgtcagctcgtgtcgtgagatgttgggttaagtcccgcaacgagcgcaaccctcgcctttagttaccatcatttagttgggtactctaaaggaaccgccggtgataagccggaggaaggtggggatgacgtcaagtcctcatggcccttacgcgctgggctacacacgtgctacaatggcaactacagtgggcagcaatcccgcgagggtgagctaatctccaaaagttgtctcagttcggattgttctctgcaactcgagagcatgaaggcggaatcgctagtaatcgcggatcagcacgccgcggtgaatacgttcccaggccttgtacacaccgcccgtcacaccatgggagttggattcacccgaaggcgtctcgctaacccgcaagggaggcaggcgaccacggtgggtttagcgactggggtg

SEQ ID NO: 3196 - DNA, 1409 bp, Sphingomonas koreensis
  source 1..1409: mol_type = unassigned DNA
aatgaacgctggcggcatgcctaacacatgcaagtcgaacgaaggcttcggccttagtggcgcacgggtgcgtaacgcgtgggaatctgcccttgggttcggaataacagttagaaatgactgctaataccggatgatgtcgtaagaccaaagatttatcgcccaaggatgagcccgcgtaggattagctagttggtgaggtaaaagctcaccaaggcgacgatccttagctggtctgagaggatgatcagccacactgggactgagacacggcccagactcctacgggaggcagcagtggggaatattggacaatgggcgaaagcctgatccagcaatgccgcgtgagtgatgaaggccttagggttgtaaagctcttttacccgggatgataatgacagtaccgggagaataagctccggctaacttcgtgccagcagccgcggtaatacgaggggagctagcgttattcggaattactgggcgtaaagcgcacgtaggcggctttgtaagttagaggtgaaagcccggggctcaactccggaattgcctttaagactgcatcgcttgaatccaggagaggtgagtggaattccgagtgtagaggtgaaattcgtagatattcggaagaacaccagtggcgaaggcggctcactggactggtattgacgctgaggtgcgaaagcgtggggagcaaacaggattagataccctggtagtccacgccgtaaacgatgataactagctgtccgggcacttggtgcttgggtggcgcagctaacgcattaagttatccgcctggggagtacggtcgcaagattaaaactcaaaggaattgacgggggcctgcacaagcggtggagcatgtggtttaattcgaagcaacgcgcagaaccttaccagcgtttgacatgtccggacgatttccagagatggatttcttcccttcggggactggaacacaggtgctgcatggctgtcgtcagctcgtgtcgtgagatgttgggttaagtcccgcaacgagcgcaaccctcgcctttagttaccatcatttagttgggtactctaaaggaaccgccggtgataagccggaggaaggtggggatgacgtcaagtcctcatggcccttacgcgctgggctacacacgtgctacaatggcaactacagtgggcagcaatcccgcgagggtgagctaatctccaaaagttgtctcagttcggattgttctctgcaactcgagagcatgaaggcggaatcgctagtaatcgcggatcagcatgccgcggtgaatacgttcccaggccttgtacacaccgcccgtcacaccatgggagttgggttcacccgaaggcgttgcgctaactcgcaagagaggcaggcgaccacggtgggcttagcgactggggtg

SEQ ID NO: 3197 - DNA, 1411 bp, unidentified
  source 1..1411: mol_type = unassigned DNA; note = Sphingomonas laterariae
aacgaacgctggcggcatgcctaacacatgcaagtcgaacgaaggcttcggccttagtggcgcacgggtgcgtaacgcgtgggaatctgcccttgggtacggaataacagttagaaatgactgctaataccgtatgatgacgtaagtccaaagatttatcgcccagggatgagcccgcgtaggattaggtagttggtgaggtaaaggctcaccaagccgacgatccttagctggtctgagaggatgatcagccacactgggactgagacacggcccagactcctacgggaggcagcagtggggaatattggacaatgggcgaaagcctgatccagcaatgccgcgtgagtgatgaaggccctagggttgtaaagctcttttacccgggaagataatgactgtaccgggagaataagccccggctaactccgtgccagcagccgcggtaatacggagggggctagcgttgttcggaattactgggcgtaaagcgcacgtaggcggcttggtaagttagaggtgaaagcccggagctcaactccggaattgcctttaagactgcctcgcttgaacgtcggagaggtgagtggaattccgagtgtagaggtgaaattcgtagatattcggaagaacaccagtggcgaaggcggctcactggacgactgttgacgctgaggtgcgaaagcgtggggagcaaacaggattagataccctggtagtccacgccgtaaacgatgataactagctgtccgggtacttggtacttgggtggcgcagctaacgcattaagttatccgcctggggagtacggccgcaaggttaaaactcaaagaaattgacgggggcctgcacaagcggtggagcatgtggtttaattcgaagcaacgcgcagaaccttaccaacgtttgacatccctatcgcggttagtggagacactttccttcagttcggctggataggtgacaggtgctgcatggctgtcgtcagctcgtgtcgtgagatgttgggttaagtcccgcaacgagcgcaaccctcgcctttagttgccatcatttagttgggcactctaaaggaaccgccggtgataagccggaggaaggtggggatgacgtcaagtcctcatggcccttacgcgttgggctacacacgtgctacaatggcaactacagtgggcagcaaactcgcgagggtgagctaatctccaaaagttgtctcagttcggattgttctctgcaactcgagagcatgaaggcggaatcgctagtaatcgcggatcagcatgccgcggtgaatacgttcccaggccttgtacacaccgcccgtcacaccatgggagttggattcacccgaaggcgctgcgctaacccgcaagggaggcaggcgaccacggtgggtttagcgactggggtg

SEQ ID NO: 3198 - DNA, 1409 bp, Sphingomonas melonis
  source 1..1409: mol_type = unassigned DNA
aacgaacgctggcggcatgcctaacacatgcaagtcgaacgagatcttcgggtctagtggcgcacgggtgcgtaacgcgtgggaatctgccctttggttcggaataacagttggaaacgactgctaataccggatgatgacgaaagtccaaagatttatcgccagaggatgagcccgcgtaggattagctagttggtgtggtaaaggcgcaccaaggcgacgatccttagctggtctgagaggatgatcagccacactgggactgagacacggcccagactcctacgggaggcagcagtggggaatattggacaatgggcgaaagcctgatccagcaatgccgcgtgagtgatgaaggccttagggttgtaaagctcttttacccgggatgataatgacagtaccgggagaataagctccggctaactccgtgccagcagccgcggtaatacggagggagctagcgttgttcggaattactgggcgtaaagcgcacgtaggcggctttgtaagttagaggtgaaagcctggagctcaactccagaactgcctttaagactgcatcgcttgaatccaggagaggtgagtggaattccgagtgtagaggtgaaattcgtagatattcggaagaacaccagtggcgaaggcggctcactggactggtattgacgctgaggtgcgaaagcgtggggagcaaacaggattagataccctggtagtccacgccgtaaacgatgataactagctgtccggggacttggtctttgggtggcgcagctaacgcattaagttatccgcctggggagtacggccgcaaggttaaaactcaaatgaattgacgggggcctgcacaagcggtggagcatgtggtttaattcgaagcaacgcgcagaaccttaccagcgtttgacatgtccggacgatttccagagatggatctcttcccttcggggactggaacacaggtgctgcatggctgtcgtcagctcgtgtcgtgagatgttgggttaagtcccgcaacgagcgcaaccctcgcctttagttaccatcattcagttggggactctaaaggaaccgccggtgataagccggaggaaggtggggatgacgtcaagtcctcatggcccttacgcgctgggctacacacgtgctacaatggcggtgacagtgggcagcaaactcgcgagagtgcgctaatctccaaaagccgtctcagttcggattgttctctgcaactcgagagcatgaaggcggaatcgctagtaatcgcggatcagcatgccgcggtgaatacgttcccaggccttgtacacaccgcccgtcacaccatgggagttgggttcacccgaaggcgttgcgctaactcgcaagagaggcaggcgaccacggtgggcttagcgactggggtg

SEQ ID NO: 3199 - DNA, 1409 bp, Sphingomonas mucosissima
  source 1..1409: mol_type = unassigned DNA
aatgaacgctggcggcatgcctaacacatgcaagtcgaacgaaggcttcggccttagtggcgcacgggtgcgtaacgcgtgggaatctgccccttggttcggaataacagttagaaatgactgctaataccggatgacgacgtaagtccaaagatttatcgccgagggatgagcccgcgtaggattagctagttggtgtggtaagagcgcaccaaggcgacgatccttagctggtctgagaggatgatcagccacactgggactgagacacggcccagactcctacgggaggcagcagtggggaatattggacaatgggcgaaagcctgatccagcaatgccgcgtgagtgatgaaggccttagggttgtaaagctcttttacccgggatgataatgacagtaccgggagaataagctccggctaactccgtgccagcagccgcggtaatacggagggagctagcgttattcggaattactgggcgtaaagcgcacgtaggcggctttgtaagttagaggtgaaagcctggagctcaactccagaattgcctttaagactgcatcgctcgaatccaggagaggtgagtggaattccgagtgtagaggtgaaattcgtagatattcggaagaacaccagtggcgaaggcggctcactggactggtattgacgctgaggtgcgaaagcgtggggagcaaacaggattagataccctggtagtccacgccgtaaacgatgataactagctgtccggggacttggtccttgggtggcgcagctaacgcattaagttatccgcctggggagtacggccgcaaggttaaaactcaaatgaattgacgggggcctgcacaagcggtggagcatgtggtttaattcgaagcaacgcgcagaaccttaccagcgtttgacatggtaggacgactttcagagatggatttcttcccttcgcggacctacacacaggtgctgcatggctgtcgtcagctcgtgtcgtgagatgttgggttaagtcccgcaacgagcgcaaccctcgcctttagttaccatcatttagttgggtactctaaaggaaccgccggtgataagccggaggaaggtggggatgacgtcaagtcctcatggcccttacgcgctgggctacacacgtgctacaatggcaactacagtgggcagcaatcccgcgagggtgagctaatctccaaaagttgtctcagttcggattgttctctgcaactcgagagcatgaaggcggaatcgctagtaatcgcggatcagcacgccgcggtgaatacgttcccaggccttgtacacaccgcccgtcacaccatgggagttggattcacccgaaggcgtcgcgctaacccgcaagggaggcaggcgaccacggtgggtttagcgactggggtg

SEQ ID NO: 3200 - DNA, 1409 bp, unidentified
  source 1..1409: mol_type = unassigned DNA; note = Sphingomonas naasensis
aatgaacgctggcggcatgcctaacacatgcaagtcgaacgaagccttcgggtttagtggcgcacgggtgcgtaacgcgtgggaatctgccttcaggttcggaataactccccgaaaggggtgctaataccggatgatgtctacggaccaaagatttatcgcctgaagatgagcccgcgtaggattagctagttggtggggtaaaggcccaccaaggcgacgatccttagctggtctgagaggatgatcagccacactgggactgagacacggcccagactcctacgggaggcagcagtggggaatattggacaatgggcgaaagcctgatccagcaatgccgcgtgagtgatgaaggccttagggttgtaaagctcttttacccgggatgataatgacagtaccgggagaataagctccggctaactccgtgccagcagccgcggtaatacggagggagctagcgttattcggaattactgggcgtaaagcgcacgtaggcggctttgtaagtcagaggtgaaagcctggagctcaactccagaactgcctttgagactgcatcgcttgaatccaggagaggtgagtggaattccgagtgtagaggtgaaattcgtagatattcggaagaacaccagtggcgaaggcggctcactggactggtattgacgctgaggtgcgaaagcgtggggagcaaacaggattagataccctggtagtccacgccgtaaacgatgataactagctgtctgggtacttggtattcaggtggcgcagctaacgcattaagttatccgcctggggagtacggccgcaaggttaaaactcaaatgaattgacgggggcctgcacaagcggtggagcatgtggtttaattcgaagcaacgcgcagaaccttaccagcgtttgacatgcccggacggtttccagagatggattccttcccttcggggactgggacacaggtgctgcatggctgtcgtcagctcgtgtcgtgagatgttgggttaagtcccgcaacgagcgcaaccctcgcctttagttaccatcatttagttggggactctaaaggaaccgccggtgataagccggaggaaggtggggatgacgtcaagtcctcatggcccttacgcgctgggctacacacgtgctacaatggcaactacagtgggcagcaatcccgcgagggtgagctaatctccaaaagttgtctcagttcggattgttctctgcaactcgagagcatgaaggcggaatcgctagtaatcgcggatcagcatgccgcggtgaatacgttcccaggccttgtacacaccgcccgtcacaccatgggagttggattcacccgaaggcgttgcgctaactcgcaagagaggcaggcgaccacggtgggtttagcgactggggtg

SEQ ID NO: 3201 - DNA, 1407 bp, unidentified
  source 1..1407: mol_type = unassigned DNA; note = Sphingomonas olei
aatgaacgctggcggcatgcctaacacatgcaagtcgaacgaaggcttcggccttagtggcgcacgggtgcgtaacgcgtgggaatctgccccttggttcggaataacagttagaaatgactgctaataccggatgatgacgtaagtccaaagatttatcgccgagggatgagcccgcgtaggattagctagttggtgtggtaagagcgcaccaaggcgacgatccttagctggtctgagaggatgatcagccacactgggactgagacacggcccagactcctacgggaggcagcagtggggaatattggacaatgggcgaaagcctgatccagcaatgccgcgtgagtgatgaaggccttagggttgtaaagctcttttacccgggatgataatgacagtaccgggagaataagctccggctaactccgtgccagcagccgcggtaatacggagggagctagcgttattcggaattactgggcgtaaagcgcacgtaggcggctttgtaagtaagaggtgaaagcccagagctcaactctggaattgccttttagactgcatcgcttgaatcatggagaggtcagtggaattccgagtgtagaggtgaaattcgtagatattcggaagaacaccagtggcgaaggcggctgactggacatgtattgacgctgaggtgcgaaagcgtggggagcaaacaggattagataccctggtagtccacgccgtaaacgatgataactagctgtccggggacttggtccttgggtggcgcagctaacgcattaagttatccgcctggggagtacggccgcaaggttaaaactcaaatgaattgacgggggcctgcacaagcggtggagcatgtggtttaattcgaagcaacgcgcagaaccttaccagcgtttgacatggtaggacggcttccagagatggattccttcccttcggggacctacacacaggtgctgcatggctgtcgtcagctcgtgtcgtgagatgttgggttaagtcccgcaacgagcgcaaccctcgcctttagttaccatcatttagttgggtactctaaaggaaccgccggtgataagccggaggaaggtggggatgacgtcaagtcctcatggcccttacgcgctgggctacacacgtgctacaatggcaactacagtgggcagcaatcccgcgagggtgagctaatctccaaaagttgtctcagttcggattgttctctgcaactcgagagcatgaaggcggaatcgctagtaatcgcggatcagcatgccgcggtgaatacgttcccaggccttgtacacaccgcccgtcacaccatgggagttggattcacccgaaggcgtcgcgctaaccgcaaggaggcaggcgaccacggtgggtttagcgactggggtg

SEQ ID NO: 3202 - DNA, 1306 bp, Sphingomonas oligophenolica
  source 1..1306: mol_type = unassigned DNA
aatgaacgctggcggcatgcctaacacatgcaagtcgaacgaagccttcgggcttagtggcgcacgggtgcgtaacgcgtgggaatctgcccttgggttcggaataacagcgagaaattgctgctaataccggatgatgacgtaagtccaaagatttatcgcccaaggatgagcccgcgtaggattagctagttggtgaggtaaaggctcaccaaggcgacgatccttagctggtctgagaggatgatcagccacactgggactgagacacggcccagactcctacgggaggcagcagtggggaatattggacaatgggcgaaagcctgatccagcaatgccgcgtgagtgatgaaggccttagggttgtaaagctcttttacccgggatgataatgacagtaccgggagaataagctccggctaactccgtgccagcagccgcggtaatacggagggagctagcgttattcggaattactgggcgtaaagcgcacgtaggcggctttgtaagttagaggtgaaagcctggagctcaactccagaattgcctttaagactgcatcgcttgaatccaggagaggtgagtggaattccgagtgtagaggtgaaattcgtagatattcggaagaacaccagtggcgaaggcggctcactggactggtattgacgctgaggtgcgaaagcgtggggagcaaacaggattagataccctggtagtccacgccgtaaacgatgataactagctgtcggggctcttagagcttcggtggcgcactaacgcattaagttatccgcctggggagtacggccgcaaggttaaaactcaaaggaattgacgggggcctgcacaagcggtggagcatgtggtttaattcgaagcaacgcgcagaaccttaccagcgtttgacatgtccggacgatttccagagatggatctcttcccttcggggactggaacacaggtgctgcatggctgtcgtcagctcgtgtcgtgagatgttgggttaagtcccgcaacgagcgcaaccctcgtctttagttgccatcatttagttgggcactctaaagaaaccgccggtgataagccggaggaaggtggggatgacgtcaagtcctcatggcccttacgcgctgggctacacacgtgctacaatggcggtgacagtgggcagcaatcccgcaagggtgagctaatctccaaaagccgtctcagttcggattgttctctgcaactcgagagcatgaaggcggaatcgctagtaatcgcggatcagcatgccgcggtgaatacgttcccaggcctt

SEQ ID NO: 3203 - DNA, 1413 bp, unidentified
  source 1..1413: mol_type = unassigned DNA; note = Sphingomonas panacis
aatgaacgctggcggcatgcctaacacatgcaagtcgaacgaacaccttcgggtgttagtggcgcacgggtgcgtaacgcgtgggaatctgccccttggttcggaataacagcgagaaattgctgctaataccggatgatgtcttcggaccaaagatttatcgccgagggatgagcccgcgtaggattagctagttggtgtggtaaaggcgcaccaaggcgacgatccttagctggtctgagaggatgatcagccacactgggactgagacacggcccagactcctacgggaggcagcagtggggaatattggacaatgggcgcaagcctgatccagcaatgccgcgtgagtgatgaaggccttagggttgtaaagctcttttacccgggatgataatgacagtaccgggagaataagctccggctaactccgtgccagcagccgcggtaatacggagggagctagcgttattcggaattactgggcgtaaagcgcacgtaggcggctttgtaagttagaggtgaaagcctggagctcaactccagaattgcctttaagactgcatcgcttgaatccaggagaggtgagtggaattccgagtgtagaggtgaaattcgtagatattcggaagaacaccagtggcgaaggcggctcactggactggtattgacgctgaggtgcgaaagcgtggggagcaaacaggattagataccctggtagtccacgccgtaaacgatgataactagctgtcagggctcatagagttttggtggcgcagctaacgcattaagttatccgcctggggagtacggccgcaaggttaaaactcaaatgaattgacgggggcctgcacaagcggtggagcatgtggtttaattcgaagcaacgcgcagaaccttaccagcgtttgacatgtccggacgatttcgggagaccgatctcttcccttcggggactggaacacaggtgctgcatggctgtcgtcagctcgtgtcgtgagatgttgggttaagtcccgcaacgagcgcaaccctcgcctttagttaccatcatttagttggggactctaaaggaaccgccggtgataagccggaggaaggtggggatgacgtcaagtcctcatggcccttacgcgctgggctacacacgtgctacaatggcaactacagtgggcagcaatcctgcaagggtgagctaatctccaaaagttgtctcagttcggattgttctctgcaactcgagagcatgaaggcggaatcgctagtaatcgcggatcagcatgccgcggtgaatacgttcccaggccttgtacacaccgcccgtcacaccatgggagttgggttcacccgaaggcgttgcgctaactcagcaatgagaggcaggcgaccacggtgggcttagcgactggggtg

SEQ ID NO: 3204 - DNA, 1413 bp, Sphingomonas parapaucimobilis
  source 1..1413: mol_type = unassigned DNA
aacgaacgctggcggcatgcctaacacatgcaagtcgaacgaggcccttcggggtttagtggcgcacgggtgcgtaacgcgtgggaatctgccctttggttcggaataacagctggaaacggctgctaataccggatgatgacgagagtccaaagatttatcgccagaggatgagcccgcgttggattaggtagttggtggggtaaaggcctaccaagccgacgatccatagctggtctgagaggatgatcagccacactgggactgagacacggcccagactcctacgggaggcagcagtggggaatattggacaatgggcgcaagcctgatccagcaatgccgcgtgagtgatgaaggccctagggttgtaaagctcttttacccgggaagataatgactgtaccgggagaataagccccggctaactccgtgccagcagccgcggtaatacggagggggctagcgttgttcggaattactgggcgtaaagcgcacgtaggcggctttgtaagtcagaggtgaaagcctggagctcaactccagaactgcctttgagactgcatcgcttgaatccaggagaggtcagtggaattccgagtgtagaggtgaaattcgtagatattcggaagaacaccagtggcgaaggcggctgactggactggtattgacgctgaggtgcgaaagcgtggggagcaaacaggattagataccctggtagtccacgccgtaaacgatgataactagctgtccgggcacttggtgcttgggtggcgcagctaacgcattaagttatccgcctggggagtacggccgcaaggttaaaactcaaaggaattgacgggggcctgcacaagcggtggagcatgtggtttaattcgaagcaacgcgcagaaccttaccagcgtttgacatgtccggacgatttccagagatggatctctttccttcggggactggaacacaggtgctgcatggctgtcgtcagctcgtgtcgtgagatgttgggttaagtcccgcaacgagcgcaaccctcgcctttagttaccatcatttggttgggtactctaaaggaaccgccggtgataagccggaggaaggtggggatgacgtcaagtcctcatggcccttacgcgctgggctacacacgtgctacaatggcaactacagtgggcagcgaccctgcgagggcgagctaatccccaaaagttgtctcagttcggattgttctctgcaactcgagagcatgaaggcggaatcgctagtaatcgcggatcagcatgccgcggtgaatacgttcccaggccttgtacacaccgcccgtcacaccatgggagttggattcacccgaaggcgttgcgccaacctagcaataggaagcaggcgaccacggtgggttcagcgactggggtg

SEQ ID NO: 3205 - DNA, 1411 bp, Sphingomonas paucimobilis
  source 1..1411: mol_type = unassigned DNA
aacgaacgctggcggcatgcctaacacatgcaagtcgaacgaaggcttcggccttagtggcgcacgggtgcgtaacgcgtgggaatctgcccttaggttcggaataacagctggaaacggctgctaataccggatgatatcgcgagatcaaagatttatcgcctgaggatgagcccgcgttggattaggtagttggtggggtaaaggcctaccaagccgacgatccatagctggtctgagaggatgatcagccacactgggactgagacacggcccagactcctacgggaggcagcagtggggaatattggacaatgggcgaaagcctgatccagcaatgccgcgtgagtgatgaaggccctagggttgtaaagctcttttacccgggaagataatgactgtaccgggagaataagccccggctaactccgtgccagcagccgcggtaatacggagggggctagcgttgttcggaattactgggcgtaaagcgcacgtaggcggctttgtaagtcagaggtgaaagcctggagctcaactccagaactgcctttgagactgcatcgcttgaatccaggagaggtcagtggaattccgagtgtagaggtgaaattcgtagatattcggaagaacaccagtggcgaaggcggctgactggactggtattgacgctgaggtgcgaaagcgtggggagcaaacaggattagataccctggtagtccacgccgtaaacgatgataactagctgtccgggcacttggtgcttgggtggcgcagctaacgcattaagttatccgcctggggagtacggccgcaaggttaaaactcaaaggaattgacgggggcctgcacaagcggtggagcatgtggtttaattcgaagcaacgcgcagaaccttaccagcgtttgacatggtaggacgacttccagagatggatttcttcccttcggggacctacacacaggtgctgcatggctgtcgtcagctcgtgtcgtgagatgttgggttaagtcccgcaacgagcgcaaccctcgcctttagttaccatcatttggttgggtactctaaaggaaccgccggtgataagccggaggaaggtggggatgacgtcaagtcctcatggcccttacgcgctgggctacacacgtgctacaatggcaactacagtgggcagcgaccctgcgagggcgagctaatccccaaaagttgtctcagttcggattgttctctgcaactcgagagcatgaaggcggaatcgctagtaatcgcggatcagcatgccgcggtgaatacgttcccaggccttgtacacaccgcccgtcacaccatgggagttggattcacccgaaggcgttgcgccaacctagcaataggaagcaggcgaccacggtgggttcagcgactggggtg

SEQ ID NO: 3206 - DNA, 1412 bp, Sphingomonas rubra
  source 1..1412: mol_type = unassigned DNA
aacgaacgctggcggcatgcctaacacatgcaagtcgaacgagatcttcggatctagtggcgcacgggtgcgtaacgcgtgggaatctgccccctggttcgggataaccgttggaaacgacggctaataccggatgatgtcgataagaccaaagatttatcgcctggggatgagcccgcgtaggattagctagttggtggggtaaaggcctaccaaggcgacgatccttagctggtctgagaggatgatcagccacactgggactgagacacggcccagactcctacgggaggcagcagtggggaatattggacaatgggcgaaagcctgatccagcaatgccgcgtgagtgatgaaggccttagggttgtaaagctcttttacccgggatgataatgacagtaccgggagaataagccccggctaactccgtgccagcagccgcggtaatacggagggggctagcgttgttcggaattactgggcgtaaagcgcacgtaggcggctttgtaagttagaggtgaaagcccggggctcaaccccggaattgcctttgatactgcatggcttgaatccaggagaggtcagtggaattccgagtgtagaggtgaaattcgtagatattcggaagaacaccagtggcgaaggcggctgactggactggtattgacgctgaggtgcgaaagcgtggggagcaaacaggattagataccctggtagtccacgccgtaaacgatgataactagctgtccgggaacttagttcttgggtggcgcagctaacgcattaagttatccgcctggggagtacggccgcaaggttaaaactcaaatgaattgacgggggcctgcacaagcggtggagcatgtggtttaattcgaagcaacgcgcagaaccttaccagcgtttgacatgtccggacgatttccagagatggatttcttcccttcggggactggaacacaggtgctgcatggctgtcgtcagctcgtgtcgtgagatgttgggttaagtcccgcaacgagcgcaaccctcgcctttagttgccatcattcagttgggcactttaaaggaaccgccggtgataagccggaggaaggtggggatgacgtcaagtcctcatggcccttacgcgctgggctacacacgtgctacaatggcggtgacagtgggcagcaatcccgcaagggtgagctaatctccaaaagccgtctcagttcggattgttctctgcaactcgagagcatgaaggcggaatcgctagtaatcgcggatcagcatgccgcggtgaatacgttcccaggccttgtacacaccgcccgtcacaccatgggagttgggttcacccgaaggcgttgcgctaactcagcaatgagaggcaggcgaccacggtgggcttagcgactggggtg

SEQ ID NO: 3207 - DNA, 1409 bp, Sphingomonas sanguinis
  source 1..1409: mol_type = unassigned DNA
aacgaacgctggcggcatgcctaacacatgcaagtcgaacgaaggcttcggccttagtggcgcacgggtgcgtaacgcgtgggaatctgcccttaggttcggaataacagctggaaacggctgctaataccggatgatgacgaaagtccaaagatttatcgcctgaggatgagcccgcgttggattaggtagttggtggggtaaaggcctaccaagccgacgatccatagctggtctgagaggatgatcagccacactgggactgagacacggcccagactcctacgggaggcagcagtggggaatattggacaatgggcgaaagcctgatccagcaatgccgcgtgagtgatgaaggccctagggttgtaaagctcttttacccgggaagataatgactgtaccgggagaataagccccggctaactccgtgccagcagccgcggtaatacggagggggctagcgttgttcggaattactgggcgtaaagcgcacgtaggcggctttgtaagtcagaggtgaaagcctggagctcaactccagaactgcctttgagactgcatcgcttgaatccaggagaggtcagtggaattccgagtgtagaggtgaaattcgtagatattcggaagaacaccagtggcgaaggcggctgactggactggtattgacgctgaggtgcgaaagcgtggggagcaaacaggattagataccctggtagtccacgccgtaaacgatgataactagctgtccgggcacttggtgcttgggtggcgcagctaacgcattaagttatccgcctggggagtacggccgcaaggttaaaactcaaaggaattgacgggggcctgcacaagcggtggagcatgtggtttaattcgaagcaacgcgcagaaccttaccagcgtttgacatgtccggacgatttccagagatggatctcttcccttcggggactggaacacaggtgctgcatggctgtcgtcagctcgtgtcgtgagatgttgggttaagtcccgcaacgagcgcaaccctcgcctttagttaccatcatttggttgggtactctaaaggaaccgccggtgataagccggaggaaggtggggatgacgtcaagtcctcatggcccttacgcgctgggctacacacgtgctacaatggcaactacagtgggcagcgaccctgcgagggcgagctaatccccaaaagttgtctcagttcggattgttctctgcaactcgagagcatgaaggcggaatcgctagtaatcgcggatcagcatgccgcggtgaatacgttcccaggccttgtacacaccgcccgtcacaccatgggagttggattcacccgaaggcgttgcgccaacccgcaagggaagcaggcgaccacggtgggttcagcgactggggtg

SEQ ID NO: 3208 - DNA, 1409 bp, Sphingomonas sanxanigenens
  source 1..1409: mol_type = unassigned DNA
aacgaacgctggcggcatgcctaacacatgcaagtcgaacgagaccttcgggtctagtggcgcacgggtgcgtaacgcgtgggaatctgcccttgggttcggaataactcagagaaatttgagctaataccggatgatgtcgagagaccaaagatttatcgcccagggatgagcccgcgtaggattagctagttggtgaggtaaaggctcaccaaggcgacgatccttagctggtctgagaggatgatcagccacactgggactgagacacggcccagactcctacgggaggcagcagtggggaatattggacaatgggcgcaagcctgatccagcaatgccgcgtgagtgatgaaggccctagggttgtaaagctcttttacccgggatgataatgacagtaccgggagaataagccccggctaactccgtgccagcagccgcggtaatacggagggggctagcgttgttcggaattactgggcgtaaagcgcacgtaggcggctttgtaagttagaggtgaaagcctggagctcaacttcagaatagcctttaagactgcatcgcttgaatccaggagaggtgagtggaattccgagtgtagaggtgaaattcgtagatattcggaagaacaccagtggcgaaggcggctcactggactggtattgacgctgaggtgcgaaagcgtggggagcaaacaggattagataccctggtagtccacgccgtaaacgatgataactagctgtccgggcacttggtgcttgggtggcgcagctaacgcattaagttatccgcctggggagtacggtcgcaagattaaaactcaaaggaattgacgggggcctgcacaagcggtggagcatgtggtttaattcgaagcaacgcgcagaaccttaccagcgtttgacatggctagtatgggtctcagagatggggtccttcagttcggctggctagcacacaggtgctgcatggctgtcgtcagctcgtgtcgtgagatgttgggttaagtcccgcaacgagcgcaaccctcgcctttagttaccatcatttggttgggtactctaaaggaaccgccggtgataagccggaggaaggtggggatgacgtcaagtcctcatggcccttacgcgctgggctacacacgtgctacaatggcaactacagtgggctgcgaactcgcgagggtgagctaatctccaaaagttgtctcagttcggattgttctctgcaactcgagagcatgaaggcggaatcgctagtaatcgcggatcagcatgccgcggtgaatacgttcccaggccttgtacacaccgcccgtcacaccatgggagttggtttcacccgaaggcagtgcgctaaccgcaaggaggcagctgaccacggtgggatcagcgactggggtg

SEQ ID NO: 3209 - DNA, 1409 bp, unidentified
  source 1..1409: mol_type = unassigned DNA; note = Sphingomonas spermidinifaciens
aacgaacgctggcggcatgcctaacacatgcaagtcgaacgaaggcttcggccttagtggcgcacgggtgcgtaacgcgtgggaatctgcccttgggttcgggataacagtgagaaattactgctaataccggatgatgacttcggtccaaagatttatcgcccagggatgagcccgcgttggattagctagttggtggggtaaaggcctaccaaggcgacgatccatagctggtctgagaggatgatcagccacactgggactgagacacggcccagactcctacgggaggcagcagtggggaatattggacaatgggcgaaagcctgatccagcaatgccgcgtgagtgatgaaggccttagggttgtaaagctcttttacccgggaagataatgactgtaccgggagaataagctccggctaactccgtgccagcagccgcggtaatacggagggagctagcgttgttcggaattactgggcgtaaagcgcacgtaggcggctttgtaagttagaggtgaaagcctggagctcaactccagaactgcctttaagactgcatcgctcgaatccaggagaggtgagtggaattccgagtgtagaggtgaaattcgtagatattcggaagaacaccagtggcgaaggcggctcactggactggtattgacgctgaggtgcgaaagcgtggggagcaaacaggattagataccctggtagtccacgccgtaaacgatgataactagctgtccggtcacttggtgattgggtggcgcagctaacgcattaagttatccgcctggggagtacggccgcaaggttaaaactcaaaggaattgacgggggcctgcacaagcggtggagcatgtggtttaattcgaagcaacgcgcagaaccttaccagcgtttgacatggtaggacgactggcagagatgcctttcttcccttcggggacctacacacaggtgctgcatggctgtcgtcagctcgtgtcgtgagatgttgggttaagtcccgcaacgagcgcaaccctcgcctttagttaccatcatttagttgggtactctaaaggaaccgccggtgataagccggaggaaggtggggatgacgtcaagtcctcatggcccttacgcgctgggctacacacgtgctacaatggcaggtacagtgggcagcaatcccgcgagggtgagctaatctccaaaacctgtctcagttcggattgttctctgcaactcgagagcatgaaggcggaatcgctagtaatcgcggatcagcatgccgcggtgaatacgttcccaggccttgtacacaccgcccgtcacaccatgggagttgggttcacccgaaggcgttgcgctaactcgcaagagaggcaggcgaccacggtgggcttagcgactggggtg

SEQ ID NO: 3210 - DNA, 1411 bp, Sphingomonas trueperi
  source 1..1411: mol_type = unassigned DNA
aacgaacgctggcggcatgcctaacacatgcaagtcgaacgagatcttcggatctagtggcgcacgggtgcgtaacgcgtgggaatctgccttggggttcggaataactccccgaaaggggtgctaataccggatgatgtcgagagaccaaagatttatcgccctgagatgagcccgcgtaggattagctagttggtgtggtaaaggcgcaccaaggcgacgatccttagctggtctgagaggatgatcagccacactgggactgagacacggcccagactcctacgggaggcagcagtggggaatattggacaatgggcgaaagcctgatccagcaatgccgcgtgagtgatgaaggccttagggttgtaaagctcttttacccgggaagataatgactgtaccgggagaataagccccggctaactccgtgccagcagccgcggtaatacggagggggctagcgttgttcggaattactgggcgtaaagcgcacgtaggcggctttgtaagtcagaggtgaaagcctggagctcaactccagaactgcctttgagactgcatcgcttgaatccaggagaggtgagtggaattccgagtgtagaggtgaaattcgtagatattcggaagaacaccagtggcgaaggcggctcactggactggtattgacgctgaggtgcgaaagcgtggggagcaaacaggattagataccctggtagtccacgccgtaaacgatgataactagctgtccgggcacttggtgcttgggtggcgcagctaacgcattaagttatccgcctggggagtacggccgcaaggttaaaactcaaaggaattgacgggggcctgcacaagcggtggagcatgtggtttaattcgaagcaacgcgcagaaccttaccagcgtttgacatggtaggacgactggcagagatgcctttcttcccttcggggacctacacacaggtgctgcatggctgtcgtcagctcgtgtcgtgagatgttgggttaagtcccgcaacgagcgcaaccctcgactttagttaccatcattaagttgggtactttaaagtaaccgccggtgataagccggaggaaggtggggatgacgtcaagtcctcatggcccttacgcgctgggctacacacgtgctacaatggcaagtacagtgggcagcaatcccgcgagggtgagctaatctccaaaacttgtctcagttcggattgttctctgcaactcgagagcatgaaggcggaatcgctagtaatcgcggatcagcatgccgcggtgaatacgttcccaggccttgtacacaccgcccgtcacaccatgggagttgggttcacccgaaggcgttgcgctaactcagcaatgagaggcaggcgaccacggtgggcttagcgactggggtg

SEQ ID NO: 3211 - DNA, 1409 bp, Sphingomonas wittichii
  source 1..1409: mol_type = unassigned DNA
aacgaacgctggcggcatgcctaacacatgcaagtcgaacgaaggcttcggccttagtggcgcacgggtgcgtaacgcgtgggaatctgcccttgggtacggaataactcaccgaaaggtgtgctaataccgtatgatgacgtaagtccaaagatttatcgcctgaggatgagcccgcgttggattagctagttggtggggtaaaggcctaccaaggcgacgatccatagctggtctgagaggatgatcagccacactgggactgagacacggcccagactcctacgggaggcagcagtggggaatattggacaatgggcgaaagcctgatccagcaatgccgcgtgagtgatgaaggccttagggttgtaaagctcttttacccgggaagataatgactgtaccgggagaataagccccggctaactccgtgccagcagccgcggtaatacggagggggctagcgttgttcggaattactgggcgtaaagcgcacgtaggcggctttgtaagttagaggtgaaagcccggggctcaaccccggaatagcctttaagactgcatcgcttgaacgtcggagaggtgagtggaattccgagtgtagaggtgaaattcgtagatattcggaagaacaccagtggcgaaggcggctcactggacgactgttgacgctgaggtgcgaaagcgtggggagcaaacaggattagataccctggtagtccacgccgtaaacgatgataactagctgtccgggcacttggtgcttgggtggcgcagctaacgcattaagttatccgcctggggagtacggccgcaaggttaaaactcaaagaaattgacgggggcctgcacaagcggtggagcatgtggtttaattcgaagcaacgcgcagaaccttaccaacgtttgacatccctagtatggatcgtggagacactttccttcagttcggctggctaggtgacaggtgctgcatggctgtcgtcagctcgtgtcgtgagatgttgggttaagtcccgcaacgagcgcaaccctcgcctttagttgccatcatttagttgggtactctaaaggaaccgccggtgataagccggaggaaggtggggatgacgtcaagtcctcatggcccttacgcgttgggctacacacgtgctacaatggcaactacagtgggcagcaatcccgcgagggcgagctaatctccaaaagttgtctcagttcggattgttctctgcaactcgagagcatgaaggcggaatcgctagtaatcgcggatcagcatgccgcggtgaatacgttcccaggccttgtacacaccgcccgtcacaccatgggagttggattcacccgaaggcgctgcgctaaccgcaaggaggcaggcgaccacggtgggtttagcgactggggtg

SEQ ID NO: 3212 - DNA, 1410 bp, Sphingomonas yabuuchiae
  source 1..1410: mol_type = unassigned DNA
aacgaacgctggcggcatgcctaacacatgcaagtcgaacgaggcccttcggggtttagtggcgcacgggtgcgtaacgcgtgggaatctgccctttggttcggaataacagctggaaacggctgctaataccggatgatgacgaaagtccaaagatttatcgccagaggatgagcccgcgttggattaggtagttggtggggtaaaggcctaccaagccgacgatccatagctggtctgagaggatgatcagccacactgggactgagacacggcccagactcctacgggaggcagcagtggggaatattggacaatgggcgaaagcctgatccagcaatgccgcgtgagtgatgaaggccctagggttgtaaagctcttttacccgggaagataatgactgtaccgggagaataagccccggctaactccgtgccagcagccgcggtaatacggagggggctagcgttgttcggaattactgggcgtaaagcgcacgtaggcggctttgtaagtcagaggtgaaagcctggagctcaactccagaactgcctttgagactgcatcgcttgaatccaggagaggtcagtggaattccgagtgtagaggtgaaattcgtagatattcggaagaacaccagtggcgaaggcggctgactggactggtattgacgctgaggtgcgaaagcgtggggagcaaacaggattagataccctggtagtccacgccgtaaacgatgataactagctgtccgggcacttggtgcttgggtggcgcagctaacgcattaagttatccgcctggggagtacggccgcaaggttaaaactcaaaggaattgacgggggcctgcacaagcggtggagcatgtggtttaattcgaagcaacgcgcagaaccttaccagcgtttgacatgtccggacgactggcagagatgcctttcttcccttcggggactggaacacaggtgctgcatggctgtcgtcagctcgtgtcgtgagatgttgggttaagtcccgcaacgagcgcaaccctcgcctttagttaccatcatttggttgggtactctaaaggaaccgccggtgataagccggaggaaggtggggatgacgtcaagtcctcatggcccttacgcgctgggctacacacgtgctacaatggcaactacagtgggcagcgaccctgcgagggcgagctaatccccaaaagttgtctcagttcggattgttctctgcaactcgagagcatgaaggcggaatcgctagtaatcgcggatcagcatgccgcggtgaatacgttcccaggccttgtacacaccgcccgtcacaccatgggagttggattcacccgaaggcgttgcgccaacccgtaagggaagcaggcgaccacggtgggttcagcgactggggt

SEQ ID NO: 3213 - DNA, 1411 bp, Sphingopyxis alaskensis
  source 1..1411: mol_type = unassigned DNA
aacgaacgctggcggcatgcctaacacatgcaagtcgaacgagaccttcgggtctagtggcgcacgggtgcgtaacgcgtgggaatctgcccttgggtacggaataactcagagaaatttgagctaataccgtataatgacttcggtccaaagatttatcgcccaaggatgagcccgcgtaagattagctagttggtggggtaaaggcctaccaaggcgacgatctttagctggtctgagaggatgatcagccacactgggactgagacacggcccagactcctacgggaggcagcagtggggaatattggacaatgggcgaaagcctgatccagcaatgccgcgtgagtgatgaaggccttagggttgtaaagctcttttacccgggatgataatgacagtaccgggagaataagctccggctaactccgtgccagcagccgcggtaatacggagggagctagcgttgttcggaattactgggcgtaaagcgcgcgtaggcggttttttaagtcagaggtgaaagcccagtgctcaacactggaactgcctttgaaactggaaaacttgaatcttggagaggtcagtggaattccgagtgtagaggtgaaattcgtagatattcggaagaacaccagtggcgaaggcgactgactggacaagtattgacgctgaggtgcgaaagcgtggggagcaaacaggattagataccctggtagtccacgccgtaaacgatgataactagctgtccgggttcatggaacttgggtggcgcagctaacgcattaagttatccgcctggggagtacggtcgcaagattaaaactcaaaggaattgacgggggcctgcacaagcggtggagcatgtggtttaattcgaagcaacgcgcagaaccttaccagcgtttgacatcctgatcgcggattagagagatcttttccttcagttcggctggatcagtgacaggtgctgcatggctgtcgtcagctcgtgtcgtgagatgttgggttaagtcccgcaacgagcgcaaccctcatccctagttgccatcattcagttgggcactctaaggaaactgccggtgataagccggaggaaggtggggatgacgtcaagtcctcatggcccttacgcgctgggctacacacgtgctacaatggcaactacagtgggcagcaacctcgcgaggggtagctaatctccaaaagttgtctcagttcggattgttctctgcaactcgagagcatgaaggcggaatcgctagtaatcgcggatcagcatgccgcggtgaatacgttcccaggccttgtacacaccgcccgtcacaccatgggagttggtttcacccgaaggcagtgctctaacccgcaagggaggaagctgaccacggtgggatcagcgactggggtg

SEQ ID NO: 3214 - DNA, 1411 bp, Sphingopyxis bauzanensis
  source 1..1411: mol_type = unassigned DNA
aacgaacgctggcggcatgcctaacacatgcaagtcgaacgaactcttcggagttagtggcgcacgggtgcgtaacgcgtgggaatctgcccttgggtacggaataactcagagaaatttgtgctaataccgtataatgtcttcggaccaaagatttatcgcccaaggatgagcccgcgtaagattagctagttggtggggtaaaggcctaccaaggctacgatctttagctggtctgagaggatgatcagccacactgggactgagacacggcccagactcctacgggaggcagcagtggggaatattggacaatgggcgaaagcctgatccagcaatgccgcgtgagtgatgaaggccttagggttgtaaagctcttttacccgggatgataatgacagtaccgggagaataagctccggctaactccgtgccagcagccgcggtaatacggagggagctagcgttgttcggaattactgggcgtaaagcgcgcgtaggcggttttttaagtcagaggtgaaagcccagtgctcaacactggaactgcctttgaaactggaaaacttgaatcttggagaggtcagtggaattccgagtgtagaggtgaaattcgtagatattcggaagaacaccagtggcgaaggcgactgactggacaagtattgacgctgaggtgcgaaagcgtggggagcaaacaggattagataccctggtagtccacgccgtaaacgatgataactatctgttcgggctcatagagcttgagtggagcagctaacgcattaagttatccgcctggggagtacggtcgcaagattaaaactcaaaggaattgacgggggcctgcacaagcggtggagcatgtggtttaattcgaagcaacgcgcagaaccttaccagcgtttgacatccttgtcgcggtttccagagatggattccttcagttcggctggacaagtgacaggtgctgcatggctgtcgtcagctcgtgtcgtgagatgttgggttaagtcccgcaacgagcgcaaccctcatccctagttgccatcattcagttgggcactctaaggaaactgccggtgataagccggaggaaggtggggatgacgtcaagtcctcatggcccttacgcgctgggctacacacgtgctacaatggcaactacagtgggcagcaaccgggcgaccggtagctaatctccaaaagttgtctcagttcggattgttctctgcaactcgagagcatgaaggcggaatcgctagtaatcgcggatcagcatgccgcggtgaatacgttcccaggccttgtacacaccgcccgtcacaccatgggagttggtttcacccgaaggcagtgctctaacccgcaagggaggaagctgaccacggtgggatcagcgactggggtg

SEQ ID NO: 3215 - DNA, 1411 bp, unidentified
  source 1..1411: mol_type = unassigned DNA; note = Sphingopyxis flava
aacgaacgctggcggcatgcctaacacatgcaagtcgaacgagaccttcgggtctagtggcgcacgggtgcgtaacgcgtgggaatctgcccttgggtgcggaataacttcccgaaagggatgctaataccgcataatgtcgtaagaccaaagatttatcgcccaaggatgagcccgcgtaagattagctagttggtggggtaaaagcctaccaaggcgacgatctttagctggtctgagaggatgatcagccacactgggactgagacacggcccagactcctacgggaggcagcagtggggaatattggacaatgggcgaaagcctgatccagcaatgccgcgtgagtgatgaaggccctagggttgtaaagctcttttacccgggatgataatgacagtaccgggagaataagctccggctaactccgtgccagcagccgcggtaatacggagggagctagcgttgttcggaattactgggcgtaaagcgcgcgtaggcggtttttcaagtcaggggtgaaagcccggggctcaaccccggaattgcctttgaaactggaaaacttgaatcttggagaggtcagtggaattccgagtgtagaggtgaaattcgtagatattcggaagaacaccagtggcgaaggcgactgactggacaagtattgacgctgaggtgcgaaagcgtggggagcaaacaggattagataccctggtagtccacgccgtaaacgatgataactagctgtccggactcatagagtttgggtggcgcagctaacgcattaagttatccgcctggggagtacggtcgcaagattaaaactcaaaggaattgacgggggcctgcacaagcggtggagcatgtggtttaattcgaagcaacgcgcagaaccttaccagcgtttgacatcctgatcgcggattagagagatcttttccttcagttcggctggatcagtgacaggtgctgcatggctgtcgtcagctcgtgtcgtgagatgttgggttaagtcccgcaacgagcgcaaccctcatccctagttgccatcattcagttgggcactctaaggaaactgccggtgataagccggaggaaggtggggatgacgtcaagtcctcatggcccttacgcgctgggctacacacgtgctacaatggcggtgacagtgggcagcaaccctgcgaggggtagctaatctccaaaagccgtctcagttcggattgttctctgcaactcgagagcatgaaggcggaatcgctagtaatcgcggatcagcatgccgcggtgaatacgttcccaggccttgtacacaccgcccgtcacaccatgggagttggtttcacccgaaggcagtgctctaacccgcaagggaggaagctgaccacggtgggatcagcgactggggtg

SEQ ID NO: 3216 - DNA, 1411 bp, unidentified
  source 1..1411: mol_type = unassigned DNA; note = Sphingopyxis fribergensis
aacgaacgctggcggcatgcctaacacatgcaagtcgaacgaactcttcggagttagtggcgcacgggtgcgtaacgcgtgggaatctgcccttgggtacggaataactcagagaaatttgtgctaataccgtataatgtcttcggaccaaagatttatcgcccaaggatgagcccgcgtaagattagctagttggtgaggtaaaagctcaccaaggcgacgatctttagctggtctgagaggatgatcagccacactgggactgagacacggcccagactcctacgggaggcagcagtggggaatattggacaatgggcgaaagcctgatccagcaatgccgcgtgagtgatgaaggccttagggttgtaaagctcttttacccgggatgataatgacagtaccgggagaataagctccggctaactccgtgccagcagccgcggtaatacggagggagctagcgttgttcggaattactgggcgtaaagcgcgcgtaggcggttttttaagtcagaggtgaaagcccagtgctcaacactggaactgcctttgaaactggaaaacttgaatcttggagaggtcagtggaattccgagtgtagaggtgaaattcgtagatattcggaagaacaccagtggcgaaggcgactgactggacaagtattgacgctgaggtgcgaaagcgtggggagcaaacaggattagataccctggtagtccacgccgtaaacgatgataactagctgtccgggttcatagaacttgggtggcgcagctaacgcattaagttatccgcctggggagtacggtcgcaagattaaaactcaaaggaattgacgggggcctgcacaagcggtggagcatgtggtttaattcgaagcaacgcgcagaaccttaccagcgtttgacatcctaatcgcggatcgtagagatactttccttcagttcggctggattagtgacaggtgctgcatggctgtcgtcagctcgtgtcgtgagatgttgggttaagtcccgcaacgagcgcaaccctcatccctagttgccatcattcagttgggcactctaaggaaactgccggtgataagccggaggaaggtggggatgacgtcaagtcctcatggcccttacgcgctgggctacacacgtgctacaatggcaactacagtgggcagcaaccgggcgaccggtagctaatctccaaaagttgtctcagttcggattgttctctgcaactcgagagcatgaaggcggaatcgctagtaatcgcggatcagcatgccgcggtgaatacgttcccaggccttgtacacaccgcccgtcacaccatgggagttggtttcacccgaaggcagtgctctaacccgcaagggaggaagctgaccacggtgggatcagcgactggggtg

SEQ ID NO: 3217 - DNA, 1411 bp, Sphingopyxis granuli
  source 1..1411: mol_type = unassigned DNA
aacgaacgctggcggcatgcctaacacatgcaagtcgaacgaagtcttcggacttagtggcgcacgggtgcgtaacgcgtgggaatctacccttgggtacggaataactcagagaaatttgtgctaataccgtataatgacttcggtccaaagatttatcgcccaaggatgagcccgcgtaagattagctagttggtggggtaaaagcctaccaaggcgacgatctttagctggtctgagaggatgatcagccacactgggactgagacacggcccagactcctacgggaggcagcagtggggaatattggacaatgggcgaaagcctgatccagcaatgccgcgtgagtgatgaaggccctagggttgtaaagctcttttacccgggatgataatgacagtaccgggagaataagctccggctaactccgtgccagcagccgcggtaatacggagggagctagcgttgttcggaattactgggcgtaaagcgcgcgtaggcggttttccaagtcaggggtgaaagcccggggctcaaccccggaatagcccttgaaactggaagactagaatcttggagaggtcagtggaattccgagtgtagaggtgaaattcgtagatattcggaagaacaccagtggcgaaggcgactgactggacaagtattgacgctgaggtgcgaaagcgtggggagcaaacaggattagataccctggtagtccacgccgtaaacgatgataactagctgtccgggttcatagaacttgggtggcgcagctaacgcattaagttatccgcctggggagtacggtcgcaagattaaaactcaaaggaattgacgggggcctgcacaagcggtggagcatgtggtttaattcgaagcaacgcgcagaaccttaccagcgtttgacatcctgatcgcggttaccagagatggtttccttcagttcggctggatcagtgacaggtgctgcatggctgtcgtcagctcgtgtcgtgagatgttgggttaagtcccgcaacgagcgcaaccctcatccctagttgccatcattcagttgggcactctaaggaaactgccggtgataagccggaggaaggtggggatgacgtcaagtcctcatggcccttacgcgctgggctacacacgtgctacaatggcggtgacagtgggcagcaactccgcgaggagtagctaatctccaaaaaccgtctcagttcggattgttctctgcaactcgagagcatgaaggcggaatcgctagtaatcgcggatcagcatgccgcggtgaatacgttcccaggccttgtacacaccgcccgtcacaccatgggagttggtttcacccgaaggcagtgctctaacccgcaagggaggaagctgaccacggtgggatcagcgactggggtg

SEQ ID NO: 3218 - DNA, 1411 bp, unidentified
  source 1..1411: mol_type = unassigned DNA; note = Sphingopyxis indica
aacgaacgctggcggcatgcctaacacatgcaagtcgaacgagatcttcggatctagtggcgcacgggtgcgtaacgcgtgggaatctgcccttgggtgcggaataacttcccgaaagggatgctaataccgcataatgtcgtaagaccaaagatttatcgcccaaggatgagcccgcgtaagattagctagttggtggggtaaaagcctaccaaggcgacgatctttagctggtctgagaggatgatcagccacactgggactgagacacggcccagactcctacgggaggcagcagtggggaatattggacaatgggcgaaagcctgatccagcaatgccgcgtgagtgatgaaggccctagggttgtaaagctcttttacccgggatgataatgacagtaccgggagaataagctccggctaactccgtgccagcagccgcggtaatacggagggagctagcgttgttcggaattactgggcgtaaagcgcgcgtaggcggttttttaagtcagaggtgaaagcccggggctcaaccccggaatagcctttgaaactggaaaactagaatcttggagaggtcagtggaattccgagtgtagaggtgaaattcgtagatattcggaagaacaccagtggcgaaggcgactgactggacaagtattgacgctgaggtgcgaaagcgtggggagcaaacaggattagataccctggtagtccacgccgtaaacgatgataactagctgtccgggttcatagaacttgggtggcgcagctaacgcattaagttatccgcctggggagtacggtcgcaagattaaaactcaaaggaattgacgggggcctgcacaagcggtggagcatgtggtttaattcgaagcaacgcgcagaaccttaccagcgtttgacatcctgatcgcggttaccagagatggtttccttcagttcggctggatcagtgacaggtgctgcatggctgtcgtcagctcgtgtcgtgagatgttgggttaagtcccgcaacgagcgcaaccctcatccctagttgccatcattcagttgggcactctaaggaaactgccggtgataagccggaggaaggtggggatgacgtcaagtcctcatggcccttacgcgctgggctacacacgtgctacaatggcggtgacagtgggcagcaaccgggcgaccggtagctaatctccaaaaaccgtctcagttcggattgttctctgcaactcgagagcatgaaggcggaatcgctagtaatcgcggatcagcatgccgcggtgaatacgttcccaggccttgtacacaccgcccgtcacaccatgggagttggtttcacccgaaggcagtgctctaacccgcaaggggggaagctgaccacggtgggatcagcgactggggtg

SEQ ID NO: 3219 - DNA, 1397 bp, Sphingopyxis macrogoltabida
  source 1..1397: mol_type = unassigned DNA
  misc_difference 119..120: note = n is a, c, g, or t
  misc_difference 133: note = n is a, c, g, or t
  misc_difference 142..143: note = n is a, c, g, or t
aacgaacgctggcggcatgcctaacacatgcaagtcgaacgaagtcttcggacttagtggcccacgggtgcgtaacgcgtgggaatctgcccttgggttcggaataacttagagaaatnngtgctaataccgnataatgacnncggtccaaagatttatcgcccaaggatgagcccgcgtaagattagctagttggtggggtaaaagcttaccaaggcgacgatctttagctggtctgagaggatgatcagccacactgggactgagacacggcccagactcctacgggaggcagcagtggggaatattggacaatgggcgaaagcctgatccagcaatgccgcgtgagtgatgaaggccctagggttgtaaagctcttttacccgggatgataatgacagtaccgggagaataagctccggctaactccgtgccagcagccgcggtaatacggagggagctagcgttgttcggaattactgggcgtaaagcgcgcgtaggcggttttttaagtcagaggtgaaagcccggggctcaaccccggaattgcctttgaaactggaaaacttgaatcttggagaggtcagtggaattccgagtgtagaggtgaaattcgtagatattcggaagaacaccagtgccgaaggcgactgactggacaagtattgacgctgaggtgcgaaagcgtggggagcaaacaggattagataccctggtagtccacgccgtaaacgatgataactagctgtccgggttcatagaacttgggtggcgcacgtaacgcattaagttatccgcctggggagtacggtcgcaaggttaaaactcaaaggaattgacgggggcctgcacaagcggtggagcatgtggtttaattcgaagcaacgcgcagaaccttaccagcgtttgacatcctgatcgcggattagagagatcttttccttcagttcggctggatcagtgacaggtgctgcatggctgtcgtcagctcgtgtcgtgagatgttgggttaagtcccgcaacgagcgcaaccctcatccctagttgccatcattcagttgggcactctaaggaaactgccggtgataagccggaggaaggtggggatgacgtcaagtcctcatggcccttacgcgctgggctacacacgtgctacaatggcggtgacagtgggcagcaaccgggcgagggcgagctaatctccaaaagccgtctcagttcggattgttctctgcaactcgagagcatgaaggcggaatcgctagtaatcgcggatcagcatgccgcggtgaatacgttcccaggccttgtacacaccgcccgtcacaccatgggagttggattcacccgaaggcaatgctctaacccgcaagggaggaagctgaccaccgtgggtc

SEQ ID NO: 3220 - DNA, 1411 bp, Sphingopyxis terrae
  source 1..1411: mol_type = unassigned DNA
aacgaacgctggcggcatgcctaacacatgcaagtcgaacgagatcttcggatctagtggcgcacgggtgcgtaacgcgtgggaatctgcccttgggtacggaataactcagagaaatttgtgctaataccgtataatgtcttcggaccaaagatttatcgcccaaggatgagcccgcgtaggattagctagttggtgaggtaaaagctcaccaaggcgacgatccttagctggtctgagaggatgatcagccacactgggactgagacacggcccagactcctacgggaggcagcagtggggaatattggacaatgggcgaaagcctgatccagcaatgccgcgtgagtgatgaaggccctagggttgtaaagctcttttacccgggatgataatgacagtaccgggagaataagctccggctaacttcgtgccagcagccgcggtaatacgaggggagctagcgttgttcggaattactgggcgtaaagcgcgcgtaggcggttttttaagtcagaggtgaaagcccggggctcaaccccggaattgcctttgaaactggaaaactagaatcttggagaggtcagtggaattccgagtgtagaggtgaaattcgtagatattcggaagaacaccagtggcgaaggcgactgactggacaagtattgacgctgaggtgcgaaagcgtggggagcaaacaggattagataccctggtagtccacgccgtaaacgatgataactagctgtccgggttcatagagcttgggtggcgcagctaacgcattaagttatccgcctggggagtacggtcgcaagattaaaactcaaaggaattgacgggggcctgcacaagcggtggagcatgtggtttaattcgaagcaacgcgcagaaccttaccagcgtttgacatcctgatcgcggttaccagagatggtttccttcagttcggctggatcagtgacaggtgctgcatggctgtcgtcagctcgtgtcgtgagatgttgggttaagtcccgcaacgagcgcaaccctcatccctagttgccatcattaagttgggcactctaaggaaactgccggtgataagccggaggaaggtggggatgacgtcaagtcctcatggcccttacgcgctgggctacacacgtgctacaatggcggtgacagtgggcagcaacctcgcgagaggtagctaatctccaaaagccgtctcagttcggattgttctctgcaactcgagagcatgaaggcggaatcgctagtaatcgcggatcagcatgccgcggtgaatacgttcccaggccttgtacacaccgcccgtcacaccatgggagttggtttcacccgaaggcagtgctctaacccgcaagggaggaagctgaccacggtgggatcagcgactggggtg

SEQ ID NO: 3221 - DNA, 1411 bp, Sphingopyxis witflariensis
  source 1..1411: mol_type = unassigned DNA
aacgaacgctggcggcatgcctaacacatgcaagtcgaacgaactcttcggagttagtggcgcacgggtgcgtaacgcgtgggaatctgcccttgggtacggaataactcagagaaatttgtgctaataccgtataatgtcttcggaccaaagatttatcgcccaaggatgagcccgcgtaagattagctagttggtgaggtaaaagctcaccaaggcgacgatctttagctggtctgagaggatgatcagccacactgggactgagacacggcccagactcctacgggaggcagcagtggggaatattggacaatgggcgaaagcctgatccagcaatgccgcgtgagtgatgaaggccttagggttgtaaagctcttttacccgggatgataatgacagtaccgggagaataagctccggctaactccgtgccagcagccgcggtaatacggagggagctagcgttgttcggaattactgggcgtaaagcgcgcgtaggcggtttttcaagtcagaggtgaaagcccggggctcaaccccggaatagcctttgaaactggaagacttgaatcttggagaggtcagtggaattccgagtgtagaggtgaaattcgtagatattcggaagaacaccagtggcgaaggcgactgactggacaagtattgacgctgaggtgcgaaagcgtggggagcaaacaggattagataccctggtagtccacgccgtaaacgatgataactatctgtccgggctcatagagcttgggtggagcagctaacgcattaagttatccgcctggggagtacggtcgcaagattaaaactcaaaggaattgacgggggcctgcacaagcggtggagcatgtggtttaattcgaagcaacgcgcagaaccttaccagcgtttgacatccttgtcgcggattccagagatggtttccttcagttcggctggacaagtgacaggtgctgcatggctgtcgtcagctcgtgtcgtgagatgttgggttaagtcccgcaacgagcgcaaccctcatccctagttgccatcatttagttgggcactctaaggaaactgccggtgataagccggaggaaggtggggatgacgtcaagtcctcatggcccttacacgctgggctacacacgtgctacaatggcggtgacagtgggcagcaaccgggcgaccggtagctaatctccaaaagccgtctcagttcggattgttctctgcaactcgagagcatgaaggcggaatcgctagtaatcgcggatcagcatgccgcggtgaatacgttcccaggccttgtacacaccgcccgtcacaccatgggagttggtttcacccgaaggcagtgctctaacccgcaagggaggaagctgaccacggtgggatcagcgactggggtg

SEQ ID NO: 3222 - DNA, 1385 bp, unidentified
  source 1..1385: mol_type = unassigned DNA; note = Sphingorhabdus contaminans
catgcagtcgacgagaccttcgggtctagtggcgcacgggtgcgtaacgcgtgggaatctaccctttgctacggaataactcagagaaatttgtgctaataccgtatgatgtcgaaagaccaaagatttatcggcaaaggacgagcccgcgtaggattagctagttggtgtggtaaaggcgcaccaaggcgacgatccttagctggtctgagaggatgatcagccacactgggactgagacacggcccagactcctacgggaggcagcagtggggaatattggacaatgggcgaaagcctgatccagcaatgccgcgtgagtgatgaaggccttagggttgtaaagctcttttaccagggatgataatgacagtacctggagaataagctccggctaactccgtgccagcagccgcggtaatacggagggagctagcgttgttcggaattactgggcgtaaagcgtacgtaggcggttattcaagtcaggggtgaaagcctggagctcaactccagaactgcccttgaaactagataactagaatcttggagaggtgagtggaattccgagtgtagaggtgaaattcgtagatattcggaagaacaccagtggcgaaggcgactcactggacaagtattgacgctgaggtacgaaagcgtggggagcaaacaggattagataccctggtagtccacgccgtaaacgatgataactagctgttcgggctctacgagcttgagtggcgcagctaacgcattaagttatccgcctggggagtacggtcgcaagattaaaactcaaaggaattgacgggggcctgcacaagcggtggagcatgtggtttaattcgaagcaacgcgcagaaccttaccagcgtttgacatcctgatcgcggatagtggagacactttccttcagttcggctggatcagtgacaggtgctgcatggctgtcgtcagctcgtgtcgtgagatgttgggttaagtcccgcaacgagcgcaaccctcgtccttagttgccatcattcagttgggcactctaaggaaactgccggtgataagccggaggaaggtggggatgacgtcaagtcctcatggcccttacacgctgggctacacacgtgctacaatggcggtgacagtgggcagcaacctcgcgagaggtagctaatctccaaaagccgtctcagttcggattgttctctgcaactcgagagcatgaaggcggaatcgctagtaatcgcggatcagcatgccgcggtgaatacgttcccaggccttgtacacaccgcccgtcacaccatgggagttggattcacccgaaggcgttgcgctaacctagcaataggaggcaggcgaccactgtgggtttagagactggggtg

SEQ ID NO: 3223 - DNA, 1409 bp, unidentified
  source 1..1409: mol_type = unassigned DNA; note = Sphingorhabdus marina
aacgaacgctggcggcatgcttaacacatgcaagtcgaacgagatcttcggatctagtggcgcacgggtgcgtaacgcgtggggatctaccatagggtacggaataactcagagaaatttgtgctaataccgtataatgtcgcaagaccaaagatttatcgccctttgatgaacccgcgtaagattagcttgttggtgaggtaaaggctcaccaaggcgacgatctttagctggtctgagaggatgatcagccacactgggactgagacacggcccagactcctacgggaggcagcagtggggaatattggacaatgggcgaaagcctgatccagcaatgccgcgtgagtgatgaaggccctagggtcgtaaagctcttttaccagggatgataatgacagtacctggagaataagctccggctaactccgtgccagcagccgcggtaatacggagggagctagcgttgttcggaattactgggcgtaaagcgcgcgtaggcggctattcaagtcagaggtgaaatcccggagctcaactccggaactgcctttgaaactagatagctagaatcttggagaggcgagtggaattccgagtgtagaggtgaaattcgtagatattcggaagaacaccagtggcgaaggcgactcgctggacaagtattgacgctgaggtgcgaaagcgtggggagcaaacaggattagataccctggtagtccacgccgtaaacgatgataactagctgctagggcccacagggctttggtggcgcagctaacgcattaagttatccgcctggggagtacggtcgcaagattaaaactcaaaggaattgacgggggcctgcacaagcggtggagcatgtggtttaattcgacgcaacgcgcagaaccttaccagcgtttgacatcctaatcgcggatttcagagatgatttccttcagttcggctggattagtgacaggtgctgcatggctgtcgtcagctcgtgtcgtgagatgttgggttaagtcccgcaacgagcgcaacccctatcattagttgctaccatttagttgggcactctaatgagaccgccggtgataagccggaggaaggtggggatgacgtcaagtcctcatggcccttacacgctgggctacacacgtgctacaatggcggtgacagtgggcagctacttcgcgagaagatgctaatctctaaaaaccgtctcagttcggattgttctctgcaactcgagagcatgaaggcggaatcgctagtaatcgcagatcagcatgctgcggtgaatacgttcccaggccttgtacacaccgcccgtcacaccatgggagttggatcaacccgaagctggtgcgctaaccttttggaggcagccaaccacggtgggttcagcgactggggtg

SEQ ID NO: 3224 - DNA, 1409 bp, unidentified
  source 1..1409: mol_type = unassigned DNA; note = Sphingorhabdus wooponensis
aacgaacgctggcggcatgcttaacacatgcaagtcgaacgagaccttcgggtctagtggcgcacgggtgcgtaacgcgtgggaatctgcccttaggtacggaataactcagagaaatttgtgctaataccgtatgatgtcgaaagaccaaagatttatcgcctaaggatgagcccgcgtaagattagcttgttggtgaggtaaaagctcaccaaggcgacgatctttagctggtctgagaggatgatcagccacactgggactgagacacggcccagactcctacgggaggcagcagtggggaatattggacaatgggcgaaagcctgatccagcaatgccgcgtgagtgatgaaggccttagggttgtaaagctcttttaccagggatgataatgacagtacctggagaataagctccggctaactccgtgccagcagccgcggtaatacggagggagctagcgttgttcggaattactgggcgtaaagagtacgtaggcggttattcaagtcagaggtgaaagcctggagctcaactccagaactgcctttgaaactagatagctagaatcttggagaggtgagtggaattccgagtgtagaggtgaaattcgtagatattcggaagaacaccagtggcgaaggcgactcactggacaagtattgacgctgaggtacgaaagcgtggggagcaaacaggattagataccctggtagtccacgccgtaaacgatgataactagctgttcgggctctacgagcttgagtggcgcagctaacgcattaagttatccgcctggggagtacggtcgcaagattaaaactcaaaggaattgacgggggcctgcacaagcggtggagcatgtggtttaattcgaagcaacgcgcagaaccttaccagcgtttgacatcctaatcgcggttttcagagatgattaccttcagttcggctggattagtgacaggtgctgcatggctgtcgtcagctcgtgtcgtgagatgttgggttaagtcccgcaacgagcgcaaccctcgtccttagttgccatcattcagttgggcactctaaggaaactgccggtgataagccggaggaaggtggggatgacgtcaagtcctcatggcccttacacgctgggctacacacgtgctacaatggcggtgacagtgggcagcaaccgggcgaccggtagctaatctccaaaaaccgtctcagttcggattgttctctgcaactcgagagcatgaaggcggaatcgctagtaatcgcggatcagcatgccgcggtgaatacgttcccaggccttgtacacaccgcccgtcacaccatgggatttggattcacccgaaggcagtgcgctaaccgcaaggaggcagctgaccacggtgggtttagagactggggtg

SEQ ID NO: 3225 - DNA, 1409 bp, unidentified
  source 1..1409: mol_type = unassigned DNA; note = Sphingosinicella ginsenosidimutans
aacgaacgctggcggcatgcctaacacatgcaagtcgaacgagaccttcgggtctagtggcgcacgggtgcgtaacgcgtgggaatctgcccttgggttcggaataacagttagaaatgactgctaataccggatgatgtcttcggaccaaagatttatcgcccaaggatgagcccgcgtaggattagcttgttggtgaggtaaaggctcaccaaggcgacgatccttagctggtctgagaggatgatcagccacactgggactgagacacggcccagactcctacgggaggcagcagtggggaatattggacaatgggcgaaagcctgatccagcaatgccgcgtgagtgatgaaggccttagggttgtaaagctcttttaccagggatgataatgacagtacctggagaataagctccggctaactccgtgccagcagccgcggtaatacggagggagctagcgttgttcggaattactgggcgtaaagcgcacgtaggcggctttgtaagttagaggtgaaagcccggggctcaaccccggaactgcctttaagactgcatcgcttgaatccgggagaggtgagtggaattccgagtgtagaggtgaaattcgtagatattcggaagaacaccagtggcgaaggcggctcactggaccggtattgacgctgaggtgcgaaagcgtggggagcaaacaggattagataccctggtagtccacgccgtaaacgatgagaactagctgtcgggggtcatggactttcggtggcgcagctaacgcattaagttctccgcctggggagtacggccgcaaggttaaaactcaaagaaattgacgggggcctgcacaagcggtggagcatgtggtttaattcgaagcaacgcgcagaaccttaccagcgtttgacatcctgatcgcggttaccagagatggtttccttcagttcggctggatcagtgacaggtgctgcatggctgtcgtcagctcgtgtcgtgagatgttgggttaagtcccgcaacgagcgcaaccctcgtctttagttgccatcattaagttgggcactctaaagaaaccgccggtgataagccggaggaaggtggggatgacgtcaagtcctcatggcccttacgcgctgggctacacacgtgctacaatggcggtgacagcgggctgctacctcgcgaggggaagctaatcccgaaaagccgtctcagttcggattgttctctgcaactcgagagcatgaaggcggaatcgctagtaatcgcggatcagcatgccgcggtgaatacgttcccaggccttgtacacaccgcccgtcacaccatgggagttggtttcacccgaaggcagtgcgctaaccgcaaggaggcagctgaccacggtgggatcagcgactggggtg

SEQ ID NO: 3226 - DNA, 1409 bp, Sphingosinicella microcystinivorans
  source 1..1409: mol_type = unassigned DNA
aacgaacgctggcggcatgcctaacacatgcaagtcgaacgaagccttcgggcttagtggcgcacgggtgcgtaacacgtgggaatctgcccttaggtacggaataacagttagaaatgactgctaataccgtatgatgactccggtccaaagatttatcgcctaaggatgagcccgcgtcggattagctagttggtgaggtaaaggctcaccaaggcgacgatccgtagctggtctgagaggatgatcagccacactgggactgagacacggcccagactcctacgggaggcagcagtggggaatattggacaatgggcgaaagcctgatccagcaatgccgcgtgagtgaagaaggccttagggttgtaaagctcttttacccgggatgataatgacagtaccgggagaataagctccggctaactccgtgccagcagccgcggtaatacggagggagctagcgttgttcggaatcactggccgtaaagcgcacgtaggcggctttgtaagttagaggtgaaagcccggggctcaactccggaactgcctttaagactgcatcgcttgaatctgggagaggtaagtggaattccgagtgtagaggtgaaattcgtagatattcggaagaacaccagtggcgaaggcggcttactggaccagaattgacgctgaggtgcgaaagcgtggggagcaaacaggattagataccctggtagtccacgccgtaaacgatgagaactagctgtcagggccttttaggctttggtggcgcagctaacgcattaagttctccgcctggggagtacggtcgcaagattaaaactcaaaggaattgacgggggcctgcacaagcggtggagcatgtggtttaattcgaagcaacgcgcagaaccttaccagcgtttgacatcctgatcgcggttaccagagatggtttccttcagttcggctggatcagtgacaggtgctgcatggctgtcgtcagctcgtgtcgtgagatgttgggttaagtcccgcaacgagcgcaaccctcgtccttagttgccatcattcagttgggcactctaaggaaaccgccggtgataagccggaggaaggtggggatgacgtcaagtcctcatggcccttacgcgctgggctacacacgtgctacaatggcggtgacagtgggcagcaaacccgcgagggtgagctaatctccaaaagccgtctcagttcggattgttctctgcaactcgagagcatgaaggcggaatcgctagtaatcgcggatcagcatgccgcggtgaatacgttcccaggccttgtacacaccgcccgttacaccatgggagttggtttcacccgaaggctgtgcgctaaccgcaaggaggcagcagaccacggtgggatcagcgactggggtg

SEQ ID NO: 3227 - DNA, 1461 bp, unidentified
  source 1..1461: mol_type = unassigned DNA; note = Spiribacter salinus
attgaacgctggcggcatgcctaacacatgcaagtcgagcggcagcaggtccttcgggatgctggcgagcggcggacgggtgagtaacacgtgggaatctacctttcggtgggggatagcccggggaaactcggattaataccgcatacgccctacggggcaaagcaggcctctgatttaagcttgcgccgatagatgagcccgcggccgattagctagttggtggggtaaaggcctaccaaggcaacgatcggtagctggtctgagaggacgatcagtcacaccggaactgagacacggtccggactcctacgggaggcagcagtggggaatattggacaatgggcgaaagcctgatccagcaatgccgcgtgggtgaagaaggcttgagggttgtaaagccctttcagcagggaggaaaagcgtacggttaatatccgtgcgtcttgacgttacctgcagaagaagcaccggctaactccgtgccagcagccgcggtaatacggagggtgcaagcgttaatcggaattactgggcgtaaagcgcgcgtaggtggtctgataagtcaaatgtgaaagccccgggctcaacctgggaattgcattcgatactgtcggactagagtctggtagagggtgggggaattcccggtgtagcggtgaaatgcgtagatatcgggaggaacaccagtggcgaaggcgcccacctggaccaagactgacactgaggtgcgaaagcgtggggagcaaacaggattagataccctggtagtccacgccgtaaacgatgagaactagccgtcgggtccatttatggacttggtggcgcagctaacgcgttaagttctccgcctggggagtacggccgcaaggttaaaactcaaaggaattgacgggggcccgcacaagcggtggagcatgtggtttaattcgatgcaacgcgaagaaccttacctgcccttgacatcctcggaacttgtcagagatgacgtggtgccttcgggaaccgagtgacaggtgctgcatggctgtcgtcagctcgtgtcgtgagatgttgggttaagtcccgcaacgagcgcaacccttgtccctagttgccagcgattcggtcgggaactctagggagactgccggtgacaaaccggaggaaggtggggatgacgtcaagtcatcatggcccttatgggcagggctacacacgtgctacaatggccggcacaatgggttgccaacccgcgagggggagctaatcccataaaaccggtcgtagtccggatcgcagtctgcaactcgactgcgtgaagtcggaatcgctagtaatcgcagatcagcaatgctgcggtgaatacgttcccgggccttgtacacaccgcccgtcacaccatgggagtcggctgcaccagaagccggtagcctaaccttcgggagggcgccgtccacggtgtggtcgatgactggggtg

SEQ ID NO: 3228 - DNA, 1431 bp, Spirosoma spitsbergense
  source 1..1431: mol_type = unassigned DNA
gatgaacgctagcggcaggcctaatacatgcaagtcgaacggagcagcaatgcttagtggcaaacgggtgcgtaacgcgtaagcaacctgccttctactgggggatagcccggcgaaagctggggtaaacccgcacggtccagaggaatcacctgattattctggtaaacatttatgggtagaagaggggcttgcgtctgattagctagttgggggggtaacggcccaccaaggcgatgatcagtaggggttctgagaggattggcccccacatgggtactgagatacggacccaactcctacgggaggcagcagtagggaatattgggcaatggaggcaactctgacccagccatgccgcgtgcaggatgaaggcgctcagcgttgtaaactgcttttatcagggaagaactgtaggattgcgatcttatttgacggtacctgaggaataagcaccggctaactccgtgccagcagccgcggtaatacggagggtgcaagcgttgtccggatttattgggtttaaagggtgcgtaggtggtacaataagtctggtttgaaagcaagtggctcaaccatttgatgtggctggaaactgttgtacttgaatggattggcggtagccggaacgggtcatgtagcggtgaaatgcatagatatgacccagaacaccgattgcgaaggcaggctactacgatttgattgacactgaggcacgagagcatgggtagcgaacaggattagataccctggtagtccatgccgtaaacgatgattactggctgtgtgtgttcaagcatgcgtggctgagcgaaagcgttaagtaatccacctggggagtacgctggcaacagtgaaactcaaaggaattgacgggggtccgcacaagcggtggagcatgtggtttaattcgatgatacgcgaggaaccttacctgggctagaatgtgcgtgaagggttcagaaatgggtccgtgtagcaatacacacaaaacaaggtgctgcatggctgtcgtcagctcgtgccgtgaggtgttgggttaagtcccgcaacgagcgcaacccctatgtttagttgccagcgcgttatggcgggaactctaaacagactgcctgcgcaagcagagaggaagggggggacgacgtcaagtcatcatggcccttacgtccagggcgacacacgtgctacaatggtcggtacagcgggtagcgatctcgcaagggggagccaatcttgtaaagccggtcacagttcggattggggtctgcaacccgaccccatgaagctggaatcgctagtaatcgcgcatcagccatggcgcggtgaatacgttcccggaccttgtacacaccgcccgtcaagccatgggaattggggggacctgaagtgggaggtaacattcctatcagggtaaactcggtgactagggct

SEQ ID NO: 3229 - DNA, 1410 bp, Spirulina subsalsa
  source 1..1410: mol_type = unassigned DNA
gatgaacgttggcggtatgcttaacacatgcaagtcgaacggactcttcggagttagtggcggacgggtgagtaacgcgtgagaatctgcctctaggtcggggacaacagttggaaacgactgctaatcccggatgagcctgagggtaaaagagaaattgcctagagaggagctcgcgtctgattagctagatggtggggtaagagcctaccatggcgacgatcagtagctgttctgagaggaagatcagccacactgggactgagacacggcccagactcctacgggaggcagcagtggggaattttccgcaatgggcgaaagctgacggagcaataccgcgtgagggaagaaggcctttgggtcgtaaacctcttttctgaaggaagaagacctgacggtacttcaggaataagcctcggctaactccgtgccagcagccgcggtaatacggaggaggcaagcgttatccggaattattgggcgtaaagcgtccgtaggtggctaatcaagtctgtggtcaaagactagagcttaactctgggagggccatggaaactgaggagctagagtgcggtaggggtagagggaattcccagtgtagcggtgaaatgcgtagagattgggaagaacaccggtggcgaaagcgctctactgggccgagactgacactgagggacgaaagctaggggagcaaaagggattagatacccctgtagtcctagccgtaaacgatggaaactaggcgtggcttgtatcgacccgagccgtgccgaagctaacgcgttaagtttcccgcctggggagtacgcacgcaagtgtgaaactcaaaggaattgacgggggcccgcacaagcggtggagtatgtggtttaattcgatgcaacgcgaagaaccttaccagggcttgacatctggcgaatcttgccgaaaggtgagagtgccttagggaacgccaagacaggtggtgcatggctgtcgtcagctcgtgtcgtgagatgttgggttaagtcccgcaacgagcgcaaccctcgtccttagttgccagcattaagttgggcactctagggagactgccggtgacaaaccggaggaaggtggggatgacgtcaagtcagcatgccccttacgtcctgggctacacacgtactacaatggttgagacaaagggcagcgagcaagcgattgtaggcgaatcccagcaaactcagcctcagttcagattgcaggctgcaactcgcctgcatgaaggaggaatcgctagtaatcgccggtcagcatacggcggtgaatccgttcccgggccttgtacacaccgcccgtcacaccatggaagctggcaacatccgaagtcgttactccaaccttacgaggaggagggcgccgaaggtggggctagtgactggggtg

SEQ ID NO: 3230 - DNA, 1370 bp, Sporolituus thermophilus
  source 1..1370: mol_type = unassigned DNA
ggataacaccgcgaaagtggtgctaataccgaatgtgtcacctgggcgcatgcccgggttgagaaaggtggcctctggaaacaagctaccgctagaagatgggtctgcgtctgattagctagttggtagggtaacggcctaccaaggcgacgatcagtagccggtctgagaggatgaacgccacactgggactgagacacggcccagactcctacgggaggcagcagtggggaatcttccgcaatgggcgaaagcctgacggagcaacgccgcgtgggtgaagaaggccttcgggtcgtaaagccctgtcatccgggacgaagtttacttatgcgaacagtgtaagtaagtgacggtaccggaggaggaagccacggctaactacgtgccagcagccgcggtaatacgtaggtggcaagcgttgtccggaattattgggcgtaaagcgcgcgtaggcggggcgtcaagtccatcttaaaaggctggggctcaaacctggtatgggatggaaactgacgttcttgagtgcaggagaggaaagtggaattcccggtgtagcggtgaaatgcgtagatatcgggaggaacaccagtggcgaaggcggctttctggactgtgtctgacgctgaggcgcgaaagccaggggagcgaacgggattagataccccggtagtcctggccgtaaacgatgggtactaggtgtgggaggtaaccaatcctttcgtgccggagttaacgcaataagtaccccgcctggggagtacggccgcaaggctgaaactcaaaggaattgacgggggcccgcacaagcggtggagtatgtggtttaattcgacgcaacgcgaagaaccttaccagggcttgacatcgagggaagtgactagagatagtcacgtcttgccttagggtaagacccgaagacaggtggtgcatggctgtcgtcagctcgtgtcgtgagatgttgggttaagtcccgcaacgagcgcaacccttatcccttgttgccagcacgtaaaggtggggactcaagggagactgccgcagagaatgcggaggaaggcggggatgacgtcaagtcatcatgccccttatgtcctgggctacacacgtactacaatgggcttaatagagggcgtgcgaagccgcgaggcagagcgaaccccaaaaacaagctctcagttcggatcgcaggctgcaactcgcctgcgtgaagtcggaatcgctagtaatcgcagatcagcatgctgcggtgaatacgttcccgggccttgtacacaccgcccgtcacaccacgagagttggcaacacccgaagccggtgaggtaaccgcaaggagccagccgtcgaaggtggggccgatgattggggtg

SEQ ID NO: 3231 - DNA, 1474 bp, Sporomusa acidovorans
  source 1..1474: mol_type = unassigned DNA
gacgaacgctggcggcgtgcctaacacatgcaagtcgaacggggagttagtaataactcctagtggcgaacgggtgagtaacgcgtagacaacctgcctctaagctggggacaacaccgcgaaagtggtgctaataccgaatgtgatatcttggtcgcatgactgagataagaaagatggcctctttacaatgctatcgattagagatgggtctgcgtctgattagcttgttggcggggtaacggcccaccaaggcgacgatcagtagccggtctgagaggatgaacggccacactgggactgagacacggcccagactcctacgggaggcagcagtggggaatcttccgcaatggacgaaagtctgacggagcaacgccgcgtgagtgaagaaggttttcggatcgtaaaactctgtcgtttgggacgaacgtatccagtgtaaataatgcggggtaatgacggtaccaaaggaggaagccacggctaactacgtgccagcagccgcggtaatacgtaggtggcaagcgttgtccggaattattgggcgtaaagggcgtgtaggtggatgattaagtcttgtgtctaagtgcggagctcaactccgtatgggcgcgggaaactggttgtcttgagtgcaggagaggaaagtggaattcccagtgtagcggtgaaatgcgtagatattgggaggaacaccagtggcgaaggcgactttctggactgtgtctgacactgaggcgcgaaagccaggggagcgaacgggattagataccccggtagtcctggccgtaaacgatgggtactaggtgtagagggtatcgacccctctgtgccgcagcaaacgcaataagtaccccgcctggggagtacggccgcaaggttgaaactcaaaggaattgacgggggcccgcacaagcggtggagtatgtggtttaattcgacgcaacgcgaagaaccttaccagggcttgacattgagtgaaagttctagagatagaatgttcccttcggggacacaaaaacaggtggtgcatggctgtcgtcagctcgtgtcgtgagatgttgggttaagtcccgcaacgagcgcaacccttatcctttgttgccagcgcgtaatggtgggaactcaaaggagactgccgcagagaatgcggaggaaggcggggatgacgtcaagtcatcatgccccttatgtcctgggctacacacgtactacaatgggcttaaacaaagtgaagcaagaccgcgaggtcaagccaaccacataaacaagctctcagttcggatcggaggctgcaactcgcctccgtgaagtcggaatcgctagtaatcgcaggtcagcatactgcggtgaatacgttcccgggccttgtacacaccgcccgtcacaccacgaaagttgacaacacccgaagccggtggcttaaccgccaaggagagagccgtctaaggtggggtcgatgattggggtg

SEQ ID NO: 3232 - DNA, 1479 bp, Sporomusa malonica
  source 1..1479: mol_type = unassigned DNA
gacgaacgctggcggcgtgcctaacacatgcaagtcgaacggagtaagtagcaatacttacttagtggcgaacgggtgagtaacgcgtagacaacctgcctctaaaatggggacaacaccgcgaaagtggtgctaataccgaatgtggtatctcggttgcatgaccgagataagaaagatggcctctacatgtaagctatcgtttagagatgggtctgcgtctgattagctagttggtgaggtaatagctcaccaaggcgacgatcagtagccggtctgagaggatgaacggccacactgggactgagacacggcccagactcctacgggaggcagcagtggggaatcttccgcaatggacgaaagtctgacggagcaacgccgcgtgagtgaagaaggccttcgggtcgtaaagctctgtcgtttgggacgaacgtgttccatgcaaatagtgtggaataatgacggtaccaaaggaggaagccacggctaactacgtgccagcagccgcggtaatacgtaggtggcaagcgttgtccggaattattgggcgtaaagggcgtgtaggtggatttttaagtcgtgtgtctaagtgcggagctcaactccgtataggcgcaggaaactgggaatcttgagtgcaggagaggaaagtggaattcccagtgtagcggtgaaatgcgtagatattgggaggaacaccagtggcgaaggcgactttctggactgtgtctgacactgaggcgcgaaagctaggggagcgaacgggattagataccccggtagtcctagccgtaaacgatgggtactaggtgtagagggtatcgaccccttctgtgccggagttaacgcaataagtaccccgcctggggagtacggccgcaaggttgaaactcaaaggaattgacgggggcccgcacaagcggtggagtatgtggtttaattcgacgcaacgcgaagaaccttaccagggcttgacattgagtgaaagattaagagattagttcctctcttcggagacacaaaaacaggtggtgcatggctgtcgtcagctcgtgtcgtgagatgttgggttaagtcccgcaacgagcgcaacccttatcctttgttgccagcacgtaaaggtgggaactcaagggagactgccgcagacaatgcggaggaaggcggggatgacgtcaagtcatcatgccccttatgtcctgggctacacacgtactacaatgggcttaaacaaagcgcagcaagaccgcgaggttgagcgaaacgcataaacaagctctcagttcggatcggaggctgcaactcgcctccgtgaagtcggaatcgctagtaatcgcaggtcagcatactgcggtgaatacgttcccgggccttgtacacaccgcccgtcacaccacgaaagttggcaacacccgaagccggtggggtaaccagaaatggaactagccgtctaaggtggggtcaatgattggggtg

SEQ ID NO: 3233 - DNA, 1471 bp, Sporomusa silvacetica
  source 1..1471: mol_type = unassigned DNA
  misc_difference 37..38: note = n is a, c, g, or t
  misc_difference 43: note = n is a, c, g, or t
ctggcggcgtgcctaacacatgcaagtcgaacggggnntccancaatggatacttagtggcgaacgggtgagtaacgcgtagacaacctgcctctaaattggggacaacaccgcgaaagtggtgctaataccgaatgtggtatcttggtcgcatgactgagataagaaaggtggcctctgaatatgctaccgattagagatgggtctgcgtctgattagctagttggtgaggtaatggctcaccaaggcgacgatcagtagccggtctgagaggatgaacggccacactgggactgagacacggcccagactcctacgggaggcagcagtggggaatcttccgcaatggacgaaagtctgacggagcaacgccgcgtgagtgaagaaggtcttcggattgtaaagctctgtcgtttgggacgaacgtgggatgtgtgaataatgcattctaatgacggtaccaaaggaggaagccacggctaactacgtgccagcagccgcggtaatacgtaggtggcaagcgttgtccggaattattgggcgtaaagggcgtgtaggtggatctttaagtcgtgtgtctaagtgcgaggctcaacctcgtataggcgcaggaaactggttatcttgagtgcaggagaggaaagtggaattcccagtgtagcggtgaaatgcgtagatattgggaggaacaccagtggcgaaggcgactttctggactgtgtctgacactgaggcgcgaaagccaggggagcgaacgggattagataccccggtagtcctggccgtaaacgatgggtactaggtgtagagggtatcgaccccttctgtgccgcagctaacgcaataagtaccccgcctggggagtacggccgcaaggttgaaactcaaaggaattgacgggggcccgcacaagcggtggagtatgtggtttaattcgacgcaacgcgaagaaccttaccaggacttgacattgagtgaaaaactaagagattagttcctatccttcgggatacacgaaaacaggtggtgcatggctgtcgtcagctcgtgtcgtgagatgttgggttaagtcccgcaacgagcgcaacccttatcctttgttgccagcacgtaatggtgggaactcaagggagactgccgcagacaatgcggaggaaggcggggatgacgtcaagtcatcatgccccttatgtcctgggctacacacgtactacaatgggcttaaacaaagcgaagcaagaccgcgagggtaagcaaaacgcataaacaagctctcagttcggatcggaggctgcaactcgcctccgtgaagtcggaatcgctagtaatcgcaggtcagcatactgcggtgaatacgttcccgggccttgtacacaccgcccgtcacaccacgaaagttgacaacacccgaagccggtggggtaaccagcaatggaactagccgtctaaggtggggccgatgattggggtg

SEQ ID NO: 3234 - DNA, 1477 bp, Sporomusa sphaeroides
  source 1..1477: mol_type = unassigned DNA
gacgaacgctggcggcgtgcctaacacatgcaagtcgaacggagagttagcaataactcttagtggcgaacgggtgagtaacgcgtagacaacctgcctctaaactggggacaacaccgcgaaagtggtgctaataccgaatgtggtaacttggctgcatggctgagttaagaaagatggcctctacctgtaagctatcgtttagagatgggtctgcgtctgattagctagttggtgaggtaaaggctcaccaaggcgacgatcagtagccggtctgagaggatgaacggccacactgggactgagacacggcccagactcctacgggaggcagcagtggggaatcttccgcaatggacgaaagtctgacggagcaacgccgcgtgagtgaagaaggtcttcggattgtaaagctctgtcgtttgggacgaacgtggattgtgtgaataatgcagtctaatgacggtaccaaaggaggaagccacggctaactacgtgccagcagccgcggtaatacgtaggtggcaagcgttgtccggaattattgggcgtaaagggcgtgtaggtggattcttaagtcgtgtgtctaagtgcggtgctcaacaccgtatgggcgcaggaaactgggaatcttgagtgcaggagaggaaagtggaattcccagtgtagcggtgaaatgcgtagatattgggaggaacaccagtggcgaaggcgactttctggactgtgtctgacactgaggcgcgaaagccaggggagcgaacgggattagataccccggtagtcctggccgtaaacgatgggtactaggtgtagagggtatcgaccccttctgtgccggagttaacgcaataagtaccccgcctggggagtacggccgcaaggttgaaactcaaaggaattgacgggggcccgcacaagcggtggagtatgtggtttaattcgacgcaacgcgaagaaccttaccagggcttgacattgagtgaaagatctagagatagatccctcccttcggggacacaaaaacaggtggtgcatggctgtcgtcagctcgtgtcgtgagatgttgggttaagtcccgcaacgagcgcaacccttatcctttgttgccagcacgtaaaggtgggaactcaagggagactgccacagacaatgcggaggaaggcggggatgacgtcaagtcatcatgccccttatgtcctgggctacacacgtactacaatgggcttaaacaaagtgaagcaagaccgcgaggttgagccaaacacataaacaagctctcagttcggatcggaggctgcaactcgcctccgtgaagtcggaatcgctagtaatcgcaggtcagcatactgcggtgaatacgttcccgggccttgtacacaccgcccgtcacgccacgaaagttggcaacacccgaagccggtggggtaaccagaaatggaactagccgtctaaggtggggtcgatgattggggtg

SEQ ID NO: 3235 - DNA, 1339 bp, Sporomusa termitida
  source 1..1339: mol_type = unassigned DNA
  misc_difference 8: note = n is a, c, g, or t
  misc_difference 46: note = n is a, c, g, or t
  misc_difference 58: note = n is a, c, g, or t
  misc_difference 314..315: note = n is a, c, g, or t
  misc_difference 435: note = n is a, c, g, or t
  misc_difference 910: note = n is a, c, g, or t
  misc_difference 916: note = n is a, c, g, or t
  misc_difference 918: note = n is a, c, g, or t
  misc_difference 934: note = n is a, c, g, or t
  misc_difference 946: note = n is a, c, g, or t
  misc_difference 1132: note = n is a, c, g, or t
  misc_difference 1214: note = n is a, c, g, or t
  misc_difference 1229: note = n is a, c, g, or t
  misc_difference 1289: note = n is a, c, g, or t
gacgaacnctggcggcgtgcctaacacatgcaagtcgaacggagtntagcaataactncttagtggcgaacgggtgagtaacgcgtagacaacctgcctcttagctggggacaacaccgcgaaagtggtgctaataccgaatgtggtaactcggttgcataacggagttaagaaagatggccactctaaagaactatcgctaagagatgggtctgcgtctgattagctggttggtgaggtaacggatcaccaaggcgacgatcagtagccggtctgagaggatgaacggccacactgggactgagacacggccnngactcctacgggaggcagcagtggggaatcttccgcaatggacgaaagtctgacggagcaacgccgcgtgagtgaagaaggccttcgggtcgtaaagctctgtcgtttgggacgaacgtngyctatgtgaataatrtagactaatgacggtaccaaaggaggaagccacggctaactacgtgccagcagccgcggtaatacgtaggtggcaagcgttgtccggaattattgggcgtaaagggcgtgtcggtggcctggtaagtcgtgtgtctaagtgcgaagctcaacttcgtatgggcgcaggaaactgtccagcttgagtgcaggagaggaaagtggaattcccagtgtagcggtgaaatgcgtagatattgggaggaacaccagtggcgaaggcgactttctggactgtgtctgacactgaggcgcgaaagccaggggagcgaacgggattagataccccggtagtcctggccgtaaacgatgggtactaggtgtagagggtatcgaccccttctgtgccggagttaacgcaataagtaccccgcctggggagtacggccgcaaggttgaaactcaaaggaattgacggggncccgcncnagcggtggcgtctgtngtttaattagangcaacgcgaagaaccttaccagggcttgacattgagcgaaaggttcagagatgaatccctatcttcggatacgcgaaaacaggtggtgcatggctgtcgtcagatagtgtcgtgagatgttgggttaagtcccgcaacgagcgcaacccttatcctttgttgccagcgcgtaaaggcgggaactcnagggagctgcggcagagaatgcggtggaaggcggggatgacgtcaagtcatcatgcccctaatgtcctgggctacacacgtnctacaatgggcttanacaaagcgaagcaagcctgcgaaggtaagcaaaacgcagaaataagctctcrgttcgganggcaggctgcaactcgcctccgtgaagtcggaatcgctagtaatcgcagg

SEQ ID NO: 3236 - DNA, 1474 bp, Sporosarcina globispora
  source 1..1474: mol_type = unassigned DNA
gacgaacgctggcggcatgcctaatacatgcaagtcgagcggaatgatgagagcttgctctctgattttagcggcggacgggtgagtaacacgtgggcaacctgccctacagatggggataactccgggaaaccggggctaataccgaataatcagtttgtccgcatggacaaactctgaaagacggtttcggctgtcactgtaggatgggcccgcggcgcattagctagttggtggggtaatggcctaccaaggcgacgatgcgtagccgacctgagagggtgatcggccacactgggactgagacacggcccagactcctacgggaggcagcagtagggaatcttccacaatggacgaaagtctgatggagcaatgccgcgtgagcgaagaaggttttcggatcgtaaagctctgttgtaagggaagaacacgtacgggagtaactgcccgtgccatgacggtaccttattagaaagccacggctaactacgtgccagcagccgcggtaatacgtaggtggcaagcgttgtccggaattattgggcgtaaagcgcgcgcaggcggttctttaagtctgatgtgaaagcccacggctcaaccgtggagggtcattggaaactggagaacttgagtacagaagaggaaagcggaattccacgtgtagcggtgaaatgcgtagagatgtggaggaacaccagtggcgaaggcggctttctggtctgtaactgacgctgaggcgcgaaagcgtggggagcaaacaggattagataccctggtagtccacgccgtaaacgatgagtgctaagtgttagggggtttccgccccttagtgctgcagctaacgcattaagcactccgcctggggagtacggccgcaaggctgaaactcaaaggaattgacggggacccgcacaagcggtggagcatgtggtttaattcgaagcaacgcgaagaaccttaccaggtcttgacatcccactgaccggtgtagagatacatctttcccttcggggacagtggtgacaggtggtgcatggttgtcgtcagctcgtgtcgtgagatgttgggttaagtcccgcaacgagcgcaacccttgatcttagttgccagcatttagttgggcactctaaggtgactgccggtgataaaccggaggaaggtggggatgacgtcaaatcatcatgccccttatgacctgggctacacacgtgctacaatggatgatacagagggttgccaacccgcgagggggagccaatcccataaaatcattcccagttcggattggaggctgcaagtcgcctccatgaagccggaatcgctagtaatcgtggatcagcatgccacggtgaatacgttcccgggtcttgtacacaccgcccgtcacaccacgagagtttgtaacacccgaagtcggtggggtaacccttacgggagccagccgccgaaggtgggacagatgattggggtg

SEQ ID NO: 3237 - DNA, 1410 bp, Sporosarcina pasteurii
  source 1..1410: mol_type = unassigned DNA
  misc_difference 39: note = n is a, c, g, or t
  misc_difference 43: note = n is a, c, g, or t
  misc_difference 57..58: note = n is a, c, g, or t
  misc_difference 60: note = n is a, c, g, or t
  misc_difference 64: note = n is a, c, g, or t
  misc_difference 66..68: note = n is a, c, g, or t
  misc_difference 200: note = n is a, c, g, or t
  misc_difference 245: note = n is a, c, g, or t
  misc_difference 250: note = n is a, c, g, or t
  misc_difference 286: note = n is a, c, g, or t
  misc_difference 377: note = n is a, c, g, or t
  misc_difference 411: note = n is a, c, g, or t
  misc_difference 435: note = n is a, c, g, or t
  misc_difference 447: note = n is a, c, g, or t
  misc_difference 455: note = n is a, c, g, or t
  misc_difference 457: note = n is a, c, g, or t
  misc_difference 564: note = n is a, c, g, or t
  misc_difference 582: note = n is a, c, g, or t
  misc_difference 601: note = n is a, c, g, or t
  misc_difference 840: note = n is a, c, g, or t
  misc_difference 858: note = n is a, c, g, or t
  misc_difference 876: note = n is a, c, g, or t
  misc_difference 888: note = n is a, c, g, or t
  misc_difference 918: note = n is a, c, g, or t
  misc_difference 930: note = n is a, c, g, or t
  misc_difference 934: note = n is a, c, g, or t
  misc_difference 947: note = n is a, c, g, or t
  misc_difference 976: note = n is a, c, g, or t
  misc_difference 1026: note = n is a, c, g, or t
  misc_difference 1032: note = n is a, c, g, or t
  misc_difference 1035: note = n is a, c, g, or t
  misc_difference 1071: note = n is a, c, g, or t
  misc_difference 1090: note = n is a, c, g, or t
  misc_difference 1135: note = n is a, c, g, or t
  misc_difference 1174: note = n is a, c, g, or t
  misc_difference 1199: note = n is a, c, g, or t
  misc_difference 1229: note = n is a, c, g, or t
  misc_difference 1315: note = n is a, c, g, or t
gacgaacgctggcggcgtgcctaatacatgcaagtcgancgancaaggaagaaactnntntctncnnntgttagcggcggatgggtgagtaacacgtgggcaacctgccctgcagttggggataactccgggaaaccggggctaataccgaataatcagttccttcgcatgaaggaactctgaaagacggctatgctgtnactgcaggatgggcccgcggcgcattagctagttggtgaggtaanggctnaccaaggcgacgatgcgtagccgacctgagagggtnatcggccacactgggactgagacacggcccagactcctacgggaggcagcagtagggaatcttccacaatggacgaaagtctgatggagcnacgccgcgtgagcgaagaaggttttcggatcgtnaagctctgttgtgagggaagaacnagtacaggagtnactgcctntnccttgacggtacctcattagaaagccacggctaactacgtgccagcagccgcggtaatacgtaggtggcaagcgttgtccggaattattgggcgtaaagcgcgcgcnggcggccttttaagtctnatgtgaaagcccacggctnaaccgtggaaggtcattggaaactggaaggcttgagtacagaagaggaaagcggaattccacgtgtagcggtgaaatgcgtagagatgtggaggaacaccagtggcgaaggcggctttctggtctgtaactgacgctgaggcgcgaaagcatggggagcaaacaggattagataccctggtagtccatgccgtaaacgatgagtgctaagtgttagggggtttccgccccttagtgctngagcaaacgcattaagcnctccgcctggggagtacngccgcaaggctnaaactcaaaggaattgacggggaccgcacnagcggtggagcntgtngtttaattcgaantacgcgaagaaccttaccaggtcttgacntcccgctgaccggtatagagatatacctttcttcggggacagcggtgacnggtggngcntggttgtcgtcagctcgtgtcgtgagatgttgggtnaagtcccgtaacgagcgcnacccttgaccttagttgccagcattcagttgggcactctaaggtnactgccggtgacaaaccggaggaaggtggggatgacgtnaaatcatcatgccccttatgacctnggctacacacgtgctacaatggacggtacngagggttgccaacccgcgagggggagctaatcccataaaaccgttcccagttcggattgcaggctgcaactcgcctgcatgaagcnggaatcgctagtaatcgtggatcagcatgccacggtgaatacgttcccgggtcttgtacacaccgcccgtcacaccacgagagtttgtaacaccc

SEQ ID NO: 3238 - DNA, 1473 bp, Sporosarcina psychrophila
  source 1..1473: mol_type = unassigned DNA
gacgaacgctggcggcatgcctaatacatgcaagtcgagcggaatgacgagagcttgctctctgattttagcggcggacgggtgagtaacacgtgggcaacctgccctacagatggggataactccgggaaaccggggctaataccgaataatcagtttgtccgcatggacaaactctgaaagacggtttcggctgtcactgtaggatgggcccgcggcgcattagctagttggtggggtaatggcctaccaaggcaacgatgcgtagccgacctgagagggtgatcggccacactgggactgagacacggcccagactcctacgggaggcagcagtagggaatcttccacaatggacgaaagtctgatggagcaatgccgcgtgagcgaagaaggttttcggatcgtaaagctctgttgtaagggaagaacacgtacgggagtaactgcccgtgccatgacggtaccttattagaaagccacggctaactacgtgccagcagccgcggtaatacgtaggtggcaagcgttgtccggaattattgggcgtaaagcgcgcgcaggcggttctttaagtctgatgtgaaagcccacggctcaaccgtggagggtcattggaaactggagaacttgagtacagaagaggaaagcggaattccacgtgtagcggtgaaatgcgtagagatgtggaggaacaccagtggcgaaggcggctttctggtctgtaactgacgctgaggcgcgaaagcgtggggagcaaacaggattagataccctggtagtccacgccgtaaacgatgagtgctaagtgttagggggtttccgccccttagtgctgcagctaacgcattaagcactccgcctggggagtacggccgcaaggctgaaactcaaaggaattgacggggacccgcacaagcggtggagcatgtggtttaattcgaagcaacgcgaagaaccttaccaggtcttgacatcccactgaccggtgtagagatacgcctttcccttcggggacagtggtgacaggtggtgcatggttgtcgtcagctcgtgtcgtgagatgttgggttaagtcccgcaacgagcgcaacccttgatcttagttgccagcattcagttgggcactctaaggtgactgccggtgataaaccggaggaaggtggggatgacgtcaaatcatcatgccccttatgacctgggctacacacgtgctacaatggatgatacagagggttgccaacccgcgagggggagccaatcccataaaatcgttcccagttcggattggaggctgcaactcgcctccatgaagttggaatcgctagtaatcgtggatcagcatgccacggtgaatacgttcccgggtcttgtacacaccgcccgtcacaccacgagagtttgtaacacccgaagtcggtggggtacatctacgggagccagccgccgaaggtgggacagatgattggggtg

SEQ ID NO: 3239 - DNA, 1410 bp, Stakelama pacifica
  source 1..1410: mol_type = unassigned DNA
aacgaacgctggcggcatgcttaacacatgcaagtcgaacgaagtcttcggacttagtggcgcacgggtgcgtaacgcgtgggaatcagcccttaggtacggaataacagtgagaaattactgctaataccgtatgatgtcttcggaccaaagatttatcgcctaaggatgagcccgcgttggattagctagttggtggggtaaaggcctaccaaggcgacgatccatagctggtctgagaggatgatcagccacactgggactgagacacggcccagactcctacgggaggcagcagtggggaatattggacaatgggggaaaccctgatccagcaatgccgcgtgagtgatgaaggccttagggttgtaaagctcttttacccgggatgataatgacagtaccgggagaataagctccggctaactccgtgccagcagccgcggtaatacggagggagctagcgttgttcggaattactgggcgtaaagcgcgcgtaggcggttttgcaagttagaggtgaaagcccggggctcaaccccggaactgcctttaaaactgcatcacttgaatccaggagaggtgagtggaattccgagtgtagaggtgaaattcgtagatattcggaagaacaccagtggcgaaggcggctcactggactggtattgacgctgaggtgcgaaagtgtggggagcaaacaggattagataccctggtagtccacaccgtaaacgatgataactagctgtccgggtgcatggcacttgggtggcgcagctaacgcattaagttatccgcctggggagtacggtcgcaagattaaaactcaaaggaattgacggggcctgcacaagcggtggagcatgtggtttaattcgaagcaacgcgcagaaccttaccagcgtttgacatgccggtcgcggatagtggagacactttccttcagttcggctggaccgtgcacaggtgctgcatggctgtcgtcagctcgtgtcgtgagatgttgggttaagtcccgcaacgagcgcaaccctcgactttagttaccatcatttagttgggtactctaaagtaaccaccggtgataagccggaggaaggtggggatgacgtcaagtcctcatggcccttacgcgctgggctacacacgtgctacaatggcggtgacagtgggcagcaatcccgcgagggtgagctaatctccaaaaaccgtctcagttcggattgttctctgcaactcgagagcatgaaggcggaatcgctagtaatcgcggatcagcatgccgcggtgaatacgttcccaggccttgtacacaccgcccgtcacaccatgggagttggattcacccgaaggtggtgcgctaacccttaagggaggcagccaaccacggtgggtttagcgactggggtg

SEQ ID NO: 3240 - DNA, 1415 bp, unidentified
  source 1..1415: mol_type = unassigned DNA; note = Stanieria cyanosphaera
gatgaacgctggcggtatgcctaacacatgcaagtcgaacgggaatccttcgggattctagtggcggacgggtgagtaacgcgtgagaatctgccttcaggacggggataacagttggaaacgactgctaatacccgatgtgccgaaaggtaaaagtaattcgcctgaagaggagctcgcgtccgattagctagttggtgtggtaagagcgcaccaaggcgacgatcggtagctggtctgagaggatgagcagccacactgggactgagacacggcccagactcctacgggaggcagcagtggggaattttccgcaatgggcgaaagcctgacggagcaataccgcgtgagggaggaaggcctttgggttgtaaacctcttttctcaaggaagaagttctgacggtacttgaggaatcagcatcggctaactccgtgccagcagccgcggtaatacggaggatgcaagcgttatccggaattattgggcgtaaagcgtccgcaggcggtttcacaagtctgctgtcaaagactggagcttaactccgggcaggcggtggaaactgtgaaactagagtacggtaggggtagagggaattcccagtgtagcggtgaaatgcgtagagattgggaagaacaccagtggcgaaggcgctctactgggccgtaactgacgctcagggacgaaagctaggggagcgaaagggattagatacccctgtagtcctagctgtaaacgatggatactaggcgttgcttgtatcgacccgagcagtgccgcagctaacgcgttaagtatcccgcctggggagtacgcacgcaagtgtgaaactcaaaggaattgacgggggcccgcacaagcggtggagtatgtggtttaattcgatgcaacgcgaagaaccttaccaggacttgacatgtcgcgaatcactaggaaactagagagtgccttcgggagcgcgaacacaggtggtgcatggctgtcgtcagctcgtgtcgtgagatgttgggttaagtcccgcaacgagcgcaaccctcgttcttagttgccagcagttaggctgggcactctaggaagactgccggtgacaaaccggaggaaggtggggatgacgtcaagtcagcatgccccttacgtcctgggctacacacgtactacaatggtagggacaaagggcagcaagctcgcaagagtaagcgaatctcagcaaaccctgcctcagttcagattgcaggctgcaactcgcctgcatgaaggaggaatcgctagtaatcgcaggtcagcatactgcggtgaatccgttcccgggccttgtacacaccgcccgtcacaccatggaagctggccacgcccgaagtcgttaccctaacccgtaagggagggggatgccgaaggcagggctagtgactggggtg

SEQ ID NO: 3241 - DNA, 1409 bp, Staphylococcus agnetis
  source 1..1409: mol_type = unassigned DNA
catgcaagtcgagcgaactgacgaggagcttgctcctttgacgttagcggcggacgggtgagtaacacgtgggtaacctacctataagactggaataactccgggaaaccggggctaatgccggataacatgttgaaccgcatggttcaacagtgaaagacggtcttgctgtcacttatagatggacccgcgccgtattagctagttggtaaggtaacggcttaccaaggcgacgatacgtagccgacctgagagggtgatcggccacactggaactgagacacggtccagactcctacgggaggcagcagtagggaatcttccgcaatgggcgaaagcctgacggagcaacgccgcgtgagtgatgaaggtcttcggatcgtaaagctctgttgttagggaagaacatatgtgtaagtaactgtgcacatcttgacggtacctaaccagaaagccacggctaactacgtgccagcagccgcggtaatacgtaggtggcaagcgttatccggaattattgggcgtaaagcgcgcgtaggcggttttttaagtctgatgtgaaagcccacggctcaaccgtggagggtcattggaaactggaaaacttgagtgcagaagaggaaagtggaattccatgtgtagcggtgaaatgcgcagagatatggaggaacaccagtggcgaaggcggctttctggtctgtaactgacgctgaggtgcgaaagcgtggggatcaaacaggattagataccctggtagtccacgccgtaaacgatgagtgctaagtgttagggggtttccgccccttagtgctgcagctaacgcattaagcactccgcctggggagtacggtcgcaagactgaaactcaaaggaattgacggggacccgcacaagcggtggagcatgtggtttaattcgaagcaacgcgaagaaccttaccaaatcttgacatcttttgaccgctctagagatagagttttcctcttcggaggacaaaatgacaggtggtgcatggttgtcgtcagctcgtgtcgtgagatgttgggttaagtcccgcaacgagcgcaacccttaagcttagttgccatcattaagttgggcactctaagttgactgccggtgacaaaccggaggaaggtggggatgacgtcaaatcatcatgccccttatgatttgggctacacacgtgctacaatggacaatacaaagggcagcgaaacygcgaggtcaagcaaatcccataaagttgttctcagttcggattgtagtctgcaactcgactacatgaagctggaatcgctagtaatcgtagatcagcatgctacggtgaatacgttcccgggtcttgtacacaccgcccgtcacaccacgagagtttgtaacacccgaagccggtggagtaaccattt

SEQ ID NO: 3242 - DNA, 985 bp, unidentified
  source 1..985: mol_type = unassigned DNA; note = Staphylococcus argensis
cagacggggagcttgctcccccgacgttagcggcggacgggtgagtaacacgtgggtaacctacctataagactggaataactccgggaaaccggagctaatgccggataacatgttggaccgcatggtcctacagtgaaagacggtcttgctgtcacttatagatggacccgcgccgtattagctagttggtaaggtaacggcttaccaaggcaacgatacgtagccgacctgagagggtgatcggccacactggaactgagacacggtccagactcctacgggaggcagcagtagggaatcttccgcaatgggcgaaagcctgacggagcaacgccgcgtgagtgatgaaggccttcgggtcgtaaaactctgttattagggaagaacaaatgtgtaagtaactatgcacgtcttgacggtacctaatcagaaagccacggctaactacgtgccagcagccgcggtaatacgtaggtggcaagcgttatccggaattattgggcgtaaagcgcgcgtaggcggtttcttaagtctgatgtgaaagcccacggctcaaccgtggagggtcattggaaactgggaaacttgagtgcaggagaggaaagtggaattccatgtgtagcggtgaaatgcgcagagatatggaggaacaccagtggcgaaggcgactttctggtctgcaactgacgctgatgtgcgaaagcgtggggatcaaacaggattagataccctggtagtccacgccgtaaacgatgagtgctaagtgttagggggtttccgccccttagtgctgcagctaacgcattaagcactccgcctggggagtacgaccgcaaggttgaaactcaaaggaattgacggggacccgcacaagcggtgaagcatgtggtttaattcgaagcaaccccgaagaaccttaccaaatctttgacatccttttgccccctctagagataaaagtttcccccttccgggggacaaa

SEQ ID NO: 3243 - DNA, 1474 bp, unidentified
  source 1..1474: mol_type = unassigned DNA; note = Staphylococcus argenteus
gatgaacgctggcggcgtgcctaatacatgcaagtcgagcgaacggacgagaagcttgcttctctgatgttagcggcggacgggtgagtaacacgtggataacctacctataagactgggataacttcgggaaaccggagctaataccggataatattttgaaccgcatggttcaaaagtgaaagacggtcttgctgtcacttatagatggatccgcgctgcattagctagttggtaaggtaacggcttaccaaggcaacgatgcatagccgacctgagagggtgatcggccacactggaactgagacacggtccagactcctacgggaggcagcagtagggaatcttccgcaatgggcgaaagcctgacggagcaacgccgcgtgagtgatgaaggtcttcggatcgtaaaactctgttattagggaagaacatatgtgtaagtaactgtgcacatcttgacggtacctaatcagaaagccacggctaactacgtgccagcagccgcggtaatacgtaggtggcaagcgttatccggaattattgggcgtaaagcgcgcgtaggcggttttttaagtctgatgtgaaagcccacggctcaaccgtggagggtcattggaaactggaaaacttgagtgcagaagaggaaagtggaattccatgtgtagcggtgaaatgcgcagagatatggaggaacaccagtggcgaaggcgactttctggtctgtaactgacgctgatgtgcgaaagcgtggggatcaaacaggattagataccctggtagtccacgccgtaaacgatgagtgctaagtgttagggggtttccgccccttagtgctgcagctaacgcattaagcactccgcctggggagtacgaccgcaaggttgaaactcaaaggaattgacggggacccgcacaagcggtggagcatgtggtttaattcgaagcaacgcgaagaaccttaccaaatcttgacatcctttgacaactctagagatagagccttccccttcgggggacaaagtgacaggtggtgcatggttgtcgtcagctcgtgtcgtgagatgttgggttaagtcccgcaacgagcgcaacccttaagcttagttgccatcattaagttgggcactctaagttgactgccggtgacaaaccggaggaaggtggggatgacgtcaaatcatcatgccccttatgatttgggctacacacgtgctacaatggacaatacaaagggcagcgaaaccgcgaggtcaagcaaatcccataaagttgttctcagttcggattgtagtctgcaactcgactacatgaagctggaatcgctagtaatcgtagatcagcatgctacggtgaatacgttcccgggtcttgtacacaccgcccgtcacaccacgagagtttgtaacacccgaagccggtggagtaaccttttaggagctagccgtcgaaggtgggacaaatgattggggtg

SEQ ID NO: 3244 - DNA, 1473 bp, Staphylococcus chromogenes
  source 1..1473: mol_type = unassigned DNA
gatgaacgctggcggcgtgcctaatacatgcaagtcgagcgaactgacgaggagcttgctcctttgacgttagcggcggacgggtgagtaacacgtgggtaacctacctataagactggaataactccgggaaaccggggctaatgccggataacatatcgaaccgcatggttcgatagtgaaagacggtcttgctgtcacttatagatggacccgcgccgtattagctagttggtgaggtaacggctcaccaaggcaacgatacgtagccgacctgagagggtgatcggccacactggaactgagacacggtccagactcctacgggaggcagcagtagggaatcttccgcaatgggcgaaagcctgacggagcaacgccgcgtgagtgatgaaggtcttcggatcgtaaagctctgttgttagggaagaacaaatgtgtaagtaactgtgcacatcttgacggtacctaaccagaaagccacggctaactacgtgccagcagccgcggtaatacgtaggtggcaagcgttatccggaattattgggcgtaaagcgcgcgtaggcggttttttaagtctgatgtgaaagcccacggctcaaccgtggagggtcattggaaactggaaaacttgagtgcagaagaggaaagtggaattccatgtgtagcggtgaaatgcgcagagatatggaggaacaccagtggcgaaggcggctttctggtctgtaactgacgctgatgtgcgaaagcgtggggatcaaacaggattagataccctggtagtccacgccgtaaacgatgagtgctaagtgttagggggtttccgccccttagtgctgcagctaacgcattaagcactccgcctggggagtacggtcgcaagactgaaactcaaaggaattgacggggacccgcacaagcggtggagcatgtggtttaattcgaagcaacgcgaagaaccttaccaaatcttgacatcttttgaccactctagagatagagttttcctcttcggaggacaaaatgacaggtggtgcatggttgtcgtcagctcgtgtcgtgagatgttgggttaagtcccgcaacgagcgcaacccttgagcttagttgccatcattaagttgggcactctaagttgactgccggtgacaaaccggaggaaggtggggatgacgtcaaatcatcatgccccttatgatttgggctacacacgtgctacaatggacaatacaaagggcagcgaaaccgcgaggtcaagcaaatcccataaagttgttctcagttcggattgtagtctgcaactcgactacatgaagctggaatcgctagtaatcgtagatcagcatgctacggtgaatacgttcccgggtcttgtacacaccgcccgtcacaccacgagagtttgtaacacccgaagccggtggagtaaccatttggagctagccgtcgaaggtgggacaaatgattggggtg

SEQ ID NO: 3245 - DNA, 1473 bp, Staphylococcus delphini
  source 1..1473: mol_type = unassigned DNA
tatgaacgctggcggcgtgcctaatacatgcaagtcgagcgaacagataaggagcttgctcctttgacgttagcggcggacgggtgagtaacacgtgggtaacctacctataagactggaataactccgggaaaccggggctaatgccggataacatgttgaaccgcatggttctacagtgaaagacggtcttgctgtcacttatagatggacccgcgccgtattagctagttggtggggtaacggcctaccaaggcgacgatacgtagccgacctgagagggtgatcggccacactggaactgagacacggtccagactcctacgggaggcagcagtagggaatcttccgcaatgggcgaaagcctgacggagcaacgccgcgtgagtgatgaaggtcttcggatcgtaaagctctgttgttagggaagaacaaatgtgtaagtaactgtgcacatcttgacggtacctaaccagaaagccacggctaactacgtgccagcagccgcggtaatacgtaggtggcaagcgttatccggaattattgggcgtaaagcgcgcgtaggcggttttttaagtctgatgtgaaagcccacggctcaaccgtggagggtcattggaaactggaaaacttgagtgcagaagaggaaagtggaattccatgtgtagcggtgaaatgcgcagagatatggaggaacaccagtggcgaaggcggctttctggtctgcaactgacgctgatgtgcgaaagcgtggggatcaaacaggattagataccctggtagtccacgccgtaaacgatgagtgctaagtgttagggggtttccgccccttagtgctgcagctaacgcattaagcactccgcctggggagtacggtcgcaagactgaaactcaaaggaattgacggggacccgcacaagcggtggagcatgtggtttaattcgaagcaacgcgaagaaccttaccaaatcttgacatcctttgacaactctagagatagagctttcctcttcggaggacaaagtgacaggtggtgcatggttgtcgtcagctcgtgtcgtgagatgttgggttaagtcccgcaacgagcgcaacccttgaacttagttgccatcattaagttgggcactctaagttgactgccggtgacaaaccggaggaaggtggggatgacgtcaaatcatcatgccccttatgatttgggctacacacgtgctacaatggacaatacaaagggcagcgaaaccgcgaggtcaagcaaatcccataaagttgttctcagttcggattgtagtctgcaactcgactacatgaagctggaatcgctagtaatcgtagatcagcatgctacggtgaatacgttcccgggtcttgtacacaccgcccgtcacaccacgagagtttgtaacacccgaagccggtggagtaaccattttggagctagccgtcgaaggtgggacaaatgattggggt

SEQ ID NO: 3246 - DNA, 1541 bp, unidentified
  source 1..1541: mol_type = unassigned DNA; note = Staphylococcus edaphicus
agagtttgatcctggctcaggatgaacgctggcggcgtgcctaatacatgcaagtcgagcgaacagataaggagcttgctcctttgacgttagcggcggacgggtgagtaacacgtgggtaacctacctataagactgggataacttcgggaaaccggagctaataccggataacatttggaaccgcatggttctaaagtgaaagatggttttgctatcacttatagatggacccgcgccgtattagctagttggtaaggtaacggcttaccaaggcgacgatacgtagccgacctgagagggtgatcggccacactggaactgagacacggtccagactcctacgggaggcagcagtagggaatcttccgcaatgggcgaaagcctgacggagcaacgccgcgtgagtgatgaagggtttcggctcgtaaaactctgttattagggaagaacaaacgtgtaagtaactgtgcacgtcttgacggtacctaatcagaaagccacggctaactacgtgccagcagccgcggtaatacgtaggtggcaagcgttatccggaattattgggcgtaaagcgcgcgtaggcggtttcttaagtctgatgtgaaagcccacggctcaaccgtggagggtcattggaaactgggaaacttgagtgcagaagaggaaagtggaattccatgtgtagcggtgaaatgcgcagagatatggaggaacaccagtggcgaaggcgactttctggtctgtaactgacgctgatgtgcgaaagcgtggggatcaaacaggattagataccctggtagtccacgccgtaaacgatgagtgctaagtgttagggggtttccgccccttagtgctgcagctaacgcattaagcactccgcctggggagtacgaccgcaaggttgaaactcaaaggaattgacggggacccgcacaagcggtggagcatgtggtttaattcgaagcaacgcgaagaaccttaccaaatcttgacatcctttgaaaactctagagatagagccttccccttcgggggacaaagtgacaggtggtgcatggttgtcgtcagctcgtgtcgtgagatgttgggttaagtcccgcaacgagcgcaacccttaagcttagttgccatcattaagttgggcactctaggttgactgccggtgacaaaccggaggaaggtggggatgacgtcaaatcatcatgccccttatgatttgggctacacacgtgctacaatggacaatacaaagggcagctaaaccgcgaggtcatgcaaatcccataaagttgttctcagttcggattgtagtctgcaactcgactacatgaagctggaatcgctagtaatcgtagatcagcatgctacggtgaatacgttcccgggtcttgtacacaccgcccgtcacaccacgagagtttgtaacacccgaagccggtggagtaaccatttatggagctagccgtcgaaggtgggacaaatgattggggtgaagtcgtaacaaggtagccgtatcggaaggtgcggctggatcacct

SEQ ID NO: 3247 - DNA, 1473 bp, Staphylococcus felis
  source 1..1473: mol_type = unassigned DNA
gatgaacgctggcggcgtgcctaatacatgcaagtcgagcgaactgaagaggagcttgctcctttgacgttagcggcggacgggtgagtaacacgtgggtaacctacctataagactggaataactccgggaaaccggggctaatgccggataatatgttgaaccgcatggttcaacagtgaaagacggttttgctgtcacttatagatggacccgcgccgcattagctagttggtgaggtaacggctcaccaaggcgacgatgcgtagccgacctgagagggtgatcggccacactggaactgagacacggtccagactcctacgggaggcagcagtagggaatcttccgcaatggacgaaagtctgacggagcaacgccgcgtgagtgatgaaggtcttcggatcgtaaagctctgttgttagggaagaacaaatgtgtaagtaactgtgcacatcttgacggtacctaaccagaaagccacggctaactacgtgccagcagccgcggtaatacgtaggtggcaagcgttatccggaattattgggcgtaaagcgcgcgtaggcggttttttaagtctgatgtgaaagcccacggctcaaccgtggagggtcattggaaactggaaaacttgagtgcagaagaggaaagtggaattccatgtgtagcggtgaaatgcgcagagatatggaggaacaccagtggcgaaggcggctttctggtctgcaactgacgctgatgtgcgaaagcgtggggatcaaacaggattagataccctggtagtccacgccgtaaacgatgagtgctaagtgttagggggtttccgccccttagtgctgcagctaacgcattaagcactccgcctggggagtacggtcgcaagactgaaactcaaaggaattgacggggacccgcacaagcggtggagcatgtggtttaattcgaagcaacgcgaagaaccttaccaaatcttgacatcctttgaccgctctagagatagagttttcctcttcggaggacaaagtgacaggtggtgcatggttgtcgtcagctcgtgtcgtgagatgttgggttaagtcccgcaacgagcgcaacccttaagcttagttgccatcattaagttgggcactctaggctgactgccggtgacaaaccggaggaaggtggggatgacgtcaaatcatcatgccccttatgatttgggctacacacgtgctacaatggacaatacaaagggcagcgaaaccgtgaggtcaagccaatcccataaagttgttctcagttcggattgtagtctgcaactcgactacatgaagctggaatcgctagtaatcgtagatcagcatgctacggtgaatacgttcccgggtcttgtacacaccgcccgtcacaccacgagagtttgtaacacccgaagccggtggagtaaccatttggagctagccgtcgaaggtgggacaaatgattggggtg

SEQ ID NO: 3248 - DNA, 1453 bp, Staphylococcus fleurettii
  source 1..1453: mol_type = unassigned DNA
agctggcggcgtgcctaatacatgcaagtcgagcgaacagatgagaagcttgcttctctgatgttagcggcggacgggtgagtaacacgtgggtaacctacctataagactgggataactccgggaaaccggggctaatacctgataatattttgaaccgcatggttcgatagtgaaaggcggcttcggctgtcacttatagatggacccgcgccgtattagctagttggtaaggtaatggcttaccaaggcgacgatacgtagccgacctgagagggtgatcggccacactggaactgagacacggtccagactcctacgggaggcagcagtagggaatcttccgcaatgggcgaaagcctgacggagcaacgccgcgtgagtgatgaaggttttcggatcgtaaaactctgttgttagggaagaacaaatttgttagtaactgaacaagtcttgacggtacctaaccagaaagccacggctaactacgtgccagcagccgcggtaatacgtaggtggcaagcgttatccggaattattgggcgtaaagcgcgcgtaggcggtttcttaagtctgatgtgaaagcccacggctcaaccgtggagggtcattggaaactggggaacttgagtgcagaagaggagagtggaattccatgtgtagcggtgaaatgcgcagagatatggaggaacaccagtggcgaaggcggctctctggtctgtaactgacgctgatgtgcgaaagcgtggggatcaaacaggattagataccctggtagtccacgccgtaaacgatgagtgctaagtgttagggggtttccgccccttagtgctgcagctaacgcattaagcactccgcctggggagtacgaccgcaaggttgaaactcaaaggaattgacggggacccgcacaagcggtggagcatgtggtttaattcgaagcaacgcgaagaaccttaccaaatcttgacatcctttgatcgctctagagatagagtcttccccttcgggggacaaagtgacaggtggtgcatggttgtcgtcagctcgtgtcgtgagatgttgggttaagtcccgcaacgagcgcaacccttaagcttagttgccatcattaagttgggcactctaggttgactgccggtgacaaaccggaggaaggtggggatgacgtcaaatcatcatgccccttatgatttgggctacacacgtgctacaatggataatacaaagggcagcgaacccgcgaggtcaagcaaatcccataaaattattctcagttcggattgtagtctgcaactcgactacatgaagctggaatcgctagtaatcgtagatcagcatgctacggtgaatacgttcccgggtcttgtgaacaccgcccgtcacaccacgagagtctgtaacacccgaagccggtggagtaaccttttattaggagctagccgtcgaaggt

SEQ ID NO: 3249 - DNA, 1474 bp, Staphylococcus lutrae
  source 1..1474: mol_type = unassigned DNA
gatgaacgctggcggcgtgcctaatacatgcaagtcgagcgaacagatgaggagcttgctcctttgacgttagcggcggacgggtgagtaacacgtgggtaacctacctataagactggaataactccgggaaaccggggctaatgccggataatatgttgaaccgcatggttcaacagtgaaagacggttttgctgtcacttatagatggacccgcgccgtattagctagttggtgaggtaacggctcaccaaggcgacgatacgtagccgacctgagagggtgatcggccacactggaactgagacacggtccagactcctacgggaggcagcagtagggaatcttccgcaatgggcgaaagcctgacggagcaacgccgcgtgagtgatgaaggtcttcggatcgtaaagctctgttgttagggaagaacacatgtgtaagtcactatgcacatcttgacggtacctaaccagaaagccacggctaactacgtgccagcagccgcggtaatacgtaggtggcaagcgttatccggaattattgggcgtaaagcgcgcgtaggcggttttttaagtctgatgtgaaagcccacggctcaaccgtggagggtcattggaaactggaaaacttgagtgcagaagaggaaagtggaattccatgtgtagcggtgaaatgcgcagagatatggaggaacaccagtggcgaaggcggctttctggtctgcaactgacgctgatgtgcgaaagcgtggggatcaaacaggattagataccctggtagtccacgctgtaaacgatgagtgctaagtgttagggggtttccgccccttagtgctgcagctaacgcattaagcactccgcctggggagtacggtcgcaagactgaaactcaaaggaattgacggggacccgcacaagcggtggagcatgtggtttaattcgaagcaacgcgaagaaccttaccaaatcttgacatcctttgaccgctctagagatagagttttcctcttcggaggacaaagtgacaggtggtgcatggttgtcgtcagctcgtgtcgtgagatgttgggttaagtcccgcaacgagcgcaacccttgaacttagttgccatcattcagttgggcactctaagttgactgccggtgacaaaccggaggaaggtggggatgacgtcaaatcatcatgccccttatgatttgggctacacacgtgctacaatggacaatacaaagggcagcgaaaccgcgaggtcaagcaaatcccataaagttgttctcagttcggattgtagtctgcaactcgactacatgaagctggaatcgctagtaatcgtagatcagcatgctacggtgaatacgttcccgggtcttgtacacaccgcccgtcacaccacgagagtttgtaacacccgaagccggtggagtaaccattttggagctagccgtcgaaggtgggacaaatgattggggtg

SEQ ID NO: 3250 - DNA, 1470 bp, Staphylococcus massiliensis
  source 1..1470: mol_type = unassigned DNA
tgaacgctggcggcgtgcctaatacatgcaagtcgagcgaactgacgaggagcttgctcctttgacgttagcggcggacgggtgagtaacacgtgggtaacctacctataagactggaataactccgggaaaccggggctaatgccggataacatgttgaaccgcatggttcaacattgaaaggcggttttgctgtcacttatagatggacctgcgccgtattagctagttggtaaggtaatggcttaccaaggcgacgatacgtagccgacctgagagggtgatcggccacactggaactgagacacggtccagactcctacgggaggcagcagtagggaatcttccgcaatggacgaaagtctgacggagcaacgccgcgtgagtgatgaaggttttcggatcgtaaagctctgttattagggaagaacaagtgcgtaggtaactatgcgcaccttgacggtacctaatcagaaagccacggctaactacgtgccagcagccgcggtaatacgtaggtggcaagcgttatccggaattattgggcgtaaagcgcgcgtaggcggtttcttaagtctgatgtgaaagcccacggctcaaccgtggatggtcattggaaactggggaacttgagtgcagaagaggaaagtggaattccatgtgtagcggtgaaatgcgcagagatatggaggaacaccagtggcgaaggcgactttctggtctgtaactgacgctgatgtgcgaaagcgtggggatcaaacaggattagataccctggtagtccacgccgtaaacgatgagtgctaagtgttagggggtttccgccccttagtgctgcagctaacgcattaagcactccgcctggggagtacgatcgcaagattgaaactcaaaggaattgacggggacccgcacaagcggtggagcatgtggtttaattcgaagcaacgcgaagaaccttaccaaatcttgacatcctttgaccgctctagagatagagttttccccttcgggggacaaagtgacaggtggtgcatggttgtcgtcagctcgtgtcgtgagatgttgggttaagtcccgcaacgagcgcaacccttaagcttagttgccatcattaagttgggcactctaagttgactgccggtgacaaaccggaggaaggtggggatgacgtcaaatcatcatgccccttatgatttgggctacacacgtgctacaatggacggtacaaagggtcgctaaaccgcgaggtcaagcaaatcccataaagccgttctcagttcggattgtagtctgcaactcgactacatgaagctggaatcgctagtaatcgtagatcagcatgctacggtgaatacgttcccgggtcttgtacacaccgcccgtcacaccacgagagtttgtaacacccgaagccggtggagtaacctttggagctagccgtcgaaggtgggacaaatgattggggtg

SEQ ID NO: 3251 - DNA, 1473 bp, Staphylococcus microti
  source 1..1473: mol_type = unassigned DNA
gatgaacgctggcggcgtgcctaatacatgcaagtcgagcgaacagacgaggtgcttgcacctctgacgttagcggcggacgggtgagtaacacgtgggtaacctacctataagactgggataactccgggaaaccggggctaataccggataacatattgaaccgcatggttcaatagtgaaagacggttttgctgtcacttatagatggacccgcgccgtattagctagttggtgaggtaacggctcaccaaggcgacgatacgtagccgacctgagagggtgatcggccacactggaactgagacacggtccagactcctacgggaggcagcagtagggaatcttccgcaatgggcgaaagcctgacggagcaacgccgcgtgagtgatgaaggtcttcggatcgtaaagctctgttattagggaagaacaaacgtgtaagtaactgtgcacgtcttgacggtacctaatcagaaagccacggctaactacgtgccagcagccgcggtaatacgtaggtggcaagcgttatccggaattattgggcgtaaagcgcgcgtaggcggttttttaagtctgatgtgaaagcccacggctcaaccgtggagggtcattggaaactggaaaacttgagtgcagaagaggaaagtggaattccatgtgtagcggtgaaatgcgcagagatatggaggaacaccagtggcgaaggcggctttctggtctgcaactgacgctgatgtgcgaaagcgtggggatcaaacaggattagataccctggtagtccacgccgtaaacgatgagtgctaagtgttagggggtttccgccccttagtgctgcagctaacgcattaagcactccgcctggggagtacggtcgcaagactgaaactcaaaggaattgacggggacccgcacaagcggtggagcatgtggtttaattcgaagcaacgcgaagaaccttaccaaatcttgacatcctttgaccgcactagagatagtgttttcctcttcggaggacaaagtgacaggtggtgcatggttgtcgtcagctcgtgtcgtgagatgttgggttaagtcccgcaacgagcgcaacccttgagcttagttgccatcattaagttgggcactctaagctgactgccggtgacaaaccggaggaaggtggggatgacgtcaaatcatcatgccccttatgatttgggctacacacgtgctacaatggacattacaaagggcagcaaaaccgcgaggtcaagcaaatcccataaagatgttctcagttcggattgtagtctgcaactcgactacatgaagctggaatcgctagtaatcgtagatcagcatgctacggtgaatacgttcccgggtcttgtacacaccgcccgtcacaccacgagagtttgtaacacccgaagccggtggagtaaccatttggagctagccgtcgaaggtgggacaaatgattggggtg

SEQ ID NO: 3252 - DNA, 1473 bp, Staphylococcus muscae
  source 1..1473: mol_type = unassigned DNA
gatgaacgctggcggcgtgcctaatacatgcaagtcgagcgaacagacgaggtgcttgcacctctgacgttagcggcggacgggtgagtaacacgtgggtaacctacctataagactggaataacttcgggaaaccggagctaatgccggataatatattgaaccgcatggttcaatagtgaaagacggttttgctgtcacttatagatggacccgcgccgtattagctagttggtaaggtaacggcttaccaaggcgacgatacgtagccgacctgagagggtgatcggccacactggaactgagacacggtccagactcctacgggaggcagcagtagggaatcttccgcaatgggcgaaagcctgacggagcaacgccgcgtgagtgatgaaggtcttcggatcgtaaagctctgttattagggaagaacaaacgtgtaagtaactgtgcacgtcttgacggtacctaatcagaaagccacggctaactacgtgccagcagccgcggtaatacgtaggtggcaagcgttatccggaattattgggcgtaaagcgcgcgtaggcggttttttaagtctgatgtgaaagcccacggctcaaccgtggagggtcattggaaactggaaaacttgagtgcagaagaggaaagtggaattccatgtgtagcggtgaaatgcgcagagatatggaggaacaccagtggcgaaggcggctttctggtctgcaactgacgctgatgtgcgaaagcgtggggatcaaacaggattagataccctggtagtccacgccgtaaacgatgagtgctaagtgttagggggtttccgccccttagtgctgcagctaacgcattaagcactccgcctggggagtacggtcgcaagactgaaactcaaaggaattgacggggacccgcacaagcggtggagcatgtggtttaattcgaagcaacgcgaagaaccttaccaaatcttgacatcctttgaccgcactagagatagtgttttcctcttcggaggacaaagtgacaggtggtgcatggttgtcgtcagctcgtgtcgtgagatgttgggttaagtcccgcaacgagcgcaacccttgagcttagttgccatcattaagttgggcactctaagttgactgccggtgacaaaccggaggaaggtggggatgacgtcaaatcatcatgccccttatgatttgggctacacacgtgctacaatggacattacaaagggcagcgaaaccgcgaggtcaagcaaatcccataaagatgttctcagttcggattgtagtctgcaactcgactacatgaagctggaatcgctagtaatcgtagatcagcatgctacggtgaatacgttcccgggtcttgtacacaccgcccgtcacaccacgagagtttgtaacacccgaagccggtggagtaaccatttggagctagccgtcgaaggtgggacaaatgattggggtg

SEQ ID NO: 3253 - DNA, 1473 bp, Staphylococcus piscifermentans
  source 1..1473: mol_type = unassigned DNA
gatgaacgctggcggcgtgcctaatacatgcaagtcgagcgaacagacgaggagcttgctcctctgacgttagcggcggacgggtgagtaacacgtgggtaacctacctataagactggaataactccgggaaaccggggctaatgccggataatatgcggaaccgcatggttccgcaatgaaagacggttttgctgtcacttatagatggacccgcgccgtattagctagttggtaaggtaacggcttaccaaggcaacgatacgtagccgacctgagagggtgatcggccacactggaactgagacacggtccagactcctacgggaggcagcagtagggaatcttccgcaatgggcgaaagcctgacggagcaacgccgcgtgagtgatgaaggtcttcggatcgtaaaactctgttattagggaagaacaagtgcgtaggtaactatgcgcaccttgacggtacctaatcagaaagccacggctaactacgtgccagcagccgcggtaatacgtaggtggcaagcgttatccggaattattgggcgtaaagcgcgcgtaggcggttttttaagtctgatgtgaaagcccacggctcaaccgtggagggtcattggaaactggaaaacttgagtgcagaagaggaaagtggaattccatgtgtagcggtgaaatgcgcagagatatggaggaacaccagtggcgaaggcgactttctggtctgcaactgacgctgatgtgcgaaagcgtggggatcaaacaggattagataccctggtagtccacgccgtaaacgatgagtgctaagtgttagggggtttccgccccttagtgctgcagctaacgcattaagcactccgcctggggagtacggccgcaaggctgaaactcaaaggaattgacggggacccgcacaagcggtggagcatgtggtttaattcgaagcaacgcgaagaaccttaccaaatcttgacatcctttgaccgctctagagatagagtcttccccttcgggggacaaagtgacaggtggtgcatggttgtcgtcagctcgtgtcgtgagatgttgggttaagtcccgcaacgagcgcaacccttaagcttagttgccagcattaagttgggcactctaagttgactgccggtgacaaaccggaggaaggtggggatgacgtcaaatcatcatgccccttatgatttgggctacacacgtgctacaatggacaatacaaagggcagcgaaaccgcgaggtcaagcaaatcccataaagttgttctcagttcggattgtagtctgcaactcgactacatgaagctggaatcgctagtaatcgtagatcagcatgctacggtgaatacgttcccgggtcttgtacacaccgcccgtcacaccacgagagtttgtaacacccgaagccggtggagtaaccttttaggagctagccgtcgaaggtgggacagatgattggggt

SEQ ID NO: 3254 - DNA, 1474 bp, Staphylococcus pseudintermedius
  source 1..1474: mol_type = unassigned DNA
gatgaacgctggcggcgtgcctaatacatgcaagtcgagcgaacagataaggagcttgctcctttgacgttagcggcggacgggtgagtaacacgtgggtaacctacctataagactggaataactccgggaaaccggggctaatgccggataacatgttgaaccgcatggttctacagtgaaagacggtcttgctgtcacttatagatggacccgcgccgtattagctagttggtggggtaacggcctaccaaggcgacgatacgtagccgacctgagagggtgatcggccacactggaactgagacacggtccagactcctacgggaggcagcagtagggaatcttccgcaatgggcgaaagcctgacggagcaacgccgcgtgagtgatgaaggtcttcggatcgtaaagctctgttgttagggaagaacaaatgtgtaagtaactgtgcacatcttgacggtacctaaccagaaagccacggctaactacgtgccagcagccgcggtaatacgtaggtggcaagcgttatccggaattattgggcgtaaagcgcgcgtaggcggttttttaagtctgatgtgaaagcccacggctcaaccgtggagggtcattggaaactggaaaacttgagtgcagaagaggaaagtggaattccatgtgtagcggtgaaatgcgcagagatatggaggaacaccagtggcgaaggcggctttctggtctgcaactgacgctgatgtgcgaaagcgtggggatcaaacaggattagataccctggtagtccacgccgtaaacgatgagtgctaagtgttagggggtttccgccccttagtgctgcagctaacgcattaagcactccgcctggggagtacggtcgcaagactgaaactcaaaggaattgacggggacccgcacaagcggtggagcatgtggtttaattcgaagcaacgcgaagaaccttaccaaatcttgacatcctttgaccgctctagagatagagttttcctcttcggaggacaaagtgacaggtggtgcatggttgtcgtcagctcgtgtcgtgagatgttgggttaagtcccgcaacgagcgcaacccttgaacttagttgccatcattcagttgggcactctaagttgactgccggtgacaaaccggaggaaggtggggatgacgtcaaatcatcatgccccttatgatttgggctacacacgtgctacaatggacaatacaaagggcagcgaaaccgcgaggtcaagcaaatcccataaagttgttctcagttcggattgtagtctgcaactcgactacatgaagctggaatcgctagtaatcgtagatcagcatgctacggtgaatacgttcccgggtcttgtacacaccgcccgtcacaccacgagagtttgtaacacccgaagccggtggagtaaccattttggagctagccgtcgaaggtgggacaaatgattgggacg

SEQ ID NO: 3255 - DNA, 1393 bp, Staphylococcus rostri
  source 1..1393: mol_type = unassigned DNA
gatgaacgctggcggcgtgcctaatacatgcaagtcgagcgaacagacgaggtgcttgcacctctgacgttagcggcggacgggtgagtaacacgtgggtaacctacctataagactggaataactccgggaaaccggggctaatgccggataacatattgaaccgcatggttcaatagtgaaagacggtcttgctgtcacttatagatggacccgcgccgtattagctagttggtaaggtaacggcttaccaaggcgacgatacgtagccgacctgagagggtgatcggccacactggaactgagacacggtccagactcctacgggaggcagcagtagggaatcttccgcaatgggcgaaagcctgacggagcaacgccgcgtgagtgatgaaggtcttcggatcgtaaagctctgttattagggaagaacaaacgtgtaagtaactgtgcacgtcttgacggtacctaatcagaaagccacggctaactacgtgccagcagccgcggtaatacgtaggtggcaagcgttatccggaattattgggcgtaaagcgcgcgtaggcggttttttaagtctgatgtgaaagcccacggctcaaccgtggagggtcattggaaactggaaaacttgagtgcagaagaggaaagtggaattccatgtgtagcggtgaaatgcgcagagatatggaggaacaccagtggcgaaggcggctttctggtctgcaactgacgctgatgtgcgaaagcgtggggatcaaacaggattagataccctggtagtccacgccgtaaacgatgagtgctaagtgttagggggtttccgccccttagtgctgcagctaacgcattaagcactccgcctggggagtacggtcgcaagactgaaactcaaaggaattgacggggacccgcacaagcggtggagcatgtggtttaattcgaagcaacgcgaagaaccttaccaaatcttgacatcctttgaccgcactagagatagtgttttcctcttcggaggacaaagtgacaggtggtgcatggttgtcgtcagctcgtgtcgtgagatgttgggttaagtcccgcaacgagcgcaacccttgagcttagttgccatcattaagttgggcactctaagctgactgccggtgacaaaccggaggaaggtggggatgacgtcaaatcatcatgccccttatgatttgggctacacacgtgctacaatggacattacaaagggcagcaaaaccgcgaggtcaagcaaatcccataaagatgttctcagttcggattgtagtctgcaactcgactacatgaagctggaatcgctagtaatcgtagatcagcatgctacggtgaatacgttcccgggtcttgtacacaccgcccgtcacac

SEQ ID NO: 3256 - DNA, 1474 bp, unidentified
  source 1..1474: mol_type = unassigned DNA; note = Staphylococcus schweitzeri
gatgaacgctggcggcgtgcctaatacatgcaagtcgagcgaacggacgagaagcttgcttctctgatgttagcggcggacgggtgagtaacacgtggataacctacctataagactgggataacttcgggaaaccggagctaataccggataatattttgaaccgcatggttcaaaagtgaaagacggtcttgctgtcacttatagatggatccgcgctgcattagctagttggtaaggtaacggcttaccaaggcaacgatgcatagccgacctgagagggtgatcggccacactggaactgagacacggtccagactcctacgggaggcagcagtagggaatcttccgcaatgggcgaaagcctgacggagcaacgccgcgtgagtgatgaaggtcttcggatcgtaaaactctgttattagggaagaacatatgtgtaagtaactgtgcacatcttgacggtacctaatcagaaagccacggctaactacgtgccagcagccgcggtaatacgtaggtggcaagcgttatccggaattattgggcgtaaagcgcgcgtaggcggttttttaagtctgatgtgaaagcccacggctcaaccgtggagggtcattggaaactggaaaacttgagtgcagaagaggaaagtggaattccatgtgtagcggtgaaatgcgcagagatatggaggaacaccagtggcgaaggcgactttctggtctgtaactgacgctgatgtgcgaaagcgtggggatcaaacaggattagataccctggtagtccacgccgtaaacgatgagtgctaagtgttagggggtttccgccccttagtgctgcagctaacgcattaagcactccgcctggggagtacgaccgcaaggttgaaactcaaaggaattgacggggacccgcacaagcggtggagcatgtggtttaattcgaagcaacgcgaagaaccttaccaaatcttgacatcctttgacaactctagagatagagccttccccttcgggggacaaagtgacaggtggtgcatggttgtcgtcagctcgtgtcgtgagatgttgggttaagtcccgcaacgagcgcaacccttaagcttagttgccatcattaagttgggcactctaagttgactgccggtgacaaaccggaggaaggtggggatgacgtcaaatcatcatgccccttatgatttgggctacacacgtgctacaatggacaatacaaagggcagcaaaaccgcgaggtcaagcaaatcccataaagttgttctcagttcggattgtagtctgcaactcgactacatgaagctggaatcgctagtaatcgtagatcagcatgctacggtgaatacgttcccgggtcttgtacacaccgcccgtcacaccacgagagtttgtaacacccgaagccggtggagtaaccttttaggagctagccgtcgaaggtgggacaaatgattggggtg

SEQ ID NO: 3257 - DNA, 1476 bp, unidentified
  source 1..1476: mol_type = unassigned DNA; note = Staphylococcus stepanovicii
gatgaacgctggcggcgtgcctaatacatgcaagtcgagcgaacagatgagaagcttgcttctctgatgttagcggcggacgggtgagtaacacgtgggtaacctacctataagactgggataactccgggaaaccggggctaataccggataatattttgaaccgcatggttcgatagtgaaagacggtttcggctgtcacttatagatggacccgcgccgtattagctagttggtaaggtaatggcttaccaaggcgacgatacgtagccgacctgagagggtgatcggccacactgggactgagacacggcccagactcctacgggaggcagcagtagggaatcttccgcaatgggcgaaagcctgacggagcaacgccgcgtgagtgatgaaggttttcggatcgtaaaactctgttgttagggaagaacaaatttgttagtaactgaacaagtcttgacggtacctaaccagaaagccacggctaactacgtgccagcagccgcggtaatacgtaggtggcaagcgttatccggaattattgggcgtaaagcgcgcgtaggcggtttcttaagtctgatgtgaaagcccacggctcaaccgtggagggtcattggaaactggggaacttgagtgcagaagaggagagtggaattccatgtgtagcggtgaaatgcgcagagatatggaggaacaccagtggcgaaggcggctctctggtctgtaactgacgctgaggtgcgaaagcgtggggatcaaacaggattagataccctggtagtccacgccgtaaacgatgagtgctaagtgttagggggtttccgccccttagtgctgcagctaacgcattaagcactccgcctggggagtacgaccgcaaggttgaaactcaaaggaattgacggggacccgcacaagcggtggagcatgtggtttaattcgaagcaacgcgaagaaccttaccaaatcttgacatcctttgatcgctctagagatagagttttccccttcgggggacaaagtgacaggtggtgcatggttgtcgtcagctcgtgtcgtgagatgttgggttaagtcccgcaacgagcgcaacccttaagcttagttgccatcattaagttgggcactctaggttgactgccggtgacaaaccggaggaaggtggggatgacgtcaaatcatcatgccccttatgatttgggctacacacgtgctacaatggataatacaaagggcagcgaacccgcgaggtcaagcaaatcccataaaattattctcagttcggattgtagtctgcaactcgactacatgaagctggaatcgctagtaatcgtagatcagcatgctacggtgaatacgttcccgggtcttgtacacaccgcccgtcacaccacgagagtttgtaacacccgaagccggtggagtaacctttataggagctagccgtcgaaggtgggacagatgattggggtg

SEQ ID NO: 3258 - DNA, 1407 bp, Starkeya novella
  source 1..1407: mol_type = unassigned DNA
aacgaacgctggcggcaggcttaacacatgcaagtcgaacgcaccgcaaggtgagtggcagacgggtgagtaacacgtggggatctgcccaatggtacggaatagctccgggaaactggaattaataccgtatgtgcccgcaaggggaaagatttatcgccattggatgaacccgcgtcggattagctagttggtgtggtaaaggcgcaccaaggcgacgatccgtagctggtctgagaggatgatcagccacactgggactgagacacggcccagactcctacgggaggcagcagtggggaatattggacaatgggcgcaagcctgatccagccatgccgcgtgagtgatgaaggccttagggttgtaaagctctttcgccgacgaagataatgacggtagtcggagaagaagccccggctaacttcgtgccagcagccgcggtaatacgaagggggctagcgttgttcggaatcactgggcgtaaagcgcacgtaggcggattgttaagtcaggggtgaaagcctggagctcaactccagaactgcccttgatactggcaatctcgagtccggaagaggtaagtggaactgcgagtgtagaggtgaaattcgtagatattcgcaagaacaccagtggcgaaggcggcttactggtccggtactgacgctgaggtgcgaaagcgtggggagcaaacaggattagataccctggtagtccacgccgtaaacgatggaggctagccgttggtgagcatgctcatcagtggcgcagctaacgcattaagcctcccgcctggggagtacggtcgcaagattaaaactcaaaggaattgacgggggcccgcacaagcggtggagcatgtggtttaattcgaagcaacgcgcagaaccttaccagcctttgacatgtctcggaattggaccagagatggaccaagctcttcggagccgggaacacaggtgctgcatggctgtcgtcagctcgtgtcgtgagatgttgggttaagtcccgcaacgagcgcaaccctcgcccttagttgccatcattaagttgggcactctagggggactgccggtgataagccgagaggaaggtggggatgacgtcaagtcctcatggcccttacgggctgggctacacacgtgctacaatggcggtgacagtgggatgcgaacccgcgagggtgagcaaatctccaaaagccgtctcagttcggattgcactctgcaactcgagtgcatgaagttggaatcgctagtaatcgtggatcagcacgccacggtgaatacgttcccgggccttgtacacaccgcccgtcacaccatgggagttggctttacccgaaggcgctgcgctaacccgcaagggaggcaggcgaccacggtagggtcagcgactggggtg

SEQ ID NO: 3259 - DNA, 1414 bp, Stella humosa
  source 1..1414: mol_type = unassigned DNA
aacgaacgctggcggcatgcctaacacatgcaagtcgaacgaatggcttcggccattagtggcgcacgggtgagtaacgcgtgggaatctgcccagcagtgggggataacctcgggaaactgaggctaataccgcatacgcccctcgggggaaaggcttgctgctgctggaggagcccgcgtcggattaggtagttggtggggtaacggcctaccaagcctgtgatccgtagctggtctgagaggatgatcagccacactgggactgagacacggcccagactcctacgggaggcagcagtggggaatattggacaatgggcgcaagcctgatccagcaatgccgcgtgagtgatgaaggccttcgggttgtaaagctctttcgcccacgacgatgatgacggtagtgggagaagaagccccggctaacttcgtgccagcagccgcggtaatacgaagggggctagcgttgttcggaatgactgggcgtaaagggcgcgtaggcggcgcatcaagtcgggcgtgaaagccccgggctcaacctgggaactgcgttcgagactggtgtgctagagttcgggagaggagagtggaattcccagtgtagaggtgaaattcgtagatattgggaagaacaccaatggcgaaggcagctctctggaccgatactgacgctgaggcgcgaaagcgtggggagcaaacaggattagataccctggtagtccacgccgtaaacgatgaatgctagacgttgggacccctagggtttcagtgtcgccgctaacgcatgaagcattccgcctggggagtacggccgcaaggttaaaactcaaaggaattgacgggggcccgcacaagcggtggagcatgtggtttaattcgacgcaacgcgcagaaccttaccagctcttgacatgggaagtttgggtctgagagatcgggtccttcagttcggctggcttccacacaggtgctgcatggctgtcgtcagctcgtgtcgtgagatgttgggttaagtcccgcaacgagcgcaaccctcatcctcagttgccatcaggtagggctgggcactctggggaaactgccggtgacaagccggaggaaggcggggatgacgtcaagtcctcatggcccttacgggctgggctacacacgtgctacaatggcggtgacagtaggacgcaatggggcgacccggagccaatccactaaaagccgtctcagttcggattgtactctgcaactcgagtgcatgaagctggaatcgctagtaatcgcggatcagcatgccgcggtgaatacgttcccgggccttgtacacaccgcccgtcacaccatgggagttggttttacctgaagccggtgggctaaccgcaaggaggcagccgaccacggtagggtcagcgactggggtg

SEQ ID NO: 3260 - DNA, 1469 bp, Stenotrophomonas chelatiphaga
  source 1..1469: mol_type = unassigned DNA
agtgaacgctggcggtaggcctaacacatgcaagtcgaacggcagcacagtaagagcttgctcttatgggtggcgagtggcggacgggtgaggaatacatcggaatctactttttcgtgggggataacgtagggaaacttacgctaataccgcatacgaccttcgggtgaaagcaggggaccttcgggccttgcgcgattgaatgagccgatgtcggattagctagttggcggggtaaaggcccaccaaggcgacgatccgtagctggtctgagaggatgatcagccacactggaactgagacacggtccagactcctacgggaggcagcagtggggaatattggacaatgggcgcaagcctgatccagccataccgcgtgggtgaagaaggccttcgggttgtaaagcccttttgttgggaaagaaaagcagcgggctaataccttgctgttctgacggtacccaaagaataagcaccggctaacttcgtgccagcagccgcggtaatacgaagggtgcaagcgttactcggaattactgggcgtaaagcgtgcgtaggtggtcgtttaagtctgttgtgaaagccctgggctcaacctgggaactgcagtggaaactggacgactagagtgtggtagagggtagcggaattcccggtgtagcagtgaaatgcgtagagatcgggaggaacatccatggcgaaggcagctacctggaccaacactgacactgaggcacgaaagcgtggggagcaaacaggattagataccctggtagtccacgccctaaacgatgcgaactggatgttgggtgcactttggcacgcagtatcgaagctaacgcgttaagttcgccgcctggggagtacggtcgcaagactgaaactcaaaggaattgacgggggcccgcacaagcggtggagtatgtggtttaattcgatgcaacgcgaagaaccttacctggccttgacatgtcgagaactttccagagatggattggtgccttcgggaactcgaacacaggtgctgcatggctgtcgtcagctcgtgtcgtgagatgttgggttaagtcccgcaacgagcgcaacccttgtccttagttgccagcacgtaatggtgggaactctaaggagaccgccggtgacaaaccggaggaaggtggggatgacgtcaagtcatcatggcccttacggccagggctacacacgtactacaatggtagggacagagggctgcaagccggcgacggtaagccaatcccagaaaccctatctcagtccggattggagtctgcaactcgactccatgaagtcggaatcgctagtaatcgcagatcagcattgctgcggtgaatacgttcccgggccttgtacacaccgcccgtcacaccatgggagtttgttgcaccagaagcaggtagcttaaccttcgggagggcgcttgccacggtgtggccgatgactggggtg

SEQ ID NO: 3261 - DNA, 1467 bp, Stenotrophomonas daejeonensis
  source 1..1467: mol_type = unassigned DNA
agtgaacgctggcggtaggcctaacacatgcaagtcgaacggcagcacaggagagcttgctctctgggtggcgagtggcggacgggtgaggaatacatcggaatctactttgtcgtgggggataacgcagggaaacttgcgctaataccgcatacgacctacgggtgaaagcaggggatcttcggaccttgcgcgattgaatgagccgatgtcggattagctagttggcggggtaaaggcccaccaaggcgacgatccgtagctggtctgagaggatgatcagccacactggaactgagacacggtccagactcctacgggaggcagcagtggggaatattggacaatgggcgcaagcctgatccagccataccgcgtgggtgaagaaggccttcgggttgtaaagcccttttgttgggaaagaaaagccatgggttaataccctgtggttctgacggtacccaaagaataagcaccggctaacttcgtgccagcagccgcggtaatacgaagggtgcaagcgttactcggaattactgggcgtaaagcgtgcgtaggtggttgattaagtctgtcgtgaaagccctgggctcaacctgggaattgcgatggaaactggttgactagagtgtggcagagggtagtggaattcctggtgtagcagtgaaatgcgtagagatcaggaggaacatccgtggcgaaggcgactgcctgggccaacactgacactgaggcacgaaagcgtggggagcaaacaggattagataccctggtagtccacgccctaaacgatgcgaactggatgttgggtgcactttggcacgcagtatcgaagctaacgcgttaagttcgccgcctggggagtacggtcgcaagactgaaactcaaaggaattgacgggggcccgcacaagcggtggagtatgtggtttaattcgatgcaacgcgaagaaccttacctggccttgacatgcacggaactttccagagatggatgggtgccttcgggaaccgtgacacaggtgctgcatggctgtcgtcagctcgtgtcgtgagatgttgggttaagtcccgcaacgagcgcaacccttgtccttagttgccagcacgtaatggtgggaactctaaggagaccgccggtgacaaaccggaggaaggtggggatgacgtcaagtcatcatggcccttacggccagggctacacacgtactacaatggtagggacagagggctgcaagccggcgacggtgagccaatcccagaaaccctatctcagtccggattggagtctgcaactcgactccatgaagtcggaatcgctagtaatcgcagatcagcattgctgcggtgaatacgttcccgggccttgtacacaccgcccgtcacaccatgggagtttgttgcaccagaagcaggtagcttaaccttcgggagggcgcttgccacggtgtggccgatgactggggtg

SEQ ID NO: 3262 - DNA, 1467 bp, Stenotrophomonas ginsengisoli
  source 1..1467: mol_type = unassigned DNA
agtgaacgctggcggtaggcctaacacatgcaagtcgaacggtagcacagaggagcttgctccttgggtgacgagtggcggacgggtgaggaatacatcggaatctactttttcgtgggggataacgtagggaaacttacgctaataccgcatacgacctacgggtgaaagccggggaccttcgggcctggcgcggataaatgagccgatgtcggattagctagttggcggggtaatggcccaccaaggcgacgatccgtagctggtctgagaggatgatcagccacactggaactgagacacggtccagactcctacgggaggcagcagtggggaatattggacaatgggcgcaagcctgatccagccataccgcgtgggtgaagaaggccttcgggttgtaaagcccttttgttgggaaagaaaagcagccggttaatacccggttgttctgacggtacccaaagaataagcaccggctaacttcgtgccagcagccgcggtaatacgaagggtgcaagcgttactcggaattactgggcgtaaagcgtgcgtaggtggtttgttaagtctgtcgtgaaagccctgggctcaacctgggaactgcgatggaaactggctaactagaatgtggtagagggtagcggaattcctggtgtagcagtgaaatgcgtagatatcaggaggaacatccatggcgaaggcagctacctgggccaacattgacactgaggcacgaaagcgtggggagcaaacaggattagataccctggtagtccacgccctaaacgatgcgaactggatgttgggtgcactttggcacgcagtatcgaagctaacgcgttaagttcgccgcctggggagtacggtcgcaagactgaaactcaaaggaattgacgggggcccgcacaagcggtggagtatgtggtttaattcgatgcaacgcgaagaaccttacctggccttgacatgctgagaactttccagagatggattggtgccttcgggaactcagacacaggtgctgcatggctgtcgtcagctcgtgtcgtgagatgttgggttaagtcccgcaacgagcgcaacccttgtccttagttgccagcacgtaatggtgggaactctaaggagaccgccggtgacaaaccggaggaaggtggggatgacgtcaagtcatcatggcccttacggccagggctacacacgtactacaatggtggggacagagggctgcaagccggcgacggtaagccaatcccagaaaccccatctcagtccggattggagtctgcaactcgactccatgaagtcggaatcgctagtaatcgcagatcagcactgctgcggtgaatacgttcccgggccttgtacacaccgcccgtcacaccatgggagtttgttgcaccagaagcaggtagcttaaccttcgggagggcgcttgccacggtgtggccgatgactggggtg

SEQ ID NO: 3263 - DNA, 1467 bp, Stenotrophomonas humi
  source 1..1467: mol_type = unassigned DNA
agtgaacgctggcggtaggcctaacacatgcaagtcgaacggcagcacaggagagcttgctctctgggtggcgagtggcggacgggtgaggaatacatcggaatctactttttcgtgggggataacgtagggaaacttacgctaataccgcatacgacctacgggtgaaagccggggaccttcgggcctggcgcggataaatgagccgatgtccgattagctagttggcggggtaagagcccaccaaggcgacgatcggtagctggtctgagaggatgatcagccacactggaactgagacacggtccagactcctacgggaggcagcagtggggaatattggacaatgggcgcaagcctgatccagccataccgcgtgggtgaagaaggccttcgggttgtaaagcccttttgttgggaaagaaaagcagtcggttaatacccgattgttctgacggtacccaaagaataagcaccggctaacttcgtgccagcagccgcggtaatacgaagggtgcaagcgttactcggaattactgggcgtaaagcgtgcgtaggtggttgtttaagtctgtcgtgaaagccctgggctcaacctgggaattgcgatggaaactgggcaactagagtgtggcagaggatagtggaattcctggtgtagcagtgaaatgcgtagagatcaggaggaacatccgtggcgaaggcgactgtctgggccaacactgacactgaggcacgaaagcgtggggagcaaacaggattagataccctggtagtccacgccctaaacgatgcgaactggatgttgggtgcaatttggcacgcagtatcgaagctaacgcgttaagttcgccgcctggggagtacggtcgcaagactgaaactcaaaggaattgacgggggcccgcacaagcggtggagtatgtggtttaattcgatgcaacgcgaagaaccttacctggccttgacatgtcgagaactttccagagatggattggtgccttcgggaactcgaacacaggtgctgcatggctgtcgtcagctcgtgtcgtgagatgttgggttaagtcccgcaacgagcgcaacccttgtccttagttgccagcacgtaatggtgggaactctaaggagaccgccggtgacaaaccggaggaaggtggggatgacgtcaagtcatcatggcccttacggccagggctacacacgtactacaatggtagggacagagggctgcaagccggcgacggtaagccaatcccagaaaccctatctcagtccggattggagtctgcaactcgactccatgaagtcggaatcgctagtaatcgcagatcagcattgctgcggtgaatacgttcccgggccttgtacacaccgcccgtcacaccatgggagtttgttgcaccagaagcaggtagcttaaccttcgggagggcgcttgccacggtgtggccgatgactggggtg

SEQ ID NO: 3264 - DNA, 1467 bp, Stenotrophomonas koreensis
  source 1..1467: mol_type = unassigned DNA
agtgaacgctggcggtaggcctaacacatgcaagtcgaacggtagcacagaggagcttgctccttgggtgacgagtggcggacgggtgaggaatgcatcggaatctactctttcgtgggggataacgtagggaaacttacgctaataccgcatacgacctacgggtgaaagcaggggaccttcgggccttgcgcgattgaatgagccgatgtccgattagctagttggcggggtaatggcccaccaaggcgacgatcggtagctggtctgagaggatgatcagccacactggaactgagacacggtccagactcctacgggaggcagcagtggggaatattggacaatgggcgcaagcctgatccagccataccgcgtgggtgaagaaggccttcgggttgtaaagcccttttgttgggaaagaaaagcagccggctaatacccggttgttctgacggtacccaaagaataagcaccggctaacttcgtgccagcagccgcggtaatacgaagggtgcaagcgttactcggaattactgggcgtaaagcgtgcgtaggtggttgtttaagtctgtcgtgaaagccctgggctcaacctgggaactgcgatggaaactgggcgactagagtgtggtagagggtagcggaattcctggtgtagcagtgaaatgcgtagatatcaggaggaacatccatggcgaaggcagctacctgggccaacactgacactgaggcacgaaagcgtggggagcaaacaggattagataccctggtagtccacgccctaaacgatgcgaactggatgttgggtgcactttggcacgcagtatcgaagctaacgcgttaagttcgccgcctggggagtacggtcgcaagactgaaactcaaaggaattgacgggggcccgcacaagcggtggagtatgtggtttaattcgatgcaacgcgaagaaccttacctggccttgacatgctgagaactttccagagatggattggtgccttcgggaactcagacacaggtgctgcatggctgtcgtcagctcgtgtcgtgagatgttgggttaagtcccgcaacgagcgcaacccttgtccttagttgccagcacgtaatggtgggaactctaaggagaccgccggtgacaaaccggaggaaggtggggatgacgtcaagtcatcatggcccttacggccagggctacacacgtactacaatggtggggacagagggctgcaaactcgcgagagtaagccaatcccagaaaccccatctcagtccggattggagtctgcaactcgactccatgaagtcggaatcgctagtaatcgcagatcagcactgctgcggtgaatacgttcccgggccttgtacacaccgcccgtcacaccatgggagtttgttgcaccagaagcaggtagcttaaccttcgggagggcgcttgccacggtgtggccgatgactggggtg

SEQ ID NO: 3265 - DNA, 1469 bp, unidentified
  source 1..1469: mol_type = unassigned DNA; note = Stenotrophomonas panacihumi
agtgaacgctggcggcaggcctaacacatgcaagtcgaacggcagcacagtaagagcttgctcttatgggtggcgagtggcggacgggtgaggaatacatcggaatctaccttttcgtgggggataacgtagggaaacttacgctaataccgcatacgaccttcgggtgaaagcaggggaccttcgggccttgcgcgattagatgagccgatgtcggattagctagttggtgaggtaaaggctcaccaaggcgacgatccgtagctggtctgagaggatgatcagccacactggaactgagacacggtccagactcctacgggaggcagcagtggggaatattggacaatgggcgcaagcctgatccagccatgccgcgtgggtgaagaaggccttcgggttgtaaagcccttttgttgggaaagaaaagcagtcgattaatactcgattgttctgacggtacccaaagaataagcaccggctaacttcgtgccagcagccgcggtaatacgaagggtgcaagcgttactcggaattactgggcgtaaagcgtgcgtaggtggtggtttaagtccgttgtgaaagccctgggctcaacctgggaattgcagtggatactgggtcactagagtgtggtagagggtagcggaattcccggtgtagcagtgaaatgcgtagagatcgggaggaacatctgtggcgaaggcggctacctggaccaacactgacactgaggcacgaaagcgtggggagcaaacaggattagataccctggtagtccacgccctaaacgatgcgaactggatgttgggtgcaatttggcacgcagtatcgaagctaacgcgttaagttcgccgcctggggagtacggtcgcaagactgaaactcaaaggaattgacgggggcccgcacaagcggtggagtatgtggtttaattcgatgcaacgcgaagaaccttacctggtcttgacatgtcgagaactttccagagatggattggtgccttcgggaactcgaacacaggtgctgcatggctgtcgtcagctcgtgtcgtgagatgttgggttaagtcccgcaacgagcgcaacccttgtccttagttgccagcacgtaatggtgggaactctaaggagaccgccggtgacaaaccggaggaaggtggggatgacgtcaagtcatcatggcccttacgaccagggctacacacgtactacaatggtagggacagagggctgcaatcccgcgagggtgagccaatcccagaaaccctatctcagtccggattggagtctgcaactcgactccatgaagtcggaatcgctagtaatcgcagatcagcattgctgcggtgaatacgttcccgggccttgtacacaccgcccgtcacaccatgggagtttgttgcaccagaagcaggtagcttaaccttcgggagggcgcttgccacggtgtggccgatgactggggtg

SEQ ID NO: 3266 - DNA, 1467 bp, Stenotrophomonas pavanii
  source 1..1467: mol_type = unassigned DNA
agtgaacgctggcggtaggcctaacacatgcaagtcgaacggcagcacaggagagcttgctctctgggtggcgagtggcggacgggtgaggaatacatcggaatctactctgtcgtgggggataacgtagggaaacttacgctaataccgcatacgacctacgggtgaaagcaggggaccttcgggccttgcgcgattgaatgagccgatgtcggattagctagttggcggggtaaaggcccaccaaggcgacgatccgtagctggtctgagaggatgatcagccacactggaactgagacacggtccagactcctacgggaggcagcagtggggaatattggacaatgggcgcaagcctgatccagccataccgcgtgggtgaagaaggccttcgggttgtaaagcccttttgttgggaaagaaatccagctggctaatacccggttgggatgacggtacccaaagaataagcaccggctaacttcgtgccagcagccgcggtaatacgaagggtgcaagcgttactcggaattactgggcgtaaagcgtgcgtaggtggtcgtttaagtccgttgtgaaagccctgggctcaacctgggaactgcagtggatactggacgactagagtgtggtagagggtagcggaattcctggtgtagcagtgaaatgcgtagagatcaggaggaacatccatggcgaaggcagctacctggaccaacactgacactgaggcacgaaagcgtggggagcaaacaggattagataccctggtagtccacgccctaaacgatgcgaactggatgttgggtgcaatttggcacgcagtatcgaagctaacgcgttaagttcgccgcctggggagtacggtcgcaagactgaaactcaaaggaattgacgggggcccgcacaagcggtggagtatgtggtttaattcgatgcaacgcgaagaaccttacctggccttgacatgtcgagaactttccagagatggatcggtgccttcgggaactcgaacacaggtgctgcatggctgtcgtcagctcgtgtcgtgagatgttgggttaagtcccgcaacgagcgcaacccttgtccttagttgccagcacgtaatggtgggaactctaaggagaccgccggtgacaaaccggaggaaggtggggatgacgtcaagtcatcatggcccttacggccagggctacacacgtactacaatggtagggacagagggctgcaagccggcgacggtaagccaatcccagaaaccctatctcagtccggattggagtctgcaactcgactccatgaagtcggaatcgctagtaatcgcagatcagcattgctgcggtgaatacgttcccgggccttgtacacaccgcccgtcacaccatgggagtttgttgcaccagaagcaggtagcttaaccttcgggagggcgcttgccacggtgtggccgatgactggggtg

SEQ ID NO: 3267 - DNA, 1466 bp, unidentified
  source 1..1466: mol_type = unassigned DNA; note = Stenotrophomonas pictorum
agtgaacgctggcggtaggcctaacacatgcaagtcgaacggcagcacagtaagagcttgctcttacgggtggcgagtggcggacgggtgaggaatacatcggaatctactttttcgtgggggataacgtagggaaacttacgctaataccgcatacgccctacgggggaaagccggggaccttcgggcctggcgcggataaatgagccgatgtccgattagctagttggcggggtaagagcccaccaaggcgacgatcggtagctggtctgagaggatgatcagcacactggaactgagacacggtccagactcctacgggaggcagcagtggggaatattggacaatgggcgcaagcctgatccagccataccgcgtgggtgaagaaggccttcgggttgtaaagcccttttgttgggaaagaaaagcagccggttaatacccggttgttctgacggtacccaaagaataagcaccggctaacttcgtgccagcagccgcggtaatacgaagggtgcaagcgttactcggaattactgggcgtaaagcgtgcgtaggtggttgtttaagtctgtcgtgaaagcctgggctcaacctgggaattgcgatggaaactgggcgactagagtgtggcagagggtagtggaattcctggtgtagcagtgaaatgcgtagagatcaggaggaacatccgtggcgaaggcgactgcctgggccaacactgacactgaggcacgaaagcgtggggagcaaacaggattagataccctggtagtccacgccctaaacgatgcgaactggatgttgggtgcaatttggcacgcagtatcgaagctaacgcgttaagttcgccgcctggggagtacggtcgcaagactgaaactcaaaggaattgacgggggcccgcacaagcggtggagtatgtggtttaattcgatgcaacgcgaagaaccttacctggccttgacatgtcgcgaactttccagagatggattggtgccttcgggaacgcgaacacaggtgctgcatggctgtcgtcagctcgtgtcgtgagatgttgggttaagtcccgcaacgagcgcaacccttgtccttagttgccagcacgtaatggtgggaactctaaggagaccgccggtgacaaaccggaggaaggtggggatgacgtcaagtcatcatggcccttacggccagggctacacacgtactacaatggtagggacagaggctgcaagccggcgacggtaagccaatcccagaaaccctatctcagtccggattggagtctgcaactcgactccatgaagtcggaatcgctagtaatcgcagatcagcattgctgcggtgaatacgttcccgggccttgtacacaccgcccgtcacaccatgggagtttgttgcaccagaagcaggtagcttaaccttcgggagggcgcttgccacggtgtggccgatgactggggtg

SEQ ID NO: 3268 - DNA, 1469 bp, Stenotrophomonas terrae
  source 1..1469: mol_type = unassigned DNA
agtgaacgctggcggtaggcctaacacatgcaagtcgaacggcagcacagtaagagcttgctcttatgggtggcgagtggcggacgggtgaggaatgcatcggaatctactctttcgtgggggataacgtagggaaacttacgctaataccgcatacgacctacgggtgaaagccggggaccttcgggcctggcgcgaatgaatgagccgatgcccgattagctagttggcggggtaagagcccaccaaggcgacgatcggtagctggtctgagaggatgatcagccacactggaactgagacacggtccagactcctacgggaggcagcagtggggaatattggacaatgggcgcaagcctgatccagccataccgcgtgggtgaagaaggccttcgggttgtaaagcccttttgttgggaaagaaaagcagccgattaatacccggttgttctgacggtacccaaagaataagcaccggctaacttcgtgccagcagccgcggtaatacgaagggtgcaagcgttactcggaattactgggcgtaaagcgtgcgtaggtggttgtttaagtctgtcgtgaaagccctgggctcaacctgggaattgcgatggaaactgggcgactagagtgtggcagaggatagtggaattcctggtgtagcagtgaaatgcgtagagatcaggaggaacatccgtggcgaaggcgactgtctgggccaacactgacactgaggcacgaaagcgtggggagcaaacaggattagataccctggtagtccacgccctaaacgatgcgaactggatgttgggtgcaatttggcacgcagtatcgaagctaacgcgttaagttcgccgcctggggagtacggtcgcaagactgaaactcaaaggaattgacgggggcccgcacaagcggtggagtatgtggtttaattcgatgcaacgcgaagaaccttacctggccttgacatgtcgcgaactttccagagatggattggtgccttcgggaacgcgaacacaggtgctgcatggctgtcgtcagctcgtgtcgtgagatgttgggttaagtcccgcaacgagcgcaacccttgtccttagttgccagcacgtaatggtgggaactctaaggagaccgccggtgacaaaccggaggaaggtggggatgacgtcaagtcatcatggcccttacggccagggctacacacgtactacaatggtggggacagagggctgcaagccggcgacggtaagccaatcccagaaaccctatctcagtccggattggagtctgcaactcgactccatgaagtcggaatcgctagtaatcgcagatcagcattgctgcggtgaatacgttcccgggccttgtacacaccgcccgtcacaccatgggagtttgttgcaccagaagcaggtagcttaaccttcgggagggcgcttgccacggtgtggccgatgactggggtg

SEQ ID NO: 3269 - DNA, 1460 bp, Steroidobacter denitrificans
  source 1..1460: mol_type = unassigned DNA
attgaacgctggcggcgtgcctaacacatgcaagtcgagcggtaacaggtgtagcaatacatgctgacgagcggcggacgggtgagtaacgcttgggaatctgcctattagtgggggataactcggggaaactcgagctaataccgcatacgcactacggtggaaagctggggaccgcaaggcctggcgctaatagatgagcccaagtcggattagctagttggtagggtaatggcctaccaaggcgacgatccgtaactggtctgagaggacgaccagtcacaccggaactgagacacggtccggactcctacgggaggcagcagtggggaatattggacaatgggcgaaagcctgatccagcgacgccgcgtgggtgaagaaggcctgcgggttgtaaagccctttcagtggggaagaaaagcctcgagtgaatacctcggggtcttgacgtaacccatagaagaagcaccggctaactctgtgccagcagccgcggtaatacagagggtgcgagcgttaatcggaattactgggcgtaaagcgcgcgtaggcggctttgcaagtcggatgtgaaatccccgggctcaacctgggaactgcattcgagactgcattgctagagtatgggagagggaagtggaatttcaggtgtagcggtgaaatgcgtagatatctgaaggaacatcagtggcgaaagcgacttcctggaccaatactgacgctcatgtgcgaaagcgtggggagcaaacaggattagataccctggtagtccacgccataaacgatgagaactggatgtcgggagggtctgcctctcggtgtcgtagctaacgcgttaagttctccgcctggggagtacggccgcaaggttgaaactcaaaggaattgacggggacccgcacaagcggtggagcatgtggtttaattcgatgcaacgcgaagaaccttacctggtcttgacatcccaggaatcctgcagagatgcgggagtgccttcgggaacctggagacaggtgctgcatggctgtcgtcagctcgtgtcgtgagatgttgggttaagtcccgcaacgagcgcaacccttgcccttagttgccagcattcagttgggaactctaaggggaccgccggtgacaaaccggaggaaggtggggatgacgtcaagtcatcatggcccttatgaccagggctacacacgtgctacaatggccagtacaaagggttgccaacccgcgagggggagctaatcccataaagctggtcgtagtccggatcgcagtctgcaactcggctgcgtgaagtcggaatcgctagtaatcgtgaatcagcattgtcacggtgaatacgttcccgggtcttgtacacaccgcccgtcacaccatgggagttgattgcaccagaagtaggtagcctaaccgcaaggggggcgcttaccacggtgtggtcaatgactggggtg

SEQ ID NO: 3270 - DNA, 1469 bp, Stigmatella aurantiaca
  source 1..1469: mol_type = unassigned DNA
aacgaacgctggcggcgtgcctaacacatgcaagtcgagcgcgaatggagcaatcctagtagagcggcgcacgggtgcgtaacacgtgggtaatctgcctagaagcttgggataaccagtcgaaagattggctaataccaaataagcccacagggacttcggtcctcgagggaaaaggtggcctctgtatacaagctatcacttctagatgagcccgcggcccatcagctagttggcggggtaacggcccaccaaggcaacgacgggtagctggtctgagaggacgatcagccacactggaactgagacacggtccagactcctacgggaggcagcagtggggaattttgcgcaatgggcgaaagcctgacgcagcaacgccgcgtgtgtgatgaaggtcttcggattgtaaagcactttcgaccgggacgaaaacccccaacctaacacgctggggcttgacggtaccgggagaagaagcaccggctaactctgtgccagcagccgcggtaatacagagggtgcaagcgttgttcggaattattgggcgtaaagcgcgtgtaggcggctttgcaagtcgggtgtgaaagccctcagctcaactgaggaagtgcgcccgaaactgcagagcttgagtgccggagagggtagcggaattccccaagtagaggtgaaattcgtagatatggggaggaacaccggtggcgaaggcggctacctggacggtgactgacgctgagacgcgaaagcgtgggtagcaaacaggattagataccctggtagtccacgccgtaaacgatgagaactaggtgtcgtgggagttgacccccgcggtgccgtagctaacgcattaagttctccgcctgggaagtacggtcgcaagactaaaactcaaaggaattgacgggggcccgcacaagcggtggagcatgtggtttaattcgacgcaacgcgcagaaccttacctggtcttgacatcctcggaatccttcagagatgagggagtgcccgcaagggaaccgagagacaggtgctgcatggctgtcgtcagctcgtgtcgtgagatgttgggttaagtcccgcaacgagcgcaaccctcgcctttagttgctccgcaaggagatctctagagggactgccggtgttaaaccggaggaaggtggggatgacgtcaagtcctcatggcctttatgaccagggctacacacgtgctacaatggccggtacagagcgttgccaacccgcgagggggagctaatcgcataaaaccggtctcagttcagattggagtctgcaactcgactccatgaaggcggagtcgctagtaatcgcagatcagcacgctgcggtgaatacgttcccgggccttgtacacaccgcccgtcacaccatgggagtcaattgctccagaagtcgctgtgccaaccgcaaggaggcaggcgcccaaggagtggttggtaactggggtg

SEQ ID NO: 3271 - DNA, 1469 bp, Stigmatella erecta
  source 1..1469: mol_type = unassigned DNA
aacgaacgctggcggcgtgcctaacacatgcaagtcgagcgcgaatggagcaatcctagtagagcggcgcacgggtgcgtaacacgtgggtaatctgcctagaagcttgggataaccagtcgaaagattggctaataccaaataagcccacagggacttcggtcctcgagggaaaaggtggcctctgtatacaagctatcacttctagatgagcccgcggcccatcagctagttggcggggtaacggcccaccaaggcaacgacgggtagctggtctgagaggacgatcagccacactggaactgagacacggtccagactcctacgggaggcagcagtggggaattttgcgcaatgggcgaaagcctgacgcagcaacgccgcgtgtgtgatgaaggtcttcggattgtaaagcactttcgaccgggacgaaaacccccaacctaacacgctggggcttgacggtaccgggagaagaagcaccggctaactctgtgccagcagccgcggtaatacagagggtgcaagcgttgttcggaattattgggcgtaaagcgcgtgtaggcggctttgcaagtcgggtgtgaaagccctcagctcaactgaggaagtgcgcccgaaactgcagagcttgagtgccggagagggtagcggaattccccaagtagaggtgaaattcgtagatatggggaggaacaccggtggcgaaggcggctacctggacggtgactgacgctgagacgcgaaagcgtgggtagcaaacaggattagataccctggtagtccacgccgtaaacgatgagaactaggtgtcgtgggagttgacccccgcggtgccgtagctaacgcattaagttctccgcctgggaagtacggtcgcaagactaaaactcaaaggaattgacgggggcccgcacaagcggtggagcatgtggtttaattcgacgcaacgcgcagaaccttacctggtcttgacatcctcggaatccttcagagatgagggagtgcccgcaagggaaccgagagacaggtgctgcatggctgtcgtcagctcgtgtcgtgagatgttgggttaagtcccgcaacgagcgcaaccctcgcctttagttgctccgcaaggagatctctagagggactgccggtgttaaaccggaggaaggtggggatgacgtcaagtcctcatggcctttatgaccagggctacacacgtgctacaatggccggtacagagcgttgccaacccgcgagggggagctaatcgcataaaaccggtctcagttcagattggagtctgcaactcgactccatgaaggcggaatcgctagtaatcgcagatcagcacgctgcggtgaatacgttcccgggccttgtacacaccgcccgtcacaccatgggagtcaattgctccagaagtcgctgtgccaaccgcaaggaggcaggcgcccaaggagtggttggtaactggggtg

SEQ ID NO: 3272 - DNA, 1479 bp, Streptococcus criceti
  source 1..1479: mol_type = unassigned DNA
gacgaacgctggcggcgtgcctaatacatgcaagtggaacgcttcttttttaccgagtgcttgcactcacaaggaagaagagtcgcgaacgggtgagtaacgcgtaggtaacctgcctggtagcgggggataactattggaaacgatagctaataccgcataatagtgattaactcatgttaatgacttgaaaggtgcaatggcaccactatcagatggacctgcgttgtattagctagtaggtagggtaaaggcctacctaggctgcgatacatagccgacctgagagggtgaacggccacactgggactgagacacggcccagactcctacgggaggcagcagtagggaatcttcggcaatggggggaaccctgaccgagcaacgccgcgtgagtgaagaaggttttcggatcgtaaagctctgttgtaagagaagaacgttgagtagagtggaaagttactcaagtgacggtatcttaccagaaagggacggctaactacgtgccagcagccgcggtaatacgtaggtcccgagcgttgtccggatttattgggcgtaaagcgagcgcaggcggtttagtaagtctgaagttaaaggcattggctcaaccaatgtttgctttggaaactgttaaacttgagtgcagaaggggagagtggaattccatgtgtagcggtgaaatgcgtagatatatggaggaacaccggtggcgaaagcggctctctggtctgtaactgacgctgaggctcgaaagcgtgggtagcgaacaggattagataccctggtagtccacgccgtaaacgctgagtgctaggtgttgggtcctttccgggactcagtgccggagctaacgcattaagcactccgcctggggagtacgaccgcaaggttgaaactcaaaggaattgacgggggcccgcacaagcggtggagcatgtggtttaattcgaagcaacgcgaagaaccttaccaggtcttgacatcccgatgccatccctagagatagggagttacttcggtacatcggtgacaggtggtgcatggttgtcgtcagctcgtgtcgtgagatgttgggttaagtcccgcaacgagcgcaacccttattgttagttgccatcattgagttgggcactctagcgagactgccggtaataaaccggaggaaggtggggatgacgtcaaatcatcatgccccttatgacctgggctacacacgtgctacaatggttggtacaacgagtcgcaagccggtgacggcaagctaatctctgaaagccaatctcagttcggattggaggctgcaactcgcctccatgaagtcggaatcgctagtaatcgcggatcagcacgccgcggtgaatacgttcccgggccttgtacacaccgcccgtcacaccacgagagtttgtaacacccaaagtcggtgaggtaaccttcgggagccagccgcctaaggtgggacggatgattggggtg

SEQ ID NO: 3273 - DNA, 1480 bp, Streptococcus downei
  source 1..1480: mol_type = unassigned DNA
gacgaacgctggcggcgtgcctaatacatgcaagtggaacgcattgatatcaccggagcttgctccactgatattaatgagtcgcgaacgggtgagtaacgcgtaggtaacctgcctgatagcgggggataactattggaaacgatagctaataccgcatgagagtgtttaacacatgttagagacttaaaagataccattgtatcactatcagatggacctgcgttgtattagctagttggtagggtagcggcctaccaaggcaccgatacatagccgacctgagagggtgatcggccacactgggactgagacacggcccagactcctacgggaggcagcagtagggaatcttcggcaatggacgaaagtctgaccgagcaacgccgcgtgagtgaagaaggttttcggatcgtaaagctctgttgtagcggaagaacgcgtgtaagagtggaaagtttacacagtgacggtacgctaccagaaagggacggctaactacgtgccagcagccgcggtaatacgtaggtcccgagcgttgtccggatttattgggcgtaaagggagcgcaggcggtttagtaagtctgaagttaaaggcattggctcaaccaatgtatgctttggaaactgttagacttgagtgcagaaggggagagtggaattccatgtgtagcggtgaaatgcgtagatatatggaggaacaccggtggcgaaagcggctctctggtctgtcactgacgctgaggctcgaaagcgtgggtagcgaacaggattagataccctggtagtccacgccgtaaacgatgagtgctaggtgttaggtcctttccgggacttagtgccgcagctaacgcaataagcactccgcctggggagtacgaccgcaaggttgaaactcaaaggaattgacgggggcccgcacaagcggtggagcatgtggtttaattcgaagcaacgcgaagaaccttaccaggtcttgacatcccgatgcccgctctagagatagagttttacttcttgaacatcggagacaggtggtgcatggttgtcgtcagctcgtgtcgtgagatgttgggttaagtcccgcaacgagcgcaacccttattgttagttgccatcattgagttgggcactctagcgagactgccggtaataaaccggaggaaggtggggatgacgtcaaatcatcatgccccttatgacctgggctacacacgtgctacaatggttggtacaacgagtcgcaagccggtgacggcaagctaatctctgaaagccaatctcagttcggattgtaggctgcaactcgcctacatgaagtcggaatcgctagtaatcgcggatcagcacgccgcggtgaatacgttcccgggccttgtacacaccgcccgtcacaccacgagagtttgtaacacccaaagtcggtgaggtaaccttataggagccagccgcctaaggtgggacagatgattggggtg

SEQ ID NO: 3274 - DNA, 1479 bp, Streptococcus henryi
  source 1..1479: mol_type = unassigned DNA
gacgaacgctggcggcgtgcctaatacatgcaagtggaacgcatgattgataccgtagcttgctacaccattaatcatgagtcgcgaacgggtgagtaacgcgtaggtaacctgcctactagcgggggataactattggaaacgatagctaataccgcataagagtttttaacacatgttagaaatttaaaaggagcaaatgcttcactagtagatggacctgcgttgtattagctagttggtaaggtaacggcttaccaaggcgacgatacatagccgacctgagagggtgatcggccacactgggactgagacacggcccagactcctacgggaggcagcagtagggaatcttcggcaatggggggaaccctgaccgagcaacgccgcgtgagtgaagaaggttttcggatcgtaaagctctgttgtaagagaagaacgttgagtagagtggaaagttactcaagtgacggtatcttaccagaaagggacggctaactacgtgccagcagccgcggtaatacgtaggtcccgagcgttgtccggatttattgggcgtaaagcgagcgcaggcggctctgtaagtctgaagttaaaggcattggctcaaccaatgttcgctttggaaactgcagggcttgagtgcagaaggggagagtggaattccatgtgtagcggtgaaatgcgtagatatatggaggaacaccggtggcgaaagcggctctctggtctgtaactgacgctgaggctcgaaagcgtggggagcaaacaggattagataccctggtagtccacgccgtaaacgatgagtgctaggtgttaggccctttccggggcttagtgccgcagctaacgcattaagcactccgcctggggagtacgaccgcaaggttgaaactcaaaggaattgacgggggcccgcacaagcggtggagcatgtggtttaattcgaagcaacgcgaagaaccttaccaggtcttgacatcccagtgaccgtcctagagataggatttcccttcggggcactggtgacaggtggtgcatggttgtcgtcagctcgtgtcgtgagatgttgggttaagtcccgcaacgagcgcaacccctattgttagttgccatcattcagttgggcactctagcgagactgccggtaataaaccggaggaaggtggggatgacgtcaaatcatcatgccccttatgacctgggctacacacgtgctacaatggttggtacaacgagtcgcaagccggtgacggcaagctaatctcttaaagccaatctcagttcggattgtaggctgcaactcgcctacatgaagtcggaatcgctagtaatcgcggatcagcacgccgcggtgaatacgttcccgggccttgtacacaccgcccgtcacaccacgagagtttgtaacacccgaagtcggtgaggtaacctattaggagccagccgcctaaggtgggatagatgattggggtg

SEQ ID NO: 3275 - DNA, 1542 bp, unidentified
  source 1..1542: mol_type = unassigned DNA; note = Streptococcus macedonicus
  misc_difference 11..12: note = n is a, c, g, or t
  misc_difference 1494: note = n is a, c, g, or t
  misc_difference 1508: note = n is a, c, g, or t
agagtttgatnntggctcaggacgaacgctggcggcgtgcctaatacatgcaagtagaacgctgaagactttagcttgctagagttggaagagttgcgaacgggtgagtaacgcgtaggtaacctgcctattagtgggggataactattggaaacgatagctaataccgcataatagtgtttaacacatgttagagacttaaaagatgcaattgcatcactagtagatggacctgcgttgtattagctagttggtggggtaacggcctaccaaggcgacgatacatagccgacctgagagggtgatcggccacactgggactgagacacggcccagactcctacgggaggcagcagtagggaatcttcggcaatgggggcaaccctgaccgagcaacgccgcgtgagtgaagaaggttttcggatcgtaaagctctgttgtaagagaagaacgtgtgtgagagtggaaagttcacacagtgacggtaacttaccagaaagggacggctaactacgtgccagcagccgcggtaatacgtaggtcccgagcgttgtccggatttattgggcgtaaagcgagcgcaggcggtttaataagtctgaagttaaaggcagtggcttaaccattgttcgctttggaaactgttaaacttgagtgcagaaggggagagtggaattccatgtgtagcggtgaaatgcgtagatatatggaggaacaccggtggcgaaagcggctctctggtctgtaactgacgctgaggctcgaaagcgtggggagcaaacaggattagataccctggtagtccacgccgtaaacgatgagtgctaggtgttaggccctttccggggcttagtgccgcagctaacgcattaagcactccgcctggggagtacgaccgcaaggttgaaactcaaaggaattgacgggggcccgcacaagcggtggagcatgtggtttaattcgaagcaacgcgaagaaccttaccaggtcttgacatcccgatgctatttctagagatagaaagtttcttcggaacatcggtgacaggtggtgcatggttgtcgtcagctcgtgtcgtgagatgttgggttaagtcccgcaacgagcgcaacccctattgttagttgccatcattcagttgggcactctagcgagactgccggtgataaaccggaggaaggtggggatgacgtcaaatcatcatgccccttatgacctgggctacacacgtgctacaatggttggtacaacgagtcgcaagccggtgacggcaagcaaatctcttaaagccaatctcagttcggattgtaggctgcaactcgcctacatgaagtcggaatcgctagtaatcgcggatcagcacgccgcggtgaatacgttcccgggccttgtacacaccgcccgtcacaccacgagagtttgtaacacccgaagtcggtgaggtaaccttttaggagccagccgcctaaggtgggacagatgattggggtgaantcgtaacaaggtanccgtatcggaaggtgcggctggatcacctccttt

SEQ ID NO: 3276 - DNA, 1470 bp, unidentified
  source 1..1470: mol_type = unassigned DNA; note = Streptococcus pasteurianus
ctggcggcgtgcctaatacatgcaagtagaacgctgactactttagcttgctagagtagaaggagttgcgaacgggtgagtaacgcgtaggtaacctgcctactagcgggggataactattggaaacgatagctaataccgcataacagtgtttaacacatgttagatgcttgaaagatgcaattgcatcactagtagatggacctgcgttgtattagctagttggtggggtaacggcccaccaaggcgacgatacatagccgacctgagagggtgatcggccacactgggactgagacacggcccagactcctacgggaggcagcagtagggaatcttcggcaatgggggcaaccctgaccgagcaacgccgcgtgagtgaagaaggttttcggatcgtaaagctctgttgtaagagaagaacgtgtgtgagagtggaaagttcacacagtgacggtaacttaccagaaagggacggctaactacgtgccagcagccgcggtaatacgtaggtcccgagcgttgtccggatttattgggcgtaaagcgagcgcaggcggtttaataagtctgaagttaaaggcagtggcttaaccattgttcgctttggaaactgttaaacttgagtgcagaaggggagagtggaattccatgtgtagcggtgaaatgcgtagatatatggaggaacaccggtggcgaaagcggctctctggtctgtaactgacgctgaggctcgaaagcgtggggagcaaacaggattagataccctggtagtccacgccgtaaacgatgagtgctaggtgttaggccctttccggggcttagtgccgcagctaacgcattaagcactccgcctggggagtacgaccgcaaggttgaaactcaaaggaattgacgggggcccgcacaagcggtggagcatgtggtttaattcgaagcaacgcgaagaaccttaccaggtcttgacatcccgatgctatttctagagatagaaagtttcttcggaacatcggtgacaggtggtgcatggttgtcgtcagctcgtgtcgtgagatgttgggttaagtcccgcaacgagcgcaacccctattgttagttgccatcatttagttgggcactctagcgagactgccggtaataaaccggaggaaggtggggatgacgtcaaatcatcatgccccttatgacctgggctacacacgtgctacaatggttggtacaacgagtcgcaagtcggtgacggcaagcaaatctcttaaagccaatctcagttcggattgtaggctgcaactcgcctacatgaagtcggaatcgctagtaatcgcggatcagcacgccgcggtgaatacgttcccgggccttgtacacaccgcccgtcacaccacgagagtttgtaacacccgaagtcggtgaggtaaccatttaggagccagccgcctaaggtgggatagatgattggggtgaagtcgt

SEQ ID NO: 3277 - DNA, 1479 bp, Streptococcus ratti
  source 1..1479: mol_type = unassigned DNA
gacgaacgctggcggcgtgcctaatacatgcaagtggaacgcaagggaacacaccgtgcttgcacatcgtgttttcttgagtcgcgaacgggtgagtaacgcgtaggtaacctgcctattagcgggggataactattggaaacgatagctaataccgcataagagagtttaacacatgttagacgcttgaaagatgcaagagcatcactagtagatggacctgcgttgtattagctagtaggtagggtaaaggcctacctaggcgacgatacatagccgacctgagagggtgaccggccacactgggactgagacacggcccagactcctacgggaggcagcagtagggaatcttcggcaatggggggaaccctgaccgagcaacgccgcgtgagtgaagaaggttttcggatcgtaaagctctgttgtcagagacgaacgtgtgtgagagtggaaagttcacacagtgacggtaactgaccagaaagggacggctaactacgtgccagcagccgcggtaatacgtaggtcccgagcgttgtccggatttattgggcgtaaagcgagcgcaggcggttttgtaagtctgaagtcaaaggcagtggcttaaccattgtgtgctttggaaactgcaggacttgagtgcagaaggggagagtggaattccatgtgtagcggtgaaatgcgtagatatatggaggaacaccggtggcgaaagcggctctctggtctgtaactgacgctgaggctcgaaagcgtgggtagcgaacaggattagataccctggtagtccacgccgtaaacgctgagtgctaggtgttaggccctttccggggcttagtgccggagctaacgcattaagcactccgcctggggagtacgaccgcaaggttgaaactcaaaggaattgacgggggcccgcacaagcggtggagcatgtggtttaattcgaagcaacgcgaagaaccttaccaggtcttgacatcccgatgcccgctctagagatagagttttacttttgtacatcggtgacaggtggtgcatggttgtcgtcagctcgtgtcgtgagatgttgggttaagtcccgcaacgagcgcaacccttattgttagttgccatcattgagttgggcactctagcgagactgccggtaataaaccggaggaaggtggggatgacgtcaaatcatcatgccccttatgacctgggctacacacgtgctacaatggtcggtacaacgagtcgcgagccggtgacggcaagctaatctctgaaagccgatctcagttcggattggaggctgcaactcgcctccatgaagtcggaatcgctagtaatcgcggatcagcacgccgcggtgaatacgttcccgggccttgtacacaccgcccgtcacaccacgagagtttgtaacacccgaagtcggtgaggtaaccgttaaggagccagccgcctaaggtgggatggatgattggggtg

SEQ ID NO: 3278 - DNA, 1478 bp, unidentified
  source 1..1478: mol_type = unassigned DNA; note = Streptococcus troglodytae
gacgaacgctggcggcgtgcctaatacatgcaagtgggacgcactgatttcacgggagcttgctccacgaggtcagtgagtcgcgaacgggtgagtaacgcgtaggtaacctgcctactagcgggggataactattggaaacgatagctaataccgcatgctagcttttagcgcatgctaggagcttaaaagatgcaactgcatcactagtagatggacctgcgttgtattagctagttggtaaggtaagagcttaccaaggcgacgatacatagccgacctgagagggtgaacggccacactgggactgagacacggcccagactcctacgggaggcagcagtagggaatcttcggcaatggacgaaagtctgaccgagcaacgccgcgtgagtgaagaaggttttcggatcgtaaagctctgttgtaagcgaagaacgggtgtaagagtggaaagcttagactgtgacggtagcttaccagaaagggacggctaactacgtgccagcagccgcggtaatacgtaggtcccgagcgttgtccggatttattgggcgtaaagggagcgcaggcggttaggaaagtctggagtaaaaggctatggctcaaccatagtgtgctctggaaactgtctgacttgagtgcagaaggggagagtggaattccatgtgtagcggtgaaatgcgtagatatatggaggaacaccagtggcgaaagcggctctctggtctgtcactgacgctgaggctcgaaagcgtgggtagcgaacaggattagataccctggtagtccacgccgtaaacgctgagtgctaggtgttaggccctttccggggcttagtgccggagctaacgcaataagcactccgcctggggagtacgaccgcaaggttgaaactcaaaggaattgacgggggcccgcacaagcggtggagcatgtggtttaattcgaagcaacgcgaagaaccttaccaggtcttgacatcccgatgttattcttagagataagaagttacttcggtacatcggagacaggtggtgcatggttgtcgtcagctcgtgtcgtgagatgttgggttaagtcccgcaacgagcgcaacccttattgttagttgccatcattaagttgggcactctagcgagactgccggtaataaaccggaggaaggtggggatgacgtcaaatcatcatgccccttatgacctgggctacacacgtgctacaatggtcggtacaacgagttgcgagccggtgacggcaagctaatctctgaaagccgatctcagttcggattggaggctgcaactcgcctccatgaagtcggaatcgctagtaatcgcggatcagcacgccgcggtgaatacgttcccgggccttgtacacaccgcccgtcacaccacgagagtttgtaacacccgaagtcggtgaggtaaccgttaaggggccagccgcctaaggtgggatggatgattggggtg

SEQ ID NO: 3279 - DNA, 1440 bp, Succinatimonas hippei
  source 1..1440: mol_type = unassigned DNA
attgaacgctggcggcaggcttaatacatgcaagtcgaacggtaacatagcgaaagcttgcttttgctgatgacgagtggcggacgggtgagtagtatctgggaaactgccctgaagagggggacaacagctggaaacggctgctaataccgcataaaccctgcgggggaaaggaaggcaacttccgcttcaggatgtgcccagaagggattagctagtaggtgaggtaaaggctcacctaggcgacgatctctagccggtctgagaggatgaccggccacatcgggactgagacacggcccggactcctacgggaggcagcagtagggaatattgcacaatggggggaaccctgatgcagccatgccgcgtgtgtgaagaaggccttcgggttgtaaagcactttcagcggggaggaaattaagttagacgttacccgcagaagaagcaccggctaactccgtgccagcagccgcggtaatacggagggtgcgagcgttaatcggaataactgggcgtaaagggcacgcaggcgggctgataagtaaggtgtgaaataccggggctcaacctcggggctgcattttaaactgtcagtctagagtattgcagagggagacggaattccgggtgtagcggtgaaatgcgtagatatccggaagaacaccggaggcgaaggcggtcttctgggcaaatactgacgctcaggtgcgaaagcgtggggagcaaacaggattagataccctggtagtccacgccgtaaacgatgtcgattaggagattgagcagaagcttggttttcggagcaaacgcgctaaatcgaccgcctggggagtacggccgcaaggttaaaactcaaatgaattgacgggggcccgcacaagcggtggagcatgtggtttaattcgatgcaacgcgaagaaccttacctgaccttgacatctgaggaatgcctgagagatttaggcagtgccttcgggagcctcaagacaggtgctgcatggctgtcgtcagctcgtgtcgtgagatgttgggttaagtcccgcaacgagcgcaacccttgtcctttgttgccagcgcgtgatggcgggaactcaaaggagactgccggtgacaaaccggaggaaggcagggatgacgtcaagtcatcatggcccttacggtcagggctacacacgtgctacaatggggcgtacagagggaagcgaggccgtgaggcggagcggagcccacaaagcgtcccacagttcggattggagtctgcaactcgactccatgaaggcggaatcgctagtaatcgcaaatcagaatgttgcggtgaatacgttcccgggccttgtacacaccgcccgtcacaccatgggagtggattgcaccagaagtggcttgcctaacccgtaagggagggcggttaccacggtgtggtttatgactggggtg

SEQ ID NO: 3280 - DNA, 1461 bp, Succinimonas amylolytica
  source 1..1461: mol_type = unassigned DNA
attgaacgctggcggcaggcttaatacatgcaagtcgaacggtagcagcaggaaagcttgcttttctggctgacgagtggcggacgggtgagtaatacctgggaaactgcctataagagggggataacacctggaaacgggtgctaataccgcataaaccctgaggggaaaaggatgggaaaccatgcgcttatagatgtgcccaggagggattagctagttggggaggtaaaggctcaccaaggcgacgatctctagctggtctgagaggatgatcagccacattgggactgagacacggcccaaactcctacgggaggcagcagtagggaatattgcacaatgggggaaaccctgatgcagccatgccgcgtgtgtgaagaaggccttcgggttgtaaagcactttcagcggggaggaagctgaagttcgaacagggcagaaagcagacgttacccgcagaagaagcgccggctaactccgtgccagcagccgcggtaatacggagggcgcaagcgttaatcggaataactgggcgtaaagcgcacgcaggcggttatgcaagtcagatgtgaaatcccagcgcttaacgttgggcggtcatttgaaactgcaagactagagtactataaggggagctggaattccaggtgtagcggtgaaatgcgtagatatctggaagaacaccggtggcgaaggcgagcttctggatagtaactgacgctcaggtgcgaaagcgtggggagcaaacaggattagataccctggtagtccacgctgtaaacgatgtcaattaggagtctagtccgaagaggctgggttccgcagctaacgctttaaattgaccgcctggggagtacggccgcaaggttaaaactcaaatgaattgacgggggcccgcacaagcggtggagcatgtggtttaattcgatgcaacgcgaagaaccttacctgaacttgacatatacgatgatctgtctgagaggatggagtacccgcaagggaatcgtaaacaggtgctgcatggctgtcgtcagctcgtgtcgtgagatgttgggttaagtcccgcaacgagcgcaacccttgttctttgttgccagcgcgtaaaggcgggaactcaaagaagactgccggtgataaaccggaggaaggcagggatgacgtcaagtcatcatggcccttacgttcagggctacacacgtgctacaatggtttgtacagagggaagcgaagtcgcgagacggggcagatctcagaaagcaaatcgtagtccggattggagtctgcaattcgactccatgaagtcggaatcgctagtaatcgcgaatcagaatgtcgcggtgaatacgttcccgggccttgtacacaccgcccgtcacaccatgggagtgaattgcaccagaagtagttagcgtaaccgcaaggggcgcgattaccacggtgtggtttatgactggggtg

SEQ ID NO: 3281 - DNA, 1387 bp, Sulfitobacter brevis
  source 1..1387: mol_type = unassigned DNA
aacgaacgctggcggcaggcctaacacatgcaagtcgagcgcacccttcggggcgagcggcggacgggttagtaacgcgtgggaacatacccctttctacggaatagcctcgggaaactgagagtaataccgtataagcccttcgggggaaagatttatcgggaagggattggcccgcgttagattagatagttggtggggtaatggcctaccaagtctacgatctatagctggttttagaggatgatcagcaacactgggactgagacacggcccagactcctacgggaggcagcagtggggaatcttagacaatgggcgcaagcctgatctagccatgccgcgtgtgtgatgaaggtcttaggatcgtaaagcactttcgccagggatgataatgacagtacctggtaaagaaaccccggctaactccgtgccagcagccgcggtaatacggagggggttagcgttgttcggaattactgggcgtaaagcgtacgtaggcggatcagaaagtatagggtgaaatcccagggctcaaccctggaactgccttgtaaactcctggtcttgagttcgagagaggtgagtggaattccaagtgtagaggtgaaattcgtagatatttggaggaacaccagtggcgaaggcggctcactggctcgatactgacgctgaggtacgaaagtgtggggagcaaacaggattagataccctggtagtccacaccgtaaacgatgaatgccagtcgtcgggcagtatactgttcggtgacacacctaacggattaagcattccgcctggggagtacggtcgcaagattaaaactcaaaggaattgacgggggcccgcacaagcggtggagcatgtggtttaattcgaagcaacgcgcagaaccttaccaacccttgacatcctgtgcaaacccgagagatcgggtgttcacttcggtgacgcagtgacaggtgctgcatggctgtcgtcagctcgtgtcgtgagatgttcggttaagtccggcaacgagcgcaacccacatccttagttgccagcaggttaagctgggcactctagggaaactgcccgtgataagcgggaggaaggtgtggatgacgtcaagtcctcatggcccttacgggttgggctacacacgtgctacaatggcagtgacaatgggttaatccccaaaagctgtctcagttcggattggggtctgcaactcgaccccatgaagtcggaatcgctagtaatcgtgtaacagcatgacacggtgaatacgttcccgggccttgtacacaccgcccgtcacaccatgggagttggttctacccgacgacgctgcgctaacccttcggggaggcaggcggccacggtaggatcagcgactggggtg

SEQ ID NO: 3282 - DNA, 1385 bp, Sulfitobacter donghicola
  source 1..1385: mol_type = unassigned DNA
aacgaacgctggcggcaggcctaacacatgcaagtcgagcgcacccttcggggcgagcggcggacgggttagtaacgcgtgggaatgtaccctttactacggaatagcctctggaaacggagagtaataccgtatgtgcccttcgggggaaagatttatcggtaaaggatcagcccgcgttagattagatagttggtggggtaatggcctaccaagtctacgatctatagctggttttagaggatgatcagcaacactgggactgagacacggcccagactcctacgggaggcagcagtggggaatcttagacaatgggcgcaagcctgatctagccatgccgcgtgtgtgatgaaggccttagggtcgtaaagcactttcgccagagatgataatgacagtatctggtaaagaaaccccggctaactccgtgccagcagccgcggtaatacggagggggttagcgttgttcggaattactgggcgtaaagcgtacgtaggcggatcagaaagtagggggtgaaatcccagggctcaaccctggaactgcctcctaaactcctggtcttgagttcgagagaggtgagtggaattccaagtgtagaggtgaaattcgtagatatttggaggaacaccagtggcgaaggcggctcactggctcgatactgacgctgaggtacgaaagtgtggggagcaaacaggattagataccctggtagtccacaccgtaaacgatgaatgccagtcgtcgggcagtatactgttcggtgacacacctaacggattaagcattccgcctggggagtacggtcgcaagattaaaactcaaaggaattgacgggggcccgcacaagcggtggagcatgtggtttaattcgaagcaacgcgcagaaccttaccaacccttgacatcctgtgctaacccgagagatcgggcgttcacttcggtgacgcagtgacaggtgctgcatggctgtcgtcagctcgtgtcgtgagatgttcggttaagtccggcaacgagcgcaacccacatctttagttgccatcatttagttgggcactctaaagaaactgcccgtgataagcgggaggaaggtgtggatgacgtcaagtcctcatggcccttacgggttgggctacacacgtgctacaatggcatttacaatgggttaatccccaaaagatgtctcagttcggattggggtctgcaactcgaccccatgaagtcggaatcgctagtaatcgcgtaacagcatgacgcggtgaatacgttcccgggccttgtacacaccgcccgtcacaccatgggagttggttctacccgacggccgtgcgccaacctttcgaggaggcagcggaccacggtaggatcagcgactggggtg

SEQ ID NO: 3283 - DNA, 1385 bp, Sulfitobacter guttiformis
  source 1..1385: mol_type = unassigned DNA
aacgaacgctggcggcaggcctaacacatgcaagtcgagcgcacccttcggggcgagcggcggacgggttagtaacgcgtgggaacataccctttactacggaatagcctcgggaaactgagagtaataccgtatgtgcccttcgggggaaagatttatcggtaaaggattggcccgcgtaagattagatagttggtggggtaatggcctaccaagtctacgatctttagctggttttagaggatgatcagcaacactgggactgagacacggcccagactcctacgggaggcagcagtggggaatcttagacaatgggcgcaagcctgatctagccatgccgcgtgtgtgatgaaggccttagggtcgtaaagcactttcgctagggatgataatgacagtacctagtaaagaaaccccggctaactccgtgccagcagccgcggtaatacggagggggttagcgttgttcggaattactgggcgtaaagcgtacgtaggcggatcagaaagtaaggggtgaaatcccagggctcaaccctggaactgcctcttaaactcctggtcttgagttcgagagaggtgagtggaattccgagtgtagaggtgaaattcgtagatattcggaggaacaccagtggcgaaggcggctcactggctcgatactgacgctgaggtacgaaagtgtggggagcaaacaggattagataccctggtagtccacaccgtaaacgatgaatgccagtcgtcgggcagtatactgttcggtgacacacctaacggattaagcattccgcctggggagtacggtcgcaagattaaaactcaaaggaattgacgggggcccgcacaagcggtggagcatgtggtttaattcgaagcaacgcgcagaaccttaccaacccttgacatcctgtgctaacccgagagatcgggcgttcacttcggtgacgcagtgacaggtgctgcatggctgtcgtcagctcgtgtcgtgagatgttcggttaagtccggcaacgagcgcaacccacatctttagttgccatcatttagttgggcactctaaagaaactgcccgtgataagcgggaggaaggtgtggatgacgtcaagtcctcatggcccttacgggttgggctacacacgtgctacaatggcatttacaatgggttaatccccaaaagatgtctcagttcggattggggtctgcaactcgaccccatgaagtcggaatcgctagtaatcgcgtaacagcatgacgcggtgaatacgttcccgggccttgtacacaccgcccgtcacaccatgggagttggttctacccgacggccgtgcgccaacccgtaagggaggcagcggaccacggtaggatcagcgactggggtg

SEQ ID NO: 3284 - DNA, 1386 bp, unidentified
  source 1..1386: mol_type = unassigned DNA; note = Sulfitobacter indolifex
aacgaacgctggcggcaggcctaacacatgcaagtcgagcgagaccttcgggtctagcggcggacgggttagtaacgcgtgggaacgtacccttctctgcggaatagccactggaaacggtgagtaataccgcatacgcccttcgggggaaagatttatcggagaaggatcggcccgcgttagattagatagttggtggggtaatggcctaccaagtctacgatctatagctggttttagaggatgatcagcaacactgggactgagacacggcccagactcctacgggaggcagcagtggggaatcttagacaatgggcgcaagcctgatctagccatgccgcgtgtgtgatgaaggtcttaggatcgtaaagcactttcgccagggatgataatgacagtacctggtaaagaaaccccggctaactccgtgccagcagccgcggtaatacggagggggttagcgttgttcggaattactgggcgtaaagcgtacgtaggcggatcagaaagtaaggggtgaaatcccagggctcaaccctggaactgcctcttaaactcctggtcttgagttcgagagaggtgagtggaattccaagtgtagaggtgaaattcgtagatatttggaggaacaccagtggcgaaggcggctcactggctcgatactgacgctgaggtacgaaagtgtggggagcaaacaggattagataccctggtagtccacaccgtaaacgatgaatgccagtcgtcgggcagtatactgttcggtgacacacctaacggattaagcattccgcctggggagtacggtcgcaagattaaaactcaaaggaattgacgggggcccgcacaagcggtggagcatgtggtttaattcgaagcaacgcgcagaaccttaccaacccttgacatcctgtgctaacccgagagatcgggcgttcacttcggtgacgcagtgacaggtgctgcatggctgtcgtcagctcgtgtcgtgagatgttcggttaagtccggcaacgagcgcaacccacatccttagttgccagcagttcggctgggcactctaaggaaactgcccgtgataagcgggaggaaggtgtggatgacgtcaagtcctcatggcccttacgggttgggctacacacgtgctacaatggcagtgacaatgggttaatccccaaaagctgtctcagttcggattggggtctgcaactcgaccccatgaagtcggaatcgctagtaatcgtggaacagcatgccacggtgaatacgttcccgggccttgtacacaccgcccgtcacaccatgggagttggttctacccgacggccgtgcgccaacctttcgaggaggcagcggaccacggtaggatcagcgactggggtg

SEQ ID NO: 3285 - DNA, 1388 bp, Sulfitobacter litoralis
  source 1..1388: mol_type = unassigned DNA
aacgaacgctggcggcaggcctaacacatgcaagtcgagcgcagtccttcgggaccgagcggcggacgggttagtaacgcgtgggaacatacccttttctacggaatagcctcgggaaactgagagtaataccgtataagcccttcgggggaaagatttatcgggaaaggattggcccgcgttagattagatagttggtggggtaatggcctaccaagtctacgatctatagctggttttagaggatgatcagcaacactgggactgagacacggcccagactcctacgggaggcagcagtggggaatcttagacaatgggcgcaagcctgatctagccatgccgcgtgtgtgatgaaggtcttaggatcgtaaagcactttcgccagggatgataatgacagtacctggtaaagaaaccccggctaactccgtgccagcagccgcggtaatacggagggggttagcgttgttcggaattactgggcgtaaagcgtacgtaggcggatcagaaagttaggggtgaaatcccgaggctcaacctcggaactgcctctaaaactcctggtcttgagttcgagagaggtgagtggaattccaagtgtagaggtgaaattcgtagatatttggaggaacaccagtggcgaaggcggctcactggctcgatactgacgctgaggtacgaaagtgtggggagcaaacaggattagataccctggtagtccacaccgtaaacgatgaatgccagtcgtcgggcagtatactgttcggtgacacacctaacggattaagcattccgcctggggagtacggtcgcaagattaaaactcaaaggaattgacgggggcccgcacaagcggtggagcatgtggtttaattcgaagcaacgcgcagaaccttaccaacccttgacatcctgtgctaactcgagagatcgagcgttcacttcggtgacgcagtgacaggtgctgcatggctgtcgtcagctcgtgtcgtgagatgttcggttaagtccggcaacgagcgcaacccacatccttagttgccagcagttcggctgggcactctaaggaaactgcccgtgataagcgggaggaaggtgtggatgacgtcaagtcctcatggcccttacgggttgggctacacacgtgctacaatggcagtgacaatgggttaatcccaaaaagctgtctcagttcggattggggtctgcaactcgaccccatgaagtcggaatcgctagtaatcgcgtaacagcatgacgcggtgaatacgttcccgggccttgtacacaccgcccgtcacaccatgggagttggttctacccgacgacgctgcgctaacccttcggggaggcaggcggccacggtaggatcagcgactggggtg

SEQ ID NO: 3286 - DNA, 1382 bp, Sulfitobacter pontiacus
  source 1..1382: mol_type = unassigned DNA
aacgaacgctggcggcaggcctaacacatgcaagtcgagcgcaccttcgggtgagcggcggacgggttagtaacgcgtgggaacatacccttttctacggaatagcctcgggaaactgagagtaataccgtataagcccttcgggggaaagatttatcgggaaaggattggcccgcgttagattagatagttggtggggtaatggcctaccaagtctacgatctatagctggttttagaggatgatcagcaacactgggactgagacacggcccagactcctacgggaggcagcagtggggaatcttagacaatgggcgcaagcctgatctagccatgccgcgtgtgtgatgaaggtcttaggatcgtaaagcactttcgccagggatgataatgacagtacctggtaaagaaaccccggctaactccgtgccagcagccgcggtaatacggagggggttagcgttgttcggaattactgggcgtaaagcgtacgtaggcggattggaaagttgggggtgaaatcccagggctcaaccctggaactgcctccaaaactatcagtctagagttcgagagaggtgagtggaattccaagtgtagaggtgaaattcgtagatatttggaggaacaccagtggcgaaggcggctcactggctcgatactgacgctgaggtacgaaagtgtggggagcaaacaggattagataccctggtagtccacaccgtaaacgatgaatgccagtcgtcgggcagtatactgttcggtgacacacctaacggattaagcattccgcctggggagtacggtcgcaagattaaaactcaaaggaattgacgggggcccgcacaagcggtggagcatgtggtttaattcgaagcaacgcgcagaaccttaccaacccttgacatcctgtgctaacccgagagatcgggcgttcacttcggtgacgcagtgacaggtgctgcatggctgtcgtcagctcgtgtcgtgagatgttcggttaagtccggcaacgagcgcaacccacatccttagttgccagcagttcggctgggcactctaaggaaactgcccgtgataagcgggaggaaggtgtggatgacgtcaagtcctcatggcccttacgggttgggctacacacgtgctacaatggcagtgacaatgggttaatcccaaaaagctgtctcagttcggattggggtctgcaactcgaccccatgaagtcggaatcgctagtaatcgcgtaacagcatgacgcggtgaatacgttcccgggccttgtacacaccgcccgtcacaccatgggagttggttctacccgacgacgctgcgctaaccttcggggggcaggcggccacggtaggatcagcgactggggtg

SEQ ID NO: 3287 - DNA, 1384 bp, unidentified
  source 1..1384: mol_type = unassigned DNA; note = Sulfitobacter pseudonitzschiae
aacgaacgctggcggcaggcctaacacatgcaagtcgagcgcacccttcggggcgagcggcggacgggttagtaacgcgtgggaatgtacccttctctatggaatagcctcgggaaactgagagtaataccatatacgcccttcgggggaaagatttatcggagaaggatcagcccgcgtaagattagatagttggtggggtaatggcctaccaagtctacgatctttagctggttttagaggatgatcagcaacactgggactgagacacggcccagactcctacgggaggcagcagtggggaatcttagacaatgggcgcaagcctgatctagccatgccgcgtgtgtgatgaaggccttagggtcgtaaagcactttcgccagggatgataatgacagtacctggtaaagaaaccccggctaactccgtgccagcagccgcggtaatacggagggggttagcgttgttcggaattactgggcgtaaagcgcacgtaggcggatcagaaagttgggggtgaaatcccggggctcaaccccggaactgcctccaaaactcctggtcttgagttcgagagaggtgagtggaattccgagtgtagaggtgaaattcgtagatattcggaggaacaccagtggcgaaggcggctcactggctcgatactgacgctgaggtgcgaaagtgtggggagcaaacaggattagataccctggtagtccacaccgtaaacgatgaatgccagtcgtcgggcagtatactgttcggtgacacacctaacggattaagcattccgcctggggagtacggtcgcaagattaaaactcaaaggaattgacgggggcccgcacaagcggtggagcatgtggtttaattcgaagcaacgcgcagaaccttaccaacccttgacatcctaggacaactccagagatggagccttccttcgggacctagtgacaggtgctgcatggctgtcgtcagctcgtgtcgtgagatgttcggttaagtccggcaacgagcgcaacccacatctttagttgccagcagttcggctgggcactctaaagaaactgcccgtgataagcgggaggaaggtgtggatgacgtcaagtcctcatggcccttacgggttgggctacacacgtgctacaatggcatctacagtgggttaatccccaaaagatgtctcagttcggattggggtctgcaactcgaccccatgaagtcggaatcgctagtaatcgcgtaacagcatgacgcggtgaatacgttcccgggccttgtacacaccgcccgtcacaccatgggagttggttctacccgacggccgtgcgccaacctttcgaggaggcagcggaccacggtaggatcagcgactggggtg

SEQ ID NO: 3288 - DNA, 1453 bp, unidentified
  source 1..1453: mol_type = unassigned DNA; note = Sulfuricaulis limicola
attgaacgctggcggcatgcctaacacatgcaagtcgcacgcgaaagggggcaaccctgagtagagtggcggacgggtgagtaacgcgtaggaatctacctggtagtgggggacaacccggtgaaaaccgggctaataccgcatacgatccacggatgaaagcaggggaccgcaaggccttgcgctatcagatgagcctgcgtcggattagctagttggtgaggtaaaggctcaccaaggcaacgatccgtagctggtttgagagaacgaccagccacactgggactgagacacggcccagactcctacgggaggcagcagtggggaatattggacaatgggggcaaccctgatccagcaatgccgcgtgtgtgaagaaggccttcgggttgtaaagcactttcggtggggacaaacaaggcggagctaacatctccgtccctgatggtacccaaagaagaagcaccggctaactctgtgccagcagccgcggtaatacagagggtgcaagcgttaatcggaattactgggcgtaaagcgtgcgtaggtggtttgttaagtcaggtgtgaaatcctcgggctcaacccgggaactgcgcttgatactgacagactcgagtgtggtagaggatagtggaattcccggtgtagcggtgaaatgcgtagatatcgggaggaacatcagtggcgaaggcggctatctggaccaacactgacactgaggtacgaaagcgtgggtagcaaacaggattagataccctggtagtccacgccctaaacgatgggtactagacgtcgggaagcttgtcttcttggtgtcgcagctaacgcaataagtaccccgcctggggagtacggtcgcaagattaaaactcaaaggaattgacgggggcccgcacaagcggtggagcatgtggttcaattcgatgcaacgcgaaaaaccttacctgcccttgacatctggggaatcctgcagagatgcgggagtgccgcaaggaaccccaagacaggtgctgcatggctgtcgtcagctcgtgtcgtgagatgttgggttaagtcccgtaacgagcgcaaccctcgtctctagttgccatcattcagttgggcactctagagagactgccggtgacaaaccggaggaaggtggggatgacgtcaagtcctcatggcctttatgggcagggctacacacgtgctacaatggacggtacagagggtcgccaacccgcgagggggagctaatctcagaaagccgttcgtagtccggattggagtctgcaactcgactccatgaagtcggaatcgctagtaatcgcggatcagcatgccgcggtgaatacgttcccgggccttgtacacaccgcccgtcacaccatgggagttggctgtaccagaagcaggtagcctaaccgcaaggagggcgcctaccacggtatggtcaatgactggggtg

SEQ ID NO: 3289 - DNA, 1464 bp, Sulfuricella denitrificans
  source 1..1464: mol_type = unassigned DNA
attgaacgctggcggaatgctttacacatgcaagtcgaacggcagcacgggagcttgctcctggtggcgagtggcgaacgggtgagtaatacctaggaacatgtccagtaatgggggataacgcagcgaaagctgtgctaataccgcatacgccctacgggggaaagcgggggattcgcaagaacctcgcgttattggagtggcctaggcctgattagctagttggtgaggtaaaggctcaccaaggcgacgatcagtagctggtctgagaggatgatcagccacactggaactgagacacggtccagactcctacgggaggcagcagtggggaattttggacaatgggggaaaccctgatccagccattccgcgtgagtgaagaaggccttcgggttgtaaagctctttcaggagggaagaaacggttttggataatactcaagactaatgacggtaccttcagaagaagcaccggctaactacgtgccagcagccgcggtaatacgtagggtgcgagcgttaatcggaattactgggcgtaaagcgtgcgcaggcggttttgtaagtcagatgtgaaagccccgggctcaacctgggaactgcgtttgaaactacaaggctagagtgtagcagaggggggtagaattccacgtgtagcagtgaaatgcgtagagatgtggaggaataccgatggcgaaggcagccccctgggttaacactgacgctcatgtacgaaagcgtggggagcaaacaggattagataccctggtagtccacgccctaaacgatgtcaactagttgtcgggagaggagactttcttggtaacgcagctaacgcgtgaagttgaccgcctggggagtacggccgcaaggttaaaactcaaaggaattgacgggggcccgcacaagcggtggattatgtggattaattcgatgcaacgcgaaaaaccttacctacccttgacatgccaggaacttgccagagatggcttggtgcccgaaagggaacctggacacaggtgctgcatggctgtcgtcagctcgtgtcgtgagatgttgggttaagtcccgcaacgagcgcaacccttgtcattaattgccatcatttagttgggcactttaatgagactgccggtgacaaaccggaggaaggtggggatgacgtcaagtcctcatggcccttatgggtagggcttcacacgtaatacaatggtcggtacagagggtcgccaacccgcgagggggagccaatcccagaaagccgatcgtagtccggattggagtctgcaactcgactccatgaagtcggaatcgctagtaatcgcggatcagcatgtcgcggtgaatacgttcccgggccttgtacacaccgcccgtcacaccatgggagtgggttccaccagaagtagttagcctaaccgcaaggagggcgattaccacggtgggattcatgactggggtg

SEQ ID NO: 3290 - DNA, 1434 bp, Sulfuricurvum kujiense
  source 1..1434: mol_type = unassigned DNA
agtgaacgctggcggcgtgcctaacacatgcaagtcgaacgatgattggagagcttgctcttcatgattagtggcgcacgggtgagtataccatagataatgtaccccttagtttgggatagccactggaaacggtgattaataccagatactccttcttgtcctaaggcaagtcgggaaagttttttcgctaagggatcagtctatgtcctatcagctagttggtgaggtaatggctcaccaaggctatgacgggtatctggtttgagaggatgatcagacacactggaactgagacacggtccagactcctacgggaggcagcagtgaggaatattgcacaatggaggaaactctgatgcagcaacgccgcgtggaggatgacgcatttcggtgtgtaaactccttttaagagggaagataatgacggtacctcttgaataagcaccggctaactccgtgccagcagccgcggtaatacggagggtgcaagcgttactcggaatcactgggcgtaaagggtgcgtaggctgacttttaagtcaggcgtgaaatccaatggcttaaccattgaactgcgcttgaaactgggagtctagagttcagaaggggcagatggaattagtggtgtaggggtaaaatccgtagatatcactaggaatatcaaaagcgaaggcgatctgctgggatgatactgacgctgaggcacgaaagcgtggggagcaaacaggattagataccctggtagtccacgccctaaacgatgaatgctagtcgtcggggagctcgtctcttcggtgatgcacttaacagattaagcattccgcctggggagtacggtcgcaagattaaaactcaaaggaatagacggggacccgcacaagtggtggagcatgtggtttaattcgaagatacacgaagaaccttacctggccttgacatggtaggaacccttaagagattagggggtgctagcttgctagaacctacacacaggtgctgcacggctgtcgtcagctcgtgtcgtgagatgttgggttaagtcccgcaacgagcgcaaccctcgtccttagttgctaacagttcggctgagcactctaaggagactgccttcgcaaggaggaggaaggtgaggacgacgtcaagtcatcatggcccttacggccagggctacacacgtgctacaatggggcgtacaaagagctgcaataccgcgaggtggagccaatctcttaaagcgtctctcagttcggattgttctctgcaactcgagaacatgaagctggaatcactagtaatcgtagatcagctatgctacggtgaatacgttcccgggtcttgtactcaccgcccgtcacaccatgggagttgatttcacccgaaatcgggatgccaaactggctaccgcttacggtggaattagcgactggggtg

SEQ ID NO: 3291 - DNA, 1462 bp, unidentified
  source 1..1462: mol_type = unassigned DNA; note = Sulfuriferula multivorans
attgaacgctggcggaatgctttacacatgcaagtcgaacggcagcacgggagcttgctcctggtggcgagtggcgaacgggtgagtaatacgtcggaacgtatccatgtaatgggggataacgcagcgaaagctgtgctaataccgcatacgccctacgggggaaagcaggggatcttcggaccttgcgttattggagcggccgacgtctgattagctagttggtggggtaaaggcctaccaaggcgacgatcagtagctggtctgagaggatgatcagccacactggaactgagacacggtccagactcctacgggaggcagcagtggggaattttggacaatgggcgcaagcctgatccagccattccgcgtgagtgaagaaggccttcgggttgtaaagctctttcagcagggaagaaacgatcttggctaatacctgagattaatgacggtacctgaagaagaagcaccggctaactacgtgccagcagccgcggtaatacgtagggtgcgagcgttaatcggaattactgggcgtaaagcgtgcgcaggcggtttttcaagtctgatgtgaaatccccgggcttaacctgggaactgcgttggaaactgaaagactagagtgcggcagaggggggtagaattccacgtgtagcagtgaaatgcgtagatatgtggaggaataccgatggcgaaggcagccccctgggtcgacactgacgctcatgcacgaaagcgtgggtagcaaacaggattagataccctggtagtccacgccctaaacgatgtcaactagttgttggggagggagacctccttagtaacgcagctaacgcgtgaagttgaccgcctggggagtacggtcgcaagattaaaactcaaaggaattgacgggggcccgcacaagcggtggattatgtggattaattcgatgcaacgcgaaaaaccttacctacccttgacatgtacggaacttgccagagatggcttggtgcttgaaagagaaccgtaacacaggtgctgcatggctgtcgtcagctcgtgtcgtgagatgttgggttaagtcccgcaacgagcgcaacccttgccattagttgctacattcagttgggcactctaatgggactgccggtgacaaaccggaggaaggtggggatgacgtcaagtcctcatggcccttatgggtagggcttcacacgtaatacaatggtcggtacagagggttgccaacccgcgagggggagccaatcccagaaagccgatcgtagtccggatcggagtctgcaactcgactccgtgaagtcggaatcgctagtaatcgcggatcagcatgtcgcggtgaatacgttcccgggccttgtacacaccgcccgtcacaccatgggagtgggtattaccagaagcaggtagcttaaccttcgggagggcgcttgccacggtaggattcatgactggggtg

SEQ ID NO: 3292 - DNA, 1450 bp, unidentified
  source 1..1450: mol_type = unassigned DNA; note = Sulfuriferula plumbiphila
attgaacgctggcggaatgctttacacatgcaagtcgaacggcagcacgggtgcttgcacctggtggcgagtggcgaacgggtgagtaacacgtcggaacgtatccattaatgggggataacgcagcgaaagctgtgctaataccgcatacgccctgagggggaaagcaggggatcttcggaccttgcgttattggagcggccgacgtctgattagctggttggtggggtaaaggcctaccaaggcgacgatcagtagctggtctgagaggatgatcagccacactggaactgagacacggtccagactcctacgggaggcagcagtggggaattttggacaatgggcgcaagcctgatccagccattccgcgtgagtgaagaaggccttcgggttgtaaagctctttcggcagggaagaaacagttgaggctaatatccttgaccaatgacggtacctgaagaagaagcaccggctaacaacgtgccagcagccgcggtaatacgtagggtgcgagcgttaatcggaattactgggcgtaaagcgtgcgcaggcggtttttcaagtctgatgtgaaagccccgggcttaacctgggaactgcgttggaaactgaaagactagagtgcggcagaggggggtagaattccacgtgtagcagtgaaatgcgtagatatgtggaggaataccgatggcgaaggcagccccctgggtcgacactgacgctcatgcacgaaagcgtgggtagcaaacaggattagataccctggtagtccacgccctaaacgatgtcaactagttgttggggagggagacctccttagtaacgcagctaacgcgtgaagttgaccgcctggggagtacggtcgcaagattaaaactcaaaggaattgacgggggcccgcacaagcggtggattatgtggattaattcgatgcaacgcgaaaaaccttacctacccttgacatgccaggaactggccagagatggccgggtgcccgaaagggaacctgggcacaggtgctgcatggctgtcgtcagctcgtgtcgtgagatgttgggttaagtcccgcaacgagcgcaacccttgccattagttgccacattcagttgggcactctaatgggactgccggtgacaaaccggaggaaggtggggatgacgtcaagtcctcatggcccttatgggtagggcttcacacgtaatacaatggtcggtacagagggttgccaacccgcgagggggagccaatcccagaaagccgatcgtagtccggattggagtctgcaactcgactccatgaagtcggaatcgctagtaatcgcggataagcatgtcgcggtgaatacgttcccgggccttgtacacaccgcccgtcacaccatgggagtgggtattaccagaagcaggtagcttaaccgcaaggagggcgcttgccacggtaggattca

SEQ ID NO: 3293 - DNA, 1454 bp, unidentified
  source 1..1454: mol_type = unassigned DNA; note = Sulfurifustis variabilis
attgaacgctggcggcatgcctaacacatgcaagtcgcacgcgaaagggggcaaccccgagtagagtggcggacgggtgagtaacgcatcggaatctacccagtagtgggggacaacccggcgaaagccgggctaataccgcatacgacccatgggtgaaagcgggggaccgcaaggcctcgcgctattggatgagccgatgtccgattagctagttggtagggtaatggcctaccaaggcgacgatcggtaactggtctgagaggacgaccagtcacactgggactgagacacggcccagactcctacgggaggcagcagtggggaatattggacaatgggggcaaccctgatccagcaatgccgcgtgtgtgaagaaggccttcgggttgtaaagcactttcggtggggaagaaaaaggccgggctaatatcccggttcttgacggtacccaaagaagaagcaccggctaactctgtgccagcagccgcggtaatacagagggtgcaagcgttaatcggaattactgggcgtaaagcgtgcgtaggtggttcgttaagtcagatgtgaaagcccggggctcaacctcggaactgcatttgatactgacgagctagagtgtggtagagggtagtggaattcccggtgtagcggtgaaatgcgtagatatcgggaggaacaccagtggcgaaagcggctacctggaccaacactgacactgaggtacgaaagcgtggggagcaaacaggattagataccctggtagtccacgccgtaaacgatgagaactagccgtcgggaagtttaatcttcttggtggcgcagctaacgcaataagttctccgcctggggagtacggccgcaaggttaaaactcaaaggaattgacgggggcccgcacaagcggtggagcatgtggttcaattcgatgcaacgcgaaaaaccttacctgcccttgacatgccaggaacctcccagagatgggagggtgccttcgggaacctggacacaggtgctgcatggctgtcgtcagctcgtgtcgtgagatgttgggttaagtcccgtaacgagcgcaacccttgtccctagttgccaccattcagttgggcactctagggagactgccggtgacaaaccggaggaaggtggggatgacgtcaagtcctcatggcccttatgggcagggctacacacgtgctacaatggccggtacaaagggtagccaacccgcgagggggagctaatctcagaaagccggtcgtagtccggattggagtctgcaactcgactccatgaagtcggaatcgctagtaatcgcggatcagcacgccgcggtgaatacgttcccgggccttgtacacaccgcccgtcacaccatgggagttggctgtaccagaagcaggtagcctaaccgcaaggagggcgcctaccacggtatggtcaatgactggggtg

SEQ ID NO: 3294 - DNA, 1445 bp, Sulfurihydrogenibium azorense
  source 1..1445: mol_type = unassigned DNA
cgcgaacgttggcggcgtgcctaacacatgcaagtcgtggggcagcaggctattaccttcgggtaatagtgctgcgaccggcaaacgggtgagtaacgcgtagctaacctacccataggttggggataaccatccgaaagggtggctaatacccaataatgaggagactccaaagcccttttgggcgcctatggatggggctgcgtcccatcagctagttggtgaggtaatggctcaccaaggctacgacgggtaaccggtctgagaggatgatcggtcacagcgggactgagacacggcccgcacccctacggggggcagcagtggggaatattgggcaatggccgaaaggctgacccagcaacgccgcgtggtggatgaagcccttcggggtgtaaacaccttttctgggggaagataatgacggtaccccaggaataagggacggctaactacgtgccagcagccgcggtaatacgtaggtcccgaacgttgcgcgaaattactgggcgtaaagggtccgtaggcggtctggtaagtggaaggtgaaatcctacggctcaaccgtagaattgccttccaaactgctggacttgaggcagggagaggtcggcggaattcccggtgtagcggtgaaatgcgtagatatcgggaggaacaccagtggcgaaggcggccgactggaactgtcctgacgctgagggacgaaagctaggggagcaaaccggattagatacccgggtagtcctagccgtaaacgatggatgctagatgtggcctacgaaagtaggctgtgcccaagctaacgcgttaagcatcccgcctggggagtacggccgcaaggttgaaactcaaaggaattgacggggacccgcacaaccggtggagcgtctggtttaattcgatgctaaccgaaaaaccttaccagggtttgacatgcggtgtgtcgggtatgaaagtaccctaggctatgattattcatagccgcgccgcacaggtggtgcatggtcgtcgtcagctcgtgtcgtgagatgttgggttaagtcccgcaacgagcgcaacccttgccctgtgttaccagcgggtaaagccgggtactcacaggggactgccggcgataagtcggaggaaggaggggatgacgtcagatcagtatgccctttatgccctgggctacacaggcgctacagtggcagggacaatgggacgcaacgcagcaatgcggagcaaatcccctaaaccctgtcgtggtgcggattgggggttgcaactcacccccatgaaggcggaatcggtagtaatggcgaatcagcaatgtcgccgtgaatacgttcccgggtcttgtacacaccgcccgtcacgccatgggagtcgggttcatcggaagtccccgagctaacccgcaagggaggcaggggccgatgatgggcctgatgactggggcg

SEQ ID NO: 3295 - DNA, 1447 bp, Sulfurihydrogenibium yellowstonense
  source 1..1447: mol_type = unassigned DNA
cgcgaacgttggcggcgtgcctaacacatgcaagtcgtggggcagcaggctactaccttcgggtagtagtgctggcgaccggcaaacgggtgagtaacacgtagcttacctacccataggttggggataacatcccgaaaggggtgctaatacccaataatgaggaggctccaaagcccttatgggtgcctatggatggggctgcgtcccatcagctagttggtgaggtaatggctcaccaaggctacgacgggtaaccggtctgagaggatgaccggtcacagtgggactgagacacggcccgcacccctacggggggcagcagtggggaatattgggcaatggccgaaaggctgacccagcaacgccgcgtggtggatgaagcccttcggggtgtaaacaccttttctgggggaagataatgacggtaccccaggaataagggacggctaactacgtgccagcagccgcggtaatacgtaggtcccgaacgttgcgcgaatttactgggcgtaaagggtccgtaggcggtttagcaagtggttggtgaaatttcacggctcaaccgtgaaactgccttccaaactgctaaacttgaggcagggagaggtcggcggaattcccggtgtagcggtgaaatgcgtagatatcgggaggaacaccagtggcgaaggcggccgactggaactgtcctgacgctgagggacgaaagctaggggagcaaaccggattagatacccgggtagtcctagccgtaaacgatggatgctagatgtgggctacgaaagtagtccgtgccgtaagctaacgcgttaagcatcccgcctggggagtacggccgcaaggttgaaactcaaaggaattgacggggacccgcacaaccggtggagcgtctggtttaattcgatgctaaccgaaaaacctcaccagggtttgacatgcggtgtgtcgggtatgaaagtaccctaggctatgattattcatagccgcgccgcacaggtggtgcatggtcgtcgtcagctcgtgtcgtgagatgttgggttaagtcccgcaacgagcgcaacccttgtcctgtgttaccagcgggtaatgccgggtactcacaggagactgccggcgataagccggaggaaggaggggatgacgtcagatcagtatgccctttatgccctgggctacacaggcgctacagtggcagggacaatgggctgcaacgccgtaaggcggagctaatcccctaaaccctgtcgtggtgcagattgagggttgcaactcaccctcatgaaggcggaatcggtagtaatggcgaatcagcaatgtcgccgtgaatacgttcccgggtcttgtacacaccgcccgtcacgccatgggagtcgggttcatcggaagtccccgagctaacctgcaaaggaggcaggggccgatgatgggcctgatgactggggcg

SEQ ID NO: 3296 - DNA, 1441 bp, Sulfurimonas autotrophica
  source 1..1441: mol_type = unassigned DNA
aatgaacgctggcggcgtgcttaacacatgcaagtcgaacggtaacagagagaagcttgcttctttgctgacgagtggcgcacgggtgagtaatatatagataatgtgcctcttagtctgggatagccattggaaacgatgattaatactggatactccttcttaccaaaaggtaagtcgggaaagtttttcgctaagagatcggtctatatcccatcagcttgttggtagtgtaagagactaccaaggcaatgacgggtagcgggtttgagaggatgatccgccacactggtactgagacacggaccagactcctacgggaggcagcagtgaggaatattgcacaatgggggaaaccctgatgcagcaacgccgcgtggaggatgacgcatttcggtgtgtaaactccttttatatgtcaagaaaatgacggtagcatatgaataagcaccggctaactccgtgccagcagccgcggtaatacggagggtgcaagcgttattcggaatcactgggcgtaaaggacgcgtaggcgggttggaaagtcagatgtgaaatcctacagcttaactgtagaactgcatttgaaacttccaatctagagtatgggagggggagatggaattagtggtgtaggggtaaaatccgtagatatcactaggaataccgaaagcgaaggcgatctcctggaacataactgacgctaaggcgtgaaagcgtggggagcaaacaggattagataccctggtagtccacgccctaaacgatgaacactagtcgtcgggatgctagtcatctcggtgatgcacttaacagattaagtgttccgcctggggagtacggtcgcaagattaaaactcaaaggaatagacggggacccgcacaagtggtggagcatgtggtttaattcgaagatacgcgaagaaccttacctagccttgacattgattgaacactttagagatagagtggtgcccttcggggaacatgaaaacaggtgctgcacggctgtcgtcagctcgtgtcgtgagatgttgggttaagtcccgcaacgagcgcaaccctcgtccttagttgctagcagttcggctgagcactctaaggagactgccttcgtaaggaggaggaaggtgaggacgacgtcaagtcatcatggcccttatggctagggctacacacgtgctacaatggggcgtacagagtgttgcgataccgcgaggtggagctaatcacttaaagcgtctctcagttcggattggagtctgcaactcgactccatgaagctggaatcactagtaatcgtagatcagcaatgctacggtgaatacgttcccgggtcttgtactcaccgcccgtcacaccatgggagttgatttcacccgaaatcgggaagcgaaccttcggggcgctaccgcttacggtggaattagcgactggggtg

SEQ ID NO: 3297 - DNA, 1444 bp, Sulfurimonas denitrificans
  source 1..1444: mol_type = unassigned DNA
agtgaacgctggcggcgtgcttaacacatgcaagtcgaacggtaacaggaagtagcttgctactttgctgacgagtggcgcacgggtgagtaatatatagttaatgtacctcaaagactgggatagccactggaaacggtgattaatactagatatacctttataacaaaagttgtaaagggaaatgttttttcgctttgagatcagactatatcccatcagttagttggtagtgtaagagactaccaaggcaatgacgggtagcgggtttgagaggatgatccgccacactggtactgagacacggaccagactcctacgggaggcagcagtgaggaatattgcacaatggaggaaactctgatgcagcaacgccgcgtggaggatgacgcatttcggtgtgtaaactccttttatgagtcaagaaaatgacggtagctcatgaataagcaccggctaactccgtgccagcagccgcggtaatacggagggtgcaagcgttactcggaatcactgggcgtaaaggacgcgtaggcgggttgtcaagtcaggtgtgaaatcctacagcttaactgtagaactgcacttgaaactggcaacctagagtatgggaggggaagatggaattagtggtgtaggggtaaaatccgtagatatcactaggaatacctaaagcgaaggcgatcttctggaacataactgacgctaaggcgtgaaagcgtggggagcaaacaggattagataccctggtagtccacgccctaaacgatgaacactagtcgtcgtgatgcttgtcattgcggtgatgcacttaacagattaagtgttccgcctggggagtacggtcgcaagattaaaactcaaaggaatagacggggacccgcacaagtggtggagcatgtggtttaattcgaagatacgcgaaaaaccttacctggccttgacattgatagaatctgctagagatagcggagtgcccttcggggagcttgaaaacaggtgctgcacggctgtcgtcagctcgtgtcgtgagatgttgggttaagtcccgcaacgagcgcaaccctcgtccttagttgccagcaggttaagctgggcactctaaggagactgccttcgcaaggaggaggaaggtgaggacgacgtcaagtcatcatggcccttacggccagggctacacacgtgctacaatggggcgtacagagtgttgcaataccgcgaggtggagccaatcacttaaagcgtctctcagttcggattgttctctgcaactcgagagcatgaagctggaatcactagtaatcgtagatcagcattgctacggtgaatacgttcccgggtcttgtactcaccgcccgtcacaccatgggagttgatttcacccgaaattgggaagctaaccttcggggggctaccacttacggtggaattagcgactggggtg

SEQ ID NO: 3298 - DNA, 1438 bp, unidentified
  source 1..1438: mol_type = unassigned DNA; note = Sulfurimonas gotlandica
agtgaacgctggcggcgtgcttaacacatgcaagtcgaacgatgattaagagcttgctcttatgattagtggcgcacgggtgagtaatatatagttaatgtacctcgaagaccgggatagccattggaaacgatgattaatactggatactccttctaaactcaagtttagtcgggaaacgttttttcgcttcgagatcagtctatatcccatcagtttgttggtgaggtaatggctcaccaaggcaatgacgggtagcgggtttgagaggatgatccgccacactggtactgagacacggaccagactcctacgggaggcagcagtgaggaatattgcacaatgggggaaaccctgatgcagcaacgccgcgtggaggatgacgcatttcggtgtgtaaactccttttatgagtcaagaaaatgacggtagctcatgaataagcaccggctaactccgtgccagcagccgcggtaatacggagggtgcaagcgttactcggaatcactgggcgtaaaggacgcgtaggcgggcttgtaagtcagatgtgaaatccaatggctcaaccattgaactgcatttgaaactacgagtctagagtatgggagggggagatggaattagtggtgtaggggtaaaatccgtagatatcactaggaataccgaaagcgaaggcgatctcctggaacattactgacgctaaggcgtgaaagcgtggggagcaaacgggattagataccccggtagtccacgccctaaacgatgaacactagtcgtcgggatgcttgtcatctcggtgatgcacttaacagattaagtgttccgcctggggagtacggtcgcaagattaaaactcaaaggaatagacggggacccgcacaagtggtggagcatgtggtttaattcgaagatacgcgaagaaccttacctagccttgacattgatagaatctttcagagatgagagagtgcccttcggggagcttgaaaacaggtgctgcacggctgtcgtcagctcgtgtcgtgagatgttgggttaagtcccgcaacgagcgcaaccctcgtccttagttgccagcaggttaagctgggcactctagggagactgccttcgcaaggaggaggaaggtgaggacgacgtcaagtcatcatggcccttatggctagggctacacacgtgctacaatggggcgtacagagtgttgcgataccgcgaggtggagccaatcacttaaagcgtctctcagttcggattggagtctgcaactcgactccatgaagctggaatcactagtaatcgtagatcagcaatgctacggtgaatacgttcccgggtcttgtactcaccgcccgtcacaccatgggagttgatttcacccgaaattgggaagctaaccttcgggaggctaccacttacggtggaattagcgactggggtg

SEQ ID NO: 3299 - DNA, 1444 bp, unidentified
  source 1..1444: mol_type = unassigned DNA; note = Sulfurimonas hongkongensis
agtgaacgctggcggcgtgcttaacacatgcaagtcgaacggtaacagaaactagcttgctagtttgctgacaagtggcgcacgggtgagtaatatatagttaatgtacctcgaagaccgggatagccattggaaacgatgattaatactggatataccttttatacataagtgtaaaagggaaatgttttttcgctttgagatcagactatatcccatcagttagttggtagtgtaagagactaccaaggcaatgacgggtagcgggtttgagaggatgatccgccacactggtactgagacacggaccagactcctacgggaggcagcagtgaggaatattgcacaatggaggaaactctgatgcagcaacgccgcgtggaggatgacgcatttcggtgtgtaaactccttttatgagccaagaaaatgacggtaactcatgaataagcaccggctaactccgtgccagcagccgcggtaatacggagggtgcaagcgttactcggaatcactgggcgtaaaggacgcgtaggcgggttggaaagtcaggtgtgaaatcctacagcttaactgtagaactgcacttgaaacttctaacctagagtatgggagggggagatggaattagtggtgtaggggtaaaatccgtagatatcactaggaatacccaaagcgaaggcgatctcctggaacataactgacgctaaggcgtgaaagcgtggggagcaaacgggattagataccccggtagtccacgccctaaacgatgaacactagtcgtcgtgatgcttgtcattgcggtgatgcacttaacagattaagtgttccgcctggggagtacggtcgcaagattaaaactcaaaggaatagacggggacccgcacaagtggtggagcatgtggtttaattcgaagatacgcgaagaaccttacctagccttgacattgatagaacacagtagagatacagtggtgcccttcggggagcttgaaaacaggtgctgcacggctgtcgtcagctcgtgtcgtgagatgttgggttaagtcccgcaacgagcgcaaccctcgtccttagttgccagcaggttaagctgggcactctaaggagactgccttcgcaaggaggaggaaggtgaggacgacgtcaagtcatcatggcccttacggctagggctacacacgtgctacaatggggcgtacagagtgttgcgataccgcgaggtggagccaatcacttaaagcgtctctcagttcggattggagtctgcaactcgactccatgaagctggaatcactagtaatcgtagatcagcaatgctacggtgaatacgttcccgggtcttgtactcaccgcccgtcacaccatgggagttgatttcacccgaaattgggaagctaaccttcggggggctaccacttacggtggaattagcgactggggtg

SEQ ID NO: 3300 - DNA, 1424 bp, unidentified
  source 1..1424: mol_type = unassigned DNA; note = Sulfurirhabdus autotrophica
attgaacgctggcggaatgctttacacatgcaagtcgaacggcagcacgggtgcttgcacctggtggcgagtggcgaacgggtgagtaatacgtaggaacatgtcctgtaatgggggataacgcaccgaaaggtgtgctaataccgcatacgccctgagggggaaagcgggggattcgaaagaacctcgcgttataggagtggcctacggctgattagctagttggtgaggtaaaggctcaccaaggcgacgatcagtagctggtctgagaggatgatcagccacactggaactgagacacggtccagactcctacgggaggcagcagtggggaattttggacaatgggggcaaccctgatccagccattccgcgtgagtgaagaaggccttcgggttgtaaagctctttcaggagggaagaaacggttttggctaatacctgagactaatgacggtaccttcagaagaagcaccggctaactacgtgccagcagccgcggtaatacgtagggtgcgagcgttaatcggaattactgggcgtaaagggtgcgcaggcggttttgtaagtcagatgtgaaagccccgggcttaacctgggaattgcgtttgaaactacaagactagagtgtgtcagaggggggtagaattccacgtgtagcagtgaaatgcgtagagatgtggaggaataccgatggcgaaggcagccccctgggataacactgacgctcatgcacgaaagcgtggggagcaaacaggattagataccctggtagtccacgccctaaacgatgtcaactagttgtcgggagctttatgcttttggtaacgcagctaacgcgtgaagttgaccgcctggggagtacggtcgcaagattaaaactcaaaggaattgacgggggcccgcacaagcggtggattatgtggattaattcgatgcaacgcgaaaaaccttacctacccttgacatgccaggaactttccagagatggattggtgcccgaaagggagcctggacacaggtgctgcatggctgtcgtcagctcgtgtcgtgagatgttgggttaagtcccgcaacgagcgcaacccttgtcattaattgccatcattcagttgggcactttaatgagactgccggtgacaaaccggaggaaggtggggatgacgtcaagtcctcatggcccttatgggtagggcttcacacgtaatacaatggcgcgtacagagggttgccaacccgcgagggggagctaatctcacaaagcgcgtcgtagtccggattgtagtctgcaactcgactacatgaagtcggaatcgctagtaatcgcggatcagcatgtcgcggtgaatacgttcccgggccttgtacacaccgcccgtcacacctatgggagtgggtttcaccagaagtagttagcctaaccgc

SEQ ID NO: 3301 - DNA, 1460 bp, unidentified
  source 1..1460: mol_type = unassigned DNA; note = Sulfurisoma sediminicola
attgaacgctggcggaatgctttacacatgcaagtcgagcggcagcgcgggggcaaccctggcggcgagcggcgaacgggtgagtaatgcatcggaacgtacccatttgtgggggataactatccgaaaggatagctaataccgcataagtcctgagggagaaagcaggggatcgcaagaccttgcgcgaatggagcggccgatgccggattagctagttggtagggtaaaggcctaccaaggcgacgatccgtagctggtctgagaggatgatcagccacactggaactgagacacggtccagactcctacgggaggcagcagtggggaattttggacaatgggggcaaccctgatccagccattccgcgtgagtgaagaaggccttcgggttgtaaagctctttcggcaggaacgaaacggtttgggttaataccctgagctaatgacggtacctgaagaagaagcaccggctaactacgtgccagcagccgcggtaatacgtagggtgcgagcgttaatcggaattactgggcgtaaagcgtgcgcaggcggttctataagacagatgtgaaatccccgggcttaacctgggaactgcgtttgtgactgtaggactcgagtgtggcagaggggggtggaattccacgtgtagcagtgaaatgcgtagagatgtggaggaacaccgatggcgaaggcagccccctgggtcaacactgacgctcatgcacgaaagcgtgggtagcaaacaggattagataccctggtagtccacgccctaaacgatgcgaactaggtgttggggaaggagactttcttagtaccgcagctaacgcgtgaagttcgccgcctggggagtacggtcgcaagattaaaactcaaaggaattgacggggacccgcacaagcggtggatgatgtggattaattcgatgcaacgcgaaaaaccttacctacccttgacatgccaggaacttggtagagataccttggtgcccgaaagggagcctggacacaggtgctgcatggctgtcgtcagctcgtgtcgtgagatgttgggttaagtcccgcaacgagcgcaacccttgtcattagttgccatcatttagttgggcactctaatgagactgccggtgacaaaccggaggaaggtggggatgacgtcaagtcctcatggcccttatgggtagggcttcacacgtcatacaatggtcggtacagagggttgccaagccgcgaggtggagccaatcccagaaagccgatcgtagtccggatcggagtctgcaactcgactccgtgaagtcggaatcgctagtaatcgtggatcagcatgccacggtgaatacgttcccgggtcttgtacacaccgcccgtcacaccatgggagtgggtttcaccagaagtaggtagcctaaccgcaaggggggcgcttaccacggtgggattcatgactggggtg

SEQ ID NO: 3302 - DNA, 1460 bp, Sulfuritalea hydrogenivorans
  source 1..1460: mol_type = unassigned DNA
attgaacgctggcggaatgctttacacatgcaagtcgagcggcagcgcgggggcaaccctggcggcgagcggcgaacgggtgagtaacatatcggaacgtaccccgtcgtgggggataacacagcgaaagttgtgctaataccgcatacgacctgagggtgaaagcgggggaccgtaaggcctcgcgcgatgggagcggccgatatcggattagctagttggtggggtaaaggctcaccaaggcgacgatccgtagctggtctgagaggacgaccagccacactggaactgagacacggtccagactcctacgggaggcagcagtggggaattttggacaatgggggcaaccctgatccagccattccgcgtgagtgaagaaggccttcgggttgtaaagctctttcggcaggaacgaaacggtggtccttaatacgggctactaatgacggtacctgaagaagaagcaccggctaactacgtgccagcagccgcggtaatacgtagggtgcgagcgttaatcggaattactgggcgtaaagcgtgcgcaggcggttccataagacagatgtgaaatccccgggcttaacctgggaactgcgtttgtgactgtgggactcgagtgtggcagaggggggtggaattccacgtgtagcagtgaaatgcgtagagatgtggaggaacaccgatggcgaaggcagccccctgggtcaacactgacgctcatgcacgaaagcgtggggagcaaacaggattagataccctggtagtccacgccctaaacgatgcgaactaggtgttggggaaggagactttcttagtaccgcagctaacgcgtgaagttcgccgcctggggagtacggtcgcaagattaaaactcaaaggaattgacggggacccgcacaagcggtggatgatgtggattaattcgatgcaacgcgaaaaaccttacctacccttgacatgtcaggaagtctgctgagaggcggatgtgcccgaaagggaacctgaacacaggtgctgcatggctgtcgtcagctcgtgtcgtgagatgttgggttaagtcccgcaacgagcgcaacccttgtcattaattgccatcattcagttgggcactttaatgagactgccggtgacaaaccggaggaaggtggggatgacgtcaagtcctcatggcccttatgggtagggcttcacacgtcatacaatggtcggtacagagggttgccaacccgcgagggggagccaatcccacaaagccgatcgtagtccggatcgcagtctgcaactcgactgcgtgaagtcggaatcgctagtaatcgtggatcagcatgtcacggtgaatacgttcccgggtcttgtacacaccgcccgtcacaccatgggagtgggttccaccagaagtaggtagtctaaccgcaaggagggcgcttaccacggtgggattcatgactggggtg

SEQ ID NO: 3303 - DNA, 1454 bp, unidentified
  source 1..1454: mol_type = unassigned DNA; note = Sulfuritortus calidifontis
attgaacgctggcggcatgccttacacatgcaagtcgaacggcagcacgggagcttgctcctggtggcgagtggcgaacgggtgagtaaagcatcggaacgtaccgcgtagtgggggataacgtagcgaaagttacgctaataccgcatacgtcctgagggagaaagcgggggtcgcaagacctcgcgctatgcgagcggccgatgtcggattagctagttggtggggtaagagcctaccaaggcgacgatccgtagcgggtctgagaggatgatccgccacactgggactgagacacggcccagactcctacgggaggcagcagtggggaattttggacaatgggggaaaccctgatccagccatgccgcgtgggtgaagaaggccttcgggttgtaaagccctttcggacggaaagaaatcatcgcctctaacataggcggtggatgacggtaccgtaagaagaagcaccggctaactacgtgccagcagccgcggtaatacgtagggtgcgagcgttaatcggaattactgggcgtaaagcgtgcgcaggcggttttttaagccagatgtgaaatccccgggcttaacctgggaatggcatttggaactggaagactagagtgcggcagaggggggtggaattcctggtgtagcagtgaaatgcgtagagatcaggaggaacaccgatggcgaaggcagccccctgggccgacactgacgctcatgcacgaaagcgtggggagcaaacaggattagataccctggtagtccacgccctaaacgatgtcaactggctgttgggggagcaatctcttagtagcgaagctaacgcgtgaagttgaccgcctggggagtacggccgcaaggttgaaactcaaaggaattgacgggggcccgcacaagcggtggatgatgtggattaattcgatgcaacgcgaagaaccttacctacccttgacatggcaggaacttgccagagatggcttggtgcccgaaagggaacctgcacacaggtgctgcatggctgtcgtcagctcgtgtcgtgagatgttgggttaagtcccgcaacgagcgcaacccttgccattagttgctacgaaagggcactctaatgggactgccggtgacaaaccggaggaaggtggggatgacgtcaagtcctcatggcccttatgggtagggcttcacacgtcatacaatggtcggtacagagggttgccaacccgcgagggggagccaatcccagaaaaccgatcgtagtccggattgttctctgcaactcgagagcatgaagtcggaatcgctagtaatcgcggatcagcatgccgcggtgaatacgttcccgggccttgtacacaccgcccgtcacaccatgggagtgggttgctccagaagtaggtagcctaaccgcgaggggggcgcttaccacggagtgattcatgactggggtg

SEQ ID NO: 3304 - DNA, 1469 bp, Sulfurivirga caldicuralii
  source 1..1469: mol_type = unassigned DNA
aatgaacgctggcggcaggcctaagacatgcaagtcgagcggtaacagaggggagcttgctcccctgctgacgagcggcgaacgggtgagtaacacgtgggaacctgccctctggttggggataacctggggaaacccaggctaataccgaataagctctacggaggaaagtgggcctctgcttgcaagctcacgccagaggatgggcccgcggcggattagctagttggtgaggtaacggctcaccaaggcgacgatccgtagctggtctgagaggatgatcagccacactgggactgagacacggcccagactcctacgggaggcagcagtcgggaatattggacaatgggcgaaagcctgatccagccatgccgcgtgtgtgaagaaggcctgagggttgtaaagcactttcagcagggaggaaaagcgtagggttaatacccctgcgtcttgacgttacctgcagaagaagcaccggctaactctgtgccagcagccgcggtaatacagagggtgcgagcgttattcggaattactgggcgtaaagcgcgcgtaggcggatttgcaagtcgggtgtgaaagccccgggctcaacctgggaactgcatccgagactgcaagtctagagtacggtagagggtagcggaattcctagtgtagcggtgaaatgcgtagatattaggaggaacaccagtggcgaaggcggctacctggaccgatactgacgctgaggtgcgaaagcgtggggagcaaacaggattagataccctggtagtccacgccctaaacgatgtcgactagctgttgggctcatttaagggctcagtagcgtagctaacgcgttaagtcgaccgcctggggagtacggccgcaaggttaaaactcaaaggaattgacgggggcccgcacaagcggtggagcatgtggtttaattcgatgcaacacgaagaaccttaccctcccttgacatccccggaaggcgccagagatggcgctgtgccttcgggaaccgggtgacaggtgctgcatggctgtcgtcagctcgtgtcgtgagatgttgggttaagtcccgcaacgagcgcaacccttgccgttagttgccatcgggtcatgccgggcactctaacgggactgccggtgataaaccggaggaaggcggggacgacgtcaagtcatcatggcccttatgggaggggctacacacgtgctacaatgggcaggacaaagggtagccaacccgcgagggggagccaatcccaaaaacctgctcgtagtccggattgcagtctgcaactcgactgcatgaagtcggaatcgctagtaatcgcgaatcagctatgtcgcggtgaatacgttcccgggccttgtacacaccgcccgtcacaccatgggagtgggctgcaccagaagtggctagtctaaccttcgggaggacggtcaccacggtgtggtccatgactggggtg

SEQ ID NO: 3305 - DNA, 1431 bp, Sulfurospirillum barnesii
  source 1..1431: mol_type = unassigned DNA
agtgaacgctggcggcgtgcttaacacatgcaagtcgaacggataaaataagcttgcttattttgttagtggcgcacgggtgagtaatgtatagctaacctgccctttagtgggggacaacagttggaaacgactgctaataccccatactccttcttactataaggtaagttgggaaagatttatcgctaaaggatggggctttattgtatcagctagttggtggggtaatggcctaccaaggctatgacgcatacctggtctgagaggatgatcaggcacactggaactgagacacggtccagactcctacgggaggcagcagtggggaatattgcacaatggaggaaactctgatgcagcaacgccgcgtggaggatgacgcatttcggtgtgtaaactccttttataagggaagataatgacggtaccttatgaataagcaccggctaactccgtgccagcagccgcggtaatacggagggtgcaagcgttactcggaatcactgggcgtaaaggatgcgtaggctgtaatataagtcaggagtgaaatccaacggctcaaccgttgaactgctcttgaaactgttttactagaatatgggagaggtagatggaattagtggtgtaggggtaaaatccgtagatatcactaggaataccgattgcgaaggcgatctactggaacattattgacgctgaggcatgaaagcgtggggagcaaacaggattagataccctggtagtccacgccctaaacgatgcacactagttgttgcgatgctagtcattgcagtaatgcacttaacagattaagtgtgccgcctggggagtacggtcgcaagattaaaactcaaaggaatagacggggacccgcacaagcggtggagcatgtggtttaattcgaagatacacgaagaaccttacctggccttgatatcctaagaatcctgtagagatatgggagtgctagtttactagaacttagagacaggtgctgcacggctgtcgtcagctcgtgtcgtgagatgttgggttaagtcccgcaacgagcgcaaccctcgtgtttagttgctaacagtttggctgagcactctaaacagactgccttcgtaaggaggaggaaggtgaggacgacgtcaagtcatcatggcccttatggccagggctacacacgtgctacaatggctaggacaaagagacgcgatactgcgaagtggagcaaatcttaaaacctagtctcagttcggattgaagtctgcaactcgacttcatgaagctggaatcgctagtaatcgtagatcagatatgctacggtgaatacgttcccgggtcttgtactcaccgcccgtcacaccatgggagttgaattcacccgaagccggaatactaaactagttaccgaccacggtgggttcagcgactggggtg

SEQ ID NO: 3306 - DNA, 1431 bp, Sulfurospirillum deleyianum
  source 1..1431: mol_type = unassigned DNA
agtgaacgctggcggcgtgcttaacacatgcaagtcgaacggataaaataagcttgcttattttgttagtggcgcacgggtgagtaatatatagctaacctgccctttagtgggggacaacagttggaaacgactgctaataccccatactccttcttatcataaggtaagttgggaaagatttattgctaaaggatggggctttattgtatcagctagttggtggggtaatggcctaccaaggctatgacgcatacctggtctgagaggatgatcaggcacactggaactgagacacggtccagactcctacgggaggcagcagtggggaatattgcacaatggaggaaactctgatgcagcaacgccgcgtggaggatgacgcatttcggtgtgtaaactccttttataagggaagataatgacggtaccttatgaataagcaccggctaactccgtgccagcagccgcggtaatacggagggtgcaagcgttactcggaatcactgggcgtaaaggatgcgtaggctgtaatataagtcaggagtgaaatccaacggctcaaccgttgaactgctcttgaaactgttttactagaatatgggagaggtagatggaattggtggtgtaggggtaaaatccgtagatatcaccaggaataccgattgcgaaggcgatctactggaacattattgacgctgaggcatgaaagcgtggggagcaaacaggattagataccctggtagtccacgccctaaacgatgcacactagttgttgcgatgctagtcattgcagtaatgcacttaacagattaagtgtgccgcctggggagtacggtcgcaagattaaaactcaaaggaatagacggggacccgcacaagcggtggagcatgtggtttaattcgaagatacacgaagaaccttacctggccttgatatcctaagaatcctgcagagatgcgggagtgctagtttactagaacttagagacaggtgctgcacggctgtcgtcagctcgtgtcgtgagatgttgggttaagtcccgcaacgagcgcaaccctcgtgattagttgctaacagtttggctgagcactctaatcagactgccttcgcaaggaggaggaaggtgaggacgacgtcaagtcatcatggcccttatggccagggctacacacgtgctacaatggttaggacaaagagacgcgatactgcgaagtggagcaaatcttaaaacctagtctcagttcggattggagtctgcaactcgactccatgaagctggaatcgctagtaatcgtagatcagatatgctacggtgaatacgttcccgggtcttgtactcaccgcccgtcacaccatgggagttgaattcacccgaagccggaatactaaactagttaccgaccacggtgggttcagcgactggggtg

SEQ ID NO: 3307 - DNA, 1431 bp, Sulfurospirillum halorespirans
  source 1..1431: mol_type = unassigned DNA
agtgaacgctggcggcgtgcttaacacatgcaagtcgaacggacttaatgagcttgcttattaagttagtggcgcacgggtgagtaatatatagctaacctgccctttagtgggggacaacagttggaaacgactgctaataccccatactccttctgatcttaagatcagttgggaaagatttatcgctaaaggatggggctttattgtatcagctagttggtggggtaatggcctaccaaggctatgacgcatacctggtctgagaggatgatcaggcacactggaactgagacacggtccagactcctacgggaggcagcagtggggaatattgcacaatggaggaaactctgatgcagcaacgccgcgtggaggatgacgcatttcggtgtgtaaactccttttataggggaagataatgacggtaccctatgaataagcaccggctaactccgtgccagcagccgcggtaatacggagggtgcaagcgttactcggaatcactgggcgtaaaggatgcgtaggctggaaatcaagtcgagagtgaaatccaacggctcaaccgttgaactgctctcgaaactggttacctagaatatgggagaggtagatggaattagtggtgtaggggtaaaatccgtagatatcactaggaataccgattgcgaaggcgatctactggaacattattgacgctgaggcatgaaagcgtggggagcaaacaggattagataccctggtagtccacgccctaaacgatgcacactagttgttgcgatgctagtcattgcagtaatgcacttaacagattaagtgtgccgcctggggagtacggtcgcaagattaaaactcaaaggaatagacggggacccgcacaagcggtggagcatgtggtttaattcgaagatacacgaagaaccttacctggccttgatatcctaagaatcctttagagatagaggagtgctagtttactagaacttagagacaggtgctgcacggctgtcgtcagctcgtgtcgtgagatgttgggttaagtcccgcaacgagcgcaaccctcgtgattagttgctaacagttcggctgagcactctaatcagactgccttcgtaaggaggaggaaggtgaggacgacgtcaagtcatcatggcccttatggccagggctacacacgtgctacaatggctaggacaaagagacgcgatactgcgaagtggagcaaatcttaaaacctagtctcagttcggattgaagtctgcaactcgacttcatgaagctggaatcgctagtaatcgtagatcagatatgctacggtgaatacgttcccgggtcttgtactcaccgcccgtcacaccatgggagttgaattcacccgaagccggaatactaaactagttaccgaccacggtgggttcagcgactggggtg

SEQ ID NO: 3308 - DNA, 1431 bp, Sulfurospirillum multivorans
  source 1..1431: mol_type = unassigned DNA
agtgaacgctggcggcgtgcttaacacatgcaagtcgaacggataaaataagcttgcttattttgttagtggcgcacgggtgagtaatatatagctaacctgccctttagtgggggacaacagttggaaacgactgctaataccccatactccttcttgtcttaagataagttgggaaagatttatcgctaaaggatggggctttattgtatcagctagttggtggggtaatggcctaccaaggcaatgacgcatacctggtctgagaggatgatcaggcacactggaactgagacacggtccagactcctacgggaggcagcagtggggaatattgcacaatggaggaaactctgatgcagcaacgccgcgtggaggatgacgcatttcggtgtgtaaactccttttataggggaagataatgacggtaccctatgaataagcaccggctaactccgtgccagcagccgcggtaatacggagggtgcaagcgttactcggaatcactgggcgtaaaggatgcgtaggctggaaatcaagtcgagagtgaaatccaacggctcaaccgttgaactgctctcgaaactggttacctagaatatgggagaggtagatggaattagtggtgtaggggtaaaatccgtagatatcactaggaataccgattgcgaaggcgatctactggaacattattgacgctgaggcatgaaagcgtggggagcaaacaggattagataccctggtagtccacgccctaaacgatgcacactagttgttgcgatgctagtcattgcagtaatgcacttaacagattaagtgtgccgcctggggagtacggtcgcaagattaaaactcaaaggaatagacggggacccgcacaagcggtggagcatgtggtttaattcgaagatacacgaagaaccttacctggccttgatatcctaagaatcctgtagagatacgggagtgctagtttactagaacttagagacaggtgctgcacggctgtcgtcagctcgtgtcgtgagatgttgggttaagtcccgcaacgagcgcaaccctcgtgattagttgctaacagttcggctgagcactctaatcagactgccttcgtaaggaggaggaaggtgaggacgacgtcaagtcatcatggcccttatggccagggctacacacgtgctacaatggctaggacaaagagacgcgatactgcgaagtggagcaaatcttaaaacctagtctcagttcggattgaagtctgcaactcgacttcatgaagctggaatcgctagtaatcgtagatcagatatgctacggtgaatacgttcccgggtcttgtactcaccgcccgtcacaccatgggagttgaattcacccgaagccggaatactaaactagttaccgaccacggtgggttcagcgactggggtg

SEQ ID NO: 3309 - DNA, 1435 bp, unidentified
  source 1..1435: mol_type = unassigned DNA; note = Sulfurovum riftiae
agtgaacgctggcggcgtgcttaacacatgcaagtcgaacgagaacggctctagcttgctagagtgtcagctaagtggcggacgggtgagtaatgtatagttaatttgccccttggagagggataacagttggaaacgactgctaatacctcatactccttctatgttaatcatagttgggaaacgttttttcgccaagggataagactatatggtatcaggtagttggtggggtaagagcctaccaagccaatgacgcctagctggtctgagaggatgatcagccacactggaactgagacacggtccagactcctacgggaggcagcagtggggaatattgcacaatggaggaaactctgatgcagcaacgccgcgtggaggatgacgcatttcggtgtgtaaactccttttatatgggaagataatgacggtaccatatgaataagcaccggctaactccgtgccagcagccgcggtaatacggagggtgcaagcgttactcggaatcactgggcgtaaagcgcgcgcaggcggtcttttaagttggatgtgaaagcctatggctcaaccatagaactgcatccaaaactattagactagagtctgggaggggaagatggaattagttgtgtaggggtaaaatccgtagagataactaggaataccaaaagcgaaggcgatcttctggaacagtactgacgctgaggcgcgaaagcgtggggagcaaacaggattagataccctggtagtccacgccctaaacgatgaatgttagtcgtcggaggcctagtgtcttcggtgatgcagctaacgcattaaacattccgcctggggagtacggtcgcaagattaaaactcaaaggaatagacggggacccgcacaagtggtggagcatgtggtttaattcgaagatacgcgaagaaccttacctggccttgacattgaaagaatccggtagagatactggagtgcccttttgggagcttgaaaacaggtgctgcacggctgtcgtcagctcgtgtcgtgagatgttgggttaagtcccgcaacgagcgcaaccctcgtcactagttactaacggttcggccgaggactctagtgagactgccttcgcaaggaggaggaaggtgaggacgacgtcaagtcatcatggcccttacggccagggcaacacacgtgctacaatggttaggacaatgagacgcgataccgcgaggtggagcaaatctataaacctaatctcagttcggattgtagtctgcaactcgactacatgaagctggaatcactagtaatcgtagatcagctatgctacggtgaatacgttcccgggtcttgtactcaccgcccgtcacaccatgggagttgatttcacccgaagcggggaagctaaactggctaccctccacggtgggatcagcgactggggtg

SEQ ID NO: 3310 - DNA, 1444 bp, Sunxiuqinia elliptica
  source 1..1444: mol_type = unassigned DNA
gatgaacgctagcgggaggcctaacacatgcaagtcgaggggtaacattgtagcttgctacagatgacgaccggcgcacgggtgagtaacgcgtatgcaacctgcctttgacagggggatagcccggagaaatccggattaatatcccatggtatttacagatcgcatggtttgtaaattaaagattttatcggtcaaagatgggcatgcgtgacattagctagttggtaaggtaacggcttaccaaggctgcgatgtctaggggttctgagaggatgatcccccacactggtactgagacacggaccagactcctacgggaggcagcagtgaggaatattggtcaatgggcgcaagcctgaaccagccatcccgcgtgaaggaagactgccctatgggttgtaaacttcttttctgcaccaagaatggttactacgtgtagtgatttgacggtagtgcaggaataagcatcggctaactccgtgccagcagccgcggtaatacggaggatgcaagcgttatccggattcattgggtttaaagggtacgtaggtggccaattaagtcagtggtgaaatcctgccgcttaacggtagaactgccattgaaactggttggcttgagtacagttgaggtaagcggaatgtgtagtgtagcggtgaaatgcttagatattacacagaaccccgattgcgaaggcagcttactaaactgtaactgacactgaggtacgaaagcgtggggagcgaacaggattagataccctggtagtccacgctgtaaacgatgctcactcgctgtatgcgatacattgtatgcggccaagcgaaagtgataagtgagccacctggggagtacgttggcaacagtgaaactcaaaggaattgacgggggcccgcacaagcggaggaacatgtggtttaattcgatgatacgcgaggaaccttacctgggcttaaatgcagattgacagacgtcgaaagatgtttttcttcggacagtttgcaaggtgctgcatggttgtcgtcagctcgtgccgtgaggtgtcgggttaagtcccataacgagcgcaacccttaccgttagttaccatcagttaggctggggactctagcgggactgccaccgtaaggtgagaggaaggtggggatgacgtcaaatcagcacggcccttatgtccagggctacacacgtgttacaatggccagtacaaagggcagctacctggtgacaggatgctaatctctaaagctggtctcagttcggatcgaagtctgcaacccgacttcgtgaagctggattcgctagtaatcgcgcatcagccatggcgcggtgaatacgttcccgggccttgtacacaccgcccgtcaaaccatggaagctgggggtacctgaagtctgtgaccgcaaggagcggcctagggtaaaactagtgactggggtt

SEQ ID NO: 3311 - DNA, 1459 bp, Sutterella parvirubra
  source 1..1459: mol_type = unassigned DNA
attgaacgctggcggcatgctttacacatgcaagtcgaacggcagcacagggagcttgctcccgggtggcgagtggcgcacgggtgagtaagacatcggaacgtgtcctcttgtgggggataactacccgaaagggtggctaataccgcataagtcctgagggagaaagcgggggatcttcggacctcgcgcgagaggagcggccgatggccgattagctagttggtgaggtaaaggctcaccaaggcgacgatcggtagctggtctgagaggacgaccagccacactgggactgagacacggcccagactcctacgggaggcagcagtggggaattttggacaatgggcgaaagcctgatccagccatgccgcgtgtgggatgaaggccttcgggttgtaaaccacttttgtcagggacgaaaaggttcaggcyaataccttgaactgctgacggtacctgaagaataagcaccggctaactacgtgccagcagccgcggtaatacgtagggtgcaagcgttaatcggaattactgggcgtaaagcgtgcgcaggcggttctgtaagatagatgtgaaatccccgggcttaaccttggaattgcatttatgactgcaggactcgagtttgtcagaggggggtggaattccaagtgtagcagtgaaatgcgtagatatttggaagaacaccgatggcgaaggcagccccctgggacatgactgacgctcatgcacgaaagcgtggggagcaaacaggattagataccctggtagtccacgccctaaacgatgtctactggttgttggggacgatttggtccttggtaacgaagctaacgcgtgaagtagaccgcctggggagtacggtcgcaagattaaaactcaaaggaattgacggggacccgcacaagcggtggatgatgtggattaattcgatgcaacgcgaaaaaccttacctagccttgacatgtcggaaagctctgagagatcggagygtgcccgcaagggaatccgaacacaggtgctgcatggctgtcgtcagctcgtgtcgtgagatgttgggttaagtcccgcaacgagcgcaacccttgtcactagttgctacgaaagggcactctagtgagactgccggtgacaaaccggaggaaggtggggatgacgtcaagtcctcatggcccttatggctagggcctcacacgtcatacaatggtcggaacagagggcagcgaagccgcgaggtggagcaaatcccagaaaaccgatcgtagtccggattgcagtctgcaactcgactgcatgaagtcggaatcgctagtaatcgcggatcagcatgccgcggtgaatacgttcccgggtcttgtacacaccgcccgtcacaccatgggagtggggttcaccagaagacgtttgtctaaccgcaaggaggacggcgtccacggtgggtttcatgactggggtg

SEQ ID NO: 3312 - DNA, 1412 bp, Swaminathania salitolerans
  source 1..1412: mol_type = unassigned DNA
agcgaacgctggcggcatgcttaacacatgcaagtcgcacggacctttcggggtgagtggcggacgggtgagtaacgcgtagggatctatccacgggtgggggataacaccgggaaactggtgctaataccgcatgatacctgagggtcaaaggcgcaagtcgcctgtggaggagcctgcgttcgattagcttgttggtggggtaaaggcctaccaaggcgatgatcgatagctggtctgagaggatgatcagccacactgggactgagacacggcccagactcctacgggaggcagcagtggggaatattggacaatgggcgcaagcctgatccagcaatgccgcgtgtgtgaagaaggtcttcggattgtaaagcactttcgacggggacgatgatgacggtacccgtagaagaagccccggctaacttcgtgccagcagccgcggtaatacgaagggggctagcgttgctcggaatgactgggcgtaagggcgtgtaggcggtttgcacagtcagatgtgaaattccagggcttaaccttggggctgcatttgatacgtgtagactagagtgtgagagagggttgtggaattcccagtgtagaggtgaaattcgtagatattgggaagaacaccggtggcgaaggcggcaacctggctcatgactgacgctgaggcgcgaaagcgtggggagcaaacaggattagataccctggtagtccacgctgtaaacgatgtgtgctggatgttgggtaacttggttactcagtgtcgaagctaacgcgctaagcacaccgcctggggagtacggccgcaaggttgaaactcaaaggaattgacgggggcccgcacaagcggtggagcatgtggtttaattcgaagcaacgcgaagaaccttaccagggcttgacattgggaggcttgtattcagagatgggtatttcccgcaaggggaccttctgcacaggtgctgcatggctgtcgtcagctcgtgtcgtgagatgttgggttaagtcccgcaacgagcgcaaccctcgcctttagttgccagcacgtttgggtgggcactctagaggaactgccggtgacaagccggaggaaggtggggatgacgtcaagtcctcatggcccttatgtcctgggctacacacgtgctacaatggcggtgacagtgggaagctagatggtgacatcgtgccgatctctaaaagccgtctcagttcggattgtactctgcaactcgagtacatgaaggtggaatcgctagtaatcgcggatcagcatgccgcggtgaatacgttccctgggcctgtacacaccgcccgtcacaccatgggagttggtttgacccgaagccggtgagcgaaccgcaaggacgcagccgaccacggtcgggtcagcgactggggtg

SEQ ID NO: 3313 - DNA, 1365 bp, unidentified
  source 1..1365: mol_type = unassigned DNA; note = Swingsia samuiensis
agcgaacgctggcggcatgcttaacacatgcaagtcgcacggacctttcggggttagtggcggacgggtgagtaacgcgtagggatttatccataggtgggggacaacactgggaaactggtgctaataccgcatgatacctgagggtcaaaggcgcaagtcgcctatggaggaacctgcgttcgattagctagttggtggggtaaaggcctaccaaggcgatgatcgatagctggtttgagaggatgatcagccacactgggactgagacacggcccagactcctacgggaggcagcagtggggaatattggacaatgggggcaaccctgatccagcaatgccgcgtgtgtgaagaaggtcttcggattgtaaagcactttcggcggggacgatgatgacggtacccgcagaagaagccccggctaacttcgtgccagcagccgcggtaatacgaagggggctagcgttgctcggaatgactgggcgtaaagggcgtgtaggcggtttggacagtcagatgtgaaatccccgggcttaacctgggaactgcatttgatacgtccagactagagttcgagagagggttgtggaattcccagtgtagaggtgaaattcgtagatattgggaagaacaccggtggcgaaggcggcaacctggctcgatactgacgctgaggcgcgaaagcgtggggagcaaacaggattagataccctggtagtccacgctgtaaacgatgtgtgctggatgttgggtaacttagttactcagtgtcgaagctaacgcgctaagcacaccgcctggggagtacggccgcaaggttgaaactcaaaggaattgacgggggcccgcacaagcggtggagcatgtggtttaattcgaagcaacgcgcagaaccttaccagggcttgcatggggaggctgtagacagagatgtctatttcttcggacctcccgcacaggtgctgcatggctgtcgtcagctcgtgtcgtgagatgttgggttaagtcccgcaacgagcgcaacccttgtctttagttgccagcatgtttgggtgggcactctagagagactgccggtgacaagccggaggaaggtggggatgacgtcaagtcctcatggcccttatgtcctgggctacacacgtgctacaatggcggtgacagtgggaagctatgtggtgacacaatgctgatctctaaaagccgtctcagttcggattgtactctgcaactcgagtacatgaaggtggaatcgctagtaatcgcggatcagcatgccgcggtgaatacgttcccgggccttgtacacaccgcccgtcacaccatgggagttggtttgaccttaagtcggtgagcgaaccc

SEQ ID NO: 3314 - DNA, 1411 bp, Synechococcus elongatus
  source 1..1411: mol_type = unassigned DNA
gatgaacgctggcggcgtgcttaacacatgcaagtcgaacgggctcttcggagctagtggcggacgggtgagtaacgcgtgagaatctgcctacaggacggggacaacagttggaaacgactgctaatacccgatgtgccgagaggtgaaacatttatggcctgtagatgagctcgcgtctgattagctagttggtggggtaagggcctaccaaggcgacgatcagtagctggtctgagaggatgatcagccacactgggactgagacacggcccagactcctacgggaggcagcagtggggaattttccgcaatgggcgcaagcctgacggagcaacgccgcgtgggggaggaaggtttttggactgtaaaccccttttctcagggaagaagaaagtgacggtacctgaggaataagcctcggctaattccgtgccagcagccgcggtaatacgggagaggcaagcgttatccggaattattgggcgtaaagcgtccgcaggcggttaatcaagtctgttgtcaaagcgtggggctcaacctcatacaggcaatggaaactgattgactagagtatggtaggggtagcgggaattccaggtgtagcggtgaaatgcgtagatatctggaagaacaccagcggcgaaagcgcgctactgggccataactgacgctcatggacgaaagctaggggagcgaaagggattagatacccctgtagtcctagccgtaaacgatgaacactaggtgttgcgtgaatcgacccgcgcagtgccgtagccaacgcgttaagtgttccgcctggggagtacgcacgcaagtgtgaaactcaaaggaattgacgggggcccgcacaagcggtggagtatgtggtttaattcgatgcaacgcgaagaaccttaccagggtttgacatcccccgaatctcttggaaacgagagagtgccttcgggagcggggagacaggtggtgcatggctgtcgtcagctcgtgtcgtgagatgttgggttaagtcccgcaacgagcgcaacccacgtttttagttgccatcattcagttgggcactctagagaaactgccggtgacaaaccggaggaaggtgtggacgacgtcaagtcatcatgccccttacatcctgggctacacacgtactacaatgctccggacagcgagacgcgaagccgcgaggtgaagcaaatctcccaaaccggggctcagttcagattgcaggctgcaactcgcctgcatgaaggcggaatcgctagtaatcgcaggtcagcatactgcggtgaatacgttcccgggccttgtacacaccgcccgtcacaccatggaagttggccatgcccgaagtcgttaccctaaccgttcgcggaggggggcgccgaaggtagggctgatgactggggtg

SEQ ID NO: 3315 - DNA, 1411 bp, Synechococcus lividus
  source 1..1411: mol_type = unassigned DNA
gatgaacgctggcggtctgcttaacacatgcaagtcgaacgagctcttcggagctagtggcggacgggtgagtaacacgtgagaatctacccttaggagggggataacagctggaaacggctgctaataccccatatgccgcaaggtgaaatcttttttgcctgaggatgagctcgcggtggattagctagttggtggggtaatggcctaccaaggcaacgatccatagctggtctgagaggatgatcagccacactgggactgagacacggcccagactcctacgggaggcagcagtggggaattttccgcaatgggcgaaagcctgacggagcaagaccgcgtgagggatgaaggcctttgggttgtaaacctcttttctcagggaagaacacaatgacggtacctgaggaataagcctcggctaactccgtgccagcagccgcggtaagacggaggaggcaagcgttatccggaattattgggcgtaaagcgtccgcaggtggctttccaagtctgctgtcaaagcccgaggcttaacctcggatcggcggtggaaactggatcgctagagtacgtcaggggtagggggaattcccggtgtagcggtgaaatgcgtagatatcgggaagaacaccagcgacgaaagtgccctactgggacgttactgacactcatggacgaaagctaggggagcgaaagggattagatacccctgtagtcctagccgtaaacgatggacactaggtgttgctggtatccactccagcagtgccgtagccaacgcgttaagtgtcccgcctggggagtacgcacgcaagtgtgaaactcaaaggaattgacgggggcccgcacaagcggtggagtatgtggtttaattcgatgcaacgcgaagaaccttaccagggcttgacatgtcgcgaatccccctgaaaggggggagtgccttcgggaacgcgaacacaggtggtgcatggctgtcgtcagctcgtgtcgtgagatgttgggttaagtcccgcaacgagcgcaaccctcgtccttagttgccagcattcagttgggcactctagggagactgccggtgacaaaccggaggaaggtggggatgacgtcaagtcatcatgccccttacgccctgggctacacacgtactacaatgctgtggacagagagttgccaacccgcgagggcgagctaatctcttaaaccacggctcagttcagattgcaggctgcaactcgcctgcatgaaggcggaatcgctagtaatcgcaggtcagcatactgcggtgaatacgttcccgggccttgtacacaccgcccgtcacaccatgggagttggccacgcccgaagtcgttactctaacccgtaagggagggggacgcctaaggcagggctgatgactggggtg

SEQ ID NO: 3316 - DNA, 1484 bp, Syntrophobacter fumaroxidans
  source 1..1484: mol_type = unassigned DNA
aataaacgctggcggcgtgcctaacacatgcaagtcgaacgagaaagccttaatcttcggatgggcgagtaaagtggcgcacgggtgagtaacgcgtaggtaacctacctccgggaccgggataacagtgcgaaagtgctgctaataccggatacgattgtggagcgggagctctacgatgaaagtcggcctctcagagaagccgatgttcggggatgggcctgcgtcctatcagctggttggtagggtaacggcctaccaaggcgacgacgggtagctggtctgagaggatgatcagccacactggcactggaacacgggccagactcctacgggaggcagcagtgaggaattttgcgcaatggccgcaaggctgacgcagcaacgccgcgtgggtgaagaaggccttcgggtcgtaaagccctgtcaggtgggaagaacaccatggggacgaataagcttcatggctgacggtaccaccagaggaagcaccggctaactccgtgccagcagccgcggtaatacggagggtgcgagcgttattcggaattactgggcgtaaagcgcgtgcaggcggtttggcaagtctgatgtgaaagccccgggcttaacctgggaagtgcattggaaactgccggacttgagtactggagaggaagggggaattcccggtgtagaggtgaaattcgtagagatcgggaggaataccagtggcgaaggcgcccttctggacggttactgacgctgagacgcgaaagcgtggggagcaaacaggattagataccctggtagtccacgctgtaaacgatgagcactaggtgtagcgggtactcattcctgctgtgccgcagctaacgcgttaagtgctccgcctggggattacggtcgcaagactaaaactcaaaggaattgacgggggcccgcacaagcggtggagtatgtggtttaattcgacgcaacgcgaagaaccttacctgggcttgacatccccggacggccctggaaacagggatttccccttcgggggaccgggagacaggtgctgcatggctgtcgtcagctcgtgtcgtgagatgttgggttaagtcccgcaacgagcgcaacccttgcctttagttgccatcattgagttgggcactctaaagggactgccggtgtgaaaccggaggaaggtggggatgacgtcaagtcctcatggcctttatgcccagggctacacacgtactacaatgggcggtacaaagggaagcgagcccgcgagggggagccaaccccaaaaagccgttcacagttcggatcggagtctgcaactcgactccgtgaagttggaatcgctagtaatcgcggatcagcatgccgcggtgaatacgttcccgggccttgtacacaccgcccgtcacaccacgaaagtcggctgtaccagaagtgcgtgggctaacttttcggagaggcagcgtaccaaggtgtggtcggtaattggggtg

SEQ ID NO: 3317 - DNA, 1488 bp, Syntrophobotulus glycolicus
  source 1..1488: mol_type = unassigned DNA
gacgaacgctggcggcgtgcctaacacatgcaagtcgaacggagaatattgaggaagcttgcgaattgatattcttagtggcgaacgggtgagtaacgcgtgggtaacctgtcctcatgaccggaataacagttggaaacgactgctaatgccggataagcttttggtaaggcatcttaccggaaggaaagctggcctctgaatatgctagtgcaagagggtggacccgcgtctgattagctggttggtagagtaaaagcctaccaaggcgacgatcagtagccggcctgagagggtaaacggccacactgggactgagacacggcccagactcctacgggaggcagcagtggggaatcttccgcaatggacgaaagtctgacggagcaacgccgcgtgtatgaagaaggctttcgggttgtaaagtactgttgtcagggacgaaccgtatatgtgtaaataatgcatatacctgacggtacctgacgaggaagccccggctaactacgtgccagcagccgcggtaatacgtagggggcgagcgttgtccggaattattgggcgtaaagggcgcgtaggcggctgtataagtctgatgtgaaagtgcggagcttaactccgtaaagcattggaaactgtacggcttgaggacaggagaggaaagtggaattccacgtgtagcggtgaaatgcgtagatatgtggaggaacaccagtggcgaaggcgactttctggactgtaactgacgctgaggcgcgaaagcgtggggagcgaacaggattagataccctggtagtccacgccgtaaacgatgagtgctaggtgtagagggtatcgaccccttctgtgccgcagttaacacaataagcactccgcctggggagtacggccgcaaggttgaaactcaaaggaattgacgggggcccgcacaagcggtggagcatgtggtttaattcgacgcaacgcgaagaaccttaccaaggcttgacatctacagaatcccgaagagattcgggagtgcctttcggggaactgtaagacaggtggtgcatggttgtcgtcagctcgtgtcgtgagatgttgggttaagtcccgcaacgagcgcaacccctatatttagttactaacaggtaaagctgaggactctagatagactgccggtgacaaaccggaggaaggtggggatgacgtcaaatcatcatgccccttatgtcttgggctacacacgtgctacaatgggcggtacagacggaagcgaagccgagaggtggagcaaatccgagaaagccgttcgtagttcggattgatctctgcaactcgagatcatgaagtcggaatcgctagtaatcgcaggtcagcacactgcggtgaatacgttcccgggccttgtacacaccgcccgtcacaccacgaaagtttgcaacacccgaagccggtgaggtaacctaagggagccagccgtcgaaggtggggcagatgattggggtg

SEQ ID NO: 3318 - DNA, 1528 bp, Syntrophomonas zehnderi
  source 1..1528: mol_type = unassigned DNA
gacgaacgctggcggcgtgcctaacacatgcaagtcgaacggactaatgtttgacactgagtgttttaagaaggatcaagaagagtcaagacccgaagcgggggagaacattcagagttgaacattagttagtggcggacgggtgagtaacgcgtgggtaatctgcctaagagtggggaataacagttggaaacgactgctaataccgcataaactgctaacgcagcaaagatggcctcttaacaatgctgtcgcttttagatgagcccgcgtctgattagctagttggtggggtaaaggcctaccaaggcaacgatcagtagccggcctgagagggtgaacggccacactgggactgagacacggcccagactcctacgggaggcagcagtggggaatattgcgcaatgggggaaaccctgacgcagcgacgccgcgtgagcgaagaaggccttagggttgtaaagctctgttttaagggacgaatgttcgcgtcagtaatatgggcgtgaaatgacggtaccttaagaggaagccccggctaactacgtgccagcagccgcggtaagacgtagggggcgagcgttgtccggaattactgggcgtaaagagcacgtaggcgggactttaagtcaggtgtgaaagaccggggctcaacctcggggttgcacttgaaactggagttcttgagggcaggagaggaaagcagaattcctggtgtagcggtgaaatgcgtagaaatcaggaggaataccagtggcgaaggcggctttctggactgaccctgacgctgaggtgcgaaagcgtgggtagcaaacaggattagataccctggtagtccacgccgtaaacgatggatactaggtgtaggaggtatcgaccccttctgtgccgcagctaacgcaataagtatcccgcctggggagtacggtcgcaaggctgaaactcaaaggaattgacgggggcccgcacaagcggtggagcatgtggtttaattcgatgcaacgcgaagaaccttaccaggtcttgacatctggcgaatcctgtagaaatacgggagtgccttttaggagcgccaagacaggtggtgcatggttgtcgtcagctcgtgtcgtgagatgttgggttaagtcccgcaacgagcgcaacccctgctattagttgctaacattaagctgagcactctaatgggactgcctgtgacaagcaggaggaaggtggggacgacgtcaaatcatcatgccctttatgatctgggctacacacgtgctacaatgggtggtacagagagcagcgagaccgtgaggtggagcgaatctcaaaaagccattctcagttcggattgaagtctgcaactcgacttcatgaagtcggaatcgctagtaatcgcgaatcagcatgtcgcggtgaatgcgttcccgggccttgtacacaccgcccgtcacaccacgaaagtcggcaacacccgaagccagtgagctaactgaacggaagtcagaggtcagaagtaagaagtcagagattagtg

SEQ ID NO: 3319 - DNA, 1482 bp, Syntrophorhabdus aromaticivorans
  source 1..1482: mol_type = unassigned DNA
aacgaacgctggcggcgtgcctaacacatgcaagtcgagcgagaaagtcccttcgggggcgagtagagcggcggacgggtgagtaatacgtgggtaatctaccctcgagcctggaataactccgcgaaagcggggctaataccggataagaccacacgacacatgtcgcggggtagaaggtggcttgtattcgtacatgctatcacttgaggatgagcccatggcctatcagcttgttggtgaggtaagagcttaccaaggctatgacgggtagctggtctgagaggacgactagccacactgggactgagacacggcccagactcctacgggaggcagcagtggggaatattgggcaatgggcgaaagcctgacccagcgacgccgcgtgggcgatgaaggccttcgggttgtaaagccctttcgtgcggaaagaatagtcccgtggtgaatatccgcgggatttgacggtaccgcaggaagaagcaccggctaactccgtgccagcagccgcggtaatacggagggtgcaagcgttgttcggaattattgggcgtaaagggcgcgtaggcggttgtgatagtcagatgtgaaatcctccggcttaactggagaactgcatctgaaacttcatagctagagtacaggagagggaaacggaattcccggtgtagaggtgaaattcgtagatatcgggaggaacaccagtggcgaaggcggtttcctggcctgatactgacgctgaggcgcgaaagcgtggggagcaaacaggattagataccctggtagtccacgcggtaaacggtgaacactaggtgtgggaggtgtaataccttctgtgccgaagctaacgcgttaagtgttccgcctgggaagtacggccgcaaggttgaaactcaaaggaattgacgggggcccgcacaagcggtggagcatgtggtttaattcgacgcaacgcgaaaaaccttacctgggcttgacatgccgagaacccggtggaaacatcggggtgccccgtaaggggaacttggacacaggtgctgcatggctgtcgtcagctcgtgccgtgaggtgttgggttaagtcccgcaacgagcgcaaccctcatccttagttgccatcattaagttgggcaccctaaggaaactgccgcagttaatgcggaggaaggtggggatgacgtcaagtcctcatggcccttatacccagggctacacacgtgctacaatggacggtacaaagggtcgcgaacctgcgagggggagctaatcccacaaaaccgttctcagttcggattggagtctgcaacccgactccatgaagctggaatcgctagtaatcgcggatcagcatgccgcggtgaatacgttcccgggccttgtacacaccgcccgtcacaccacgaaagcttgttgtaccagaagtcgttgggctaactcgcaagagaggcagacgccgaaggtatggcaggtaattggggtg

SEQ ID NO: 3320 - DNA, 1691 bp, Syntrophothermus lipocalidus
  source 1..1691: mol_type = unassigned DNA
agagtttgatcctggctcaggacgaacgctggcggcgtgcctaacacatgcaagtcgagcggtccggcactcagcacagtgctcattcgggggatgtaggaagtagagggagaggcgattggagcaggtaattaggggatgagtgagcagtgagctgagtgccggatagcggcggacgggtgagtaacgcgtgggtaatctacccataagagggggataacactgggaaaccggtgctaataccgcataagctattcggtatgcatgtactggatagtaaaggtggcctctggagcaagctaccgcttatggatgagcccgcgtctgattagctagttggtggggtaacggcctaccaaggcgacgatcagtagccggcctgagagggtggacggccacactgggactgagacacggcccagactcctacgggaggcagcagtggggaatattgcgcaatggggggaaccctgacgcagcgacgccgcgtgagcgacgaaggccttcgggttgtaaagctcttttattagggacgaaatcccgcatgcgaatagtgtgtggggatgacggtacctaatgaataagccccggctaactacgtgccagcagccgcggtaagacgtagggggcgagcgttgtccggaattactgggcgtaaagagcgtgtaggcgggctgttaagtcaggtgtgaaataccgcagctcaactgcggggtggcatctgatactggcagtcttgagggcaggagagggaagtggaattcctggtgtagcggtgaaatgcgtagatatcaggaggaacaccagtggcgaaggcggcttcctggactggccctgacgctgagacgcgaaagcgtggggagcaaacaggattagataccctggtagtccacgctgtaaacgatgggcactaggtgtaggaggtatcgaccccttctgtgccgcagctaacgcaataagtgccccgcctggggagtacggtcgcaaggctgaaactcaaaggaattgacgggggcccgcacaagcggtggagcatgtggtttaattcgatgcaacgcgaagaaccttaccagggcttgacatcctgcggacctggtggaaacactggggtgccttagggaaacttaaggaacgcagagacaggtggtgcatggttgtcgtcagctcgtgtcgtgagatgttgggttaagtcccgcaacgagcgcaacccttgctgttagttgctaacgggtgaagccgagcactctaacgggactgccggtgacaagccggaggaaggtggggatgacgtcaaatcatcatgccctttatgccctgggctacacacgtgctacaatggccggtacagagagaagcgaagccgcgaggtggagcaaatctcaaaagccggtctcagttcggattgcaggctgcaactcgcctgcatgaagtcggaatcgctagtaatcgcgaatcagaacgtcgcggtgaatgcgttcccgggccttgtacacaccgcccgtcacaccacgaaagctggcaacacccgaagccggtgagccaacccggcactcaagtggtgggaaaagactttaggagatggttgctgaaggacagaggaagcatcttcggagcgagttctcgccagttgagtgccgggaggcagccgtcgaaggtggggctggtgattggggtgaagtcgtaacaaggta

SEQ ID NO: 3321 - DNA, 1486 bp, Syntrophus aciditrophicus
  source 1..1486: mol_type = unassigned DNA
aacgaacgctggcggcgtgcctaacacatgcaagtcgtacgagaaaatccgtttcggcggatgagtaaagtggcgcacgggtgagtaacgcgtggataatctgcctttaagctgggaataactcatcgaaaggtgggctaatacccgataatgctatgcagctaaggttgtatagtcaaagagagcctctgcttgcaagccctcacttagagatgagtccgcgtaccattagctagttggtagggtaatggcctaccaaggcgatgatggttagctggtctgagaggatgatcagccacactggaactgagacacggtccagactcctacgggaggcagcagtgaggaatattgcgcaatgggggaaaccctgacgcagcaacgccgcgtgagtgaggaaggttttcggatcgtaaagctctgtcgggtgggaagaaatgtatggaggttaatagcctttgtacttgacggtaccgccaaaggaagcaccggctaactccgtgccagcagccgcggtaatacggggggtgcaagcgttgttcggaatcattgggcgtaaagagcgtgtaggcggctgagcaagtcagatgtgaaatccctgggcttaacccaggaagtgcatttgaaactgttcagcttgagtaaggaagagggaagtggaattcctggtgtagaggtgaaattcgtagatatcaggaggaacaccggtggcgaaggcgacttcctggtcctatactgacgctgagacgcgagagcgtggggagcaaacaggattagataccctggtagtccacgccgtaaacgatgttcactaggtgttgagggtattgaccccttcagtgccgaagctaacgcattaagtgaaccgcctggggagtacggtcgcaagattaaaactcaaaggaattgacgggggcccgcacaagcggtggagcatgtggtttaattcgatgcaacgcgaagaaccttacctgggcttgacatcccgggaatcttctggaaacaggagagtgcccttcggggaacccggagacaggtgctgcatggctgtcgtcagctcgtgtcgtgagatgttgggttaagtcccgcaacgagcgcaacccttgtctttaattgccatcattcagttgggcactttaaagagactgccggcgttaaaccggaggaaggtggggatgacgtcaagtcctcatggcctttatgcccagggctacacacgtgctacaatgggtggtacaaagagcagccaactcgcgagagtgagcaaatctcaaaaagccatcctcagttcggattggagtctgcaactcgactccatgaagtcggaatcgctagtaatcgcggatcagcatgccgcggtgaatacgttcccgggccttgtacacaccgcccgtcacacccggaaaattgattgcaccagaagtcgttgagctaacccctattttagaggaggcaggcgcctacggtgtggttggtaatcggggtg

SEQ ID NO: 3322 - DNA, 1487 bp, Syntrophus gentianae
  source 1..1487: mol_type = unassigned DNA
aacgaacgctggcggcgtgcctaacacatgcaagtcgtacgagaaaatccgcttcggcgggtgagtagagtggcgcacgggtgcgtaacgcgtggataatctgcctttaagttgggaataactcaccgaaaggtgggctaatacccgataatgctatattacttcggttgtatagccaaagagagcctctgcttgcaagccctcacttagagatgagtccgcgtaccattagctagttggtagggtaatggcctaccaaggcgacgatggttagctggtctgagaggatgatcagccacactggaactgagacacggtccagactcctacgggaggcagcagtgaggaatattgcgcaatgggggcaaccctgacgcagcaacgccgcgtgagtgaggaaggttttcggatcgtaaagctctgtcgggtgggaagaaatgtattgaggttaatagcctttgtacttgacggtaccgccaaaggaagcaccggctaactccgtgccagcagccgcggtaatacggggggtgcaagcgttgttcggaatcattgggcgtaaagagcgtgtaggcggctaggcaagtcagatgtgaaatccctgggcttaacccaggacgtgcatttgaaactgcttggcttgagtaaggaagagggaagtggaattcctggtgtagaggtgaaattcgtagatatcaggaggaacaccggtggcgaaggcgacttcctggtcctatactgacgctgagacgcgagagcgtggggagcaaacaggattagataccctggtagtccacgccgtaaacgatgttcactaggtgttgagggtattgaccccttcagtgccgaagctaacgcattaagtgaaccgcctggggagtacggtcgcaagattaaaactcaaaggaattgacgggggcccgcacaagcggtggagcatgtggtttaattcgatgcaacgcgaagaaccttacctgggcttgacatcccgagaatctcctggaaacaggggagtgcctttcggggaactcggagacaggtgctgcatggctgtcgtcagctcgtgtcgtgagatgttgggttaagtcccgcaacgagcgcaacccttgtctttaattgccatcattcagttgggcactttaaagagactgccggcgttaaaccggaggaaggtggggatgacgtcaagtcctcatggcctttatgtccagggctacacacgtgctacaatgggtggtacaaagagcagccaactcgcgagagtgagcaaatctcaaaaagccatcctcagttcggattggagtctgcaactcgactccatgaagtcggaatcgctagtaatcgcggatcagcatgccgcggtgaatacgttcccgggccttgtacacaccgcccgtcacacccggaaaattgattgcaccagaagtcgttgagctaacccctatttatagaggaggcaggcgcctacggtgtggttggtaatcggggtg

SEQ ID NO: 3323 - DNA, 1459 bp, unidentified
  source 1..1459: mol_type = unassigned DNA; note = Tahibacter aquaticus
  misc_difference 415: note = n is a, c, g, or t
gtgaacggctggcggcaggcctaacacatgcaagtcgagcggccagcgcggggcaacctggcggcgagcggcggacgggtgaggaatgcatcggaatctaccctgtcgtgggggataacgtagggaaacttacgctaataccgcatacgaccgagaggtgaaagtgggggaccgcaaggcctcacgcgattggatgagccgatgccggattagctagttggaggggtaaaggcccaccaaggcgacgatccgtagctggtctgagaggatgatcagccacattgggactgagacacggcccaaactcctacgggaggcagcagtggggaatattggacaatgggcgcaagcctgatccagccatgccgcgtgtgtgaagaaggccttcgggttgtaaagcacttttgttcgggangaaatcgtgcggattaatactctgtacggatgacggtaccgaaagaataagcaccggctaacttcgtgccagcagccgcggtaatacgaagggtgcaagcgttactcggaatcactgggcgtaaagcgtgcgtaggcggttcgttaagtctgctgtgaaagccctgggctcaacctgggaactgcagtggatactggcggactagagtgtgatagaggatggtggaattcccggtgtagcggtgaaatgcgtagagatcgggaggaacaccagtggcgaaggcggccatctggatcaacactgacgctgaggcacgaaagcgtggggagcaaacaggattagataccctggtagtccacgccctaaacgatgcgaactggacgttggttgcaacttggcaatcagtgtcgaagctaacgcgttaagttcgccgcctggggagtacggtcgcaagactgaaactccaaggattgacgggggcccgcacaagcggtggagtatgtggtttaattcgatgcaacgcgaagaaccttacctggccttgacatccagtgaactttccagagatggattggtgccttcgggaacactgagacaggtgctgcatggctgtcgtcagctcgtgtcgtgagatgttgggttaagtcccgcaacgagcgcaacccttgtccttagttgccagcacgtaaaggtgggaactctaaggagactgccggtgacaaaccggaggaaggtggggatgacgtcaagtcatcatggcccttacggccagggctacacacgtactacaatggtcggtacagagggttgcaataccgcgaggtggagccaatcccagaaaaccgatcccagtccggatcggagtctgcaactcgactccgtgaagtcggaatcgctagtaatcgcggatcagctatgccgcggtgaatacgttcccgggccttgtacacaccgcccgtcacaccatgggagttggttgctccagaagtaggtagtctaaccgcaggggggacgcttaccacggaatggtcaatgactggggtg

SEQ ID NO: 3324 - DNA, 1462 bp, unidentified
  source 1..1462: mol_type = unassigned DNA; note = Tamilnaduibacter salinus
attgaacgctggcggcaggcctaacacatgcaagtcgagcggaaacgatgggagcttgctcccaggcgtcgagcggcggacgggtgagtaatgcataggaatctgcccggtagtgggggatagcccggggaaacccggattaataccgcatacgccctttgggggaaagcaggggatcttcggaccttgcgctatcggatgagcctatgtcggattagttagttggtggggtaatggcctaccaaggcgacgatccgtagctggtctgagaggatgatcagccacatcgggactgagacacggcccgaactcctacgggaggcagcagtggggaatattggacaatgggggcaaccctgatccagccatgccgcgtgtgtgaagaaggctttcgggttgtaaagcactttcagcagggaggaaagcttgtcggttaatacccggcaagggcgacgttacctgcagaagaagcaccggctaactccgtgccagcagccgcggtaatacggagggtgcaagcgttaatcggaattactgggcgtaaagcgcgcgtaggcggttggataagcgagatgtgaaagccctgggcttaacctgggaatggcatttcgaactgtctggctagagtgtggtagagggtagtggaatttccagtgtagcggtgaaatgcgtagatattggaaagaacaccagtggcgaaggcggctacctggaccaacactgacgctgaggcgcgaaagcgtggggagcaaacaggattagataccctggtagtccacgccgtaaacgctgtcgaccagccgttggggatgttagatccttagtggcgcagttaacgcactaagtcgaccgcctggggagtacggccgcaaggttaaaactcaaatgaattgacgggggcccgcacaagcggtggagcatgtggtttaattcgacgcaacgcgaagaaccttacctggccttgacatcctgcgaacttggtagagataccttggtgccttcgggagcgcagtgacaggtgctgcatggccgtcgtcagctcgtgtcgtgagatgttgggttaagtcccgtaacgagcgcaacccttatccttagttgccagcggtccggccgggaactctagggagactgccggtgacaaaccggaggaaggtggggatgacgtcaggtcatcatggcccttacggccagggctacacacgtgctacaatggtgcgtacaacaggctgctaacccgcgagggggcgccaatcctgcaaagcgcatcgtagtccggatcggagtctgcaactcgactccgtgaagtcggaatcgctagtaatcgcagatcagaatgctgcggtgaatacgttcccgggccttgtacacaccgcccgtcacaccatgggagtggattgcaccagaagtggttagtctaaccttcggggggacgatcactacggtgtggttcatgactggggtg

SEQ ID NO: 3325 - DNA, 1411 bp, Tanticharoenia sakaeratensis
  source 1..1411: mol_type = unassigned DNA
agcgaacgctggcggcatgcttaacacatgcaagtcgcacggacctttcggggttagtggcggacgggtgagtaacgcgtaggtatctatccatgggtgggggacaactctgggaaactggagctaataccgcatgacacctgagggtcaaaggcgcaagtcgcctgtggaggagcctgcgttcgattagcttgttggtggggtaatggcctaccaaggcgatgatcgatagctggtctgagaggatgatcagccacactgggactgagacacggcccagactcctacgggaggcagcagtggggaatattggacaatgggcgcaagcctgatccagcaatgccgcgtgtgtgaagaaggtcttcggattgtaaagcactttcgacggggacgatgatgacggtacccgtagaagaagccccggctaacttcgtgccagcagccgcggtaatacgaagggggctagcgttgctcggaatgactgggcgtaaagggcgcgtaggcggttgttacagtcagatgtgaaatcccagggcttaaccttggagctgcatttgatacgtgacgactagagttcgagagagggttgtggaattcccagtgtagaggtgaaattcgtagatattgggaagaacaccggtggcgaaggcggcaacctggctcgatactgacgctgaggcgcgaaagcgtggggagcaaacaggattagataccctggtagtccacgctgtaaacgatgtgtgctggatgttggggtgcttagcacttcagtgtcgtagttaacgcgataagcacaccgcctggggagtacggccgcaaggttgaaactcaaaggaattgacgggggcccgcacaagcggtggagcatgtggtttaattcgaagcaacgcgcagaaccttaccagggcttgacatggggaggtcgtgtccagagatgggcatttcccgcaagggacctcctgcacaggtgctgcatggctgtcgtcagctcgtgtcgtgagatgttgggttaagtcccgcaacgagcgcaaccctcgcctttagttgccagcatgtttgggtgggcactctagaggaactgccggtgacaagccggaggaaggtggggatgacgtcaagtcctcatggcccttatgtcctgggctacacacgtgctacaatggcggtgacagtgggaagctatgtggtgacacaatgctgatctctaaaagccgtctcagttcggattgcactctgcaactcgagtgcatgaaggtggaatcgctagtaatcgcggatcagcatgccgcggtgaatacgttcccgggccttgtacacaccgcccgtcacaccatgggagttggttcgaccttaagccggtgagcgaaccgcaaggacgcagccgaccacggtcgggtcagcgactggggtg

SEQ ID NO: 3326 - DNA, 1409 bp, unidentified
  source 1..1409: mol_type = unassigned DNA; note = Tardiphaga robiniae
agcgaacgctggcggcaggcttaacacatgcaagtcgaacgggcgtagcaatacgtcagtggcagacgggtgagtaacgcgtgggaacatacctcttggttcggaacaacacagggaaacttgtgctaataccggataagcccttacggggaaagatttatcgccgagagattggcccgcgtctgattagctagttggtggggtaaaggcctaccaaggcgacgatcagtagctggtctgagaggatgatcagccacattgggactgagacacggcccaaactcctacgggaggcagcagtggggaatattggacaatgggcgcaagcctgatccagccatgccgcgtgagtgatgaaggccctagggttgtaaagctcttttgtacgggaagataatgacggtaccgtaagaataagccccggctaacttcgtgccagcagccgcggtaatacgaagggggctagcgttgctcggaatcactgggcgtaaagggtgcgtaggcgggtttttaagtcagaggtgaaatcctggagctcaactccagaactgcctttgatactgaaagtcttgagtatgggagaggtgagtggaactgcgagtgtagaggtgaaattcgtagatattcgcaagaacaccagtggcgaaggcggctcactggcccataactgacgctgaggcacgaaagcgtggggagcaaacaggattagataccctggtagtccacgccgtaaacgatgaatgccagccgttagtgggtttactcactagtggcgcagctaacgctttaagcattccgcctggggagtacggtcgcaagattaaaactcaaaggaattgacgggggcccgcacaagcggtggagcatgtggtttaattcgacgcaacgcgcagaaccttaccagcccttgacatgtctatgaccggtaccagagatggaactttcccttcggggcatagagcacaggtgctgcatggctgtcgtcagctcgtgtcgtgagatgttgggttaagtcccgcaacgagcgcaacccccgtccttagttgctaccatttagttgagcactctaaggagactgccggtgataagccgcgaggaaggtggggatgacgtcaagtcctcatggcccttacgggctgggctacacacgtgctacaatggcggtgacaatgggatgcaaaagggcgacctctcgcaaatctcaaaaagccgtctcagttcggattgggctctgcaactcgagcccatgaagttggaatcgctagtaatcgtggatcagcatgccacggtgaatacgttcccgggccttgtacacaccgcccgtcacaccatgggagttggttctacctgaaggcagtgcgctaaccgcaagggggcagctgaccacggtagggtcagcgactggggtg

SEQ ID NO: 3327 - DNA, 1474 bp, Tatlockia micdadei
  source 1..1474: mol_type = unassigned DNA
  misc_difference 5: note = n is a, c, g, or t
  misc_difference 12..14: note = n is a, c, g, or t
  misc_difference 29..30: note = n is a, c, g, or t
  misc_difference 37: note = n is a, c, g, or t
  misc_difference 48: note = n is a, c, g, or t
  misc_difference 80: note = n is a, c, g, or t
  misc_difference 82..88: note = n is a, c, g, or t
  misc_difference 117: note = n is a, c, g, or t
  misc_difference 130: note = n is a, c, g, or t
  misc_difference 136..137: note = n is a, c, g, or t
  misc_difference 163: note = n is a, c, g, or t
  misc_difference 169: note = n is a, c, g, or t
  misc_difference 176: note = n is a, c, g, or t
  misc_difference 179: note = n is a, c, g, or t
  misc_difference 222..224: note = n is a, c, g, or t
  misc_difference 229: note = n is a, c, g, or t
  misc_difference 249: note = n is a, c, g, or t
  misc_difference 304: note = n is a, c, g, or t
  misc_difference 335: note = n is a, c, g, or t
  misc_difference 420: note = n is a, c, g, or t
  misc_difference 426: note = n is a, c, g, or t
  misc_difference 452: note = n is a, c, g, or t
  misc_difference 479: note = n is a, c, g, or t
  misc_difference 508: note = n is a, c, g, or t
  misc_difference 552: note = n is a, c, g, or t
  misc_difference 571: note = n is a, c, g, or t
  misc_difference 589..591: note = n is a, c, g, or t
  misc_difference 598: note = n is a, c, g, or t
  misc_difference 625: note = n is a, c, g, or t
  misc_difference 652..653: note = n is a, c, g, or t
  misc_difference 828: note = n is a, c, g, or t
  misc_difference 886: note = n is a, c, g, or t
  misc_difference 945: note = n is a, c, g, or t
  misc_difference 957..959: note = n is a, c, g, or t
  misc_difference 983: note = n is a, c, g, or t
  misc_difference 993: note = n is a, c, g, or t
  misc_difference 1042: note = n is a, c, g, or t
  misc_difference 1092: note = n is a, c, g, or t
  misc_difference 1117: note = n is a, c, g, or t
  misc_difference 1213: note = n is a, c, g, or t
  misc_difference 1276: note = n is a, c, g, or t
  misc_difference 1287: note = n is a, c, g, or t
  misc_difference 1296: note = n is a, c, g, or t
  misc_difference 1302: note = n is a, c, g, or t
aactnaagagtnnnatcctggctcagatnnaacgctngcggcatgctnaacacatgcaagtcgaacggcagcacggtctngnnnnnnnatgggtgacgagtggcgaacgggtgagtnacgcgtaggaatntgcctnnaagtgtgggataacttggggaaactnaagctnataccgnatnagctctaaggaggaaagctggggaccgcgaggcctgcgcgctnnnagatnagcctgcgtccgattagctngttggtgggggaagggcctaccaaggcgacgatcggtagctggtctgagaggatnatcagccacactgggactgagacacggcccngtctcctacgggaggcagcagtggggaatattggacaatggggggaaccctratccagcaatgccgcgtgtgtgaagaaggcctnagggtngtaaagcactttcagtggggaggagngrtgataggttaagagctaattatctngacgttacccacagaagaagcaccggctnactccgtgccagcagccgcggtaatacggagggtgcgagcgttnatcggaattactgggcgtnaagggtgcgtaggtggtnnnataagtnatctgtgaaattcctgggctcaacctngggtggtcagataagactgtgagactnngagtataggagagggtagtggaatttccggtgtagcggtgaaatgcgtagagatcggaaggaacaccagtggcgaaggcggctacctggcctaatactgacactgaggcacgaaagcgtggggagcaaacaggattagataccctggtagtccacgctgtaaacgatgtcaactngttgttggccttatgaatgaggttagtgacgaagcaaacgcgataagttgaccgcctngggagtacggtcgcaagatyaaaactcaaaggaattgacgggggcccgcacaagcggtngagcatgtggtnnnattcgatgcaacgcgaagaacctnacctaccctngacatacagtgaattctgcagagatgtggaagtgccgcgaggagcactnatacaggtgctgcatggctgtcgtcagctcgtgtcgtgagatgttgggtnaagtcccgtaacgagcgcaaccctngtycttagttgccagcgcgtagatggyggggactctaaggagactgccggtgacaaaccggaggaaggcggggatgacgtcaagtcatcatggccnttacgggtagggctacacacgtgctacaatggccggtacagagggcggcgaaggggagacctngagcaaatctntgaaagctngtcgtngtccggattgaagtctgcaactcgactkcatgaagtcggaatcgctagtaatcgcgaatcagcatgtcgcggtgaatacgttcccgggccttgtacacaccgcccgtcacaccatgggagtgggttgcaccagaagtagatagtctaaccaatgggggacgtataccacggt

SEQ ID NO: 3328 - DNA, 1464 bp, Tatumella citrea
  source 1..1464: mol_type = unassigned DNA
attgaacgctggcggcaggcctaacacatgcaagtcgaacggtagcacagaggagcttgctccttgggtgacgagtggcggacgggtgagtaatgtctgggaaactgcctgatggagggggataactactggaaacggtagctaataccgcataacgtcgcaagaccaaagtgggggaccttcgggcctcacaccatcggatgtgcccagatgggattagctagtaggtggggtaacggctcacctaggcgacgatccctagctggtctgagaggatgaccagccacactggaactgagacacggtccagactcctacgggaggcagcagtggggaatattgcacaatgggcgcaagcctgatgcagccatgccgcgtgtatgaagaaggccttcgggttgtaaagtactttcagtcaggaggaagggtgtagtcttaatacggctatgcattgacgttactgacagaagaagcaccggctaactccgtgccagcagccgcggtaatacggagggtgcaagcgttaatcggaattactgggcgtaaagcgcacgcaggcggtctgtcaagtcggatgtgaaatccccgggctcaacccgggaactgcattcgaaactggcaggctagagtcttgtagaggggggtagaattccaggtgtagcggtgaaatgcgtagagatctggaggaataccggtggcgaaggcggccccctggacaaagactgacgctcaggtgcgaaagcgtggggagcaaacaggattagataccctggtagtccacgccgtaaacgatgtcgacttggaggttgtgcccttgaggcgtggcttccggagctaacgcgttaagtcgaccgcctggggagtacggccgcaaggttaaaactcaaatgaattgacgggggcccgcacaagcggtggagcatgtggtttaattcgatgcaacgcgaagaaccttacctactcttgacatccagagaacttagcagagatgctttggtgccttcgggaactctgagacaggtgctgcatggctgtcgtcagctcgtgttgtgaaatgttgggttaagtcccgcaacgagcgcaacccctatcctttgttgccagcgattcggtcgggaactcaaaggagactgccggtgataaaccggaggaaggtggggatgacgtcaagtcatcatggcccttacgagtagggctacacacgtgctacaatggcgcatacaaagagaagcgacctcgcgagagcaagcggacctcataaagtgcgtcgtagtccggattggagtctgcaactcgactccatgaagtcggaatcgctagtaatcgtagatcagaatgctacggtgaatacgttcccgggccttgtacacaccgcccgtcacaccatgggagtgggttgcaaaagaagtagatagcttaaccttcgggagggcgtttaccactttgtgattcatgactggggtg

SEQ ID NO: 3329 - DNA, 1462 bp, Tatumella morbirosei
  source 1..1462: mol_type = unassigned DNA
attgaacgctggcggcaggcctaacacatgcaagtcgaacggcagcacagagagcttgctctcgggtggcgagtggcggacgggtgagtaatgtctgggaaactgcctgatggagggggataactactggaaacggtagctaataccgcataatgtcgcaagaccaaagtgggggaccttcgggcctcacaccatcggatgtgcccagatgggattagctagcaggtagggtaacggcctacctgggcgacgatccctagctggtctgagaggatgaccagccacactggaactgagacacggtccagactcctacgggaggcagcagtggggaatattgcacaatgggcgcaagcctgatgcagccatgccgcgtgtatgaagaaggccttcgggttgtaaagtactttcagcgaggaggaaggcattgcggttaataaccgcagtgattgacgttactcgcagaagaagcaccggctaactccgtgccagcagccgcggtaatacggagggtgcaagcgttaatcggaattactgggcgtaaagcgcacgcaggcggtctgtcaagtcggatgtgaaatccccgggctcaacccgggaactgcattcgaaactggcagactagagtcttgtagaggggggtagaattccaggtgtagcggtgaaatgcgtagagatctggaggaataccggtggcgaaggcggccccctggacaaagactgacgctcaggtgcgaaagcgtggggagcaaacaggattagataccctggtagtccacgccgtaaacgatgtcgacttggaggttgtgcccttgaggcgtggcttccggagctaacgcgttaagtcgaccgcctggggagtacggccgcaaggttaaaactcaaatgaattgacgggggcccgcacaagcggtggagcatgtggtttaattcgatgcaacgcgaagaaccttacctactcttgacatccagagaacttggcagagatgccctggtgccttcgggaactctgagacaggtgctgcatggctgtcgtcagctcgtgttgtgaaatgttgggttaagtcccgcaacgagcgcaacccctatcctttgttgccagcgattcggtcgggaactcaaaggagactgccggtgataaaccggaggaaggtggggatgacgtcaagtcatcatggcccttacgagtagggctacacacgtgctacaatggcgcatacaaagagaagcgacctcgcgagagcaagcggacctcataaagtgcgtcgtagtccggatcggagtctgcaactcgactccgtgaagtcggaatcgctagtaatcgtagatcagaatgctacggtgaatacgttcccgggccttgtacacaccgcccgtcacaccatgggagtgggttgcaaaagaagtagatagcttaaccttcgggagggcgtttaccactttgtgattcatgactggggtg

SEQ ID NO: 3330 - DNA, 1463 bp, Tatumella ptyseos
  source 1..1463: mol_type = unassigned DNA
attgaacgctggcggcaggcctaacacatgcaagtcgaacggtagcacagaggagcttgctccttgggtgacgagtggcggacgggtgagtaatgtctgggaaactgcctgatggagggggataactactggaaacggtagctaataccgcataatgtcgcaagaccaaagcgggggaccttcgggcctcgcaccatcggatgtgcccagatgggattagcttgtaggtgaggtaatggctcacctaggcgacgatccctagctggtctgagaggatgaccagccacactggaactgagacacggtccagactcctacgggaggcagcagtggggaatattgcacaatgggcgcaagcctgatgcagccatgccgcgtgtatgaagaaggccttcgggttgtaaagtactttcagcggggaggaaggcagtcgtgttaatagcacgattgattgacgttacccgcagaagaagcaccggctaactccgtgccagcagccgcggtaatacggagggtgcaagcgttaatcggaattactgggcgtaaagcgcacgcaggcggtctgtcaagtcggatgtgaaatccccgggctcaacccgggaactgcattcgaaactggcagactagagtcttgtagaggggggtagaattccaggtgtagcggtgaaatgcgtagagatctggaggaataccggtggcgaaggcggccccctggacaaagactgacgctcaggtgcgaaagcgtggggagcaaacaggattagataccctggtagtccacgccgtaaacgatgtcgacttggaggctgttcccttgaggagtggcttccggagctaacgcgttaagtcgaccgcctggggagtacggccgcaaggttaaaactcaaatgaattgacgggggcccgcacaagcggtggagcatgtggtttaattcgatgcaacgcgaagaaccttacctactcttgacatccagagaacttccagagatggattggtgccttcgggaactctgagacaggtgctgcatggctgtcgtcagctcgtgttgtgaaatgttgggttaagtcccgcaacgagcgcaacccctatcctttgttgccagcgattcggtcgggaactcaaaggagactgccggtgataaaccggaggaaggtggggatgacgtcaagtcatcatggcccttacgagtagggctacacacgtgctacaatggcgcatacaaagagaagcgacctcgcgagagcaagcggacctcataaagtgcgtcgtagtccggattggagtctgcaactcgactccatgaagtcggaatcgctagtaatcgtagatcagaatgctacggtgaatacgttcccgggccttgtacacaccgcccgtcacaccatgggagtgggttgcaaaagaagtagatagcttaaccttcgggagggcgtttaccactttgtgattcatgactggggtg

SEQ ID NO: 3331 - DNA, 1465 bp, Taylorella asinigenitalis
  source 1..1465: mol_type = unassigned DNA
attgaacgctagcggaatgccttacacatgcaagtcgaacggcagcatagggaagcttgctttcctgatggcgagtggcgaacgggtgagtaaagtatcggaacgtgcccagtagcgggggataactacgcgaaagcgtagctaataccgcatacgccctgagggggaaagagggggatcagcgatgaccttttactattggagcggccgatatcggattagttagttggtggggtaaaggcctaccaaggcatcgatccgtagctggtttgagaggacgaccagccacactgggactgagacacggcccagactcctacgggaggcagcagtggggaattttggacaatgggggcaaccctgatccagccattccgcgtgtgcgatgaaggccttcgggttgtaaagcacttttgtcagggaagaaaagttttaggataataccctaggatgctgacggtacctgaagaataagcaccggcaaactacgtgccagcagccgcggtaatacgtagggtgcgagcgttaatcggaattactgggcgtaaagcgtgcgcaggcggttcggaaagagagatgtgaaatcccagggctcaaccttggaactgcatttttaactgccgagctagagtatgttagaggggggtagaattccacgtgtagcagtgaaatgcgtagagatgtggaggaataccgatggcgaaggcagccccctgggataatactgacgctcatgcacgaaagcgtggggagcaaacaggattagataccctggtagtccacgccctaaacgatgtcaactagctgttgggaccttaaatggttttggtagcgaagccaacgcgtgaagttgaccgcctggggagtacggtcgcaagattaaaactcaaaggaattgacggggacccgcacaagcggtggatgatgtggattaattcgatgcaacgcgaaaaaccttacctacccttgacatgtttggaatcctgaagagatttaggagtgctcgcaagagaaccgaaacacaggtgctgcatggctgtcgtcagctcgtgtcgtgagatgttgggttaagtcccgcaacgagcgcaacccttgtcattagttgctacgtaaaagggcactctaatgagactgccggtgataaaccggaggaaggtggggatgacgtcaagtcctcatggcccttatgggtagggcttcacacgtcatacaatggtcaggacagagggatgcgaagccgcgaggtggagctaatctcacaaacctggtcgtagtccggattgcaggctgcaactcgcctgcatgaagtcggaatcgctagtaatcgcggatcagcatgtcgcggtgaatacgttcccgggtcttgtacacaccgcccgtcacaccatgggagtgggttttaccagaagtagttagtctaaccgcaaggggggcgattaccacggtaggattcatgactggggtg

SEQ ID NO: 3332 - DNA, 1468 bp, Taylorella equigenitalis
  source 1..1468: mol_type = unassigned DNA
attgaacgctagcggaatgccttacacatgcaagtcgaacggcagcataaggagagcttgcttttcttgatggcgagtggcgaacgggtgagtaaagtatcggaacgtgcccagtagcgggggataactacgcgaaagcgtagctaataccgcatacgccctgagggggaaagagggggatcagagatgaccttttactattggagcggccgatatcggattagctagttggtggggtaaaggcctaccaaggcgacgatccgtagctggtttgagaggacgaccagccacactgggactgagacacggcccagactcctacgggaggcagcagtggggaattttggacaatgggggcaaccctgatccagccattccgcgtgtgcgatgaaggccttcgggttgtaaagcacttttgtcagggaagaaaaggtttgtgttaataccatggactgctgacggtacctgaagaataagcaccggcaaactacgtgccagcagccgcggtaatacgtagggtgcgagcgttaatcggaattactgggcgtaaagcgtgcgcaggcggttcggaaagagagatgtgaaatcccagggctcaaccttggaactgcatttctaactgtcgagctagagtatgttagaggggggtagaattccacgtgtagcagtgaaatgcgtagagatgtggaggaataccgatggcgaaggcagccccctgggataatactgacgctgatgcacgaaagcgtggggagcaaacaggattagataccctggtagtccacgccctaaacgatgtcaactagctgttgggacttacgggtcttggtagcgaagccaacgcgtgaagttgaccgcctggggagtacggtcgcaagattaaaactcaaaggaattgacggggacccgcacaagcggtggatgatgtggattaattcgatgcaacgcgaaaaaccttacctacccttgacatgtttggaatcctgaagagatttaggagtgctcgcaagagaaccgaaacacaggtgctgcatggctgtcgtcagctcgtgtcgtgagatgttgggttaagtcccgcaacgagcgcaacccttgtcattagttgctacaagtaagatgggcactctaatgagactgccggtgataaaccggaggaaggtggggatgacgtcaagtcctcatggcccttatgggtagggcttcacacgtcatacaatggtcaggacagagggaagccaaaccgcgaggtggagctaatctcacaaacctgatcgtagtccggattgcaggctgcaactcgcctgcatgaagtcggaatcgctagtaatcgcggatcagcatgtcgcggtgaatacgttcccgggtcttgtacacaccgcccgtcacaccatgggagtgggttttaccagaagtagttagtctaaccgcaaggagggcgattaccacggtaggattcatgactggggtg

SEQ ID NO: 3333 - DNA, 1324 bp, Telmatospirillum siberiense
  source 1..1324: mol_type = unassigned DNA
aacgaacgctggcggcatgcctaacacatgcaagtcgaacgaaggcttcggccttagtggcgcacgggtgagtaacgcgtgggaatctgcctagcagtggggaataacgatgggaaactgtcgctaataccgcatacgcccttcgggggaaagatttattgctgttagatgagcccgcgtccgattaggtagttggtggggtaaaggcctaccaagccttcgatcggtagctggtctgagaggatgatcagccacactgggactgagacacggcccagactcctacgggaggcagcagtggggaatattggacaatgggggaaaccctgatccagcaatgccgcgtgagtgatgaaggccttagggttgtaaagctctttcgggtgggacgatgatgacggtaccaccagaagaagccccggctaacttcgtgccagcagccgcggtaatacgaagggggctagcgttgttcggaattactgggcgtaaagcgcacgcaggcggctcgttaaattagaagtgaaagccctgggctcaacccgggaattgcttttaagactggcgagcttgaattcggaagagggcagtggaattccaagtgtagaggtgaaattcgtagatatttggaagaacaccagtggcgaaggcgactgcctggtccgatattgacgctcatgtgcgaaagcgtggggagcaaacaggattagataccctggtagtccacgctgtaaacgatgagtgctagttgttggggtgcatgcacctcagtgacgcagctaacgcattaagcactccgcctggggagtacggccgcaaggttaaaactcaaaggaattgacgggggcccgcacaagcggtggagcatgtggtttaattcgaagcaacgcgcagaaccttaccaacctttgacatgggacgtttgatttccagagatggatttcttcagttcggctggcgtccacacaggtgctgcatggctgtcgtcagctcgtgtcgtgagatgttgggttaagtcccgcaacgagcgcaaccctcatctccagttgccatcagttcggctgggcactctgaagaaactgccggtgacaagccggaggaaggtggggatgacgtcaagtcctcatggcccttacaggttgggctacacacgtgctacaatggcggtgacaatgggttgctaacccgcgagggcaagctaatctccaaaagccgtctcagttcggattgcactctgcaactcgagtgcatgaagtcggaatcgctagtaatcgtggatcagcatgccacggtgaatacgttcccgggccttgtacacaccgcccgt

SEQ ID NO: 3334 - DNA, 1377 bp, Tepidibacter formicigenes
  source 1..1377: mol_type = unassigned DNA
  misc_difference 858: note = n is a, c, g, or t
gagcttgctctttgattctagcggcggacgggtgagtaacgcgtgggtaacctgccctatacacatggataacataccgaaaggtatgctaatacaagataatactaagataaggcatcttattttagtcaaagcgttagcggtataggatggacccgcgtcccattagctagttggtgaggtaacggctcaccaaggccacgatgggtagccgacctgagagggtgatcggccacactggaactgagacacggtccagactcctacgggaggcagcagtggggaatattgcacaatgggggaaaccctgatgcagcaacgccgcgtgagcgatgaaggccttcgggtcgtaaagctctgtcctaagggaagaatactgacggtaccttaggaggaagccccggctaactacgtgccagcagccgcggtaatacgtagggggctagcgttatccggaattactgggcgtaaagggtgcgtaggcggcccttcaagtcagaggtgaaaggctacggctcaaccgtagtaagcctttgaaactgtagggcttgagtgcaggagaggagagtggaattcccagtgtagcggtgaaatgcgtagatattgggaggaacaccagttgcgaaggcggctctctggactgtaactgacgctgaggcacgaaagcgtggggagcgaacaggattagataccctggtagtccacgcggtaaacgatgagtgctaggtgtcgggggttacccccctcggtgcggcagctaacgcattaagcactctgcctgggaagtacgctcgcaagagtgaaactcaaaggaattgacggggacccgcacaagcagcggagcatgtggtttaattngaagcaacgcgaagaaccttacctaggcttgacatcccttggaccgcttcttaaccgaagctttcccttttgggactgaggtgacaggtggtgcatggttgtcgtcagctcgtgtcgtgagatgttgggttaagtcccgcaacgagcgcaacccttacctttagttgccagcatttaggatgggcactctagagggactgccgaggataactcggaggaaggtggggatgacgtcaaatcatcatgccccttatgcttagggctacacacgtgctacaatggctagtacagagggttgcgaagtcgcgaggccaagctaatcccttaaagctagtctcagttcggattgcaggctgaaactcgcctgcatgaagctggagttgctagtaatcgcgaatcagaatgtcgcggtgaatgcgttcccgggtcttgtacacaccgcccgtcacaccatgggagtcgggggcgccctaagtcgggtatccaaccattaggaggaacccgccgaaggtgaaatcg

SEQ ID NO: 3335 - DNA, 1402 bp, Tepidibacter thalassicus
  source 1..1402: mol_type = unassigned DNA
cgtgcctaacacatgcaagtcgagcgaggagaaaagagcttgctcttggatcctagcggcggacgggtgagtaacgcgtgggtaacctgccctatacacacggataacataccgaaaggtatgctaatacgggataagctaagataaggcatcttatcatagtcaaagcgaaagcggtataggatgggcccgcgtcccattagctagttggtgaggtaaaagctcaccaaggcgacgatgggtagccgacctgagagggtgatcggccacactggaactgagacacggtccagactcctacgggaggcagcagtggggaatattgcacaatgggggaaaccctgatgcagcaacgccgcgtgagcgaagaaggccttcgggtcgtaaagctctgtcctaagggaagaggattgacggtaccttaggaggaagccccggctaactacgtgccagcagccgcggtaatacgtagggggcaagcgttatccggaattactgggcgtaaagggtgcgtaggcggctgtacaagtcagaggtgaaaggctacggctcaaccgtagtaagcctttgaaactgtacggcttgagtgcaggagaggagagtagaattcccagtgtagcggtgaaatgcgtagatattgggaggaataccagttgcgaaggcggctctctggactgtaactgacgctgaggcacgaaagcgtggggagcgaacaggattagataccctggtagtccacgccgtaaacgatgagtgctaggtgtcgggggttaccccctcggtgccgcagctaacgcattaagcactccgcctggggagtacgctcgcaagagtgaaactcaaaggaattgacggggacccgcacaagcagcggagcatgtggtttaattcgaagcaacgcgaagaaccttacctaggcttgacatccctcggaccgcttcttaatagaagctttcccttatgggactgaggagacaggtggtgcatggttgtcgtcagctcgtgtcgtgagatgttgggttaagtcccgcaacgagcgcaacccttacctttagttgccagcacttagggtgggcactctagagggactgccgaggacaactcggaggaaggtggggatgacgtcaaatcatcatgccccttatgcctagggctacacacgtgctacaatggctagtacagagggaagcgaaactgcgaagtggagcaaatcccttaaagctagtctcagttcggattgcaggctgcaactcgcctgcatgaagctggagttgctagtaatcgcgaatcagcatgtcgcggtgaatgcgttcccgggtcttgtacacaccgcccgtcacaccatgggagtcggaggcacccgaagtcgggaaaccaaccgcaaggagggacccgccgaagg

SEQ ID NO: 3336 - DNA, 1386 bp, unidentified
  source 1..1386: mol_type = unassigned DNA; note = Tepidicaulis marinus
tgcggaggcttacactgcaagtcgaacgcgaacgcaccttcgggtgttagtagagtggcagacgggtgagtaacgcgtgggaacctacctaggggtacggaataacgcagggaaacttgtgctaataccgtatacgtccttcgggagaaagatttatcgcccctagatgggcccgcgttggattagcttgttggtgaggtaatggctcaccaaggctacgatccatagctggtctgagaggatgatcagccacactgggactgagacacggcccagactcctacgggaggcagcagtggggaatcttgcacaatgggcgaaagcctgatgcagccatgccgcgtgagtgaagaaggccctagggttgtaaaactctttcagtggggaagataatgacggtacccacagaagaagctccggctaactccgtgccagcagccgcggtaatacggagggagctagcgttgttcggaattactgggcgtaaagcgcacgtaggcggactgatcagttgggggtgaaagcccagggctcaaccctggaactgccttcaatactgtcagtcttgagtccgagagaggtgagtggaatttccagtgtagaggtgaaattcgtagatattggaaagaacaccagtggcgaaggcggctcactggctcggtactgacgctgaggtgcgaaagtgtggggagcaaacaggattagataccctggtagtccacaccgtaaacgatggatgctagttgtcgggcagcatgctgttcggtgacgcagctaacgcattaagcatcccgcctggggagtacggtcgcaagattaaaactcaaaggaattgacgggggcccgcacaagcggtggagcatgtggtttaattcgaagcaacgcgcagaaccttaccaacccttgacatcccgatcgcggttaccagagatggtttccttcagctcggctggatcggtgacaggtgttgcatggctgtcgtcagctcgtgtcgtgagatgttgggttaagtcccgcaacgagcgcaaccctcgcctttagttgccagcattaagttgggcactctagagggactgccggtgataagccggaggaaggtggggatgacgtcaagtcctcatggcccttacgggttgggctacacacgtgctacaatggcggcgacagagggcagcgataccgcgaggtggagcaaatccctaaaagccgtctcagttcggattgttctctgcaactcgagagcatgaaggtggaatcgctagtaatcgcagaacagcatgctgcggtgaatacgttcccgggccttgtacacaccgcccgtcacatcatgggagttggctttgcccgaaggcggtgcgctaaccagcaatggaagcagccgaccac

SEQ ID NO: 3337 - DNA, 1402 bp, unidentified
  source 1..1402: mol_type = unassigned DNA; note = Tepidiphilus thermophilus
agtcgaacggcagcgggcccttcggggtgccggcgagtggcgaacgggtgagtaatgcatcggaacgtacccgggagagggggataaccggccgaaaggctggctaataccgcatgaactcggaagagcaaagcgggggaccttcgggcctcgcgctctcggagcggccgatgtccgattagctagttggtggggtaaaggcccaccaaggcgacgatcggtagcgggtctgagaggacgatccgccacactgggactgagacacggcccagactcctacgggaggcagcagtggggaatcttggacaatgggcgcaagcctgatccagcaatgccgcgtgggtgaagaaggccttcgggttgtaaagccctttcggtggggaagaaatcggtcaggcgaatagtctggctggatgacggtacccgcagaagaagcaccggctaactacgtgccagcagccgcggtaatacgtagggtgcgagcgttaatcggaattactgggcgtaaagggtgcgcaggcggccctgtaagaccggtgtgaaatccccgggctcaacctgggaattgcgctggtgactgcagggctagagtacggtagaggggggtggaattcctggtgtagcagtgaaatgcgtagagatcagaggaacaccgatggcgaagcagccccctgggcctgtactgacgctcatgcacgaaagcgtggggagcaaacaggattagataccctggtagtgcacgccctaaacgatgagaactagccgtctggagtcttcgtgctctgggtggcgcagctaacgcgtgaagttctccgcctggggagtacggccgcaaggttaaaactcaaaggaattgacggggacccgcacaagcggtggatgatgtggattaattcgatgcaacgcgaagaaccttaccctacccttgacatgccgggaatcctgcccagaggcgggagtgccttcgggaacccggacacaggtgctgcatggctgtcgtcagctcgtgtcgtgagatgttgggttaagtcccgcaacgagcgcaacccctgtcgatagttgccatcatttggttgggcactctatcgagactgccggtgacaaaccggaggaaggtggggatgacgtcaagtcctcatggcccttatgggtagggcttcacacgtcatacaatggtcggtacagagggttgccaagccgcgaggtggagccaatcccagaaagccgatcgtagtccggattgcagtctgcaactcgactgcatgaagtcggaatcgctagtaatcgcggatcagcatgccgcggtgaatacgttcccgggtcttgtacacaccgcccgtcacaccatgggagtggggtgcaccagaagtcggtcgcctaaccgcaaggagggcgccgccca

SEQ ID NO: 3338 - DNA, 1456 bp, unidentified
  source 1..1456: mol_type = unassigned DNA; note = Terasakiispira papahanaumokuakeensis
attgaacgctggcggcaggcctaacacatgcaagtcgagcggaaacgatggaagcttgcttccaggcgtcgagcggcggacgggtgagtaatgcataggaatctgcccggtagtgggggataactcggggaaactcgagctaataccgcatacgtcctacgggagaaagtgggcttttgctcacgctatcggatgagcctatgtcagattagctagttggtggggtaaaggctcaccaaggcgacgatctgtagctggtctgagaggatgatcagccacactgggactgagacacggcccagactcctacgggaggcagcagtggggaatattggacaatgggggcaaccctgatccagccatgccgcgtgtgtgaagaaggctttcgggttgtaaagcactttcagcgaggaggaaagcggtgttgttaataccagcatcgtgtgacgttactcgcagaagaagcaccggcaaactccgtgccagcagccgcggtaatacggagggtgcgagcgttaatcggaattactgggcgtaaagcgtgcgtaggtggttaagtaagccagatgtgaaagccccgggcttaacctgggaacggcatctggaactgcttaactagagtgcagtagaggaaggtagaattccacgtgtagcggtgaaatgcgtagatatgtggaggaataccagtggcgaaggcggccttctggactgacactgacactgaggtacgaaagcgtggggatcaaacaggattagataccctggtagtccacgccgtaaacgatgtctactagccgttgggctccttgagagcttagtggcgcagctaacgcaataagtagaccgcctggggagtacggccgcaaggttaaaactcaaatgaattgacgggggcccgcacaagcggtggagcatgtggtttaattcgatgcaacgcgaagaaccttacctacccttgacatccagagaagtcgctagagatagcttcgtgccttcgggaactctgtgacaggtgctgcatggctgtcgtcagctcgtgttgtgaaatgttgggttaagtcccgtaacgagcgcaacccctatccctatttgctagcagttcggctgagaactctagggagactgccggtgacaaaccggaggaaggtggggacgacgtcaagtcatcatggcccttacgggtagggctacacacgtgctacaatggccggtacaacaggttgctaacccgcgagggggcgctaatccgtaaaaaccggtcgtagtccggattggagtctgcaactcgactccatgaagtcggaatcgctagtaatcgcggatcagaatgccgcggtgaatacgttcccgggccttgtacacaccgcccgtcacaccatgggagttgattgcaccagaagtagctagcttaaccttcgggagggcggttaccacggtgtgattaatgactggggtg

SEQ ID NO: 3339 - DNA, 1453 bp, Teredinibacter turnerae
  source 1..1453: mol_type = unassigned DNA
attgaacgctggcggcaggcctaacacatgcaagtcgagcgtgaaagccttcgggtgagtaaagcggcggacgggtgagtaacgcgtgggaatctgcctgatagtgggggacaacagtcggaaacgactgctaataccgcatacgtcctaagggagaaagtgggggatcttcggacctcacgctatcagatgagcccgcgtcggattagctagtaggtgaggtaatggctcacctaggcgacgatccgtagctggtctgagaggatgatcagccacattgggactgagacacggcccaaactcctacgggaggcagcagtggggaatattgcacaatgggggaaaccctgatgcagccatgccgcgtgtgtgaagaaggccctcgggttgtaaagcactttcagcagtgaggaaaggttgtacgttaatagcgtgcaactgtgacgttaactgcagaagaagcaccggctaactccgtgccagcagccgcggtaatacggagggtgcgagcgttaatcggaattactgggcgtaaagcgcgcgtaggcggttatttaagctagatgtgaaagccctgggctcaacctgggaactgcatttagaactgggtaacttgagtacagcagaggatagtggaatttcaggtgtagcggtgaaatgcgtagagatctgaaggaacatcagtggcgaaggcgactgtctgggctgatactgacgctgaggtgcgaaagcgtggggagcaaacaggattagataccctggtagtccacgccgtaaacgatgtctactagccgttggtctccttgagggattagtggcgcagctaacgcagtaagtagaccgcctggggagtacggtcgcaagattaaaactcaaatgaattgacgggggcccgcacaagcggtggagcatgtggtttaattcgaagcaacgcgaagaaccttaccaggtcttgacatcctagaaacttagcagagatgctttggtgccttcgggaatctagagacaggtgctgcatggctgtcgtcagctcgtgtcgtgagatgttgggttaagtcccgtaacgagcgcaacccttgtccttagttgccatcagttcggctgggaactctaaggagactgccggtgacaaaccggaggaaggtggggacgacgtcaagtcatcatggcccttacgacctgggctacacacgtgctacaatgggctgtacaaagggttgccaagccgcgaggtggagctaatcccataaaacagttcgtagtccggattggagtctgcaactcgactccatgaagtcggaatcgctagtaatcgtaaatcagaatgttacggtgaatacgttcccgggccttgtacacaccgcccgtcacaccatgggagtgggttgcaccagaagtagctagtctaaccttcgggaggacggttaccacggtgtgattcatgactggggtg

SEQ ID NO: 3340 - DNA, 1433 bp, Terribacillus goriensis
  source 1..1433: mol_type = unassigned DNA
atgcaagtcgagcgcaggaaaccagatgaccccttcggggtgattctggtggaatgagcggcggacgggtgagtaacacgtgggcaacctgcctgtaagactgggataacttcgggaaaccggagctaataccggatagtatttcctttctcctgattggaaatggaaagacggtttcggctgtcacttacagatgggcccgcggtgcattagctagttggtggggtaatggcccaccaaggcgacgatgcatagccgacctgagagggtgatcggccacactgggactgagacacggcccagactcctacgggaggcagcagtagggaatcttccgcaatggacgaaagtctgacggagcaacgccgcgtgagcgatgaaggccttcgggtcgtaaagctctgttgttagggaagaacaagtacgagagtaactgctcgtaccttgacggtacctaaccagaaagccccggctaactacgtgccagcagccgcggtaatacgtagggggcaagcgttgtccggaattattgggcgtaaagggctcgtaggcggtttcttaagtctgatgtgaaagcccacagctcaactgtggagggtcattggaaactggggaacttgagtgcagaagargagagtggaattccacgtgtagcggtgaaatgcgtagatatgtggaggaacaccagtggcgaaggcgactctctggtctgtaactgacgctgaggagcgaaagcgtggggagcaaacaggattagataccctggtagtccacgccgtaaacgatgagtgctaggtgttagggggtttccgccccttagtgctgaagttaacgcattaagcactccgcctggggagtacggccgcaaggctgaaactcaaaagaattgacgggggcccgcacaagcggtggagcatgtggtttaattcgaagcaacgcgaagaaccttaccaggtcttgacatccgctgacaatcttggagacaagacgttcccttcggggacagcgtgacaggtggtgcatggttgtcgtcagctcgtgtcgtgagatgttgggttaagtcccgcaacgagcgcaacccttgattctagttgccagcattaagttgggcactctagagtgactgccggtgacaaaccggaggaaggtggggatgacgtcaaatcatcatgccccttatgacctgggctacacacgtgctacaatggatggtacaaagggcagcaaagtcgcgaggctaagcaaatcccataaaaccattctcagttcggattgcaggctgcaactcgcctgcatgaagccggaatcgctagtaatcgcggatcagcatgccgcggtgaatacgttcccgggccttgtacacaccgcccgtcacaccacgagagttggtaacacccgaagtcggtgaggtaaccttttaggagccagccgcc

SEQ ID NO: 3341 - DNA, 1485 bp, Terribacillus saccharophilus
  source 1..1485: mol_type = unassigned DNA
  misc_difference 77: note = n is a, c, g, or t
gacgaacgctggcggcgtgcctaatacatgcaagtcgagcgcaggaaaccagatgaccccttcggggtgattctggnggaatgagcggcggacgggtgagtaacacgtgggcaacctgcctgtaagactgggataacttcgggaaaccggagctaataccggatagtatttcctttctcctgattggaaatggaaagacggtttcggctgtcacttacagatgggcccgcggtgcattagctagttggtggggtaatggcccaccaaggcgacgatgcatagccgacctgagagggtgatcggccacactgggactgagacacggcccagactcctacgggaggcagcagtagggaatcttccgcaatggacgaaagtctgacggagcaacgccgcgtgagcgatgaaggccttcgggtcgtaaagctctgttgttagggaagaacaagtacgagagtaactgctcgtaccttgacggtacctaaccagaaagccccggctaactacgtgccagcagccgcggtaatacgtagggggcaagcgttgtccggaattattgggcgtaaagggctcgtaggcggtttcttaagtctgatgtgaaagcccacagctcaactgtggagggtcattggaaactggggaacttgagtgcagaagaggagagtggaattccacgtgtagcggtgaaatgcgtagatatgtggaggaacaccagtggcgaaggcgactctctggtctgtaactgacgctgaggagcgaaagcgtggggagcaaacaggattagataccctggtagtccacgccgtaaacgatgagtgctaggtgttagggggtttccgccccttagtgctgaagttaacgcattaagcactccgcctggggagtacggccgcaaggctgaaactcaaaagaattgacgggggcccgcacaagcggtggagcatgtggtttaattcgaagcaacgcgaagaaccttaccaggtcttgacatccgctgacaatcttggagacaagacgttcccttcggggacagcgtgacaggtggtgcatggttgtcgtcagctcgtgtcgtgagatgttgggttaagtcccgcaacgagcgcaacccttgattctagttgccagcattaagttgggcactctagagtgactgccggtgacaaaccggaggaaggtggggatgacgtcaaatcatcatgccccttatgacctgggctacacacgtgctacaatggatggtacaaagggcagcaaagtcgcgaggctaagcaaatcccataaaaccattctcagttcggattgcaggctgcaactcgcctgcatgaagccggaatcgctagtaatcgcggatcagcatgccgcggtgaatacgttcccgggccttgtacacaccgcccgtcacaccacgagagttggtaacacccgaagtcggtgaggtaaccttttaggagccagccgccgaaggtgggatcaatgattggggtg

SEQ ID NO: 3342 - DNA, 1422 bp, unidentified
  source 1..1422: mol_type = unassigned DNA; note = Terriglobus albidus
aatcaacgctggcggcgtgcctaacacatgcaagtcgcacgagaaagggtagcaatacctgagtaaagtggcgcacgggtgagtaacacgtgactaacctacctccgagtggggaataacttcgggaaaccgaggctaataccgcataacacttacgagtcaaagcagcaatgcgcttggagagggggtcgcggcagattagctagttggcggggtaatggcccaccaaggcgatgatctgtatccggcctgagagggcgcacggacacactggaactgaaacacggtccagactcctacgggaggcagcagtggggaattttgcgcaatgggggaaaccctgacgcagcaacgccgcgtggaggatgaagtctcttgggacgtaaactcctttcgatcgggacgattatgacggtaccggaagaagaagccccggctaacttcgtgccagcagccgcggtaatacgaggggggcaagcgttgttcggaattattgggcgtaaagggcgcgtaggcggtttggcaagtctagtgtgaaatcttcgggctcaactcgaagtctgcactggaaactgccgggcttgagtatgggagaggtgagtggaatttccggtgtagcggtgaaatgcgtagatatcggaaggaacacctgtggcgaaagcggctcactggaccataactgacgctgaggcgcgaaagctaggggagcaaacaggattagataccctggtagtcctagccctaaacgatgattgcttggtgtgtcgggtacccaatcccgtcgtgccgaagctaacgcgataagcaatccgcctggggagtacggtcgcaaggctgaaactcaaaggaattgacgggggcccgcacaagcggtggagcatgtggtttaattcgacgcaacgcgaagaaccttacctgggctcgaaatgtagaggaattcggtagaaatatcggcgcctagcaataggcctctatataggtgctgcatggctgtcgtcagctcgtgtcgtgagatgttgggttaagtcccgcaacgagcgcaacccttatctccagttgctaccatttagttgagcactctggcgaaaccgcctcggataacggggaggaaggtggggatgacgtcaagtcctcatggcctttatgtccagggctacacacgtgctacaatggccggtacaaaccgtcgcgaacccgtgagggggagccaatcggaaaaagccggcctcagttcggattgaagtctgcaactcgacttcatgaagctggaatcgctagtaatcgcagatcagaacgctgcggtgaatacgttcccgggccttgtacacaccgcccgtcacatcacgaaagtgggttgcactagaagtcggtgagctaaccgcaagggagcagccgcccaaggtgtaattcatgattggggtg

SEQ ID NO: 3343 - DNA, 1424 bp, Terriglobus roseus
  source 1..1424: mol_type = unassigned DNA
aatcaacgctggcggcgtgcctaacacatgcaagtcgcacgagaaagggacttcggtcctgagtaaagtggcgcacgggtgagtaacacgtgactaatctacctccgagtggggaataactgagggaaaccttagctaataccgcataacacttacgagtcaaagcagcaatgcgcttggagaggaggtcgcggcagattagctagttggcggggtaatggcccaccaaggcaatgatctgtatccggcctgagagggcgcacggacacactggaactgaaacacggtccagactcctacgggaggcagcagtggggaattttgcgcaatgggggaaaccctgacgcagcaacgccgcgtggaggatgaagtctcttgggacgtaaactcctttcgatagggaagataatgacggtacctatagaagaagccccggctaacttcgtgccagcagccgcggtaatacgaggggggcaagcgttgttcggaattattgggcgtaaagggcgcgtaggcggtttggcaagtttcgtgtgaaatcttcgggctcaactcgaagtctgcacggaaaactgccgggcttgagtatgggagaggtgagtggaatttccggtgtagcggtgaaatgcgtagatatcggaaggaacacctgtggcgaaagcggctcactggaccattactgacgctgaggcgcgaaagctaggggagcaaacaggattagataccctggtagtcctagccctaaacgatgattgtttgatgtggcaggtacccaatcctgccgtgtcgaagctaacgcgataaacaatccgcctggggagtacggtcgcaaggctgaaactcaaaggaattgacgggggcccgcacaagcggtggagcatgtggtttaattcgacgcaacgcgaagaaccttacctgggctcgaaatgtaccggaatccggcagaaacgtcggcgtctagcaatagaccggtatataggtgctgcatggctgtcgtcagctcgtgtcgtgagatgttgggttaagtcccgcaacgagcgcaacccttatctctagttgctaccatttagttgagcactctagcgaaaccgcctcggataacggggaggaaggtggggatgacgtcaagtcctcatggcctttatgtccagggctacacacgtgctacaatggccggtacaaaccgctgcgaacccgcgagggggagccaatcggaaaaagccggcctcagttcggattggagtctgcaactcgactccatgaagctggaatcgctagtaatcgcagatcagaacgctgcggtgaatacgttcccgggccttgtacacaccgcccgtcacatcacgaaagtgggtcgtactagaagtcggtgcgctaactcgcaagaggagcagccgcccaaggtataattcatgattggggtg

SEQ ID NO: 3344 - DNA, 1422 bp, Terriglobus saanensis
  source 1..1422: mol_type = unassigned DNA
aatcaacgctggcggcgtgcctaacacatgcaagtcgcacgagaaagggacttcggtcctgagtaaagtggcgtacgggtgagtaacacgtgactaacctacctccgagtggggaataacctagggaaacctgggctaataccgcataacacttacgagtcaaagcagcaatgcgcttggagagggggtcgcggcagattagctagttggcggggtaatggcccaccaaggcaatgatctgtatccggcctgagagggcgcacggacacactggaactgaaacacggtccagactcctacgggaggcagcagtggggaattttgcgcaatgggggaaaccctgacgcagcaacgccgcgtggaggatgaagtatcttggtacgtaaactcctttcgatggggaagataatgacggtacccatagaagaagccccggctaacttcgtgccagcagccgcggtaatacgaggggggcaagcgttgttcggatttattgggcgtaaagggtgcgtaggcggtttggcaagtttggtgtgaaatcttcgggctcaactcgaagtctgcatcaaaaactgccgggcttgagtatgggagaggtgagtggaatttccggtgtagcggtgaaatgcgtagatatcggaaggaacacctgtggcgaaagcggctcactggaccataactgacgctgaggcacgaaagctaggggagcaaacaggattagataccctggtagtcctagccctaaacgatgattgcttggtgtggcaggtacccaatcctgccgtgccgaagctaacgcgataagcaatccgcctggggagtacggtcgcaaggctgaaactcaaaggaattgacgggggcccgcacaagcggtggagcatgtggtttaattcgacgcaacgcgaagaaccttacctgggctcgaaatgtagtggaatccggcagaaacgtcggcgtctagcaatagactgctatataggtgctgcatggctgtcgtcagctcgtgtcgtgagatgttgggttaagtcccgcaacgagcgcaacccttatctccagttgctaccattcagttgagcactctggcgagaccgcttcggataacggagaggaaggcggggatgacgtcaagtcctcatggcctttatgtccagggctacacacgtgctacaatggccggtacaaaccgctgcgaacccgcgagggggagccaatcggaaaaagccggcctcagttcggattggagtctgcaactcgactccatgaagctggaatcgctagtaatcgcagatcagaacgctgcggtgaatacgttcccgggccttgtacacaccgcccgtcacatcacgaaagtgggttgcactagaagtcggtgcgctaaccgcaagggagcagccgcccaaggtgtaattcatgattggggtg

SEQ ID NO: 3345 - DNA, 1344 bp, unidentified
  source 1..1344: mol_type = unassigned DNA; note = Testudinibacter aquarius
attgaacgctggcggcaggcttaacacatgcaagtcgagcggtaacgggggagagcttgctctcttgccgacgagcggcggacgggtgagtaatgcttggggatctggcttgtggagggggataaccacgggaaactgtggctaataccgcgtagtatcgagagatgaaagggtgggactttcgggccacctgccatgagatgaacccaagtgagattaggtagttggtgaggtaaaggctcaccaagccgtcgatctctaactggtctgagaggatgaccagtcacactgggactgagacacggcccagactcctacgggaggcagcagtggggaatattgcgcaatggggggaaccctgacgcagccatgccgcgtgaatgaagaaggccttcgggttgtaaagttctttcggtgatgaggaaggtggatgttttaatagggcattcaattgacgttattcacagaagaagcaccggctaactccgtgccagcagccgcggtaatacggagggtgcgagcgttaatcggaataactgggcgtaaagggcacgcaggcggttacttgagtgagatgtgaaatccccgagcttaacttgggaattgcatttcatactgggtagctagagttttgtagagaggggtagaattccacgtgtagcggtgaaatgcgtagagatgtggaggaataccggaggcgaaggcggccccttggacaaagactgacgctcatgtgcgaaagcgtggggagcaaacaggattagataccctggtagtccacgctgtaaacgatgtcgatttgggggttgggtgtaaacctggctctcgcagctaacgcgttaaatcgaccgcctggggagtacggccgcaaggttaaaactcaaatgaattgacgggggcccgcacaagcggtggagcatgtggtttaattcgatgcaacgcgaagaaccttacctactcttaaaaagacatccagagaatctgctagagatagcggagtgccttcgggagctctgagacaggtgctgcatggctgtcgtcagctcgtgttgtgaaatgttgggttaagtcccgcaacgagcgcaacccctatcctttgtatattgccatcattaagttgggaactcaaaggagactgccggtgacaaaccggaggaaggtggggatgacgtcaagtcatcatggcccttacgagtagggctacacacgtgctacaatggcgtatacagagggaggcgagccagcgatggtgagcgaatctcttaaagtgcgtcgtagtccggattggagtctgcaactcgactccatgaagtcggaatcgctagtaatcgcaaatcagaatgt

SEQ ID NO: 3346 - DNA, 1489 bp, Thalassobacillus cyri
  source 1..1489: mol_type = unassigned DNA
gacgaacgctggcggcgtgcctaatacatgcaagtcgagcgcgggaagcaagcggatccccttcgggggtgacgcttgtggaacgagcggcggacgggtgagtaacacgtgggcaacctgcctgtaagactgggataaccccgggaaaccggggctaataccggataacaccggactccacatggagtcgggttgaaagatggcttcttgctatcacttacagatgggcccgcggcgcattagctagttggtgaggtaacggctcaccaaggcgacgatgcgtagccgacctgagagggtgatcggccacactgggactgagacacggcccagactcctacgggaggcagcagtagggaatcttccgcaatggacgaaagtctgacggagcaacgccgcgtgaacgatgaaggtcttcggatcgtaaagttctgttgtcagggaagaacaagtgccgtgcgaatagagcggcaccttgacggtacctgacgaggaagccccggctaactacgtgccagcagccgcggtaatacgtagggggcaagcgttgtccggaattattgggcgtaaagcgcgcgcaggcggtttcttaagtctgatgtgaaagcccacggctcaaccgtggagggtcattggaaactggggaacttgagtacagaagaggagagtggaattccacgtgtagcggtgaaatgcgtagatatgtggaggaacaccagtggcgaaggcgactctctggtctgtaactgacgctgaggcgcgaaagcgtggggagcaaacaggattagataccctggtagtccacgccgtaaacgatgagtgctaggtgttagggggcttccaccccttagtgctgaagttaacgcattaagcactccgcctggggagtacggccgcaaggctgaaactcaaaggaattgacgggggcccgcacaagcggtggagcatgtggtttaattcgaagcaacgcgaagaaccttaccaggtcttgacatcttcggacaaccctggagacagggcgttcccttcggggaccgaatgacaggtggtgcatggttgtcgtcagctcgtgtcgtgagatgttgggttaagtcccgcaacgagcgcaacccctgaccttagttgccagcattcagttgggcactctaaggtgactgccggtgacaaaccggaggaaggcggggatgacgtcaaatcatcatgccccttatgacctgggctacacacgtgctacaatggatggtacaaagggcagcgaagccgcgaggtgtagcaaatcccataaaaccattctcagttcggattgcaggctgcaactcgcctgcatgaagccggaatcgctagtaatcgcggatcagcatgccgcggtgaatacgttcccgggccttgtacacaccgcccgtcacaccacgagagttggcaacacccgaagtcggtgaggtaacctttatggagccagccgccgaaggtggggccaatgattggggtg

SEQ ID NO: 3347 - DNA, 1383 bp, Thalassococcus halodurans
  source 1..1383: mol_type = unassigned DNA
aacgaacgctggcggcaggcctaacacatgcaagtcgagcgcaccttcgggtgagcggcggacgggttagtaacgcgtgggaacgtacccttttctaaggaatagccactggaaacggtgagtaataccttatacgcccttcgggggaaagatttatcggagaaggatcggcccgcgttagattagatagttggtggggtaacggcctaccaagtctacgatctatagctggttttagaggatgatcagcaacactgggactgagacacggcccagactcctacgggaggcagcagtggggaatcttggacaatgggcgcaagcctgatccagccatgccgcgtgagtgatgaaggccttagggtcgtaaagctctttcgctggggatgataatgacagtacccagtaaagaaaccccggctaactccgtgccagcagccgcggtaatacggagggggttagcgttgttcggaattactgggcgtaaagcgcgcgtaggcggattggaaagttgggggtgaaatcccggggctcaacctcggaactgcctccaaaactatcagtctagagttcgagagaggtgagtggaattccgagtgtagaggtgaaattcgtagatattcggaggaacaccagtggcgaaggcggctcactggctcgatactgacgctgaggtgcgaaagtgtggggagcaaacaggattagataccctggtagtccacaccgtaaacgatgaatgccagtcgtcagcaagcatgcttgttggtgacacacctaacggattaagcattccgcctggggagtacggtcgcaagattaaaactcaaaggaattgacgggggcccgcacaagcggtggagcatgtggtttaattcgaagcaacgcgcagaaccttaccaacccttgacatcctgtgctacatccagagatggatggttcccttcggggacgcagtgacaggtgctgcatggctgtcgtcagctcgtgtcgtgagatgttcggttaagtccggcaacgagcgcaacccacatcttcagttgccagcagttcggctgggcactctggagaaactgcccgtgataagcgggaggaaggtgtggatgacgtcaagtcctcatggcccttacgggttgggctacacacgtgctacaatggcagtgacaatgggttaatccccaaaaactgtctcagttcggattgttctctgcaactcgagagcatgaagtcggaatcgctagtaatcgcgtaacagcatgacgcggtgaatacgttcccgggccttgtacacaccgcccgtcacaccatgggagttgggtttacccgaagacggtgcgccaaccttttaggaggcagctggccacggtaagctcagcgactggggtg

SEQ ID NO: 3348 - DNA, 1461 bp, Thalassolituus oleivorans
  source 1..1461: mol_type = unassigned DNA
attgaacgctggcggcaggcttaacacatgcaagtcgagcggtagcacagagagcttgctctcgggtgacaagcggcggacgggtgagtaacgcgtaggaatctacctagtagtgggggacaacagttggaaacgactgctaataccgcatacgccctaagggggaaagcgggggatcttcggacctcgtgctattagatgagcctgcgtgagattagctagttggtgaggtaaaggctcaccaaggcgacgatctctagctggtctgagaggatgatcagccacactgggactgagacacggcccagactcctacgggaggcagcagtggggaatattggacaatgggcgcaagcctgatccagccatgccgcgtgtgtgaagaaggccttcgggttgtaaagcactttcagaagggaggaaaggttgtgtgttaatagcacatagctgtgacgttaccttcagaagaagcaccggctaactccgtgccagcagccgcggtaatacggagggtgcaagcgttaatcggaattactgggcgtaaagcgcgcgtaggttgtttgttaagcgagatgtgaaagccccgggcttaacctgggaactgcatttcgaactggcaagctagagtacagtagagggtagtggaatttcctgtgtagcggtgaaatgcgtagagatgggaaggaacatcagtggcgaaggcgactgcctggactgatactgacactgaggtgcgaaagcgtggggagcaaacaggattagataccctggtagtccacgccgtaaacgatgtctactagttgtcgggagacttgatctcttggtaacgaagctaacgcgataagtagaccgcctggggagtacggccgcaaggttaaaactcaaatgaattgacgggggcccgcacaagcggtggagcatgtggtttaattcgaagcaacgcgaagaaccttacctactcttgacatccagtgaacttagcagagatgctttggtgccttcgggaacactgagacaggtgctgcatggctgtcgtcagctcgtgttgtgaaatgttgggttaagtcccgtaacgagcgcaacccttgtccttagttaccatcattaagttggggactctaaggagactgccggtgacaaaccggaggaaggcggggacgacgtcaagtcatcatggcccttacgagtagggctacacacgtgctacaatggccagtacagagggttgcaatgccgcgaggtggagctaatcccacaaagctggtcgtagtccggattggagtctgcaactcgactccatgaagtcggaatcgctagtaatcgtgaatcagaatgtcacggtgaatacgttcccgggccttgtacacaccgcccgtcacaccatgggagtgggttgctccagaagtagatagcctaaccttcgggagggcgtttaccacggagtgattcatgactggggtg

SEQ ID NO: 3349 - DNA, 1462 bp, Thalassomonas actiniarum
  source 1..1462: mol_type = unassigned DNA
attgaacgctggcggcaggcttaacacatgcaagtcgagcggaaacgagaagtacttgtacttcggcgtcgagcggcggacgggtgagtaatgcttgggaatatgccttatggtgggggacaacagttggaaacgactgctaataccgcataatgtctacggaccaaagcgggggaccttcgggcctcgtgccatttgattagcccaagtgagattagctagttggtaaggtaatggcttaccaaggcgacgatctctagctggtttgagaggatgatcagccacactgggactgagacacggcccagactcctacgggaggcagcagtggggaatattgcacaatgggcgaaagcctgatgcagccatgccgcgtgtgtgaagaaggccttcgggttgtaaagcactttcagttgtgaggaaaggggtgtagttaataactgcatcctgtgacgttagcaacagaagaagcaccggctaactccgtgccagcagccgcggtaatacggagggtgcgagcgttaatcggaattactgggcgtaaagcgtgcgtaggcggtttgttaagcaagatgtgaaagccccgggctcaacctgggaactgcattttgaactggcaggctagagttttgtagagggtggtggaatttccagtgtagcggtgaaatgcgtagagattggaaggaacatcagtggcgaaggcggccacctggacaaaaactgacgctgaggcacgaaagcgtggggagcaaacaggattagataccctggtagtccacgccgtaaacgatgtcaactagccgtctgtatccttgagatgtgggtggcgcagctaacgcgataagttgaccgcctggggagtacggccgcaaggttaaaactcaaatgaattgacgggggcccgcacaagcggtggagcatgtggtttaattcgatgcaacgcgaagaaccttaccatcccttgacatccagagaatttaccagagatggtttagtgccttcgggaactctgtgacaggtgctgcatggctgtcgtcagctcgtgttgtgaaatgttgggttaagtcccgcaacgagcgcaacccctatccttatttgccagtgcttcgggcgggaactttaaggagactgccggtgataaaccggaggaaggtggggacgacgtcaagtcatcatggcccttacgggatgggctacacacgtgctacaatggcaagtacagagggcagcaataccgcgaggtggagcgaatcccacaaagcttgtcgtagtccggattggagtctgcaactcgactccatgaagtcggaatcgctagtaatcgtggatcagaatgccacggtgaatacgttcccgggccttgtacacaccgcccgtcacaccatgggagtaggttgcaaaagaagtggctagtttaaccttcgggaggacggtcaccactttgtgatttatgactggggtg

SEQ ID NO: 3350 - DNA, 1462 bp, Thalassomonas viridans
  source 1..1462: mol_type = unassigned DNA
attgaacgctggcggcaggcttaacacatgcaagtcgagcggaaacgagaagtacttgtacttcggcgtcgagcggcggacgggtgagtaatgcttgggaatatgccttatggtgggggacaacagttggaaacgactgctaataccgcataatgtctacggaccaaagcgggggaccttcgggcctcgtgccatttgattagcccaagtgagattagctagttggtggggtaatggcctaccaaggcgacgatctctagctggtttgagaggatgatcagccacactgggactgagacacggcccagactcctacgggaggcagcagtggggaatattgcacaatgggcgaaagcctgatgcagccatgccgcgtgtgtgaagaaggccttcgggttgtaaagcactttcagttgtgaggaaagggtgttggttaatacctaacatctgtgacgttagcaacagaagaagcaccggctaactccgtgccagcagccgcggtaatacggagggtgcgagcgttaatcggaattactgggcgtaaagcgtgcgtaggcggtttgttaagcaagatgtgaaagccccgggctcaacctgggaactgcattttgaactggcaggctagagttttgtagagggtggtggaatttccagtgtagcggtgaaatgcgtagagattggaaggaacatcagtggcgaaggcggccacctggacaaaaactgacgctgaggcacgaaagcgtggggagcaaacaggattagataccctggtagtccacgccgtaaacgatgtcaactagccgtctgtatccttgagatgtgggtggcgcagctaacgcgctaagttgaccgcctggggagtacggccgcaaggttaaaactcaaatgaattgacgggggcccgcacaagcggtggagcatgtggtttaattcgatgcaacgcgaagaaccttaccatcccttgacatccagagaattcgctagagatagcttagtgccttcgggaactctgtgacaggtgctgcatggctgtcgtcagctcgtgttgtgaaatgttgggttaagtcccgcaacgagcgcaacccctatccttatttgccagcgcttttggcgggaactctaaggagactgccggtgataaaccggaggaaggtggggacgacgtcaagtcatcatggcccttacgggatgggctacacacgtgctacaatggcaagtacagagggcagcaataccgcgaggtggagcgaatcccacaaagcttgtcgtagtccggattggagtctgcaactcgactccatgaagtcggaatcgctagtaatcgtggatcagaatgccacggtgaatacgttcccgggccttgtacacaccgcccgtcacaccatgggagtgggttgcaaaagaagtggctagtttaaccttcgggaggacggtcaccactttgtgattcatgactggggtg

SEQ ID NO: 3351 - DNA, 1422 bp, unidentified
  source 1..1422: mol_type = unassigned DNA; note = Thalassospira alkalitolerans
aacgaacgctggcggcaggcctaacacatgcaagtcgtacgagaaggttccttcgggaactggagagtggcgcacgggtgagtaacgcgtggggacctaccttttagtgggggataacggttggaaacgaccgctaataccgcatacgcccttcgggggaaagatttatcgctaagagatggacccgcgttggattagatagttggtgaggtaacggctcaccaagtcttcgatccatagctggtttgagaggatgatcagccacactgggactgagacacggcccagactcctacgggaggcagcagtggggaatattggacaatgggcgcaagcctgatccagccatgccgcgtgagtgaagaaggccttcgggttgtaaagctctttcagatgtgaagatgatgacggtagcatcagaagaagccccggctaatttcgtgccagcagccgcggtaatacgaaaggggcaagcgttgttcggatttactgggcgtaaagggcacgcaggcggtcttgccagtcaggggtgaaagcccggggctcaaccccggaactgcctctgatactgcaggactagagactaggagagggtggtggaattcccagtgtagaggtgaaattcgtagatattgggaggaacaccagaggcgaaggcggccacctggactagatctgacgctcaggtgcgaaagcgtggggagcaaacaggattagataccctggtagtgcacgccgtaaacgatgagtgctagttgtcgggacttcggtttcggtgacgcagctaacgcattaagcactccgcctggggagtacggtcgcaagattaaaactcaaaggaattgacgggggcccgcacaagcggtggagcatgtggtttaattcgaagcaacgcgcagaaccttaccaacccttgacatccctatcgcgattaccagagatggttttcatcagttcggctggataggtgacaggtgctgcatggctgtcgtcagctcgtgtcgtgagatgttgggttaagtcccgcaacgagcgcaacccctatccttagttgccagcatttagttgggcactctagggagactgccggtgacaagccggaggaaggcggggatgacgtcaagtcctcatggcccttacgggttgggctacacacgtgctacaatggtaactacagagggctgcttcttggcaacaagtggcgaatcccaaaaagttatctcagttcggattgcactctgcaactcgagtgcatgaagttggaatcgctagtaatcgtggatcagcatgccacggtgaatacgttcccgggccttgtacacaccgcccgtcacaccatgggagttggttttacccgaagacggtgggctaaccagatttatctggaggcagccggccacggtaaggtcagcgactggggtg

SEQ ID NO: 3352 - DNA, 1422 bp, unidentified
  source 1..1422: mol_type = unassigned DNA; note = Thalassospira lohafexi
aacgaacgctggcggcaggcctaacacatgcaagtcgtacgagaaggttctttcgggaactggagagtggcgcacgggtgagtaacgcgtggggacctacctcttagtgggggataacggttggaaacgaccgctaataccgcatacgcccttcgggggaaagatttatcgctaagagatggacccgcgttggattagatagttggtgaggtaatggctcaccaagtcggcgatccatagctggtttgagaggatgatcagccacactgggactgagacacggcccagactcctacgggaggcagcagtggggaatattggacaatgggggcaaccctgatccagccatgccgcgtgagtgaagaaggccttcgggttgtaaagctctttcagatgcgaagatgatgacggtaacatcagaagaagccccggctaatttcgtgccagcagccgcggtaatacgaaaggggcaagcgttgttcggatttactgggcgtaaagggcacgcaggcggtcttgccagtcaggggtgaaagcccggggctcaaccccggaactgcctctgatactgcaagactagagactaggagagggtggtggaattcccagtgtagaggtgaaattcgtagatattgggaggaacaccagaggcgaaggcggccacctggactagatctgacgctcaggtgcgaaagcgtggggagcaaacaggattagataccctggtagtccacgccgtaaacgatgagtgctagttgtcgggacttcggtttcggtgacgcagctaacgcattaagcactccgcctggggagtacggtcgcaagattaaaactcaaaggaattgacgggggcccgcacaagcggtggagcatgtggtttaattcgaagcaacgcgcagaaccttaccaacccttgacatccctatcgcgatttccagagatggatttcatcagttcggctggataggtgacaggtgctgcatggctgtcgtcagctcgtgtcgtgagatgttgggttaagtcccgcaacgagcgcaacccctatccttagttgccagcatttagttgggcactctagggagactgccggtgacaagccggaggaaggcggggatgacgtcaagtcctcatggcccttacgggttgggctacacacgtgctacaatggtaactacagagggctgcttcttggcaacaagtggcgaatcccaaaaagttatctcagttcggattgcactctgcaactcgagtgcatgaagttggaatcgctagtaatcgtggatcagcatgccacggtgaatacgttcccgggccttgtacacaccgcccgtcacaccatgggagttggttttacccgaagacggtgggctaaccagatttatctggaggcagccggccacggtaaggtcagcgactggggtg

SEQ ID NO: 3353 - DNA, 1422 bp, Thalassospira lucentensis
  source 1..1422: mol_type = unassigned DNA
aacgaacgctggcggcaggcctaacacatgcaagtcgtacgagaaggttctttcgggaactggagagtggcgcacgggtgagtaacgcgtggggacctacctcttagtgggggataacggttggaaacgaccgctaataccgcatacgcccttcgggggaaagatttatcgctaagagatggacccgcgttggattagatagttggtgaggtaatggctcaccaagtcggcgatccatagctggtttgagaggatgatcagccacactgggactgagacacggcccagactcctacgggaggcagcagtggggaatattggacaatgggggcaaccctgatccagccatgccgcgtgagtgaagaaggccttcgggttgtaaagctctttcagatgcgaagatgatgacggtaacatcagaagaagccccggctaatttcgtgccagcagccgcggtaatacgaaaggggcaagcgttgttcggatttactgggcgtaaagggcacgcaggcggtcttgccagtcaggggtgaaagcccggggctcaaccccggaactgcctctgatactgcaagactagagactaggagagggtggtggaattcccagtgtagaggtgaaattcgtagatattgggaggaacaccagaggcgaaggcggccacctggactagatctgacgctcaggtgcgaaagcgtggggagcaaacaggattagataccctggtagtccacgccgtaaacgatgagtgctagttgtcgggatttcggtttcggtgacgcagctaacgcattaagcactccgcctggggagtacggtcgcaagattaaaactcaaaggaattgacgggggcccgcacaagcggtggagcatgtggtttaattcgaagcaacgcgcagaaccttaccaacccttgacatccctatcgcgatttccagagatggatttcatcagttcggctggataggtgacaggtgctgcatggctgtcgtcagctcgtgtcgtgagatgttgggttaagtcccgcaacgagcgcaacccctatccttagttgccagcatttagttgggcactctagggagactgccggtgacaagccggaggaaggcggggatgacgtcaagtcctcatggcccttacgggttgggctacacacgtgctacaatggtaactacagagggctgcttcttggcaacaagtggcgaatcccaaaaagttatctcagttcggattgcactctgcaactcgagtgcatgaagttggaatcgctagtaatcgtggatcagcatgccacggtgaatacgttcccgggccttgtacacaccgcccgtcacaccatgggagttggttttacccgaagacggtgggctaaccagatttatctggaggcagccggccacggtaaggtcagcgactggggtg

SEQ ID NO: 3354 - DNA, 1495 bp, unidentified
  source 1..1495: mol_type = unassigned DNA; note = Thalassospira marina
gaacatgagagtttgatcctggctcagaacgaacgctggcggcaggcctaacacatgcaagtcgtacgagaaggttccttcgggaactggagagtggcgcacgggtgagtaacgcgtggggacctaccttttagtgggggataacggttggaaacgaccgctaataccgcatacgcccttcgggggaaagatttatcgctaaaagatggacccgcgttggattagatagttggtgaggtaacggctcaccaagtcagcgatccatagctggtttgagaggatgatcagccacactgggactgagacacggcccagactcctacgggaggcagcagtggggaatattggacaatgggcgcaagcctgatccagccatgccgcgtgagtgaagaaggccttcgggttgtaaagctctttcagatgcgaagatgatgacggtaacatcagaagaagccccggctaatttcgtgccagcagccgcggtaatacgaaaggggcaagcgttgttcggatttactgggcgtaaagggcacgcaggcggtctcgccagtcaggggtgaaagcccggggctcaaccccggaactgcctctgatactgtgagactagagactaggagagggtggtggaattcccagtgtagaggtgaaattcgtagatattgggaggaacaccagaggcgaaggcggccacctggactagatctgacgctcaggtgcgaaagcgtggggagcaaacaggattagataccctggtagtccacgccgtaaacgatgagtgctagttgtcgggacttcggtttcggtgacgcagctaacgcattaagcactccgcctggggagtacggtcgcaagattaaaactcaaaggaattgacgggggcccgcacaagcggtggagcatgtggtttaattcgaagcaacgcgcagaaccttaccaacccttgacatcctgatcgcgattaccagagatggttttcttcagttcggctggatcagtgacaggtgctgcatggctgtcgtcagctcgtgtcgtgagatgttgggttaagtcccgcaacgagcgcaacccctattcccagttgccagcattcagttgggcactctggggagactgccggtgacaagccggaggaaggcggggatgacgtcaagtcctcatggcccttacgggttgggctacacacgtgctacaatggtaactacagagggtagcggcctggtgacaggtagccaatcccaaaaagttatctcagttcggattgcactctgcaactcgagtgcatgaagttggaatcgctagtaatcgtggatcagcatgccacggtgaatacgttcccgggccttgtacacaccgcccgtcacaccatgggagttggttttacccgaagacggtgggctaaccttttaggaggcagccggccacggtaaggtcagcgactggggtgaagtcgtaacaaggtagccgtaggggaacctgcggctggatcacctccttt

SEQ ID NO: 3355 - DNA, 1422 bp, unidentified
  source 1..1422: mol_type = unassigned DNA; note = Thalassospira mesophila
aacgaacgctggcggcaggcctaacacatgcaagtcgtacgagaaggttccttcgggaactggagagtggcgcacgggtgagtaacgcgtggggacctaccttttagtgggggataacggttggaaacgaccgctaataccgcatacgcccttttggggaaagatttatcgctaaaagatggacccgcgttggattagatagttggtgaggtaacggctcaccaagtcttcgatccatagctggtttgagaggatgatcagccacactgggactgagacacggcccagactcctacgggaggcagcagtggggaatattggacaatgggcgcaagcctgatccagccatgccgcgtgagtgaagaaggccttcgggttgtaaagctctttcagatgcgaagatgatgacggtaacatcagaagaagccccggctaatttcgtgccagcagccgcggtaatacgaaaggggcaagcgttgttcggatttactgggcgtaaagggcacgcaggcggtcttgycagtcaggggtgaaagcccggggctcaaccccggaactgcctctgatactgcaggactagagactaggagagggtggtggaattcccrgtgtagaggtgaaattcgtagatattgggaggaacaccagaggcgaaggcggccacctggactagatctgacgctcaggtgcgaaagcgtggggagcaaacaggattagataccctggtagtccacgccgtaaacgatgagtgctagttgtcgggacttcggtttcggtgacgcagctaacgcattaagcactccgcctggggagtacggtcgcaagattaaaactcaaaggaattgacgggggcccgcacaagcggtggagcatgtggtttaattcgaagcaacgcgaagaaccttaccaacccttgacatccctatcgcgatttccagagatggatttcatcagttcggctggataggtgacaggtgctgcatggctgtcgtcagctcgtgtcgtgagatgttgggttaagtcccgcaacgagcgcaacccctattctcagttgccagcattaagttgggcactctggggagactgccggtgacaagccggaggaaggcggggatgacgtcaagtcctcatggcccttatgggttgggctacacacgtgctacaatggtaactacagagggctgcttcttggcgacaagtggcgaatcccgaaaagttatctcagttcggattgcactctgcaactcgagtgcatgaagttggaatcgctagtaatcgtggatcagcatgccacggtgaatacgttcccgggccttgtacacaccgcccgtcacaccatgggagttggttttacccgaagacggtgggctaaccagatttatctggaggcagccggccacggtaaggtcagcgactggggtg

SEQ ID NO: 3356 - DNA, 1398 bp, unidentified
  source 1..1398: mol_type = unassigned DNA; note = Thalassospira permensis
ggcaggcctaacacatgcaagtcgtacgagaaggttcyttcgggaactggagagtggcgcacgggtgagtaacgcgtggggacctacctcttagtgggggataacggttggaaacgaccgctaataccgcatacgcccttcgggggaaagatttatcgctaagagatggacccgcgttggattagatagttggtgaggtaacggctcaccaagtcagcgatccatagctggtttgagaggatgatcagccacactgggactgagacacggcccagactcctacgggaggcagcagtggggaatattggacaatgggcgcaagcctgatccagccatgccgcgtgagtgaagaaggccttcgggttgtaaagctctttcagatgcgaagatgatgacggtaacatcagaagaagccccggctaatttcgtgccagcagccgcggtaatacgaaaggggcaagcgttgttcggatttactgggcgtaaagggcacgcaggcggtcttgccagtcaggggtgaaagcccggggctcaaccccggaactgcctctgatactgcaggactagagactaggagagggtggtggaattcccagtgtagaggtgaaattcgtagatattgggaggaacaccagaggcgaaggcggccacctggactagatctgacgctcaggtgcgaaagcgtggggagcaaacaggattagataccctggtagtccacgccgtaaacgatgagtgctagttgtcgggatttcgatttcggtgacgcagctaacgcattaagcactccgcctggggagtacggtcgcaagattaaaactcaaaggaattgacgggggcccgcacaagcggtggagcatgtggtttaattcgaagcaacgcgcagaaccttaccaacccttgacatccctatcgcgatttccagagatggatatcatcagttcggctggataggtgacaggtgctgcatggctgtcgtcagctcgtgtcgtgagatgttgggttaagtcccgcaacgagcgcaacccctgttcctagttgccagcattcagttgggcactctagggagactgccggtgacaagccggaggaaggcggggatgacgtcaagtcctcatggcccttacgggttgggctacacacgtgctacaatggtaactacagagggcagcgacttagcgataagtagccaatcccaaaaagttatctcagttcggattgcactctgcaactcgagtgcatgaagttggaatcgctagtaatcgtggatcagcatgccacggtgaatacgttcccgggccttgtacacaccgcccgtcacaccatgggagttggttttacccgaagacggtgggctaaccttttaggaggcagccggccacggtaaggtcagcgact

SEQ ID NO: 3357 - DNA, 1417 bp, unidentified
  source 1..1417: mol_type = unassigned DNA; note = Thalassospira povalilytica
aacgaacgctggcggcaggcctaacacatgcaagtcggacgagaaggttccttcgggaactggagagtggcgcacgggtgagtaacgcgtggggacctacctcttagtgggggataacggttggaaacgaccgctaataccgcatacgcccttcgggggaaagatttatcgctaagagatggacccgcgttggattagatagttggtgaggtaacggctcaccaagtcagcgatccatagctggtttgagaggatgatcagccacactgggactgagacacggcccagactcctacgggaggcagcagtggggaatattggacaatgggggcaaccctgatccagccatgccgcgtgagtgaagaaggccttcgggttgtaaagctctttcagatgcgaagatgatgacggtaacatcagaagaagccccggctaatttcgtgccagcagccgcggtaatacgaaaggggctagcgttgttcggatttactgggcgtaaagggcacgcaggcggtcttgccagtcaggggtgaaagcccggggctcaaccccggaactgcctctgatactgcaagactagagactaggagagggtggtggaattcccagtgtagaggtgaaattcgtagatattgggaggaacaccagaggcgaaggcggccacctggactagatctgacgctcaggtgcgaaagcgtggggagcaaacaggattagataccctggtagtccacgccgtaaacgatgagtgctagttgtcgggacttcggtttcggtgacgcagctaacgcattaagcactccgcctggggagtacggtcgcaagattaaaactcaaaggaattgacgggggcccgcacaagcggtggagcatgtggtttaattcgaagcaacgcgcagaaccttaccaacccttgacatccctatcgcgattaccagagatggttttcatcagttcggctggataggtgacaggtgctgcatggctgtcgtcagctcgtgtcgtgagatgttgggttaagtcccgcaacgagcgcaacccctgttcccagttgccagcatttagttgggcactctggggagactgccggtgacaagccggaggaaggcggggatgacgtcaagtcctcatggcccttacgggttgggctacacacgtgctacaatggtaactacagagggcagcgacttagcgataaggagccaatcccaaaaagttatctcagttcggattgcactctgcaactcgagtgcatgaagttggaatcgctagtaatcgtggatcagcatgccacggtgaatacgttcccgggccttgtacacaccgcccgtcacaccatgggagttggttttacccgaagacggtgggctaaccttttaggaggcagccggccacggtaaggtcagcgactggggtg

SEQ ID NO: 3358 - DNA, 1417 bp, Thalassospira profundimaris
  source 1..1417: mol_type = unassigned DNA
aacgaacgctggcggcaggcctaacacatgcaagtcggacgagaaggttccttcgggaactggagagtggcgcacgggtgagtaacgcgtggggacctacctcttagtgggggataacggttggaaacgaccgctaataccgcatacgcccttcgggggaaagatttatcgctaagagatggacccgcgttggattagatagttggtgaggtaacggctcaccaagtcagcgatccatagctggtttgagaggatgatcagccacactgggactgagacacggcccagactcctacgggaggcagcagtggggaatattggacaatgggggcaaccctgatccagccatgccgcgtgagtgaagaaggccttcgggttgtaaagctctttcagatgcgaagatgatgacggtaacatcagaagaagccccggctaatttcgtgccagcagccgcggtaatacgaaaggggctagcgttgttcggatttactgggcgtaaagggcacgcaggcggtcttgccagtcaggggtgaaagcccgaggctcaacctcggaactgcctctgatactgtaagacttgagactaggagagggtggtggaattcccagtgtagaggtgaaattcgtagatattgggaggaacaccagaggcgaaggcggccacctggactagatctgacgctcaggtgcgaaagcgtggggagcaaacaggattagataccctggtagtccacgccgtaaacgatgagtgctagttgtcgggacttcggtttcggtgacgcagctaacgcattaagcactccgcctggggagtacggtcgcaagattaaaactcaaaggaattgacgggggcccgcacaagcggtggagcatgtggtttaattcgaagcaacgcgcagaaccttaccaacccttgacatccctatcgcgattaccagagatggttttcatcagttcggctggataggtgacaggtgctgcatggctgtcgtcagctcgtgtcgtgagatgttgggttaagtcccgcaacgagcgcaacccctgttcctagttgccagcatttagttgggcactctagggagactgccggtgacaagccggaggaaggcggggatgacgtcaagtcctcatggcccttacgggttgggctacacacgtgctacaatggtaactacagagggcagcgacttagcgataagtagccaatcccaaaaagttatctcagttcggattgcactctgcaactcgagtgcatgaagttggaatcgctagtaatcgtggatcagcatgccacggtgaatacgttcccgggccttgtacacaccgcccgtcacaccatgggagttggttttacccgaagacggtgggctaaccttttaggaggcagccggccacggtaaggtcagcgactggggtg

SEQ ID NO: 3359 - DNA, 1417 bp, Thalassospira xiamenensis
  source 1..1417: mol_type = unassigned DNA
aacgaacgctggcggcaggcctaacacatgcaagtcgtacgagaaggttccttcgggaactggagagtggcgcacgggtgagtaacgcgtggggacctacctcttagtgggggataacggttggaaacgaccgctaataccgcatacgcccttcgggggaaagatttatcgctaagagatggacccgcgttggattagatagttggtgaggtaacggctcaccaagtcagcgatccatagctggtttgagaggatgatcagccacactgggactgagacacggcccagactcctacgggaggcagcagtggggaatattggacaatgggcggaagcctgatccagccatgccgcgtgagtgaagaaggccttcgggttgtaaagctctttcagatgcgaagatgatgacggtaacatcagaagaagccccggctaatttcgtgccagcagccgcggtaatacgaaaggggcaagcgttgttcggatttactgggcgtaaagggcacgcaggcggtcttgccagtcaggggtgaaagcccggggctcaaccccggaactgcctctgatactgcaggactagagactaggagagggtggtggaattcccagtgtagaggtgaaattcgtagatattgggaggaacaccagaggcgaaggcggccacctggactagatctgacgctcaggtgcgaaagcgtggggagcaaacaggattagataccctggtagtccacgccgtaaacgatgagtgctagttgtcgggatttcgatttcggtgacgcagctaacgcattaagcactccgcctggggagtacggtcgcaagattaaaactcaaaggaattgacgggggcccgcacaagcggtggagcatgtggtttaattcgaagcaacgcgcagaaccttaccaacccttgacatccctatcgcgatttccagagatggatatcatcagttcggctggataggtgacaggtgctgcatggctgtcgtcagctcgtgtcgtgagatgttgggttaagtcccgcaacgagcgcaacccctgttcctagttgccagcattcagttgggcactctagggagactgccggtgacaagccggaggaaggcggggatgacgtcaagtcctcatggcccttacgggttgggctacacacgtgctacaatggtaactacagagggcagcgacttagcgataagtagccaatcccaaaaagttatctcagttcggattgcactctgcaactcgagtgcatgaagttggaatcgctagtaatcgtggatcagcatgccacggtgaatacgttcccgggccttgtacacaccgcccgtcacaccatgggagttggttttacccgaagacggtgggctaaccttttaggaggcagccggccacggtaaggtcagcgactggggtg

SEQ ID NO: 3360 - DNA, 1417 bp, Thalassospira xianhensis
  source 1..1417: mol_type = unassigned DNA
aacgaacgctggcggcaggcctaacacatgcaagtcgtacgagaaggttctttcgggaactggagagtggcgcacgggtgagtaacgcgtggggacctacctcttagtgggggataacggttggaaacgaccgctaataccgcatacgcccttcgggggaaagatttatcgctaagagatggacccgcgttggattagatagttggtgaggtaacggctcaccaagtcagcgatccatagctggtttgagaggatgatcagccacactgggactgagacacggcccagactcctacgggaggcagcagtggggaatattggacaatgggcgcaagcctgatccagccatgccgcgtgagtgaagaaggccttcgggttgtaaagctctttcagatgcgaagatgatgacggtaacatcagaagaagccccggctaatttcgtgccagcagccgcggtaatacgaaaggggcaagcgttgttcggatttactgggcgtaaagggcacgcaggcggtcttgccagtcaggggtgaaagcccggggctcaaccccggaactgcctctgatactgcaggactagagactaggagagggtggtggaattcccagtgtagaggtgaaattcgtagatattgggaggaacaccagaggcgaaggcggccacctggactagatctgacgctcaggtgcgaaagcgtggggagcaaacaggattagataccctggtagtccacgccgtaaacgatgagtgctagttgtcgggatttcgatttcggtgacgcagctaacgcattaagcactccgcctggggagtacggtcgcaagattaaaactcaaaggaattgacgggggcccgcacaagcggtggagcatgtggtttaattcgaagcaacgcgcagaaccttaccaacccttgacatccctatcgcgaattccagagatggatttcatcagttcggctggataggtgacaggtgctgcatggctgtcgtcagctcgtgtcgtgagatgttgggttaagtcccgcaacgagcgcaacccctgttcctagttgccagcattcagttgggcactctagggagactgccggtgacaagccggaggaaggcggggatgacgtcaagtcctcatggcccttacgggttgggctacacacgtgctacaatggtaactacagagggcagcgacttagcgataagtagccaatcccaaaaagttatctcagttcggattgcactctgcaactcgagtgcatgaagttggaatcgctagtaatcgtggatcagcatgccacggtgaatacgttcccgggccttgtacacaccgcccgtcacaccatgggagttggttttacccgaagacggtgggctaaccttttaggaggcagccggccacggtaaggtcagcgactggggtg

SEQ ID NO: 3361 - DNA, 1464 bp, unidentified
  source 1..1464: mol_type = unassigned DNA; note = Thalassotalea agarivorans
ttgaacgctggcggcaggcttaacacatgcaagtcgagcggaaacgaagaggtgcttgcacctctggcgtcgagcggcggacgggtgagtaatgcttgggaatatgccataaggtgggggacaacagttggaaacgactgctaataccgcataatgtctacggaccaaaggaggggctcttcggacctttcgccttttgattagcccaagtgagattagctagttggtggggtaatggcctaccaaggcgacgatctctagctggtttgagaggatgatcagccacactgggactgagacacggcccagactcctacgggaggcagcagtggggaatattgcacaatgggggaaaccctgatgcagccatgccgcgtgtgtgaagaaggccttcgggttgtaaagcactttcagttgtgaggaaaggttagtagttaatacctgctagctgtgacgttagcaacagaagaagcaccggctaactccgtgccagcagccgcggtaatacggagggtgcgagcgttaatcggaattactgggcgtaaagcgtgcgtaggcggttacataagtcagatgtgaaagcccggggctcaacctcggaactgcatttgaaactgtgtgactagagtattgtagagggtggtggaatttccagtgtagcggtgaaatgcgtagagattggaaggaacatcagtggcgaatgcggccacctggacaaatactgacgctgaggcacgaaagcgtggggagcaaacaggattagataccctggtagtccacgccgtaaacgatgtcaactagttgtctgtgcacttgatgcgtgggtgacgtagctaacgcgctaagttgaccgcctggggagtacggccgcaaggttaaaactcaaatgaattgacgggggcccgcacaagcggtggagcatgtggtttaattcgatgcaacgcgaagaaccttaccatcccttgacatccagagaattttctagagatagattagtgccttcgggaactctgagacaggtgctgcatggctgtcgtcagctcgtgttgtgaaatgttgggttaagtcccgcaacgagcgcaacccttatccttatttgccagcgagtaatgtcgggaactttaaggagactgccggtgataaaccggaggaaggtggggacgacgtcaagtcatcatggcccttacgggatgggctacacacgtgctacaatggcgtatacagagggcagcgagaccgcgaggtggagcgaatcccagaaagtacgtcgtagtccggattggagtctgcaactcgactccatgaagtcggaatcgctagtaatcgcgaatcaaaatgtcgcggtgaatacgttcccgggccttgtacacaccgcccgtcacaccatgggagtgggttgcaaaagaagtggctagtttaaccttcgggaggacggtcaccactttgtgattcatgactggggtg

SEQ ID NO: 3362 - DNA, 1463 bp, unidentified
  source 1..1463: mol_type = unassigned DNA; note = Thalassotalea euphylliae
attgaacgctggcggcaggcttaacacatgcaagtcgagcggaaacgagaatagcttgctattcggcgtcgagcggcggacgggtgagtaatgcttgggaatatgccttttggtgggggacaacagttggaaacgactgctaataccgcataatgtttacggaccaaagcgggggaccttcgggcctcgtgccaaaagattagcccaagtgagattagctagttggtggggtaaaggcctaccaaggcgacgatctctagctggtttgagaggatgatcagccacactgggactgagacacggcccagactcctacgggaggcagcagtggggaatattgcacaatgggggaaaccctgatgcagccatgccgcgtgtgtgaagaaggccttcgggttgtaaagcactttcagtcgtgaggaaaggttagtaattaatacttgctagctgtgacgttagcgacagaagaagcaccggctaactccgtgccagcagccgcggtaatacggagggtgcgagcgttaatcggaattactgggcgtaaagcgtgcgtaggcggtttgataagccagatgtgaaatcccggggcttaacctcggaactgcatttggaactgtttgactagagtactgtagagggtggtggaatttccagtgtagcggtgaaatgcgtagagattggaaggaacatcagtggcgaaggcggccacctggacagatactgacgctgaggcacgaaagcgtggggagcgaacaggattagataccctggtagtccacgccgtaaacgatgtcaactagccgtttgtggttttaaaccgtgagtggcgtagctaacgcgctaagttgaccgcctggggagtacggtcgcaagattaaaactcaaatgaattgacgggggcccgcacaagcggtggagcatgtggtttaattcgatgcaacgcgaagaaccttaccatcccttgacatccagagaattttctagagatagattagtgccttcgggaactctgagacaggtgctgcatggctgtcgtcagctcgtgttgtgaaatgttgggttaagtcccgcaacgagcgcaacccctatccttatttgccagcgagtaatgtcgggaactctaaggagactgccggtgataaaccggaggaaggtggggacgacgtcaagtcatcatggcccttacgggatgggctacacacgtgctacaatggtacatacagagggcagcaagaccgcgaggtggagcgaatcccagaaagtgtatcgtagtccggattggagtctgcaactcgactccatgaagtcggaatcgctagtaatcgcgaatcagaatgtcgcggtgaatacgttcccgggccttgtacacaccgcccgtcacaccatgggagtgggttgcaaaagaagtggctagtttaaccttcgggaggacggtcaccactttgtgattcatgactggggtg

SEQ ID NO: 3363 - DNA, 1461 bp, Thauera aminoaromatica
  source 1..1461: mol_type = unassigned DNA
attgaacgctggcggcatgctttacacatgcaagtcgaacggcagcgggggcttcggcctgccggcgagtggcgaacgggtgagtaatgcatcggaacgtgcccatgtcgtgggggataacgtagcgaaagctacgctaataccgcatacgccctgagggggaaagcgggggattcttcggaacctcgcgcgattggagcggccgatgtcggattagctagtaggtgaggtaaaggctcacctaggcgacgatccgtagcgggtctgagaggatgatccgccacactgggactgagacacggcccagactcctacgggaggcagcagtggggaattttggacaatgggcgcaagcctgatccagccatgccgcgtgagtgaagaaggccttcgggttgtaaagctctttcggccgggaagaaatcgtggtctctaacataggccatggatgacggtaccggactaagaagcaccggctaactacgtgccagcagccgcggtaatacgtagggtgcgagcgttaatcggaattactgggcgtaaagcgtgcgcaggcggttttgtaagacagatgtgaaatccccgggcttaacctgggaactgcgtttgtgactgcaaggctagagtacggcagaggggggtggaattcctggtgtagcagtgaaatgcgtagagatcaggaggaacaccgatggcgaaggcagccccctgggcctgtactgacgctcatgcacgaaagcgtggggagcaaacaggattagataccctggtagtccacgccctaaacgatgtcgactagtcgttcggagcagcaatgcactgagtgacgcagctaacgcgtgaagtcgaccgcctggggagtacggccgcaaggttaaaactcaaaggaattgacggggacccgcacaagcggtggatgatgtggattaattcgatgcaacgcgaaaaaccttacctacccttgacatgtctggaaccttgctgagaggcgagggtgccttcgggagccagaacacaggtgctgcatggctgtcgtcagctcgtgtcgtgagatgttgggttaagtcccgcaacgagcgcaacccttgtcactagttgccatcatttggttgggcactctagtgagactgccggtgacaaaccggaggaaggtggggatgacgtcaagtcctcatggcccttatgggtagggcttcacacgtcatacaatggtcggtacagagggttgccaagccgcgaggtggagccaatcccttaaagccgatcgtagtccggatcgtagtctgcaactcgactacgtgaagtcggaatcgctagtaatcgcagatcagcatgctgcggtgaatacgttcccgggtcttgtacacaccgcccgtcacaccatgggagtgggtttcaccagaagtaggtagcttaaccttcgggagggcgcttaccacggtgagattcatgactggggtg

SEQ ID NO: 3364 - DNA, 1457 bp, Thauera aromatica
  source 1..1457: mol_type = unassigned DNA
attgaacgctggcggcatgctttacacatgcaagtcgaacggcagcgggggcttcggcctgccggcgagtggcgaacgggtgagtaatgcatcggaacgtgcccagtcgtgggggataacgtatcgaaaggtacgctaataccgcatacgtcctgagggagaaagcgggggatcttcggacctcgcgcgattggagcggccgatgtcggattagctagtaggtgaggtaaaggctcacctaggcgacgatccgtagcgggtctgagaggatgatccgccacactgggactgagacacggcccagactcctacgggaggcagcagtggggaattttggacaatgggggcaaccctgatccagccatgccgcgtgagtgaagaaggccttcgggttgtaaagctctttcggccgggaagaaatcgtggtctctaacataggccatggatgacggtaccggactaagaagcaccggctaactacgtgccagcagccgcggtaatacgtagggtgcgagcgttaatcggaattactgggcgtaaagcgtgctcaggcggttttgtaagacagatgtgaaatccccgggctcaacctgggaactgcgtttgtgactgcaaggctagagtacggcagaggggggtggaattcctggtgtagcagtgaaatgcgtagagatcaggaggaacaccgatggcgaaggcagccccctgggcctgtactgacgctcatgcacgaaagcgtggggagcaaacaggattagataccctggtagtccacgccctaaacgatgtcgactagtcgttcggagcagcaatgcactgagtgacgcagctaacgcgtgaagtcgaccgcctggggagtacggccgcaaggttaaaactcaaaggaattgacggggacccgcacaagcggtggatgatgtggattaattcgatgcaacgcgaaaaaccttacctacccttgacatgccaggaaccttgctgagaggcgagggtgccttcgggagcctggacacaggtgctgcatggctgtcgtcagctcgtgtcgtgagatgttgggttaagtcccgcaacgagcgcaacccttgtcactagttgccatcatttggttgggcactctagtgagactgccggtgacaaaccggaggaaggtggggatgacgtcatgtcctatggcccttatgggtagggcttcacacgtcatacaatggtcggtacagagggttgccaagccgcgaggtggagccaatcccaaaaagccgatcgtagtccggatcgtagtctgcaactcgactacgtgaagtcggaatcgctagtaatcgcagatcagcatgctgcggtgaatacgttcccgggtcttgtacacaccgcccgtcacaccatgggagtgggtttcaccagaagtaggtagcttaaccttcgggagggcgcttaccacggtgagattcatgactggggtg

SEQ ID NO: 3365 - DNA, 1461 bp, Thauera chlorobenzoica
  source 1..1461: mol_type = unassigned DNA
attgaacgctggcggcatgctttacacatgcaagtcgaacggcagcgggggcttcggcctgccggcgagtggcgaacgggtgagtaatgcatcggaacgtgcccatgtcgtgggggataacgtatcgaaaggtacgctaataccgcatacgtcctgagggagaaagcgggggattcttcggaacctcgcgcgattggagcggccgatgtcggattagctagtaggtgaggtaaaggctcacctaggcgacgatccgtagcgggtctgagaggatgatccgccacactgggactgagacacggcccagactcctacgggaggcagcagtggggaattttggacaatgggggcaaccctgatccagccatgccgcgtgagtgaagaaggccttcgggttgtaaagctctttcggccgggaagaaatcgcgcactctaacatagtgtgtggatgacggtaccggactaagaagcaccggctaactacgtgccagcagccgcggtaatacgtagggtgcgagcgttaatcggaattactgggcgtaaagcgtgcgcaggcggttttgtaagacagatgtgaaatccccgggctcaacctgggaactgcgtttgtgactgcaaggctagagtacggcagaggggggtggaattcctggtgtagcagtgaaatgcgtagatatcaggaggaacaccgatggcgaaggcagccccctgggcctgtactgacgctcatgcacgaaagcgtggggagcaaacaggattagataccctggtagtccacgccctaaacgatgtcgactagtcgttcggagcagcaatgcactgagtgacgcagctaacgcgtgaagtcgaccgcctggggagtacggccgcaaggttaaaactcaaaggaattgacggggacccgcacaagcggtggatgatgtggattaattcgatgcaacgcgaaaaaccttacctacccttgacatgtctggaaccttgctgagaggcgagggtgccttcgggagccagaacacaggtgctgcatggctgtcgtcagctcgtgtcgtgagatgttgggttaagtcccgcaacgagcgcaacccttgtcactagttgccatcatttggttgggcactctagtgagactgccggtgacaaaccggaggaaggtggggatgacgtcaagtcctcatggcccttatgggtagggcttcacacgtcatacaatggtcggtacagagggttgccaagccgcgaggtggagccaatcccaaaaagccgatcgtagtccggatcgtagtctgcaactcgactacgtgaagtcggaatcgctagtaatcgcagatcagcatgctgcggtgaatacgttcccgggtcttgtacacaccgcccgtcacaccatgggagtgggtttcaccagaagtaggtagcttaaccttcgggagggcgcttaccacggtgagattcatgactggggtg

SEQ ID NO: 3366 - DNA, 1460 bp, unidentified
  source 1..1460: mol_type = unassigned DNA; note = Thauera humireducens
attgaacgctggcggcatgctttacacatgcaagtcgaacggcagcacgggcttcggcctggtggcgagtggcgaacgggtgagtaatgcatcggaacgtgcccatttgtgggggataacgcggcgaaagtcgcgctaataccgcatacgccctgagggggaaagcgggggattcttcggaacctcgcgcaattggagcggccgatgtcagattagctagttggtagggtaaaggcctaccaaggcgacgatctgtagcgggtctgagaggatgatccgccacactgggactgagacacggcccagactcctacgggaggcagcagtggggaattttggacaatgggggcaaccctgatccagccatgccgcgtgagtgaagaaggccttcgggttgtaaagctctttcggccgggaagaaatcggcgactctaacatagtcgctggatgacggtaccggactaagaagcaccggctaactacgtgccagcagccgcggtaatacgtagggtgcgagcgttaatcggaattactgggcgtaaagcgtgcgcaggcggttttgtaagacagatgtgaaatccccgggcttaacctgggaactgcgtttgtgactgcaaggctagagtacggcagaggggggtggaattcctggtgtagcagtgaaatgcgtagatatcaggaggaacaccgatggcgaaggcagccccctgggcctgtactgacgctcatgcacgaaagcgtggggagcaaacaggattagataccctggtagtccacgccctaaacgatgtcgactagtcgttcggagcagcaatgcactgagtgacgcagctaacgcgtgaagtcgaccgcctggggagtacggccgcaaggttaaaactcaaaggaattgacggggacccgcacaagcggtggatgatgtggattaattcgatgcaacgcgaaaaaccttacctacccttgacatgtctggaaccttgctgagaggcgagggtgccttcgggagccagaacacaggtgctgcatggctgtcgtcagctcgtgtcgtgagatgttgggttaagtcccgcaacgagcgcaacccttgtcactagttgccaccattcagttgggcactctagtgagactgccggtgacaaaccggaggaaggtggggatgacgtcaagtcctcatggcccttatgggtagggcttcacacgtcatacaatggtcggtacagagggttgccaaaccgcgaggtggagccaatcccttaaagccgatcgtagtccggatcgtagtctgcaactcgactacgtgaagtcggaatcgctagtaatcgcagatcagcatgctgcggtgaatacgttcccgggtcttgtacacaccgcccgtcacaccatgggagtgggtttcaccagaagtaggtagcttaaccttcgggagggcgcttaccacggtgagattcatgactggggtg

SEQ ID NO: 3367 - DNA, 1460 bp, Thauera linaloolentis
  source 1..1460: mol_type = unassigned DNA
attgaacgctggcggcatgctttacacatgcaagtcgaacggcagcgcgggcttcggcctggcggcgagtggcgaacgggtgagtaatgcatcggaacgtgcccagtcgtgggggataacacatcgaaagatgtgctaataccgcatacgtcctgagggagaaagcgggggaatcttcggatcctcgcgcgattggagcggccgatgtcagattagctagtaggtgaggtaaaggctcacctaggcgacgatctgtagcgggtctgagaggatgatccgccacactgggactgagacacggcccagactcctacgggaggcagcagtggggaattttggacaatgggggcaaccctgatccagccatgccgcgtgagtgaagaaggccttcgggttgtaaagctctttcggccgggaagaaatcgcattctctaacataggatgtggatgacggtaccggactaagaagcaccggctaactacgtgccagcagccgcggtaatacgtagggtgcgagcgttaatcggaattactgggcgtaaagcgtgcgcaggcggtttgccaagacaggcgtgaaatccccgggcttaacctgggaactgcgcttgtgactggcaggctagagtacggcagaggggggtggaattccacgtgtagcagtgaaatgcgtagagatgtggaggaacaccgatggcgaaggcagccccctgggcctgtactgacgctcatgcacgaaagcgtggggagcaaacaggattagataccctggtagtccacgccctaaacgatgtcgactagtcgttcggagcagcaatgcactgagtgacgcagctaacgcgtgaagtcgaccgcctggggagtacggccgcaaggttaaaactcaaaggaattgacggggacccgcacaagcggtggatgatgtggattaattcgatgcaacgcgaaaaaccttacctacccttgacatgccaggaatcttgctgagaggcgagagtgccttcgggagcctggacacaggtgctgcatggctgtcgtcagctcgtgtcgtgagatgttgggttaagtcccgcaacgagcgcaacccttgtcactagttgccatcatttggttgggcactctagtgagactgccggtgacaaaccggaggaaggtggggatgacgtcaagtcctcatggcccttatgggtagggcttcacacgtcatacaatggtcggtacagagggttgccaagccgcgaggtggagccaatcccttaaagccgatcgtagtccggatcgtagtctgcaactcgactacgtgaagtcggaatcgctagtaatcgcagatcagcatgctgcggtgaatacgttcccgggtcttgtacacaccgcccgtcacaccatgggagtgggtttcaccagaagtaggtagcttaaccttcgggggggcgcttaccacggtgagattcatgactggggtg

SEQ ID NO: 3368 - DNA, 1461 bp, Thauera phenylacetica
  source 1..1461: mol_type = unassigned DNA
attgaacgctggcggcatgctttacacatgcaagtcgaacggcagcgggggcttcggcctgccggcgagtggcgaacgggtgagtaatgcatcggaacgtgcccatgtcgtgggggataacgtagcgaaagctacgctaataccgcatacgccctgagggggaaagcgggggattcttcggaacctcgcgcgattggagcggccgatgtcggattagctagtaggtgaggtaaaggctcacctaggcgacgatccgtagcgggtctgagaggatgatccgccacactgggactgagacacggcccagactcctacgggaggcagcagtggggaattttggacaatgggcgcaagcctgatccagccatgccgcgtgagtgaagaaggccttcgggttgtaaagctctttcggccgggaagaaatcgtgttctctaacataggacatggatgacggtaccggactaagaagcaccggctaactacgtgccagcagccgcggtaatacgtagggtgcgagcgttaatcggaattactgggcgtaaagcgtgcgcaggcggttttgtaagacagatgtgaaatccccgggcttaacctgggaactgcgtttgtgactgcaaggctagagtacggcagaggggggtggaattcctggtgtagcagtgaaatgcgtagagatcaggaggaacaccgatggcgaaggcagccccctgggcctgtactgacgctcatgcacgaaagcgtggggagcaaacaggattagataccctggtagtccacgccctaaacgatgtcgactagtcgttcggagcagcaatgcactgagtgacgcagctaacgcgtgaagtcgaccgcctggggagtacggccgcaaggttaaaactcaaaggaattgacggggacccgcacaagcggtggatgatgtggattaattcgatgcaacgcgaaaaaccttacctacccttgacatgtctggaaccttgctgagaggcgagggtgccttcgggagccagaacacaggtgctgcatggctgtcgtcagctcgtgtcgtgagatgttgggttaagtcccgcaacgagcgcaacccttgtcactagttgccatcatttagttgggcactctagtgagactgccggtgacaaaccggaggaaggtggggatgacgtcaagtcctcatggcccttatgggtagggcttcacacgtcatacaatggtcggtacagagggttgccaagccgcgaggtggagccaatcccttaaagccgatcgtagtccggatcgtagtctgcaactcgactacgtgaagtcggaatcgctagtaatcgcagatcagcatgctgcggtgaatacgttcccgggtcttgtacacaccgcccgtcacaccatgggagtgggtttcaccagaagtaggtagcttaaccttcgggagggcgcttaccacggtgagattcatgactggggtg

SEQ ID NO: 3369 - DNA, 1461 bp, unidentified
  source 1..1461: mol_type = unassigned DNA; note = Thauera propionica
attgaacgctggcggcatgctttacacatgcaagtcgaacggcagcacgggcttcggcctggtggcgagtggcgaacgggtgagtaatgcatcggaacgtgcccatgtcgtgggggataacgtagcgaaagctacgctaataccgcatacgccctgagggggaaagcgggggattcttcggaacctcgcgcgattggagcggccgatgtcggattagctagtaggtgaggtaaaggctcacctaggcgacgatccgtagcgggtctgagaggatgatccgccacactgggactgagacacggcccagactcctacgggaggcagcagtggggaattttggacaatgggggcaaccctgatccagccatgccgcgtgagtgaagaaggccttcgggttgtaaagctctttcggccgggaagaaatcggcgactctaacatagtcgctggatgacggtaccggactaagaagcaccggctaactacgtgccagcagccgcggtaatacgtagggtgcgagcgttaatcggaattactgggcgtaaagcgtgcgcaggcggttttgtaagacagatgtgaaatccccgggcttaacctgggaactgcgtttgtgactgcaaggctagagtacggcagaggggggtggaattccacgtgtagcagtgaaatgcgtagagatgtggaggaacaccgatggcgaaggcagccccctgggcctgtactgacgctcatgcacgaaagcgtggggagcaaacaggattagataccctggtagtccacgccctaaacgatgtcgactagtcgttcggagcagcaatgcactgagtgacgcagctaacgcgtgaagtcgaccgcctggggagtacggccgcaaggttaaaactcaaaggaattgacggggacccgcacaagcggtggatgatgtggattaattcgatgcaacgcgaaaaaccttacctacccttgacatgtctggaaccttggtgagagccgagggtgccttcgggagccagaacacaggtgctgcatggctgtcgtcagctcgtgtcgtgagatgttgggttaagtcccgcaacgagcgcaacccttgtcactagttgccatcatttagttgggcactctagtgagactgccggtgacaaaccggaggaaggtggggatgacgtcaagtcctcatggcccttatgggtagggcttcacacgtcatacaatggtcggtacagagggttgccaagccgcgaggtggagccaatcccttaaagccgatcgtagtccggatcgtagtctgcaactcgactacgtgaagtcggaatcgctagtaatcgcagatcagcatgctgcggtgaatacgttcccgggtcttgtacacaccgcccgtcacaccatgggagtgggtttcaccagaagtaggtagcttaaccttcgggagggcgcttaccacggtgagattcatgactggggtg

SEQ ID NO: 3370 - DNA, 1460 bp, Thauera terpenica
  source 1..1460: mol_type = unassigned DNA
attgaacgctggcggcatgctttacacatgcaagtcgaacggcagcacgggcttcggcctggtggcgagtggcgaacgggtgagtaatgcatcggaacgtgcccatttgtgggggataactacgcgaaagcgtggctaataccgcatacgccctgagggggaaagcgggggattcttcggaacctcgcgcaattggagcggccgatgtcagattagcttgttggtgaggtaaaggctcaccaaggcgacgatctgtagcgggtctgagaggatgatccgccacactgggactgagacacggcccagactcctacgggaggcagcagtggggaattttggacaatgggggcaaccctgatccagccatgccgcgtgagtgaagaaggccttcgggttgtaaagctctttcagccgggaagaaaacgcactctctaacatagggtgtggatgacggtaccggaagaagaagcaccggctaactacgtgccagcagccgcggtaatacgtagggtgcgagcgttaatcggaattactgggcgtaaagggtgcgcaggcggttttgtaagacagatgtgaaatccccgggcttaacctgggaactgcgtttgtgactgcaaggctagagtacggcagaggggggtggaattccgcgtgtagcagtgaaatgcgtagatatgcggaggaacaccgatggcgaaggcaaccccctgggcctgtactgacgctcatgcacgaaagcgtggggagcaaacaggattagataccctggtagtccacgccctaaacgatgtcaactagtcgttcggagcagcaatgcactgagtgacgcagctaacgcgtgaagttgaccgcctggggagtacggccgcaaggttaaaactcaaaggaattgacggggacccgcacaagcggtggatgatgtggattaattcgatgcaacgcgaaaaaccttacctacccttgacatgtctggaaccttggtgagagccgagggtgccttcgggagccagaacacaggtgctgcatggctgtcgtcagctcgtgtcgtgagatgttgggttaagtcccgcaacgagcgcaacccttgtcattagttgccatcatttagttgggcactctaatgagactgccggtgacaaaccggaggaaggtggggatgacgtcaagtcctcatggcccttatgggtagggcttcacacgtcatacaatggtcggtacagagggttgccaagccgcgaggtggagccaatcccacaaagccgatcgtagtccggatcgtagtctgcaactcgactacgtgaagtcggaatcgctagtaatcgcagatcagcatgctgcggtgaatacgttcccgggtcttgtacacaccgcccgtcacaccatgggagtgggtttcaccagaagtaggtagcttaaccttcgggagggcgcttaccacggtgagattcatgactggggtg

SEQ ID NO: 3371 - DNA, 1483 bp, Thermanaeromonas toyohensis
  source 1..1483: mol_type = unassigned DNA
gacgaacgctggcggcgtgcctaacacatgcaagtcgagcgggccgtagcattaagctggagaggtttagtgttacggtttagcggcggacgggtgagtaacgcgtaggtaacctacccatgagaccgggataaccctgggaaactggggctaatactggatacgctccttttagggcatcctagggggaggaaaggctcttaaggggccgctcatggatgggcctgcgtcccattagctagttggtggggtaatggcctaccaaggctacgatgggtagccggcctgagagggtggtcggccacactgggactgagacacggcccagactcctacgggaggcagcagtgggggatcttgcgcaatgggcgaaagcctgacgcagcgacgccgcgtgggggatgaaggcctttgggttgtaaacccctgtctggagggaagaatggatgacggtacctccggaggaagccccggctaactacgtgccagcagccgcggtaagacgtagggggcgagcgttgtccggaattactgggcgtaaagggcgtgtaggcggtttagcaagtcaggtgtaaaaggctgcggctcaaccgcggttaagcgcctgatactgctggacttgagggcaggagaggggggcggaattcccggtgtagcggtgaaatgcgtagatatcgggaggaacaccagtggcgaaggcggctccctggactggccctgacgctgaggcgcgaaagcgtggggagcaaacaggattagataccctggtagtccacgctgtaaacgatgggtactaggtgttgggggtatcgacccctccagtgccgcagttaacacagtaagtaccccgcctggggagtacggccgcaaggctgaaactcaaaggaattgacgggggcccgcacaagcggtggagcatgtggtttaattcgatgcaacgcgaagaaccttaccagggcttgacatgctggtggtactgacccgaaaggggagggacccttaaggggtagactttaagggagccagcacaggtgctgcatggttgtcgtcagctcgtgtcgtgagatgttgggttaagtcccgcaacgagcgcaacccctacctctagttgccagcgggttaagccgggcactctagagggactgccggcgacaagccggaggaaggtggggatgacgtcaaatcatcatggcccttatgccctgggctacacacgtgctacaatggccggtacagagggtagcgaacctgcgagggggagccaatcccaaaaagccggtctcagttcggattgcaggctgcaactcgcctgcatgaaggcggaatcgctagtaatcgcggatcagccatgccgcggtgaatacgttcccgggccttgtacacaccgcccgtcacaccacgaaagccggcaacacccgaagccggtggagctaaccctggagaagggaggcagccgtcgaaggtggggccggtgattggggtg

SEQ ID NO: 3372 - DNA, 1471 bp, Thermoactinomyces vulgaris
  source 1..1471: mol_type = unassigned DNA
gatgaacgctggcggcgtgcctaatacatgcaagtcgagcgggagaatcatccttcgggatgaggatccagcggcgaacgggtgagtaacacgtgggcaacctgcccgcaagaccgggataactccgggaaaccggggctaataccggatagtccttttccccgcatggggaaaaggggaaaggcggcttcggctgtcacttgcggatgggcccgcggcgcattagctggttggtgaggtaacggctcaccaaggcgacgatgcgtagccgacctgagagggtgatcggccacactgggactgagacacggcccagactcctacgggaggcagcagtagggaattttccgcaatgggcgaaagcctgacggagcaacgccgcgtgagtgaggacggccttcgggttgtaaaactctgttcttgaggaagaattccttccaggcgaacagcctggaaggttgacggtactcaaggagaaagccccggctaactacgtgccagcagccgcggtaatacgtagggggcgagcgttatccggaattattgggcgtaaagcgcgcgcaggcggctgattaagtcaggtgtgaaaggctgcggctcaaccgcagagcggcacctgaaactggtcagcttgagtgcaggagaggggagcggaattcccggtgtagcggtggaatgcgtagagatcgggaggaacaccagtggcgaaggcggctctctggcctgtaactgacgctgaggcgcgaaagcgtggggagcaaacaggattagataccctggtagtccacgccgtaaacgatgagtgctaggtgttggggggctacgcccctcagtgccgaaggtaacccattaagcactccgcctggggagtacggccgcaaggctgaaactcaaaggaattgacgggggcccgcacaagcggtggagcatgtggtttaattcgaagcaacgcgaagaaccttaccagggcttgacatcccgctgacccctccagagatggaggtttccttcgggacagcggtgacaggtggtgcatggttgtcgtcagctcgtgtcgtgagatgttgggttcagtcccgcaacgagcgcaacccttgtcgttagttgccagcatttcggatgggcactctaacgagacagccggtgaaagccggaggaaggtggggatgacgtcaaatcatcatgccccttatgtcctgggctacacacgtgctacaatggctggtacaaagggcagcgaacccgcgagggggagccaatcccaaaaagccagtctcagttcggatcgcaggctgcaactcgcctgcgtgaagccggaatcgctagtaatcgcggatcagcatgccgcggtgaatacgttcccgggccttgtacacaccgcccgtcacaccacgagagtttgcaacacccgaagtcggtgaggcaaccttttaggagccagccgccgaaggtggggcagatgattggggtg

SEQ ID NO: 3373 - DNA, 1480 bp, unidentified
  source 1..1480: mol_type = unassigned DNA; note = Thermoanaerobaculum aquaticum
aatgaacgctggcggcgcgcctaacacatgcaagtcgagcgaggccacggcttcggccgtgagtcgagcggcgaacgggtgagtaacgcgtgggtaacgtacccgggagtgggggatagctccgggaaactggaggtaataccgcatacgctcacttcaccgcatggtggagtgaggaaaggttgggacccttcggggccagccgctcccggatcggcctgcgtccgattagctagttggtagggtaacggcctaccaaggctacgatcggtagccggcctgagagggtgaccggccacattgggactgagacacggcccagactcctacgggaggcagcagtggggaatcttgggcaatgggcgaaagcctgacccagcgacgccgcgtgggggatgaaggccttcgggttgtaaacccctgtcaggggggacgaaagcctctcggtgaatagccggggggtctgacggtacccccaaaggaagccccggctaactccgtgccagcagccgcggtaatacggagggggcgagcgttattcggaattactgggcgtaaagcgcgcgcaggtggcgtggcaagtggcaggtgaaagccctcggctcaaccgaggaattgcctgccaaactaccgcgcttgaggccgggagggggaagcggaattcctggtgtagcggtgaaatgcgtagataccaggaggaacaccggtggcgaaggcggcttcctggaccggttctgacactcatgcgcgaaagcgtggggagcaaacaggattagataccctggtagtccacgccctaaacgatgggcactaggcgtcgcgggtgtcgacccctgcggtgccgtagctaacgcgttaagtgccccgcctggggagtacggtcgcaaggctgaaactcaaaggaattgacgggggcccgcacaagcggtggagtatgtggtttaattcgatgcaacgcgaagaaccttacctgggtttgaactgctggggacagctccagagatggggccttcccttcggggactccagcagaggtgctgcatggctgtcgtcagctcgtgccgtgaggtgttgggttaagtcccgcaacgagcgcaacccctgcccctagttgccagcggttcggccggggactctagggggactgccggtgacaaaccggaggaaggtggggatgacgtcaagtcatcatggcctttatgtccagggctacacacgtactacaatggccgctacaaagggctgcgaacccgcgagggggagccaatcccaaaaaagcggcctcagttcggattgcagtctgcaactcgactgcatgaaggtggaatcgctagtaatcgcgcatcagcatggcgcggtgaatacgttcccgggccttgtacacaccgcccgtcacatcacgaaagtcggctgtaccagaagccggtgggctaacccgcaagggaggcagccgtccaaggtatggtcggcgattggggtg

SEQ ID NO: 3374 - DNA, 1443 bp, Thermobrachium celere
  source 1..1443: mol_type = unassigned DNA
gacgaacgctggcggcgtgcctaacacatgcaagtcgagcggaggggataggagcttgctccttgaaccttagcggcggacgggtgagtaacacgtgggtaacctgcccttgagagggggataacaggtcgaaaggcctgctaataccgcataacgctaagatgccgcatggcgtcttagccaaaggttaattccgctcaaggatgggcccgcggcccattagctagttggtgaggtaatggctcaccaaggcgacgatgggtagccggcctgagagggtggtcggccacactgggactgagacacggcccagactcctacgggaggcagcagtggggaatattgcgcaatgggggaaaccctgacgcagcgacgccgcgtgagcgatgaaggccttcgggttgtaaagctctgtcttccctgacgataatgacggtaagggaggaggaagccacggctaactacgtgccagcagccgcggtaatacgtaggtggcaagcgttgtccggaattactgggcgtaaagggtgcgtaggcggctctttaagtggggtgtgaaatccctgggctcaacccaggaactgcactccaaactggagagctagagtgcaggagaggaaagcggaattcccagtgtagcggtgaaatgcgtagagattgggaggaacaccagtggcgaaggcggctttctggactgtaactgacgctgaggcacgaaagcgtggggagcaaacaggattagataccctggtagtccacgctgtaaacgatgggtactaggtgtagggggcgaagccctctgtgccgcagctaacgcattaagtaccccgcctggggagtacggtcgcaagattaaaactcaaaggaattgacgggggcccgcacaagcagcggagcatgtggtttaattcgaagcaacgcgaagaaccttaccagggcttgacatccaccgaaccctgtggaaacacgggggtgcccttcggggaacggtgagacaggtggtgcatggttgtcgtcagctcgtgtcgtgagatgttgggttaagtcccgcaacgagcgcaacccttgcctttagttgccagcacttcgggtgggcactctaaagggactgcctgggttaaccaggaggaaggtggggatgacgtcaaatcatcatgccccttatgctctgggctacacacgtgctacaatggccggtacaatgagttgcaaacccgtgagggggagctaatctcaaaaaccggtcccagttcggattgtaggctgcaactcgcctacatgaagccggagttgctagtaatcgcggatcagcatgccgcggtgaatacgttcccgggccttgtacacaccgcccgtcacaccatgagagccggcaacacccgaagccagtgggctaacccgcaagggaggcagctgtcgaaggtggggctggtgattggggtg

SEQ ID NO: 3375 - DNA, 1503 bp, Thermocrinis albus
  source 1..1503: mol_type = unassigned DNA
cgcgaacgctggcggcgtgcctaacacatgcaagtcgtgcgcaggctcatctgtcctctggacagatgggtgctgagcggcaaacgggtgagtaacacgtgcctaacctacccccaggaaggggataaccctccgaaaggggggctaataccctataaagccgggggccactaaggctacccggccaaagggggcctctggtctctgaccatgctcccgcctggggatgggggcgcggcccatcaggtagttggtggggtaacggcctaccaagcctatgacgggtagccggcctgagagggtggccggccacagtgggactgagacacggcccacacccctacggggggcagcagtggggaatcgtgggcaatgggcgaaagcctgaccccgcgacgccgcgtgggggatgaagcccttcggggtgtaaacccctgtcgggggggacgatgcggcctggggcgaacagtctcgggtcgtgacggtacccccagaggaagggacggctaactacgtgccagcagccgcggtaatacgtaggtcccgagcgttgcgcgaattcactgggcgtaaagcgtccgcagccggacgggtaagcggttcgtcaaagcccacggctcaaccgtggaacggcgtaccgaactgcccgtcttgaggcacgctcaggcaggcggaattcccggtgtagcggtgaaatgcgtagatatcgggaggaacaccgaaggcgaaggcagcctgctggggctgtcctgacggtcagggacgaaagctgggggagcgaaccggattagatacccgggtagtcccagccgtaaaccatgggcgcttggcgtcgtccgtaagggcggtgccgcagctaacgcggtaagcgccccgcctggggagtacgggcgcaagcctgaaactcaaaggaattggcgggggcccgcacaaccggtggagcgtctggttcaattcgatgctaaccgaaaaaccttacccgggcttgacatggtgggaaacccctgcgaaagcggggggtgccgtcctctggacggaatcccaccacaggtggtgcatggccgtcgtcagctcgtgtcgtgagatgttgggttaagtcccgcaacgagcgcaacccctgcccttagttgctaccccgtaaggggagcactctaaggggaccgccggcgataagccggaggaaggtggggatgacgtcaggtcagtatgccctttatgcccggggctacacaggcgctacagtggccgggacaatgggatgcgacccagtaatggggagctaatcccccaaacccggtcatggtgcagattgagggctgaaactcgccctcatgaagccggaatcggtagtaatggcggatcagctaagccgccgtgaatacgttctcgggccttgcacacaccgcccgtcacgccacggaagtcagtcttcccggaagcccccgggctaaccggtcttcggaccggaggcaggggacgatgggaaggctggcaactggggcg

SEQ ID NO: 3376 - DNA, 1491 bp, Thermocrinis minervae
  source 1..1491: mol_type = unassigned DNA
cgcgaacgctggcggcgtgcctaacacatgcaagtcgtgcgcaggctcgcccttcggggcgggtgctgagcggcaaacgggtgagtaacacgtgagtaacctgccctcgggaaggggataaccctccgaaaggggggctaataccctataatgccctgggtcactaaggctcagggtgaaaggtggcctctgctctgcatgctaccgcccgaggaggggctcgcggcccatcaggtagttggtggggtaacggcctaccaagcctatgacgggtagccggcctgagagggtggccggccacagtgggactgagacacggcccacacccctacggggggcagcagtggggaatcgtgggcaatgggcgaaagcctgaccccgcgacgccgcgtgggggaagaagcccttcggggtgtaaacccctgtcgggggggacgatgcggccatggacgaatagtccttggtcgtgacggtacccccagaggaagggacggctaactacgtgccagcagccgcggtaatacgtaggtcccgagcgttgcgcgaattcactgggcgtaaagcgtccgcagccggatgggtaagcggtttgtcaaagcccaccgctcaacggtggaaaggcaaaccgaactgcccatcttgaggcaagctcaggtaggcggaattcccggtgtagcggtgaaatgcgtagatatcgggaggaacaccggtggcgaaggcggcctactggagctgtcctgacggtcagggacgaaagctgggggagcaaaccggattagatacccgggtagtcccagccgtaaaccatgggtgctaggcgttgtccctttggggcagtgccggagctaacgcgttaagcgccccgcctggggagtacgggcgcaagcctgaaactcaaaggaattggcgggggcccgcacaaccggtggagcgtctggttcaattcgatgctaaccgaaaaaccttacccgggcttgacatggtgggaaacccttgcgaaagcgaggggtgccgtcctctggacggaatcccaccacaggtggtgcatggccgtcgtcagctcgtgtcgtgagatgttgggttaagtcccgcaacgagcgcaacccctgcccttagttgctacgccggaaggcgggcactctaaggggactgccggcgataagccggaggaaggtggggatgacgtcaggtcagtatgccctttatgcccggggctacacaggcgctacagtggccaggacaatgggaagcgacccagtaatggggagcaaatccctaaacctggtcatggtgcagattgagggctgaaactcgccctcatgaagccggaatcggtagtaatggcggatcagctaagccgccgtgaatacgttctcgggccttgcacacaccgcccgtcacgccacggaagtcagtcttcccggaagccctcgggctaaccacctgcaagggtgggggcagaggacgatgggaaggctggcaactggggcg

SEQ ID NO: 3377 - DNA, 1483 bp, Thermocrinis ruber
  source 1..1483: mol_type = unassigned DNA
cgcgaacgctggcggcgtgcctaacacatgcaagtcgtgcggaggggtgatgagcccctcagcggcaaacgggtgagtaacacgtgagtaacctgcccctgggaaggggataaccctccgaaaggggggctaataccctatatagccggggaccactaaggtctcccggtgaaaggtggcctctgcccttcacgggcatgctaccgcccagggaggggctcgcggcccatcaggtagttggtggggtaacggcctaccaagcctatgacgggtagccggcctgagagggtggccggccacagtgggactgagacacggcccacacccctacggggggcagcagtggggaatcgtgggcaatgggcgaaagcctgaccccgcgacgccgcgtgggggatgaagcccttcggggtgtaaacccctgtcgggggggacgatgtgtcctggggtgaataatcccagggcatgacggtacccccagaggaagggacggctaactacgtgccagcagccgcggtaatacgtaggtcccgagcgttgcgcgaattcactgggcgtaaagcgtccgcagccggacgggtaagcggtgcgtcaaagcccaccgctcaacggtggaacggcgtaccgaactgcctgtcttgaggcacgctcaggcaggcggaattcccggtgtagcggtgaaatgcgtagatatcgggaggaacaccgaaggcgaaggcagcctgctggagctgtcctgacggtcagggacgaaagctgggggagcaaaccggattagatacccgggtagtcccagccgtaaaccatgggcgcttggcgtcgtcctcgtggcggtgccgcagctaacgcggtaagcgccccgcctggggagtacgggcgcaagcctgaaactcaaaggaattggcgggggcccgcacaaccggtggagcgtctggttcaattcgatgctaaccgaaaaaccttacccgggcttgacatggtgggaaacccttgcgaaagcgaggggtgccgtcctctggacggaatcccaccacaggtggtgcatggccgtcgtcagctcgtgtcgtgagatgttgggttaagtcccgcaacgagcgcaacccctgcccttagttgctaccccgaatggggagcactctaaggggactgccggcgataagccggaggaaggtggggatgacgtcaggtcagtatgccctttatgcccggggcaacacaggcgctacagtggccaggacaatgggatgcgacccagtaatggggagcaaatcccccaaacctggtcatggtgcagattgagggctgaaactcgccctcatgaagccggaatcggtagtaatggcggatcagctaagccgccgtgaatacgttctcgggccttgcacacaccgcccgtcacgccacggaagtcagtcttcccggaaggccccgagctaacccgcaagggaggcaggggacgatgggaaggctggcaactggggcg

SEQ ID NO: 3378 - DNA, 1496 bp, unidentified
  source 1..1496: mol_type = unassigned DNA; note = Thermodesulfatator autotrophicus
ggcgaacgctggcggcgcgcctaacacatgcaagtcgagggggaaagggcggcttcggctgcccgagtacaccggcagacgggtgagtaacgcgtgggtaacctgccttggggtctgggataaccacccgaaagggtggctaataccggatacgttcctgaggtgcgagccgagggaagaaagggtgccgctgcatagcaagcacctgccctaagaggggcccgcgtcccatcagctagttggtgaggtaacggctcaccaaggcgacgacgggtagccggcctgagagggtggtcggccacactggcactgagacacgggccagactcctacgggaggcagcagtggggaatcttgggcaatggccgaaaggctgacccagcgacgccgcgtgggggaagaaggccttcgggtcgtaaacccctgtcaaggaggaagaagccctttctggttaagagctaggaggggttgacggtactcctggaggaagccacggctaactccgtgccagcagccgcggtaatacggaggtggcgagcgttgcccggaatcactgggcgtaaagggggcgtaggcggccggacgagtcggacgtgaaagcccggggctcaaccccggaattgcgttcgatactgtctggcttgaggtccggagaggccggcggaattcccggtgtaggggtgaaatccgtagatatcgggaggaacaccggtggcgaaggcggccggctggacggcacctgacgctgaggcccgaaagcgtggggagcaaaccggattagatacccgggtagtccacgccgtaaacgatgggtgctaggtgtggggggttagaccttccgtgccgaagctaacgcaataagcaccccgcctggggagtacggccgcaaggctgaaactcaaaggaattgacgggggcccgcacaagcggtggagcacgtggtttaattcgatgcaaagcgaagaaccttacctgggtttgacatgctaggggaccttccagagatgggagggtgcccgggttttacccgggagccctagcacaggtgctgcatggctgtcgtcagctcgtgtcgtgagatgttgggttaagtcccgcaacgagcgcaaccctcgcccttagttgccagcgggtagagccgggcactctagggggactgccggggacaacccggaggaagggggggatgacgtcaagtcatcatggcccttatgcccagggctacacacgtgctacaatgggcggtacagagggaagcgaacccgcaagggggagcagaacccagaaagccgtcctcagtacggatcggggtctgcaactcgaccccgtgaagccggaatcgctagtaacggcggatcagcatgccgccgtgaatacgttcccgggccttgtacacaccgcccgtcacaccacggaagctggctctgcccgaagtcgctatcccaacccccggtagggggagggaggcgccgacggcagggctggtgactggggtg

SEQ ID NO: 3379 - DNA, 1496 bp, Thermodesulfatator indicus
  source 1..1496: mol_type = unassigned DNA
ggcgaacgctggcggcgcgcctaacacatgcaagtcgagggggaaagggtagcttcggctacccgagtacaccggcagacgggtgagtaacgcgtgggtaacctaccttggggtctgggataaccacccgaaagggtggctaataccggatacgttcctgaggcgcgagccgagggaagaaagggtgccactgcatagcaagcacctgccctaagaggggcccgcgtcccatcagctagttggtgaggtaacggctcaccaaggcaacgacgggtagccggcctgagagggtggtcggccacactggcactgagacacgggccagactcctacgggaggcagcagtggggaatcttgggcaatggccgaaaggctgacccagcgacgccgcgtgggggaagaaggccttcgggtcgtaaacccctgtcaaggaggaagaagcccttactggttaagagctggtaggggttgacggtactcctggaggaagccacggctaactccgtgccagcagccgcggtaatacggaggtggcgagcgttgcccggaatcactgggcgtaaagggggcgtaggcggccggacgagtcggacgtgaaagcccggggctcaaccccggaattgcgttcgatactgtctggcttgaggtccggagaggccggcggaattcccggtgtaggggtgaaatccgtagatatcgggaggaacaccggtggcgaaggcggccggctggacggcacctgacgctgaggcccgaaagcgtggggagcaaaccggattagatacccgggtagtccacgccgtaaacgatgggtgctaggtgtggggggttaaaccttccgtgccgaagctaacgcaataagcaccccgcctggggagtacggccgcaaggctgaaactcaaaggaattgacgggggcccgcacaagcggtggagcacgtggtttaattcgatgcaaagcgaagaaccttacctgggtttgacatgctaggggacccctcagagatgagggggtgcccgggctttgcctgggagccctagcacaggtgctgcatggctgtcgtcagctcgtgtcgtgagatgttgggttaagtcccgcaacgagcgcaacccttgcccttagttgccagcgggtagagccgggcactctagggggactgccggggacaacccggaggaagggggggatgacgtcaagtcatcatggcccttatgcccagggctacacacgtgctacaatgggcggtacagagggaagcgaacccgtaagggggagcaaatcccagaaagccgctctcagtacggatcggggtctgcaactcgaccccgtgaagccggaatcgctagtaacggcggatcagcatgccgccgtgaatacgttcccgggccttgtacacaccgcccgtcacaccacgggagctggctctgcccgaagtcgctatcccaacccccggaagggggagggaggcgccgacggcagggctggtgactggggtg

SEQ ID NO: 3380 - DNA, 1394 bp, unidentified
  source 1..1394: mol_type = unassigned DNA; note = Thermodesulfitimonas autotrophica
cggcggacgggtgagtaacgcgtggataacctgcccgggagaccgggataactctgggaaactggagctaataccggatacgcttctgctggggcatcctggtggaaggaaagggattaccgctctcggatgggtccgcgtcccattagcttgttggcggggtaacggcccaccaaggcgacgatgggtagccggcctgagagggtggtcggccacactgggactgagacacggcccagactcctacgggaggcagcagtggggaatattccgcaatgggcgcaagcctgacggagcgacgccgcgtgggggacgaaggccttcgggttgtaaacccctgtcgtaggggaagatgcccctttggggtgacggtaccctacaagaaagccccggctaactacgtgccagcagccgcggtaagacgtagggggcgagcgttgtccggaatcactgggcgtaaagggcgtgtaggcggcttcagaagtcgcgggtgaaatctccaggctcaacctggaggctgcctgcgaaaccatggagcttgagggcaggagaggggagtggaattcccggtgtagcggtgaaatgcgtagatatcgggaggaacaccagtggcgaaggcggctctctggcctggccctgacgctgaggcgcgaaagctgggggagcaaacaggattagataccctggtagtcccagccgtaaacgatgggcactaggtgtgggggaggatctaactcttccgtgccgaaggtaacctattaagtgccccgcctggggagtacggccgcaaggttgaaactcaaaggaattgacgggggcccgcacaagcggtggagcatgtggtttaattcgacgcaacgcgaagaaccttaccagggcttgacatgccggtggtagtgaaccgaaaggggaacgacccatggggtaacttatgggagccggcacaggtggtgcatggctgtcgtcagctcgtgtcgtgagatgttgggttaagtcccgcaacgagcgcaacccttacccttagttgccagcgggtgaagccgggcactctaagggactgccgtcgacaagacggaggaaggtggggatgacgtcaagtcatcatgccctttatgccctgggctacacacgtgctacaatggccggtacagcgggaagcgatgccgcgaggcggagcaaatcccttaaaaccggtctcagttcggattgcaggctgcaactcgcctgcatgaaggcggaatcgctagtaatcgccggtcagcacacggcggtgaatacgttcccgggccttgtacacaccgcccgtcacaccacgaaagccggcaacacccgaagtcgctgttcctaacccgcaagggagggagccgccgaaggtggggtcggtgattggggtg

SEQ ID NO: 3381 - DNA, 1444 bp, unidentified
  source 1..1444: mol_type = unassigned DNA; note = Thermodesulfobium acidiphilum
gacgaacgctggcggcgtgcctaacacatgcaagtcgaacggagatagaagcttgcttctatcttagtggcaaacgggtgagtaacgcgtgggtaacctacccttaagtgggggataacaggtcgaaaggcctgctaataccgcatacctttcaagcacacaagtgtttgaaagaaaggagcaatccgcttgaggaggggcctgcgtcctatcaggtagttggtgaggtaatggctcaccaagcctatgacgggtagctggtctgagaggatggtcagccacactggaactgagacacggtccagactcctacgggaggcagcagtggggaatattccgcaatgggcgaaagcctgacggagcgacgccgcgtggacgatgaagaccctatgggttgtaaagtccttttgtgagggaagaagatctgacggtacctcacgaataagccacggctaactacgtgccagcagccgcggtaaaacgtaggtggcaagcgttgtccggaattactgggcgtaaagagtgcgtaggctgttttgtaagtctcaggtgaaatctatcagctcaactgataaactgcttgagatactgcagaacttgagggcaggagaggagagtggaattcccggtgtagcggtgaaatgcgtagatatcgggaggaacaccagtggcgaaggcggctctctggactgtccctgacgctgtggcacgaaagctaggggagcaaacaggattagataccctggtagtcctagccgtaaacgatggatgcttggtgtaggaggttataccttctgtgccgaagctaacgcgttaagcatcccgcctgggaactacggccgcaaggttaaaactcaaaggaattgacgggggcccgcacaagcggtggagcatgtggtttaattcgacgcaacgcgaagaaccttaccagggcttgacatgtaagtggtacggatccgaaaggtgaaggaaccgagcttgctcggtagcttacacaggtggtgcatggctgtcgtcagctcgtgccgtgaggtgttgggttaagtcccgcaacgagcgcaacccctatcgttagttactactctgaaaaagagaggactctaatgagactgccggcgataagccggaggaaggaggggacgacgtcaagtcatcatgccctttatgccctgggcgacacacgtgctacaatggctggtacaacgggttgcaacaaagcgatttggagccaatcccttaaagccagcctcagttcggatcgtaggctgaaactcgcctacgtgaagtcggaatcgctagtaatcgccaatcagccacgtggcggtgaatacgttcccgggccttgtacacaccgcccgtcacaccacggaagctggcaatgcccgaagccgctgacccaaccattaggagggaggcgtcgaaggcagggtcggtgactggggtg

SEQ ID NO: 3382 - DNA, 1442 bp, Thermodesulfobium narugense
  source 1..1442: mol_type = unassigned DNA
gacgaacgctggcggcgtgcctaacacatgcaagtcgaacggagatagaagcttgcttctatcttagtggcaaacgggtgagtaacgcgtgggtaacctacccttaagtgggggataacaggtcgaaaggcctgctaataccgcatacctttcaagcacacaagtgtttgaaagaaaggagtaatccgcttgaggaggggcctgcgtcctatcaggtagttggtgaggtaacggctcaccaagcctatgacgggtagctggtctgagaggatggtcagccacactggaactgagacacggtccagactcctacgggaggcagcagtggggaatattccgcaatgggcgaaagcctgacggagcgacgccgcgtggacgatgaagaccctatgggtcgtaaagtccttttgtgagggaagaagctctgacggtacctcacgaataagccacggctaactacgtgccagcagccgcggtaaaacgtaggtggcaagcgttgtccggaattactgggcgtaaagagtgcgtaggctgttttgtaagtctcaggtgaaatctatcagctcaactgataaactgcttgagatactgcagaacttgagggcaggagaggagagtggaattcccggtgtagcggtgaaatgcgtagatatcgggaggaacaccagtggcgaaggcgactctctggactgtccctgacgctgtggcacgaaagctaggggagcaaacaggattagataccctggtagtcctagccgtaaacgatggatgcttggtgtaggaggttataccttctgtgccgaagctaacgcgttaagcatcccgcctgggaactacggccgcaaggttaaaactcaaaggaattgacgggggcccgcacaagcggtggagcatgtggtttaattcgacgcaacgcgaagaaccttaccagggtttgacatgtaagtggtacggatccgaaaggtgaaggaaccgagcttgctcggtagcttacacaggtggtgcatggctgtcgtcagctcgtgccgtgaggtgttgggttaagtcccgcaacgagcgcaacccctatcgttagttactactcgaaaagagaggactctaatgagactgccggcgataagccggaggaaggaggggacgacgtcaagtcatcatgccctttatgccctgggcgacacacgtgctacaatggctggtacaacgggttgcaacaaagcgatttggagccaatcccttaaagccagcctcagttcggatcgtaggctgaaactcgcctacgtgaagtcggaatcgctagtaatcgccaatcagccacgtggcggtgaatacgttcccgggccttgtacacaccgcccgtcacaccacggaagctggcaatgcccgaagccgctgacccaaccattaggagggaggcgtcgaaggcagggtcggtgactggggtg

SEQ ID NO: 3383 - DNA, 1490 bp, Thermodesulforhabdus norvegica
  source 1..1490: mol_type = unassigned DNA
aacgctggcggcgtacctaacacattcaactcgcacgagaaaggctgggtgaaagctggccgagtaaagtggcgcacgggtgagtaacgcgtgagtgacctaccctggtgtctgggataaccctgcgaaagtggggctaataccggatgagcctacctggaggtgatctgggtagggaaagggggcctctcggagaagctcctgcactgggatgggctcgcgtcctatcagctagttggtggggtaatggcctaccaaggctacgacgggtagccggcctgagagggtggtcggccacactggcactggaacacgggccagactcctacgggaggcagcagtgagggatattgcgcaatggccgcaaggctgacgcagcgacgccgcgtgggtgaggaaggccttcgggttgtaaagccctgtcggcggggaagaaccttcatggggttaatagccctgtggactgacggtacccgcggaggaagcaccggctaactccgtgccagcagccgcggtaatacggagggtgcgagcgttactcggaattactgggcgtaaagggcgcgtaggcggccgtgcaagtctggtgtgaaagcccggggcttaaccctggaagtgcactggatactgtgcggcttgagtgccggagaggaggggggaattcccggtgtagcggcgaaatgcgtagatatcgggaggaataccggtggcgaaggcgcccctctggacggttactgacgctgaggcgcgaaagcgtggggagcaaacaggattagataccctggtagtccacgctgtaaacgatgggacctaggtggtgcgggttataactctgccgtgccgtagctaacgcgttaagtgggccgcctggggagtacggccgcaaggttaaaactcaaaggaattgacgggggcccgcacaagcggtggagcatgtggtttaattcgatgcaacgcgaagaaccttacctgggtttgacatccccggaacctggtggaaacactggggtgccccttattggggagccgggagacaggtgctgcatggctgtcgtcagctcgtgtcgtgagatgttgggttaagtcccgcaacgagcgcaacccctgcctctagttgccagcgggtaaggccgggcactctagagggactgccggtgataaaccggaggaaggtggggacgacgtcaagtcatcatggcctttatgcccagggctacacacgtgctacaatggccggtacaaagggatgcgaacctgcgagggggagcaaatcccaaaaagccggtcccagttcggatcggagtctgcaactcgactccgtgaaggcggaatcgctagtaatcgcggatcagcatgccgcggtgaatacgttcccgggccttgtacacaccgcccgtcacaccacgaaagtcggctgtaccagaagtgcgtgggccaaccgcgattgtgtcgtggggcagcgtaccaaggtatggtcgatgattggggtg

SEQ ID NO: 3384 - DNA, 1457 bp, Thermodesulfovibrio aggregans
  source 1..1457: mol_type = unassigned DNA
agcgaacgctggcggcgtgcctaacacatgcaagtcgagcggactacatgaaggggtaactcttcatgtagttagcggcgaacgggtgagtaacacgtgggtaacctaccctcaggtgggggataactcggggaaacctgagctaataccccataagactacgggctgaaaggcttgtagtaaaagaagcaattcgcctgaggatgggcccgcggcctatcaggtagttggtagggtaatggcctaccaagcctatgacgggtagccgagctgagaggctggccggccacactgggactgagacacggcccagactcctacgggaggcagcagtggggaatcttgggcaatgggcgaaagcctgacccagcgacgccgcgtgggggaagaaggccttcgggttgtaaaccccttttgcaggggacgacacaggacggtaccctgcgaataagccacggctaactctgtgccagcagccgcggtaagacagaggtggcgagcgttgctcggatttactgggcttaaagggcgcgtaggtggccttgtaagtcaaaggtggaattccacagctcaactgtggaactgcctttgatactgcaaggcttgagtcaggtagaggagggcggaattcccggtgtagcggtgaaatgcgtagatatcgggaggaaggccggtggcgaaggcggccctctgggcctgtactgacactgaggcgcgaaagcgtggggagcaaacaggattagataccctggtagtccacgccctaaacggtgggcactaggtgtgggatccgtatggattccgtgccgaagggaaaccattaagtgccccgcctggggagtacggccgcaaggttgaaactcaaaggaattgacgggggcccgcacaagcggtggagcatgtggtttaattcgatgcaacgcgaagaaccttacctgggcttgacatgctggtggtaggaacccgaaagggggacgaccttaggggaaaccctaaggagccagcacaggtgctgcatggctgtcgtcagctcgtgccgtgaggtgttgggttaagtcccgcaacgagcgcaacccctatcccctgttgccagcggataatgccgggcactctggggaaactgccggcgacaagccggaggaaggtggggatgacgtcaagtccgcatggcccttatgcccagggctacacacgtgctacaatgggcgctacaaagggttgcgaacccgcgagggggagccaatccctaaaaagcgctctcagttgggatcggagtctgcaactcgactccgtgaacccggaatcgctagtaatcgcgcatcagctacggcgcggtgaatacgttcccgggccttgtacacaccgcccgtcacaccacgagagctggcttcatccgaagttggtgggctaacccgcaagggaggcagccaacgaagatggggctggtgattggggtg

SEQ ID NO: 3385 - DNA, 1457 bp, Thermodesulfovibrio yellowstonii
  source 1..1457: mol_type = unassigned DNA
agcgaacgctggcggcgtgcctaacacatgcaagtcgagcggaccagaaatggaggtaactttatttctggttagcggcgaacgggtgagtaacacgtgggtaacctgccctcaggaggaggataactcggggaaacctgagctaatactccataagaccacgagctgaaatgcttgtggtaaaagaagcaattcacctgaggatgggcccgcggcctatcaggtagttggtagggtaatggcctaccaagcctatgacgggtagccgagctgagaggctggccggccacactgggactgagacacggcccagactcctacgggaggcagcagtggggaatattgggcaatgggcgaaagcctgacccagcgacgccgcgtgggggaagaaggccttcgggttgtaaaccccttttgcaggggacgacacaggacggtaccctgcgaataagccacggctaactctgtgccagcagccgcggtaagacagaggtggcaagcgttgctcggattcactgggcttaaagggcgcgtaggtggttttgtaagtctaaggtggaattccacagcttaactgtgggactgcctttgatactgcaaggcttgagtcaggcagaggagggcggaattcccggtgtagcggtgaaatgcgtagatatcgggaggaaggcctgtggcgaaggcggccctctgggcctgcactgacactgaggcgcgaaagcgtggggagcaaacaggattagataccctggtagtccacgccctaaacggtgggcactaggtgtggggtccatatggactctgtgccgaagggaaaccattaagtgccccgcctggggagtacggccgcaaggttgaaactcaaaggaattgacgggggcccgcacaagcggtggagcatgtggtttaattcgatgcaacgcgaagaaccttacctgggcttgacatgctggtggtaggaacccgaaagggggacgaccttaggggtaactctaaggagccagcacaggtgctgcatggctgtcgtcagctcgtgccgtgaggtgttgggttaagtcccgcaacgagcgcaacccctatcccctgttgccatcaggtaaagctgggcactctggggaaactgccggcgacaagccggaggaaggtggggatgacgtcaagtccgcatggcccttatgtccagggctacacacgtgctacaatgggcgctatagagggtagcaagcccgcgagggtgagccaatccctaaaaagcgctctcagttgggatcggagtctgcaattcgactccgtgaacccggaatcgctagtaatcgcgcatcagctacggcgcggtgaatacgttcccgggccttgtacacaccgcccgtcacaccacgagagctggcttcatccgaagttggtgagctaacccgtaagggaggcagccaacgaagatggggctggtgattggggtg

SEQ ID NO: 3386 - DNA, 1443 bp, Thermoflavimicrobium dichotomicum
  source 1..1443: mol_type = unassigned DNA
gatgaacgctggcggcgtgcctaatacatgcaagtcgagcggggttatttccttcgggaaataacctagcggcgaacgggtgagtaacacgtgggcaacctgcccctaagactgggataactccgggaaaccggggctaataccagataacctcttccctcgcatgagggaagagtaaaaggcttttgccacttagggatgggcccgcggcgcattagctagttggtgaggtaacggctcaccaaggcgacgatgcgtagccgacctgagagggtgaccggccacactgggactgagacacggcccagactcctacgggaggcagcagtagggaattttccgcaatgggcgaaagcctgacggagcaacgccgcgtgagcgaagacggccttcgggttgtaaagctctgttcttggggaagaaggaagtgacggtacccaaggagaaagccccggctaactacgtgccagcagccgcggtaatacgtagggggcgagcgttatccggaattattgggcgtaaagcgcgcgcaggcggccaggtaagtcggatgtgaaaggctacggctcaaccgtagagcggcatccgaaactgtctggcttgagtgcaggagaggggagcggaattcccggtgtagcggtggaatgcgtagagatcgggaggaacaccagtggcgaaggcggctctctggcctgtaactgacgctgaggcgcgaaagcgtggggagcaaacaggattagataccctggtagtccacgccgtaaacgatgagtgctaggtgttggagggactctcccttcagtgccgcaggtaacccaataagcactccgcctggggagtacggtcgcaagactgaaactcaaaggaattgacgggggcccgcacaagcggtggagcatgtggtttaattcgaagcaacgcgaagaaccttaccagggcttgacatcccgctgaccggtgtagagatacgcctttccccttcgggggacagcggtgacaggtggtgcatggttgtcgtcagctcgtgtcgtgagatgttgggttcagtcccgcaacgagcgcaacccttatctccagttgccagcacttcgggtgggcactctggagagacagccggtgaaagccggaggaaggtggggatgacgtcaaatcatcatgccccttatgtcctgggctacacacgtgctacaatggctggtacaaagggcagcgaacccgcgagggggagccaatcccaaaaagccagtctcagttcggattgcaggctgcaactcgcctgcatgaagccggaatcgctagtaatcgcggatcagcatgccgcggtgaatacgttcccgggccttgtacacaccgcccgtcacaccacgagagtctgcaacacccgaagtcggtgaggcaaccgcaaggagccagccgccgaaggtggggcagatgattggggtg

SEQ ID NO: 3387 - DNA, 1491 bp, unidentified
  source 1..1491: mol_type = unassigned DNA; note = Thermoflexus hugenholtzii
ggtgaacgctggcggcgtgcctaacacatgcaagtcgagcggggagggggtaggcgtaagccgagccctcctagcggcaaacgggtgagtaacacgtgggtgacctgccccggcgtgggggataaccctccgaaaggggggctaataccgcatacgctcggcggggacggcccgtcgaggaaaggcccggggaggagacgaaccgggtcgcgccgggaggggcccgcggcccatcaggtagttggtggggtaatggcccaccaagccgatgacgggtagccggcctgagagggtgaccggccacacgggcactgagacacgggcccgactcctacgggaggcagcagtggggaatcttgggcaatgggcgaaagcctgacccagcgacgccgcgtgcgggaagaagcccttcggggtgtaaaccgcttttgccggggacgagaaaggacggtacccggcgaataaggcccggccaactacgtgccagcagccgcggtaatacgtaggggccgagcgttacccggatttactgggcgtaaagtgcgcgtaggcggggctctaagtcgggcgtgaaagccccgggctcaactcggggaggccgctcgatactggagcccttgagggcgggagagggtggtggaattcccggtgtagcggtgaaatgcgtagatatcgggaggaacaccagtggggaagccggccacctggcccgtccctgacgctgaggcgcgaaagcgtggggagcgaaccggattagatacccgggtagtccacgccctaaacgatgcgcactaggtatggggggctgaccacgctctccgtgccgaagctaacgcgttaagtgcgccgcctgggtagtacggccgcaaggctgaaactcaaaggaattggcgggggcccgcacaagcagcggagcgtgtggtttaattcgatgcaaaacgaagaaccttacccgggcttgacatgccggtggtaccgacccgaaagggaagggaccccgcaaggggagccggcacaggtgctgcatggctgtcgtcagctcgtgccgtgaggtgtcgggttaagtcccgcaacgagcgcaacccctgcccctagttacacgtgtctagggggactgccggcgacaagccggaggaaggtggggatgacgtcaagtcagcatggccttgatgcccggggctacacacacgctacaatgcccggtacaatgggttgccaacccgcgagggggagccaatcccatcaaagccgggctcagttgggattgcaggctgcaacccgcctgcatgaacgcggagttgctagtaaccgccggtcagccatacggcggtgaatacgttcccgggccttgcacacaccgcccgtcacgtcatgggagtcggcaacgcctgaagccggtggcccaaccctcccccacccaggacctctccccggaggggtcttgcgtgggggagggagggagccgtcgaaggcggggccggcgactgggac

SEQ ID NO: 3388 - DNA, 1464 bp, unidentified
  source 1..1464: mol_type = unassigned DNA; note = Thermogutta terrifontis
agtgaacgttggcggcgtggattaggcatgcaagtcgtgcgacgaggcccgcaagggtgctcgagcggcgaaagggagagtaatgcatgggtaacctgccctcgggactgggatagccgcgggaaactgcgggtaataccagataacgtcgcaagccttcgggtttgcgaccaaaggtgcgagtccgcccgaggaggggcccatgtcctatcagctagttggtggggtaacggctcaccaaggctacgacgggtacggggtgtgagagcatgtccccgctcactgggactgagacactgcccagacacctacgggtggctgcagtcgagaatcttcggcaatgggcgcaagcctgaccgagcgacgccgcgtgcgggacgaaggccgtttggttgtaaaccgctgtcaggggggaggaaatgtcggtcctcagggccggcttgacctatccccagaggaaggacgggctaagtccgtgccagcagccgcggtaagacggaccgtccgaacgttactcggaattactgggcttaaagggtgcgtaggcggccttgcaagtcgggtgtgaaatccctcggctcaaccgaggaattgcgctcgatactgcggggctcgagggagatagaggtgagcggaacttgcggtggagcggtgaaatgcgttgatatcgcaaggaacaccggaggcgaaagcggctcactgggtctctcctgacgctgaggcacgaaagctaggggagcgaacgggattagataccccggtagtcctagccctaaacgatgagcactagaccgaggaactctccatggtttcttggtcgtagggaaaccgttaagtgctccgcctggggagtatggtcgcaaggctgaaactcaaaggaattgacgggggctcacacaagcggtggaggatgtggcttaattcgaggctacgcgaaaaaccttatcccggtcttgacatgcacggattaaccccgtgaaagcggggccacgcctctctgaggtggaacgtgcacaggtgctgcatggctgtcgtcagctcgtgtcgtgagatgtcgggttaagtcccttaacgagcgaaacccctgtcgctagttgccagcgggtcatgccgggcactctagcgagactgccggtgttaaaccggaggaaggtggggatgacgtcaagtcctcatggcccttatgaccggggctgcacacgtcctacaatggcgcgtacaaagggaagcaaacccgcgagggggagcaaatcccaaaaagcgcgccccagttcagattgcaggctgcaacccgcctgcatgaagccggaatcgctagtaatcgcggatcagcatgccgcggtgaatgtgttcctgagccttgtacacaccgcccgtcaagccacgaaagtgggggacatccgaagtcgccgggctaacccgaaagggaggcaggcgccgaagatggactccgcgattgggact

SEQ ID NO: 3389 - DNA, 1514 bp, Thermohydrogenium kirishiense
  source 1..1514: mol_type = unassigned DNA
gacgaacgctggcggcgtgcctaacacatgcaagtcgagcgatccggcactcaactaagcgcttacaggaagaaaagacgggaaagagaaaaaaggcaggaagagaaaaaaatatgagtaaacgcggagttgagtgtcggatagcggcggacgggtgagtaacgcgtggacaatctaccctgtagactgggataacacctcgaaaggggtgctaataccggataatgtcgagaagcggcatcgcttttcgaagaaaggagggaatccgctataggaggagtccgcgtcccattagctagttggtggggtaacggcccaccaaggcgacgatgggtagccggcctgagagggtgaacggccacactggaactgagacacggtccagactcctacgggaggcagcagtggggaatattgtgcaatgggggaaaccctgacacagcgacgccgcgtgagtggagaaggccttcgggtcgtaaagctcaatagtatgggaagaaagaaatgacggtaccatacgaaagccccggctaactacgtgccagcagccgcggtaatacgtagggggcgagcgttgtccggaattactgagcgtaaagagcacgtaggcggctataaaagtcagatgtgaaaaacctgggctcaaccgagggtatgcatctgaaactatatagcttgagtcaaggagaggagagcggaattcctggtgtagcggtgaaatgcgtagagatcaggaagaataccagtggcgaaagcggctctctggacttgaactgacgctgaggtgcgaaagcgtggggagcaaacaggattagataccctggtagtccacgccgtaaacgatggatactaggtgtgggttagtataatccgtgccggagttaacgcaataagtatcccgcctggggagtacggccgcaaggttgaaactcaaaggaattgacgggggcccgcacaagcagcggagcatgtggtttaattcgaagcaacgcgaagaaccttaccagggcttgacatccacagaatcgagtagaaatacttgagtgcctcgtaagaggagctgtgagacaggtggtgcacggttgtcgtcagctcgtgtcgtgagatgttgggttaagtcccgcaacgagcgcaacccctgttggtagttaccagcgtaaagacggggactctaccgagactgccgtggaaaacacggaggaaggcggggatgacgtcaaatcatcatgccctttatgccctgggctacacacgtgctacaatggcctgaacagagggcagcgaaggagcgatccggagcgaatcccagaaaacaggtcccagttcagattgcaggctgcaacccgcctgcatgaagacggagttgctagtaatcgcggatcagcatgccgcggtgaatacgttcccgggccttgtacacaccgcccgtcacaccacgagagtttacaacacccgaagtcagtgacctaaccgaaagggaggagctgccgaaggtggggtaaatgattggggtg

SEQ ID NO: 3390 - DNA, 1427 bp, unidentified
  source 1..1427: mol_type = unassigned DNA; note = Thermolongibacillus altinsuensis
agtcgagcggaccgaatggaagcttgctttcattcggttagcggcggacgggtgagtaacacgtgggtaacctgcccgtaagaccgggataacttcgggaaaccggagctaataccggataacaccgaggatcgcatgatccttggttgaaaggtggcttcggctaccacttacggatgggcccgcggcgcattagctagttggtgaggtaacggctcaccaaggcgacgatgcgtagccggcctgagagggtgaccggccacactgggactgagacacggcccagactcctacgggaggcagcagtagggaatcttccgcaatggacgaaagtctgacggagcgacgccgcgtgagcgaagaaggccttcgggtcgtaaagctctgttgttagggaagaacaagtaccgttcgaatagggcggtaccttgacggtacctaacgagaaagccccggctaactacgtgccagcagccgcggtaatacgtagggggcgagcgttgtccggaattattgggcgtaaagcgcgcgcaggcggtcccttaagtctgatgtgaaagcccacggctcaaccgtggagagccattggaaactggggggacttgagtgcagaagaggagagcggaattccatgtgtagcggtgaaatgcgtagagatttggaggaaccccagtggcgaaggcggctctctggtctgtaactgacgctgaggccggaaaggctggggagccaaccagattagattccctggtagttcacgccgtaaacgatgagtgctaagtgttagagggtttaaccctttagtgctgtagctaacgcattaagcactccgcctggggagtacggccgcaaggctgaaactcaaaggaattgacgggggcccgcacaagcggtggagcatgtggtttaattcgaagcaacgcgaagaaccttaccaggtcttgacatcccctgacaaccctagagatagggcgttccctcccttcggggagggacagggtgacaggtggtgcatggttgtcgtcagctcgtgtcgtgagatgttgggtttaagtcccgcaacgagcgcaacccttgaccttagttgccagcgagtaaagtcgggcactctaaggtgactgccggctaaaagtcggaggaaggtggggatgacgtcaaatcatcatgccccttatgacctgggctacacacgtgctacaatgggcggtacaaagggtcgcgaagccgcgaggtggagctaatcccaaaaagccgctctcagttcggattgcaggctgcaactcgcctgcatgaagccggaatcgctagtaatcgcggatcagcatgccgcggtgaatacgttcccgggccttgtacacaccgcccgtcacaccacgagagcttgcaacacccgaagtcggtgaggtaacccttacgggagccagccg

SEQ ID NO: 3391 - DNA, 1467 bp, Thermomonas haemolytica
  source 1..1467: mol_type = unassigned DNA
agtgaacgctggcggcaggcctaatacatgcaagtcgaacggcagcacagtggagcttgctccatgggtggcgagtggcggacgggtgaggaatacgtgggaatctgcccagtcgtgggggataacgtagggaaacttacgctaataccgcatgcgcccttcgggggaaagccggggaccttcgggcctggcgcgattggatgagcccacgtcggattagctagttggcggggtaacggcccaccaaggcgacgatccgtagctggtctgagaggatgatcagccacactggaactgagacacggtccagactcctacgggaggcagcagtagggaatattggacaatgggcgcaagcctgatccagccatgccgcgtgagtgaagaaggccctcgggttgtaaagctcttttgtccggaaagaaaagcatcgggttaataccccggtgttctgacggtaccggaagaataagcaccggctaacttcgtgccagcagccgcggtaatacgaagggtgcaagcgttactcggaattactgggcgtaaagcgtgcgtaggtggttcgttaagtctgatgtgaaagccctgggctcaacctgggaatggcattggaaactggcggactggagtgcggtagagggtagcggaattcccggtgtagcagtgaaatgcgtagagatcgggaggaacatccgtggcgaaggcggctacctggaccagcactgacactgaggcacgaaagcgtggggagcaaacaggattagataccctggtagtccacgccctaaacgatgcgaactggatgttgggtgcaacttggcactcagtatcgaagctaacgcgttaagttcgccgcctggggagtacggtcgcaagactgaaactcaaaggaattgacgggggcccgcacaagcggtggagtatgtggtttaattcgatgcaacgcgcagaaccttacctggccttgacatgcacggaagcttccagagatgggagtgtgccttcgggaaccgtgacacaggtgctgcatggctgtcgtcagctcgtgtcgtgagatgttgggttaagtcccgcaacgagcgcaacccttgtccttagttgccagcacgtaatggtgggaactctaaggagaccgccggcgacaagccggaggaaggtggggatgacgtcaagtcatcatggcccttacggccagggctacacacgtactacaatggtggggacagagggctgcgatgccgcgaggcggagccaatcccagaaaccccatcccagtccggattggagtctgcaactcgactccatgaagtcggaatcgctagtaatcgcagatcagcattgctgcggtgaatacgttcccgggccttgtacacaccgcccgtcacaccatgggagtctgttgcaccagaagcasgtagcttaaccgcaaggagggcgcttgccackgtgtggccgatsactggggtk

SEQ ID NO: 3392 - DNA, 1467 bp, Thermomonas hydrothermalis
  source 1..1467: mol_type = unassigned DNA
agtgaacgctggcggcaggcctaatacatgcaagtcggacggcagcacagtggagcttgctccatgggtggcgagtggcggacgggtgaggaatacatgggaatctgcccagtcgtgggggataacgtagggaaacttacgctaataccgcatgcgcccttcgggggaaagccggggaccttcgggcctggcgcgattggatgagcccatgtcggattagctagttggcggggtaaaggcccaccaaggcgacgatccgtagctggtctgagaggatgatcagccacactgggactgagacacggcccagactcctacgggaggcagcagtagggaatattggacaatgggggcaaccctgatccagccatgccgcgtgagtgaagaaggccttcgggttgtaaagctcttttgtccgggaagaaaagcatctggctaatacctggatgtgttgacggtaccggaagaataagcaccggctaacttcgtgccagcagccgcggtaatacgaagggtgcaagcgttactcggaattactgggcgtaaagcgtgcgtaggtggtctgctaagtctgatgtgaaagccctgggctcaacctgggaatggcattggaaactggcgggctagagtgcggtagagggtagtggaattcccggtgtagcagtgaaatgcgtagagatcgggaggaacattcgtggcgaaggcggctacctggaccagcactgacactgaggcacgaaagcgtggggagcaaacaggattagataccctggtagtccacgccctaaacgatgcgaactggaggttgggtgcactttggcgctcagtctcgaagctaacgcgttaagttcgccgcctggggagtacggtcgcaagactgaaactcaaaggaattgacgggggcccgcacaagcggtggagtatgtggtttaattcgatgcaacgcgcagaaccttacctggccttgacatgcacggaatcctgcagagatgtgggagtgccttcgggaaccgtgacacaggtgctgcatggctgtcgtcagctcgtgtcgtgagatgttgggttaagtcccgcaacgagcgcaacccttgtccttagttgccagcacgtaaaggtgggaactctaaggagaccgccggcgacaagccggaggaaggtggggatgacgtcaagtcatcatggcccttacggccagggctacacacgtactacaatggtggggacagagggctgcgatgccgcgaggcggagccaatcccagaaaccccatctcagtccggattggagtctgcaactcgactccatgaagtcggaatcgctagtaatcgcagatcagcattgctgcggtgaatacgttcccgggccttgtacacaccgcccgtcacaccatgggagtctgttgcaccagaagcaggtagcttaaccgcaaggagggcgcttgccacggtgtggccgatgactggggtg

SEQ ID NO: 3393 - DNA, 1449 bp, unidentified
  source 1..1449: mol_type = unassigned DNA; note = Thermophagus xiamenensis
gatgaacgctagcgacaggcctaacacatgcaagtcgaggggtaacaggggcagcttgctgcctgctgacgaccggcgcacgggtgagtaacgcgtatgcaacctgtctttaacaggaggatagcccccggaaacggggattaatactccatgatacttgtgtttcgcatgagatacaagttaaagctgaggcggttaaaggtgggcatgcgtgacattagctagttggtgaggtaacggctcaccaaggcgacgatgtctaggggttctgagaggaaggtcccccacactggtactgagacacggaccagactcctacgggaggcagcagtgaggaatcttggtcaatggacggaagtctgaaccagccatgtcgcgtgcaggaagacggccctacgggttgtaaactgcttttgtacgggaataaaagccattacgagtagtggattgaatgtaccgtacgaataagcatcggctaactccgtgccagcagccgcggtaatacggaggatgcgagcgttatccggacttattgggtttaaagggtgcgtaggcggaatggtaagtcagcggtgaaatactacagctcaactgtagggatgccgatgatactgtcattcttgagtatacttgaggcatgcggaatgagtagtgtagcggtgaaatgcatagatattactcagaacaccgatagcgaaggcagcatgctaaggtaatactgacgctgaggcacgaaagcgtgggtatcaaacaggattagataccctggtagtccacgccgtaaacgatgattactggttgtttgtccgttaaaggataagcgactgagcgaaagcattaagtaatccacctggggagtacgtcggcaacgatgaaactcaaaggaattgacgggggcccgcacaagcggtggaacatgtggtttaattcgatgatacgcgaggaaccttacctgggcttaaatgcagagtggtgtactgggaaaccggtatttcttcggacactttgcaaggtgctgcatggttgtcgtcagctcgtgccgtgaggtgtcgggttaagtcccataacgagcgcaacccctgttgtcagttaccagcacgtaatggtggggactctgacaagactgccggtgtaaaccgcgaggaaggtggggatgacgtcaaatcagcacggcccttacgtccagggctacacacgtgttacaatggccggtacagagggcagcgagacagcgatgttgagcgaatcctaaaaagccggtctcagttcggattggagtctgcaacccgactccatgaagctggaatcgctagtaatcgcgcatcagccatggcgcggtgaatacgttcccgggccttgtacacaccgcccgtcaagccatggaagccggtggtacctgaagtctgtaaccgcaaggagcggcctagggtaaagccggtgactggggct

SEQ ID NO: 3394 - DNA, 1483 bp, Thermosinus carboxydivorans
  source 1..1483: mol_type = unassigned DNA
gacgaacgctggcggcgtgcctaacacatgcaagtcgaacggggagcatagcaatatgctcctagtggcgaacgggtgagtaacgcgtagacaacctaccttctagatggggataacaccgcgaaagtggtgctaataccgaatgtgtcagcttgggcgcatgcccaggttgagaaaggtggcctctggaaacaagctaccgctagaagatgggtctgcgtctgattagctagttggtagggtaacggcctaccaaggcgacgatcagtagccggtctgagaggatggacggccacactgggactgagacacggcccagactcctacgggaggcagcagtggggaatcttccgcaatgggcgaaagcctgacggagcaacgccgcgtgggtgaagaaggccttcgggtcgtaaagccctgtcaatcgggacgaagtttacttatgcgaacagtgtaagtaagtgacggtaccggaggaggaagccacggctaactacgtgccagcagccgcggtaatacgtaggtggcaagcgttgtccggaattattgggcgtaaagcgcgcgtaggcgggacgtcaagtccatcttaaaaggcctgggctcaaccctggtatgggatggaaactgacgttcttgagtgcaggagaggaaagtggaattcccggtgtagcggtgaaatgcgtagatatcgggaggaacaccagtggcgaaggcggctttctggactgtgtctgacgctgaggcgcgaaagccaggggagcgaacgggattagataccccggtagtcctggccgtaaacgatgggtactaggtgtgggaggtaaccaatccttctgtgccggagttaacgcaataagtaccccgcctggggagtacggccgcaaggctgaaactcaaaggaattgacgggggcccgcacaagcggtggagtatgtggtttaattcgacgcaacgcgaagaaccttaccagggcttgacatcgagggaagcggctagagatagtcgcgtcttgccttagggcaagacccgaagacaggtggtgcatggctgtcgtcagctcgtgtcgtgagatgttgggttaagtcccgcaacgagcgcaacccttatcccttgttgccagcacgttatggtggggactcaagggagactgccgcagacaatgcggaggaaggtggggatgacgtcaagtcatcatgccccttatgtcctgggctacacacgtactacaatgggcttaaatagagggcatgcgaagccgcgaggcagagcgaaccccaaaaacaagctctcagttcggatcgcaggctgcaactcgcctgcgtgaagtcggaatcgctagtaatcgcagatcagcatgctgcggtgaatacgttcccgggccttgtacacaccgcccgtcacaccacgagagtcgagagcacccgaagccggtggggtaaccgcaaggggccagccgtcgaaggtgagatcgatgattggggtg

SEQ ID NO: 3395 - DNA, 1406 bp, Thermosporothrix hazakensis
  source 1..1406: mol_type = unassigned DNA
gacgaacgctggcggcgtgcctaacacatgcaagtcgaacgcccttccctcgtggaagggagtggcggacgggtgagtaacacgtgggtacctaccccgaagtgaggaataccggcgagaaatcgccgacaataccgcatacgctcctgcgggagcaaagctcgyaagggcgctttgggatgggcctgcggccgattagctagctggtgaggtaacrgcttaccagggcgacgatcggtagctggtctgagaggacgatcagccacactgggattgagaacggcccagactcctacggggggcagcagtgaggaattttcggcaatgggggcaaccctgaccgagcaacgccgcgtgcaggaagacggccttcgggttgtaaactgcttttctgtgggacgagcaaggacggtaccacaggaagaagccccggctaactacgtgccagcagccgcggtaatacgtagggggcgagcgttgtccggagttactgggcgtaaagcgcatgcaggcggtcgggtaagtttgcactgacagtcatcggcttaactgatggaggcgtgcgaaaactgtccgacttgagggctctagaggggtgcggaattccgagtggagcggtgaaatgcgtagagattcggaggaacaccgaaggcgaaggcagcgccctggagagtacctgacgctcagatgcgaaagctaggggagcgaacgggattagataccccggtagtcctagccgtaaacgatgaccactagatgtccggagtatcgacccttcgggtatcggagctaacgcgttaagtggtccgcctggggagtacggtcgcaagattaaaactcaaaggaattgacggggacccgcacaagcagcggagcgtgtggtttaattcgatgcaacgcgaagaaccttaccaggtcttgacatcacactgacagctctagagatagggtcttccttcgggacagtgtgacaggtgctgcatggctgtcgtcagctcgtgtcgtgagatgttgggttaagtcccgcaacgagcgcaaccctcgtcgctagttgaatgttctagcgagaccgccgttacaaagcggaggaaggtggggatgacgtcaagtcagcacggcccttacgacctgggcgacacacacgctacaatggccgggacaaagggcagccaacccgcgagggggagccaatcccatcaaacccggtctcagttcagattgcaggctgcaacccgcctgcatgaagtcggagttgctagtaaccgtaggtcagcacactacggtgaatacgttcccgggtcttgtacacaccgcccgtcacaccacgaaagtcggcaacacctgaagccgctgggctaacctcgttgaggaggcaggcgtcgagggtggggtcggtgattggggtg

SEQ ID NO: 3396 - DNA, 1507 bp, Thermosulfidibacter takaii
  source 1..1507: mol_type = unassigned DNA
cgcgaacgctagcggcgcgcctaacacatgcaagtcgtggggcagcaggccgaatccttcgggattcggtgctggcgaccggcggacgggtgagtaacgcgtgagtaacctacccctaggaccgggataaccctccgaaaggggggctaataccggataagctcacggtgcgcatgtactgtgagaaaagggggcctctgcttagcatgctcccgcctagggatgggctcgcgtcccatcagctagttggtggggtaacggcccaccaaggctatgacgggtagccggcctgagagggtggtcggccacacgggcactgagacacgggcccgactcctacgggaggcagcagtggggaatattgggcaatgggcgcaagcctgacccagcgacgccgcgtgggggatgaaggcctttgggtcgtaaacccctgtcaggagggaagaacggctcggtggtgaataatcaccgggtctgacggtacctccagaggaagggacggctaactacgtgccagcagccgcggtaatacgtaggtcccgagcgttgcgcggaatcactgggcgtaaagagtgcgtaggcggcctggtaagtcggaggttaaagcccacggctcaaccgtggaactgcctccgatactgctgggcttgaggccgggagaggccggcggaattcccggtgtagcggtgaaatgcgtagatatcgggaggaacaccggaggcgaaggcggccggctggcccgcgcctgacgctgaggcacgaaagcgtggggagcaaaccggattagatacccgggtagtccacgccgtaaaccatgggtgctaggtgtggggagggacaacctctccgtgccgaagctaacgcgttaagcaccccgcctggggagtacggccgcaaggctgaaactcaaaggaattgacggggacccgcacaagcggcggagcatgtggtttaatccgacgctacgcgtagaaccttaccagggcttgacatgctggcataagcccgcccgaaagggttgggtgggtatggccttgtgccataccggccagcacaggtgttgcatggctgtcgtcagctcgtgccgtgaggtgttcggttaagtccggcaacgagcgcaacccctgcccctagttgccagcggttcggccgggcactctagggggactgccggcgataagccggaggaaggtggggatgacgtcaagtcatcatggcccttatgccctgggctacacacgtgctacaatggccgggacagagggttgcgaagccgcgaggcggagccaatcccaaaaacccggtcccagttcggattgcaggctgcaactcgcctgcatgaagccggagtcgctagtaatcgcggatcagctacgccgcggtgaatacgttcccgggtcttgtacacaccgcccgtcacaccacgaaagtcgggtgtaccggaagccggtaaccccaacccggcaacgggagggggccgaccaaggtatgcccggcgattggggtg

SEQ ID NO: 3397 - DNA, 1497 bp, unidentified
  source 1..1497: mol_type = unassigned DNA; note = Thermosulfurimonas dismutans
ggcgaacgctggcggcgtgcctaacacatgcaagtcgtgggggaaagggaggcttcggcctcccgagtacaccggcagacgggtgagtaacacgtgggtaacctgcccccgggtccgggataacctctcgaaaggggggctaataccggataaagtgcgtgggcgcaagctcacgcaccaaagggggcctctgcatagcaagctcctgcctggggaggggcccgcggcccatcagctagttggtggggtaacggcccaccaaggctacgacgggtagccggcctgagagggtggtcggccacacgggcactgagacacgggcccgactcctacgggaggcagcagtggggaatcttgggcaatgggcgcaagcctgacccagcgacgccgcgtgggggaagaaggccttcgggtcgtaaacccctgtcaggggggaagaaccctgctccggtgaataaccggatgcaggctgacggtacccccagaggaagccacggctaactccgtgccagcagccgcggtaatacggaggtggcaagcgttgcccggaatcactgggcgtaaagggggcgtaggcggccaggcaagtcggaggttaaagcccggggctcaaccccggaaaggcctccgatactgcttggcttgaggaccggagaggctggcggaattcccggtgtaggggtgaaatccgtagatatcgggaggaacaccagtggggaagccggccagctggacggttcctgacgctgaggcccgaaagcgtggggagcaaaccggattagatacccgggtagtccacgccgtaaacgatgggcgctgggtgtggggggttaatccctccgtgccgtagctaacgcgttaagcgccccgcctggggagtacggccgcaaggctgaaactcaaaggaattgacgggggcccgcacaagcggtggagcacgtggtttaattcgatgcaaagcgaagaaccttacccgggcttgacatgctagggtcgtacccggcagagatgtcggggaggtcagactttgtctgaccgctctagcacaggtgctgcatggctgtcgtcagctcgtgtcgtgagatgttgggttaagtcccgcaacgagcgcaaccctcgcccctagttgccagcggttcggccgggcactctagggggactgccggggacaacccggaggaaggaggggatgacgtcaagtcctcatggcccttatgcccggggctacacacgtgctacaatgggcggtacagagggttgcgaacccgcaagggggagctaatcccagaaagccgccctcagttcggatcggggtctgcaactcgaccccgtgaagccggaatcgctagtaacggcggatcagcatgccgccgtgaatacgttcccgggccttgtacacaccgcccgtcacaccacggaagccggctctgcccgaagtcgctgtcccaaccccgtaaggggagggaggcgcctacggcagggctggtgactggggtg

SEQ ID NO: 3398 - DNA, 1412 bp, unidentified
  source 1..1412: mol_type = unassigned DNA; note = Thermosynechococcus elongatus
gatgaacgctggcggtctgcttaacacatgcaagtcgaacgagcacttcggtgctagtggcggacgggtgagtaacacgtgagaatctaccctcaggagggggataacggctggaaacggccgctaataccccatatgccgcaaggtgaaatcttttttggcctggggatgagctcgcggtggattagctagttggtggggtaatggcctaccaaggcgacgatccatagctggtctgagaggatgatcagccacactgggactgagacacggcccagactcctacgggaggcagcagtggggaattttccgcaatgggcgaaagcctgacggagcaagaccgcgtgagggatgaaggcctttgggttgtaaacctcttttctcagggaagaacacaatgacggtacctgaggaataagcctcggctaactccgtgccagcagccgcggtaagacggaggaggcaagcgttatccggaattattgggcgtaaagcgtccgcaggtggctttccaagtctgccgtcaaagcccgaggcttaacctcggatcggcggtggaaactggatcgctagagtgcgtcaggggtagggggaattcccggtgtagcggtgaaatgcgtagatatcgggaagaacaccagtgacgaaagtgccctactgggacgttactgacactcatggacgaaagctaggggagcgaaagggattagatacccctgtagtcctagccgtaaacgatggacactaggtgttgctggtatccactccagcagtgccgtagccaacgcgttaagtgtcccgcctggggagtacgcacgcaagtgtgaaactcaaaggaattgacgggggcccgcacaagcggtggagtatgtggtttaattcgatgcaacgcgaagaaccttaccagggcttgacatgtcgcgaatcccgcggaaacgtgggagtgccttcgggaacgcgaacacaggtggtgcatggctgtcgtcagctcgtgtcgtgagatgttgggttaagtcccgcaacgagcgcaaccctcgtccttagttgccagcattcagttgggcactctagggagactgccggtgacaaaccggaggaaggtggggatgacgtcaagtcatcatgccccttacgtcctgggctacacacgtactacaatgctgtggacaaagagttgccaacccgcgagggcgagctaatctcttaaaccacggctcagttcagattgcaggctgcaactcgcctgcatgaaggcggaatcgctagtaatcgcaggtcagcatactgcggtgaatacgttcccgggccttgtacacaccgcccgtcacaccatgggagttggccatgcccgaagtcgttactctaacccgcaagggagggggacgcctaaggcagggctgatgactggggtg

SEQ ID NO: 3399 - DNA, 1423 bp, Thermosyntropha lipolytica
  source 1..1423: mol_type = unassigned DNA
  misc_difference 225: note = n is a, c, g, or t
  misc_difference 761: note = n is a, c, g, or t
cctagtggcggacgggtgagtaacgcgtgaccaacctacccataagttggggatgacactgggaaactggtgctaataccgcataagcttgttatctcgcatgggggacacagtaaagatggcctataggggctatcgcttatggatgggctcgcgtctgattagctagttggtggggtaacggcctaccaaggcgacgatcagtaaccgacctgagagggtggncggccacactgggactgagacacggcccagactcctacgggaggcagcagtggggaatattgctcaatgggggaaaccctgactcagcgaccccgcgtgagcgaagaaggcctttgggtcgtaaagctctgttgtaagggacgaaggacacgctgcgaatagtggcgtgaggtgacggtaccttacgaggaagccccggctaactacgtgccagcagccgcggtaagacgtagggggcgagcgttgtccggaattactgggcgtaaagagcacgtaggcgggtgaataagtcaggtgtgaaagaccggagctcaacttcggggttgcatctgatactgttcatcttgagggcaggagagggcagtagaattcctggtgtagcggtgaaatgcgtagaaatcaggaggaataccggtggcgaaggcggctgcctggactgtccctgacgctgaggtgcgaaagcgtggggagcaaacaggattagataccctggtagtccacgctgtaaacgatggatactaggtgtaggaggtatngaccccttccgtgccggagcaaacgcaataagtatcccgcctggggagtacggtcgcaaggctgaaactcaaaggaattgacgggggcccgcacaagcggtggagcatgtggtttaattcgatgcaacgcgaagaaccttaccaggccttgacatccagcgaacctggtggaaacactggggtgcctgtcgaaaggcaggagcgctgagacaggtggtgcatggttgtcgtcagctcgtgtcgtgagatgttgggttaagtcccgcaacgagcgcaacccttgccattagttgctaacaggtgaagctgagcactctaatgggactgcccgtgacaagcgggaggaaggtggggatgacgtcaaatcatcatgccctttatggtctgggctacacacgtgctacaatgggtggtacagagagaggcgaagccgcgaggtggagcgaatctcaaaaagccactctcagttcggattgcagtctgcaactcgactgcatgaagtcggaatcgctagtaatcgcgaatcagcatgtcgcggtgaatgcgttcccgggccttgtacacaccgcccgtcacaccacgaaagtcggcaacacccgaagtcggtgagctaaccgcggaagcggaggcaaccgccgaaggtggggtcggtgattggggtg

SEQ ID NO: 3400 - DNA, 1511 bp, Thermovibrio ammonificans
  source 1..1511: mol_type = unassigned DNA
cgcgaacgctgtcggcgtgcctaacacatgcaagtcgtggggcagcgggccggttccttcgggaaccggtgccggcgaccggcgaacgggtgagtaacgcgtgagcaacctaccccgaggagggggataacccggggaaacccgggctaataccccataagcgcacaggccgcatggcccgtgtgaaaagggtggcctctgcttcgcatgctgccgcctcgggatgggctcgcgtcccatcaggtagttggtggggtaacggcctaccaagcctacgacgggtagctggtctgagaggatggccagccacaccgggactgagacacggcccggactcctacgggaggcagcagtggggaatcttgggcaatgggcgcaagcctgacccagcgacgccgagtggaggatgaagcccttcggggtgtaaactcctgtcgccggggacgatgcgggcgggggtgaatagcccccgcccgtgacggtacccggagaggaagggacggctaactacgtgccagcagccgcggtaatacgtaggtcccgagcgttgcgcgaaattactgggcgtaaagtgcgcgtaggcgggccagtaagtcagaggtgaaagcccccggctcaaccggggaattgcctctgatactgctggcctagggtccggaagacgctggcggaattcccggtgtagcggtgaaatgcgtagatatcgggaggaacaccggtggcgaaggcggccagcgaggacggtaccgacgctgaggcgcgaaagcgtggggagcaaaccggattagatacccgggtagtccacgctgtaaacgatgggtgctgggcgttgcaccctaaagggtgcagtgccgaagctaacgcgttaagcaccccgcctggggagtacggccgcaaggctgaaactcaaaggaatagacgggggcccgcacaagcggtggagcatgtggtttaattcaatgctacgcgaagaaccttaccagggcttgacatgccgggggtagccctgccgaaaggcagggtcgtggcccccttcggggggcccacccggcacaggtggtacatggccgtcgtcagctcgtgccgtgaggtgttgggttaagtcccgcaacgagcgcaacccctgtccctagttgccagcgggtaatgccgggcacactagggagactgccggcgacaagccggaggaagggggggatgacgtcaggtcagtatgccccttacgccctgggctacacacgtgctacaatggccgggacagagggattgcgaagccgcgaggtggagcaaatctcagaaacccggtcccagttcggattgcaggctgcaactcgcctgcatgaagctggaatcgctagtaacggccggtcagctacacggccgtgaatacgttcccgggccttgtactcaccgcccgtcacaccccggaagctggctctaccagaagtccccgagccaacccccctctcggggggaggcaggggccgaaggtagggccggtgactggggtg

SEQ ID NO: 3401 - DNA, 1508 bp, Thermovibrio guaymasensis
  source 1..1508: mol_type = unassigned DNA
cgcgaacgctgtcggcgtgcctaacacatgcaagtcgtggggcagcgggcgggctccttcgggagcccgtgccggcgaccggcgaacgggtgagtaacgcgtgagcaacctaccccgaggagggggataacccggggaaacccgggctaataccccataagcgcacggcccgcatgggctgtgtgaaaagggtggcctctgctttgcaagctgccgcctcgggatgggctcgcgtcccatcaggtagttggtgaggtaacggctcaccaagcctacgacgggtagccggcctgagagggtggccggccacaccgggactgagacacggcccggactcctacgggaggcagcagtggggaatcttgggcaatgggcgcaagcctgacccagcgacgccgagtggaggaagaagcccttcggggtgtaaactcctgtcgccggggacgatgcgggtaggggttaatagcctctacccgtgacggtacccggagaggaagggacggctaactacgtgccagcagccgcggtaatacgtaggtcccgagcgttgcgcgaaattactgggcgtaaagtgcgcgtaggcgggccagtaagtcagaggtgaaagcccccggctcaaccggggaattgcctctgatactgctggcctagggtccggaagacgctggcggaattcccggtgtagcggtgaaatgcgtagatatcgggaggaacaccggtggcgaaggcggccagcgaggacggtaccgacgctgaggcgcgaaagcgtggggagcgaaccggattagatacccgggtagtccacgctgtaaacgatgggtgctgggcgttgtgcccgatagggtgcagtgccgaaggtaacccgttaagcaccccgcctggggagtacggccgcaaggctgaaactcaaaggaatagacgggggcccgcacaagcggtggagcatgtggtttaattcaatgctacgcgaagaaccttaccagggcttgacatgccgggggtagccctgccgaaaggcagggtcgcggcccccttcggggggcccacccggcacaggtggtacatggccgtcgtcagctcgtgccgtgaggtgtgggttaagtcccgcaacgagcgcaacccctgtccctagttgccagcgggtaaagccgggcacactagggagactgccggcgataagccggaggaagggggggatgacgtcaggtcagtatgccccttacgccctgggctacacacgtgctacaatggccgggacagagggattgcgaagccgcgaggcggagcaaatctcagaaacccggtcccagttcggattgcaggctgcaactcgcctgcatgaagctggaatcgctagtaacggccggtcagctacacggccgtgaatacgttcccgggccttgtactcaccgcccgtcacaccccggaagctggctctaccagaagtccccgagctaacccccgcaagggggaggcaggggccgaaggtagggctggtgactggggtg

SEQ ID NO: 3402 - DNA, 1409 bp, Thioalbus denitrificans
  source 1..1409: mol_type = unassigned DNA
catgcaagtcgaacggtaacaggcccttcggggtgctgacgagtggcggacgggtgagtaacgcgtaggaatctgccctgtagtgggggacaacctggggaaacccaggctaataccgcatacgcccttcgggggaaagtgggggatcttcggacctcacgctattggatgagcctgcgtcggattagctagttggtggggtaaaggcccaccaaggcgacgatccgtagctggtctgagaggacgatcagccacactgggactgagacacggcccagactcctacgggaggcagcagtggggaatattggacaatgggggcaaccctgatccagcaatgccgcgtgtgtgaagaaggcctgcgggttgtaaagcactttcagtggggaggaaaagcctgaggccaatacccttgggtcttgacgttacccacagaagaagcaccggctaactccgtgccagcagccgcggtaatacggagggtgcaagcgttaatcggaattactgggcgtaaagcgcgcgtaggcggctgactaagtcgggtgtgaaagccccgggctcaacctgggaattgcattcgatactggttggctggagtctggtagaggggtgtggaattccaggtgtagcggtgaaatgcgtagatatctggaggaacatcagtggcgaaggcggcaccctggaccaagactgacgctgaggtgcgaaagcgtgggtagcaaacaggattagataccctggtagtccacgccgtaaacgatgagaactagccgttgggaggattagcctcttagtggcgaagctaacgcgataagttctccgcctggggagtacggccgcaaggttaaaactcaaaggaattgacgggggcccgcacaagcggtggagcatgtggtttaattcgatgcaacgcgaagaaccttacctgcccttgacatcctcggaacttgtcagagatgacttggtgccttcgggaaccgagagacaggtgctgcatggctgtcgtcagctcgtgtcgtgagatgttgggttaagtcccgtaacgagcgcaacccttgtccctagttgccagcgcgtcatggcgggaactctagggagactgccggtgacaaaccggaggaaggtggggatgacgtcaagtcatcatggcccttatgggcagggctacacacgtgctacaatggccagtacagagggttgccaacccgcgagggggagctaatcccagaaagctggtcgtagtccggatcgcagtctgcaactcgactgcgtgaagtcggaatcgctagtaatcgcgaatcagaatgtcgcggtgaatacgttcccgggccttgtacacaccgcccgtcacaccatgggagttggctgtaccagaagccgctagtctaaccttcggggggacggcgtcc

SEQ ID NO: 3403 - DNA, 1462 bp, Thioalkalivibrio denitrificans
  source 1..1462: mol_type = unassigned DNA
attgaacgctggcggcatgcttaacacatgcaagtcgaacggtaacgcgggagcttgctcctggcgacgagtggcggacgggtgagtaacgcgtaggaatctgcctggtggtgggggacaactcggggaaactcgagctaataccgcatacgccctacgggggaaagcgggggatcttcggacctcgcgccatcagatgagcctgcgtccgattagcttgttggtagggtaacggcctaccaaggcgacgatcggtagctggtctgagaggacgatcagccacactgggactgagacacggcccagactcctacgggaggcagcagtggggaatattggacaatgggcgaaagcctgatccagcaatgccgcgtgtgtgaagaaggcctgcgggttgtaaagcactttcagtagggaagaaaagcctggcgccaataccgccgggtcttgacgttacctacagaagaagcaccggctaactccgtgccagcagccgcggtaatacggagggtgcaagcgttaatcggaattactgggcgtaaagcgcacgtaggcggccttgtaagtcggatgtgaaagccccgggcttaacctgggaattgcatccgatactgcagggctagagtttggtagaggagagtggaattcccggtgtagcggtgaaatgcgtagatatcgggaggaacaccagtggcgaaggcgactctctggaccaaaactgacgctgaggtgcgaaagcgtggggagcaaacaggattagataccctggtagtccacgccgtaaacgatgagaactagccgttgggaggattatgcctcttagtggcgcagctaacgcattaagttctccgcctggggagtacggccgcaaggttgaaactcaaaggaattgacgggggcccgcacaagcggtggagcatgtggtttaattcgatgcaacgcgaagaaccttacctgcccttgacatcctcggaacttgtcagagatgacttggtgccttcgggaaccgagtgacaggtgctgcatggctgtcgtcagctcgtgtcgtgagatgttgggttaagtcccgcaacgagcgcaacccttgtccctagttgccagcacttcgggtgggaactctagggagactgccggtgacaaaccggaggaaggtggggatgacgtcaagtcatcatggcccttatgggcagggctacacacgtgctacaatggccagtacagagggtcgccaacccgcgagggggagccaatcccagaaagctggtcgtagtccggatcggagtctgcaactcgactccgtgaagtcggaatcgctagtaatcgcggatcagcattgccgcggtgaatacgttcccgggccttgtacacaccgcccgtcacaccatgggagttggctgcaccagaagtggatagtctaaccttcgggaggacgttcaccacggtgtggtcaatgactggggtg

SEQ ID NO: 3404 - DNA, 1464 bp, Thioalkalivibrio halophilus
  source 1..1464: mol_type = unassigned DNA
attgaacgctggcggcatgcctaacacatgcaagtcgaacggtaacgctgggagcttgctccctggcgacgagtggcggacgggtgagtaacgcgtaggaatctgcctggtagcgggggataactcggggaaactcgagctaataccgcatacgccctacgggggaaagcgggggatcttcggacctcgcactatcagatgagcctgcgtccaattagcttgttggtgaggtaacggctcaccaaggcgacaattggtagctggtctgagaggatgatcagccacactgggactgagacacggcccagactcctacgggaggcagcagtggggaatattggacaatgggcgaaagcctgatccagcaatgccgcgtgtgtgaagaaggcctgcgggttgtaaagcactttcagcagggaggaaaagctgtcggttaataactggcggtcttgacgttacctgcagaagaagcaccggccaactccgtgccagcagccgcggtaatacggagggtgcaagcgttaatcggaattactgggcgtaaagcgcgcgtaggcggctgtgtaagttagatgtgaaagccccgggctcaacctgggaattgcatctaatactatacagctagagtttgatagaggagagcggaattcccggtgtagcggtgaaatgcgtagatatcgggaggaacaccagtggcgaaggcggctctctggatcaaaactgacgctgaggtgcgaaagcgtgggtagcaaacaggattagataccctggtagtccacgccctaaacgatgagaactagttgttggtcggattttgccgatcagtgacgcagctaacgcattaagttctccgcctggggagtacggccgcaaggttgaaactcaaaggaattgacgggggcccgcacaagcggtggagcatgtggtttaattcgatgcaacgcgaagaaccttacctgcccttgacatcctcggaacttggcagagatgccttggtgccttcgggaaccgagtgacaggtgctgcatggctgtcgtcagctcgtgtcgtgagatgttgggttaagtcccgcaacgagcgcaacccttatccctagttgccatcggttcggccgggaactctagggagactgccggtgacaaaccggaggaaggtggggatgacgtcaagtcatcatggcccttatgggcagggctacacacgtgctacaatggccggtacagagggcagccaacccgcgagggggagctaatctcacaaagccggtcctagtccagattggagtctgcaactcgactccatgaagcaggaatcgctagtaatcgcagatcagcactgctgcggtgaatacgttcccgggccttgtacacaccgcccgtcacaccatgggagttgactgcaccagaagtggatagtctaaccttcgggaggacgttcaccacggtgtggttaatgactggggtg

SEQ ID NO: 3405 - DNA, 1443 bp, Thioalkalivibrio nitratireducens
  source 1..1443: mol_type = unassigned DNA
cctaacacatgcaagtcgaacggcagcgcgggagcttgctcctggcggcgagtggcggacgggtgagtaacgcgcaggaatctgcctggtagcgggggataactcggggaaactcgagctaataccgcatacgccctacgggggaaagcgggggaccttcgggcctcgcactatcagatgagcctgcgtccgattagcttgttggtgaggtaatggctcaccaaggctacgatcggtagctggtctgagaggatgatcagccacactgggactgagacacggcccagactcctacgggaggcagcagtggggaatattggacaatgggcgaaagcctgatccagcaatgccgcgtgtgtgaagaaggcctgcgggttgtaaagcactttcagtggggaagaaaagccgccggttaatacccggcagtcttgacattacccacagaagaagcaccggctaactccgtgccagcagccgcggtaatacggagggtgcgagcgttaatcggaattactgggcgtaaagcgcgcgtaggcggctgcgtaagttggatgtgaaagccccgggcttaacctgggaattgcatccaatactgcgtggctagagtttgatagaggagagcggaattcccggtgtagcggtgaaatgcgtagatatcgggaggaacaccagtggcgaaggcggctctctggatcaaaactgacgctgaggtgcgaaagcgtggggagcaaacaggattagataccctggtagtccacgccctaaacgatgagaactagctgttgggtggattttgccgctcagtggcgcagctaacgcattaagttctccgcctggggagtacggccgcaaggttgaaactcaaaggaattgacgggggcccgcacaagcggtggagcatgtggtttaattcgatgcaacgcgaagaaccttacctacccttgacatcctcggaacttgtcagagatgacttggtgccttcgggaaccgagtgacaggtgctgcatggctgtcgtcagctcgtgtcgtgagatgttgggttaagtcccgcaacgagcgcaacccttgcatctagttgccagcggttaggccgggaactctagatggactgacggtgacaaaccgtaggaaggtggggatgacgtcaagtcatcatggcccttatgggtagggctacacacgtgctacaatggtcggtacagagggtcgccaacccgcgagggggagccaatctcacaaagccgatcgtagtccagattggagtctgcaactcgactccatgaagccggaatcgctagtaatcgcagatcagcactgctgcggtgaatacgttcccgggccttgtacacaccgcccgtcacaccatgggagttggctgcaccagaagtagatagtctaaccttcgggaagacgtttaccacggtgtggtcaatgactggggtg

SEQ ID NO: 3406 - DNA, 1454 bp, Thioalkalivibrio paradoxus
  source 1..1454: mol_type = unassigned DNA
  misc_difference 384: note = n is a, c, g, or t
  misc_difference 636: note = n is a, c, g, or t
attgaacgctggcggcatgcctarcacatggaagtcgagcgggagcgcgggcgttcctgtggcggcgagtggcggacgggtgagtaacgcgtaggaatctgcctggtagcgggggataactggggaaactcgagctaatactgcatacgctacgggggaaagcgggggacttcgggcctcgtactatcagatgagcctgcgtccgattagcttgttggtgaggtaatggctcaccaaggctacgatcggtagctggtctgagaggatgatcagccacactgggactgagacacggcccagactcctacgggaggcagcagtggggaatattggacaatgggcgaaagcctgatccagcaatgccgcgtgtgtgaagaaggcctncgggttgtaaagcactttcagtggggaagaaaagccgccggttaatacccggcggtcttgacattacccacagaagaagcaccggctaactccgtgccagcagccgcggtaatacggagggtgcgagcgttaatcggaattactgggcgtaaagcgcgcgtaggcggctgcgtgagttggatgtgaaagccccgggcttaacctgggaattgcatccaatactgcgtagctagagtttggtagaggaaagcngaattcccggtgtagcggtgaaatgcgtagatatcgggaggaacaccagtggcgaaggcggctttctggatcaaaactgacgctgaggtgcgaaagcgtggggagcaaacaggattagataccctggtagtccacgccctaaacgatgagaactagctgttgggtggattttaccgctcagtggcgcagctaacgcattaagttctccgcctggggagtacggccgcaaggttgaaactcaaaggaattgacgggggcccgcacaagcggtggagcatgtggtttaattcgatgcaacgcgaagaaccttacctacccttgacatcctcggaacttgtcagagatgacttggtgccttcgggaaccgagtgacaggtgctgcatggctgtcgtcagctcgtgtcgtgagatgttgggttaagtcccgcaacgagcgcaacccttacatctagttgccagcggttcggccgggaactctagatggactaccggtgacaaaccggaggaaggtggggatgacgtcaagtcatcatggcccttatgggtagggctacacacgtgctacaatggtcggtacagagggtcgccaacccgcgagggggagccaatctcacaaagccgatcgtagtccagattggagtctgcaactcgactccatgaagccggaatcgctagtaatcgcagatcagcactgctgcggtgaatacgttcccgggccttgtacacaccgcccgtcacaccatgggagttggctgcaccagaagtagatagtctaaccttgggaggacgtttaccacggtgtggtcaatgatctgggt

SEQ ID NO: 3407 - DNA, 1460 bp, unidentified
  source 1..1460: mol_type = unassigned DNA; note = Thioalkalivibrio sulfidiphilus
attgaacgctggcggcatgcctaacacatgcaagtcgaacggtaacaggggcttcggcccgctgacgagtggcggacgggtgagtaacgcgtaggaatctgcctggtggtgggggacaactcggggaaactcgagctaataccgcatacgccctacgggggaaagcgggggatcttcggacctcgcgccatcagatgagcctgcgtccgattagctagttggtggggtaatggcctaccaaggcgacgatcggtagctggtctgagaggacgatcagccacactgggactgagacacggcccagactcctacgggaggcagcagtggggaatattggacaatgggcgaaagcctgatccagcaatgccgcgtgtgtgaagaaggcctgcgggttgtaaagcactttcagtagagaagaaaagcctggcgttaataccgtcgggtcttgacgtaacctacagaagaagcaccggctaactccgtgccagcagccgcggtaatacggagggtgcaagcgttaatcggaattactgggcgtaaagcgcacgtaggcggccttgtaagtcggatgtgaaagccccgggcttaacctgggaattgcatccgatactgcagggctagagtttggtagaggagagtggaattcccggtgtagcggtgaaatgcgtagatatcgggaggaacaccagtggcgaaggcgactctctggaccaaaactgacgctgaggtgcgaaagcgtggggagcaaacaggattagataccctggtagtccacgccgtaaacgatgagaactagccgttgggaggattatgcctcttagtggcgcagctaacgcattaagttctccgcctggggagtacggccgcaaggttgaaactcaaaggaattgacgggggcccgcacaagcggtggagcatgtggtttaattcgatgcaacgcgaagaaccttacctgcccttgacatcctcggaacttgtcagagatgacttggtgccttcgggaaccgagtgacaggtgctgcatggctgtcgtcagctcgtgtcgtgagatgttgggttaagtcccgcaacgagcgcaacccttgtccctagttgccagcacttcgggtgggaactctagggagactgccggtgacaaaccggaggaaggtggggatgacgtcaagtcatcatggcccttatgggcagggctacacacgtgctacaatggccagtacagagggttgccaacccgcgagggggagccaatcccagaaagctggtcgtagtccggattggagtctgcaactcgactccatgaagtcggaatcgctagtaatcgcggatcagcattgccgcggtgaatacgttcccgggccttgtacacaccgcccgtcacaccatgggagttggctgcaccagaagtagatagtctaaccttcgggaggacgtttaccacggtgtggtcaatgactggggtg

SEQ ID NO: 3408 - DNA, 1462 bp, Thioalkalivibrio thiocyanodenitrificans
  source 1..1462: mol_type = unassigned DNA
attgaacgctggcggcatgcctaacacatgcaagtcgaacggcagcgcgggagcttgctcctggcggcgagtggcggacgggtgagtaacgcgtaggaatctgcctggtggtgggggacaactcggggaaactcgagctaataccgcatacgccctacgggggaaagcgggggatcttcggacctcgcgccatcagatgagcctgcgtccgattagcttgttggtggggtaacggcctaccaaggcgacgatcggtagctggtctgagaggacgatcagccacactgggactgagacacggcccagactcctacgggaggcagcagtggggaatattggacaatgggcgaaagcctgatccagcaatgccgcgtgtgtgaagaaggcctgcgggttgtaaagcactttcagtagggaagaaaagcctggcgctaataccgtcgggtcttgacgtcacctacagaagaagcaccggctaactccgtgccagcagccgcggtaatacggagggtgcgagcgttaatcggaattactgggcgtaaagcgcacgtaggcggtcctgtaagtcggatgtgaaagccccgggcttaacctgggaattgcatccgatactgcagggctagagtttggtagaggagagtggaattcccggtgtagcggtgaaatgcgtagatatcgggaggaacaccagtggcgaaggcgactctctggaccaaaactgacgctgaggtgcgaaagcgtggggagcaaacaggattagataccctggtagtccacgctgtaaacgatgagaactagccgttggggggattatgccccttagtggcgcagctaacgcattaagttctccgcctggggagtacggccgcaaggttgaaactcaaaggaattgacgggggcccgcacaagcggtggagcatgtggtttaattcgatgcaacgcgaagaaccttacctgcccttgacatcctcggaacttgtcagagatgacttggtgccttcgggaaccgagtgacaggtgctgcatggctgtcgtcagctcgtgtcgtgagatgttgggttaagtcccgcaacgagcgcaacccttgtccctagttgccagcacttcgggtgggaactctagggagactgccggtgacaaaccggaggaaggtggggatgacgtcaagtcatcatggcccttatgggcagggctacacacgtgctacaatggccagtacagagggtcgccaacccgcaagggggagccaatcccagaaagctggtcgtagtccggatcggagtctgcaactcgactccgtgaagtcggaatcgctagtaatcgcggatcagcattgccgcggtgaatacgttcccgggccttgtacacaccgcccgtcacaccatgggagttggctgcaccagaagtagatagtctaaccttcgggaggacgtttaccacggtgtggtcaatgactggggtg

SEQ ID NO: 3409 - DNA, 1462 bp, Thioalkalivibrio thiocyanoxidans
  source 1..1462: mol_type = unassigned DNA
attgaacgctggcggcatgcctaacacatgcaagtcgaacggtaacgcaggagcttgctcctggcgacgagtggcggacgggtgagtaacgcgtaggaatctgcctggtagcggaggataacccggggaaactcgggctaatactgcatacgccctacgggggaaagcgggggatcttcggacctcgcactatcagatgagcctgcgtccaattagcttgttggtgaggtaacggctcaccaaggcgacgattggtagctggtctgagaggatgatcagccacactgggactgagacacggcccagactcctacgggaggcagcagtggggaatattggacaatgggggaaaccctgatccagcaatgccgcgtgtgtgaagaaggcctgcgggttgtaaagcactttcagtagggaagaaaagctgccggttaatacccgacagtcttgacatcacctacagaagaagcaccggctaactccgtgccagcagccgcggtaatacggagggtgcaagcgttaatcggaattactgggcgtaaagcgcacgtaggcggtcgtgtaagttagatgtgaaagccctgggcttaacctgggaattgcatctaatactatacgactagagtttgatagaggagagcggaattcccggtgtagcggtgaaatgcgtagatatcgggaggaacaccagtggcgaaggcggctctctggctcaaaactgacgctgaggtgcgaaagcgtgggtagcaaacaggattagataccctggtagtccacgccctaaacgatgagaactagttgttggtcggatcttgccgatcagtgacgcagctaacgcattaagttctccgcctggggagtacggccgcaaggttgaaactcaaaggaattgacgggggcccgcacaagcggtggagcatgtggtttaattcgatgcaacgcgaagaaccttacctacccttgacatcctcggaacttgtcagagatgacttggtgccttcgggaaccgagtgacaggtgctgcatggctgtcgtcagctcgtgtcgtgagatgttgggttaagtcccgcaacgagcgcaacccttatccctagttgccagcggttcggccgggaactctagggagactgccggtgacaaaccggaggaaggtggggatgacgtcaagtcatcatggcccttatgggtagggctacacacgtgctacaatggccggtacagagggctgccaacccgcgagggggagccaatcccagaaaaccggtcctagtccagattggagtctgcaactcgactccatgaagcaggaatcgctagtaatcgcagatcagcactgctgcggtgaatacgttcccgggccttgtacacaccgcccgtcacaccatgggagttgactgcaccagaagtggatagtctaaccttcgggaggacgttcaccacggtgtggttaatgactggggtg

SEQ ID NO: 3410 - DNA, 1462 bp, Thioalkalivibrio versutus
  source 1..1462: mol_type = unassigned DNA
attgaacgctggcggcatgcctaacacatgcaagtcgaacggtaacgcgggagcttgctcctggcgacgagtggcggacgggtgagtaacgcgtaggaatctgcctggtagcggaggacaactcggggaaactcgagctaatactgcatacgccctacgggggaaagcgggggatcttcggacctcgcactatcagatgagcctgcgtccaattagcttgttggtgaggtaacggctcaccaaggcgacgattggtagctggtctgagaggatgatcagccacactgggactgagacacggcccagactcctacgggaggcagcagtggggaatattggacaatgggggaaaccctgatccagcaatgccgcgtgtgtgaagaaggcctgcgggttgtaaagcactttcagtagggaagaaaagccgacggccaatacccttcggtcttgacatcacctacagaagaagcaccggctaactccgtgccagcagccgcggtaatacggagggtgcaagcgttaatcggaattactgggcgtaaagggcacgcaggcggtcgtgtaagttagatgtgaaagccccgggcttaacctgggaattgcacctaatactatacgactagagtttgatagaggagagcggaattcccggtgtagcggtgaaatgcgtagatatcgggaggaacaccagtggcgaaggcggctctctggatcaaaactgacgctgaggtgcgaaagcgtgggtagcaaacaggattagataccctggtagtccacgccctaaacgatgagaactagttgttggtcggatcttgccgatcagtgacgcagctaacgcattaagttctccgcctggggagtacggccgcaaggttgaaactcaaaggaattgacgggggcccgcacaagcggtggagcatgtggtttaattcgatgcaacgcgaagaaccttacctacccttgacatcctcggaacttgtcagagatgacttggtgccttcgggaaccgagtgacaggtgctgcatggctgtcgtcagctcgtgtcgtgagatgttgggttaagtcccgcaacgagcgcaacccttatccctagttgccagcggttcggccgggaactctagggagactgccggtgacaaaccggaggaaggtggggatgacgtcaagtcatcatggcccttatgggtagggctacacacgtgctacaatggccggtacagagggctgccaacccgcgagggggagccaatcccacaaaaccggtcctagtccagattggagtctgcaactcgactccatgaagtcggaatcgctagtaatcgtggatcagcactgccacggtgaatacgttcccgggccttgtacacaccgcccgtcacaccatgggagttgactgcaccagaagtggatagtctaaccttcgggaggacgttcaccacggtgtggttaatgactggggtg

SEQ ID NO: 3411 - DNA, 1370 bp, Thiobaca trueperi
  source 1..1370: mol_type = unassigned DNA
tgacgctggcggcatgcctaacacatgcaagtcgaacgcggaagggcttcggcctgagtagcgtggcggacgggtgagtaatgcgtgggaatctgcctgatcgtgggggataacccggggaaactcgggctaataccgcatacgccctacgggggaaagggggcttcggctctcgcgaacagatgagcccacgtccgattagctagttggtgaggtaatggcccaccaaggcgacgatcggtagctggtctgagaggatgatcagccacactgggactgagacacggcccagactcctacgggaggcagcagtggggaatattggacaatgggcgcaagcctgatccagcaatgccgcgtgtgtgaagaaggcctgcgggttgtaaagcactttcggtgggaaagaaagattcaaggttaatacccttggatgttgacgttacccacagaagaagcaccggctaactccgtgccagcagccgcggtaatacggagggtgcaagcgttaatcggaatcactgggcgtaaagcgcacgtaggcggcttggtcagtcagatgtgaaagccctgggctcaacctgggaacggcatttgatactgccaggctcgagtctaagagaggggggtggaattccaggtgtagcggtgaaatgcgtagagatctggaggaacaccagtggcgaaggcggccccctggcttaagactgacgctgaggtgcgaaagcgtggggagcaaacaggattagataccctggtagtccacgctgtaaacgatgtcaactagccgtcgggtccatttaagggtttggtggcgcagctaacgcgataagttgaccgcctggggagtacggccgcaaggttaaaactcaaaggaattgacgggggcccgcacaagcggtggagcatgtggtttaattcgatgcaacgcgaaaaaccttaccagcccttgacatcctcggaaccctgtagagatatgggggtgccttcgggagccgagagacaggtgctgcatggctgtcgtcagctcgtgtcgtgagatgttgggttaagtcccgtaacgagcgcaacccttgtccttagttgccagcacttcgggtgggaactctaaggagactgccggtgataaaccggaggaaggtggggatgacgtcaagtcatcatggcccttatgggctgggctacacacgtgctacaatggccggtacagagggtcgcaaccccgcgagggtgagccaatctcagaaaaccggtcgtagtccggatcgcagtctgcaactcgactgcgtgaagtcggaatcgctagtaatcgcgaatcagcatgtcgcggtgaatacgttcccgggccttgtacacaccgcccgtcacaccat

SEQ ID NO: 3412 - DNA, 1457 bp, Thiobacillus denitrificans
  source 1..1457: mol_type = unassigned DNA
attgaacgctggcggaatgctttacacatgcaagtcgaacggcagcacgggtgcttgcacctggtggcgagtggcgaacgggtgagtaatgcgtcggaacgtaccgagtaatgggggataacgcggcgaaagtcgcgctaataccgcatacgccctgagggggaaagtgggggatcgcaagacctcacgttattcgagcggccgacgtctgattagctagttggtggggtaatggctcaccaaggcgacgatcagtagcgggtctgagaggatgatccgtcacactgggactgagacacggcccagactcctacgggaggcagcagtggggaattttggacaatgggcgaaagcctgatccagccattccgcgtgagtgaagaaggccttcgggttgtaaagctctttcagctggaacgaaacggtacgcgctaacatcgtgtgctaatgacggtaccagcagaagaagcaccggctaactacgtgccagcagccgcggtaatacgtagggtgcgagcgttaatcggaattactgggcgtaaagcgtgcgcaggcggattattaagcaagacgtgaaatccccgggcttaacctgggaatggcgttttgaactggtagtctagagtgcgtcagaggggggtggaattccacgtgtagcagtgaaatgcgtagagatgtggaggaacaccaatggcgaaggcagccccctgggatgacactgacgctcatgtacgaaagcgtgggtagcaaacaggattagataccctggtagtccacgccctaaacgatgtcaactggttgttgggggagtgaaatcccttagtaacgaagctaacgcgtgaagttgaccgcctggggagtacggtcgcaagattaaaactcaaaggaattgacggggacccgcacaagcggtggatgatgtggattaattcgatgcaacgcgaaaaaccttacctacccttgacatgtccagaaccctgcagagatgcgggggtgcccgaaagggaattggaacacaggtgctgcatggctgtcgtcagctcgtgtcgtgagatgttgggttaagtcccgcaacgagcgcaacccttatcattagttgctacgcaagggcactctaatgagactgccggtgacaaaccggaggaaggtggggatgacgtcaagtcctcatggcccttatgggtagggcttcacacgtcatacaatggtcggtacagagggttgccaagccgcgaggtggagccaatcccagaaagccgatcgtagtccggattgttctctgcaactcgagagcatgaagtcggaatcgctagtaatcgcggatcagcatgtcgcggtgaatacgttcccgggtcttgtacacaccgcccgtcacaccatgggagtggaatctggcagaagtaggtagcctaaccgcaaggggggcgcttaccacgctgggtttcatgactggggtg

SEQ ID NO: 3413 - DNA, 1457 bp, Thiobacillus thioparus
  source 1..1457: mol_type = unassigned DNA
attgaacgctggcggaatgctttacacatgcaagtcgaacggcagcacgggagcttgctcctggtggcgagtggcgaacgggtgagtaatgcgtcggaacgtaccgagtaatgggggataacgcagcgaaagctgtgctaataccgcatacgccctgagggggaaagtgggggatcgcaagacctcacgttattcgagcggccgacgtctgattagctagttggtggggtaatggcctaccaaggcgacgatcagtagcgggtctgagaggatgatccgccacactggaactgagacacggtccagactcctacgggaggcagcagtggggaattttggacaatgggggcaaccctgatccagccattccgcgtgagtgaagaaggccttcgggttgtaaagctctttcagctggaacgaaacggtacgctctaacatagcgtgctaatgacggtaccggcagaagaagcaccggctaactacgtgccagcagccgcggtaatacgtagggtgcgagcgttaatcggaattactgggcgtaaagcgtgcgcaggcggattgttaagcaagatgtgaaatccccgggcttaacctgggaatggcattttgaactggcagtctagagtgcgtcagaggggggtggaattccacgtgtagcagtgaaatgcgtagagatgtggaggaacaccaatggcgaaggcagccccctgggatgacactgacgctcatgtacgaaagcgtgggtagcaaacaggattagataccctggtagtccacgccctaaacgatgtcaactggttgttgggggagtgaaatcccttagtaacgaagctaacgcgtgaagttgaccgcctggggagtacggtcgcaagattaaaactcaaaggaattgacggggacccgcacaagcggtggatgatgtggattaattcgatgcaacgcgaaaaaccttacctacccttgacatgtccggaatcctgcagagatgcgggagtgctcgaaagagaaccggaacacaggtgctgcatggctgtcgtcagctcgtgtcgtgagatgttgggttaagtcccgcaacgagcgcaacccttatcattagttgctacgcaagggcactctaatgagactgccggtgacaaaccggaggaaggtggggatgacgtcaagtcctcatggcccttatgggtagggcttcacacgtcatacaatggtcggtacagagggttgccaagccgcgaggtggagccaatcccagaaagccgatcgtagtccggattgttctctgcaactcgagagcatgaagtcggaatcgctagtaatcgcggatcagcatgtcgcggtgaatacgttcccgggtcttgtacacaccgcccgtcacaccatgggagtggaatctggcagaagtaggtagcctaaccgcaaggggggcgcttaccacgctgggtttcatgactggggtg

SEQ ID NO: 3414 - DNA, 1451 bp, Thiocapsa marina
  source 1..1451: mol_type = unassigned DNA
attgaacgctggcggcatgcctaacacatgcaagtcgaacgcgaaagtccttcggggcgagtagagtggcggacgggtgagtaacgcatgggaatctacctcgacgtgggggataacccggggaaactcgggctaataccgcatacgacctacgggtgaaagggggcttcggctctcgcggcgagatgagctcatgtccgattagctagttggcggggtaaaggcccaccaaggcgacgatcggtagctggtctgagaggatgatcagccacactgggactgagacacggcccagactcctacgggaggcagcagtggggaatattggacaatgggcgcaagcctgatccagcaatgccgcgtgtgtgaagaaggcctgcgggttgtaaagcactttcagtggggaagaaagcctcggggcgaataccctcgggggttgacgttacccacagaagaagcaccggctaactccgtgccagcagccgcggtaatacggagggtgcaagcgttaatcggaatcactgggcgtaaagcgcacgtaggcggcaacgtaagtcagatgtgaaagccccgggctcaacccgggaacggcatttgagactgcgtcgctcgagtctgagagaggggggtggaattccgggtgtagcggtgaaatgcgtagagatccggaggaacaccagtggcgaaggcggccccctggctcaagactgacgctgaggtgcgaaagcgtggggagcaaacaggattagataccctggtagtccacgccgtaaacgatgtcgactagccgtggggtccatttaagggcttcgtggcgcagctaacgcgataagtcgaccgcctggggagtacggccgcaaggttaaaactcaaaggaattgacgggggcccgcacaagcggtggagcatgtggtttaattcgatgcaacgcgaagaaccttaccagcccttgacatcctcggaatcctgcagagatgcgggagtgccttcgggagccgagagacaggtgctgcatggctgtcgtcagctcgtgtcgtgagatgttgggttaagtcccgtaacgagcgcaacccttgcccttagttgccagcgagtgatgtcgggaactctaaggggactgccggtgataaaccggaggaaggtggggatgacgtcaagtcatcatggcccttatgggctgggctacacacgtgctacaatggccggtacagagggttgccaacccgcgagggggagccaatctcagaaaaccggtcgtagtccggatcgcagtctgcaactcgactgcgtgaagtcggaatcgctagtaatcgcgaatcagcatgtcgcggtgaatacgttcccgggccttgtacacaccgcccgtcacaccatgggagttggttgcaccagaagcaggtagcttaaccttcgggagggcgcttgccacggtgtggtcaatgactggggtg

SEQ ID NO: 3415 - DNA, 1451 bp, Thiocapsa rosea
  source 1..1451: mol_type = unassigned DNA
attgaacgctggcggcatgcctaacacatgcaagtcgaacgcgaaagggctttggcccgagtagagtggcggacgggtgagtaatgcatgggaatccacctcgacgtgggggataacccggggaaactcgggctaataccgcatacgacctacgggtgaaagggggcttcggctctcgcgtcgagacgagctcatgtccgattagctagttggcggggtaaaggcccaccaaggcgacgatcggtagctggtctgagaggatgatcagccacactgggactgagacacggcccagactcctacgggaggcagcagtggggaatattggacaatgggcgcaagcctgatccagcaatgccgcgtgtgtgaagaaggcctgcgggttgtaaagcactttcagtggggaagaaacgcctgaggcgaatactctcgggctatgacgttacccacagaagaagcaccggctaactccgtgccagcagccgcggtaatacggagggtgcaagcgttaatcggaatcactgggcgtaaagcgcacgtaggcggcaacgtaagtcagatgtgaaagccccgggctcaacccgggaacggcatttgagactgcgtcgctcgagtctgagagaggggggtggaattccaggtgtagcggtgaaatgcgtagagatctggaggaacaccagtggcgaaggcggccccctggctcaagactgacgctgaggtgcgaaagcgtggggagcaaacaggattagataccctggtagtccacgccgtaaacgatgtcgactagccgtggggtccatttaagggcttcgtggcgcagctaacgcgataagtcgaccgcctggggagtacggccgcaaggttaaaactcaaaggaattgacgggggcccgcacaagcggtggagcatgtggtttaattcgatgcaacgcgaagaaccttaccagcccttgacatcctcggaatcctgcagagatgcgggagtgccttcgggagccgagagacaggtgctgcatggctgtcgtcagctcgtgtcgtgagatgttgggttaagtcccgtaacgagcgcaacccttgcccttagttgccagcgcgtgatggcgggaactctaaggggactgccggtgataaaccggaggaaggtggggatgacgtcaagtcatcatggcccttatgggctgggctacacacgtgctacaatggccggtacagagggttgccaacccgcgagggggagccaatctcagaaaaccggtcgtagtccggatcgcagtctgcaactcgactgcgtgaagtcggaatcgctagtaatcgcgaatcagcatgtcgcggtgaatacgttcccgggccttgtacacaccgcccgtcacaccatgggagttggttgcaccagaagcaggtagcttaaccttcgggagggcgcttgccacggtgtggtcaatgactggggtg

SEQ ID NO: 3416 - DNA, 1451 bp, Thiocapsa roseopersicina
  source 1..1451: mol_type = unassigned DNA
attgaacgctggcggcatgcctaacacatgcaagtcgaacgcgaaagggctttggcctgagtagagtggcggacgggtgagtaatgcatgggaatctacctcgacgtgggggataacccggggaaactcgggctaataccgcatacgacctacgggtgaaagggggcttcggctctcgcggcgagatgagctcatgtccgattagctagttggcggggtaaaggcccaccaaggcgacgatcggtagctggtctgagaggatgatcagccacactgggactgagacacggcccagactcctacgggaggcagcagtggggaatattggacaatgggcgcaagcctgatccagcaatgccgcgtgtgtgaagaaggcctgcgggttgtaaagcactttcagtggggaagaaacgctcggggcgcataccctcgggctatgacgttacccacagaagaagcaccggctaactccgtgccagcagccgcggtaatacggagggtgcaagcgttaatcggaatcactgggcgtaaagcgcacgtaggcggcaacgtaagtcagatgtgaaagccccgggctcaacccgggaacggcatttgagactgcgtcgctcgagtctgagagaggggggtggaattccaggtgtagcggtgaaatgcgtagagatctggaggaacaccagtggcgaaggcggccccctggctcaagactgacgctgaggtgcgaaagcgtggggagcaaacaggattagataccctggtagtccacgccgtaaacgatgtcgactagccgtggggtccatttaagggcttcgtggcgcagctaacgcgataagtcgaccgcctggggagtacggccgcaaggttaaaactcaaaggaattgacgggggcccgcacaagcggtggagcatgtggtttaattcgatgcaacgcgaagaaccttaccagcccttgacatcctcggaaccctgtagagatacgggggtgccttcgggagccgagagacaggtgctgcatggctgtcgtcagctcgtgtcgtgagatgttgggttaagtcccgtaacgagcgcaacccttgcccttagttgccagcgcgtcatggcgggaactctaaggggactgccggtgataaaccggaggaaggtggggatgacgtcaagtcatcatggcccttatgggctgggctacacacgtgctacaatggccggtacagagggttgccaacccgcgagggggagccaatctcagaaaaccggtcgtagtccggatcgcagtctgcaactcgactgcgtgaagtcggaatcgctagtaatcgcgaatcagcatgtcgcggtgaatacgttcccgggccttgtacacaccgcccgtcacaccatgggagttggttgcaccagaagcaggtagcttaaccttcgggagggcgcttgccacggtgtggtcaatgactggggtg

SEQ ID NO: 3417 - DNA, 1391 bp, unidentified
  source 1..1391: mol_type = unassigned DNA; note = Thioclava atlantica
aacgaacgctggcggcaggcctaacacatgcaagtcgagcgagatcttcggatctagcggcggacgggtgagtaacgcgtgggaacgtaccctttgctacggaatagccccgggaaactgggagtaataccgtataagcccttcgggggaaagatttttcggcaaaggatcggcccgcgttggattaggtagttggtggggtaacggcctaccaagccgacgatccatagctggtttgagaggatgatcagccacactgggactgagacacggcccagactcctacgggaggcagcagtggggaatcttagacaatgggggaaaccctgatctagccatgccgcgtgagcgatgaaggccttagggttgtaaagctctttcagctgggaagataatgacggtaccagcagaagaagccccggctaactccgtgccagcagccgcggtaatacggagggggctagcgttgttcggaattactgggcgtaaagcgcacgtaggcggactattaagtcaggggtgaaatcccggggctcaaccccggaactgcctctgatactggtagtcttgagttcgagagaggtgagtggaattccgagtgtagaggtgaaattcgtagatattcggaggaacaccagtggcgaaggcggctcactggctcgatactgacgctgaggtgcgaaagcgtggggagcaaacaggattagataccctggtagtccacgccgtaaacgatgaatgccagtcgtcgggtagcatgctattcggtgacacacctaacggattaagcattccgcctggggagtacggtcgcaagattaaaactcaaaggaattgacgggggcccgcacaagcggtggagcatgtggtttaattcgaagcaacgcgcagaaccttaccaacccttgacatcctgatcgcggttaccagagatggtttccttcagttcggctggatcagtgacaggtgctgcatggctgtcgtcagctcgtgtcgtgagatgttcggttaagtccggcaacgagcgcaacccacgtccttagttgccatcattcagttgggcactctagggaaactgccgatgataagtcggaggaaggtgtggatgacgtcaagtcctcatggcccttacgggttgggctacacacgtgctacaatggcagtgacaatgggataatcccaaaaagctgtctcagttcggattggggtctgcaactcgaccccatgaagtcggaatcgctagtaatcgcgtaacagcatgacgcggtgaatacgttcccgggccttgtacacaccgcccgtcacaccatgggagttggttctacccgaagatggtgcgccaacctgttcgcagggggcagctagccacggtaggatcagcgactggggtg

SEQ ID NO: 3418 - DNA, 1393 bp, unidentified
  source 1..1393: mol_type = unassigned DNA; note = Thioclava dalianensis
aacgaacgctggcggcaggcctaacacatgcaagtcgagcgagatcttcggatctagcggcggacgggttagtaacgcgtggggatgtaccctttgctacggaatagtcccgggaaactgggtttaataccgtatgtgcccttcgggggaaagatttatcggcaaaggatcaacccgcgttggattagatagttggtggggtaatggcctaccaagtcgacgatccatagctggtttgagaggatgatcagcaacactgggactgagacacggcccagactcctacgggaggcagcagtggggaatcttagacaatgggcgcaagcctgatctagccatgccgcgtggatgatgaaggccttagggttgtaaagtcctttcagctgggaagataatgacggtaccagcagaagaagccccggctaactccgtgccagcagccgcggtaatacggagggggctagcgttgttcggaattactgggcgtaaagcgcacgtaggcggactattaagtgaggggtgaaatcccagggctcaaccctggaactgcctctcatactggtagtcttgagttcgagagaggtgagtggaattccgagtgtagaggtgaaattcgtagatattcggaggaacaccagtggcgaaggcggctcactggctcgatactgacgctgaggtgcgaaagcgtggggagcaaacaggattagataccctggtagtccacgccgtaaacgatgaatgccagtcgtcgggtagcatgctattcggtgacacacctaacggattaagcattccgcctggggagtacggtcgcaagattaaaactcaaaggaattgacgggggcccgcacaagcggtggagcatgtggtttaattcgaagcaacgcgcagaaccttaccaacccttgacatcctgatcgcggttaccagagatggtttccttcagttcggctggatcagtgacaggtgctgcatggctgtcgtcagctcgtgtcgtgagatgttcggttaagtccggcaacgagcgcaacccacgtccttagttgccagcaggttaagctgggcactctagggaaactgccgatgataagtcggaggaaggtgtggatgacgtcaagtcctcatggcccttacgggttgggctacacacgtgctacaatggcagtgacaatgggttaatcccaaaaagctgtctcagttcggattggggtctgcaactcgaccccatgaagtcggaatcgctagtaatcgcgtaacagcatgacgcggtgaatacgttcccgggccttgtacacaccgcccgtcacaccatgggagttggttctacccgaagatggtgcgccaacctgttcgcagggggcagctagccacggtaggatcagcgactggggtg

SEQ ID NO: 3419 - DNA, 1451 bp, Thiocystis violascens
  source 1..1451: mol_type = unassigned DNA
attgaacgctggcggcatgcctaacacatgcaagtcgaacgcgaaaaggctttggcctgagtagcgtggcggacgggtgagtaatgcgtgggaatctgcctggcagtgggggataacccggggaaactcgggctaataccgcatacgccctacgggggaaagggggcttcggctctcgttgccagatgagcccacgtccgattagcttgttggcggggtaacggcccaccaaggccgcgatcggtcgctggtctgagaggatgaccagccacactgggactgagacacggcccagactcctacgggaggcagcagtggggaatattggacaatgggcgcaagcctgatccagcaatgccgcgtgtgtgaagaaggcctgcgggttgtaaagcactttcagtgggaaagaaaagcggctggttaatacccagtcgtcttgacgttactcacaaaagaagcaccggctaactccgtgccagcagccgcggtaatacggagggtgcaagcgttaatcggaattactgggcgtaaagcgcgcgtaggcggcccggtcagtccgctgtgaaagccctgggcttaacctgggaactgcagtggatactgccgcgctagagtgtgaaagaggggggtggaattccaggtgtagcggtgaaatgcgtagagatctggaggaacaccagtggcgaaggcggccccctggttcaacactgacgctgaggtgcgaaagcgtggggagcaaacaggattagataccctggtagtccacgcggtaaacgatgtcgactagccgtggggtccatttaagggcttcgtggcgcagctaacgcgataagtcgaccgcctggggagtacggccgcaaggttaaaactcaaaggaattgacgggggcccgcacaagcggtggagcatgtggtttaattcgatgcaacgcgaagaaccttaccagcccttgacatcctcggaatcctgcggagacgcgggagtgccttcgggagccgagagacaggtgctgcatggctgtcgtcagctcgtgtcgtgagatgttgggttaagtcccgtaacgagcgcaacccttgtccttagttgccagcgcgtcatggcgggaactctaaggagactgccggtgataaaccggaggaaggtggggatgacgtcaagtcatcatggcccttatgggctgggctacacacgtgctacaatggccggtacagagggttgcgagcccgcgagggggagccaatcccagaaaaccggtcgtagtccggatcgcagtctgcaactcgactgcgtgaagtcggaatcgctagtaatcgcgaatcagcatgtcgcggtgaatacgttcccgggccttgtacacaccgcccgtcacaccatgggagttggttgcaccagaagtcgatagcctaaccttcgggagggcgttgaccacggtgtggtcaatgactggggtg

SEQ ID NO: 3420 - DNA, 1458 bp, Thioflavicoccus mobilis
  source 1..1458: mol_type = unassigned DNA
attgaacgctggcggcatgcttaacacatgcaagtcgaacgcgaaagggcttcggcctgagtagagtggcggacgggtgagtaacgcgtgggaatctgccctgtagtgggggacaacccggggaaactcgggctaataccgcatacgtcctacgggagaaagggggcctctgcttgcaagctcctgctagaggatgagcccacgtccgattagctagttggtggggtaaaggcccaccaaggcgacgatcggtagctggtctgagaggatgatcagccacactgggactgagacacggcccagactcctacgggaggcagcagtggggaatattggacaatgggcgcaagcctgatccagcaatgccgcgtgtgtgaagaaggcctgcgggttgtaaagcactttcagtggggaagaaaggcctggggtgaatagccctgggtgttgacgttacccacagaagaagcaccggctaactccgtgccagcagccgcggtaatacggagggtgcaagcgttaatcggaatcactgggcgtaaagggcgcgtaggcggcgaggtaagtcagatgtgaaatccccgggctcaacctgggaatggcatttgatactgctttgctagagtctggtagaggggggtggaattccaggtgtagcggtgaaatgcgtagagatctggaggaacaccagtggcgaaggcgaccccctgggccaagactgacgctgaggtgcgaaagcgtggggagcaaacaggattagataccctggtagtccacgctgtaaacgctgtcgactagccgttggatccaattaagggttgagtggcgcagctaacgcgataagtcgaccgcctggggagtacggccgcaaggttaaaactcaaaggaattgacgggggcccgcacaagcggtggagcatgtggtttaattcgatgcaacgcgaagaaccttaccagcccttgacatcctcggaatcctgcagagatgtgggagtgccttcgggagccgagagacaggtgctgcatggctgtcgtcagctcgtgtcgtgagatgttgggttaagtcccgtaacgagcgcaacccttgtccttagttgccagcggttcggccgggaactctaaggagactgccggtgataaaccggaggaaggtggggatgacgtcaagtcatcatggcccttatgggctgggctacacacgtgctacaatggtcggtacagagggttgcgaagcggcgacgtggagccaatcccagaaaaccggtcgtagtccggattgcagtctgcaactcgactgcatgaagtcggaatcgctagtaatcgcgaatcagcatgtcgcggtgaatacgttcccgggccttgtacacaccgcccgtcacaccatgggagttggttgcaccagaagtcgatagcttaaccttcgggagggcgttgaccacggtgtgatcaatgactggggtg

SEQ ID NO: 3421 - DNA, 1465 bp, unidentified
  source 1..1465: mol_type = unassigned DNA; note = Thiogranum longum
attgaacgctggcggcatgcctaacacatgcaagtcgaacggaaacgatgaagagcttgctcttcaggcgtcgagtggcggacgggtgagtaatgcttaggaatctacccatgtagtgggggacaacctggtgaaaaccaggctaataccgcatgagcccttcgggggaaagcaggggatcttcggaccttgcgctattggatgagcctaagtcggattagcttgttggtggggtaacggcctaccaaggcgacgatccgtagctggtctgagaggatgatcagccacactgggactgagacacggcccagactcctacgggaggcagcagtggggaatattggacaatgggcgcaagcctgatccagcaatgccgcgtgtgtgaagaaggcctgcgggttgtaaagcactttcagtaaggaggaaatgctcaaggttaataaccttgagtcttgacgttacttacagaagaagcaccggctaactctgtgccagcagccgcggtaatacagagggtgcgagcgttaatcggaattactgggcgtaaagcgcgcgtaggcggtttgttaagttggatgtgaaagccctgggcttaacctgggaactgcattcaaaactggcaggctagagtatggtagaggtaagtggaattccgggtgtagcggtgaaatgcgtagatatccggaggaacatcagtggcgaaggcggcttactggaccaatactgacgctgaggtgcgaaagcgtggggagcaaacaggattagataccctggtagtccacgccgtaaacgatgagaactagacgttgggtccatttaaggatttagtgtcgcagctaacgcgtgaagttctccgcctggggagtacggccgcaaggttaaaactcaaaggaattgacgggggcccgcacaagcggtggagcatgtggtttaattcgatgcaacgcgaagaaccttaccagcccttgacatcctgggaattttctagagatagattagtgccttcgggaacccagtgacaggtgctgcatggctgtcgtcagctcgtgtcgtgagatgttgggttaagtcccgcaacgagcgcaacccttgtccttagttgccagcattcagttgggcactctagggagactgccggtgacaaaccggaggaaggtggggatgacgtcaagtcatcatggcccttatgggctgggctacacacgtgctacaatggtgcatacagagggttgccaacccgcgagggggagctaatcccagaaagtgcatcgtagtccggattggagtctgcaactcgactccatgaagtcggaatcgctagtaatcgtagatcagaatgctacggtgaatacgttcccgggccttgtacacaccgcccgtcacaccatgggagtgggctgcaaaagaagtgggtagcataaccttcgggagtgcgctcaccactttgtggttcatgactggggtg

SEQ ID NO: 3422 - DNA, 1451 bp, Thiohalobacter thiocyanaticus
  source 1..1451: mol_type = unassigned DNA
attgaacgctggcggcatgcttaacacatgcaagtcgaacgcgaaagtccttcggggcgagtagagtggcggacgggtgagtaatgcgtgggaatctgcctggcagtgggggataacccgaggaaactcgggctaataccgcatacgccctacgggggaaagggggcttcggctctcgttgctagatgagcccacgtccgattagctagttggtggggtaaaggcccaccaaggcgacgatcggtagctggtctgagaggatgatcagccacactgggactgagacacggcccagactcctacgggaggcagcagtggggaatattggacaatgggcgcaagcctgatccagcaatgccgcgtgtgtgaagaaggcctgcgggttgtaaagcactttcagtgaggaagaaaagcctggggttaatacccctgggtcttgacgttactcacagaagaagcaccggctaactccgtgccagcagccgcggtaatacggagggtgcaagcgttaatcggaatcactgggcgtaaagcgcacgtaggcggcttggtcagtcagctgtgaaagccctgggcttaacctgggaactgcagttgatactgcctagctagagtctgaaagaggggggtggaattccaggtgtagcggtgaaatgcgtagatatctggaggaacaccagtggcgaaggcggccccctggttcaagactgacgctgaggtgcgaaagcgtggggagcaaacaggattagataccctggtagtccacgctgtaaacgctgtcgactagccgtggggctcatttaagggtttcgtggcgcagctaacgcgataagtcgaccgcctggggagtacggccgcaaggttaaaactcaaaggaattgacgggggcccgcacaagcggtggagcatgtggtttaattcgatgcaacgcgaagaaccttaccagcccttgacatcctcgggacttggcagagatgccttggtgccttcgggagccgagagacaggtgctgcatggctgtcgtcagctcgtgtcgtgagatgttgggttaagtcccgtaacgagcgcaacccttgtccttagttgccagcgagtcaagtcgggaactctaaggagactgccggtgataaaccggaggaaggtggggatgacgtcaagtcatcatggcccttatgggctgggctacacacgtgctacaatggccggtacagagggtcgcaagcccgcgagggggagccaatctcagaaaaccggtcgtagtccggatcgcagtctgcaactcgactgcgtgaagtcggaatcgctagtaatcgcgaatcagaatgtcgcggtgaatacgttcccgggccttgtacacaccgcccgtcacaccatgggagttggttgcaccagaagtagatagcttaaccttcgggagggcgtttaccacggtgtggtcaatgactggggtg

SEQ ID NO: 3423 - DNA, 1462 bp, Thiohalomonas denitrificans
  source 1..1462: mol_type = unassigned DNA
attgaacgctggcggcatgcttaacacatgcaagtcgagcggtaacaggcccttcggggtgctgacgagcggcggacgggtgagtaatgcgtaggaatctgcctggtagtgggggatagcccggggaaacccggattaataccgcatacgctctacggaggaaagtgggggacctttcggggcctcacgctatcagatgagcctacgtcggattagctagttggtagggtaaaggcctaccaaggcgacgatccgtagctgttctgagaggatgatcagccacactgggactgagacacggcccagactcctacgggaggcagcagtggggaatattggacaatgggggcaaccctgatccagcaatgccgcgtgtgtgaagaaggcctgcgggttgtaaagcactttcagtagggaggaaaagttcaaggttaatagccttgagccttgacgttacctacagaagaagcaccggctaactccgtgccagcagccgcggtaatacggagggtgcaagcgttaatcggaattactgggcgtaaagcgcgcgtaggcggcttgttaagtcggatgtgaaagccccgggcttaacctgggaatggcattcgatactggcaggctagagtttggtagagggaagtggaattccgggtgtagcggtgaaatgcgtagatatccggaggaacaccagtggcgaaggcgacttcctggaccaaaactgacgctgaggtgcgaaagcgtgggtagcaaacaggattagataccctggtagtccacgccgtaaacgatgagaactagccgttgggggaatttattccctttgtggcgaagctaacgcgataagttctccgcctggggagtacggccgcaaggttaaaactcaaaggaattgacgggggcccgcacaagcggtggagcatgtggtttaattcgatgcaacgcgaagaaccttacctgcccttgacatcctcggaacttggcagagatgccttggtgccttcgggaaccgagtgacaggtgctgcatggctgtcgtcagctcgtgtcgtgagatgttgggttaagtcccgtaacgagcgcaacccttgtccctagttgccagcacgtaatggtgggaactctagggagactgccggtgacaaaccggaggaaggtggggatgacgtcaagtcatcatggcccttatgggcagggctacacacgtgctacaatggccggtacagagggctgccaagccgcaaggtggagcaaatctcagaaaaccggtcgtagtccggatcggagtctgcaactcgactccgtgaagtcggaatcgctagtaatcgcggatcagaatgccgcggtgaatacgttcccgggccttgtacacaccgcccgtcacaccatgggagtgggctgcaccagaagtcgcttgtctaaccttcgggaggacggcgcccacggtgtggttcatgactggggtg

SEQ ID NO: 3424 - DNA, 1297 bp, Thiohalophilus thiocyanatoxydans
  source 1..1297: mol_type = unassigned DNA
cagcagcagagagcttgctctctggctggcgagtggcggacgggtgagtaatgcataggaatctgcccagtagtgggggacaacctggggaaactcaggctaataccgcatacgacctacgggtgaaagtgggggatcttcggacctcacgctactggatgagcctatgtcagattagcttgttggtgaggtaaaggctcaccaaggcaacgatctgtagctggtctgagaggacgatcagccacactgggactgagacacggcccagactcctacgggaggcagcagtggggaatattggacaatgggggcaaccctgatccagcaatgccgcgtgtgtgaagaaggcctgcgggttgtaaagcactttcaacagtgaagaaaagctgacggttaatacccgtcagtcttgacattaactgtagaagaagcaccggctaactccgtgccagcagccgcggtaatacggagggtgcaagcgttaatcggaattactgggcgtaaagcgcgcgtaggcggtttgataagtcggatgtgaaagccccgggctcaacctgggaattgcattcgatactgtcaggctagagtatggtagagggaagtggaattccaggtgtagcggtgaaatgcgtagagatctggaggaacatcagtggcgaaggcgacttcctggaccaatactgacgctgaggtgcgaaagcgtggggagcaaacaggattagataccctggtagtccacgccgtaaacgatgtcaactagccgttggggatattaaatctttagtggcgtagctaacgcgataagttgaccgcctggggagtacggcgcaaggttaaaactcaaaggaattgacgggggcccgcacaagcggtggagcatgtggtttaattcgatgcaacgcgaagaaccttacctacccttgacatcctcagaacttgtcagagatgacttggtgccttcgggaactgagtgacaggtgctgcatggctgtcgtcagctcgtgtcgtgagatgttgggttaagtcccgtaacgagcgcaacccttgtccctagttgctaacatttattgagaactctagggagactgccggtgacaaaccggaggaaggtggggatgacgtcaagtcatcatggcccttacgggtagggctacacacgtgctacaatggacggtacagagggccgcaaacccgcgagggggagcaaatctcataaaaccgttcgtagtccggatcggagtctgcaactcgactccgtgaagtcggaatcgctagtaatcgcgaatcagaatgtcgc

SEQ ID NO: 3425 - DNA, 1332 bp, Thiohalorhabdus denitrificans
  source 1..1332: mol_type = unassigned DNA
gtacgtgaaagcaccttcgggtgtgactagcgtggcggacgggtgagtaacgcgtggatgacctgccctttggcgggggataacccggggaaacccgggctaataccgcatacgtcctgttcctttggggacaggggaaagctggcctctgatgcaagctagcgccgaaggaggggtccgcgtcggattagctagttggtggggtaacggcccaccaaggcgacgatccgtagctggtcttagcggatgatcagccacactgggactgagacacggcccagactcctacgggaggcagcagtggggaatcttggacaatgggggcaaccctgatccagccatgccgcgtgggtgaagaaggccttcgggttgtaaagccctttcagcagggaagacgccttgtggttcaaatagggccgcaaggtgacgttacctgcagaagaagcgccggccaactccgtgccagcagccgcggtaatacggagggcgcaagcgttaatcggaatcactgggcgtaaagggcgcgcaggcggctcgtcaagtgggatgtgaaagccctgggctcaacctaggaattgcattccaaactggcgggctagagtccggaagagggaggtggaattccccgtgtagcggtgaaatgcgtagatatggggaggaacaccggtggcgaaggcgacctcctggtccggtactgacgctgaggcgcgaaagcgtgggtagcgaacgggattagataccccggtagtccacgccgtaaacgttgagaactaggtgtggggaagcatgccttctccgtgccgaagctaacgcgttaagttctccgcctggggagtacggccgcaaggctaaaactcaaaggaattgacgggggcccgcacaagcggtggagcatgtggtttaattcgatgcaacgcgaagaaccttacctgggcttgacatcatccggaatcccctagagataggggagtgccttcgggagccggatgacaggtgctgcatggctgtcgtcagctcgtgtcgtgagatgttgggttaagtcccgcaacgagcgcaacccctatccttagttgccagcggttcggccgggcactctagggagactgccggtgacaaaccggaggaaggcggggacgacgtcaagtcatcatggcctttatgtccagggctacacacgtgctacaatggccggtacagagggcagcgagtccgcgaggcggagcgaatcccaaaaagccggtcgtagttcggattgcagtctgcaactcgactgcatgaagccggaatcgctagtaatcgcagatcagaatgctgcggtgaatacgttcccgg

SEQ ID NO: 3426 - DNA, 1465 bp, Thiohalospira halophila
  source 1..1465: mol_type = unassigned DNA
attgaacgctggcggcatgcctaacacatgcaagtcgaacggcagcgcgggagagcttgctcttctggcggcgagtggcgaacgggtgagtaacgcgtaggaatctgcccggtagtgggggataacttggggaaactcaagctaataccgcatacgccctacgggggaaaatgggggatcttcggacctcatgctatcggaggagcctgcgtcggattagctagttggtggggtaagagcctaccaaggcgacgatccgtagctggtctgagaggatgatcagccacactgggactgagacacggcccagactcctacgggaggcagcagtggggaatattggacaatgggcgaaagcctgatccagcaatgccgcgtgtgtgaagaaggcctgcgggttgtaaagcactttcagcagccaagaaaagctcagggctaatacccctgagtcttgacattaactgcagaagaagcaccggctaactccgtgccagcagccgcggtaatacggagggtgcaagcgttaatcggaattactgggcgtaaagggcacgcaggcggcctggacagttggatgtgaaagccccgggcttaacctgggaattgcattcaatacttccaggctagagttcggtagagggtagtggaattcccggtgtagcggtgaaatgcgtagatatcgggaggaacaccagtggcgaaggcgactgcctggaccgaaactgacgctgaggtgcgaaagcgtgggtagcaaacaggattagataccctggtagtccacgccgtaaacgctgagaactagccgttggggaccttgatgtccttagtggcgaagctaacgcgttaagttctccgcctggggagtacggccgcaaggttaaaactcaaaggaattgacgggggcccgcacaagcggtggagcatgtggtttaattcgatgcaacgcgaagaaccttacctgcccttgacatcctcggaacttggtagagataccttggtgccttcgggaaccgagtgacaggtgctgcatggctgtcgtcagctcgtgtcgtgagatgttgggttaagtcccgtaacgagcgcaacccttatccctagttgccagcggtccggccgggaactctagggagactgccggtgacaaaccggaggaaggtggggatgacgtcaagtcatcatggcccttatgggcagggctacacacgtgctacaatggccggcacagagggcagcaaacccgcgagggggagcaaatcccgtaaagccggtcccagtccggattggagtctgcaactcgactccatgaagtcggaatcgctagtaatcgcagatcagaatgctgcggtgaatacgttcccgggccttgtacacaccgcccgtcacaccatgggagtcgactgtaccagaagcgggtagtctaaccttcgggaggacgctcgccacggtatggtcggcgactggggtg

SEQ ID NO: 3427 - DNA, 1463 bp, unidentified
  source 1..1463: mol_type = unassigned DNA; note = Thiolapillus brandeum
attgaacgctggcggtatgcttaacacatgcaagtcgaacgcgaaaggcaccttcgggagctgagtagagtggcggacgggtgagtaacgcgtaggaatctgcctagtagtgggggatagcccggagaaatccggattaataccgcatacgccctacgggggaaagatggcctcttcttgaaagctatcactattagatgagcctgcgtcggattagctggttggtgaggtaatggctcaccaaggcgacgatccgtagctggtctgagaggacgatcagccacactgggactgagacacggcccagactcctacgggaggcagcagtggggaatattggacaatgagcgaaagcttgatccagcaataccgcgtgtgtgaagaaggcctgcgggttgtaaagcactttcagtggggaagaaaagcttaaggttaatacccttgagtcttgacgttacccacagaagaagcaccggctaactccgtgccagcagccgcggtaatacggagggtgcaagcgttaatcggaattactgggcgtaaagcgcgcgtaggcggtttggtcagtcagatgtgaaagccctgggctcaacctgggaactgcatttgatactgccaagctagagtatggtagagggaagtggaattccgggtgtagcggtgaaatgcgtagatatccggaggaacaccagtggcgaaggcgacttcctggaccaatactgacgctgaggtgcgaaagcgtgggtagcaaacaggattagataccctggtagtccacgccgtaaacgatgtcaactagccgttggggccatttaaggctttagtggcgcagctaacgcgataagttgaccgcctggggagtacggtcgcaagattaaaactcaaaggaattgacgggggcccgcacaagcggtggagcatgtggtttaattcgatgcaacgcgaagaaccttaccagcccttgacatcctcggaagttagcagagatgctttcgtgccttcgggaaccgagtgacaggtgctgcatggctgtcgtcagctcgtgtcgtgagatgttgggttaagtcccgtaacgagcgcaacccctgtccttagttgccagcgagtaatgtcgggaactctaaggagactgccggtgacaaaccggaggaaggtggggatgacgtcaagtcatcatggcccttatgggctgggctacacacgtgctacaatggccggtacagagggttgccaacccgcgagggggagctaatcccagaaaaccggtcgtagtccggattggagtctgcaactcgactccatgaagtcggaatcgctagtaatcgcgaatcagaatgtcgcggtgaatacgttcccgggccttgtacacaccgcccgtcacaccatgggagtgggttgcaccagaagtagctagactaaccttcggggggtcggttaccacggtgtgattcatgactggggtg

SEQ ID NO: 3428 - DNA, 1462 bp, unidentified
  source 1..1462: mol_type = unassigned DNA; note = Thiomicrospira aerophila
aatgaacgctggcggcaggcctaacacatgcaagtcggacggtaacaggggagcttgctctcgctgacgagtggcggacgggtgagtaatgcatgggaatctgccctttggttggggataccgtatggaaacgtacgttaataccgaatgagatctacggatgaaaggtggcctctacttgtaagctatcgccaagggatgagcccatgttagattagctagttggtgaggtaatggctcaccaaggcgacgatctatagctggtttgagaggatgatcagccacactgggactgagacacggcccagactcctacgggaggcagcagtggggaatattggacaatgggggcaaccctgatccagccatgccgcgtgtgtgaagaaggcccgagggttgtaaagcacttttagtgaggaggaaaggttagtagttaatacctgctagctgtgacgttactcacagaaaaagcaccggctaactctgtgccagcagccgcggtaatacagagggtgcaagcgttattcggaattactgggcgtaaagcgcgcgtaggcggattgttaagtcagttgtgaaagccctgggctcaacctaggaatggcgattgaaactggcagtctagagtttagtagagggaaggggaatttctggagtagcagtgaaatgcgtagatatcagaaggaacatcagtggcgaaggcgccttcctggactaaaactgacgctgaggtgcgaaagcgtggggagcaaacgggattagataccccggtagtccacgccctaaacgatgtcaactagctgttggtcttattaaaaagattagtagcgcagctaacgcgataagttgaccgcctggggagtacggtcgcaagattaaaactcaaaggaattgacgggggcccgcacaagcggtggagcatgtggtttaattcgatgcaacgcgaagaaccttaccatcccttgacatccacagaactttctagagatagattggtgccttcgggaactgtgagacaggtgctgcatggctgtcgtcagctcgtgtcgtgagatgttgggttaagtcccgcaacgagcgcaacccttatcattagttgctaccatttagttgagaactctaatgagactgccggtgataaaccggaggaaggcggggacgacgtcaagtcatcatggcccttatgggatgggctacacacgtgctacaatggtcggtacaaacagttgcgaagccgcgaggtggtgctaatctgaaaaaaccgatcgtagtccggattggagtctgcaactcgactccatgaagtcggaatcgctagtaatcgcaaatcagaatgttgcggtgaatacgttcccgggccttgtacacaccgcccgtcacaccatgggagtgggttgcaccagaagtagctagtctaaccttcgggaggacggttaccacggtgtgattcatgactggggtg

SEQ ID NO: 3429 - DNA, 1462 bp, unidentified
  source 1..1462: mol_type = unassigned DNA; note = Thiomicrospira cyclica
aatgaacgctggcggcaggcctaacacatgcaagtcggacggtaacaggggagcttgctcctgctgacgagtggcggacgggtgagtaaggcatgggaatctgccctttggttggggataccgtatggaaacgtacgttaataccgaatgagatctacggatgaaaggtggcctctacttgtaagctatcgccaaaggatgagcccatgttagattagctagttggtgaggtaatggctcaccaaggcgacgatctatagctggtttgagaggatgatcagccacactgggactgagacacggcccagactcctacgggaggcagcagtggggaatattggacaatgggggcaaccctgatccagccatgccgcgtgtgtgaagaaggcccgagggttgtaaagcacttttagtgaggaggaaaggcagttagttaatacctgattgctgtgacgttactcacagaaaaagcaccggctaactctgtgccagcagccgcggtaatacagagggtgcaagcgttattcggaattactgggcgtaaagcgcgcgtaggcggattgttaagtcagttgtgaaagccctgggctcaacctaggaacggcgattgaaactggcagtctagagtttagtagagggaaggggaatttctggagtagcagtgaaatgcgtagatatcagaaggaacatcagtggcgaaggcgccttcctggactaaaactgacgctgaggtgcgaaagcgtggggagcaaacgggattagataccccggtagtccacgccctaaacgatgtcaactagctgttggtcttattaaaaagattagtagcgcagctaacgcgataagttgaccgcctggggagtacggtcgcaagattaaaactcaaaggaattgacgggggcccgcacaagcggtggagcatgtggtttaattcgatgcaacgcgaagaaccttaccatcccttgacatccacagaactttctagagatagattggtgccttcgggaactgtgagacaggtgctgcatggctgtcgtcagctcgtgtcgtgagatgttgggttaagtcccgcaacgagcgcaacccttatcattagttgctaccatttagttgagaactctaatgagactgccggtgataaaccggaggaaggcggggacgacgtcaagtcatcatggcccttatgggatgggctacacacgtgctacaatggtcggtacaaacagttgcgaagccgcgaggtggtgcgaatctgaaaaaaccgatcgtagtccggattggagtctgcaactcgactccatgaagtcggaatcgctagtaatcgcaaatcagaatgttgcggtgaatacgttcccgggccttgtacacaccgcccgtcacaccatgggagtgggttgcaccagaagtagctagtctaaccttcgggaggacggttaccacggtgtgattcatgactggggtg

SEQ ID NO: 3430 - DNA, 1453 bp, Thiomonas delicata
  source 1..1453: mol_type = unassigned DNA
attgaacgctagcggcatgccttacacatgcaagtcgaacggcagcacgggggcaaccctggtggcgagtggcgaacgggtgagtaatgcatcggaacgtgcccatcgatgggggataactgcgcgaaagcgttgctaataccgcatacgacctacgggtgaaagcaggggaccgcaaggccttgcgtcgatggagcggccgatgccggattagctagttggtgaggtaaaggctcaccaaggcaacgatccgtagctggtctgagaggacgaccagccacactgggactgagacacggcccagactcctacgggaggcagcagtggggaatcttggacaatgggcgaaagcctgatccagcaatgccgcgtgtgggaagagggccttcgggttgtaaaccacttttggcgggaaagaaatggtctgtgctaataccacggattgatgacggtacccgcagaataagcaccggctaactacgtgccagcagccgcggtaatacgtagggtgcgagcgttaatcggaattactgggcgtaaagcgtgcgcaggcggttgggaaagatagatgtgaaagccctgggctcaacctaggaattgcatttatgactgcccgactggagtacggtagaggggagtggaattccgcgtgtagcagtgaaatgcgtagatatgcggaggaacaccgatggcgaaggcagctccctggacctgtactgacgctcatgcacgaaagcgtggggagcaaacaggattagataccctggtagtccacgccctaaacgatgtcgactggttgttggacgggaaactgttcagtaacgaagctaacgcgtgaagtcgaccgcctggggagtacggccgcaaggttaaaactcaaaggaattgacggggacccgcacaagcggtggatgatgtggtttaattcgatgcaacgcgaaaaaccttacctacccttgacatgtctggaatcccgaagagatttgggagtgctcgaaagagagccagaacacaggtgctgcatggctgtcgtcagctcgtgtcgtgagatgttgggttaagtcccgcaacgagcgcaacccttgtcattagttgctacgaaagggcactctaatgagactgccggtgacaaaccggaggaaggtggggatgacgtcaagtcatcatggcccttatgggtagggctacacacgtcatacaatggacggtacagagggttgccaacccgcgagggggagccaatcccataaaaccgttcgtagtccggattgcagtctgcaactcgactgcatgaagtcggaatcgctagtaatcgcggatcagcttgccgcggtgaatacgttcccgggtcttgtacacaccgcccgtcacaccatgggagtggggtttaccagaagtagttagcctaaccgcaaggagggcgattaccacggtaggcttcatgactggggtg

SEQ ID NO: 3431 - DNA, 1467 bp, Thioploca ingrica
  source 1..1467: mol_type = unassigned DNA
  misc_difference 343..346: note = n is a, c, g, or t
  misc_difference 394: note = n is a, c, g, or t
  misc_difference 413: note = n is a, c, g, or t
  misc_difference 833..836: note = n is a, c, g, or t
attgaacgctggcggcatgcctaatacatgcaagtcgaacggtaacatgcttcggggtgatgacgagtggcggacgggtgagtaatacataggaatctgccttgtagtggggaacaacttggggaaactcaagctaataccgcataagtcttttttaaagaaagggaaagagggcctcttcatgaatctctcgctactagatgagcctatgtcagattagctagttggtaaggtaatggcttaccaaggcgacgatctgtagctggtctgagaggacgatcagccacactgggactgagacacggcccagactcctacgggaggcagcagtagggaatattgnnnnatgggcgaaagcctgatccagcaatgccgcgtgtgtgaagaaggcctncgggttgtaaagcactttnaattgggaagaaaagttcttggctaataatcaagtaccttgacgttaccaatataagaagcaccggctaactctgtgccagcagccgcggtaatacagagggtgcaagcgttaatcggaattactgggcgtaaagcgtgcgtaggcggctatgtaagtcagatgtgaaagcccaaggcttaaccttggaattgcatttgatactgcttagctagagtacagtaaagggaagcggaattcctagtgtagcggtgaaatgcgtagatattaggaggaacaccagtggcgaaggcggcttcctagactgatactgacactgaggtacgaaagcgtggggagcaaacaggattagataccctggtagtccacgccctaaacgatgagaactagacgttggaagggtataccttttagtgtcgcnnnnaacgcgataagttctccgcctggggagtacggccgcaaggttaaaactcaaatgaattgacgggggcccgcacaagcggtggagcatgtggtttaattcgatgcaacgcgaagaaccttacctagctttgacatccttggaaccttgcagaaatgtgaggctgccttcgggagccaagagacaggtgctgcatggctgtcgtcagctcgtgtcgtgagatgttgggttaagtcccgcaacgagcgcaacccttgtccctagttgccagcgattcggtcgggaactctagagagactgccggtgacaaaccggaggaaggtggggatgacgtcaagtcatcatggcctttatggctagggctacacacgtgctacaatggtgagtacagagggtcgccaaactgtaaagtggagctaatctcataaaactcatcgtagtccggattggagtctgcaactcgactccatgaagtcggaatcgctagtaatcgcggatcagcatgtcgcggtgaatacgttcccgggccttgtacacaccgcccgtcacaccatgggagtgggttgtaccagaagtaggtagtctaacctgataaggggggacgcttaccacggtatggttcataactggggtg

SEQ ID NO: 3432 - DNA, 1466 bp, unidentified
  source 1..1466: mol_type = unassigned DNA; note = Thiopseudomonas denitrificans
attgaacgctggcggcaggcttaacacatgcaagtcgagcggtaacagggagaagcttgcttctttgctgacgagcggcggacgggtgagtaatgcctgggaatctgcctggtagtgggggataacttgccgaaaggtaagctaataccgcgtacgccccatgggggaaagcaggggatcttcggaccttgcgctatcagatgagcccaggccggattagctagttggtggggtaaaggcctgccaaggcgacgatccgtagctggtctgagaggatgatcagccacaccgggactgagacacggcccggactcctacgggaggcagcagtggggaatattggacaatggggggaaccctgatccagccatgccgcgtgtgtgaagaaggtcttcggattgtaaagcactttaagttgggaggaagggtttctggttaatacccgggaattttgacgttaccaacagaataagcaccggctaacttcgtgccagcagccgcggtaatacgaagggtgcgagcgttaatcggaattactgggcgtaaagcgcgcgtaggtggtttgttaagttggaagtgaaagccccgggctcaacctgggaatggctttcaaaactggcgagctagagtacggtagagggcagtggaatttcctgtgtagcggtgaaatgcgtagatataggaaggaacatcagtggcgaaggcgactgtctggactgatactgacactgaggtgcgaaagcgtggggagcaaacaggattagataccctggtagtccacgccgtaaacgatgtcaactagttgttggaggccttgtgcctttagtaacgcagctaacgcattaagttgaccgcctggggagtacggccgcaaggttaaaactcaaatgaattgacgggggcccgcacaagcggtggagcatgtggtttaattcgaagcaacgcgaagaaccttacctggccttgacatgtagcgaactttccagagatggattggtgccttcgggaacgctaacacaggtgctgcatggctgtcgtcagctcgtgtcgtgagatgttgggttaagtcccgtaacgagcgcaacccttgtccttagttaccagcacgttatggtgggcactttaaggggactgccggtgacaaaccggaggaaggtggggatgacgtcaagtcatcatggcccttacggccagggctacacacgtgctacaatggtcggtacaacgggatgccaagccgcgaggtggagccaaccccatcaaagccgatcgtagtccggattgcactctgcaactcgagtgcatgaagtcggaatcgctagtaatcgcggatcagaatgccgcggtgaatacgttcccgggccttgtacacaccgcccgtcacaccatgggagtgggttgcaccagaagtagctagtctaaccttcggggggacggttaccacggtgtgattcatgactggggtg

SEQ ID NO: 3433 - DNA, 1464 bp, unidentified
  source 1..1464: mol_type = unassigned DNA; note = Thiorhodococcus drewsii
attgaacgctggcggcatgcttaacacatgcaagtcgaacgcgaaagtccttcggggcgagtagagtggcggacgggtgagtaatgcgtgggaatctgcctggcagtgggggataacccgaggaaactcgggctaataccgcatacgccctacgggggaaagggggcttcggctctcgttgctagatgagcccacgtccgattagctagttggtggggtaaaggcccaccaaggcgacgatcggtagctggtctgagaggatgatcagccacactgggactgagacacggcccagactcctacgggaggcagcagtggggaatattggacaatgggcgcaagcctgatccagcaatgccgcgtgtgtgaagaaggcctgcgggttgtaaagcactttcagtgaggaagaaaagcctggggttaatacccctgggtcttgacgttactcacagaagaagcaccggctaactccgtgccagcagccgcggtaatacggagggtgcaagcgttaatcggaatcactgggcgtaaagcgcacgtaggcggcttggtcagtcagctgtgaaagccctgggcttaacctgggaactgcagttgatactgcctagctagagtctgaaagaggggggtggaattccaggtgtagcggtgaaatgcgtagatatctggaggaacaccagtggcgaaggcggccccctggttcaagactgacgctgaggtgcgaaagcgtggggagcaaacaggattagataccctggtagtccacgctgtaaacgctgtcgactagccgtggggctcatttaagggtttcgtggcgcagctaacgcgataagtcgaccgcctggggagtacggccgcaaggttaaaactcaaaggaattgacgggggcccgcacaagcggtggagcatgtggtttaattcgatgcaacgcgaagaaccttaccagcccttgacatcctcgggacttggcagagatgccttggtgccttcgggagccgagagacaggtgctgcatggctgtcgtcagctcgtgtcgtgagatgttgggttaagtcccgtaacgagcgcaacccttgtccttagttgccagcgagtcaagtcgggaactctaaggagactgccggtgataaaccggaggaaggtggggatgacgtcaagtcatcatggcccttatgggctgggctacacacgtgctacaatggccggtacagagggtcgcaagcccgcgagggggagccaatctcagaaaaccggtcgtagtccggatcgcagtctgcaactcgactgcgtgaagtcggaatcgctagtaatcgcgaatcagaatgtcgcggtgaatacgttcccgggccttgtacacaccgcccgtcacaccatgggagttggttgcaccagaagtagatagcttaaccttcgggagggcgtttaccacggtgtggtcaatgactggggtgaagtcgtaacaag

SEQ ID NO: 3434 - DNA, 1458 bp, Thiorhodospira sibirica
  source 1..1458: mol_type = unassigned DNA
attgaacgctggcggcatgcctaacacatgcaagtcgaacggtaacaggccttcgggcgctgacgagtggcggacgggtgagtaacgcgtaggaatctgcctggtagtgggggataacccggggaaactcgggctaataccgcatacgccctacgggggaaagcgggggatcttcggacctcgcgttatcagatgagcctgcgtccgattagctagttggtgaggtaatggctcaccaaggcgacgatcggtagctggtctgagaggacgatcagccacactgggactgagacacggcccagactcctacgggaggcagcagtggggaatattggacaatgggcgcaagcctgatccagcaatgccgcgtgtgtgaagaaggcctgcgggttgtaaagcactttcagtggggaggaaaagctcaatgttaataccattgggtcttgacgtaacccacagaagaagcaccggctaactccgtgccagcagccgcggtaatacggagggtgcaagcgttaatcggaattactgggcgtaaagcgcacgtaggtggttgtgtcagtcagatgtgaaagccccgggcttaacctgggaactgcatctgatactgcacggctagagtttggtagaggagggcggaattcccggtgtagcggtgaaatgcgtagatatcgggaggaacaccagtggcgaaggcggctctctggactaaaactgacactgaggtgcgaaagcgtggggagcaaacaggattagataccctggtagtccacgccgtaaacgatgagaactagccgttgggaggatttagcctcttagtggcgcagcaaacgcattaagttctccgcctggggagtacggccgcaaggttgaaactcaaaggaattgacgggggcccgcacaagcggtggagcatgtggtttaattcgatgcaacgcgaagaaccttacctacccttgacatcctcggaacttgtcagagatgacttggtgccttcgggaaccgagagacaggtgctgcatggctgtcgtcagctcgtgtcgtgagatgttgggttaagtcccgcaacgagcgcaacccttatccttagttgccagcgattcggtcgggaactctagggagactgccggtgacaaaccggaggaaggtggggatgacgtcaagtcatcatggcccttatgggtagggctacacacgtgctacaatggccagtacaaagggttgccaacccgcgagggggagctaatctcaaaaagctggtcgtagtccggattggagtctgcaactcgactccatgaagtcggaatcgctagtaatcgcagatcagcattgctgcggtgaatacgttcccgggccttgtacacaccgcccgtcacaccatgggagttggttgcaccagaagtaggtagtctaaccttcgggagggcgcttaccacggtgtggtcaatgactggggtg

SEQ ID NO: 3435 - DNA, 1411 bp, Thiothrix caldifontis
  source 1..1411: mol_type = unassigned DNA
attgaacgctggcggtatgcttaagacatgcaagtcgaacggaatcttcggattcagtggcggacgggtgagtaacacgtgggaatctactgagtagtgggggacagcccggcgaaagccggattaataccgcatacgccctacgggggaaaggcgcaagccgctatttaatgagcccgcgtaagattagctagttggtaaggtaaaggcttaccaaggcgacgatctttagctggtctgagaggatggccagccacatcgggactgagacacggcccggactcctacgggaggcagcagtcgggaatattggacaatgggcgcaagcctgatccagcaataccgcgtgtgtgaagaaggcctgcgggttgtaaagcactttcagttgggaagataatgacgttaccaacagaagaagcaccggctaactccgtgccagcagccgcggtaatacggagggtgcaagcgttaatcggaattactgggcgtaaagcgtgcgtaggcggttacttaagtcagatgtgaaatccccgggctcaacctgggaactgcatctgatactgggtgactagagtgtgggagaggagagtggaatttccggtgtagcggtgaaatgcatagagatcggaaggaacatcagtggcgaaggcgactctctggaccaacactgacgctgaggcacgaaagcgtgggtagcaaacaggattagataccctggtagtccacgccgtaaacgatgtcaactagccgtcaggcccgctttagggtttggtggtggagctaacgtattaagttgaccgcctggggagtacgctcgcaagagtaaaactcaaaggaattgacgggggcccgcacaagcggtggagcatgtggtttaattcgatgcaacgcgaagaaccttacctggtcttgacatgcagtgaactttgcagaaatgtattggtgccttcgggaacactgacacaggtgctgcacggctgtcgtcagctcgtgtcgtgagatgttgggttaagtcccgcaacgagcgcaacccctatccctagttgccagcacgtaatggtgggaactctaaggagactgccggtgacaaaccggaggaaggtggggatgacgtcaagtcatcatggcccttatgaccagggctacacacgtgctacaatgggtggtacagagggaagcgataccgcgaggtggagcaaatcccagaaagccatccgtagtccggatcggagtctgcaactcgactccgtgaagtcggaatcgctagtaatcgcgaatcagcatgtcgcggtgaatacgttcccgggccttgtacacaccgcccgtcacaccatgggagtttgttgcaccagaagcaggtagtctaaccgaaaggagggcgcttgccacggtgtggccgatgactggggtg

SEQ ID NO: 3436 - DNA, 1411 bp, Thiothrix lacustris
  source 1..1411: mol_type = unassigned DNA
attgaacgctggcggtatgcttaagacatgcaagtcgaacggaatcttcggattcagtggcggacgggtgagtaacacgtgggaatctactgagtagtgggggacagcccggcgaaagccggattaataccgcatacgccctacgggggaaaggcgcaagccgctatttaatgagcccgcgtaagattagctagttggtgaggtaaaggcccaccaaggcaacgatctttagctggtctgagaggatggccagccacatcgggactgagacacggcccggactcctacgggaggcagcagtcgggaatattggacaatgggcgcaagcctgatccagcaataccgcgtgtgtgaagaaggcctgcgggttgtaaagcactttcagttgggaagataatgacgttaccaacagaagaagcaccggctaactccgtgccagcagccgcggtaatacggagggtgcaagcgttaatcggaattactgggcgtaaagcgtgcgtaggcggttttttaagtcagatgtgaaatccccgggctcaacctgggaactgcatctgatactgggagactagagtgtgggagaggagagtggaatttccggtgtagcggtgaaatgcatagagatcggaaggaacatcagtggcgaaggcgactctctggaccaacactgacgctgaggcacgaaagcgtgggtagcaaacaggattagataccctggtagtccacgccgtaaacgatgtcaactagccgtcaggcccgctttagggtttggtggtggagctaacgtattaagttgaccgcctggggagtacgctcgcaagagtaaaactcaaaggaattgacgggggcccgcacaagcggtggagcatgtggtttaattcgatgcaacgcgaagaaccttacctggtcttgacatgtagtgaacttagcagaaatgttttggtgccttcgggaacactaacacaggtgctgcacggctgtcgtcagctcgtgtcgtgagatgttgggttaagtcccgcaacgagcgcaacccctatccctagttgccagcacgtaatggtgggaactctaaggagactgccggtgacaaaccggaggaaggtggggatgacgtcaagtcatcatggcccttatgaccagggctacacacgtgctacaatgggtggtacagagggaagcaagaccgcgaggtggagcaaatcccagaaagccatccgtagtccggattggagtctgcaactcgactccatgaagtcggaatcgctagtaatcgcggatcagcatgccgcggtgaatacgttcccgggccttgtacacaccgcccgtcacaccatgggagtttgttgcaccagaagcaggtagtctaaccgaaaggagggcgcttgccacggtgtggccgatgactggggtg

SEQ ID NO: 3437 - DNA, 1413 bp, Thiothrix nivea
  source 1..1413: mol_type = unassigned DNA
attgaacgctggcggtatgcttaagacatgcaagtcggacggggtacttcggtactcagtggcggacgggtgagtaacacgtgggaatctgcctgttagtgggggacagcccagcgaaagctggattaataccgcatacgccctacgggggaaagcagcaatgcgctaacagatgagcccgcgttagattagctggttggtggggtaaaggcccaccaaggcgacgatctatagctggtctgagaggatggccagccacattgggactgagacacggcccagactcctacgggaggcagcagtcgggaatattggacaatgggcgcaagcctgatccagcaataccgcgtgtgtgaagaaggcctgcgggttgtaaagcactttcagtggggaagataatgacgttacccacagaagaagcaccggctaactccgtgccagcagccgcggtaatacggagggtgcaagcgttaatcggaattactgggcgtaaagcgcacgtaggcggccctttaagtcagatgtgaaatccccgggctcaacctgggaactgcacctgatactggggggctagaatgtgggagaggagagtagaatttccggtgtagcggtgaaatgcatagagatcggaaggaataccagtggcgaaggcggctctctggaccaacattgacgctgaggtgcgaaagcgtgggtagcaaacaggattagataccctggtagtccacgccgtaaacgatgtcaactagccgtcaggcccgctttagggtttggtggtgcagctaacgtattaagttgaccgcctggggagtacgctcgcaagagtaaaactcaaaggaattgacgggggcccgcacaagcggtggagcatgtggtttaattcgatgcaacgcgaagaaccttacctggtcttgacatgcagtgaactttgcagaaatgtattggtgccttcgggaacactgacacaggtgctgcacggctgtcgtcagctcgtgtcgtgagatgttgggttaagtcccgcaacgagcgcaacccctgtccctagttgccagcacattatggtgggaactctagggagactgccggtgacaaaccggaggaaggtggggatgacgtcaagtcatcatggcccttatgaccagggctacacacgtgctacaatgggcagtacagagggaagcgaagctgtgaggtggagcaaatcccagaaagctgttcgtagtccggattggagtctgcaactcgactccatgaagtcggaatcgctagtaatcgcgaatcagcatgtcgcggtgaatacgttcccgggccttgtacacaccgcccgtcacaccatgggagtttgttgcaccagaagcaggtagtctaaccttcgggagggcgcttgccacggtgtggccgatgactggggtg

SEQ ID NO: 3438 - DNA, 1410 bp, Tistlia consotensis
  source 1..1410: mol_type = unassigned DNA
aacgaacgctggcggcaggcctaacacatgcaagtcgaacgctctcttcggagagagtggcgcacgggtgagtaacgcgtgggaacctaccccgaggtccgggacaaccgctggaaacggcggctaataccggatgtgtcctgagggagaaagattcatcgccttgggaggggcccgcgtccgattaggtagttggtgtggtaacggcgcaccaagccttcgatcggtagctggtctgagaggatgatcagccacactgggactgagacacggcccagactcctacgggaggcagcagtggggaatattggacaatgggcgcaagcctgatccagccatgccgcgtgagtgaagaaggccttagggttgtaaagctctttcacgggcgacgatgatgacggtagcccgagaagaagccccggctaactccgtgccagcagccgcggtaatacggagggggcgagcgttgttcggaattactgggcgtaaagggcgcgtaggcggtttggtcagttggaggtgaaagccctgggctcaacctgggaggtgccttcaatacggccagacttgagagcgggagaggatgacggaattcccagtgtagaggtgaaattcgtagatattgggaagaacaccggtggcgaaggcggtcatctggcccgtttctgacgctgaggcgcgaaagcgtggggagcaaacaggattagataccctggtagtccacgccgtaaacgatgtgcgctagccgtcgggggacatagtttctcggtggcgcagctaacgcgataagcgcaccgcctggggagtacggccgcaaggttaaaactcaaaggaattgacgggggcccgcacaagcggtggagcatgtggtttaattcgaagcaacgcgcagaaccttaccagcccttgacatgggggtcgcagtctccggagacggagacatcagttcggctggaccccgcacaggtgctgcatggctgtcgtcagctcgtgtcgtgagatgttgggttaagtcccgcaacgagcgcaacccttgcccttagttgccatcaggttgggctgggcactctaagggaaccgccggtgacaagccggaggaaggcggggatgacgtcaagtcctcatggcccttatgggctgggctacacacgtgctacaatggcggtgacagtgggcagcgaaggcgcgagccggagccaatccccaaaagccgtctcagttcggattgcactctgcaactcgggtgcatgaaggtggaatcgctagtaatcgtggatcagcatgccacggtgaatacgttcccgggccttgtacacaccgcccgtcacaccatgggagttggtttgacccgaagacggtgcgccaaccgcaaggaggcagccggccacggtcaggtcagcgactggggtg

SEQ ID NO: 3439 - DNA, 1423 bp, Tistrella mobilis
  source 1..1423: mol_type = unassigned DNA
aacgaacgctggcggcatgcctaacacatgcaagtcgaacggggtcggaacttcggttccggcttacgtggcgcacgggtgagtaacacgtgggaatctgcccatctatggggaataactgcgggaaactgcagctaataccgcatacgcccttcgggggaaaggcttcggccgtagatggatgagcccgcgtccgattagctagttggtggggtaacggcctaccaaggcgacgatcggtagctggtctgagaggatgatcagccacactgggactgagacacggcccagactcctacgggaggcagcagtggggaatattggacaatgggcgaaagcctgatccagcaatgccgcgtgagtgatgaaggtcttcggattgtaaagctctttcgacggggaagataatgacggtacccgtagaagaagccccggctaacttcgtgccagcagccgcggtaatacgaagggggctagcgttgttcggatttactgggcgtaaagcgtgcgtaggcggcttatcaagtcagaagtgaaagcccggggctcaactccggaactgcttttgagactggtaggctggagttcgggagagggtagtggaattcccagtgtagaggtgaaattcgtagatattgggaagaacaccggtggcgaaggcggctgcctggcccgaaactgacgctgaggcacgaaagcgtggggagcaaacaggattagataccctggtagtccacgccgtaaacgatgagtgctggacgttgggatacttagtatcgcagtgtcgtagctaacgcgttaagcactccgcctggggagtacggccgcaaggttaaaactcaaaggaattgacgggggcccgcacaagcggtggagcatgtggtttaattcgaagcaacgcgcagaaccttaccagcccttgacatggacgtcgcgaccctggagacggggttttcggttcggccggacgtcacacaggtgctgcatggctgtcgtcagctcgtgtcgtgagatgttgggttaagtcccgcaacgagcgcaaccctcatccttagttgccatcagttcggctgggcactctagggaaactgccggtgataagccggaggaaggtggggatgacgtcaagtcctcatggcccttatgggctgggctacacacgtgctacaatggcgactacagtgggcagcgacatcgcgaggtgaagctaatctcaaaaagtcgtctcagttcggattgtactctgcaactcgagtgcatgaagtcggaatcgctagtaatcgcggaacagcatgccgcggtgaatacgttcccgggccttgtacacaccgcccgtcacaccatgggagttggttttacccgaagccggtgagctgacccgtaagggaggcagccgtccacggtaaggtcagcgactggggtg

SEQ ID NO: 3440 - DNA, 1468 bp, Tolumonas auensis
  source 1..1468: mol_type = unassigned DNA
attgaacgctggcggcaggcctaacacatgcaagtcgaacggtagcacaggagagcttgctctctgggtgacgagtggcggacgggtgagtaatgcatggggagctgcccaatcgagggggataccagctggaaacggctgctaataccgcatacgccctgagggggaaaggtggggaccttcgggcctaccgcgattggatgcacccatgtgggattagctagttggtgaggtaacggctcaccaaggcgacgatctctagctggtctgagaggatgaccagccacactggaactgagacacggtccagactcctacgggaggcagcagtggggaatattgcacaatgggggaaaccctgatgcagccatgccgcgtgtgtgaagaaggccttcgggttgtaaagcactttcagtagggaggaagggttgatgtctaatacgcatcagcattgacgttacctacagaagaagcaccggctaactccgtgccagcagccgcggtaatacggagggtgcaagcgttaatcggaataactgggcgtaaagcgcacgcaggcggttagataagtcagatgtgaaatccccgggctcaacctgggaactgcatttgaaactgtctgactagagtcttgtagaggggggtagaattccaggtgtagcggtgaaatgcgtagagatctggaggaataccggtggcgaaggcggccccctggacaaagactgacgctcaggtgcgaaagcgtggggagcaaacaggattagataccctggtagtccacgctgtaaacgatgtcgatttggagtttgtgccattatgagcgtgggttccgaagctaacgcgataaatcgaccgcctggggagtacggccgcaaggttaaaactcaaatgaattgacgggggcccgcacaagcggtggagcatgtggtttaattcgatgcaacgcgaagaaccttacctggccttgacatgctgagaagtttgtagagatacgaatgtgccttcgggaactcagacacaggtgctgcatggctgtcgtcagctcgtgtcgtgagatgttgggttaagtcccgcaacgagcgcaacccctatcctttgttgccagcgagtaatgtcgggaactcaagggagactgccggtgataaaccggaggaaggtggggatgacgtcaagtcatcatggcccttacggccagggctacacacgtgctacaatggcgtatacagagggaagcgacctcgcgagagcaagcggaacccacaaagtacgtcgtagtccggatcggagtctgcaactcgactccgtgaagtcggaatcgctagtaatcgtggatcagaatgccacggtgaatacgttcccgggccttgtacacaccgcccgtcacaccatgggagtgggttgtaccagaagtagttagtctaacccttcggggaggacgattaccacggtgtgattcatgactggggtg

SEQ ID NO: 3441 - DNA, 1464 bp, Trabulsiella guamensis
  source 1..1464: mol_type = unassigned DNA
attgaacgctggcggcaggcctaacacatgcaagtcgagcggcagcgggggaaagcttgctttcccgccggcgagcggcggacgggtgagtaatgtctgggaaactgcctgatggagggggataactactggaaacggtagctaataccgcataacgtcttcggaccaaagtgggggaccttcgggcctcatgccatcagatgtgcccagatgggattagctagtaggtggggtaacggctcacctaggcgacgatccctagctggtctgagaggatgaccagccacactggaactgagacacggtccagactcctacgggaggcagcagtggggaatattgcacaatgggcgcaagcctgatgcagccatgccgcgtgtatgaagaaggccttcgggttgtaaagtactttcagcggggaggaaggtgttgtggttaataaccagagcaattgacgttacccgcagaagaagcaccggctaactccgtgccagcagccgcggtaatacggagggtgcaagcgttaatcggaattactgggcgtaaagcgcacgcaggcggtctgtcaagtcggatgtgaaatccccgggctcaacctgggaactgcatccgaaactggcaggcttgagtcttgtagaggggggtagaattccaggtgtagcggtgaaatgcgtagagatctggaggaataccggtggcgaaggcggccccctggacaaagactgacgctcaggtgcgaaagcgtggggagcaaacaggattagataccctggtagtccacgccgtaaacgatgtcgacttggaggttgtgcccttgaggcgtggcttccggagctaacgcgttaagtcgaccgcctggggagtacggccgcaaggttaaaactcaaatgaattgacgggggcccgcacaagcggtggagcatgtggtttaattcgatgcaacgcgaagaaccttacctggtcttgacatccacagaaccctgtagagatacgggggtgccttcgggaactgtgagacaggtgctgcatggctgtcgtcagctcgtgttgtgaaatgttgggttaagtcccgcaacgagcgcaacccttatcctttgttgccagcggtccggccgggaactcaaaggagactgccagtgataaactggaggaaggtggggatgacgtcaagtcatcatggcccttacgaccagggctacacacgtgctacaatggcatatacaaagagaagcgacctcgcgagagcaagcggacctcataaagtatgtcgtagtccggattggagtctgcaactcgactccatgaagtcggaatcgctagtaatcgtggatcagaatgccacggtgaatacgttcccgggccttgtacacaccgcccgtcacaccatgggagtgggttgcaaaagaagtaggtagcttaaccttcgggagggcgcttaccactttgtgattcatgactggggtg

SEQ ID NO: 3442 - DNA, 1395 bp, Trabulsiella odontotermitis
  source 1..1395: mol_type = unassigned DNA
ggcgagcggcggacgggtgagtaatgtctgggaaactgcctgatggagggggataactactggaaacggtagctaataccgcataacgtcttcggaccaaagtgggggaccttcgggcctcatgccatcagatgtgcccagatgggattagcttgttggtggggtaacggctcaccaaggcgacgatccctagctggtctgagaggatgaccagccacactggaactgagacacggtccagactcctacgggaggcagcagtggggaatattgcacaatgggcgcaagcctgatgcagccatgccgcgtgtatgaagaaggccttcgggttgtaaagtactttcagcggggaggaaggtgttgtggttaataaccacagcaattgacgttacccgcagaagaagcaccggctaactccgtgccagcagccgcggtaatacggagggtgcaagcgttaatcggaattactgggcgtaaagcgcacgcaggcggtctgtcaagtcggatgtgaaatccccgggctcaacccgggaactgcatccgaaactggcaggcttgagtcttgtagaggggggtagaattccaggtgtagcggtgaaatgcgtagagatctggaggaataccggtggcgaaggcggccccctggacaaagactgacgctcaggtgcgaaagcgtggggagcaaacaggattagataccctggtagtccacgccgtaaacgatgtcgacttggaggttgtgcccttgaggcgtggcttccggagctaacgcgttaagtcgaccgcctggggagtacggccgcaaggttaaaactcaaatgaattgacgggggcccgcacaagcggtggagcatgtggtttaattcgatgcaacgcgaagaaccttacctggtcttgacatccacggaagttttcagagatgagaatgtgccttcgggaaccgtgagacaggtgctgcatggctgtcgtcagctcgtgttgtgaaatgttgggttaagtcccgcaacgagcgcaacccttatcctttgttgccagcggtccggccgggaactcaaaggagactgccagtgataaactggaggaaggtggggatgacgtcaagtcatcatggcccttacgaccagggctacacacgtgctacaatggcatatacaaagagaagcgacctcgcgagagcaagcggacctcataaagtatgtcgtagtccggattggagtctgcaactcgactccacgaagtcggaatcgctagtaatcgtggatcagaatgccacggtgaatacgttcccgggccttgtacacaccgcccgtcacaccatgggagtgggttgcaaaagaagtaggtagcttaaccttcgggagggcgcttaccactttgtgattcatgactggggtg

SEQ ID NO: 3443 - DNA, 1481 bp, Trichococcus collinsii
  source 1..1481: mol_type = unassigned DNA
gacgaacgctggcggcgtgcctaatacatgcaagtcgaacggtcttttctatggaagcttgcttccactgagaagatagtggcggacgggtgagtaacacgtgggtaacctgcccataagagggggataacatccggaaacgggtgctaataccgcatagttttcttgatcgcatgatcgagaaaggaaagacggcctttgtgctgtcgcttatggatggacccgcggcgtattagttagttggtgaggtaatggctcaccaagacgatgatacgtagccgacctgagagggtgatcggccacattgggactgagacacggcccaaactcctacgggaggcagcagtagggaatcttccgcaatggacgaaagtctgacggagcaacgccgcgtgagtgaagaaggttttcggatcgtaaaactctgttgtcagagaagaacaagtcggagagtaactgctccggccttgacggtatctgaccagaaagccacggctaactacgtgccagcagccgcggtaatacgtaggtggcaagcgttgtccggatttattgggcgtaaagcgagcgcaggcggttccttaagtctgatgtgaaagcccacggctcaaccgtggaaggtcattggaaactggggaacttgagtgcagaagaggagagtggaattccatgtgtagcggtgaaatgcgtagatatatggaggaacaccagtggcgaaggcgactctctggtctgtaactgacgctgaggctcgaaagcgtggggagcaaacaggattagataccctggtagtccacgccgtaaacgatgagtgctaagtgttggagggtttccacccttcagtgctgcagctaacgcattaagcactccgcctggggagtacggccgcaaggctgaaactcaaaggaattgacggggacccgcacaagcggtggagcatgtggtttaattcgaagcaacgcgaagaaccttaccaggtcttgacatcctttgacaatcctagagataggactttcccttcggggacaaagtgacaggtggtgcatggttgtcgtcagctcgtgtcgtgagatgttgggttaagtcccgcaacgagcgcaacccctattgttagttgccagcattcagttgggcactctaatgagactgccggtgacaaaccggaggaaggtggggatgacgtcaaatcatcatgccccttatgacctgggctacacacgtgctacaatggatggtacaacgagcagcaagaccgcgaggtcaagcgaatctcttaaagccattctcagttcggattgcaggctgcaactcgcctgcatgaagccggaatcgctagtaatcgcggatcagcacgccgcggtgaatacgttcccgggtcttgtacacaccgcccgtcacaccacgagagtttgtaacacccgaagtcggtgaggtaacctttttggagccagccgcctaaggtgggacagatgattggggtg

SEQ ID NO: 3444 - DNA, 1475 bp, unidentified
  source 1..1475: mol_type = unassigned DNA; note = Trichococcus ilyis
cgctggcggcgtgcctaatacatgcaagtcgaacggtcttttctatggaagcttgcttccactgagaagatagtggcgaacgggtgagtaacacgtgggtaacctgcccataagagggggataacatccggaaacgggtgctaataccgcataggtttcttggtcgcatgatcgagaaaggaaagacggcctttgtgctgtcgcttatggatggacccgcggcgtattagttagttggtgaggtaayggctcaccaagacgatgatacgtagccgacctgagagggtgatcggccacattgggactgagacacggcccaaactcctacgggaggcagcagtagggaatcttccgcaatggacgaaagtctgacggagcaacgccgcgtgagtgaagaaggttttcggatcgtaaaactctgttgtcagagaagaacaagtcggaaagtaactgttccggccttgacggtatctgaccagaaagccacggctaactacgtgccagcagccgcggtaatacgtaggtggcaagcgttgtccggatttattgggcgtaaagcgagcgcaggcggttccttaagtctgatgtgaaagcccacggcttaaccgtggaaggtcattggaaactggggaacttgagtgcagaagaggagagtggaattccatgtgtagcggtgaaatgcgtagatatatggaggaacaccagtggcgaaggcgactctctggtctgtaactgacgctgaggctcgaaagcgtggggagcaaacaggattagataccctggtagtccacgccgtaaacgatgagtgctaagtgttggagggtttccacccttcagtgctgcagctaacgcattaagcactccgcctggggagtacggccgcaaggctgaaactcaaaggaattgacggggacccgcacaagcggtggagcatgtggtttaattcgaagcaacgcgaagaaccttaccaggtcttgacatcctttgacaatcctagagataggactttcccttcggggacaaagtgacaggtggtgcatggttgtcgtcagctcgtgtcgtgagatgttgggttaagtcccgcaacgagcgcaacccctattgttagttgccagcattcagttgggcactctaatgagactgccggtgacaaaccggaggaaggtggggatgacgtcaaatcatcatgccccttatgacctgggctacacacgtgctacaatggatggtacaacgagcagcaagaccgcgaggtcaagcgaatctcttaaagccattctcagttcggattgcaggctgcaactcgcctgcatgaagccggaatcgctagtaatcgcggatcagcacgccgcggtgaatacgttcccgggtcttgtacacaccgcccgtcacaccacgagagtttgtaacacccgaagtcggtgaggtaacctttttggagccagccgcctaaggtgggacagatgattggggtg

SEQ ID NO: 3445 - DNA, 1483 bp, Trichococcus palustris
  source 1..1483: mol_type = unassigned DNA
gacgaacgctggcggcgtgcctaatacatgcaagtcgaacggttctttcttttggaagcttgcttccgatcgagagaatagtggcgaacgggtgagtaacacgtgggtaacctgcccataagagggggataacatccggaaacgggtgctaataccgcatagtttttttgatcgcatgatcgagaaaggaaagacggcctttgtgctgtcgcttatggatggacccgcggcgtattagttagttggtgaggtaatggctcaccaagacgatgatacgtagccgacctgagagggtgatcggccacattgggactgagacacggcccaaactcctacgggaggcagcagtagggaatcttccgcaatggacgaaagtctgacggagcaacgccgcgtgagtgaagaaggttttcggatcgtaaaactctgttgtcagagaagaacaagtcggagagtaactgctccggccttgacggtatctgaccagaaagccacggctaactacgtgccagcagccgcggtaatacgtaggtggcaagcgttgtccggatttattgggcgtaaagcgagcgcaggcggttccttaagtctgatgtgaaagcccacggctcaaccgtggaaggtcattggaaactggggaacttgagtgcagaagaggagagtggaattccatgtgtagcggtgaaatgcgtagatatatggaggaacaccagtggcgaaggcgactctctggtctgtaactgacgctgaggctcgaaagcgtggggagcaaacaggattagataccctggtagtccacgccgtaaacgatgagtgctaagtgttggagggtttccacccttcagtgctgcagctaacgcattaagcactccgcctggggagtacggccgcaaggctgaaactcaaaggaattgacggggacccgcacaagcggtggagcatgtggtttaattcgaagcaacgcgaagaaccttaccaggtcttgacatcctttgacaatcctagagataggactttcccttcggggacaaagtgacaggtggtgcatggttgtcgtcagctcgtgtcgtgagatgttgggttaagtcccgcaacgagcgcaacccctattgttagttgccagcattcagttgggcactctaatgagactgccggtgacaaaccggaggaaggtggggatgacgtcaaatcatcatgccccttatgacctgggctacacacgtgctacaatggatggtacaacgagcagcaagaccgcgaggtcaagcgaatctcttaaagccattctcagttcggattgtaggctgcaactcgcctacatgaagccggaatcgctagtaatcgcggatcagcacgccgcggtgaatacgttcccgggtcttgtacacaccgcccgtcacaccacgagagtttgtaacacccgaagtcggtgaggtaacctttttggagccagccgcctaaggtgggacagatgattggggtg

SEQ ID NO: 3446 - DNA, 1481 bp, Trichococcus pasteurii
  source 1..1481: mol_type = unassigned DNA
gacgaacgctggcggcgtgcctaatacatgcaagtcgaacggtcttttctatggaagcttgcttccactgagaagatagtggcggacgggtgagtaacacgtgggtaacctgcccataagagggggataacatccggaaacgggtgctaataccgcatagttttcttgatcgcatgatcgagaaaggaaagacggcctttgtgctgtcgcttatggatggacccgcggcgtattagttagttggtgaggtaatggctcaccaagacgatgatacgtagccgacctgagagggtgatcggccacattgggactgagacacggcccaaactcctacgggaggcagcagtagggaatcttccgcaatggacgaaagtctgacggagcaacgccgcgtgagtgaagaaggttttcggatcgtaaaactctgttgtcagagaagaacaagttggagagtaactgctccagccttgacggtatctgaccagaaagccacggctaactacgtgccagcagccgcggtaatacgtaggtggcaagcgttgtccggatttattgggcgtaaagcgagcgcaggcggttccttaagtctgatgtgaaagcccacggctcaaccgtggaaggtcattggaaactggggaacttgagtgcagaagaggagagtggaattccatgtgtagcggtgaaatgcgtagatatatggaggaacaccagtggcgaaggcgactctctggtctgtaactgacgctgaggctcgaaagcgtggggagcaaacaggattagataccctggtagtccacgccgtaaacgatgagtgctaagtgttggagggtttccacccttcagtgctgcagctaacgcattaagcactccgcctggggagtacggccgcaaggctgaaactcaaaggaattgacggggacccgcacaagcggtggagcatgtggtttaattcgaagcaacgcgaagaaccttaccaggtcttgacatcctttgacaatcctagagataggactttcccttcggggacaaagtgacaggtggtgcatggttgtcgtcagctcgtgtcgtgagatgttgggttaagtcccgcaacgagcgcaacccctattgttagttgccagcattcagttgggcactctaatgagactgccggtgacaaaccggaggaaggtggggatgacgtcaaatcatcatgccccttatgacctgggctacacacgtgctacaatggatggtacaacgagcagcaagaccgcgaggtcaagcgaatctcttaaagccattctcagttcggattgcaggctgcaactcgcctgcatgaagccggaatcgctagtaatcgcggatcagcacgccgcggtgaatacgttcccgggtcttgtacacaccgcccgtcacaccacgagagtttgtaacacccgaagtcggtgaggtaacctttttggagccagccgcctaaggtgggacagatgattggggtg

SEQ ID NO: 3447 - DNA, 1481 bp, Trichococcus patagoniensis; identical to SEQ ID NO: 3443
  source 1..1481: mol_type = unassigned DNA

SEQ ID NO: 3448 - DNA, 1410 bp, unidentified
  source 1..1410: mol_type = unassigned DNA; note = Trichodesmium erythraeum
gatgaacgctggcggtctgcttaacacatgcaagtcgaacggactcttcggagttagtggcggacgggtgagtaacgcgtgagaatctgccttcaggtctgggacaacagaaggaaacttctgctaatcccggatgagccttagggtaaaagataaattgcctggagatgagctcgcgtctgattagctagttggtgtggtaaaagcataccaaggcaacgatcagtagctggtctgagaggatgagcagccacactgggactgagacacggcccagactcctacgggaggcagcagtggggaattttccgcaatgggcgaaagcctgacggagcaagaccgcgtgggggaggaaggctctagggttgtaaaccccttttctttgggaagaagatctgacggtaccaaaggaatcagcctcggctaactccgtgccagcagccgcggtaatacggaggaggcaagcgttatccggaatgattgggcgtaaagcgtccgtagatggccatgtaagtctgctgtcaaaacccagggctcaactctggtcaggcagtggaaactacaaagctagagtttggtaggggcaaagggaattcccggtgtagcggtgaaatgcgtagatatcgggaagaacatcggtggcgaaagcgctttgctagaccaaaactgacattgagggacgaaagctaggggagcgaatgggattagataccccagtagtcctagccgtaaacgatggatactaggtgttgcctgtatcgacccaggcagtgccgtagctaacgcgttaagtatcccgcctggggagtacgcacgcaagtgtgaaactcaaaggaattgacgggggcccgcacaagcggtggagtatgtggtttaattcgatgcaacgcgaagaaccttaccaggacttgacatgtcgcgaatctaatggaaacatgagagtgccttcgggagcgcgaacacaggtggtgcatggctgtcgtcagctcgtgtcgtgagatgttgggttaagtcccgcaacgagcgcaaccctcgtctttagttgccatcattaagttgggcactctgaagagactgccggtgacaaaccggaggaaggtggggatgacgtcaagtcagcatgccccttacgtcctgggctacacacgtactacaatggttgggacagagggtagcgaacccgagaggggaagccaatccccaaaacccagtctcagttcagattgcaggctgcaactcgcctgcatgaaggaggaatcgctagtaatcgcaggtcagcatactgcggtgaatccgttcccgggccttgtacacaccgcccgtcacaccatggaagttggccacgcccgaagtcattactctaacccgaaagggagggggatgccgaaggtagggctgatgactggggtg

SEQ ID NO: 3449 - DNA, 1412 bp, unidentified
  source 1..1412: mol_type = unassigned DNA; note = Trichormus azollae
gatgaacgctggcggtatgcttaacacatgcaagtcgaacggaatctttagggatttagtggcggacgggtgagtaacgcgtgagaatctggcttcaggtcggggataactactggaaacggtggctaataccggatgtgccgagaggtgaaaggctagctgcctgaagatgagctcgcgtctgattagctagttggtgtggtaagagcgcaccaaggcgacgatcagtagctggtctgagaggatgatcagccacactgggactgagacacggcccagactcctacgggaggcagcagtggggaattttccgcaatgggcgaaagcctgacggagcaataccgcgtgagggaggaaggctcttgggttgtaaacctcttttctcaaggaataagttctgaaggtacttgaggaataagcatcggctaactccgtgccagcagccgcggtaatacggaggatgcaagcgttatccggaatgattgggcgtaaagcgtccgcaggtggcagtgtaagtctgctgttaaagagtctagcttaactagataaaagcagtggaaactacacagctagagtacgttcggggtagagggaattcctggtgtagcggtgaaatgcgtagagatcaggaagaacaccggtggcgaaggcgctctactaggccgtaactgacactgagggacgaaagctaggggagcgaatgggattagataccccagtagtcctagccgtaaacgatggatactaggcgttgcgagtatcgaccctcgcagtgccggagccaacgcgttaagtatcccgcctggggagtacgcacgcaagtgtgaaactcaaaggaattgacgggggcccgcacaagcggtggagtatgtggtttaattcgatgcaacgcgaagaaccttaccaagacttgacatgtcgcgaatttccttgaaaggggagagtgccttagggagcgcgaacacaggtggtgcatggctgtcgtcagctcgtgtcgtgagatgttgggttaagtcccgcaacgagcgcaaccctcgtttttagttgccagcattaagttgggcactctagagagactgccggtgacaaaccggaggaaggtggggatgacgtcaagtcagcatgccccttacgtcttgggctacacacgtactacaatgctccgaacagagggcagcgagctagtgatagcaagcaaatcccggaaatcggagctcagttcagatcgaaggctgcaactcgccttcgtgaaggaggaatcgctagtaattgcaggtcagcatactgcagtgaattcgttcccgggccttgtacacaccgcccgtcacaccatggaagctggcaacgcccgaagtcattaccccaacttttaggagagggggatgcctaaggcagtgctggtgactggggtg

SEQ ID NO: 3450 - DNA, 1411 bp, unidentified
  source 1..1411: mol_type = unassigned DNA; note = Trichormus variabilis
gatgaacgctggcggtatgcttaacacatgcaagtcgaacggaatctttagggatttagtggcggacgggtgagtaacgcgtgagaatctggcttcaggtctgggacaaccactggaaacggtggctaataccggatgtgccgagaggtgaaaggcttgctgcctgaagatgagcttgcgtctgattagctagttggtggggtaagagcctaccaaggcgacgatcagtagctggtctgagaggatgatcagccacactgggactgagacacggcccagactcctacgggaggcagcagtggggaattttccgcaatgggcgaaagcctgacggagcaataccgcgtgagggaggaaggctcttgggttgtaaacctcttttctcagggaagaaaaaaatgacggtacctgaggaataagcatcggctaactccgtgccagcagccgcggtaatacggaggatgcaagcgttatccggaatgattgggcgtaaagggtccgcaggtggctgtgtaagtctgctgttaaatagtcatgctcaacatgataaaggcagtggaaactacatagctagagtgcgttcggggcagagggaattcctggtgtagcggtgaaatgcgtagatatcaggaagaacaccggtggcgaaagcgctctgctaggccgcaactgacactgagggacgaaagctaggggagcgaatgggattagataccccagtagtcctagccgtaaacgatggatactaggcgtggcttgtatcgacccgagccgtgccgtagctaacgcgttaagtatcccgcctggggagtacgcacgcaagtgtgaaactcaaaggaattgacgggggcccgcacaagcggtggagtatgtggtttaattcgatgcaacgcgaagaaccttaccaagacttgacatgtcgcgaatcttcttgaaaggggagagtgccttcgggagcgcgaacacaggtggtgcatggctgtcgtcagctcgtgtcgtgagatgttgggttaagtcccgcaacgagcgcaaccctcgtttctagttgccagcattaagatgggaactctagagagactgccggtgacaaaccggaggaaggtggggatgacgtcaagtcagcatgccccttacgtcttgggctacacacgtactacaatgctacggacaaagggcagctacacagcgatgtgatgcaaatctcataaaccgtagctcagttcagatcgaaggctgcaactcgccttcgtgaaggaggaatcgctagtaattgcaggtcagcatactgcagtgaattcgttcccgggccttgtacacaccgcccgtcacaccatggaagtcggtcacgcccgaagtcattaccccaaccttttggagggggatgcctaaggtaggactggtgactggggtg

SEQ ID NO: 3451 - DNA, 1384 bp, unidentified
  source 1..1384: mol_type = unassigned DNA; note = Tropicibacter phthalicicus
aacgaacgctggcggcaggcctaacacatgcaagtcgagcgcgaccttcgggttgagcggcggacgggttagtaacgcgtgggaacgtacccagatctaaggaatagccactggaaacggtgagtaataccttatacgcccttcgggggaaagatttatcggatttggatcggcccgcgttagattaggtagttggtgcggtaacggcgcaccaagcctacgatctatagctggttttagaggatgatcagcaacactgggactgagacacggcccagactcctacgggaggcagcagtggggaatcttggacaatgggcgcaagcctgatccagccatgccgcgtgagtgatgaaggccttagggtcgtaaagctctttcgccagagatgataatgacagtatctggtaaagaaaccccggctaactccgtgccagcagccgcggtaatacggagggggttagcgttgttcggaattactgggcgtaaagcgcgcgtaggcggaccagaaagttaggggtgaaatcccggggctcaaccccggaactgcctctaaaactcctgatctagagttcgagagaggtgagtggaattccgagtgtagaggtgaaattcgtagatattcggaggaacaccagtggcgaaggcggctcactggctcgatactgacgctgaggtgcgaaagtgtggggagcaaacaggattagataccctggtagtccacaccgtaaacgatgaatgccagtcgtcgggtagtatactattcggtgacacacctaacggattaagcattccgcctggggagtacggtcgcaagattaaaactcaaaggaattgacgggggcccgcacaagcggtggagcatgtggtttaattcgaagcaacgcgcagaaccttaccaacccttgacatcctgtgctacatccagagatggatggttcccttcggggacgcagtgacaggtgctgcatggctgtcgtcagctcgtgtcgtgagatgttcggttaagtccggcaacgagcgcaacccacatccttagttgccagcagttcggctgggcactctagggaaactgcccgtgataagcgggaggaaggtgtggatgacgtcaagtcctcatggcccttacgggttgggctacacacgtgctacaatggcagtgacaatgggttaatccccaaaaactgtctcagttcggattggggtctgcaactcgaccccatgaagtcggaatcgctagtaatcgcgtaacagcatgacgcggtgaatacgttcccgggccttgtacacaccgcccgtcacaccatgggagttggttctacctgacgacgctgcgctaaccttcgggaggcaggcggccacggtaggatcagcgactggggtg

SEQ ID NO: 3452 - DNA, 1467 bp, unidentified
  source 1..1467: mol_type = unassigned DNA; note = Tumebacillus algifaecis
gacgaacgctggcggcgtgcctaatacatgcaagtcgagcggactggagggagcttgctcccaaaggttagcggcggacgggtgagtaacacgtgggcaatctgcccgacagactgggataacgcttggaaacgagtgctaataccggataagcgattccctcgcatgaggggatcgagaaagaagctttcgcttcactgtcggatgagcccgcggcgcattagctagttggtgaggtaacggctcaccaaggcgacgatgcgtagccgacctgagagggtgatcggccacactgggactgagacacggcccagactcctacgggaggcagcagtagggaatcttccacaatgggcgcaagcctgatggagcaacgccgcgtgaatgatgaaggccttcgggttgtaaaattctgtcttctgtgaagaacaagtgtgagaagagaatgctcacaccctgacggtaacagaggaggaagccccggctaactacgtgccagcagccgcggtaatacgtagggggcaagcgttgtccggaatcactgggcgtaaagcgcgcgcaggcggccatctgcgtccggggtgaaagcccaaggctcaaccttgggactgccttggatacgggatggcttgaggatcggagaggcaaggggaattccacgtgtagcggtgaaatgcgtagagatgtggaggaacacctgtggcgaaggcgccttgctggccgatttctgacgctgaggcgcgaaagcgtggggagcaaacaggattagataccctggtagtccacgccgtaaacgatgagtgctaggtgttggggggtaccaccctcagtgccgaagctaacgcattaagcactccgcctggggagtacggtcgcaagactgaaactcaaaggaattgacgggggcccgcacaagcagtggagcatgtggtttaattcgaagcaacgcgaagaaccttaccaagacttgacatcccgctgaccggtttagagatagaccttcccttcggggcagcggtgacaggtggtgcatggttgtcgtcagctcgtgtcgtgagatgttgggttaagtcccgcaacgagcgcaacccctaaattgtgttgccatcattcagttgggcactcacaattgactgccggtgacaaaccggaggaaggcggggatgacgtcaaatcatcatgccccttatgtcttgggctacacacgtgctacaatgggcggtacaaagggttgcgaggccgcgaggcggagccaatcccaaaaagccgctcacagttcggattgcaggctgcaactcgcctgcatgaagctggaattgctagtaatcgcggatcagcatgccgcggtgaattcgttcccgggccttgtacacaccgcccgtcacaccatgggagttggcaacacccgaagccggtgaggtaaccgcaaggagccagccgtctaaggtggggtcgatgactggggtg

SEQ ID NO: 3453 - DNA, 1455 bp, unidentified
  source 1..1455: mol_type = unassigned DNA; note = Tumebacillus flagellatus
gacgaacgctggcggcgtgcctaatacatgcaagtcgtgcgagaccttcgggtctagcggcggacgggtgagtaacacgtgggtaacctgcctgatcgaccgggataacgcttggaaacgagtgctaataccggataatctcttggatcgcatggtttgagagtaaaaggagcttttgcttcacgatcagatggacccgcggcgcattagctagttggtgaggtaacggctcaccaaggcgacgatgcgtagccgacctgagagggtgaccggccacactgggactgagacacggcccagactcctacgggaggcagcagtagggaatcttccgcaatgggcgcaagcctgacggagcaacgccgcgtgagtgatgaaggccttcgggttgtaaaactctgtcttctgtgaagaaccatcctgtgcagagaaagctcaggacctgacggtaacagaggaggaagccccggctaactacgtgccagcagccgcggtaatacgtagggggcaagcgttgtccggaatcactgggcgtaaagcgcgcgcaggcggtctttcacgtccggggtgaaagcccagagctcaactctgggactgccttggatacggagagacttgagggtcggagaggcaaggggaattccacgtgtagcggtgaaatgcgtagagatgtggaggaacacctgtggcgaaggcgccttgctggccgacttctgacgctgaggcgcgaaagcgtggggagcaaacaggattagataccctggtagtccacgccgtaaacgatgagtgctaggtgttagggggcccaccccttagtgccgaagctaacgcattaagcactccgcctggggagtacggtcgcaagactgaaactcaaaggaattgacgggggcccgcacaagcagtggagcatgtggtttaattcgaagcaacgcgaagaaccttaccaggacttgacatcccgctgaccggtttagagataaaccttcccttcggggcagcggtgacaggtggtgcatggttgtcgtcagctcgtgtcgtgagatgttgggttaagtcccgcaacgagcgcaacccctatgttgtgttgctaccattcagttgagcactcacaacagactgccggtgacaaaccggaggaaggcggggatgacgtcaaatcatcatgccccttatgtcctgggctacacacgtgctacaatgggcggtacaaagggatgccaagccgcgaggcggagccaatcccagaaagccgttcgtagttcggattgcaggctgcaactcgcctgcatgaagccggaattgctagtaatcgcggatcagcatgccgcggtgaattcgttcccgggccttgtacacaccgcccgtcacaccatgggagttggcaacacccgaagtcggtgaggtaactgcttgcagagccagccgcctaaggtggggtcgatgactggggtg

SEQ ID NO: 3454 - DNA, 1406 bp, Tumebacillus permanentifrigoris
  source 1..1406: mol_type = unassigned DNA
  misc_difference 242: note = n is a, c, g, or t
  misc_difference 276: note = n is a, c, g, or t
  misc_difference 972: note = n is a, c, g, or t
tgcagtcgagcggactgatgtggagcttgctccatggatgtcagcggcggacgggtgagtaacacgtgggtaacctgcctggcagactgggataacgcttggaaacgagtgctaataccggatgatctcttggactgcatggttcgagagtaaaaggagcttttgcttcactgccagatggacccgcggcgcattagctagttggtgaggtaacggctcaccaaggcgacgatgcgtagccnacctgagagggtgaccggccacactgggactganacacggcccagactcctacgggaggcagcagtagggaatcttccgcaatgggcgcaagcctgacggagcaacgccgcgtgagtgatgaaggccttcgggttgtaaaactctgtcttctgtgaagaaccatcctgtgcagagaaagctcagacctgacggtaacagaggaggaagccccggctaactacgtgccagcagccgcggtaatacgtagggggcaagcgttgtccggattcactgggcgtaaagcgcgcgcaggcggtctctcacgtccggggtgaaagcccagagctcaactctgggattgccttggatacggggagacttgaggatcggagaggcaaggggaattccacgtgtagcggtgaaatgcgtagagatgtggaggaacacctgtggcgaaggcgccttgctggccgatttctgacgctgaggcgcgaaagcgtggggagcaaacaggattagataccctggtagtccacgccgtaaacgatgagtgctaggtgttagggggcccaccccttagtgccgaagctaacgcattaagcactccgcctggggagtacggtcgcaagactgaaactcaaaggaattgacgggggcccgcacaagcagtggagcatgtggtttaattcgaagcaacgcgaagaaccttaccaagacttgacatcccgctgaccgttctagagatagagnttcccttcggggcagcggtgacaggtggtgcatggttgtcgtcagctcgtgtcgtgagatgttgggttaagtcccgcaacgagcgcaacccctatgttgtgttgctaccatttagttgagcacttacaacagactgccggtgacaaaccggaggaaggcggggatgacgtcaaatcatcatgccccttatgtcttgggctacacacgtgctacaatggacggtacaaagggttgcgaagccgcgaggtgaagccaatcccagaaagccgttcgtagttcggattgcaggctgcaactcgcctgcatgaagccggaattgctagtaatcgcggatcagcatgccgcggtgaattcgttcccgggccttgtacacaccgcccgtcacaccatgggagttggtaacacccgaagtcggtgaggtaactgctgcagag

SEQ ID NO: 3455 - DNA, 1440 bp, Turneriella parva
  source 1..1440: mol_type = unassigned DNA
aacgaacgctggcggcgcgtcttaaacatgcaagtcgaacgatctgtagcaatacagggagtggcggacgggtgaggaacacgtaggaatctacctcgaagagcgggacaactttgggaaaccggggctaataccgcatagtacagagatgttaaagggctagcaatagtcgcttcgagatgagcctgcggtctatcagcttgttggtgaggtaatggctcaccaaggctacgacggatagccggtctgagaggatgatcggccacactggcactgagacacgggccagactcctacgggaggcagcagttaagaatcttgcgcaatgggggcaaccctgacgcagcgacgccgcgtgaaggatgaaggctttcgggttgtaaacttcggtagactgggaagaagaactacgttcgttgagggcgtagagtgacggtaccagtctgaagccccggctaattacgtgccagcagccgcggtaatacgtatggggcaagcgttgttcggaattattgggcgtaaagggctcgcaggtggtttgttaagttggtggtttaatctctgggctcaacccagagtcagcctccaaaactggcgaacttgagtacgataggggatagcggaattctcggtgtagcggtggaatgcgtagatatcgagaggaacaccaatggcgaaggcagctatctggatcgtaactgacactcatgagcgaaagtgcggggagcaaacaggattagataccctggtagtccgcaccgtaaacgttgtatactagttgttggtggtttcaacgccatcagtgacgtcgctaacgcattaagtataccgcctggggagtatgctcgcaagggtgaaactcaaagaaattgacgggggcccgcacaagcggtggagcatgtggtttaattcgacgatacgcgagaaaccttacctgggtttgacatggatttgactggggtagagataccccttcccgcaagggcagattcacaggtgttgcatggtcgtcgtcagctcgtgttgtgagatgttgggttaagtcccgcaacgagcgcaacccctatcttctgttgccatcattaagttgggcactctgaagaaaccgccggtgacaaaccggaggaaggtggggatgacgtcagatcagcatggcccttatatccagggctacacacgtgctacaatggccggtacagagggacgcaatgccgcgaggtggagcaaatcccacaaagccggtctcagttcagattgcagtctgcaactcgactgcatgaagtcggaatcgctagtaatcgcaaatcagcatgttgcggtgaatacgttcccgggccttgtacacaccgcccgtcacaccacccgagttggaggtacccgaagaggctgttgccaaccgcaaggaggcaggtcgctaaggtaaattcggcgaggggggtg

SEQ ID NO: 3456 - DNA, 1361 bp, unidentified
  source 1..1361: mol_type = unassigned DNA; note = Tychonema bourrellyi
ggatttagtggcggacgggtgagtaacgcgtgagaatctaccttcaggacggagacaacagttggaaacgactgctaacccccgatgtaccgagagggaaaatatttatagcctgaagaagagctcgcgtccgattagctagttggagaggtaaaagctcaccaaggcgacgatcggtagctggtctgagaggacgatcagccacactgggactgagacacggcccagactcctacgggaggcagcagtggggaattttccgcaatgggcgaaagcctgacggagcaagaccgcgtgggggaagaaggctcttgggttgtaaactccttttctctgggaagaacaaaatgacggtaccagaggaatcagcatcggctaactccgtgccagcagccgcggtaagacggaggatgcaagcgttatccggaatgattgggcgtaaagcgtccgcaggtggcagttcaagtctgctgtcaaagaccggggctcaacctcggaaaggcagtggaaactgaacagctagagtatggtaggggcaaagggaattcctggtgtagcggtgaaatgcgtagagatcaggaagaacatcggtggcgaaggcgctttgctggaccataactgacactcagggacgaaagctaggggagcgaatgggattagataccccagtagtcctagccgtaaacgatggatactaggtgttgtctgtatcgacccggacagtgccgtagctaacgcgttaagtatcccgcctggggagtacgcacgcaagtgtgaaactcaaaggaattgacgggggcccgcacaagcggtggagtatgtggtttaattcgatgcaacgcgaagaaccttaccaggacttgacatgtcgcgaatctttttgaaagagaagagtgccttagggagcgcgaacacaggtggtgcatggctgtcgtcagctcgtgtcgtgagatgttgggttaagtcccgcaacgagcgcaaccctcgtgtttagttgccatcattaagttgggaactctaaacagactgccggtgacaaaccggaggaaggtggggatgacgtcaagtcagcatgccccttacgtcctgggctacacacgtactacaatggtagggacagagggcagccaactcgcgagagagagctaatcccgtaaaccctgcctcagttcagattgcaggctgcaactcgcctgcatgaaggcggaatcgctagtaatcgcaggtcagcatactgcggtgaatccgttcccgggccttgtacacaccgcccgtcacaccatggaagttggccacgcccgaagtcattactctaacctttcgggggggaggatgccgaaggcagggctgatgactggggt

SEQ ID NO: 3457 - DNA, 1456 bp, Umboniibacter marinipuniceus
  source 1..1456: mol_type = unassigned DNA
attgaacgctggcggcaggcctaacacatgcaagtcgaacgcgaaatcacttcggtgagagtagagtggcggacgggtgagtaacgcgtgggaatctacctcgtagtgggggacaacttgtggaaacgcaagctaataccgcatacgtcctaagggagaaagcaggggatcttcggaccttgtgctatgagatgagcccgcgtcggattagctagttggtggggtaaaggcctaccaaggcgacgatccgtagctggtctgagaggatgatcagccacactggaactgagacacggtccagactcctacgggaggcagcagtggggaatattgcacaatgggcgaaagcctgatgcagccatgccgcgtgtgtgaagaaggctctagggttgtaaagcactttcagcaaggaggaaaggttgtcagttaatacctggcagctgtgacgttacttgcagaagaagcaccggctaactccgtgccagcagccgcggtaatacggagggtgcaagcgttaatcggaattactgggcgtaaagcgcgcgtaggcggtctgttaagctggatgtgaaagcccagggctcaaccttggaactgcattcagaactggcagactagagtattggagaggtgagtggaatttcccgtgtagcagtgaaatgcgtagatatgggaaggaacaccagtggcgaaggcgactcactggccaaatactgacgctgaggtgcgaaagcgtggggagcaaacgggattagataccccggtagtccacgccgtaaacgatgtctactagccgttgggatccttgagattttagtggcgcagctaacgcactaagtagaccgcctggggagtacggccgcaaggttaaaactcaaatgaattgacgggggcccgcacaagcggtggagcatgtggtttaattcgaagcaacgcgaagaaccttaccaggtcttgacatccagagaacttactagagatagtttggtgccttcgggaactctgagacaggtgctgcatggctgtcgtcagctcgtgtcgtgagatgttgggttaagtcccgcaacgagcgcaacccttgtcctatgttgccagcacataatggtgggaactcatgggagactgccggtgataaaccggaggaaggtggggacgacgtcaagtcatcatggcccttacgacctgggctacacacgtgctacaatggtgcatacaaacggttgccaagccgcgaggtggagctaatctgagaaagtgcatcgtagtccggattggagtctgcaactcgactccatgaagtcggaatcgctagtaatcgtgaatcagaatgtcacggtgaatacgttcccgggccttgtacacaccgcccgtcacaccatgggagtgggttgctccagaagtggctagtctaaccttcggggggacggtcaccacggagtgattcatgactggggtg

SEQ ID NO: 3458 - DNA, 1465 bp, Ureibacillus terrenus
  source 1..1465: mol_type = unassigned DNA
  misc_difference 382: note = n is a, c, g, or t
tggcggcgtgcctaatacatgcaagtcgagcggacctcataggaagcttgctttttatgaggttagcggcggacgggtgagtaacacgtgggtaacctgccctatagaccgggataactcgcggaaacgcgtgctaataccggataacacagcggagcgcatgctccggtgttgaaaggtggttctgctaccgctataggatgggcccgcggcgcattagctagttggtggggtaacggcctaccaaggcgacgatgcgtagccgacctgagagggtgatcggccacactgggactgagacacggcccagactcctacgggaggcagcagtagggaatcttccacaatgggcgaaagcctgatggagcaacgccgcgtgagngaagaaggtcttcggatcgtaaagctctgttgtaagggaagaacaagtgcggtagtaactgaccgcaccctgacggtaccttacgagaaagccacggctaactacgtgccagcagccgcggtaatacgtaggtggcgagcgttgtccggaattattgggcgtaaagcgcgcgcaggcggtctcttaagtctgatgtgaaagcccccggctcaaccggggagggtcattggaaactgggagacttgagtgcaggagagggaagcggaattccatgtgtagcggtgaaatgcgtagagatatggaggaacaccagtggcgaaggcggcttcctggcctgtaactgacgctgaagcgcgaaagcgtggggaccaaacaggattagataccctggtagtccacgccgtaaacgatgagtgctaagtgttagggggcttgccccttagtgctgcagctaacgcattaagcactccgcctggggagtacggtcgcaagactgaaactcaaaggaattgacgggggcccgcacaagcggtggagcatgtggtttaattcgaagcaacgcgaagaaccttaccaggtcttgacatcccgctgaccgccatggagacatggccttcccttcggggacagcggtgacaggtggtgcatggttgtcgtcagctcgtgtcgtgagatgttgggttaagtcccgcaacgagcgcaacccttgtccttagttgccatcattcagttgggcactctaaggagactgccgtacaaatacggaggaaggtggggatgacgtcaaatcatcatgccccttatgacctgggctacacacgtgctacaatgggcggtacaaagggctgcgaacccgcgagggggagcgaatcccaaaaagccgctctcagttcggattgcaggctgcaactcgcctgcatgaagccggaatcgctagtaatcgcggatcagcatgccgcggtgaatacgttcccgggccttgtacacaccgcccgtcacaccacgagagtctgtaacacccgaagtcggtgaggtaacccttccgggagccagccgccgaaggtgggacagatgattggggtg

SEQ ID NO: 3459 - DNA, 1475 bp, Ureibacillus thermophilus
  source 1..1475: mol_type = unassigned DNA
gacgaacgctggcggcgtgcctaatacatgcaagtcgagcggaccaattaagaagcttgctttttgattggttagcggcggacgggtgagtaacacgtgggtaacctgccctatagacygggataactcgcggaaacgcgagctaataccggataacacatcgaagcgcatgcttcgatgttgaaagatggttctgctatcactataggatgggcccgcggcgcattagctagttggtggggtaacggcctaccaaggcgacgatgcgtagccgacctgagagggtgatcggccacactgggactgagacacggcccagactcctacgggaggcagcagtagggaatcttccacaatgggcgaaagcctgatggagcaacgccgcgtgagcgaagaaggtcttcggatcgtaaagctctgttgtaagggaagaacaagcgcagcagtaactggctgcgccctgacggtaccttactagaaagccacggctaactacgtgccagcagccgcggtaatacgtaggtggcaagcgttgtccggaattattgggcgtaaagcgcgcgcaggcggtctcttaagtctgatgtgaaagcccccggctcaaccggggagggtcattggaaactgggagacttgagtgcaggagagggaagtggaattccatgtgtagcggtgaaatgcgtagagatatggaggaacaccagtggcgaaggcggcttcctggcctgtaactgacgctgaggcgcgaaagcgtggggagcaaacaggattagataccctggtagtccacgccgtaaacgatgagtgctaggtgttagggggtttccaccccttagtgctgcagctaacgcattaagcactccgcctggggagtacggtcgcaagactgaaactcaaaggaattgacgggggcccgcacaagcggtggagcatgtggtttaattcgaagcaacgcgaagaaccttaccaggtcttgacatcccgctgaccgctatggagacatagccttcccttcggggacagcggtgacaggtggtgcatggttgtcgtcagctcgtgtcgtgagatgttgggttaagtcccgcaacgagcgcaacccttgtccttagttgccatcattcagttgggcactctaaggagactgccgtacaaatacggaggaaggtggggatgacgtcaaatcatcatgccccttatgacctgggctacacacgtgctacaatgggcggtacaaagggctgcgaacccgcgagggggagcgaatcccaaaaagccgctctcagttcggattgcaggctgcaactcgcctgcatgaagccggaatcgctagtaatcgcagatcagcatgctgcggtgaatacgttcccgggccttgtacacaccgcccgtcacaccacgagagtctgtaacacccgaagtcggtgaggtaaccctccgggagccagccgccgaaggtgggacagatgattggggtg

SEQ ID NO: 3460 - DNA, 1475 bp, Ureibacillus thermosphaericus
  source 1..1475: mol_type = unassigned DNA
gacgaacgctggcggcgtgcctaatacatgcaagtcgagcgaaccaattgaaagcctagctttcatgaggttagcggcggacgggtgagtaacacgtgggtaacctgccctatagactgggataactcgcggaaacgcgtgctaataccggataacacatcaaagtgcatgctttgatgttgaaagatggttctgctatcactataggatgggcccgcggcgcattagcttgttggtggggtaacggcctaccaaggcgacgatgcgtagccgacctgagagggtgatcggccacactgggactgagacacggcccagactcctacgggaggcagcagtagggaatcttccacaatgggcgaaagcctgatggagcaacgccgcgtgagcgaagaaggtcttcggatcgtaaagctctgttgtaagggaagaacaagtgcagtagtaactggctgcaccttgacggtaccttactagaaagccacggctaactacgtgccagcagccgcggtaatacgtaggtggcaagcgttgtccggaattattgggcgtaaagcgcgcgcaggcggtctcttaagtctgatgtgaaagcccccggcttaaccggggagggtcattggaaactgggagacttgagtgcaggagagggaagcggaattccatgtgtagcggtgaaatgcgtagagatatggaggaacaccagtggcgaaggcggcttcctggcctgtaactgacgctgaggcgcgaaagcgtggggagcaaacaggattagataccctggtagtccacgccgtaaacgatgagtgctaagtgttagggggtttccaccccttagtgctgcagctaacgcattaagcactccgcctggggagtacggtcgcaagactgaaactcaaaggaattgacgggggcccgcacaagcggtggagcatgtggtttaattcgaagcaacgcgaagaaccttaccaggtcttgacatcccgctgaccgctatggagacatagccttcccttcggggacagcggtgacaggtggtgcatggttgtcgtcagctcgtgtcgtgagatgttgggttaagtcccgcaacgagcgcaacccttgtccttagttgccatcattcagttgggcactctaaggagactgccgtacaaatacggaggaaggtggggatgacgtcaaatcatcatgccccttatgacctgggctacacacgtgctacaatggacggtacaaacggtcgcgaagtcgcgagacggagccaatccgaaaaaaccgttctcagttcggattgcaggctgcaactcgcctgcatgaagccggaatcgctagtaatcgcggatcagcatgccgcggtgaatacgttcccgggccttgtacacaccgcccgtcacaccacgagagtctgtaacacccgaagtcggtgaggtaaccctttcgggagccagccgccgaaggtgggacagatgattggggtg

SEQ ID NO: 3461 - DNA, 1454 bp, Uruburuella suis
  source 1..1454: mol_type = unassigned DNA
tggcggcatgctttacacatgcaagtcggacggcagcatagaagagcttgctcttttgatggcgagtggcgaacgggtgagtaatgcatcggaacgtaccgagtagtgggggataactgtccgaaaggatggctaataccgcatattctctgaggaggaaagcaggggaccttagggccttgcgctatttgagcggccgatgtctgattagctagttggtggggtaagagcccaccaaggcgacgatcagtagcgggtctgagaggatgatccgccacactgggactgagacacggcccagactcctacgggaggcagcagtggggaattttggacaatgggcgcaagcctgatccagccatgccgcgtgtatgaagaaggccttcgggttgtaaagtacttttgtcagggaagaaaagcctggggataacaccctcaggtcatgacggtacctgaagaataagcaccggctaactacgtgccagcagccgcggtaatacgtagggtgcgagcgttaatcggaattactgggcgtaaagcgagcgcagacggttatttaagcaagatgtgaaagccccgggctcaacttgggaactgcgttttgaactgggtaactagagtgtgtcagaggggggtagaattccacgtgtagcagtgaaatgcgtagagatgtggaggaataccgatggcgaaggcagccccctgggataacactgacgttcatgctcgaaagcgtgggtagcaaacaggattagataccctggtagtccacgccctaaacgatgtcaattagctgttggggtacatgatgccttagtagcgtagctaacgcgtgaaattgaccgcctggggagtacggtcgcaagattaaaactcaaaggaattgacggggacccgcacaagcggtggatgatgtggattaattcgatgcaacgcgaagaaccttacctggtcttgacatgtacggaatctcttagagataggagagtgccttcgggagccgtaacacaggtgctgcatggctgtcgtcagctcgtgtcgtgagatgttgggttaagtcccgcaacgagcgcaacccttgccattagttgccatcattaagttgggcactctaatgggactgccggtgacaaaccggaggaaggtggggatgacgtcaagtcctcatggcccttatgaccagggcttcacacgtcatacaatggtcggtacagagggtagccaagccgcgaggtggagccaatcccagaaaaccgatcgtagtccggattgcactctgcaactcgagtgcatgaagtcggaatcgctagtaatcgcaggtcagcatactgcggtgaatacgttcccgggtcttgtacacaccgcccgtcacaccatgggagtgggggataccagaattgggtagggtaaccttcgggagcccgcttaacacggtatgcttcatgactggggtg

SEQ ID NO: 3462 - DNA, 1407 bp, unidentified
  source 1..1407: mol_type = unassigned DNA; note = Variibacter gotjawalensis
agcgaacgctggcggcaggcttaacacatgcaagtcgagcgccccgcaaggggagcggcagacgggtgagtaacacgtgggaacgtaccttttggttcggaacaacacagggaaacttgtgctaataccggataagcccttacggggaaagatttatcgccaaaagatcggcccgcgtctgattagctagttggtggggtaatggcccaccaaggcgacgatcagtagctggtctgagaggatgatcagccacactgggactgagacacggcccagactcctacgggaggcagcagtggggaatattggacaatgggggcaaccctgatccagccatgccgcgtgagtgatgaaggccttagggttgtaaagctctttcgttggggaagataatgacggtacccaaagaagaagccccggctaacttcgtgccagcagccgcggtaatacgaagggggctagcgttgctcggaatcactgggcgtaaagcgcacgtaggcggacttttaagtcaggggtgaaatcctggagctcaactccagaactgcctttgatactggaagtcttgagtccggaagaggtaagtggaactgcgagtgtagaggtgaaattcgtagatattcgcaagaacaccagtggcgaaggcggcttactggtccggtactgacgctgaggtgcgaaagcgtggggagcaaacaggattagataccctggtagtccacgccgtaaacgatgaatgctagccgttggcgggtttacccgtcagtggcgcagctaacgctttaagcattccgcctggggagtacggtcgcaagattaaaactcaaaggaattgacgggggcccgcacaagcggtggagcatgtggttcaattcgaagcaacgcgcagaaccttaccggcccttgacatgtcccgtatggatttcagagatgagatccttcagttcggctggcgggaacacaggtgctgcatggctgtcgtcagctcgtgtcgtgagatgttgggttaagtcccgcaacgagcgcaaccctcgcccctagttgccatcattcagttgggcactctagggggactgccggtgataagccgagaggaaggtggggatgacgtcaagtcctcatggcccttacgggccgggctacacacgtgctacaatggcggtgacaatgggaagcaacacagcaatgtgtagcgaatctcaaaaagccgtctcagttcggattggggtctgcaactcgaccccatgaagttggaatcgctagtaatcgtggatcagcacgccacggtgaatacgttcccgggccttgtacacaccgcccgtcacaccatgggagttgggtttacccgaaggcagtgcgctaaccgcaagggggcagctgaccacggtaggctcagcgactggggtg

SEQ ID NO: 3463 - DNA, 1455 bp, Variovorax boronicumulans
  source 1..1455: mol_type = unassigned DNA
tgaacgctggcggcatgccttacacatgcaagtcgaacggcagcgcgggagcaatcctggcggcgagtggcgaacgggtgagtaatacatcggaacgtgcccaatcgtgggggataacgcagcgaaagctgtgctaataccgcatacgatctacggatgaaagcaggggatcgcaagaccttgcgcgaatggagcggccgatggcagattaggtagttggtgaggtaaaggctcaccaagccttcgatctgtagctggtctgagaggacgaccagccacactgggactgagacacggtccagactcctacgggaggcagcagtggggaattttggacaatgggcgaaagcctgatccagccatgccgcgtgcaggatgaaggccttcgggttgtaaactgcttttgtacggaacgaaacggtcttttctaatacagaaggctaatgacggtaccgtaagaataagcaccggctaactacgtgccagcagccgcggtaatacgtagggtgcaagcgttaatcggaattactgggcgtaaagcgtgcgcaggcggttatgtaagacagttgtgaaatccccgggctcaacctgggaactgcatctgtgactgcatagctagagtacggtagagggggatggaattccgcgtgtagcagtgaaatgcgtagatatgcggaggaacaccgatggcgaaggcaatcccctggacctgtactgacgctcatgcacgaaagcgtggggagcaaacaggattagataccctggtagtccacgccctaaacgatgtcaactggttgttgggtcttcactgactcagtaacgaagctaacgcgtgaagttgaccgcctggggagtacggccgcaaggttgaaactcaaaggaattgacggggacccgcacaagcggtggatgatgtggtttaattcgatgcaacgcgaaaaaccttacccacctttgacatgtacggaattcgccagagatggcttagtgctcgaaagagaaccgtaacacaggtgctgcatggctgtcgtcagctcgtgtcgtgagatgttgggttaagtcccgcaacgagcgcaacccttgtcattagttgctacattcagttgggcactctaatgagactgccggtgacaaaccggaggaaggtggggatgacgtcaagtcctcatggcccttataggtggggctacacacgtcatacaatggctggtacaaagggttgccaacccgcgagggggagctaatcccataaaaccagtcgtagtccggatcgcagtctgcaactcgactgcgtgaagtcggaatcgctagtaatcgtggatcagaatgtcacggtgaatacgttcccgggtcttgtacacaccgcccgtcacaccatgggagcgggttctgccagaagtagttagcttaaccgcaaggagggcgattaccacggcagggttcgtgactggggtg

SEQ ID NO: 3464 - DNA, 1395 bp, unidentified
  source 1..1395: mol_type = unassigned DNA; note = Variovorax guangxiensis
gcagtcgacggcagcgcgggagcaatcctggcggcgagtggcgaacgggtgagtaatacatcggaacgtgcccaatcgtgggggataacgcagcgaaagctgtgctaataccgcatacgatctacggatgaaagcaggggatcgcaagaccttgcgcgaatggagcggccgatggcagattaggtagttggtgaggtaaaggctcaccaagccttcgatctgtagctggtctgagaggacgaccagccacactgggactgagacacggcccagactcctacgggaggcagcagtggggaattttggacaatgggcgcaagcctgatccagccatgccgcgtgcaggatgaaggccttcgggttgtaaactgcttttgtacggaacgaaacggctctttctaataaagagggctaatgacggtaccgtaagaataagcaccggctaactacgtgccagcagccgcggtaatacgtagggtgcaagcgttaatcggaattactgggcgtaaagcgtgcgcaggcggtgatgtaagacagttgtgaaatccccgggctcaacctgggaactgcatctgtgactgcattgctggagtacggcagagggggatggaattccgcgtgtagcagtgaaatgcgtagatatgcggaggaacaccgatggcgaaggcaatcccctgggcctgtactgacgctcatgcacgaaagcgtggggagcaaacaggattagataccctggtagtccacgccctaaacgatgtcaactggttgttgggtcttcactgactcagtaacgaagctaacgcgtgaagttgaccgcctggggagtacggccgcaaggttgaaactcaaaggaattgacggggacccgcacaagcggtggatgatgtggtttaattcgatgcaacgcgaaaaaccttacccacctttgacatgtacggaatttgccagagatggcttagtgctcgaaagagagccgtaacacaggtgctgcatggctgtcgtcagctcgtgtcgtgagatgttgggttaagtcccgcaacgagcgcaacccttgtcattagttgctacattcagttgggcactctaatgagactgccggtgacaaaccggaggaaggtggggatgacgtcaagtcctcatggcccttataggtggggctacacacgtcatacaatggctggtacaaagggttgccaacccgcgagggggagctaatcccataaaaccagtcgtagtccggatcgcagtctgcaactcgactgcgtgaagtcggaatcgctagtaatcgtggatcagaatgtcacggtgaatacgttcccgggtcttgtacacaccgcccgtcacaccatgggagcgggttctgccagaagtagttagcttaaccgcaaggagggc

SEQ ID NO: 3465 - DNA, 1457 bp, Variovorax paradoxus
  source 1..1457: mol_type = unassigned DNA
attgaacgctggcggcatgccttacacatgcaagtcgaacggcagcgcgggagcaatcctggcggcgagtggcgaacgggtgagtaatacatcggaacgtgcccaatcgtgggggataacgcagcgaaagctgtgctaataccgcatacgatctacggatgaaagcaggggatcgcaagaccttgcgcgaatggagcggccgatggcagattaggtagttggtgaggtaaaggctcaccaagccttcgatctgtagctggtctgagaggacgaccagccacactgggactgagacacggcccagactcctacgggaggcagcagtggggaattttggacaatgggcgaaagcctgatccagccatgccgcgtgcaggatgaaggccttcgggttgtaaactgcttttgtacggaacgaaacggccttttctaataaagagggctaatgacggtaccgtaagaataagcaccggctaactacgtgccagcagccgcggtaatacgtagggtgcaagcgttaatcggaattactgggcgtaaagcgtgcgcaggcggtaatgtaagacagttgtgaaatccccgggctcaacctgggaactgcatctgtgactgcattgctggagtacggcagagggggatggaattccgcgtgtagcagtgaaatgcgtagatatgcggaggaacaccgatggcgaaggcaatcccctgggcctgtactgacgctcatgcacgaaagcgtggggagcaaacaggattagataccctggtagtccacgccctaaacgatgtcaactggttgttgggtcttcactgactcagtaacgaagctaacgcgtgaagttgaccgcctggggagtacggccgcaaggttgaaactcaaaggaattgacggggacccgcacaagcggtggatgatgtggtttaattcgatgcaacgcgaaaaaccttacccacctttgacatgtacggaattcgccagagatggcttagtgctcgaaagagaaccgtaacacaggtgctgcatggctgtcgtcagctcgtgtcgtgagatgttgggttaagtcccgcaacgagcgcaacccttgtcattagttgctacatttagttgggcactctaatgagactgccggtgacaaaccggaggaaggtggggatgacgtcaagtcctcatggcccttataggtggggctacacacgtcatacaatggctggtacaaagggttgccaacccgcgagggggagctaatcccataaaaccagtcgtagtccggatcgcagtctgcaactcgactgcgtgaagtcggaatcgctagtaatcgtggatcagaatgtcacggtgaatacgttcccgggtcttgtacacaccgcccgtcacaccatgggagcgggttctgccagaagtagttagcttaaccgcaaggagggcgattaccacggcagggttcgtgactggggtg

SEQ ID NO: 3466 - DNA, 1360 bp, unidentified
  source 1..1360: mol_type = unassigned DNA; note = Varunaivibrio sulfuroxidans
tgcagtcgaacgataacctgccttcgggcaggggacagtggcgcacgggtgagtaacgcgtgggaacctgccctagagtgaggaataaccattggaaacgatggctaataccgcataatccctgagggggaaaggcttcggccgctcttggatggtcccgcgtctgattagctagttggtagggtaatggcctaccaaggcgacgatcagtagctggtctgagaggatgatcagccacactgggactgagacacggcccagactcctacgggaggcagcagtggggaatattggacaatgggcgcaagcctgatccagcaatgccgcgtgagtgaagaaggccttagggttgtaaaactctttcgcccgcgaagatgatgactgtagcgggtaaagaagctccggctaactccgtgccagcagccgcggtaatacggagggagctagcgttgttcggaattactgggcgtaaagagcacgtaggctgttgacctagtcagaggtgaaagcccagggcttaaccctggaattgcctttgatactggttggctagagatcgagagagggtggcggaattccaagtgtagaggtgaaattcgtagatatttggaagaacaccagtggcgaaggcggccacctggctcgatactgacgctgaggtgcgaaagcgtggggagcaaacaggattagataccctggtagtccacgccgtaaacgatgagagctagttgttggggtgtttacacttcagtgacgcagctaacgcgttaagctctccgcctggggagtacggtcgcaagattaaaactcaaaggaattgacgggggcccgcacaagcggtggagcatgtggtttaattcgaagcaacgcgaagaaccttaccagcccttgacataccgatcgcggttagtggagacactttccttcagttcggctggatcggatacaggtgctgcatggctgtcgtcagctcgtgtcgtgagatgttgggttaagtcccgcaacgagcgcaaccctcattttcagttgccatcattcagttgggcactctggagaaactgccggtgacaagccggaggaaggtggggatgacgtcaagtcctcatggcccttacgggctgggctacacacgtgctacaatggcggtgacagagggcggcgatcccgcgagggggagctaatctctaaaagccgtctcagttcggattgttctctgcaactcgagagcatgaagttggaatcgctagtaatcgcggatcagcatgccgcggtgaatacgttcccgggccttgtacacaccgcccgtcacaccatgggagttggttttacccgaaggcgatgcgccaaccgcaagggggca

SEQ ID NO: 3467 - DNA, 1474 bp, Veillonella criceti
  source 1..1474: mol_type = unassigned DNA
gcggcgtgcttaacacatgcaagtcgaacggagagcgatggaagcttgcttctatcaatcttagtggcgaacgggtgagtaacgcgtaaccaacctgcccttcagagggggataacaacgggaaaccgttgctaataccgcgtacgaatggacttcggcatcggagttcattgaaaggtggcctctatttataagctatcgctgaaggagggggttgcgtctgattagctagttggaggggtaatggcccaccaaggcaatgatcagtagccggtctgagaggatgaacggccacattgggactgagacacggcccaaactcctacgggaggcagcagtggggaatcttccgcaatggacgaaagtctgacggagcaacgccgcgtgagtgatgacggccttcgggttgtaaagctctgttaatcgggacgaatggtctttgtgcgaatagtgcagagatttgacggtaccggaatagaaagccacggctaactacgtgccagcagccgcggtaatacgtaggtggcaagcgttgtccggaattattgggcgtaaagcgcgcgcaggcggtttcgtaagtctgtcttaaaagtgcgaggctcaacctcgtgaggggatggaaactatgraactagagtatcggagaggaaagcggaattcctagtgtagcggtgaaatgcgtagatattaggaagaacaccagtggcgaaggcggctttctggacgacaactgacgctgaggcgcgaaagccaggggagcgaacgggattagataccccggtagtcctggccgtaaacgatgggtactaggtgtaggaggtatcgaccccttctgtgccggagttaacgcaataagtaccccgcctggggagtacggtcgcaaggctgaaactcaaaggaattgacgggggcccgcacaagcggtggagtatgtggtttaattcgacgcaacgcgaagaaccttaccaggtcttgacattgatggacgaaacaagagattgtttttctccttcgggagccagaaaacaggtggtgcacggctgtcgtcagctcgtgtcgtgagatgttgggttaagtcccgcaacgagcgcaacccctatcttatgttgccagcacttcgggtgggaactcatgagagactgccgcagacaatgcggaggaaggcggggatgacgtcaagtcatcatgccccttatgacctgggctacacacgtactacaatgggctttaatagagggacgcgaagccgcgaggtggagcaaaccccagaaacaagctctcagttcggatcgtaggctgcaactcgcctacgtgaagtcggaatcgctagtaatcgcaggtcagcatactgcggtgaatacgttcccgggccttgtacacaccgcccgtcacaccacgaaagtcggaagtacccaaagccggtggggtaaccttcgggagccagccgtctaaggtaaagtcgatgattggggtg

SEQ ID NO: 3468 - DNA, 1409 bp, Veillonella montpellierensis
  source 1..1409: mol_type = unassigned DNA
gagcacgggagcttgctcctatgaatcttagtggcgaacgggtgagtaacgcgtaatcaacctgccctacaatgggggacaacagttggaaacgactgctaataccgcatacgacctacggttggcatcaatcgtaggtgaaaggtggcctctacatgtaagctatcgttgtaggaggggattgcgtctgattagctagttggaggggtaacggcccaccaaggcgatgatcagtagccggtctgagaggatgaacggccacattgggactgagacacggcccaaactcctacgggaggcagcagtggggaatcttccgcaatggacgaaagtctgacggagcaacgccgcgtgagtgatgacggtcttcggattgtaaagctctgttaatcgggacgaatggtttgtgtgcaaatagtgcatagacatgacggtaccggaatagaaagccacggctaactacgtgccagcagccgcggtaatacgtaggtggcaagcgttgtccggaattattgggcgtaaagcgcgcgcaggcggactagccagtcagtcttaaaagttcggggcttaaccccgtgatgggattgaaactactagtctagagtatcggagaggaaagtggaattcctagtgtagcggtgaaatgcgtagatattaggaagaacaccagtggcgaaggcgactttctggacgaacactgacgctgaggcgcgaaagccaggggagcgaacgggattagataccccggtagtcctggccgtaaacgatgggtactaagtgtgggaggtatcgaccccttccgtgctgcagttaacgcaataagtaccccgcctggggagtacggtcgcaagactgaaactcaaaggaattgacgggggcccgcacaagcggtggagtatgtggtttaattcgacgcaacgcgaagaaccttaccaggtcttgacattgatggacagaactagagatagtttttcttcttcggaagccagaaaacaggtggtgcacggttgtcgtcagctcgtgtcgtgagatgttgggttaagtcccgcaacgagcgcaacccctatcttatgttgccagcacgtaatggtgggaactcatgagagactgccgcagacaatgcggaggaaggcggggatgacgtcaaatcatcatgccccttatgacctgggctacacacgtactacaatgggagttaataaagagaagcgaaaccgcgaggtggagcgaacctcacaaacactctctcagttcggattgcaggctgcaactcgcctgcatgaagtcggaatcgctagtaatcgcaggtcagcatactgcggtgaatacgttcccgggccttgtacacaccgcccgtcacaccacgaaagtcggaagtacccaaagccggtggggtaaccttcgggagc

SEQ ID NO: 3469 - DNA, 1308 bp, Veillonella rodentium
  source 1..1308: mol_type = unassigned DNA
cgcgtaatcaacctgcccttcagagggggaaacagttggaaacgactgctaataccgcatacgatctgacctcggcatcgaggatggatgaaaggtggcctctacatgtaagctatcactgaaggaggggattgcgtctgattagctagttggaggggtaacggcccaccaaggcgatgatcagtagccggtctgagaggatgaacggccacattgggactgagacacggcccagactcctacgggaggcagcagtggggaatcttccgcaatggacgaaagtctgacggagcaacgccgcgtgagtgatgacggccttcgggttgtaaagctctgttaatcgggacgaaaggccttcttgcgaatagttggaaggattgacggtaccggaatagaaagccacggctaactacgtgccagcagccgcggtaatacgtaggtggcaagcgttgtccggaattattgggcgtaaagcgcgcgcaggcggatcagtcagtctgtcttaaaagttcggggcttaaccccgtgaggggatggaaactgctgatctagagtatcggagaggaaagtggaattcctagtgtagcggtgaaatgcgtagatattaggaagaacaccagtggcgaaggcgactttctggacgaacactgacgctgaggcgcgaaagccaggggagcgaacgggattagataccccggtagtcctggccgtaaacgatgggtactaggtgtaggaggtatcgaccccttctgtgccggagttaacgcaataagtaccccgcctggggagtacgaccgcaaggttgaaactcaaaggaattgacgggggcccgcacaagcggtggagtatgtggtttaattcgacgcaacgcgaagaaccttaccaggtcttgacattgatggacagaaccagagatggttcctcttcttcggaagccagaaaacaggtggtgcacggttgtcgtcagctcgtgtcgtgagatgttgggttaagtcccgcaacgagcgcaacccttatcttatgttgccagcacgtaatggtgggaactcatgagagactgccgcagacaatgcggaggaaggcggggatgacgtcaaatcatcatgccccttatgacctgggctacacacgtactacaatgggagtcaatagacggaagcgaagccgcgaggtggagcgaacccgagaaacactctctcagttcggatcgtaggctgcaactcgcctacgtgaagtcggaatcgctagtaatcgcaggtcagcatactgcggtgaatacgttcccgggccttgtcacaccgcccgtca

SEQ ID NO: 3470 - DNA, 1343 bp, unidentified
  source 1..1343: mol_type = unassigned DNA; note = Veillonella seminalis
tcttagtggcgaacgggtgagtaacgcgtaaccaacctgcccttcagagggggataacaacgggaaaccgttgctaataccgcgtacgaatgaacttcggcatcggagctcattgaaaggtggcctctatttataagctatcgctgaaggagggggttgcgtctgattagctagttggaggggtaacggcccaccaaggcaatgatcagtagccggtctgagaggatgaacggccacattgggactgagacacggcccaaactcctacgggaggcagcagtggggaatcttccgcaatggacgaaagtctgacggagcaacgccgcgtgagtgatgacggccttcgggttgtaaagctctgttaatcgggacgaatggtctttgtgtgaataatgcaaagatttgacggtaccggaatagaaagccacggctaactacgtgccagcagccgcggtaatacgtaggtggcaagcgttgtccggaattattgggcgtaaagcgcgcgcaggcggtttcataagtctgtcttaaaagtgcggggcttaaccccgtgaggggatggaaactatggaactggagtatcggagaggaaagcggaattcctagtgtagcggtgaaatgcgtagatattaggaagaacaccagtggcgaaggcggctttctggacgacaactgacgctgaggcgcgaaagccaggggagcgaacgggattagataccccggtagtcctggccgtaaacgatgggtactaggtgtaggaggtatcgaccccttctgtgccggagttaacgcaataagtaccccgcctggggagtacggtcgcaaggctgaaactcaaaggaattgacgggggcccgcacaagcggtggagtatgtggtttaattcgacgcaacgcgaagaaccttaccaggtcttgacattgatggacgaaacaagagattgtttttctccttcgggagccagaaaacaggtggtgcacggctgtcgtcagctcgtgtcgtgagatgttgggttaagtcccgcaacgagcgcaacccctatcttatgttgccagcacttcgggtgggaactcatgagagactgccgcagacaatgcggaggaaggcggggatgacgtcaagtcatcatgccccttatgacctgggctacacacgtactacaatgggctttaatagagggaagcgaaaccgcgaggtggagcaaaccccagaaacaagctctcagttcggatcgtaggctgcaactcgcctacgtgaagtcggaatcgctagtaatcgcaggtcagcatactgcggtgaatacgttcccgggccttgtacacaccgcccgtcacaccacgaaa

SEQ ID NO: 3471 - DNA, 1484 bp, unidentified
  source 1..1484: mol_type = unassigned DNA; note = Veillonella tobetsuensis
acgaacgctggcggcgtgcttaacacatgcaagtcgaacgaagaggcttggaagcttgcttctaagaatcttagtggcgaacgggtgagtaacgcgtaatcaacctgcccttcagagggggacaacagttggaaacgactgctaataccgcatacgatccaatctcggcatcgaggatggatgaaaggtggcctctatttataagctatcactgaaggaggggattgcgtctgattagctagttggaggggtaacggcccaccaaggcgatgatcagtagccggtctgagaggatgaacggccacattgggactgagacacggcccagactcctacgggaggcagcagtggggaatcttccgcaatggacgaaagtctgacggagcaacgccgcgtgagtgatgacggccttcgggttgtaaagctctgttaatcgggacgaaaggccttcttgcgaatagttagaaggattgacggtaccggaatagaaagccacggctaactacgtgccagcagccgcggtaatacgtaggtggcaagcgttgtccggaattattgggcgtaaagcgcgcgcaggcggatcagtcagtctgtcttaaaagttcggggcttaaccccgtgatgggatggaaactgctgatctagagtatcggagaggaaagtggaattcctagtgtagcggtgaaatgcgtagatattaggaagaacaccagtggcgaaggcgactttctggacgaaaactgacgctgaggcgcgaaagccaggggagcgaacgggattagataccccggtagtcctggccgtaaacgatgggtactaggtgtaggaggtatcgaccccttctgtgccggagttaacgcaataagtaccccgcctggggagtacgaccgcaaggttgaaactcaaaggaattgacgggggcccgcacaagcggtggagtatgtggtttaattcgacgcaacgcgaagaaccttaccaggtcttgacattgatggacagaactagagatagttcctcttcttcggaagccagaaaacaggtggtgcacggttgtcgtcagctcgtgtcgtgagatgttgggttaagtcccgcaacgagcgcaacccctatcttatgttgccagcacttcgggtgggaactcatgagagactgccgcagacaatgcggaggaaggcggggatgacgtcaaatcatcatgccccttatgacctgggctacacacgtactacaatgggagttaatagacggaagcgagatcgcgagatggagcaaacccgagaaacactctctcagttcggatcgtaggctgcaactcgcctacgtgaagtcggaatcgctagtaatcgcaggtcagcatactgcggtgaatacgttcccgggccttgtacacaccgcccgtcacaccacgaaagtcggaagtgcccaaagccggtggggtaaccttcgggagccagccgtctaaggtaaagtcgatgattggggtg

SEQ ID NO: 3472 - DNA, 1456 bp, Verminephrobacter eiseniae
  source 1..1456: mol_type = unassigned DNA
attgaacgctggcggcatgccttacacatgcaagtcgaacggtagcaggccttagggcgctgacagagtggcgaacgggtgagtaagacatcggaacgtgcccgatcgagggggataacggagcgaaagctctgctaataccgcataagatccgaggatgaaagcaggggaccgaaaggccttgcgcggacggagcggccgatggcagattaggtagttggtgggataaaagcctaccaagccgacgatctgtagctggtctgagaggacgaccagccacactgggactgagacacggcccagactcctacgggaggcagcagtggggaattttggacaatgggcgcaagcctgatccagccatgccgcgtgcaggatgaaggccctcgggttgtaaactgcttttgtacggaacgaaaaggccctggtgaacaaccggggttgctgacggtaccgtaagaataagcaccggctaactacgtgccagcagccgcggtaatacgtagggtgcgagcgttaatcggaattactgggcgtaaagcgtgcgcaggcggacatgcaagacagatgtgaaatccccgggctcaacctgggaactgcatatgtgactgcatgactggagtacggcagagggggatggaattccgcgtgtagcagtgaaatgcgtagatatgcggaggaacaccgatggcgaaggcaatcccctgggccagtactgacgctcatgcacgaaagcgtggggagcaaacaggattagataccctggtagtccacgccctaaacgatgtcaactggttgttgggtcttgactgactcagtaacgaagccaacgcgtgaagttgaccgcctggggagtacggccgcaaggttgaaactcaaaggaattgacggggacccgcacaagcggtggatgatgtggtttaattcgacgcaacgcgaaaaaccttacccacctttgacatgtacggaaagctgcagagatgcagaagtgctcgaaagagaaccgtaacacaggtgctgcatggctgtcgtcagctcgtgtcgtgagatgttgggttaagtcccgcaacgagcgcaacccttgtcatcagttgccgcattgagttgggcactctgatgagactgccggtgacaaaccggaggaaggtggggatgacgtcaagtcctcatggcccttataggtggggctacacacgtcatacaatggccggtacagagggcagccaacccgcgagggggagccaatcccaaaaagccggtcgtagtccggatcgcagtctgcaactcgactgcgtgaagtcggaatcgctagtaatcgcggatcagaacgccgcggtgaatacgttcccgggtcttgtacacaccgcccgtcacaccatgggagcgggttctgccagaagtagttagcctaaccgcaaggagggcgactaccacggcagggttcgtgactggggtg

SEQ ID NO: 3473 - DNA, 1461 bp, Verrucomicrobium spinosum
  source 1..1461: mol_type = unassigned DNA
aacgaacgctggcggcgtggataagacatgcaagtcgaacgggataatcttgtagcaataccgggttgttcagtggcgaacgggtgcgtaacacgtggattacataccggaaagcgaggaatagcccagggaaacttggattaatacctcatgtggtcgcaagactaaaggcggggcaacctgtcgctttctgattggtccgcggcctatcagctagttggcggggtaacggcccaccaaggcgacgacgggtagctggtctgagaggatgaccagccacactggaactgagacacggtccagacacctacgggtggcagcagtcgagaatcattcacaatgggggcaaccctgatggtgcgacgccgcgtggaggataaggtcttcggattgtaaactcctgtcatgcgagagcaagatttgagcgggtaactccgctggatttgatagtatcgcaagaggaagagacggctaactctgtgccagcagccgcggtaatacagaggtctcaagcgttgttcggaatcactgggcgtaaagggtgcgtaggtggcgtggaaagtcagatgtgaaatccgggggctcaacctccgaatagcatccgatactcccatgctagagaactggagggggatctggaattctcggtgtagcagtgaaatgcgtagatatcgagaggaacactagtggcgaaggcgagatcctggacagtatctgacactgatgcacgaaggtcaggggagcaaacgggattagataccccggtagtcctgacagtaaacggtgcacgtttggtgtgggaggattcgaccccttctgtgccggagctaacgcgttaaacgtgccgcctgggaagtacggtcgcaagattaaaactcaaagaaattgacggggacccgcacaagcggtggagtatgtggcttaattcgatgcaacgcgaagaaccttacctgggcttgacatgcactgtgtcgtcggtgaaagccggctagcgtagcaatacgcgctttgcacaggtgctgcatggctgtcgtcagctcgtgtcgtgagatgttgggttaagtcccgcaacgagcgcaacccctgtgatttgttgccaccggagcaatccgagcactcgaatcagactgcccagatcaactgggaggaaggtggggatgacgtcaagtcagtatggcccttacgcccagggctgcacacgtactacaatgcccagcacaatgtgaaccgaaaccgcgaggtggaggaaatcctcaaaactgggctcagttcagattgcaggctgcaactcgcctgcatgaagttggaatcgctagtaatggtacatcagctacggtaccgtgaatacgttcccgggtcttgtacacaccgcccgtcacatcatggaagctggtttcgcccgaagtgcccgcgccgaccgcaaggaggcaaggccctaaggcaagactggtgactgggatg

SEQ ID NO: 3474 - DNA, 1453 bp, unidentified
  source 1..1453: mol_type = unassigned DNA; note = Verticiella sediminum
attgaacgctagcggaatgccttacacatgcaagtcgaacggcagcacggacttcggtctggtggcgagtggcgaacgggtgagtaatgcatcggaacgtgcccagtagcgggggataactacgcgaaagcgtagctaataccgcatacgccctacgggggaaagggggggatcgcaagacctctcactattggagcggccgatgtcggattagctagttggtagggtaaaggcctaccaaggcgacgatccgtagctggtttgagaggacgaccagccacactgggactgagacacggcccagactcctacgggaggcagcagtggggaattttggacaatgggggaaaccctgatccagccattccgcgtgtgcgatgaaggccttcgggttgtaaagcacttttggcaggaaagaaatcggtcggattaataccctgaccggatgacggtacctgcagaataagcaccggctaactacgtgccagcagccgcggtaatacgtagggtgcaagcgttaatcggaattactgggcgtaaagcgtgcgcaggcggttcggaaagaaagatgtgaaatcccagagctcaactttggaactgcatttttaactaccgggctagagtgtgtcagagggaggtggaattccgcgtgtagcagtgaaatgcgtagatatgcggaggaacaccgatggcgaaggcagcctcctgggataacactgacgctcaggcacgaaagcgtggggagcaaacaggattagataccctggtagtccacgccctaaacgatgtcaactagctgttgggttcttcgggacttagtagcgcagctaacgcgtgaagttgaccgcctggggagtacggtcgcaagattaaaactcaaaggaattgacggggacccgcacaagcggtggatgatgtggattaattcgatgcaacgcgaaaaaccttacctacgcttgacatgtctggaatcctagagagatctgggagtgctcgaaagagaaccggaacacaggtgctgcatggctgtcgtcagctcgtgtcgtgagatgttgggttaagtcccgcaacgagcgcaacccttgtcattagttgctacgaaagggcactctaatgagactgccggtgacaaaccggaggaaggtggggatgacgtcaagtcctcatggcccttatgcgtagggcttcacacgtcatacaatggtcgggacagggggtcgccaacccgcgagggggagccaatcccagaaacccgatcgtagtccggattgcagtctgcaactcgactgcatgaagtcggaatcgctagtaatcgcggatcagcatgtcgcggtgaatacgttcccgggtcttgtacacaccgcccgtcacaccatgggagtgggtttcaccagaagtaggtagcctaaccgcaaggagggcgcttaccacggtgagattcatgactggggtg

SEQ ID NO: 3475 - DNA, 1469 bp, unidentified
  source 1..1469: mol_type = unassigned DNA; note = Vesicomyosocius okutanii
attgaacgctggcggtatgcttaacacatgcaagtcgaacggaaacgatactagcttgctagtaggtgtcgagtggcggacgggtgagtaacgcgtaggaatctgcttgatagtgggggatagcccggagaaatccggattaataccgcataatcttgataaagtaaagaaggcctctggttatatatgctttcgctatcaaatgagcctgcgtaagattagctagttggtgaggtaaaagctcaccaaggtgacgatctttagctggtctgagaggatgatcagccacactggaactgagacacggtccagactcctacgggaggcagcagtggggaatattggacaatgggcgcaagcctgatccagcaataccgcgtgtgtgaagaaggcctgagggttgtaaagcactttcaattaggaagaaaaaataatggttaatatctattatttttgacgttacttttagaagaagcaccggctaactccgtgccagcagccgcggtaatacggagggtgcaagcgttaatcggaattactgggcgtaaagcgtgcgtaggtggtttattaagtcagatgtgaaagccctgggcttaacctaggaactgcatttgaaactggaaaactagagtataggagaggaaagtggaatttctggtgtagcggtgaaatgcgtagatatcagaaggaacatcaatggcgaaggcagctttctggactaatactgacactgaggtacgaaagcgtgggtagcaaacaggattagataccctggtagtccatgccgtaaacgatgataactagccgttggggggggtaccctttagtggcgaagctaacgcgttaagttatccgcctggggagtacggccgcaaggttaaaactcaaaggaattgacggggacccgcacaagcggtggagcatgtggtttaattcgatgcaacgcgaagaaccttacctggtcttgacatatcgcaaactttctagagatagattggtgccttcgggaatgcgaatacaggtgctgcatggctgtcgtcagctcgtgtcgtgagatgttgggttaagtcccgtaacgagcgcaacccttatccttatttgccagtacataatggtgggaactataaggagactgccggtgataaaccggaggaaggcggggacgacgtcaagtcatcatggcccttacgaccagggctacacacgtgctacaatgggaaggacaaagggtcgctaagccgtgaggtggtgctaatctcacaaatcttttcgtagtccggatcggagtctgcaactcgactccgtgaagtcggaatcgctagtaatcgtagatcagaatgctacggtgaatacgttcccgggtcttgtacacaccgcccgtcataccatgggagtgggttgcaccagaagtagctagtttaactattttatagaggacggttaccacggtgtgattcatgactggggta

SEQ ID NO: 3476 - DNA, 1462 bp, unidentified
  source 1..1462: mol_type = unassigned DNA; note = Vespertiliibacter pulmonis
attgaacgctggcggcaggcttaacacatgcaagtcgaacggtaacgggtaagtacttgtacttatgctgacgagtggcggacgggtgagtaatgcttgggaatctggcttatggagggggataactacgggaaactgtagctaataccgcgtataatcgagagatgaaagggtgggaccttcgggccacctgccatgagatgagcccaagtgggattaggtagtaggtgaggtaagggctcacctagccgacgatctctagctggtctgagaggatgaccagccacactggaactgagacacggtccagactcctacgggaggcagcagtggggaatattgcacaatggggggaaccctgatgcagccatgccgcgtgaatgaagaaggccttcgggttgtaaagttctttcggtgatgaggaaagcttgggtgttaatagcacttgggtatgacgttagttacagaagaagcaccggctaactccgtgccagcagccgcggtaatacggagggtgcgagcgttaatcggaatgactgggcgtaaagggcacgcaggcggtgacttaagtgagatgtgaaagccctgggcttaacctaggaatagcatttcatactgggtcgctagagtattttagggaggggtagaattccacgtgtagcggtgaaatgcgtagagatgtggaggaataccgaaggcgaaggcagccccttgggaatatactgacgctcatgtgcgaaagcgtggggagcaaacaggattagataccctggtagtccacgctgtaaacgatgtcgatttggggattgggctttgagtttggtccccgaagctaacgcgataaatcgaccgcctggggagtacggccgcaaggctaaaactcaaatgaattgacgggggcccgcacaagcggtggagcatgtggtttaattcgatgcaacgcgaagaaccttacctactcttgacatccagagaatcctgtagagatacgggagtgccttcgggagctctgagacaggtgctgcatggctgtcgtcagctcgtgttgtgaaatgttgggttaagtcccgcaacgagcgcaacccttatcctttgttgccagcgggttatgccgggaactcaaaggagactgccagtgataaactggaggaaggtggggatgacgtcaagtcatcatggcccttacgagtagggctacacacgtgctacaatggcgtatacagagggaagcaagatggcgacatggagcgaatctcacaaagtacgtctaagttcggattggagtctgcaactcgactccatgaagtcggaatcgctagtaatcgcaaatcagaatgttgcggtgaatacgttcccgggccttgtacacaccgcccgtcacaccatgggagtgggttgtaccagaagtagatagcttaaccttcgggagggcgtttaccacggtatgattcatgactggggt

SEQ ID NO: 3477 - DNA, 1350 bp, Vibrio aerogenes
  source 1..1350: mol_type = unassigned DNA
aacacatgcaagtcgggcggaaacgaaagaaagcttgctttcttggcgtcgagcggcggacgggtgagtaatgcctgggaaattgccctgatgtgggggataaccattggaaacgatggctaataccgcataacgtctacggaccaaagagggggaccttcgggcctctcgcgtcgggatatgcccaggtgggattagcttgttggtgaggtaagggctcaccaaggcgacgatccctagctggtctgagaggatgatcagccacactggaactgagacacggtccagactcctacgggaggcagcagtggggaatattgcacaatgggcgcaagcctgatgcagccatgccgcgtgtatgaagaaggccttcgggttgtaaagtactttcagcagtgaggaaggtggtgtatttaatacgtgcatcatttgacgttagctgcagaagaagcaccggctaactccgtgccagcagccgcggtaatacggagggtgcgagcgttaatcggtggatgattaagtcagatgtgaaagcccggggcttaaccccggaacagcatttgaaactggtcatctagagtactgtagaggggggtagaatttcaggtgtagcggtgaaatgcgtagagatctgaaggaataccggtggcgaaggcggccccctggacagatactgacactcagatgcgaaagcgtggggagcaaacaggattagataccctggtagtccacgccgtaaacgatgtctacttggaggttgtggccttgagccgtggctttcggagctaacgcgttaagtagaccgcctggggagtacggtcgcaagattaaaactcaaatgaattgacgggggcccgcacaagcggtggagcatgtggtttaattcgatgcaacgcgaagaaccttacctactcttgacatccagagaattttccagagatggattagtgccttcgggagctctgagacaggtgctgcatggctgtcgtcagctcgtgttgtgaaatgttgggttaagtcccgcaacgagcgcaacccttatccttgattgccagcacttcgggtgggaacttcagggagactgccggtgataaaccggaggaaggtggggacgacgtaagtcatcatggcccttacgagtagggctacacacgtgctacaatggcggatacagagggcagctaacttgcgagagtgtgcgaatcccaaaaagtccgtcgtagtccggattggagtctgcaactcgactccatgaagtcggaatcgctagtaatcgtagatcagaatgctacggtgaatacgttcccgggccttgtacacaccgcccgtcacaccatgggagtgggctgc

SEQ ID NO: 3478 - DNA, 1475 bp, Vibrio agarivorans
  source 1..1475: mol_type = unassigned DNA
attgaacgctggcggcaggcctaacacatgcaagtcgagcggaaacgacttaactgaaccttcggggaacgttaagggcgtcgagcggcggacgggtgagtaatgcctgggaatatgccttgatgtgggggataactattggaaacgatagctaataccgcataatgctttcgggccaaagagggggaccttcgggcctctcgcgtcaagattagcccaggtgggattagctagttggtgaggtaaaggctcaccaaggcgacgatccctagctggtctgagaggatgatcagccacactggaactgagacacggtccagactcctacgggaggcagcagtggggaatattgcacaatgggcgcaagcctgatgcagccatgccgcgtgtgtgaagaaggccttcgggttgtaaagcactttcagtcgtgaggaaggtagtgtagttaatagctgcattatttgacgttagcgacagaagaagcaccggctaactccgtgccagcagccgcggtaatacggagggtgcgagcgttaatcggaattactgggcgtaaagcgcatgcaggtgggtgattaagtcagatgtgaaagcccggggctcaacctcggaacagcatttgaaactggtcacctagagtactgtagaggggggtagaatttcaggtgtagcggtgaaatgcgtagagatctgaaggaataccagtggcgaaggcggccccctggacagatactgacactcagatgcgaaagcgtggggagcaaacaggattagataccctggtagtccacgccgtaaacgatgtctacttggaggttgtggccttgagccgtggctttcggagctaacgcgttaagtagaccgcctggggagtacggtcgcaagattaaaactcaaatgaattgacgggggcccgcacaagcggtggagcatgtggtttaattcgatgcaacgcgaagaaccttacctactcttgacatccagagaacttagcagagatgctttggtgccttcgggaactctgagacaggtgctgcatggctgtcgtcagctcgtgttgtgaaatgttgggttaagtcccgcaacgagcgcaacccttatccttgtttgccagcgagtaatgtcgggaactccagggagactgccggtgataaaccggaggaaggtggggacgacgtcaagtcatcatggcccttacgagtagggctacacacgtgctacaatggcgcatacagagggcagcaagctagcgatagtgagcgaatcccaaaaagtgcgtcgtagtccggattggagtctgcaactcgactccatgaagtcggaatcgctagtaatcgtagatcagaatgctacggtgaatacgttcccgggccttgtacacaccgcccgtcacaccatgggagtgggctgcaaaagaagtgggtagtttaaccttcgggaggacgctcaccactttgtggttcatgactggggtg

SEQ ID NO: 3479 - DNA, 1476 bp, unidentified
  source 1..1476: mol_type = unassigned DNA; note = Vibrio alfacsensis
attgaacgctggcggcaggcctaacacatgcaagtcgagcggcagcgacaacattgaatcttcggaggatttgttgggcggcgagcggcggacgggtgagtaatgcctaggaaattgccctgatgtgggggataaccattggaaacgatggctaataccgcatgatgcctacgggccaaagagggggaccttcgggcctctcgcgtcaggatatgcctaggtgggattagctagttggtgaggtaagggctcaccaaggcgacgatccctagctggtctgagaggatgatcagccacactggaactgagacacggtccagactcctacgggaggcagcagtggggaatattgcacaatgggcgcaagcctgatgcagccatgccgcgtgtgtgaagaaggccttcgggttgtaaagcactttcagtagggaggaaggttcatgcgttaatagcgtatggatttgacgttacctacagaagaagcaccggctaactccgtgccagcagccgcggtaatacggagggtgcgagcgttaatcggaattactgggcgtaaagcgcatgcaggtggtttgttaagtcagatgtgaaagcccggggctcaacctcggaattgcatttgaaactggcagactagagtactgtagaggggggtagaatttcaggtgtagcggtgaaatgcgtagagatctgaaggaataccggtggcgaaggcggccccctggacagatactgacactcagatgcgaaagcgtggggagcaaacaggattagataccctggtagtccacgccgtaaacgatgtctacttggaggttgtggccttgagccgtggctttcggagctaacgcgttaagtagaccgcctggggagtacggtcgcaagattaaaactcaaatgaattgacgggggcccgcacaagcggtggagcatgtggtttaattcgatgcaacgcgaagaaccttacctactcttgacatccagagaagccagtagagatacaggtgtgccttcgggaactctgagacaggtgctgcatggctgtcgtcagctcgtgttgtgaaatgttgggttaagtcccgcaacgagcgcaacccttatccttgtttgccagcgagtaatgtcgggaactccagggagactgccggtgataaaccggaggaaggtggggacgacgtcaagtcatcatggcccttacgagtagggctacacacgtgctacaatggcgcatacagagggcagccaacttgcgaaagtgagcgaatcccaaaaagtgcgtcgtagtccggattggagtctgcaactcgactccatgaagtcggaatcgctagtaatcgtggatcagaatgccacggtgaatacgttcccgggccttgtacacaccgcccgtcacaccatgggagtgggctgcaaaagaagtaggtagtttaaccttcggggaggacgcttaccactttgtggttcatgactggggtg

SEQ ID NO: 3480 - DNA, 1475 bp, Vibrio alginolyticus
  source 1..1475: mol_type = unassigned DNA
attgaacgctggcggcaggcctaacacatgcaagtcgagcggaaacgagttatctgaaccttcggggaacgataacggcgtcgagcggcggacgggtgagtaatgcctaggaaattgccctgatgtgggggataaccattggaaacgatggctaataccgcatgatgcctacgggccaaagagggggaccttcgggcctctcgcgtcaggatatgcctaggtgggattagctagttggtgaggtaagggctcaccaaggcgacgatccctagctggtctgagaggatgatcagccacactggaactgagacacggtccagactcctacgggaggcagcagtggggaatattgcacaatgggcgcaagcctgatgcagccatgccgcgtgtatgaagaaggccttcgggttgtaaagtactttcagtcgtgaggaaggtagtgtagttaatagctgcattatttgacgttagcgacagaagaagcaccggctaactccgtgccagcagccgcggtaatacggagggtgcgagcgttaatcggaattactgggcgtaaagcgcatgcaggtggtttgttaagtcagatgtgaaagcccggggctcaacctcggaatagcatttgaaactggcagactagagtactgtagaggggggtagaatttcaggtgtagcggtgaaatgcgtagagatctgaaggaataccggtggcgaaggcggccccctggacagatactgacactcagatgcgaaagcgtggggagcaaacaggattagataccctggtagtccacgccgtaaacgatgtctacttggaggttgtggccttgagccgtggctttcggagctaacgcgttaagtagaccgcctggggagtacggtcgcaagattaaaactcaaatgaattgacgggggcccgcacaagcggtggagcatgtggtttaattcgatgcaacgcgaagaaccttacctactcttgacatccagagaactttccagagatggattggtgccttcgggaactctgagacaggtgctgcatggctgtcgtcagctcgtgttgtgaaatgttgggttaagtcccgcaacgagcgcaacccttatccttgtttgccagcgagtaatgtcgggaactccagggagactgccggtgataaaccggaggaaggtggggacgacgtcaagtcatcatggcccttacgagtagggctacacacgtgctacaatggcgcatacagagggcggccaacttgcgaaagtgagcgaatcccaaaaagtgcgtcgtagtccggattggagtctgcaactcgactccatgaagtcggaatcgctagtaatcgtggatcagaatgccacggtgaatacgttcccgggccttgtacacaccgcccgtcacaccatgggagtgggctgcaaaagaagtaggtagtttaaccttcggggggacgcttaccactttgtggttcatgactggggtg

SEQ ID NO: 3481 - DNA, 1462 bp, unidentified
  source 1..1462: mol_type = unassigned DNA; note = Vibrio algivorus
ttgaacgctggcggcaggcctaacacatgcaagtcgagcggaaacgagaatagcttgctattcggcgtcgagcggcggacgggtgagtaatgcataggaagttgcccagtagagggggataaccattggaaacgatggctaataccgcataacctcttcggagcaaagcgggggaccttcgggcctcgcgctactggatacgcctatgtgggattagctagttggtgaggtaaaggctcaccaaggcgacgatccctagctggtctgagaggatgatcagccacactgggactgagacacggcccagactcctacgggaggcagcagtggggaatattgcacaatgggcgaaagcctgatgcagccatgccgcgtgtatgaagaaggccttcgggttgtaaagtactttcagttgtgaggaaggtttcgtagttaataactgcgttgcttgacgttagcaacagaagaagcaccggctaactccgtgccagcagccgcggtaatacggagggtgcgagcgttaatcggaattactgggcgtaaagcgcatgcaggtggtttgttaagtcagatgtgaaagcccggggctcaacctcggaaggtcatttgaaactggcaaactagagtactgtagaggggggtagaatttcaggtgtagcggtgaaatgcgtagagatctgaaggaataccagtggcgaaggcggccccctggacagatactgacactcagatgcgaaagcgtggggagcaaacaggattagataccctggtagtccacgccgtaaacgatgtctacttggaggttgtggccttgagccgtggctttcggagctaacgcgttaagtagaccgcctggggagtacggtcgcaagattaaaactcaaatgaattgacgggggcccgcacaagcggtggagcatgtggtttaattcgatgcaacgcgaagaaccttacctactcttgacatccagagaactttccagagatggattggtgccttcgggaactctgagacaggtgctgcatggctgtcgtcagctcgtgttgtgaaatgttgggttaagtcccgcaacgagcgcaacccttatccttgtttgccagcgagtaatgtcgggaactccagggagactgccggtgataaaccggaggaaggtggggacgacgtcaagtcatcatggcccttacgagtagggctacacacgtgctacaatggcgcatacagagggcagcgaacttgcgaaagtaagcgaatcccaaaaagtgcgtcgtagtccggattggagtctgcaactcgactccatgaagtcggaatcgctagtaatcgtggatcagaatgccacggtgaatacgttcccgggccttgtacacaccgcccgtcacaccatgggagtgggctgcaaaagaagtaggtagtttaaccttcgggaggacgcttaccactttgtggttcatgactggggtg

SEQ ID NO: 3482 - DNA, 1467 bp, Vibrio anguillarum
  source 1..1467: mol_type = unassigned DNA
attgaacgctggcggcaggcctaacacatgcaagtcgagcggcagcacagaggaacttgttccttgggtggcgagcggcggacgggtgagtaatgcctaggaaattgccctgatgtgggggataaccattggaaacgatggctaataccgcatgatgcctacgggccaaagagggggaccttcgggcctctcgcgtcaggatatgcctaggtgggattagctagttggtgaggtaatggctcaccaaggcgacgatccctagctggtctgagaggatgatcagccacactggaactgagacacggtccagactcctacgggaggcagcagtggggaatattgcacaatgggcgcaagcctgatgcagccatgccgcgtgtatgaagaaggccttcgggttgtaaagtactttcagtcgtgaggaaggtggtgttgttaatagcagcatcatttgacgttagcgacagaagaagcaccggctaactccgtgccagcagccgcggtaatacggagggtgcgagcgttaatcggaattactgggcgtaaagcgcatgcaggtggtggattaagtcagatgtgaaagcccggggctcaacctcggaaccgcatttgaaactggttcactagagtactgtagaggggggtagaatttcaggtgtagcggtgaaatgcgtagagatctgaaggaataccggtggcgaaggcggccccctggacagatactgacactcagatgcgaaagcgtggggagcaaacaggattagataccctggtagtccacgccgtaaacgatgtctacttggaggttgtggccttgagccgtggctttcggagctaacgcgttaagtagaccgcctggggagtacggtcgcaagattaaaactcaaatgaattgacgggggcccgcacaagcggtggagcatgtggtttaattcgatgcaacgcgaagaaccttacctactcttgacatctacagaatcctgcggagacgcgggagtgccttcgggaactgtaagacaggtgctgcatggctgtcgtcagctcgtgttgtgaaatgttgggttaagtcccgcaacgagcgcaacccttatccttgtttgccagcgagtaatgtcgggaactccagggagactgccggtgataaaccggaggaaggtggggacgacgtcaagtcatcatggcccttacgagtagggctacacacgtgctacaatggcgcatacagagggcagcaagctagcgatagtgagcgaatcccaaaaagtgcgtcgtagtccggattggagtctgcaactcgactccatgaagtcggaatcgctagtaatcgtagatcagaatgctacggtgaatacgttcccgggccttgtacacaccgcccgtcacaccatgggagtgggctgcaaaagaagtgggtagtttaacctttcgaggaggacgctcaccactttgtggttcatgactggggtg

SEQ ID NO: 3483 - DNA, 1477 bp, Vibrio atlanticus
  source 1..1477: mol_type = unassigned DNA
attgaacgctggcggcaggcctaacacatgcaagtcgagcggaaacgacactaacaatccttcgggtgcgttaatgggcgtcgagcggcggacgggtgagtaatgcctaggaaattgccttgatgtgggggataaccattggaaacgatggctaataccgcataatgcctacgggccaaagagggggaccttcgggcctctcgcgtcaagatatgcctaggtgggattagctagttggtgaggtaatggctcaccaaggcgacgatccctagctggtctgagaggatgatcagccacactggaactgagacacggtccagactcctacgggaggcagcagtggggaatattgcacaatgggcgaaagcctgatgcagccatgccgcgtgtatgaagaaggccttcgggttgtaaagtactttcagttgtgaggaagggtgtgtagttaatagctgcamatcttgacgttagcaacagaagaagcaccggctaactccgtgccagcagccgcggtaatacggagggtgcgagcgttaatcggaattactgggcgtaaagcgcatgcaggtggttcattaagtcagatgtgaaagcccggggctcaacctcggaactgcatttgaaactggtgaactagagtgctgtagaggggggtagaatttcaggtgtagcggtgaaatgcgtagagatctgaaggaataccagtggcgaaggcggccccctggacagacactgacactcagatgcgaaagcgtggggagcaaacaggattagataccctggtagtccacgccgtaaacgatgtctacttggaggttgtggccttgagccgtggctttcggagctaacgcgttaagtagaccgcctggggagtacggtcgcaagattaaaactcaaatgaattgacgggggcccgcacaagcggtggagcatgtggtttaattcgatgcaacgcgaagaaccttacctactcttgacatccagagaagccagcggagacgcaggtgtgccttcgggagctctgagacaggtgctgcatggctgtcgtcagctcgtgttgtgaaatgttgggttaagtcccgcaacgagcgcaacccttatccttgtttgccagcgagtaatgtcgggaactccagggagactgccggtgataaaccggaggaaggtggggacgacgtcaagtcatcatggcccttacgagtagggctacacacgtgctacaatggcgcatacagagggcagcaagctagcgatagtgagcgaatcccaaaaagtgcgtcgtagtccggattggagtctgcaactcgactccatgaagtcggaatcgctagtaatcgtgaatcagaatgtcacggtgaatacgttcccgggccttgtacacaccgcccgtcacaccatgggagtgggctgcaaaagaagtgggtagtttaacctttcggggaggacgctcaccactttgtggttcatgactggggtg

SEQ ID NO: 3484 - DNA, 1475 bp, Vibrio azureus
  source 1..1475: mol_type = unassigned DNA
attgaacgctggcggcaggcctaacacatgcaagtcgagcggaaacgagttatctgaaccttcggggaacgataacggcgtcgagcggcggacgggtgagtaatgcctaggaaattgccctgatgtgggggataaccattggaaacgatggctaataccgcatgatgcctacgggccaaagagggggaccttcgggcctctcgcgtcaggatatgcctaggtgggattagctagttggtgaggtaagggctcaccaaggcgacgatccctagctggtctgagaggatgatcagccacactggaactgagacacggtccagactcctacgggaggcagcagtggggaatattgcacaatgggcgcaagcctgatgcagccatgccgcgtgtgtgaagaaggccttcgggttgtaaagcactttcagtcgtgaggaaggtagtgtagttaatagctgcattatttgacgttagcgacagaagaagcaccggctaactccgtgccagcagccgcggtaatacggagggtgcgagcgttaatcggaattactgggcgtaaagcgcatgcaggtggtttgttaagtcagatgtgaaagcccggggctcaacctcggaatagcatttgaaactggcagactagagtactgtagaggggggtagaatttcaggtgtagcggtgaaatgcgtagagatctgaaggaataccggtggcgaaggcggccccctggacagatactgacactcagatgcgaaagcgtggggagcaaacaggattagataccctggtagtccacgccgtaaacgatgtctacttggaggttgtggccttgagccgtggctttcggagctaacgcgttaagtagaccgcctggggagtacggtcgcaagattaaaactcaaatgaattgacgggggcccgcacaagcggtggagcatgtggtttaattcgatgcaacgcgaagaaccttacctactcttgacatccagagaacttttcagagatgaattggtgccttcgggaactctgagacaggtgctgcatggctgtcgtcagctcgtgttgtgaaatgttgggttaagtcccgcaacgagcgcaacccttatccttgtttgccagcgagtaatgtcgggaactccagggagactgccggtgataaaccggaggaaggtggggacgacgtcaagtcatcatggcccttacgagtagggctacacacgtgctacaatggcgcatacagagggcagccaacttgcgaaagtgagcgaatcccaaaaagtgcgtcgtagtccggattggagtctgcaactcgactccatgaagtcggaatcgctagtaatcgtggatcagaatgccacggtgaatacgttcccgggccttgtacacaccgcccgtcacaccatgggagtgggctgcaaaagaagtaggtagtttaaccttcgggaggacgcttaccactttgtggttcatgactggggtg

SEQ ID NO: 3485 - DNA, 1475 bp, unidentified
  source 1..1475: mol_type = unassigned DNA; note = Vibrio barjaei
attgaacgctggcggcaggcctaacacatgcaagtcgagcggaaacgagttaactgacccttcgggtgacgttaacggcgtcgagcggcggacgggtgagtaatgcctgggaaattgccctgatgtgggggataaccattggaaacgatggctaataccgcataatgccttcgggccaaagagggggaccttcgggcctctcgcgtcaggatatgcccaggtgggattagctagttggtaaggtaatggcttaccaaggcgacgatccctagctggtctgagaggatgatcagccacactggaactgagacacggtccagactcctacgggaggcagcagtggggaatattgcacaatgggcgcaagcctgatgcagccatgccgcgtgtgtgaagaaggccttcgggttgtaaagcactttcagtcgtgaggaaggtagtgtagttaatagctgcattgcttgacgttagcgacagaagaagcaccggctaactccgtgccagcagccgcggtaatacggagggtgcgagcgttaatcggaattactgggcgtaaagcgcatgcaggtggttcgttaagtcagatgtgaaagcccggggctcaacctcggaactgcatttgaaactggcggactagagtactgtagaggggggtagaatttcaggtgtagcggtgaaatgcgtagagatctgaaggaataccggtggcgaaggcggccccctggacagatactgacactcagatgcgaaagcgtggggagcaaacaggattagataccctggtagtccacgccgtaaacgatgtctacttggaggttgtggccttgagccgtggctttcggagctaacgcgttaagtagaccgcctggggagtacggtcgcaagattaaaactcaaatgaattgacgggggcccgcacaagcggtggagcatgtggtttaattcgatgcaacgcgaagaaccttacctactcttgacatccagagaagccagcggagacgcaggtgtgccttcgggagctctgagacaggtgctgcatggctgtcgtcagctcgtgttgtgaaatgttgggttaagtcccgcaacgagcgcaacccttatccttgtttgccagcgagtaatgtcgggaactccagggagactgccggtgataaaccggaggaaggtggggacgacgtcaagtcatcatggcccttacgagtagggctacacacgtgctacaatggcgcatacagagggcagccaacttgcgaaagtgagcgaatcccaaaaagtgcgtcgtagtccggattggagtctgcaactcgactccatgaagtcggaatcgctagtaatcgtagatcagaatgctacggtgaatacgttcccgggccttgtacacaccgcccgtcacaccatgggagtgggctgcaaaagaagtgggtagtttaaccttcgggaggacgctcaccactttgtggttcatgactggggtg

SEQ ID NO: 3486 - DNA, 1475 bp, unidentified
  source 1..1475: mol_type = unassigned DNA; note = Vibrio bivalvicida
attgaacgctggcggcaggcctaacacatgcaagtcgagcggaaacgagttaactgaaccttcggggaacgttaacggcgtcgagcggcggacgggtgagtaatgcctgggaaattgccctgatgtgggggataaccattggaaacgatggctaataccgcataatgccttcgggccaaagagggggaccttcgggcctctcgcgtcaggatatgcccaggtgggattagctagttggtgaggtaatggctcaccaaggcgacgatccctagctggtctgagaggatgatcagccacactggaactgagacacggtccagactcctacgggaggcagcagtggggaatattgcacaatgggcgcaagcctgatgcagccatgccgcgtgtatgaagaaggccttcgggttgtaaagtactttcagtcgtgaggaaggtggtgttgttaatagcagcatcatttgacgttagcgacagaagaagcaccggctaactccgtgccagcagccgcggtaatacggagggtgcgagcgttaatcggaattactgggcgtaaagcgcatgcaggtggtctgttaagtcagatgtgaaagcccggggctcaacctcggaattgcatttgaaactggcagactagagtactgtagaggggggtagaatttcaggtgtagcggtgaaatgcgtagagatctgaaggaataccagtggcgaaggcggccccctggacagatactgacactcagatgcgaaagcgtggggagcaaacaggattagataccctggtagtccacgccgtaaacgatgtctacttggaggttgtggccttgagccgtggctttcggagctaacgcgttaagtagaccgcctggggagtacggtcgcaagattaaaactcaaatgaattgacgggggcccgcacaagcggtggagcatgtggtttaattcgatgcaacgcgaagaaccttacctactcttgacatccagagaagccagcagagatgcaggtgtgccttcgggaactctgagacaggtgctgcatggctgtcgtcagctcgtgttgtgaaatgttgggttaagtcccgcaacgagcgcaacccttatccttgtttgccagcgagtaatgtcgggaactccagggagactgccggtgataaaccggaggaaggtggggacgacgtcaagtcatcatggcccttacgagtagggctacacacgtgctacaatggcgcatacagagggcagcaagctagcgatagtgagcgaatcccaaaaagtgcgtcgtagtccggattggagtctgcaactcgactccatgaagtcggaatcgctagtaatcgtggatcagaatgccacggtgaatacgttcccgggccttgtacacaccgcccgtcacaccatgggagtgggctgcaaaagaagtaggtagtttaaccttcgggagaacgcttaccactttgtggttcatgactggggtg

SEQ ID NO: 3487 - DNA, 1474 bp, Vibrio brasiliensis
  source 1..1474: mol_type = unassigned DNA
attgaacgctggcggcaggcctaacacatgcaagtcgagcggaaacgagttaactgaaccttcggggaacgttaacggcgtcgagcggcggacgggtgagtaatgcctgggaaattgccctgatgtgggggataaccattggaaacgatggctaataccgcataatagcttcggctcaaagagggggaccttcgggcctctcgcgtcaggatatgcccaggtgggattagctagttggtgaggtaatggctcaccaaggcgacgatccctagctggtctgagaggatgatcagccacactggaactgagacacggtccagactcctacgggaggcagcagtggggaatattgcacaatgggcgcaagcctgatgcagccatgccgcgtgtatgaagaaggccttcgggttgtaaagtactttcagcagtgaggaaggcaggtacgttaatagcgtgcttgtttgacgttagctgcagaagaagcaccggctaactccgtgccagcagccgcggtaatacggagggtgcgagcgttaatcggaattactgggcgtaaagcgcatgcaggtggtttgttaagtcagatgtgaaagcccggggctcaacctcggaattgcatttgaaactggcagactagagtactgtagaggggggtagaatttcaggtgtagcggtgaaatgcgtagagatctgaaggaataccggtggcgaaggcggccccctggacagatactgacactcagatgcgaaagcgtggggagcaaacaggattagataccctggtagtccacgccgtaaacgatgtctacttggaggttgtggccttgagccgtggctttcggagctaacgcgttaagtagaccgcctggggagtacggtcgcaagattaaaactcaaatgaattgacgggggcccgcacaagcggtggagcatgtggtttaattcgatgcaacgcgaagaaccttacctactcttgacatccagagaacttttcagagatggattggtgccttcgggaactctgagacaggtgctgcatggctgtcgtcagctcgtgttgtgaaatgttgggttaagtcccgcaacgagcgcaacccttatccttgtttgccagcacttcgggtgggaactccagggagactgccggtgataaaccggaggaaggtggggacgacgtcaagtcatcatggcccttacgagtagggctacacacgtgctacaatggcgcatacagagggcggccaacttgcgaaagtgagcgaatcccaaaaagtgcgtcgtagtccggatcggagtctgcaactcgactccgtgaagtcggaatcgctagtaatcgtggatcagaatgccacggtgaatacgttcccgggccttgtacacaccgcccgtcacaccatgggagtgggctgcaaaagaagtgggtagtttaaccttcgggaggacgctcaccactttgtggttcatgactggggtg

SEQ ID NO: 3488 - DNA, 1430 bp, Vibrio breoganii
  source 1..1430: mol_type = unassigned DNA
attgaacgctggcggcaggcctaacacatgcaagtcgagcggaaacgacaacattgacccttcgggtgatttgttgggcgtcgagcggcggacgggtgagtaatgcctgggaaattgccctgatgtgggggataaccattggaaacgatggctaataccgcataacgtctacggaccaaagagggggaccttcgggcctctcgcttcaggatatgcccaggtgggattagctagttggtgaggtaatggctcaccaaggcgacgatccctagctggtctgagaggatgatcagccacactggaactgagacacggtccagactcctacgggaggcagcagtggggaatattgcacaatgggcgcaagcctgatgcagccatgccgcgtgtatgaagaaggccttcgggttgtaaagtactttcagtcgtgaggaaggcgttgaagttaatagcttcattgtttgacgttagcgacagaagaagcaccggctaactccgtgccagcagccgcggtaatacggagggtgcgagcgttaatcggaattactgggcgtaaagcgcatgcaggtggtttgttaagtcagatgtgaaagcccggggctcaacctcggaaccgcatttgaaactggcaggctagagtactgtagaggggggtagaatttcaggtgtagcggtgaaatgcgtagagatctgaaggaataccagtggcgaaggcggccccctggacagatactgacactcagatgcgaaagcgtggggagcaaacaggattagataccctggtagtccacgccgtaaacgatgtctacttggaggttgtggccttgagccgtggctttcggagctaacgcgttaagtagaccgcctggggagtacggtcgcaagattaaaactcaaatgaattgacgggggcccgcacaagcggtggagcatgtggtttaattcgatgcaacgcgaagaaccttacctactcttgacatccagagaacttagcagagatgctttggtgccttcgggaactctgagacaggtgctgcatggctgtcgtcagctcgtgttgtgaaatgttgggttaagtcccgcaacgagcgcaacccttatccttgtttgccagcacgtaatggtgggaactccagggagactgccggtgataaaccggaggaaggtggggacgacgtcaagtcatcatggcccttacgagtagggctacacacgtgctacaatggcgcatacagagggcagccaaccagcgatggtgagcgaatcccaaaaagtgcgtcgtagtccggattggagtctgcaactcgactccatgaagtcggaatcgctagtaatcgtgaatcagaatgtcacggtgaatacgttcccgggccttgtacacaccgcccgtcacaccatgggagtgggctgcaaaagaagtgggtagttta

SEQ ID NO: 3489 - DNA, 1426 bp, Vibrio campbellii
  source 1..1426: mol_type = unassigned DNA
attgaacgctggcggcaggcctaacacatgcaagtcgagcggaaacgagttatctgaaccttcggggaacgataacggcgtcgagcggcggacgggtgagtaatgcctaggaaattgccctgatgtgggggataaccattggaaacgatggctaataccgcataatgcctacgggccaaagagggggaccttcgggcctctcgcgtcaggatatgcctaggtgggattagctagttggtgaggtaagggctcaccaaggcgacgatccctagctggtctgagaggatgatcagccacactggaactgagacacggtccagactcctacgggaggcagcagtggggaatattgcacaatgggcgcaagcctgatgcagccatgccgcgtgtgtgaagaaggccttcgggttgtaaagcactttcagtcgtgaggaaggtagtgtagttaatagctgcattatttgacgttagcgacagaagaagcaccggctaactccgtgccagcagccgcggtaatacggagggtgcgagcgttaatcggaattactgggcgtaaagcgcatgcaggtggtttgttaagtcagatgtgaaagcccggggctcaacctcggaattgcatttgaaactggcagactagagtactgtagaggggggtagaatttcaggtgtagcggtgaaatgcgtagagatctgaaggaataccggtggcgaaggcggccccctggacagatactgacactcagatgcgaaagcgtggggagcaaacaggattagataccctggtagtccacgccgtaaacgatgtctacttggaggttgtggccttgagccgtggctttcggagctaacgcgttaagtagaccgcctggggagtacggtcgcaagattaaaactcaaatgaattgacgggggcccgcacaagcggtggagcatgtggtttaattcgatgcaacgcgaagaaccttacctactcttgacatccagagaactttccagagatggattggtgccttcgggaactctgagacaggtgctgcatggctgtcgtcagctcgtgttgtgaaatgttgggttaagtcccgcaacgagcgcaacccttatccttgtttgccagcgagtaatgtcgggaactccagggagactgccggtgataaaccggaggaaggtggggacgacgtcaagtcatcatggcccttacgagtagggctacacacgtgctacaatggcgcatacagagggcagccaacttgcgagagtgagcgaatcccaaaaagtgcgtcgtagtccggatcggagtctgcaactcgactccgtgaagtcggaatcgctagtaatcgtggatcagaatgccacggtgaatacgttcccgggccttgtacacaccgcccgtcacaccatgggagtgggctgcaaaagaagtaggtag

SEQ ID NO: 3490 - DNA, 1474 bp, unidentified
  source 1..1474: mol_type = unassigned DNA; note = Vibrio caribbeanicus
attgaacgctggcggcaggcctaacacatgcaagtcgagcggaaacgagttatctgaaccttcggggaacgataacggcgtcgagcggcggacgggtgagtaatgcctgggaaattgccctgatgtgggggataaccattggaaacgatggctaataccgcataatagcttcggctcaaagagggggaccttcgggcctctcgcgtcaggatatgcccaggtgggattagctagttggtgaggtaagggctcaccaaggcgacgatccctagctggtctgagaggatgatcagccacactggaactgagacacggtccagactcctacgggaggcagcagtggggaatattgcacaatgggcgcaagcctgatgcagccatgccgcgtgtatgaagaaggccttcgggttgtaaagtactttcagcagtgaggaaggtggtgtacttaatacgtgcatcatttgacgttagctgcagaagaagcaccggctaactccgtgccagcagccgcggtaatacggagggtgcgagcgttaatcggaattactgggcgtaaagcgcatgcaggtggtttgttaagtcagatgtgaaagcccggggctcaacctcggaattgcatttgaaactgacagactagagtactgtagaggggggtagaatttcaggtgtagcggtgaaatgcgtagagatctgaaggaataccggtggcgaaggcggccccctggacagatactgacactcagatgcgaaagcgtggggagcaaacaggattagataccctggtagtccacgccgtaaacgatgtctacttggaggttgtggccttgagccgtggctttcggagctaacgcgttaagtagaccgcctggggagtacggtcgcaagattaaaactcaaatgaattgacgggggcccgcacaagcggtggagcatgtggtttaattcgatgcaacgcgaagaaccttacctactcttgacatccatagaactttccagagatggattggtgccttcgggaactatgagacaggtgctgcatggctgtcgtcagctcgtgttgtgaaatgttgggttaagtcccgcaacgagcgcaacccttatccttgtttgccagcacttcgggtgggaactccagggagactgccggtgataaaccggaggaaggtggggacgacgtcaagtcatcatggcccttacgagtagggctacacacgtgctacaatggcgcatacagagggcggccaacttgcgaaagtgagcgaatcccaaaaagtgcgtcgtagtccggattggagtctgcaactcgactccatgaagtcggaatcgctagtaatcgtggatcagaatgccacggtgaatacgttcccgggccttgtacacaccgcccgtcacaccatgggagtgggctgcaaaagaagtgggtagtttaaccttcggggggacgctcaccactttgtggttcatgactggggtg

SEQ ID NO: 3491 - DNA, 1479 bp, Vibrio casei
  source 1..1479: mol_type = unassigned DNA
attgaacgctggcggcaggcctaacacatgcaagtcgagcggaaacgagaagkwgcttgcwmcttcggcgtcgagcggcggacgggtgagtaatgcataggaagttgccctaacgagggggataccagttggaaacgactgttaataccgcataatctcctttctgttaaaggaaagaagyaaagcgggggaccttcgggcctcgcgcgttaggatacgcctatgtgggattagctagttggtgaggtaatggctcaccaaggcgacgatccctagctggtctgagaggatgatcagccacactgggactgagacacggcccagactcctacgggaggcagcagtggggaatattgcacaatgggcgaaagcytgatgcagccatgccgcgtgtatgaagaaggccttcgggttgtaaagtactttcagttgtgaggaaggtttcgtmgttaatarckgcgttgcttgacgttagcaacagaagaagcaccggctaactccgtgccagcagccgcggtaatacggagggtgcgagcgttaatcggaattactgggcgtaaagcgcatgcaggtggtttgttaagtcagatgtgaaagcccggggctcaacctcggaaggtcatttgaaactggcaaactagagtactgtagaggggggtagaatttcaggtgtagcggtgaaatgcgtagagatctgaaggaataccagtggcgaaggcggccccctggacagatactgacactcagatgcgaaagcgtggggagcaaacaggattagataccctggtagtccacgccgtaaacgatgtctacttggaggttgtggccttgagccgtggctttcggagctaacgcgttaagtagaccgcctggggagtacggtcgcaagattaaaactcaaatgaattgacgggggcccgcacaagcggtggagcatgtggtttaattcgatgcaacgcgaagaaccttacctactcttgacatcyagagaarccagtagagatacaggtgtgccttcgggarctctragacaggtgctgcatggctgtcgtcagctcgtgttgtgaaatgttgggttaagtcccgcaacgagcgcaacccttatccttgtttgccagcgagtaatgtcgggaactccagggagactgccggtgataaaccggaggaaggtggggacgacgtcaagtcatcatggcccttacgagtagggctacacacgtgctacaatggcgcatacagagggcagcgaacttgcgaaagtaagcgaatcccaaaaagtgcgtcgtagtccrgattggagtctgcaactcgactccatgaagtcggaatcgctagtaatcgtggatcagaatgccacggtgaatacgttcccgggccttgtacacaccgcccgtcacaccatgggagtgggctgcaaaagaagtaggtagtttaaccttcgggaggacgcttaccactttgtggttcatgactggggtg

SEQ ID NO: 3492 - DNA, 1473 bp, Vibrio celticus
  source 1..1473: mol_type = unassigned DNA
attgaacgctggcggcaggcctaacacatgcaagtcgagcggaaacgacactaacaatccttcgggtgcgttaatgggcgtcgagcggcggacgggtgagtaatgcctaggaaattgccttgatgtgggggataaccattggaaacgatggctaataccgcataatgcctacgggccaaagagggggaccttcgggcctctcgcgtcaagatatgcctaggtgggattagctagttggtgaggtaatggctcaccaaggcgacgatccctagctggtctgagaggatgatcagccacactggaactgagacacggtccagactcctacgggaggcagcagtggggaatattgcacaatgggcgaaagcctgatgcagccatgccgcgtgtatgaagaaggccttcgggttgtaaagtactttcagttgtgaggaagggggtagygttaatagcgctatctcttgacgttagcaacagaagaagcaccggctaactccgtgccagcagccgcggtaatacggaggtgcgagcgtaatcggaattactgggcgtaaagcgcatgcagtggttcattaagtcagatgtgaaagcccggggctcaacctcggaactgcattgaaactggtgaactagagtactgtagaggggggtagaatttcaggtgtagcggtgaaatgcgtagagatctgaaggaataccagtggcgaaggcggccccctggacagatactgacactcagatgcgaaagcgtggggagcaaacaggattagataccctggtagtccacgccgtaaacgatgtctacttggaggttgtggccttgagccgtggctttcggagctaacgcgttaagtagaccgcctggggagtacggtcgcaagattaaaactcaaatgaattgacgggggcccgcacaagcggtggagcatgtggtttaattcgatgcaacgcgaagaaccttacctactcttgacatccagagaagccagcggagacgcaggtgtgccttcgggagctctgagacaggtgctgcatggctgtcgtcagctcgtgttgtgaaatgttgggttaagtcccgcaacgagcgcaacccttatccttgtttgccagcgagtaatgtcgggaactccagggagactgccggtgataaaccggaggaaggtggggacgacgtcaagtcatcatggcccttacgagtagggctacacacgtgctacaatggcgcatacagagggcagcaagctagcgatagtgagcgaatcccaaaaagtgcgtcgtagtccggattggagtctgcaactcgactccatgaagtcggaatcgctagtaatcgtgaatcagaatgtcacggtgaatacgttcccgggccttgtacacaccgcccgtcacaccatgggagtgggctgcaaaagaagtgggtagtttaacctttcggggaggacgctcaccactttgtggttcatgactggggtg

SEQ ID NO: 3493 - DNA, 1435 bp, Vibrio chagasii
  source 1..1435: mol_type = unassigned DNA
attgaacgctggcggcaggcctaacacatgcaagtcgagcggaaacgagttatctgaaccttcggggaacgwtaasggcgtcgagcggcggacgggtgagtaatgcctaggaaattgccttgatgtgggggataaccattggaaacgatggctaataccgcataaygcctacgggccaaagagggggaccttcgggcctctcgcgtcaagatatgcctaggtgggattagctagttggtgaggtaatggctcaccaaggcgacgatccctagctggtctgagaggatgatcagccacactggaactgagacacggtccagactcctacgggaggcagcagtggggaatattgcacaatgggcgaaagcctgatgcagccatgccgcgtgtatgaagaaggccttcgggttgtaaagtactttcagttgtgaggaagggggtgtcgttaatagcggcatytcttgacgttagcaacagaagaagcaccggctaactccgtgccagcagccgcggtaatacggagggtgcgagcgttaatcggaattactgggcgtaaagcgcatgcaggtggttcattaagtcagatgtgaaagcccggggctcaacctcggaactgcatttgaaactggtgaactagagtactgtagaggggggtagaatttcaggtgtagcggtgaaatgcgtagagatctgaaggaataccagtggcgaaggcggccccctggacagatactgacactcagatgcgaaagcgtggggagcaaacaggattagataccctggtagtccacgccgtaaacgatgtctacttggaggttgtggccttgagccgtggctttcggagctaacgcgttaagtagaccgcctggggagtacggtcgcaagattaaaactcaaatgaattgacgggggcccgcacaagcggtggagcatgtggtttaattcgatgcaacgcgaagaaccttacctactcttgacatccagagaagccagcggagacgcaggtgtgccttcgggagctctgagacaggtgctgcatggctgtcgtcagctcgtgttgtgaaatgttgggttaagtcccgcaacgagcgcaacccttatccttgtttgccagcgagtaatgtcgggaactccagggagactgccggtgataaaccggaggaaggtggggacgacgtcaagtcatcatggcccttacgagtagggctacacacgtgctacaatggcgcatacagagggcagcgaacttgcgagagtgagcgaatcccaaaaagtgcgtcgtagtccggattggagtctgcaactcgactccatgaagtcggaatcgctagtaatcgtagatcagaatgctacggtgaatacgttcccgggccttgtacacaccgcccgtcacaccatgggagtgggctgcaaaagaagtgggtagtttaacctt

SEQ ID NO: 3494 - DNA, 1465 bp, unidentified; identical to SEQ ID NO: 399
  source 1..1465: mol_type = unassigned DNA; note = Vibrio cholera

SEQ ID NO: 3495 - DNA, 1481 bp, unidentified
  source 1..1481: mol_type = unassigned DNA; note = Vibrio cidicii
attgaacgctggcggcaggcctaacacatgcaagtcgagcggcagcacagagaaacttgtttctcgggtggcgagcggcggacgggtgagtaatgcctgggaaattgccctgatgtgggggataaccattggaaacgatggctaataccgcatgatgtcctttctgttaaaagaggggaccaaagagggggaccgcaaggcctctcgcgtcaggatatgcccaggtgggattagctagttggtgaggtaagggctcaccaaggcgacgatccctagctggtctgagaggatgatcagccacactggaactgagacacggtccagactcctacgggaggcagcagtggggaatattgcacaatgggcgcaagcctgatgcagccatgccgcgtgtgtgaagaaggccttcgggttgtaaagcactttcagttgtgaggaaggtggtgtcgttaatagcggcatcatttgacgttagcaacagaagaagcaccggctaactccgtgccagcagccgcggtaatacggagggtgcgagcgttaatcggaattactgggcgtaaagcgcatgcaggtggtttgttaagtcagatgtgaaagccccgggctcaacctgggaattgcatttgaaactggcaaactagagtactgtagaggggggtagaatttcaggtgtagcggtgaaatgcgtagagatctgaaggaataccggtggcgaaggcggccccctggacagatactgacactcagatgcgaaagcgtggggagcaaacaggattagataccctggtagtccacgccgtaaacgatgtctacttggaggttgtggccttgagccgtggctttcggagctaacgcgttaagtagaccgcctggggagtacggtcgcaagattaaaactcaaatgaattgacgggggcccgcacaagcggtggagcatgtggtttaattcgatgcaacgcgaagaaccttacctactcttgacatccagagaatctggcggagacgctggagtgccttcgggagctctgagacaggtgctgcatggctgtcgtcagctcgtgttgtgaaatgttgggttaagtcccgcaacgagcgcaacccttatccttgtttgccagcacgtaatggtgggaactccagggagactgccggtgataaaccggaggaaggtggggacgacgtcaagtcatcatggcccttacgagtagggctacacacgtgctacaatggcgcatacagagggcggccaacttgcgaaagtgagcgaatcccaaaaagtgcgtcgtagtccggattggagtctgcaactcgactccatgaagtcggaatcgctagtaatcgtggatcagaatgccacggtgaatacgttcccgggccttgtacacaccgcccgtcacaccatgggagtgggctgcaaaagaagtgggtagtttaacctttcggggaggacgctcaccactttgtggttcatgactggggtg

SEQ ID NO: 3496 - DNA, 1465 bp, Vibrio cincinnatiensis
  source 1..1465: mol_type = unassigned DNA
attgaacgctggcggcaggcctaacacatgcaagtcgagcggtaacagagagaagcttgcttctctgctgacgagcggcggacgggtgagtaatgcctgggaaattgccctgatgtgggggataaccattggaaacgatggctaataccgcatgatagcttcggctcaaagagggggacctgcaaggcctctcgcgtcaggatatgcccaggtgggattagctagttggtggggtaaaggctcaccaaggcgacgatccctagctggtctgagaggatgatcagccacactgggactgagacacggcccagactcctacgggaggcagcagtggggaatattgcacaatgggcgcaagcctgatgcagccatgccgcgtgtatgaagaaggccttcgggttgtaaagtactttcagtggtgaggaagggggtgtggttaatagccatattctttgacgttagccacagaagaagcaccggctaactccgtgccagcagccgcggtaatacggagggtgcgagcgttaatcggaattactgggcgtaaagcgcatgcaggtggtttgttaagtcagatgtgaaagcccggggctcaacctcggagttgcatttgaaactggcaggctagagtactgtagaggggggtagaatttcaggtgtagcggtgaaatgcgtagagatctgaaggaataccggtggcgaaggcggccccctggacagatactgacactcagatgcgaaagcgtggggagcaaacaggattagataccctggtagtccacgccgtaaacgatgtctacttggaggttgcggtcttgaactgtggctttcggagctaacgcgttaagtagaccgcctggggagtacggtcgcaagattaaaactcaaatgaattgacgggggcccgcacaagcggtggagcatgtggtttaattcgatgcaacgcgaagaaccttacctactcttgacatccagagaatcctgcggagacgcgggagtgccttcgggagctctgagacaggtgctgcatggctgtcgtcagctcgtgttgtgaaatgttgggttaagtcccgcaacgagcgcaacccttatccttgtttgccagcacttcgggtgggaactccagggagactgccggtgataaaccggaggaaggtggggacgacgtcaagtcatcatggcccttacgagtagggctacacacgtgctacaatggcgcatacagagggcggcgagacagcgatgttaagcgaatcccaaaaagtgcgtcgtagtccggattggagtctgcaactcgactccatgaagtcggaatcgctagtaatcgtggatcagaatgccacggtgaatacgttcccgggccttgtacacaccgcccgtcacaccatgggagtgggctgcaaaagaagcaggtagtttaaccttcggggggacgcttgccactttgtggttcatgactggggtg

SEQ ID NO: 3497 - DNA, 1432 bp, Vibrio comitans
  source 1..1432: mol_type = unassigned DNA
ctaacacatgcaagtcgagcggaaacgacaacattgacccttcgggtgatttgttgggcgtcgagcggcggacgggtgagtaatgcctgggaaattgccctgatgtgggggataaccattggaaacgatggctaataccgcataacgtctacggaccaaagagggggaccttcgggcctctcgcttcaggatatgcccaggtgggattagctagttggtgaggtaatggctcaccaaggcgacgatccctagctggtctgagaggatgatcagccacactggaactgagacacggtccagactcctacgggaggcagcagtggggaatattgcacaatgggcgcaagcctgatgcagccatgccgcgtgtatgaagaaggccttcgggttgtaaagtactttcagtcgtgaggaaggcgttgaagttaatagcttcatcgtttgacgttagcgacagaagaagcaccggctaactccgtgccagcagccgcggtaatacggagggtgcgagcgttaatcggaattactgggcgtaaagcgcatgcaggtggtttgttaagtcagatgtgaaagcccggggctcaacctcggaaccgcatttgaaactggcaggctagagtactgtagaggggggtagaatttcaggtgtagcggtgaaatgcgtagagatctgaaggaataccagtggcgaaggcggccccctggacagatactgacactcagatgcgaaagcgtgsggagcaaacaggattagataccctggtagtccacgccgtaaacgatgtctacttggaggttgtggccttgagccgtggctttcggagctaacgcgttaagtagaccgcctggggagtacggtcgcaagattaaaactcaaatgaattgacgggggcccgcacaagcggtggagcatgtggtttaattcgatgcaacgcgaagaaccttacctactcttgacatccagagaaytcgctagagatagcttggtgccttcgggaactctgagacaggtgctgcatggctgtcgtcagctcgtgttgtgaaatgttgggttaagtcccgcaacgagcgcaacccttatccttgtttgccagcacgtaatggtgggaactccagggagactgccggtgataaaccggaggaaggtggggacgacgtcaagtcatcatggcccttacgagtagggctacacacgtgctacaatggcgcatacagagggcagccaaccagcgatggtgagcgaatcccaaaaagtgcgtcgtagtccggattggagtctgcaactcgactccatgaagtcggaatcgctagtaatcgtgaatcagaatgtcacggtgaatacgttcccgggccttgtacacaccgcccgtcacaccatgggagtgggctgcaaaagaagtgggtagtttaaccttcgggaggacgctcacca

SEQ ID NO: 3498 - DNA, 1475 bp, Vibrio coralliilyticus
  source 1..1475: mol_type = unassigned DNA
attgaacgctggcggcaggcctaacacatgcaagtcgagcggaaacgagttgtctgaaccttcggggaaggataacggcgtcgagcggcggacgggtgagtaatgcctgggaaattgccctgatgtgggggataaccattggaaacgatggctaataccgcataatagcttcggctcaaagagggggaccttcgggcctctcgcgtcaggatatgcccaggtgggattagctagttggtgaggtaatggctcaccaaggcgacgatccctagctggtctgagaggatgatcagccacactggaacttagacacggtccagactcctacgggaggcagcagtggggaatattgcacaatgggcgcaagcctgatgcagccatgccgcgtgtatgaagaaggctctcgggttgtaaagtactttcagcagtgaggaaggcgggtgtgttaatagcgcattcgtttgacgttagctgcagaagaagcaccggctaactccgtgccagcagccgcggtaatacggagggtgcgagcgttaatcggaattactgggcgtaaagcgcatgcaggtggtttgttaagtcagatgtgaaagcccggggctcaacctcggaattgcatttgaaactggcagactagagtactgtagaggggggtagaatttcaggtgtagcggtgaaatgcgtagagatctgaaggaataccggtggcgaaggcggccccctggacagatactgacactcagatgcgaaagcgtggggagcaaacaggattagataccctggtagtccacgccgtaaacgatgtctacttggaggttgtggccttgagccgtggctttcggagctaacgcgttaagtagaccgcctggggagtacggtcgcaagattaaaactcaaatgaattgacgggggcccgcacaagcggtggagcatgtggtttaattcgatgcaacgcgaagaaccttacctactcttgacatcctcagaagagactggagacagtcttgtgccttcgggaactgagagacaggtgctgcatggctgtcgtcagctcgtgttgtgaaatgttgggttaagtcccgcaacgagcgcaacccttatccttgtttgccagcgagtaatgtcgggaactccagggagactgccggtgataaaccggaggaaggtggggacgacgtcaagtcatcatggcccttacgagtagggctacacacgtgctacaatggcgcatacagagggcggccaacttgcgaaagtgagcgaatcccaaaaagtgcgtcgtagtccggattggagtctgcaactcgactccatgaagtcggaatcgctagtaatcgtagatcagaatgctacggtgaatacgttcccgggccttgtacacaccgcccgtcacaccatgggagtgggctgcaaaagaagtgggtagtttaaccttcggggggacgctcaccactttgtggttcatgactggggtg

SEQ ID NO: 3499 - DNA, 1477 bp, Vibrio crassostreae
  source 1..1477: mol_type = unassigned DNA
attgaacgctggcggcaggcctaacacatgcaagtcgagcggaaacgacactaacaatccttcgggtgcgttaatgggcgtcgagcggcggacgggtgagtaatgcctaggaaattgccttgatgtgggggataaccattggaaacgatggctaataccgcataatgcctacgggccaaagagggggaccttcgggcctctcgcgtcaagatatgcctaggtgggattagctagttggtgaggtaatggctcaccaaggcgacgatccctagctggtctgagaggatgatcagccacactggaactgagacacggtccagactcctacgggaggcagcagtggggaatattgcacaatgggcgaaagcctgatgcagccatgccgcgtgtatgaagaaggccttcgggttgtaaagtactttcagttgtgaggaagggggtagcgttaatagcgctatctcttgacgttagcaacagaagaagcaccggctaactccgtgccagcagccgcggtaatacggagggtgcgagcgttaatcggaattactgggcgtaaagcgcatgcaggtggttcattaagtcagatgtgaaagcccggggctcaacctcggaactgcatttgaaactggtgaactagagtactgtagaggggggtagaatttcaggtgtagcggtgaaatgcgtagagatctgaaggaataccagtggcgaaggcggccccctggacagatactgacactcagatgcgaaagcgtggggagcaaacaggattagataccctggtagtccacgccgtaaacgatgtctacttggaggttgtggccttgagccgtggctttcggagctaacgcgttaagtagaccgcctggggagtacggtcgcaagattaaaactcaaatgaattgacgggggcccgcacaagcggtggagcatgtggtttaattcgatgcaacgcgaagaaccttacctactcttgacatccagagaagccagcggagacgcaggtgtgccttcgggagctctgagacaggtgctgcatggctgtcgtcagctcgtgttgtgaaatgttgggttaagtcccgcaacgagcgcaacccttatccttgtttgccagcgagtaatgtcgggaactccagggagactgccggtgataaaccggaggaaggtggggacgacgtcaagtcatcatggcccttacgagtagggctacacacgtgctacaatggcgcatacagagggcagcaagctagcgatagtgagcgaatcccaaaaagtgcgtcgtagtccggattggagtctgcaactcgactccatgaagtcggaatcgctagtaatcgtagatcagaatgctacggtgaatacgttcccgggccttgtacacaccgcccgtcacaccatgggagtgggctgcaaaagaagtgggtagtttaacctttcggggaggacgctcaccactttgtggttcatgactggggtg

SEQ ID NO: 3500 - DNA, 1461 bp, Vibrio cyclitrophicus
  source 1..1461: mol_type = unassigned DNA
  misc_difference 175: note = n is a, c, g, or t
  misc_difference 196: note = n is a, c, g, or t
  misc_difference 382: note = n is a, c, g, or t
  misc_difference 400: note = n is a, c, g, or t
attgaacgctggcggcaggcctaacacatgcaagtcgagcggaaacgacactaacaatccttcgggtgcgttaatgggcgtcgagcggcggacgggtgagtaatgcctaggaaattgccttgatgtgggggataaccattggaaacgatggctaataccgcatgatgcctacggnccaaagagggggaccttcggncctctcgcgtcaagatatacctaggtgggattagctagttggtgaggtaatggctcaccaaggcgacgatccctagctggtctgagaggatgatcatccacactggaactgagactcggtccagactcctacgggaggcagcagtggggaatattgcacaatggccgaaagcctgatgcagccatnccgcgtgtatgaagaagnccttcgggttgtaaagtactttcagttgtgaggaagggtgtgtagttaataactgcgcatcttgacgttagcaacagaagaagcaccggctaactccgtgccagcagccgcggtaatacggagggtgcgaccgttaatcggaattactgggcgtaaagcgcatgcaggtggttcattaagtcagatgtgaaagcccggggctcaacctcggaactgcatttgaaactggtgaactagagtactgtagaggggggtagaatttcaggtgtagcggtgaaatgcgtagagatctgaaggaataccagtggcgaaggcggccccctggacagatactgacactcagatgcgaaagcgtggggagcaaacaggattagataccctggtagaccacgccgtaaacgatgtctacttggaggttgtggccttgagccgtggctttcggagctaacgcgttaagtagaccgcctggggaggacggtcgcaagattaaaactcaaatgaattgacgggggcccgcacaagcggtggagcatgtggtttaattcgatgcaacgcgaagaaccttacctactcttgacatccagagaagccagcggagacgcaggtgtgccttcgggagctctgagacaggtgctgcatggctgtcgtcagctcgtgttgtgaaatgttgggttaagtcccgcaacgagcgcaacccttatccttgtttgccagcgagtcatgtcgggaactccagggagactgccggtgataaaccggaggaaggtggggacgacgtcaagtcatcatggcccttacgagtagggctacacacgtgctacaatggcgcatacagagggcagcaagctagcgatagtgagcgaatcccaaaaagtgcgtcgtagtccggattggagtctgcaactcgactccatgaagtcggaatcgctagtaatcgtgaatcagaatgtcacggtgaatacgttcccgggccttgtacacaccgcccgtcacaccatgggagtgggctgcaaaagaagtgggtagtttaacctttcggggaggacgctcaccactttgtg

SEQ ID NO: 3501 - DNA, 1426 bp, Vibrio diabolicus
  source 1..1426: mol_type = unassigned DNA
  misc_difference 457..458: note = n is a, c, g, or t
  misc_difference 460: note = n is a, c, g, or t
  misc_difference 622: note = n is a, c, g, or t
  misc_difference 911: note = n is a, c, g, or t
  misc_difference 991..992: note = n is a, c, g, or t
  misc_difference 1365: note = n is a, c, g, or t
ttgaacgctggcggcaggcctaacacatgcaagtcgagcggaaacgagttatctgaaccttcgggaacgataacggcgtcgagcggcggacgggtgagtaatgcctaggaaattgccctgatgtgggggataaccattggaaacgatggctaataccgcatgatgcctacgggccaaagagggggaccttcgggcctctcgcgtcaggatatgcctaggtgggattagctagttggtgaggtaagggctcaccaaggcgacgatccctagctggtctgagaggatgatcagccacactggaactgagacacggtccagactcctacgggaggcagcagtggggaatattgcacaatgggcgcaagcctgatgcagccatgccgcgtgtgtgaagaaggccttcgggttgtaaagcactttcagcagtgaggaaggcgggttcgttaatagcgtgctnntntgacgttagctgcagaagaagcaccggctaactccgtgccagcagccgcggtaatacggagggtgcgagcgttaatcggaattactgggcgtaaagcgcatgcaggtggtttgttaagtcagatgtgaaagcccggggctcaacctcggaatagcatttganactggcagactagagtactgtagaggggggtagaatttcaggtgtagcggtgaaatgcgtagagatctgaaggaataccggtggcgaaggcggccccctggacagatactgacactcagatgcgaaagcgtggggagcaaacaggattagataccctggtagtccacgccgtaaacgatgtctacttggaggttgtggccttgagccgtggctttcggagctaacgcgttaagtagaccgcctggggagtacggtcgcaagattaaaactcaaatgaattgacgggggnccgcacaagcggtggagcatgtggtttaattcgatgcaacgcgaagaaccttacctactcttgacatccagagaactttnnagagatggattggtgccttcgggaactctgagacaggtgctgcatggctgtcgtcagctcgtgttgtgaaatgttgggttaagtcccgcaacgagcgcaacccttatccttgtttgccagcgagtaatgtcgggaactccagggagactgccggtgataaaccggaggaaggtggggacgacgtcaagtcatcatggcccttacgagtagggctacacacgtgctacaatggcgcatacagagggcggccaacttgcgaaagtgagcgaatcccaaaaagtgcgtcgtagtccggattggagtctgcaactcgactccatgaagtcggaatcgctagtaatcgtggatcagaatgccacggtgaatacgttcncgggccttgtacacaccgcccgtcacaccatgggagtgggctgcaaaagaagtaggtagtt

SEQ ID NO: 3502 - DNA, 1465 bp, Vibrio diazotrophicus
  source 1..1465: mol_type = unassigned DNA
attgaacgctggcggcaggcctaacacatgcaagtcgagcggcagcacagagaaacttgtttctcgggtggcgagcggcggacgggtgagtaatgcctgggaaattgccctgatgtgggggataaccattggaaacgatggctaataccgcataatagcttcggctcaaagagggggaccttcgggcctctcgcgtcaggatatgcccaggtgggattagctagttggtgaggtaatggctcaccaaggcgacgatccctagctggtctgagaggatgatcagccacactggaactgagacacggtccagactcctacgggaggcagcagtggggaatattgcacaatgggcgcaagcctgatgcagccatgccgcgtgtgtgaagaaggccttcgggttgtaaagcactttcagtcgtgaggaaggtggtgttgttaatagcagcatcatttgacgttagcgacagaagaagcaccggctaactccgtgccagcagccgcggtaatacggagggtgcgagcgttaatcggaattactgggcgtaaagcgcatgcaggtggtttgttaagtcagatgtgaaagcccggggctcaacctcggaatagcatttgaaactggcaagctagagtactgtagaggggggtagaatttcaggtgtagcggtgaaatgcgtagagatctgaaggaataccggtggcgaaggcggccccctggacagatactgacactcagatgcgaaagcgtggggagcaaacaggattagataccctggtagtccacgccgtaaacgatgtctacttggaggttgtggccttgagccgtggctttcggagctaacgcgttaagtagaccgcctggggagtacggtcgcaagattaaaactcaaatgaattgacgggggcccgcacaagcggtggagcatgtggtttaattcgatgcaacgcgaagaaccttacctactcttgacatctacagaatcctgcggagacgcgggagtgccttcgggaactgtaagacaggtgctgcatggctgtcgtcagctcgtgttgtgaaatgttgggttaagtcccgcaacgagcgcaacccttatccttgtttgccagcgagtcatgtcgggaactccagggagactgccggtgataaaccggaggaaggtggggacgacgtcaagtcatcatggcccttacgagtagggctacacacgtgctacaatggcgcatacagagggcagcgaactagcgatagtaagcgaatcccaaaaagtgcgtcgtagtccggattggagtctgcaactcgactccatgaagtcggaatcgctagtaatcgtgaatcagaatgtcacggtgaatacgttcccgggccttgtacacaccgcccgtcacaccatgggagtgggctgcaaaagaagcaggtagtttaaccttcgggaggacgcttgccactttgtggttcatgactggggtg

SEQ ID NO: 3503 - DNA, 1475 bp, unidentified
  source 1..1475: mol_type = unassigned DNA; note = Vibrio europaeus
attgaacgctggcggcaggcctaacacatgcaagtcgagcggaaacgagttaactgaaccttcggggaacgttaacggcgtcgagcggcggacgggtgagtaatgcctaggaaattgccctgatgtgggggataaccattggaaacgatggctaataccgcataatgccttcgggccaaagagggggaccttcgggcctctcgcgtcaggatatgcctaggtgggattagctagttggtgaggtaagggctcaccaaggcgacgatccctagctggtctgagaggatgatcagccacactggaactgagacacggtccagactcctacgggaggcagcagtggggaatattgcacaatgggcgcaagcctgatgcagccatgccgcgtgtatgaagaaggccttcgggttgtaaagtactttcagcagtgaggaaggtggtgtagttaataactgcatcatttgacgttagctgcagaagaagcaccggctaactccgtgccagcagccgcggtaatacggagggtgcgagcgttaatcggaattactgggcgtaaagcgcatgcaggtggtttgttaagtcagatgtgaaagcccggggctcaacctcggaattgcatttgaaactggcagactagagtactgtagaggggggtagaatttcaggtgtagcggtgaaatgcgtagagatctgaaggaataccggtggcgaaggcggccccctggacagatactgacactcagatgcgaaagcgtggggagcaaacaggattagataccctggtagtccacgccgtaaacgatgtctacttggaggttgtggccttgagccgtggctttcggagctaacgcgttaagtagaccgcctggggagtacggtcgcaagattaaaactcaaatgaattgacgggggcccgcacaagcggtggagcatgtggtttaattcgatgcaacgcgaagaaccttacctactcttgacatccagagaagccagtagagatacaggtgtgccttcgggaactctgagacaggtgctgcatggctgtcgtcagctcgtgttgtgaaatgttgggttaagtcccgcaacgagcgcaacccttatccttgtttgccagcgagtaatgtcgggaactccagggagactgccggtgataaaccggaggaaggtggggacgacgtcaagtcatcatggcccttacgagtagggctacacacgtgctacaatggcgcatacagagggcagcaagctagcgatagtgagcgaatcccaaaaagtgcgtcgtagtccggattggagtctgcaactcgactccatgaagtcggaatcgctagtaatcgtggatcagaatgccacggtgaatacgttcccgggccttgtacacaccgcccgtcacaccatgggagtgggctgcaaaagaagtaggtagtttaaccttcgggagaacgcttaccactttgtggttcatgactggggtg

SEQ ID NO: 3504 - DNA, 1475 bp, Vibrio ezurae
  source 1..1475: mol_type = unassigned DNA
attgaacgctggcggcaggcctaacacatgcaagtcgagcggaaacgagttatctgaaccttcggggaacgataacggcgtcgagcggcggacgggtgagtaatgcctgggaaattgccctgatgtgggggataactattggaaacgatagctaataccgcataacgtctacggaccaaagagggggaccttcgggcctctcgcttcaggatatgcccaggtgggattagctagttggtgaggtaatggctcaccaaggcgacgatccctagctggtctgagaggatgatcagccacactggaactgagacacggtccagactcctacgggaggcagcagtggggaatattgcacaatgggcgcaagcctgatgcagccatgccgcgtgtatgaagaaggccttcgggttgtaaagtactttcagtcgtgaggaaggcagtatagttaatagctgtattgtttgacgttagcgacagaagaagcaccggctaactccgtgccagcagccgcggtaatacggagggtgcgagcgttaatcggaattactgggcgtaaagcgcatgcaggtggtttgttaagtcagatgtgaaagcccggggctcaacctcggaaccgcatttgaaactggcaggctagagtactgtagaggggggtagaatttcaggtgtagcggtgaaatgcgtagagatctgaaggaataccagtggcgaaggcggccccctggacagatactgacactcagatgcgaaagcgtggggagcaaacaggattagataccctggtagtccacgccgtaaacgatgtctacttggaggttgtggccttgagccgtggctttcggagctaacgcgttaagtagaccgcctggggagtacggtcgcaagattaaaactcaaatgaattgacgggggcccgcacaagcggtggagcatgtggtttaattcgatgcaacgcgaagaaccttacctactcttgacatccagagaacttttcagagatgaattggtgccttcgggaactctgagacaggtgctgcatggctgtcgtcagctcgtgttgtgaaatgttgggttaagtcccgcaacgagcgcaacccttatccttgtttgccagcgagtaatgtcgggaactccagggagactgccggtgataaaccggaggaaggtggggacgacgtcaagtcatcatggcccttacgagtagggctacacacgtgctacaatggcgcatacagagggcggccaaccagcgatggtgagcgaatcccaaaaagtgcgtcgtagtccggattggagtctgcaactcgactccatgaagtcggaatcgctagtaatcgtagatcagaatgctacggtgaatacgttcccgggccttgtacacaccgcccgtcacaccatgggagtgggctgcaaaagaagtgggtagtttaaccttcgggaggacgctcaccactttgtggttcatgactggggtg

SEQ ID NO: 3505 - DNA, 1475 bp, Vibrio fluvialis
  source 1..1475: mol_type = unassigned DNA
attgaacgctggcggcaggcctaacacatgcaagtcgagcggcagcgacaacattgaaccttcgggggatttgttgggcggcgagcggcggacgggtgagtaatgcctgggaaattgccctgatgtgggggataaccattggaaacgatggctaataccgcatgatagcttcggctcaaagagggggaccttcgggcctctcgcgtcaggatatgcccaggtgggattagctagttggtgaggtaagggctcaccaaggcgacgatccctagctggtctgagaggatgatcagccacactggaactgagacacggtccagactcctacgggaggcagcagtggggaatattgcacaatgggcgcaagcctgatgcagccatgccgcgtgtatgaagaaggccttcgggttgtaaagtactttcagcagtgaggaaggaggtatcgttaatagcggtatcttttgacgttagctgcagaagaagcaccggctaactccgtgccagcagccgcggtaatacggagggtgcgagcgttaatcggaattactgggcgtaaagcgcatgcaggtggtttgttaagtcagatgtgaaagcccggggctcaacctcggaattgcatttgaaactggcaggctagagtactgtagaggggggtagaatttcaggtgtagcggtgaaatgcgtagagatctgaaggaataccggtggcgaaggcggccccctggacagatactgacactcagatgcgaaagcgtggggagcaaacaggattagataccctggtagtccacgccgtaaacgatgtctacttggaggttgtggccttgagccgtggctttcggagctaacgcgttaagtagaccgcctggggagtacggtcgcaagattaaaactcaaatgaattgacgggggcccgcacaagcggtggagcatgtggtttaattcgatgcaacgcgaagaaccttacctactcttgacatccagagaacttagcagagatgctttggtgccttcgggaactctgagacaggtgctgcatggctgtcgtcagctcgtgttgtgaaatgttgggttaagtcccgcaacgagcgcaacccttatccttgtttgccagcgagtaatgtcgggaactccagggagactgccggtgataaaccggaggaaggtggggacgacgtcaagtcatcatggcccttacgagtagggctacacacgtgctacaatggcgcatacagagggcggccaacttgcgaaagtgagcgaatcccaaaaagtgcgtcgtagtccggattggagtctgcaactcgactccatgaagtcggaatcgctagtaatcgtgaatcagaatgtcacggtgaatacgttcccgggccttgtacacaccgcccgtcacaccatgggagtgggctgcaaaagaagcaggtagtttaaccttcgggaggacgcttgccactttgtggttcatgactggggtg

SEQ ID NO: 3506 - DNA, 1475 bp, Vibrio fortis
  source 1..1475: mol_type = unassigned DNA
attgaacgctggcggcaggcctaacacatgcaagtcgagcggaaacgagttatctgaaccttcggggaacgataacggcgtcgagcggcggacgggtgagtaatgcctaggaaattgccttgatgtgggggataaccattggaaacgatggctaataccgcatraygcctacgggccaaagagggggaccttcgggcctctcgcgtcaagatatgcctaggtgggattagctagttggtgaggtaatggctcaccaaggcgacgatccctagctggtctgagaggatgatcagccacactggaactgagacacggtccagactcctacgggaggcagcagtggggaatattgcacaatgggcgcaagcctgatgcagccatgccgcgtgtatgaagaaggccttcgggttgtaaagtactttcagcagtgaggaagggggtgtcgttaatagcggcatctcttgacgttagctgcagaagaagcaccggctaactccgtgccagcagccgcggtaatacggagggtgcgagcgttaatcggaattactgggcgtaaagcgcatgcaggtggtttgttaagtcagatgtgaaagcccggggctcaacctcggaactgcatttgaaactggcaaactagagtactgtagaggggggtagaatttcaggtgtagcggtgaaatgcgtagagatctgaaggaataccagtggcgaaggcggccccctggacagatactgacactcagatgcgaaagcgtggggagcaaacaggattagataccctggtagtccacgccgtaaacgatgtctacttggaggttgtggccttgagccgtggctttcggagctaacgcgttaagtagaccgcctggggagtacggtcgcaagattaaaactcaaatgaattgacgggggcccgcacaagcggtggagcatgtggtttaattcgatgcaacgcgaagaaccttacctactcttgacatccagagaacttascagagatgswttggtgccttcgggaactctgagacaggtgctgcatggctgtcgtcagctcgtgttgtgaaatgttgggttaagtcccgcaacgagcgcaacccttatccttgtttgccagcgagtaatgtcgggaactccagggagactgccggtgataaaccggaggaaggtggggacgacgtcaagtcatcatggcccttacgagtagggctacacacgtgctacaatggcgcatacagagggcggccaactcgcgagagtgagcgaatcccaaaaagtgcgtcgtagtccggattggagtctgcaactcgactccatgaagtcggaatcgctagtaatcgtagatcagaatgctacggtgaatacgttcccgggccttgtacacaccgcccgtcacaccatgggagtgggctgcaaaagaagtgggtagtttaaccttcgggaggacgctcaccactttgtggttcatgactggggtg

SEQ ID NO: 3507 - DNA, 1475 bp, Vibrio furnissii
  source 1..1475: mol_type = unassigned DNA
attgaacgctggcggcaggcctaacacatgcaagtcgagcggcagcgacaacattgaaccttcgggggatttgttgggcggcgagcggcggacgggtgagtaatgcctgggaaattgccctgatgtgggggataaccattggaaacgatggctaataccgcatgatagcttcggctcaaagagggggaccttcgggcctctcgcgtcaggatatgcccaggtgggattagctagttggtgaggtaagggctcaccaaggcgacgatccctagctggtctgagaggatgatcagccacactggaactgagacacggtccagactcctacgggaggcagcagtggggaatattgcacaatgggcgcaagcctgatgcagccatgccgcgtgtatgaagaaggccttcgggttgtaaagtactttcagcagtgaggaaggggatatcgttaatagcggtattctttgacgttagctgcagaagaagcaccggctaactccgtgccagcagccgcggtaatacggagggtgcgagcgttaatcggaattactgggcgtaaagcgcatgcaggtggtttgttaagtcagatgtgaaagcccggggctcaacctcggaattgcatttgaaactggcaggctagagtactgtagaggggggtagaatttcaggtgtagcggtgaaatgcgtagagatctgaaggaataccggtggcgaaggcggccccctggacagatactgacactcagatgcgaaagcgtggggagcaaacaggattagataccctggtagtccacgccgtaaacgatgtctacttggaggttgtggccttgagccgtggctttcggagctaacgcgttaagtagaccgcctggggagtacggtcgcaagattaaaactcaaatgaattgacgggggcccgcacaagcggtggagcatgtggtttaattcgatgcaacgcgaagaaccttacctactcttgacatccagagaacttagcagagatgctttggtgccttcgggaactctgagacaggtgctgcatggctgtcgtcagctcgtgttgtgaaatgttgggttaagtcccgcaacgagcgcaacccttatccttgtttgccagcgagtaatgtcgggaactccagggagactgccggtgataaaccggaggaaggtggggacgacgtcaagtcatcatggcccttacgagtagggctacacacgtgctacaatggcgcatacagagggcggccaacttgcgaaagtgagcgaatcccaaaaagtgcgtcgtagtccggattggagtctgcaactcgactccatgaagtcggaatcgctagtaatcgtggatcagaatgccacggtgaatacgttcccgggccttgtacacaccgcccgtcacaccatgggagtgggctgcaaaagaagcaggtagtttaaccttcgggaggacgcttgccactttgtggttcatgactggggtg

SEQ ID NO: 3508 - DNA, 1476 bp, unidentified
  source 1..1476: mol_type = unassigned DNA; note = Vibrio galatheae
attgaacgctggcggcaggcctaacacatgcaagtcgagcggaaacgagttaactgaaccttcggggaacgttaacggcgtcgagcggcggacgggtgagtaatgcctgggaaattgccctgatgtgggggataaccattggaaacgatggctaataccgcataatagcttcggctcaaagagggggaccttcgggcctctcgcgtcaggatatgcccaggtgggattagctagttggtgaggtaagggctcaccaaggcgacgatccctagctggtctgagaggatgatcagccacactggaactgagacacggtccagactcctacgggaggcagcagtggggaatattgcacaatgggcgcaagcctgatgcagccatgccgcgtgtatgaagaaggccttcgggttgtaaagtactttcagcagtgaggaaggttcatgcgttaatagcgtatggatttgacgttagctgcagaagaagcaccggctaactccgtgccagcagccgcggtaatacggagggtgcgagcgttaatcggaattactgggcgtaaagcgcatgcaggtggtttgttaagtcagatgtgaaagcccggggctcaacctcggaattgcatttgaaactggcagactagagtactgtagaggggggtagaatttcaggtgtagcggtgaaatgcgtagagatctgaaggaataccggtggcgaaggcggccccctggacagatactgacactcagatgcgaaagcgtggggagcaaacaggattagataccctggtagtccacgccgtaaacgatgtctacttggaggttgtggccttgagccgtggctttcggagctaacgcgttaagtagaccgcctggggagtacggtcgcaagattaaaactcaaatgaattgacgggggcccgcacaagcggtggagcatgtggtttaattcgatgcaacgcgaagaaccttacctactcttgacatctacagaacttagcagagatgctttggtgccttcgggaactgtaagacaggtgctgcatggctgtcgtcagctcgtgttgtgaaatgttgggttaagtcccgcaacgagcgcaacccttatccttgtttgccagcacttcgggtgggaactccagggagactgccggtgataaaccggaggaaggtggggacgacgtcaagtcatcatggcccttacgagtagggctacacacgtgctacaatggcgcatacagagggcggccaacttgcgagagtgagcgaatcccaaaaagtgcgtcgtagtccggatcggagtctgcaactcgactccgtgaagtcggaatcgctagtaatcgtggatcagaatgccacggtgaatacgttcccgggccttgtacacaccgcccgtcacaccatgggagtgggctgcaaaagaagtgggtagtttaacctttcggggaggacgctcaccactttgtggttcatgactggggtg

SEQ ID NO: 3509 - DNA, 1402 bp, Vibrio gazogenes
  source 1..1402: mol_type = unassigned DNA
  misc_difference 237: note = n is a, c, g, or t
  misc_difference 903: note = n is a, c, g, or t
  misc_difference 1376: note = n is a, c, g, or t
attgaacgctggcggcaggcctaacacatgcaagtcgagcggtaacagaaagaagcttgcttctttgctgacgagcggcggacgggtgagtaaagcctgggaaattgccctgatgtgggggataaccattggaaacgatggctaataccgcataacgtctacggaccaaagagggggaccttcgggcctctcgcgtcgggatatgcccaggtgggattagctagttggtgaggtaanggctcaccaaggcgacgatctctagctggtctgagaggatgatcagccacactggaactgagacacggtccagactcctacgggaggcagcagtggggaatattgcacaatgggcgcaagcctgatgcagccatgccgcgtgtatgaagaaggccttcgggttgtaaagtactttcagcagtgaggaaggatatagctttaatagagttatattttgacgttagctgcagaagaagcaccggctaactccgtgccagcagccgcggtaatacggagggtgcgagcgttaatcggaattactgggcgtaaagcgcatgcaggtggttttttaagtcagatgtgaaagcccggggcttaaccccggagttgcatttgaaactgggaggctagagtactgtagaggggggtagaatttcaggtgtagcggtgaaatgcgtagagatctgaaggaataccggtggcgaaggcggccccctggacagatactgacactcagatgcgaaagcgtggggagcaaacaggattagataccctggtagtccacgccgtaaacgatgtctacttggaggttgtggccttgagccgtggctttcggagctaacgcgttaagtagaccgcctggggagtacggtcgcaagattaaaactcaaatgaattgacgggggnccgcacaagcggtggagcatgtggtttaattcgatgcaacgcgaagaaccttacctactcttgacatcctcagaagagactggagacagtcttgtgccttcgggaactgagagacaggtgctgcatggctgtcgtcagctcgtgttgtgaaatgttgggttaagtcccgcaacgagcgcaacccttatccttgattgccagcacttcgggtgggaactccagggagactgccggtgataaaccggaggaaggtggggacgacgtcaagtcatcatggcccttacgagtagggctacacacgtgctacaatggcgtatacagagggcggccaacttgcgaaagtgagcgaatcccaaaaagtacgtcgtagtccggattggagtctgcaactcgactccatgaagtcggaatcgctagtaatcgtggatcagaatgccacggtgaatacgttcccgggccttgtacacaccgcncgtcacaccatgggagtgggctgcaa

SEQ ID NO: 3510 - DNA, 1475 bp, Vibrio halioticoli
  source 1..1475: mol_type = unassigned DNA
attgaacgctggcggcaggcctaacacatgcaagtcgagcggaaacgagttatctgaaccttcggggaacgataacggcgtcgagcggcggacgggtgagtaatgcctgggaaattgccctgatgtgggggataactattggaaacgatagctaataccgcataatgtctacggaccaaagagggggaccttcgggcctctcgcttcaggatatgcccaggtgggattagctagttggtgaggtaatggctcaccaaggcgacgatccctagctggtctgagaggatgatcagccacactggaactgagacacggtccagactcctacgggaggcagcagtggggaatattgcacaatgggcgcaagcctgatgcagccatgccgcgtgtatgaagaaggccttcgggttgtaaagtactttcagtcgtgaggaaggcgttgaagttaatagcttcatcgtttgacgttagcgacagaagaagcaccggctaactccgtgccagcagccgcggtaatacggagggtgcgagcgttaatcggaattactgggcgtaaagcgcatgcaggtggtttgttaagtcagatgtgaaagcccggggctcaacctcggaaccgcatttgaaactggcaggctagagtactgtagaggggggtagaatttcaggtgtagcggtgaaatgcgtagagatctgaaggaataccagtggcgaaggcggccccctggacagatactgacactcagatgcgaaagcgtggggagcaaacaggattagataccctggtagtccacgccgtaaacgatgtctacttggaggttgtggccttgagccgtggctttcggagctaacgcgttaagtagaccgcctggggagtacggtcgcaagattaaaactcaaatgaattgacgggggcccgcacaagcggtggagcatgtggtttaattcgatgcaacgcgaagaaccttacctactcttgacatccagagaacttagcagagatgctttggtgccttcgggaactctgagacaggtgctgcatggctgtcgtcagctcgtgttgtgaaatgttgggttaagtcccgcaacgagcgcaacccttatccttgtttgccagcacgtaatggtgggaactccagggagactgccggtgataaaccggaggaaggtggggacgacgtcaagtcatcatggcccttacgagtagggctacacacgtgctacaatggcgcatacagagggcagccaaccagcgatggtgagcgaatcccaaaaagtgcgtcgtagtccggattggagtctgcaactcgactccatgaagtcggaatcgctagtaatcgtagatcagaatgctacggtgaatacgttcccgggccttgtacacaccgcccgtcacaccatgggagtgggctgcaaaagaagtgggtagtttaaccttcgggaggacgctcaccactttgtggttcatgactggggtg

SEQ ID NO: 3511 - DNA, 1475 bp, Vibrio hangzhouensis
  source 1..1475: mol_type = unassigned DNA
attgaacgctggcggcaggcctaacacatgcaagtcgagcggaaacgagttaactgacccttcgggtgacgttaacggcgtcgagcggcggacgggtgagtaatgcctgggaatatgccttgatgtgggggataaccattggaaacgatggctaataccgcataatctctacggagcaaagagggggaccttcgggcctctcgcgtcaagattagcccaggtgggattagctagttggtgaggtaaaggctcaccaaggcgacgatccctagctggtctgagaggatgatcagccacactggaactgagacacggtccagactcctacgggaggcagcagtggggaatattgcacaatgggcgcaagcctgatgcagccatgccgcgtgtgtgaagaaggccttcgggttgtaaagcactttcagtcgtgaggaaggtggtgtagttaatagctgcattatttgacgttagcgacagaagaagcaccggctaactccgtgccagcagccgcggtaatacggagggtgcgagcgttaatcggaattactgggcgtaaagcgcatgcaggtggttagttaagtcagatgtgaaagcccggggctcaacctcggaactgcatttgaaactggctgactagagtactgtagaggggggtagaatttcaggtgtagcggtgaaatgcgtagagatctgaaggaataccggtggcgaaggcggccccctggacagatactgacactcagatgcgaaagcgtggggagcaaacaggattagataccctggtagtccacgccgtaaacgatgtctacttggaggttgtggccttgagccgtggctttcggagctaacgcgttaagtagaccgcctggggagtacggtcgcaagattaaaactcaaatgaattgacgggggcccgcacaagcggtggagcatgtggtttaattcgatgcaacgcgaagaaccttacctactcttgacatccagagaacttagcagagatgctttggtgccttcgggaactctgagacaggtgctgcatggctgtcgtcagctcgtgttgtgaaatgttgggttaagtcccgcaacgagcgcaacccttatccttgtttgccagcgagtaatgtcgggaactccagggagactgccggtgataaaccggaggaaggtggggacgacgtcaagtcatcatggcccttacgagtagggctacacacgtgctacaatggcgcatacagagggctgccaacttgcgaaagtgagcgaatcccaaaaagtgcgtcgtagtccggattggagtctgcaactcgactccatgaagtcggaatcgctagtaatcgtggatcagaatgccacggtgaatacgttcccgggccttgtacacaccgcccgtcacaccatgggagtgggctgcaaaagaagtgggtagtttaaccttcgggaggacgctcaccactttgtggttcatgactggggtg

SEQ ID NO: 3512 - DNA, 1474 bp, Vibrio harveyi
  source 1..1474: mol_type = unassigned DNA
attgaacgctggcggcaggcctaacacatgcaagtcgagcggaaacgagttatctgaaccttcggggaacgataacggcgtcgagcggcggacgggtgagtaatgcctaggaaattgccctgatgtgggggataaccattggaaacgatggctaataccgcataataccttcgggtcaaagagggggaccttcgggcctctcgcgtcaggatatgcctaggtgggattagctagttggtgaggtaatggctcaccaaggcgacgatccctagctggtctgagaggatgatcagccacactggaactgagacacggtccagactcctacgggaggcagcagtggggaatattgcacaatgggcgcaagcctgatgcagccatgccgcgtgtgtgaagaaggccttcgggttgtaaagcactttcagtcgtgaggaaggtagtgtagttaatagctgcattatttgacgttagcgacagaagaagcaccggctaactccgtgccagcagccgcggtaatacggagggtgcgagcgttaatcggaattactgggcgtaaagcgcatgcaggtggtttgttaagtcagatgtgaaagcccggggctcaacctcggaatagcatttgaaactggcagactagagtactgtagaggggggtagaatttcaggtgtagcggtgaaatgcgtagagatctgaaggaataccggtggcgaaggcggccccctggacagatactgacactcagatgcgaaagcgtggggagcaaacaggattagataccctggtagtccacgccgtaaacgatgtctacttggaggttgtggccttgagccgtggctttcggagctaacgcgttaagtagaccgcctggggagtacggtcgcaagattaaaactcaaatgaattgacgggggcccgcacaagcggtggagcatgtggtttaattcgatgcaacgcgaagaaccttacctactcttgacatccagagaactttccagagatggattggtgccttcgggaactctgagacaggtgctgcatggctgtcgtcagctcgtgttgtgaaatgttgggttaagtcccgcaacgagcgcaacccttatccttgtttgccagcacttcgggtgggaactccagggagactgccggtgataaaccggaggaaggtggggacgacgtcaagtcatcatggcccttacgagtagggctacacacgtgctacaatggcgcatacagagggcggccaacttgcgagagtgagcgaatcccaaaaagtgcgtcgtagtccggatcggagtctgcaactcgactccgtgaagtcggaatcgctagtaatcgtggatcagaatgccacggtgaatacgttcccgggccttgtacacaccgcccgtcacaccatgggagtgggctgcaaaagaagtaggtagtttaaccttcgggaggacgcttaccactttgtggttcatgactggggtg

SEQ ID NO: 3513 - DNA, 1468 bp, Vibrio hepatarius
  source 1..1468: mol_type = unassigned DNA
attgaacgctggcggcaggcctaacacatgcaagtcgagcggaaacgacttaactgaaccttcggggaacgttaagggcgtcgagcggcggacgggtgagtaatgcctgggaaattgccctgatgtgggggataaccattggaaacgatggctaataccgcataatagcttcggctcaaagagggggaccttcgggcctctcgcgtcaggatatgcccaggtgggattagctagttggtgaggtaagggctcaccaaggcgacgatccctagctggtctgagaggatgatcagccacactggaactgagacacggtccagactcctacgggaggcagcagtggggaatattgcacaatgggcgcaagcctgatgcagccatgccgcgtgtatgaagaaggccttcgggttgtaaagtactttcagcagtgaggaaggtksatgcgttaatagcgtattcatttgacgttagctgcagaagaagcaccggctaactccgtgccagcagccgcggtaatacggagggtgcgagcgttaatcggaattactgggcgtaaagcgcatgcaggtggtttgttaagtcagatgtgaaagcccggggctcaacctcggaattgcatttgaaactggcagactagagtactgtagaggggggtagaatttcaggtgtagcggtgaaatgcgtagagatctgaaggaataccggtggcgaaggcggccccctggacagatactgacactcagatgcgaaagcgtggggagcaaacaggattagataccctggtagtccacgccgtaaacgatgtctacttggaggttgtggccttgagccgtggctttcggagctaacgcgttaagtagaccgcctggggagtacggtcgcaagattaaaactcaaatgaattgacgggggcccgcacaagcggtggagcatgtggtttaattcgatgcaacgcgaagaaccttacctactcttgacatccagagaactttccagagatggattggtgccttcgggaactctgagacaggtgctgcatggctgtcgtcagctcgtgttgtgaaatgttgggttaagtcccgcaacgagcgcaacccttatccttgtttgccagcgagtaatgtcgggaactccagggagactgccggtgataaaccggaggaaggtggggacgacgtcaagtcatcatggcccttacgagtagggctacacacgtgctacaatggcgcatacagagggcggccaacttgcgaaagtgagcgaatcccaaaaagtgcgtcgtagtccggattggagtctgcaactcgactccatgaagtcggaatcgctagtaatcgtggatcagaatgccacggtgaatacgttcccgggccttgtacacaccgcccgtcacaccatgggagtgggctgcaaaagaagtaggtagtttaaccttcgggagaacgcttaccactttgtggttcatgac

SEQ ID NO: 3514 - DNA, 1365 bp, Vibrio ichthyoenteri
  source 1..1365: mol_type = unassigned DNA
attgaacgctggcggcaggcctaacacatgcaagtcgagcggtaacatttcaaaagcttgcttttgaagatgacgagcggcggacgggtgagtaatgcctgggaatatgccttgatgtgggggataaccattggaaacgatggctaataccgcataatgcctacgggccaaagagggggatcttcggacctctcgcgtcaagattagcccaggtgggattagctagttggtgaggtaatggctcaccaaggcgacgatccctagctggtctgagaggatgatcagccacactggaactgagacacggtccagactcctacgggaggcagcagtggggaatattgcacaatgggcgcaagcctgatgcagccatgccgcgtgtgtgaagaaggccttcgggttgtaaagcactttcagtcgtgaggaaggtattagcgttaatagcgttattgtttgacgttagcgacagaagaagcaccggctaactccgtgccagcagccgcggtaatacggagggtgcgagcgttaatcggaattactgggcgtaaagcgcatgcaggtggtttgttaagtcagatgtgaaagcccggggctcaacctcggaattgcatttgaaactggcagactagagtactgtagaggggggtagaatttcaggtgtagcggtgaaatgcgtagagatctgaaggaataccggtggcgaaggcggccccctggacagatactgacactcagatgcgaaagcgtggggagcaaacaggattagataccctggtagtccacgccgtaaacgatgtctacttggaggttgtggccttgagccgtggctttcggagctaacgcgttaagtagaccgcctggggagtacggtcgcaagattaaaactcaaatgaattgacgggggcccgcacaagcggtggagcatgtggtttaattcgatgcaacgcgaagaaccttacctactcttgacatccagagaagccagcggagacgcaggtgtgccttcgggaactctgagacaggtgctgcatggctgtcgtcagctcgtgttgtgaaatgttgggttaagtcccgcaacgagcgcaacccttatccttgtttgccagcgagtaatgtcgggaactccagggagactgccggtgataaaccggaggaaggtggggacgacgtcaagtcatcatggcccttacgagtagggctacacacgtgctacaatggcgcatacagagggctgccaaccagcgatggtgagcgaatcccaaaaagtgcgtcgtagtccggattggagtctgcaactcgactccatgaagtcggaatcgctagtaatcgtggatcagaatgccacggtgaatacgttcccgggcc

SEQ ID NO: 3515 - DNA, 1433 bp, Vibrio inusitatus
  source 1..1433: mol_type = unassigned DNA
ctamcacatgcaagtcgagcggaaacgacaacattgacccttcgggtgatttattgggcgtcgagcggcggacgggtgagtaatgcctgggaaattgccctgatgtgggggataactattggaaacgatagctaataccgcataacgtctacggaccaaagagggggaccttcgggcctctcgcttcaggatatgcccaggtgggattagctagttggtgaggtaatggctcaccaaggcgacgatccctagctggtctgagaggatgatcagccacactggaactgagacacggtccagactcctacgggaggcagcagtggggaatattgcacaatgggcgaaagcctgatgcagccatgccgcgtgtatgaagaaggccttcgggttgtaaagtactttcagtcgtgaggaagatatataagttaatagcttatgtgtttgacgttagcgacagaagaagcaccggctaactccgtgccagcagccgcggtaatacggagggtgcgagcgttaatcggaattactgggcgtaaagcgcatgcaggtggtttgttaagtcagatgtgaaagcccggggctcaacctcggaaccgcatttgaaactggcaggctagagtactgtagaggggggtagaatttcaggtgtagcggtgaaatgcgtagagatctgaaggaataccagtggcgaaggcggccccctggacagatactgacactcagatgcgaaagcgtggggagcaaacaggattagataccctggtagtccacgccgtaaacgatgtctacttggaggttgtggccttgagccgtggctttcggagctaacgcgttaagtagaccgcctggggagtacggtcgcaagattaaaactcaaatgaattgacgggggcccgcacaagcggtggagcatgtggtttaattcgatgcaacgcgaagaaccttacctactcttgacatccagagaacttwccagagatggwttggtgccttcgggaactctgagacaggtgctgcatggctgtcgtcagctcgtgttgtgaaatgttgggttaagtcccgcaacgagcgcaacccttatccttgtttgccagcacgtaatggtgggaactccagggagactgccggtgataaaccggaggaaggtggggacgacgtcaagtcatcatggcccttacgagtagggctacacacgtgctacaatggcgcatacagagggcrgccaaccagcgatggtgagcgaatcccaaaaagtgcgtcgtagtccggattggagtctgcaactcgactccatgaagtcggaatcgctagtaatcgtgaatcagaatgtcacggtgaatacgttcccgggccttgtacacaccgcccgtcacaccatgggagtgggctgcaaaagaagtgggtagtttaaccttcgggaggacgctcaccac

SEQ ID NO: 3516 - DNA, 1471 bp, unidentified
  source 1..1471: mol_type = unassigned DNA; note = Vibrio ishigakensis
attgaacgctggcggcaggcctaacacatgcaagtcgagcggaaacgacttaactgaaccttcggggaacgttaagggcgtcgagcggcggacgggtgagtaatgcctgggaatatgccttgatgtgggggataaccattggaaacgatggctaataccgcataatctcttcggagcaaagagggggaccttcgggcctctcgcgtcaagattagcccaggtgggattagctagttggtgaggtaatggctcaccaagcgacgatccctagctggtctgagaggatgatcagcacactggaactgagacacggtccagactcctacgggaggcagcagtggggaatattgcacaatgggcgcaagcctgatgcagccatgccgcgtgtgtgaagaaggccttcgggttgtaaagcactttcagtcgtgaggaaggtagtgtagttaatagctgcattatttgacgttagcgacagaagaagcaccggctaactccgtgccagcagccgcggtaatacggagggtgcgagcgttaatcggaattactgggcgtaaagcgcatgcaggtggtttgttaagtcagatgtgaaagcccggggctcaacctcggaaccgcatttgaaactggcaggctagagtactgtagagggggtagaatttcaggtgtagcggtgaaatgcgtagagatctgaaggaataccggtggcgaaggcggccccctggacagatactgacactcagatgcgaaagcgtggggagcaaacaggattagataccctggtagtccacgccgtaaacgatgtctacttggaggttgtggccttgagccgtggctttcggagctaacgcgttaagtagaccgcctggggagtacggtcgcaagattaaaactcaaatgaattgacgggggcccgcacaagcggtggagcatgtggtttaattcgatgcaacgcgaagaaccttacctactcttgacatccagagaacttttcagagatggattggtgccttcgggaactctgagacaggtgctgcatggctgtcgtcagctcgtgttgtgaaatgttgggttaagtcccgcaacgagcgcaacccttatccttgtttgccagcacgtaatggtgggaactccagggagactgccggtgataaaccggaggaaggtggggacgacgtcaagtcatcatggcccttacgagtagggctacacacgtgctacaatggcgcatacagagggcggccaactcgcgagagtgagcgaatcccaaaaagtgcgtcgtagtccggattggagtctgcaactcgactccatgaagtcggaatcgctagtaatcgtagatcagaatgctacggtgaatacgttccgggccttgtacacaccgcccgtcacaccatgggagtgggctgcaaaagaagtgggtagtttaaccttcgggaggacgctcaccactttgtggttcatgactggggtg

SEQ ID NO: 3517 - DNA, 1400 bp, unidentified
  source 1..1400: mol_type = unassigned DNA; note = Vibrio jasicida
tgcaagtcgagcggaaacgacttatctgaaccttcggggaacgttaagggcgtcgagcggcggacgggtgagtaatgcctaggaaattgccctgatgtgggggataaccattggaaacgatggctaataccgcatgatgcctacgggccaaagagggggaccttcgggcctctcgcgtcaggatatgcctaggtgggattagctagttggtgaggtaatggctcaccaaggcgacgatccctagctggtctgagaggatgatcagccacactggaactgagacacggtccagactcctacgggaggcagcagtggggaatattgcacaatgggcgcaagcctgatgcagccatgccgcgtgtgtgaagaaggccttcgggttgtaaagcactttcagtcgtgaggaaggtggtgtagttaatagctgcattacttgacgttagcgacagaagaagcaccggctaactccgtgccagcagccgcggtaatacggagggtgcgagcgttaatcggaattactgggcgtaaagcgcatgcaggtggtttgttaagtcagatgtgaaagcccggggctcaacctcggaatagcatttgaaactggcagactagagtactgtagaggggggtagaatttcaggtgtagcggtgaaatgcgtagagatctgaaggaataccggtggcgaaggcggccccctggacagatactgacactcagatgcgaaagcgtggggagcaaacaggattagataccctggtagtccacgccgtaaacgatgtctacttggaggttgtggccttgagccgtggctttcggagctaacgcgttaagtagaccgcctggggagtacggtcgcaagattaaaactcaaatgaattgacgggggcccgcacaagcggtggagcatgtggtttaattcgatgcaacgcgaagaaccttacctactcttgacatccagagaactttccagagatggattggtgccttcgggaactctgagacaggtgctgcatggctgtcgtcagctcgtgttgtgaaatgttgggttaagtcccgcaacgagcgcaacccttatccttgtttgccagcgagtaatgtcgggaactccagggagactgccggtgataaaccggaggaaggtggggacgacgtcaagtcatcatggcccttacgagtagggctacacacgtgctacaatggcgcatacagagggcagcaagctagcgatagtgagcgaatcccaaaaagtgcgtcgtagtccggattggagtctgcaactcgactccatgaagtcggaatcgctagtaatcgtggatcagaatgccacggtgaatacgttcccgggccttgtacacaccgcccgtcacaccatgggagtgggctgcaaaagaagtaggtagtt

SEQ ID NO: 3518 - DNA, 1464 bp, Vibrio kanaloae
  source 1..1464: mol_type = unassigned DNA
gcggcaggcctaacacatgcaagtcgagcggaaacgacactaacaatccttcgggtgcgttaatgggcgtcgagcggcggacgggtgagtaatgcctaggaaattgccttgatgtgggggataaccattggaaacgatggctaataccgcatratgcctacgggccaaagagggggaccttcgggcctctcgcgtcaagatatgcctaggtgggattagctagttggtgaggtaatggctcaccaaggcgacgatccctagctggtctgagaggatgatcagccacactggaactgagacacggtccagactcctacgggaggcagcagtggggaatattgcacaatgggcgcaagcctgatgcagccatgccgcgtgtatgaagaaggccttcgggttgtaaagtactttcagttgtgaggaagggggtgttgttaatagcwrcatmtcttgacgttagcaacagaagaagcaccggctaactccgtgccagcagccgcggtaatacggagggtgcgagcgttaatcggaattactgggcgtaaagcgcatgcaggtggttcattaagtcagatgtgaaagcccggggctcaacctcggaactgcatttgaaactggtgaactagagtrctgtagaggggggtagaatttcaggtgtagcggtgaaatgcgtagagatctgaaggaataccagtggcgaaggcggccccctggacagatactgacactcagatgcgaaagcgtggggagcaaacaggattagataccctggtagtccacgccgtaaacgatgtctacttggaggttgtggccttgagccgtggctttcggagctaacgcgttaagtagaccgcctggggagtacggtcgcaagattaaaactcaaatgaattgacgggggcccgcacaagcggtggagcatgtggtttaattcgatgcaacgcgaagaaccttacctactcttgacatccagagaatccagcggagacgcaggagtgccttcgggagctctgagacaggtgctgcatggctgtcgtcagctcgtgttgtgaaatgttgggttaagtcccgcaacgagcgcaacccttatccttgtttgccagcgagtcatgtcgggaactccagggagactgccggtgataaaccggaggaaggtggggacgacgtcaagtcatcatggcccttacgagtagggctacacacgtgctacaatggcgcatacagagggcagcgagccagcgatggtaagcgaatcccaaaaagtgcgtcgtagtccggattggagtctgcaactcgactccatgaagtcggaatcgctagtaatcgtgaatcagaatgtcacggtgaatacgttcccgggccttgtacacaccgcccgtcacaccatgggagtgggctgcaaaagaagtaggtagtctaaccttcgggaggacgcttaccactttgtggttcatgactggggtg

SEQ ID NO: 3519 - DNA, 1477 bp, Vibrio lentus
  source 1..1477: mol_type = unassigned DNA
attgaacgctggcggcaggcctaacacatgcaagtcgagcggaaacgacactatctgaatcttcggatgctttagatgggcgtcgagcggcggacgggtgagtaatgcctaggaaattgccttgatgtgggggataaccattggaaacgatggctaataccgcataatgcctacgggccaaagagggggatcttcggacctctcgcgtcaagatatgcctaggtgggattagctagttggtgaggtaatggctcaccaaggcgacgatccctagctggtctgagaggatgatcagccacactggaactgagacacggtccagactcctacgggaggcagcagtggggaatattgcacaatgggcgaaagcctgatgcagccatgccgcgtgtatgaagaaggccttcgggttgtaaagtactttcagttgtgaggaagggtgtgtagttaatatctgcgcatcttgacgttagcaacagaagaagcaccggctaactccgtgccagcagccgcggtaatacggagggtgcgagcgttaatcggaattactgggcgtaaagcgcatgcaggtggttcattaagtcagatgtgaaagcccggggctcaacctcggaactgcatttgaaactggtgaactagagtgctgtagaggggggtagaatttcaggtgtagcggtgaaatgcgtagagatctgaaggaataccagtggcgaaggcggccccctggacagacactgacactcagatgcgaaagcgtggggagcaaacaggattagataccctggtagtccacgccgtaaacgatgtctacttggaggttgtggccttgagccgtggctttcggagctaacgcgttaagtagaccgcctggggagtacggtcgcaagattaaaactcaaatgaattgacgggggcccgcacaagcggtggagcatgtggtttaattcgatgcaacgcgaagaaccttacctactcttgacatccagagaagccagcggagacgcaggtgtgccttcgggagctctgagacaggtgctgcatggctgtcgtcagctcgtgttgtgaaatgttgggttaagtcccgcaacgagcgcaacccttatccttgtttgccagcgagtaatgtcgggaactccagggagactgccggtgataaaccggaggaaggtggggacgacgtcaagtcatcatggcccttacgagtagggctacacacgtgctacaatggcgcatacagagggcagcaagctagcgatagtgagcgaatcccaaaaagtgcgtcgtagtccggattggagtctgcaactcgactccatgaagtcggaatcgctagtaatcgtgaatcagaatgtcacggtgaatacgttcccgggccttgtacacaccgcccgtcacaccatgggagtgggctgcaaaagaagtgggtagtttaaccttcgggaggacgctcaccactttgtggttcatgactggggtg

SEQ ID NO: 3520 - DNA, 1464 bp, Vibrio mangrovi
  source 1..1464: mol_type = unassigned DNA
attgaacgctggcggcaggcctaacacatgcaagtcgagcggaaacgagagaaagcttgctttctcggcgtcgagcggcggacgggtgagtaaagcctgggaaattgccctgatgtgggggataaccattggaaacgatggctaataccgcataatgtctacggaccaaagagggggaccttcgggcctctcgcgtcaggatatgcccaggtgggattagctagttggtgaggtaaaggctcaccaaggcgacgatccctagctggtctgagaggatgatcagccacactggaactgagacacggtccagactcctacgggaggcagcagtggggaatattgcacaatgggcgcaagcctgatgcagccatgccgcgtgtatgaagaaggccttcgggttgtaaagtactttcagcagtgaggaaggggatagttttaatagagctgttctttgacgttagctgcagaagaagcaccggctaactccgtgccagcagccgcggtaatacggagggtgcgagcgttaatcggaattactgggcgtaaagcgcatgcaggtggtctgttaagtcagatgtgaaagcccggggcttaacctcggagttgcatttgaaactggcaggctagagtactgtagaggggggtagaatttcaggtgtagcggtgaaatgcgtagagatctgaaggaataccggtggcgaaggcggccccctggacagatactgacactcagatgcgaaagcgtggggagcaaacaggattagataccctggtagtccacgccgtaaacgatgtctacttggaggttgtgacccagagtcgtggctttcggagctaacgcgttaagtagaccgcctggggagtacggtcgcaagattaaaactcaaatgaattgacgggggcccgcacaagcggtggagcatgtggtttaattcgatgcaacgcgaagaaccttacctactcttgacatccagagaagccggaagagattctggtgtgccttcgggagctctgagacaggtgctgcatggctgtcgtcagctcgtgttgtgaaatgttgggttaagtcccgcaacgagcgcaacccttatccttgattgccagcggttaggccgggaacttcagggagactgccggtgataaaccggaggaaggtggggacgacgtcaagtcatcatggcccttacgagtagggctacacacgtgctacaatggcgtatacagagggcagctaactcgcgagagcatgcgaatcccaaaaagtacgtcgtagtccggattggagtctgcaactcgactccatgaagtcggaatcgctagtaatcgtagatcagaatgctacggtgaatacgttcccgggccttgtacacaccgcccgtcacaccatgggagtgggctgcaaaagaagcaggtagtttaaccttcgggaggacgcttgccactttgtggttcatgactggggtg

SEQ ID NO: 3521 - DNA, 1474 bp, Vibrio maritimus
  source 1..1474: mol_type = unassigned DNA
attgaacgctggcggcaggcctaacacatgcaagtcgagcggaaacgagttaactgaaccttcggggaacgttaacggcgtcgagcggcggacgggtgagtaatgcctgggaaattgccctgatgtgggggataaccattggaaacgatggctaataccgcataatrscttcggsycaaagagggggaccttcgggcctctcgcgtcaggatatgcccaggtgggattagctagttggtgaggtaatggctcaccaaggcgacgatccctagctggtctgagaggatgatcagccacactggaactgagacacggtccagactcctacgggaggcagcagtggggaatattgcacaatgggcgcaagcctgatgcagccatgccgcgtgtgtgaagaaggccttcgggttgtaaagcactttcagymgtgaggaaggtrgtgtmgttaatagckgcatyatttgacgttagckrcagaagaagcaccggctaactccgtgccagcagccgcggtaatacggagggtgcgagcgttaatcggaattactgggcgtaaagcgcatgcaggtggttagttaagtcagatgtgaaagcccggggctcaacctcggaactgcatttgaaactggctgactagagtactgtagaggggggtagaatttcaggtgtagcggtgaaatgcgtagagatctgaaggaataccggtggcgaaggcggccccctggacagatactgacactcagatgcgaaagcgtggggagcaaacaggattagataccctggtagtccacgccgtaaacgatgtctacttggaggttgtggccttgagccgtggctttcggagctaacgcgttaagtagaccgcctggggagtacggtcgcaagattaaaactcaaatgaattgacgggggcccgcacaagcggtggagcatgtggtttaattcgatgcaacgcgaagaaccttacctactcttgacatccagagaacttagcagagatgctttggtgccttcgggaactctgagacaggtgctgcatggctgtcgtcagctcgtgttgtgaaatgttgggttaagtcccgcaacgagcgcaacccttatccttgtttgccagcacttcgggtgggaactccagggagactgccggtgataaaccggaggaaggtggggacgacgtcaagtcatcatggcccttacgagtagggctacacacgtgctacaatggcgcatacagagggcrgccaacttgcgaaagtgagcgaatcccaaaaagtgcgtcgtagtccggattggagtctgcaactcgactccatgaagtcggaatcgctagtaatcgtggatcagaatgccacggtgaatacgttcccgggccttgtacacaccgcccgtcacaccatgggagtgggctgcaaaagaagtgggtagtttaaccttcgggaggacgctcaccactttgtggttcatgactggggtg

SEQ ID NO: 3522 - DNA, 1443 bp, Vibrio mediterranei
  source 1..1443: mol_type = unassigned DNA
  misc_difference 460: note = n is a, c, g, or t
  misc_difference 913: note = n is a, c, g, or t
  misc_difference 1431: note = n is a, c, g, or t
attgaacgctggcggcaggcctaacacatgcaagtcgagcggaaacgagttaactgacccttcgggtaacgttaacggcgtcgagcggcggacgggtgagtaatgcctgggaaattgccctgatgtgggggataaccattggaaacgatggctaataccgcataatgccttcgggccaaagagggggaccttcgggcctctcgcgtcaggatatgcccaggtgggattagctagttggtgaggtaatggctcaccaaggcgacgatccctagctggtctgagaggatgatcagccacactggaactgagacacggtccagactcctacgggaggcagcagtggggaatattgcacaatgggcgcgagcctgatgcagccatgccgcgtgtgtgaagaaggccttcgggttgtaaagcactttcagcagtgaggaaggcgggtacgttaatagcgtgctcntttgacgttagctgcagaagaagcaccggctaactccgtgccagcagccgcggtaatacggagggtgcgagcgttaatcggaattactgggcgtaaagcgcatgcaggtggttcgttaagtcagatgtgaaagcccggggctcaacctcggaactgcatttgaaactggcggactagagtactgtagaggggggtagaatttcaggtgtagcggtgaaatgcgtagagatctgaaggaataccggtggcgaaggcggccccctggacagatactgacactcagatgcgaaagcgtggggagcaaacaggattagataccctggtagtccacgccgtaaacgatgtctacttggaggttgtggccttgagccgtggctttcggagctaacgcgttaagtagaccgcctggggagtacggtcgcaagattaaaactcaaatgaattgacgggggnccgcacaagcggtggagcatgtggtttaattcgatgcaacgcgaagaaccttacctactcttgacatccagagaagccagcggagacgcaggtgtgccttcgggagctctgagacaggtgctgcatggctgtcgtcagctcgtgttgtgaaatgttgggttaagtcccgcaacgagcgcaacccttatccttgtttgccagcgagtaatgtcgggaactccagggagactgccggtgataaaccggaggaaggtggggacgacgtcaagtcatcatggcccttacgagtagggctacacacgtgctacaatggcgcatacagagggcagccaacttgcgaaagtgagcgaatcccaaaaagtgcgtcgtagtccggattggagtctgcaactcgactccatgaagtcggaatcgctagtaatcgtagatcagaatgctacggtgaatacgttcccgggccttgtacacaccgcccgtcacaccatgggagtgggctgcaaaagaagtgggtagtttanccttcgggagga

SEQ ID NO: 3523 - DNA, 1391 bp, unidentified
  source 1..1391: mol_type = unassigned DNA; note = Vibrio metoecus
attgaacgctggcggcaggcctaacacatgcaagtcgagcggcagcacagaggaacttgttccttgggtggcgagcggcggacgggtgagtaatgcctgggaaattgcccggtagagggggataaccattggaaacgatggctaataccgcataacctcgtaaagagcaaagcagggggacctttcgggccttgcgctaccgggatatgcccaggtagggattagctagttggtgaggtaagggctcaccaaggcgacgatccctagctggtctgagaggatgatcagccacactggaactgagacacggtccagactcctacgggaggcagcagtggggaatattgctcaatgggcgcaagcctgatgcagccatgccgcgtgtatgaagaaggccttcgggttgtaaagtactttcagtagggaggaaggtggttaagctaatatcttaatcatttgacgttacctacagaagaagcaccggctaactccgtgccagcagccgcggtaatacggagggtgcaagcgttaatcggaattactgggcgtaaagcgcatgcaggtggtttgttaagtcagatgtgaaagccctgggctcaacctaggaatcgcatttgaaactgacaagctagagtactgtagaggggggtaggaatttcaggtgtagcggtgaaatagcgtagagatctgaaggaataccggtggcgaaggcggccccctggacagatactgacactcagatgcgaaagcgtggggagcaaacaggattagataccctggtagtccacgccgtaaacgatgtctacttggaggttgtgacctagagtcgtggctttcggagctaacgcgttaagtagaccgcctggggagtacggtcgcaagaattaaaactcaaatgaattggaccgggggcccgcacaagcggtggagcatgtggtttaattcgatgcaacgcgaagaaccttacctactcttgacatccagagaatctagcggagacgctggagtgccttcgggaactctgagacaggtgctgcatggctgtcgtcagctcgtgttgtgaaatgttgggttaagtcccgcaacgagcgcaacccttatccttgtttgccagcacgtaatggtgggaactccagggagactgccggtgataaaccggaggaaggtggggacgacgtcaagtcatcatggcccttacgagtagggctacacacgtgctacaatggcgtatacagagggcagcgataccgcgaggtggagcgaatctcacaaagtacgtcgtagtccggattggagtctgcaactcgactccatgaagtcggaatcgctagtaatcgcaaatcagaatgttgcggtgaatacgttcccgggccttgtacacaccgcccgtc

SEQ ID NO: 3524 - DNA, 1482 bp, Vibrio metschnikovii
  source 1..1482: mol_type = unassigned DNA
attgaacgctggcggcaggcctaacacatgcaagtcgagcggtaacaggaaggaagcttgctttctttgctgacgagcggcggacgggtgagtaatgcctgggaaattgccctgatgtgggggataaccattggaaacgatggctaataccgcatgatgcccttgtttataatgaacagggaccaaagagggggaccttcgggcctctcgcgtcaggatatgcccaggtgggattagctagttggtgaggtaatggctcaccaaggcgacgatccctagctggtctgagaggatgatcagccacactggaactgagacacggtccagactcctacgggaggcagcagtggggaatattgcacaatgggcgcaagcctgatgcagccatgccgcgtgtatgaagaaggccttcgggttgtaaagtactttcagtcgtgaggaagggggtatcgttaatagcggtattctttgacgttagcgacagaagaagcaccggctaactccgtgccagcagccgcggtaatacggagggtgcgagcgttaatcggaattactgggcgtaaagcgcatgcaggtggtttgttaagtcagatgtgaaagcccggggctcaacctcggagttgcatttgaaactggcaggctagagtactgtagaggggggtagaatttcaggtgtagcggtgaaatgcgtagagatctgaaggaataccggtggcgaaggcggccccctggacagatactgacactcagatgcgaaagcgtggggagcaaacaggattagataccctggtagtccacgctgtaaacgatgtctacttggaggttgtggccttgagccgtggctttcggagctaacgcgttaagtagaccgcctggggagtacggtcgcaagattaaaactcaaatgaattgacgggggcccgcacaagcggtggagcatgtggtttaattcgatgcaacgcgaagaaccttacctactcttgacatctacaggatcctgcggagacgcgggagtgccttcgggaactgtaagacaggtgctgcatggctgtcgtcagctcgtgttgtgaaatgttgggttaagtcccgcaacgagcgcaacccttatccttgtttgccagcgagtaatgtcgggaactccagggagactgccggtgataaaccggaggaaggtggggacgacgtcaagtcatcatggcccttacgagtagggctacacacgtgctacaatggcgcatacagagggcggcgagctagcgatagtgagcgaatcccaaaaagtgcgtcgtagtccggattggagtctgcaactcgactccatgaagtcggaatcgctagtaatcgtggatcagaatgccacggtgaatacgttcccgggccttgtacacaccgcccgtcacaccatgggagtgggctgcaaaagaagcaggtagtttaaccttcgggaggacgcttgccactttgtggttcatgactggggtg

SEQ ID NO: 3525 - DNA, 1465 bp, Vibrio mimicus
  source 1..1465: mol_type = unassigned DNA
attgaacgctggcggcaggcctaacacatgcaagtcgagcggcagcacagaggaacttgttccttgggtggcgagcggcggacgggtgagtaatgcctgggaaattgcccggtagagggggataaccattggaaacgatggctaataccgcataacctcgtaagagcaaagcaggggaccttcgggccttgtgctaccggatatgcccaggtgggattagctagttggtgaggtaagggctcaccaaggcgacgatccctagctggtctgagaggatgatcagccacactggaactgagacacggtccagactcctacgggaggcagcagtggggaatattgcacaatgggcgcaagcctgatgcagccatgccgcgtgtatgaagaaggccttcgggttgtaaagtactttcagtagggaggaaggtggttaagttaataccttaatcatttgacgttacctacagaagaagcaccggctaactccgtgccagcagccgcggtaatacggagggtgcaagcgttaatcggaattactgggcgtaaagcgcatgcaggtggtttgttaagtcagatgtgaaagccctgggctcaacctaggaattgcatttgaaactgacaagctagagtactgtagaggggggtagaatttcaggtgtagcggtgaaatgcgtagagatctgaaggaataccggtggcgaaggcggccccctggacagatactgacactcagatgcgaaagcgtggggagcaaacaggattagataccctggtagtccacgccgtaaacgatgtctacttggaggttgtgacctagagtcgtggctttcggagctaacgcgttaagtagaccgcctggggagtacggtcgcaagattaaaactcaaatgaattgacgggggcccgcacaagcggtggagcatgtggtttaattcgatgcaacgcgaagaaccttacctactcttgacatccagagaatctagcggagacgctggagtgccttcgggaactctgagacaggtgctgcatggctgtcgtcagctcgtgttgtgaaatgttgggttaagtcccgcaacgagcgcaacccttatccttgtttgccagcacgtaatggtgggaactccagggagactgccggtgataaaccggaggaaggtggggacgacgtcaagtcatcatggcccttacgagtagggctacacacgtgctacaatggcgtatacagagggcagcgataccgcgaggtggagcgaatctcacaaagtacgtcgtagtccggattggagtctgcaactcgactccatgaagtcggaatcgctagtaatcgcaaatcagaatgttgcggtgaatacgttcccgggccttgtacacaccgcccgtcacaccatgggagtgggctgcaaaagaagcaggtagtttaaccttcgggaggacgcttgccactttgtggttcatgactggggtg

SEQ ID NO: 3526 - DNA, 1475 bp, Vibrio natriegens
  source 1..1475: mol_type = unassigned DNA
attgaacgctggcggcaggcctaacacatgcaagtcgagcggaaacgagttaactgaaccttcgggggacgttaacggcgtcgagcggcggacgggtgagtaatgcctaggaaattgccctgatgtgggggataaccattggaaacgatggctaataccgcatgatgcctacgggccaaagagggggaccttcgggcctctcgcgtcaggatatgcctaggtgggattagctagttggtgaggtaagggctcaccaaggcgacgatccctagctggtctgagaggatgatcagccacactggaactgagacacggtccagactcctacgggaggcagcagtggggaatattgcacaatgggcgcaagcctgatgcagccatgccgcgtgtgtgaagaaggccttcgggttgtaaagcactttcagtcgtgaggaaggtagtgtagttaatagctgcattatttgacgttagcgacagaagaagcaccggctaactccgtgccagcagccgcggtaatacggagggtgcgagcgttaatcggaattactgggcgtaaagcgcatgcaggtggtttgttaagtcagatgtgaaagcccggggctcaacctcggaatagcatttgaaactggcagactagagtactgtagaggggggtagaatttcaggtgtagcggtgaaatgcgtagagatctgaaggaataccggtggcgaaggcggccccctggacagatactgacactcagatgcgaaagcgtggggagcaaacaggattagataccctggtagtccacgccgtaaacgatgtctacttggaggttgtggccttgagccgtggctttcggagctaacgcgttaagtagaccgcctggggagtacggtcgcaagattaaaactcaaatgaattgacgggggcccgcacaagcggtggagcatgtggtttaattcgatgcaacgcgaagaaccttacctactcttgacatccagagaacttttcagagatgaattggtgccttcgggaactctgagacaggtgctgcatggctgtcgtcagctcgtgttgtgaaatgttgggttaagtcccgcaacgagcgcaacccttatccttgtttgccagcgagtaatgtcgggaactccagggagactgccggtgataaaccggaggaaggtggggacgacgtcaagtcatcatggcccttacgagtagggctacacacgtgctacaatggcgcatacagagggcggccaacttgcgaaagtgagcgaatcccaaaaagtgcgtcgtagtccggattggagtctgcaactcgactccatgaagtcggaatcgctagtaatcgtggatcagaatgccacggtgaatacgttcccgggccttgtacacaccgcccgtcacaccatgggagtgggctgcaaaagaagtaggtagtttaaccttcggggggacgcttaccactttgtggttcatgactggggtg

SEQ ID NO: 3527 - DNA, 1491 bp, Vibrio navarrensis
  source 1..1491: mol_type = unassigned DNA
attgaacgctggcggcaggcctaacacatgcaagtcgagcggcagcgacaacattgaaccttcgggggatttgttgggcggcgagcggcggacgggtgagtaatgcctgggaaattgccctgatgtgggggataaccattggaaacgatggctaataccgcatgatagcttcggctcaaagagggggaccttcgggcctctcgcgtcaggatatgcccaggtgggattagctagttggtgaggtaagggctcaccaaggcgacgatccctagctggtctgagaggatgatcagccacactggaactgagacacggtccagactcctacgggaggcagcagtggggaatattgcacaatgggcgcaagcctgatgcagccatgccgcgtgtgtgaagaaggccttcgggttgtaaagcactttcagttgtgaggaaggtggtgttgtgaatagcagcatcatttgacgttagcaacagaagaagcaccggctaactccgtgccagcagccgcggtaatacggagggtgcgagcgttaatcggaattactgggcgtaaagcgcatgcaggtggtttgttaagtcagatgtgaaagccccgggctcaacctgggaattgcatttgaaactggcaaactagagtactgtagaggggggtagaatttcaggtgtagcggtgaaatgcgtagagatctgaaggaataccggtggcgaaggcggccccctggacagatactgacactcagatgcgaaagcgtggggagcaaacaggattagataccctggtagtccacgccgtaaacgatgtctacttggaggttgtggccttgagccgtggctttcggagctaacgcgttaagtagaccgcctggggagtacggtcgcaagattaaaactcaaatgaattgacgggggcccgcacaagcggtggagcatgtggtttaattcgatgcaacgcgaagaaccttacctactcttgacatccagagaagccagcggagacgcaggtgtgccttcgggagctctgagacaggtgctgcatggctgtcgtcagctcgtgttgtgaaatgttgggttaagtcccgcaacgagcgcaacccttatccttagttgccagcgagtaatgtcgggaactccagggagactgccggtgataaaccggaggaaggtggggacgacgtcaagtcatcatggcccttacgagtagggctacacacgtgctacaatggcgcatacagagggcggccaacttgcgaaagtgagcgaatcccaaaaagtgcgtcgtagtccggattggagtctgcaactcgactccatgaagtcggaatcgctagtaatcgtggatcagaatgccacggtgaatacgttcccgggccttgtacacaccgcccgtcacaccatgggagtgggctgcaccagaagtggttagtttaaccccttttctttcgagattaggggaggacgatcaccacggtgtggttcatgactggggtg

SEQ ID NO: 3528 - DNA, 1416 bp, unidentified
  source 1..1416: mol_type = unassigned DNA; note = Vibrio neocaledonicus
  misc_difference 913: note = n is a, c, g, or t
atgcaagtcgagcggaaacgagttatctgaaccttcggggaacgataacggcgtcgagcggcggacgggtgagtaatgcctaggaaattgccctgatgtgggggataaccattggaaacgatggctaataccgcatgatgcctacgggccaaagagggggaccttcgggcctctcgcgtcaggatatgcctaggtgggattagctagttggtgaggtaagggctcaccaaggcgacgatccctagctggtctgagaggatgatcagccacactggaactgagacacggtccagactcctacgggaggcagcagtggggaatattgcacaatgggcgcaagcctgatgcagccatgccgcgtgtgtgaagaaggcccttcgggttgtaaagcactttcagtcgtgaggaaggtggtgtagttaatagctgcattatttgacgttagcgacagaagaagcaccggctaacctccgtgccagcagccgcggtaatacggagggtgcgagcgttaatcggaattactgggcgtaaagcgcatgcaggtggtttgttaagtcagatgtgaaagcccggggctcaacctcggaatagcatttgaaactggcagactagagtactgtagaggggggtagaatttcaggtgtagcggtgaaatgcgtagagatctgaaggaataccggtggcgaaggcggccccctggacagatactgacactcagatgcgaaagcgtggggagcaaacaggattagataccctggtagtccacgccgtaaacgatgtctacttggaggttgtggcttgagccgtggctttcggagctaacgcgttaagtagaccgcctggggagtacggtcgcaagattaaaactcaaatgaattgacgggggcccgcacaagcggtggagcatgtggtntaattcgatgcaacgcgaagaaccttacctactcttgacatccagagaactttccagagatggattggtgccttcgggaactctgagacaggtgctgcatggctgtcgtcagctcgtgttgtgaaatgttgggttaagtcccgcaacgagcgcaacccttatccttgtttgccagcgagtaatgtcgggaactccagggagactgccggtgataaaccggaggaaggtggggacgacgtcaagtcatcatggcccttacgagtagggctacacacgtgctacaatggcgcatacagagggcggccaacttgcgaaagtgagcgaatcccaaaaagtgcgtcgtagtccggattggagtctgcaactcgactccatgaagtcggaatcgctagtaatcgtggatcagaatgccacggtgaatacgttcccgggccttgtacacaccgcccgtcacaccatgggagtgggctgcaaaagaagtaggtagttaacttcgggggacg

SEQ ID NO: 3529 - DNA, 1468 bp, Vibrio neptunius
  source 1..1468: mol_type = unassigned DNA
attgaacgctggcggcaggcctaacacatgcaagtcgagcggaaacgagttatcaaagccttcgggtggagataacggcgtcgagcggcggacgggtgagtaatgcctgggaaattgccctgatgtgggggataaccattggaaacgatggctaataccgcataatagcttcggctcaaagagggggaccttcgggcctctcgcgtcaggatatgcccaggtgggattagctagttggtgaggtaatggctcaccaaggcgacgatccctagctggtctgagaggatgatcagccacactggaactgagacacggtccagactcctacgggaggcagcagtggggaatattgcacaatgggcgcaagcctgatgcagccatgccgcgtgtatgaagaaggccttcgggttgtaaagtactttcagcagtgaggaaggtggtgtcgttaatagcggcatcatttgacgttagctgcagaagaagcaccggctaactccgtgccagcagccgcggtaatacggagggtgcgagcgttaatcggaattactgggcgtaaagcgcatgcaggtggtttgttaagtcagatgtgaaagcccggggctcaacctcggaattgcatttgaaactggcagactagagtactgtagaggggggtagaatttcaggtgtagcggtgaaatgcgtagagatctgaaggaataccggtggcgaaggcggccccctggacagatactgacactcagatgcgaaagcgtggggagcaaacaggattagataccctggtagtccacgccgtaaacgatgtctacttggaggttgtggccttgagccgtggctttcggagctaacgcgttaagtagaccgcctggggagtacggtcgcaagattaaaactcaaatgaattgacgggggcccgcacaagcggtggagcatgtggtttaattcgatgcaacgcgaagaaccttacctactcttgacatcctcagaagagactggagacagtcttgtgccttcgggaactgagagacaggtgctgcatggctgtcgtcagctcgtgttgtgaaatgttgggttaagtcccgcaacgagcgcaacccttatccttgtttgccagcgagtaatgtcgggaactccagggagactgccggtgataaaccggaggaaggtggggacgacgtcaagtcatcatggcccttacgagtagggctacacacgtgctacaatggcgcatacagagggcrgccaacttgcgaaagtgagcgaatcccaaaaagtgcgtcgtagtccggattggagtctgcaactcgactccatgaagtcggaatcgctagtaatcgtggatcagaatgcyacggtgaatacgttcccgggccttgtacacaccgcccgtcacaccatgggagtgggctgcaaaagaagtgggtagtttaaccttcggggggacgctcaccactttgtggttcatgac

SEQ ID NO: 3530 - DNA, 1475 bp, Vibrio nereis
  source 1..1475: mol_type = unassigned DNA
attgaacgctggcggcaggcctaacacatgcaagtcgagcggaaacgagttatctgaaccttcggggaacgataacggcgtcgagcggcggacgggtgagtaatgcctgggaaattgccctgatgtgggggataaccattggaaacgatggctaataccgcataatagcttcggctcaaagagggggaccttcgggcctctcgcgtcaggatatgcccaggtgggattagctagttggtgaggtaaaggctcaccaaggcaacgatccctagctggtctgagaggatgatcagccacactggaactgagacacggtccagactcctacgggaggcagcagtggggaatattgcacaatgggcgcaagcctgatgcagccatgccgcgtgtatgaagaaggccttcgggttgtaaagtactttcagcagtgaggaagggggatgcgttaatagcgtattcgtttgacgttagctgcagaagaagcaccggctaactccgtgccagcagccgcggtaatacggagggtgcgagcgttaatcggaattactgggcgtaaagcgcatgcaggtggtgtgttaagtcagatgtgaaagcccggggctcaacctcggaatagcatttgaaactggcacactagagtactgtagaggggggtagaatttcaggtgtagcggtgaaatgcgtagagatctgaaggaataccagtggcgaaggcggccccctggacagatactgacactcagatgcgaaagcgtggggagcaaacaggattagataccctggtagtccacgccgtaaacgatgtctacttggaggttgtggccttgagccgtggctttcggagctaacgcgttaagtagaccgcctggggagtacggtcgcaagattaaaactcaaatgaattgacgggggcccgcacaagcggtggagcatgtggtttaattcgatgcaacgcgaagaaccttacctactcttgacatccagagaactttccagagatggattggtgccttcgggaactctgagacaggtgctgcatggctgtcgtcagctcgtgttgtgaaatgttgggttaagtcccgcaacgagcgcaacccttatccttgtttgccagcgagtaatgtcgggaactccagggagactgccggtgataaaccggaggaaggtggggacgacgtcaagtcatcatggcccttacgagtagggctacacacgtgctacaatggcgcatacagagggcggccaacttgcgaaagtgagcgaatcccaaaaagtgcgtcgtagtccggattggagtctgcaactcgactccatgaagtcggaatcgctagtaatcgtggatcagaatgccacggtgaatacgttcccgggccttgtacacaccgcccgtcacaccatgggagtgggctgcaaaagaagtaggtagtttaaccttcggggggacgcttaccactttgtggttcatgactggggtg

SEQ ID NO: 3531 - DNA, 1474 bp, Vibrio nigripulchritudo
  source 1..1474: mol_type = unassigned DNA
attgaacgctggcggcaggcctaacacatgcaagtcgagcggaaacgagttgtctgaaccttcggggaacgacaacggcgtcgagcggcggacgggtgagtaatgcctgggaaattgccctgatgtgggggataaccattggaaacgatggctaataccgcataatagcttcggctcaaagagggggaccttcgggcctctcgcgtcaggatatgcccaggtgggattagctagttggtgaggtaaaggctcaccaaggcgacgatccctagctggtctgagaggatgatcagccacactggaactgagacacggtccagactcctacgggaggcagcagtggggaatattgcacaatgggcgcaagcctgatgcagccatgccgcgtgtgtgaagaaggccttcgggttgtaaagcactttcagcagtgaggaagggtgtgtatttaatagatgcacattttgacgttagctgcagaagaagcaccggctaactccgtgccagcagccgcggtaatacggagggtgcgagcgttaatcggaattactgggcgtaaagcgcatgcaggtggtttgttaagtcagatgtgaaagcccggggctcaacctcggaactgcatttgaaactggcaggctagagtactgtagaggggggtagaatttcaggtgtagcggtgaaatgcgtagagatctgaaggaataccggtggcgaaggcggccccctggacagatactgacactcagatgcgaaagcgtggggagcaaacaggattagataccctggtagtccacgccgtaaacgatgtctacttggaggttgtggccttgagccgtggctttcggagctaacgcgttaagtagaccgcctggggagtacggtcgcaagattaaaactcaaatgaattgacgggggcccgcacaagcggtggagcatgtggtttaattcgatgcaacgcgaagaaccttacctactcttgacatccatagaacttagcagagatgctttggtgccttcgggaactatgagacaggtgctgcatggctgtcgtcagctcgtgttgtgaaatgttgggttaagtcccgcaacgagcgcaacccttatccttgtttgccagcacttcgggtgggaactccagggagactgccggtgataaaccggaggaaggtggggacgacgtcaagtcatcatggcccttacgagtagggctacacacgtgctacaatggcgcatacagagggcggccaacttgcgagagtgagcgaatcccaaaaagtgcgtcgtagtccggattggagtctgcaactcgactccatgaagtcggaatcgctagtaatcgtggatcagaatgccacggtgaatacgttcccgggccttgtacacaccgcccgtcacaccatgggagtgggctgcaaaagaagcaggtagtttaaccttcgggaggacgcttgccactttgtggttcatgactggggtg

SEQ ID NO: 3532 - DNA, 1481 bp, Vibrio ordalii
  source 1..1481: mol_type = unassigned DNA
attgaacgctggcggcaggcctaacacatgcaagtcgagcggcagcacagaggaacttgttccttgggtggcgagcggcggacgggtgagtaatgcctaggaaattgccctgatgtgggggataaccattggaaacgatggctaataccgcatgatgcctacgggccaaagagggggaccttcgggcctctcgcgtcaggatatgcctaggtgggattagctagttggtgaggtaatggctcaccaaggcgacgatccctagctggtctgagaggatgatcagccacactggaactgagacacggtccagactcctacgggaggcagcagtggggaatattgcacaatgggcgcaagcctgatgcagccatgccgcgtgtatgaagaaggccttcgggttgtaaagtactttcagtcgtgaggaaggtggtgttgttaatagcagcatcatttgacgttagcgacagaagaagcaccggctaactccgtgccagcagccgcggtaatacggagggtgcgagcgttaatcggaattactgggcgtaaagcgcatgcaggtggtggattaagtcagatgtgaaagcccggggctcaacctcggaaccgcatttgaaactggttcactagagtactgtagaggggggtagaatttcaggtgtagcggtgaaatgcgtagagatctgaaggaataccggtggcgaaggcggccccctggacagatactgacactcagatgcgaaagcgtggggagcaaacaggattagataccctggtagtccacgccgtaaacgatgtctacttggaggttgtggccttgagccgtggctttcggagctaacgcgttaagtagaccgcctggggagtacggtcgcaagattaaaactcaaatgaattgacgggggcccgcacaagcggtggagcatgtggtttaattcgatgcaacgcgaagaaccttacctactcttgacatctacagaatcctgcggagacgcgggagtgccttcgggaactgtaagacaggtgctgcatggctgtcgtcagctcgtgttgtgaaatgttgggttaagtcccgcaacgagcgcaacccttatccttgtttgccagcgagtaatgtcgggaactccagggagactgccggtgataaaccggaggaaggtggggacgacgtcaagtcatcatggcccttacgagtagggctacacacgtgctacaatggcgcatacagagggcagcaagctagcgatagtgagcgaatcccaaaaagtgcgtcgtagtccggattggagtctgcaactcgactccatgaagtcggaatcgctagtaatcgtagatcagaatgctacggtgaatacgttcccgggccttgtacacaccgcccgtcacaccatgggagtgggctgcaccagaagtggttagtttaaccgcactttcttcggagagagtggaggacgatcaccacggtgtggttcatgactggggtg

SEQ ID NO: 3533 - DNA, 1475 bp, Vibrio orientalis
  source 1..1475: mol_type = unassigned DNA
attgaacgctggcggcaggcctaacacatgcaagtcgagcggaaacgacttaactgaaccttcgggggacgttaagggcgtcgagcggcggacgggtgagtaatgcctgggaaattgccctgatgtgggggataaccattggaaacgatggctaataccgcataatgccttcgggccaaagagggggaccttcgggcctctcgcgtcaggatatgcccaggtgggattagctagttggtgaggtaagggctcaccaaggcgacgatccctagctggtctgagaggatgatcagccacactggaactgagacacggtccagactcctacgggaggcagcagtggggaatattgcacaatgggcgcaagcctgatgcagccatgccgcgtgtatgaagaaggccttcgggttgtaaagtactttcagcagtgaggaaggtggagtcgttaatagcggcctcacttgacgttagctgcagaagaagcaccggctaactccgtgccagcagccgcggtaatacggagggtgcgagcgttaatcggaattactgggcgtaaagcgcatgcaggtggttcattaagtcagatgtgaaagcccggggctcaacctcggaattgcatttgaaactggtggactagagtactgtagaggggggtagaatttcaggtgtagcggtgaaatgcgtagagatctgaaggaataccggtggcgaaggcggccccctggacagatactgacactcagatgcgaaagcgtggggagcaaacaggattagataccctggtagtccacgccgtaaacgatgtctacttggaggttgtggccttgagccgtggctttcggagctaacgcgttaagtagaccgcctggggagtacggtcgcaagattaaaactcaaatgaattgacgggggcccgcacaagcggtggagcatgtggtttaattcgatgcaacgcgaagaaccttacctactcttgacatccagagaagccggaagagattctggtgtgccttcgggaactctgagacaggtgctgcatggctgtcgtcagctcgtgttgtgaaatgttgggttaagtcccgcaacgagcgcaacccttatccttgtttgccagcgagtaatgtcgggaactccagggagactgccggtgataaaccggaggaaggtggggacgacgtcaagtcatcatggcccttacgagtagggctacacacgtgctacaatggcgcatacagagggcagccaacttgcgaaagtgagcgaatcccaaaaagtgcgtcgtagtccggattggagtctgcaactcgactccatgaagtcggaatcgctagtaatcgtggatcagaatgccacggtgaatacgttcccgggccttgtacacaccgcccgtcacaccatgggagtgggctgcaaaagaagtaggtagtttaaccttcgggagaacgcttaccactttgtggttcatgactggggtg

SEQ ID NO: 3534 - DNA, 1475 bp, Vibrio owensii
  source 1..1475: mol_type = unassigned DNA
attgaacgctggcggcaggcctaacacatgcaagtcgagcggaaacgagttatctgaaccttcggggaacgataacggcgtcgagcggcggacgggtgagtaatgcctaggaaattgccctgatgtgggggataaccattggaaacgatggctaataccgcataatgcctacgggccaaagagggggaccttcgggcctctcgcgtcaggatatgcctaggtgggattagctagttggtgaggtaatggctcaccaaggcgacgatccctagctggtctgagaggatgatcagccacactggaactgagacacggtccagactcctacgggaggcagcagtggggaatattgcacaatgggcgcaagcctgatgcagccatgccgcgtgtgtgaagaaggccttcgggttgtaaagcactttcagtcgtgaggaaggtagtgtagttaatagctgcattatttgacgttagcgacagaagaagcaccggctaactccgtgccagcagccgcggtaatacggagggtgcgagcgttaatcggaattactgggcgtaaagcgcatgcaggtggtttgttaagtcagatgtgaaagcccggggctcaacctcggaatagcatttgaaactggcagactagagtactgtagaggggggtagaatttcaggtgtagcggtgaaatgcgtagagatctgaaggaataccggtggcgaaggcggccccctggacagatactgacactcagatgcgaaagcgtggggagcaaacaggattagataccctggtagtccacgccgtaaacgatgtctacttggaggttgtggccttgagccgtggctttcggagctaacgcgttaagtagaccgcctggggagtacggtcgcaagattaaaactcaaatgaattgacgggggcccgcacaagcggtggagcatgtggtttaattcgatgcaacgcgaagaaccttacctactcttgacatccagagaactttccagagatggattggtgccttcgggaactctgagacaggtgctgcatggctgtcgtcagctcgtgttgtgaaatgttgggttaagtcccgcaacgagcgcaacccttatccttgtttgccagcgagtaatgtcgggaactccagggagactgccggtgataaaccggaggaaggtggggacgacgtcaagtcatcatggcccttacgagtagggctacacacgtgctacaatggcgcatacagagggcagcaagctagcgatagtgagcgaatcccaaaaagtgcgtcgtagtccggattggagtctgcaactcgactccatgaagtcggaatcgctagtaatcgtggatcagaatgccacggtgaatacgttcccgggccttgtacacaccgcccgtcacaccatgggagtgggctgcaaaagaagtaggtagtttaaccttcgggaggacgcttaccactttgtggttcatgactggggtg

SEQ ID NO: 3535 - DNA, 1410 bp, unidentified
  source 1..1410: mol_type = unassigned DNA; note = Vibrio palustris
tgcaagtcgagcggtaacatttctagcttgctagaagatgacgagcggcggacgggtgagtaatgcctgggaaattgccttgatgtgggggataaccattggaaacgatggctaataccgcataatgccttcgggccaaagagggggaccttcgggcctctcgcgtcaagatatgcccaggtgagattagcttgttggtgaggtaagagctcaccaaggcgacgatctctagctggtctgagaggatgatcagccacattgggactgagacacggcccaaactcctacgggaggcagcagtggggaatattgcacaatgggcgcaagcctgatgcagccatgccgcgtgtatgaagaaggccttcgggttgtaaagtactttcagcagtgaggaaggggtaacgttgaatagacgttattcttgacgttagctgcagaagaagcaccggctaactccgtgccagcagccgcggtaatacggagggtgcgagcgttaatcggaattactgggcgtaaagcgcatgcaggtggtctgttaagtcagatgtgaaagcccgaggcttaacctcggaattgcatttgaaactggcaggctagagtactgtagaggggggtagaatttcaggtgtagcggtgaaatgcggagagatctgaaggaataccagtggcgaaggcggccccctggacagatactgacactcagatgcgaaagcgtggggagcaaacaggattagataccctggtagtccacgccgtaaacgatgtctacttgaaggttgtggccttgagccgtggctttcggagctaacgcgttaagtagaccgcctggggagtacggtcgcaagattaaaactcaaatgaattgacgggggcccgcacaagcggtggagcatgtggtttaattcgatgcaacgcgaagaaccttacctactcttgacatccagagaactttccaaagatggattagtgccttccggaactctgagacaggggctgcatggctgtcgtcacttcgtgttgggaaatgttgggtttagttcccctaccgagcccaccccttatccttgattgccagcacctaatggggggaacttccgggagaattgcccgtggtaaacccgaaggaaaggtggggacgacgtcaagtcatcatggcccttacgagtagggctacacacgtgctacaatggcgcatacagagggttgccaacttgcgaaagtgagcgaatcccaaaaagtgcgtcgtagtccggattggagtctgcaactcgactccatgaagtcggaatcgctagtaatcgtgaatcagaatgtcacggtgaatacgttcccgggccttgtacacaccgcccgtcacaccatgggagtgggctgcaaaagaagcaggtagtttaaccttcggggggacgc

SEQ ID NO: 3536 - DNA, 1422 bp, unidentified
  source 1..1422: mol_type = unassigned DNA; note = Vibrio panuliri
caagtcgagcggcagcgacataaacaatccttcgggtgcgtttatgggcggcgagcggcggacgggtgagtaatgcctaggaaattgccctgatgtgggggataaccattggaaacgatggctaataccgcataatgcctacgggccaaagagggggaccttcgggcctctcgcgtcaggatatgcctaggtgggattagctagttggtgaggtaagggctcaccaaggcgacgatccctagctggtctgagaggatgatcagccacactggaactgagacacggtccagactcctacgggaggcagcagtggggaatattgcacaatgggcgcaagcctgatgcagccatgccgcgtgtatgaagaaggccttcgggttgtaaagtactttcagtcgtgaggaaggttcatgcgttaatagcgtatggatttgacgttagcgacagaagaagcaccggctaactccgtgccagcagccgcggtaatacggagggtgcgagcgttaatcggaattactgggcgtaaagcgcatgcaggtggttagttaagtcagatgtgaaagcccggggctcaacctcggaattgcatttgaaactggctgactagagtactgtagaggggggtagaatttcaggtgtagcggtgaaatgcgtagagatctgaaggaataccggtggcgaaggcggccccctggacagatactgacactcagatgcgaaagcgtggggagcaaacaggattagataccctggtagtccacgccgtaaacgatgtctacttggaggttgtggccttgagccgtggctttcggagctaacgcgttaagtagaccgcctggggagtacggtcgcaagattaaaactcaaatgaattgacgggggcccgcacaagcggtggagcatgtggtttaattcgatgcaacgcgaagaaccttacctactcttgacatccatagaacttagcagagatgctttggtgccttcgggaactatgagacaggtgctgcatggctgtcgtcagctcgtgttgtgaaatgttgggttaagtcccgcaacgagcgcaacccttatccttgtttgccagcgagtaatgtcgggaactccagggagactgccggtgataaaccggaggaaggtggggacgacgtcaagtcatcatggcccttacgagtagggctacacacgtgctacaatggcgtatacagagggcagccaacttgcgaaagtgagcgaatcccaaaaagtacgtcgtagtccggattggagtctgcaactcgactccatgaagtcggaatcgctagtaatcgtggatcagaatgccacggtgaatacgttcccgggccttgtacacaccgcccgtcacaccatgggagtgggctgcaaaagaagtgggtagtttaaccttcgggaggacgctcacca

SEQ ID NO: 3537 - DNA, 1475 bp, Vibrio parahaemolyticus
  source 1..1475: mol_type = unassigned DNA
attgaacgctggcggcaggcctaacacatgcaagtcgagcggaaacgagttatctgaaccttcgggggacgataacggcgtcgagcggcggacgggtgagtaatgcctaggaaattgccctgatgtgggggataaccattggaaacgatggctaataccgcatgatgcctacgggccaaagagggggaccttcgggcctctcgcgtcaggatatgcctaggtgggattagctagttggtgaggtaagggctcaccaaggcgacgatccctagctggtctgagaggatgatcagccacactggaactgagacacggtccagactcctacgggaggcagcagtggggaatattgcacaatgggcgcaagcctgatgcagccatgccgcgtgtgtgaagaaggccttcgggttgtaaagcactttcagtcgtgaggaaggtggtagtgttaatagcactatcatttgacgttagcgacagaagaagcaccggctaactccgtgccagcagccgcggtaatacggagggtgcgagcgttaatcggaattactgggcgtaaagcgcatgcaggtggtttgttaagtcagatgtgaaagcccggggctcaacctcggaattgcatttgaaactggcagactagagtactgtagaggggggtagaatttcaggtgtagcggtgaaatgcgtagagatctgaaggaataccggtggcgaaggcggccccctggacagatactgacactcagatgcgaaagcgtggggagcaaacaggattagataccctggtagtccacgccgtaaacgatgtctacttggaggttgtggccttgagccgtggctttcggagctaacgcgttaagtagaccgcctggggagtacggtcgcaagattaaaactcaaatgaattgacgggggcccgcacaagcggtggagcatgtggtttaattcgatgcaacgcgaagaaccttacctactcttgacatccagagaactttccagagatggattggtgccttcgggaactctgagacaggtgctgcatggctgtcgtcagctcgtgttgtgaaatgttgggttaagtcccgcaacgagcgcaacccttatccttgtttgccagcgagtaatgtcgggaactccagggagactgccggtgataaaccggaggaaggtggggacgacgtcaagtcatcatggcccttacgagtagggctacacacgtgctacaatggcgcatacagagggcagccaacttgcgaaagtgagcgaatcccaaaaagtgcgtcgtagtccggattggagtctgcaactcgactccatgaagtcggaatcgctagtaatcgtggatcagaatgccacggtgaatacgttcccgggccttgtacacaccgcccgtcacaccatgggagtgggctgcaaaagaagtaggtagtttaaccttcggggggacgcttaccactttgtggttcatgactggggtg

SEQ ID NO: 3538 - DNA, 1452 bp, Vibrio pectenicida
  source 1..1452: mol_type = unassigned DNA
  misc_difference 178: note = n is a, c, g, or t
  misc_difference 918: note = n is a, c, g, or t
attgaacgctggcggcaggcctaacacatgcaagtcgagcggaaacgagaagtagcttgctacttcggcgtcgagcggcggacgggtgagtaatgcctgggaaattgccttgatgtgggggataaccattggaaacgatggctaataccgcataatgcttttgtttgtaatgaacggnagccaaagagggggaccttcgggcctctcgcgtcaagatatgcccaggtgggattagctagttggtgaggtaatggctcaccaaggcgacgatccctagctggtctgagaggatgatcagccacactggaactgagacacggtccagactcctacgggaggcagcagtggggaatattgcacaatgggcgcaagcctgatgcagccatgccacgtgtatgaagaaggccttcgggttgtaaagtactttcagcagtgaggaaggtggatgtgttaatagcgcattcatttgacgttagctgcagaagaagcaccggctaactccgtgccagcagccgcggtaatacggagggtgcgagcgttaatcggaattactgggcgtaaagcgcatgcaggtggatgattaagtcagatgtgaaagcccggggctcaacctcggaatagcatttgaaactggtcatctagagtactgtagaggggggtagaatttcaggtgtagcggtgaaatgcgtagagatctgaaggaataccagtggcgaaggcggccccctggacagatactgacactcagatgcgaaagcgtggggagcaaacaggattagataccctggtagtccacgccgtaaacgatgtctacttggaggttgtggccttgagccgtggctttcggagctaacgcgttaagtagaccgcctggggagtacggtcgcaagattaaaactcaaatgaattgacgggggnccgcacaagcggtggagcatgtggtttaattcgatgcaacgcgaagaaccttacctactcttgacatccagagaagccagcggagacgcaggtgtgccttcgggagctctgagacaggtgctgcatggctgtcgtcagctcgtgttgtgaaatgttgggttaagtcccgcaacgagcgcaacccttatccttgtttgccagcgagtaatgtcgggaactccagggagactgccggtgataaaccggaggaaggtggggacgacgtcaagtcatcatggcccttacgagtagggctacacacgtgctacaatggcgcatacagagggcggccaacttgcaaaagtgagcgaatcccaaaaagtgcgtcgtagtccggattggagtctgcaactcgactccatgaagtcggaatcgctagtaatcgtggatcagaatgccacggtgaatacgttcccgggccttgtacacaccgcccgtcacaccatgggagtgggctgcaaaagaagtaggtagtttaacttcgggagaacgctt

SEQ ID NO: 3539 - DNA, 1462 bp, Vibrio penaeicida
  source 1..1462: mol_type = unassigned DNA
attgaacgctggcggcaggcctaacacatgcaagtcgagcggaaacgagaatagcttgctattcggcgtcgagcggcggacgggtgagtaatgcctgggaaattgccctgatgtgggggataaccattggaaacgatggctaataccgcataacgccttcgggccaaagagggggaccttcgggcctctcgcgtcaggatatgcccaggtgggattagctagttggtgaggtaaaggctcaccaaggcgacgatccctagctggtctgagaggatgatcagccacactggaactgagacacggtccagactcctacgggaggcagcagtggggaatattgcacaatgggcgcaagcctgatgcagccatgccgcgtgtatgaagaaggccttcgggttgtaaagtactttcagcagtgaggaagggtgtgaagttaatagcttcatatcttgacgttagctgcagaagaagcaccggctaactccgtgccagcagccgcggtaatacggagggtgcgagcgttaatcggaattactgggcgtaaagcgcatgcaggtggtttgttaagtcagatgtgaaagcccggggctcaacctcggaaccgcatttgaaactggcaggctagagtactgtagaggggggtagaatttcaggtgtagcggtgaaatgcgtagagatctgaaggaataccagtggcgaaggcggccccctggacagatactgacactcagatgcgaaagcgtggggagcaaacaggattagataccctggtagtccacgccgtaaacgatgtctacttggaggttgtggccttgagccgtggctttcggagctaacgcgttaagtagaccgcctggggagtacggtcgcaagattaaaactcaaatgaattgacgggggcccgcacaagcggtggagcatgtggtttaattcgatgcaacgcgaagaaccttacctactcttgacatccacagaacttagcagagatgctttggtgccttcgggaactctgagacaggtgctgcatggctgtcgtcagctcgtgttgtgaaatgttgggttaagtcccgcaacgagcgcaacccttatccttgtttgccagcacgtaatggtgggaactccagggagactgccggtgataaaccggaggaaggtggggacgacgtcaagtcatcatggcccttacgagtagggctacacacgtgctacaatggcgcatacagagggcggccaaccagcgatggtgagcgaatcccaaaaagtgcgtcgtagtccggattggagtctgcaactcgactccatgaagtcggaatcgctagtaatcgtggatcagaatgccacggtgaatacgttcccgggccttgtacacaccgcccgtcacaccatgggagtgggctgcaaaagaagtaggtagtttaaccttcgggggacgcttaccactttgtggttcatgactggggtg

SEQ ID NO: 3540 - DNA, 1477 bp, Vibrio ponticus
  source 1..1477: mol_type = unassigned DNA
attgaacgctggcggcaggcctaacacatgcaagtcgagcggcagcgacaacattgaaccttcgggggatttgttgggcggcgagcggcggacgggtgagtaatgcctaggaaattgccctgatgtgggggataaccattggaaacgatggctaataccgcatgatgcctacgggccaaagagggggaccttcgggcctctcgcgtcaggatatgcctaggtgggattagctagttggtgaggtaagggctcaccaaggcgacgatccctagctggtctgagaggatgatcagccacactggaactgagacacggtccagactcctacgggaggcagcagtggggaatattgcacaatgggcgcaagcctgatgcagccatgccgcgtgtatgaagaaggccttcgggttgtaaagtactttcagtagggaggaaggttcatgcgttaatagcgtatggatttgacgttacctacagaagaagcaccggctaactccgtgccagcagccgcggtaatacggagggtgcgagcgttaatcggaattactgggcgtaaagcgcatgcaggtggttagttaagtcagatgtgaaagcccggggctcaacctcggaattgcatttgaaactggctgactagagtactgtagaggggggtagaatttcaggtgtagcggtgaaatgcgtagagatctgaaggaataccggtggcgaaggcggccccctggacagatactgacactcagatgcgaaagcgtggggagcaaacaggattagataccctggtagtccacgccgtaaacgatgtctacttggaggttgtggccttgagccgtggctttcggagctaacgcgttaagtagaccgcctggggagtacggtcgcaagattaaaactcaaatgaattgacgggggcccgcacaagcggtggagcatgtggtttaattcgatgcaacgcgaagaaccttacctactcttgacatccatagaacttagcagagatgctttggtgccttcgggaactatgagacaggtgctgcatggctgtcgtcagctcgtgttgtgaaatgttgggttaagtcccgcaacgagcgcaacccttatccttgtttgccagcgagtaatgtcgggaactccagggagactgccggtgataaaccggaggaaggtggggacgacgtcaagtcatcatggcccttacgagtagggctacacacgtgctacaatggcgtatacagagggctgccaaccagcgatggtgagcgaatcccaaaaagtgcgtcgtagtccggattggagtctgcaactcgactccatgaagtcggaatcgctagtaatcgtggatcagaatgccacggtgaatacgttcccgggccttgtacacaccgcccgtcacaccatgggagtgggctgcaaaagaagtgggtagtttaacctttcggggaggacgctcaccactttgtggttcatgactggggtg

SEQ ID NO: 3541 - DNA, 1475 bp, Vibrio proteolyticus
  source 1..1475: mol_type = unassigned DNA
attgaacgctggcggcaggcctaacacatgcaagtcgagcggaaacgagatatctgaaccttcggggaacgatatcggcgtcgagcggcggacgggtgagtaatgcctgggaaattgccctgatgtgggggataaccattggaaacgatggctaataccgcataatagcttcggctcaaagagggggaccttcgggcctctcgcatcaggatatgcccaggtgggattagctagttggtgaggtaagggctcaccaaggcgacgatccctagctggtctgagaggatgatcagccacactggaactgagacacggtccagactcctacgggaggcagcagtggggaatattgcacaatgggcgcaagcctgatgcagccatgccgcgtgtgtgaagaaggccttcgggttgtaaagcactttcagtcgtgaggaaggtagtgtagttaatagctgcattatttgacgttagcgacagaagaagcaccggctaactccgtgccagcagccgcggtaatacggagggtgcgagcgttaatcggaattactgggcgtaaagcgcatgcaggtggtgtgttaagtcagatgtgaaagcccggggctcaacctcggaatagcatttgaaactggcagactagagtactgtagaggggggtagaatttcaggtgtagcggtgaaatgcgtagagatctgaaggaataccggtggcgaaggcggccccctggacagatactgacactcagatgcgaaagcgtggggagcaaacaggattagataccctggtagtccacgccgtaaacgatgtctacttggaggttgtggccttgagccgtggctttcggagctaacgcgttaagtagaccgcctggggagtacggtcgcaagattaaaactcaaatgaattgacgggggcccgcacaagcggtggagcatgtggtttaattcgatgcaacgcgaagaaccttacctactcttgacatccagagaactttccagagatggattggtgccttcgggaactctgagacaggtgctgcatggctgtcgtcagctcgtgttgtgaaatgttgggttaagtcccgcaacgagcgcaacccttatccttgtttgccagcacgtaatggtgggaactccagggagactgccggtgataaaccggaggaaggtggggacgacgtcaagtcatcatggcccttacgagtagggctacacacgtgctacaatggcgcatacagagggcggccaacttgcgaaagtgagcgaatcccaaaaagtgcgtcgtagtccggattggagtctgcaactcgactccatgaagtcggaatcgctagtaatcgtggatcagaatgccacggtgaatacgttcccgggccttgtacacaccgcccgtcacaccatgggagtgggctgcaaaagaagtgggtagtttaaccttcgggaggacgctcaccactttgtggttcatgactggggtg

SEQ ID NO: 3542 - DNA, 1464 bp, unidentified
  source 1..1464: mol_type = unassigned DNA; note = Vibrio quintilis
attgaacgctggcggcaggcttaacacatgcaagtcgggcggaaacgaaagaaagcttgctttcttggcgtcgagcggcggacgggtgagtaatgcctgggaaattgccctgatgtgggggataaccattggaaacgatggctaataccgcataatgtctacggactaaagagggggaccttcgggcctctcgcgtcgggatatgcccaggtgggattagcttgttggtgaggtaagagctcaccaaggcgacgatccctagctggtctgagaggatgatcagccacactggaactgagacacggtccagactcctacgggaggcagcagtggggaatattgcacaatgggcgcaagcctgatgcagccatgccgcgtgtatgaagaaggccttcgggttgtaaagtactttcagtggtgaggaaggggcagagtttaatacgctttgcttttgacgttagccacagaagaagcaccggctaactccgtgccagcagccgcggtaatacggagggtgcgagcgttaatcggaattactgggcgtaaagcgcatgcaggtggatgattaagtcagatgtgaaagcccggggcttaaccccggaacagcatttgaaactggtcatctagagtactgtagaggggggtagaatttcaggtgtagcggtgaaatgcgtagagatctgaaggaataccggtggcgaaggcggccccctggacagatactgacactcagatgcgaaagcgtggggagcaaacaggattagataccctggtagtccacgccgtaaacgatgtctacttggaggttgtggccttgagccgtggctttcggagctaacgcgttaagtagaccgcctggggagtacggtcgcaagattaaaactcaaatgaattgacgggggcccgcacaagcggtggagcatgtggtttaattcgatgcaacgcgaagaaccttacctactcttgacatccatagaagcttgaagagattcgagtgtgccttcgggaactatgagacaggtgctgcatggctgtcgtcagctcgtgttgtgaaatgttgggttaagtcccgcaacgagcgcaacccttatccttgattgccagcacttcgggtgggaacttcagggagactgccggtgataaaccggaggaaggtggggacgacgtcaagtcatcatggcccttacgagtagggctacacacgtgctacaatggcggatacagagggcagctaacttgcgagagtgtgcgaatcccaaaaagtccgtcgtagtccggattggagtctgcaactcgactccatgaagtcggaatcgctagtaatcgtagatcagaatgctacggtgaatacgttcccgggccttgtacacaccgcccgtcacaccatgggagtgggctgcaaaagaagcaggtagtttaaccttcgggaggacgcttgccactttgtggttcatgactggggtg

SEQ ID NO: 3543 - DNA, 1469 bp, unidentified
  source 1..1469: mol_type = unassigned DNA; note = Vibrio renipiscarius
attgaacgctggcggcaggcctaacacatgcaagtcgagcggtaacaggaagaaagcttgctttctttgctgacgagcggcggacgggtgagtaatgcctgggaatatgccttaacgtgggggataactattggaaacgatagctaataccgcatgatgcctacgggccaaagagggggaccttcgggcctctcgcgttaagattagcccaggtgggattagctagttggtgaggtaatggctcaccaaggcgacgatccctagctggtctgagaggatgatcagccacactggaactgagacacggtccagactcctacgggaggcagcagtggggaatattgcacaatgggcgcaagcctgatgcagccatgccgcgtgtatgaagaaggccttcgggttgtaaagtactttcagtcgtgaggaaggcatttgcgttaatagcgtaggtgtttgacgttagcgacagaagaagcaccggctaactccgtgccagcagccgcggtaatacggagggtgcgagcgttaatcggaattactgggcgtaaagcgcatgcaggtggttcgttaagtcagatgtgaaagcccggggctcaacctcggaattgcatttgaaactggcggactagagtgctgtagaggggggtagaatttcaggtgtagcggtgaaatgcgtagagatctgaaggaataccggtggcgaaggcggccccctggacagacactgacactcagatgcgaaagcgtggggagcaaacaggattagataccctggtagtccacgccgtaaacgatgtctacttggaggttgtggccttgagccgtggctttcggagctaacgcgttaagtagaccgcctggggagtacggtcgcaagattaaaactcaaatgaattgacgggggcccgcacaagcggtggagcatgtggtttaattcgatgcaacgcgaagaaccttacctactcttgacatctagagaagccagcggagacgcaggtgtgccttcgggaactctaagacaggtgctgcatggctgtcgtcagctcgtgttgtgaaatgttgggttaagtcccgcaacgagcgcaacccttatccttgtttgccagcgagtaatgtcgggaactccagggagactgccggtgataaaccggaggaaggtggggacgacgtcaagtcatcatggcccttacgagtagggctacacacgtgctacaatggcgcatacagagggctgccaaccagcgatggtgagcgaatcccaaaaagtgcgtcgtagtccggattggagtctgcaactcgactccatgaagtcggaatcgctagtaatcgtgaatcagaatgtcacggtgaatacgttcccgggccttgtacacaccgcccgtcacaccatgggagtgggctgcaaaagaagtgggtagtttaacctttcgaggaggacgctcaccactttgtggttcatgactggggtg

SEQ ID NO: 3544 - DNA, 1468 bp, Vibrio rotiferianus
  source 1..1468: mol_type = unassigned DNA
attgaacgctggcggcaggcctaacacatgcaagtcgagcggaaacgagttatctgaaccttcggggaacgataacggcgtcgagcggcggacgggtgagtaatgcctaggaaattgccctgatgtgggggataaccattggaaacgatggctaataccgcataatgcctacgggccaaagagggggaccttcgggcctctcgcgtcaggatatgcctaggtgggattagctagttggtgaggtaatggctcaccaaggcgacgatccctagctggtctgagaggatgatcagccacactggaactgagacacggtccagactcctacgggaggcagcagtggggaatattgcacaatgggcgcaagcctgatgcagccatgccgcgtgtgtgaagaaggccttcgggttgtaaagcactttcagtcgtgaggaaggtagtgtagttaatagctgcattatttgacgttagcgacagaagaagcaccggctaactccgtgccagcagccgcggtaatacggagggtgcgagcgttaatcggaattactgggcgtaaagcgcatgcaggtggtttgttaagtcagatgtgaaagcccggggctcaacctcggaattgcatttgaaactggcagactagagtactgtagaggggggtagaatttcaggtgtagcggtgaaatgcgtagagatctgaaggaataccggtggcgaaggcggccccctggacagatactgacactcagatgcgaaagcgtggggagcaaacaggattagataccctggtagtccacgccgtaaacgatgtctacttggaggttgtggccttgagccgtggctttcggagctaacgcgttaagtagaccgcctggggagtacggtcgcaagattaaaactcaaatgaattgacgggggcccgcacaagcggtggagcatgtggtttaattcgatgcaacgcgaagaaccttacctactcttgacatccagagaactttccagagatggattggtgccttcgggaactctgagacaggtgctgcatggctgtcgtcagctcgtgttgtgaaatgttgggttaagtcccgcaacgagcgcaacccttatccttgtttgccagcgagtaatgtcgggaactccagggagactgccggtgataaaccggaggaaggtggggacgacgtcaagtcatcatggcccttacgagtagggctacacacgtgctacaatggcgcatacagagggcagccaacttgcgagagtgagcgaatcccaaaaagtgcgtcgtagtccggatcggagtctgcaactcgactccgtgaagtcggaatcgctagtaatcgtggatcagaatgccacggtgaatacgttcccgggccttgtacacaccgcccgtcacaccatgggagtgggctgcaaaagaagtaggtagtttaaccttcgggaggacgcttaccactttgtggttcatgac

SEQ ID NO: 3545 - DNA, 1456 bp, Vibrio ruber
  source 1..1456: mol_type = unassigned DNA
acgctggcggcaggcctaacacatgcaagtcgagcggaaacgagagaaagcttgctttctcggcgtcgagcggcggacgggtgagtaaagtctgggaaattgccctgatgtgggggataaccattggaaacgatggctaataccgcatgatgtctacggaccaaagagggggaccttcgggcctctcgcgtcaggatatgcccagatgggattagctagttggtgaggtaatggctcaccaaggcgacgatccctagctggtctgagaggatgatcagccacactggaactgagacacggtccagactcctacgggaggcagcagtggggaatattgcacaatgggcgcaagcctgatgcagccatgccgcgtgtatgaagaaggccttcgggttgtaaagtactttcagcagtgaggaagggagtagttttaacagagctgctttttgacgttagctgcagaagaagcaccggctaactccgtgccagcagccgcggtaatacggagggtgcgagcgttaatcggaattactgggcgtaaagcgcatgcaggtggtctgttaagtcagatgtgaaagcccggggcttaaccccggagttgcatttgaaactggcaggctagagtactgtagaggggggtagaatttcaggtgtagcggtgaaatgcgtagagatctgaaggaataccggtggcgaaggcggccccctggacagatactgacactcaaatccgaaagcgtggggagcaaacaggattagataccctggtagtccacgccgtaaacgatgtctacttggaggttgtgacctagagtcgtggctttgggagctaacgcgttaagtagaccgcctggggagtacggtcgcaagattaaaactcaaatgaattgacgggggcccgcacaagcggtggagcatgtggtttaattcgatgcaacgcgaagaaccttacctactcttgacatccagagaagccggaagagattctggtgtgccttcgggagctctgagacaggtgctgcatggctgtcgtcagctcgtgttgtgaaatgttgggttaagtcccgcaacgagcgcaacccttatccttgattgccagcacttcgggtgggaacttcagggagactgccggtgataaaccggaggaaggtggggacgacgtcaagtcatcatggcccttacgagtagggctacacacgtgctacaatggcgtatacagagggcagctaacttgcgagagtgtgcgaatcccaaaaagtacgtcgtagtccggattggagtctgcaactcgactccatgaagtcggaatcgctagtaatcgtagatcagaatgctacggtgaatacgttcccgggccttgtacacaccgcccgtcacaccatgggagtgggctgcaaaagaagcaggtagtttaacggtcgggaggacgcttgccacttggggttcatgacgaggt

SEQ ID NO: 3546 - DNA, 1464 bp, Vibrio rumoiensis
  source 1..1464: mol_type = unassigned DNA
ttgaacgctggcggcaggcctaacacatgcaagtcgagcggaaacgagaagtagcttgctacttcggcgtcgagcggcggacgggtgagtaatgcataggaagttgcccagtagagggggataaccattggaaacgatggctaataccgcataacctcttcggagcaaagcgggggaccttcgggcctcgcgctactggatacgcctatgtgggattagctagttggtgaggtaatggctcaccaaggcgacgatccctagctggtctgagaggatgatcagccacactgggactgagacacggcccagactcctacgggaggcagcagtggggaatattgcacaatgggcgaaagcctgatgcagccatgccgcgtgtatgaagaaggccttcgggttgtaaagtactttcagttgtgaggaaggtttcgtagttaataactgcgttgcttgacgttagcaacagaagaagcaccggctaactccgtgccagcagccgcggtaatacggagggtgcgagcgttaatcggaattactgggcgtaaagcgcatgcaggtggtttgttaagtcagatgtgaaagcccggggctcaacctcggaaggtcatttgaaactggcaaactagagtactgtagaggggggtagaatttcaggtgtagcggtgaaatgcgtagagatctgaaggaataccagtggcgaaggcggccccctggacagatactgacactcagatgcgaaagcgtggggagcaaacaggattagataccctggtagtccacgccgtaaacgatgtctacttggaggttgtggccttgagccgtggctttcggagctaacgcgttaagtagaccgcctggggagtacggtcgcaagattaaaactcaaatgaattgacgggggcccgcacaagcggtggagcatgtggtttaattcgatgcaacgcgaagaaccttacctactcttgacatccagagaactttccagagatggattggtgccttcgggaactctgagacaggtgctgcatggctgtcgtcagctcgtgttgtgaaatgttgggttaagtcccgcaacgagcgcaacccttatccttgtttgccagcgagtaatgtcgggaactccagggagactgccggtgataaaccggaggaaggtggggacgacgtcaagtcatcatggcccttacgagtagggctacacacgtgctacaatggcgcatacagagggcagcaagctagcgatagtgagcgaatcccaaaaagtgcgtcgtagtccggattggagtctgcaactcgactccatgaagtcggaatcgctagtaatcgtggatcagaatgccacggtgaatacgttcccgggccttgtacacaccgcccgtcacaccatgggagtgggctgcaaaagaagtaggtagtttaaccttcgggaggacgcttaccactttgtggttcatgactggggtg

SEQ ID NO: 3547 - DNA, 1298 bp, Vibrio sagamiensis
  source 1..1298: mol_type = unassigned DNA
gcgtcgagcggcggacgggtgagtaatgcctaggaaattgccctgatgtgggggataaccattggaaacgatggctaataccgcataatgccttcgggccaaagagggggaccttcgggcctctcgcgtcaggatatgcctaggtgggattagctagttggtgaggtaagggctcaccaaggcgacgatccctagctggtctgagaggatgatcagccacactggaactgagacacggtccagactcctacgggaggcagcagtggggaatattgcacaatgggcgcaagcctgatgcagccatgccgcgtgtgtgaagaaggccttcgggttgtaaagcactttcagtcgtgaggaaggcggtaatgttaatagcattatcgtttgacgttagcgacagaagaagcaccggctaactccgtgccagcagccgcggtaatacggagggtgcgagcgttaatcggaattactgggcgtaaagcgcatgcaggtggtttgttaagtcagatgtgaaagcccggggctcaacctcggaattgcatttgaaactggcagactagagtactgtagaggggggtagaatttcaggtgtagcggtgaaatgcgtagagatctgaaggaataccggtggcgaaggcggccccctggacagatactgacactcagatgcgaaagcgtggggagcaaacaggattagataccctggtagtccacgccgtaaacgatgtctacttggaggttgtggccttgagccgtggctttcggagctaacgcgttaagtagaccgcctggggagtacggtcgcaagattaaaactcaaatgaattgacgggggcccgcacaagcggtggagcatgtggtttaattcgatgcaacgcgaagaaccttacctactcttgacatccagagaacttttcagagatggattggtgccttcgggaactctgagacaggtgctgcatggctgtcgtcagctcgtgttgtgaaatgttgggttaagtcccgcaacgagcgcaacccttatccttgtttgccagcgagtaatgtcgggaactccagggagactgccggtgataaaccggaggaaggtggggacgacgtcaagtcatcatggcccttacgagtagggctacacacgtgctacaatggcgcatacagagggcagccaacttgcgaaagtgagcgaatcccaaaaagtgcgtcgtagtccggattggagtctgcaactcgactccatgaagtcggaatcgctagtaatcgtggatcagaatgccacggtgaatacgttcccgggcctt

SEQ ID NO: 3548 - DNA, 1398 bp, Vibrio scophthalmi
  source 1..1398: mol_type = unassigned DNA
gacgagcggcggacgggtgagtaatgcctgggaatatgccttgatgtgggggataaccattggaaacgatggctaataccgcataatgcctacgggccaaagagggggatcttcggacctctcgcgtcaagattagcccaggtgggattagctagttggtgaggtaatggctcaccaaggcgacgatccctagctggtctgagaggatgatcagccacactggaactgagacacggtccagactcctacgggaggcagcagtggggaatattgcacaatgggcgcaagcctgatgcagccatgccgcgtgtgtgaagaaggccttcgggttgtaaagcactttcagtcgtgaggaaggtagttgcgttaatagcgtaattatttgacgttagcgacagaagaagcaccggctaactccgtgccagcagccgcggtaatacggagggtgcgagcgttaatcggaattactgggcgtaaagcgcatgcaggtggtttgttaagtcagatgtgaaagcccggggctcaacctcggaattgcatttgaaactggcagactagagtactgtagaggggggtagaatttcaggtgtagcggtgaaatgcgtagagatctgaaggaataccggtggcgaaggcggccccctggacagatactgacactcagatgcgaaagcgtggggagcaaacaggattagataccctggtagtccacgccgtaaacgatgtctacttggaggttgtggccttgagccgtggctttcggagctaacgcgttaagtagaccgcctggggagtacggtcgcaagattaaaactcaaatgaattgacgggggcccgcacaagcggtggagcatgtggtttaattcgatgcaacgcgaagaaccttacctactcttgacatccagagaagccagcggagacgcaggtgtgccttcgggagctctgagacaggtgctgcatggctgtcgtcagctcgtgttgtgaaatgttgggttaagtcccgcaacgagcgcaacccttatccttgtttgccagcgagtaatgtcgggaactccagggagactgccggtgataaaccggaggaaggtggggacgacgtcaagtcatcatggcccttacgagtagggctacacacgtgctacaatggcgcatacagagggctgccaaccagcgatggtgagcgaatcccaaaaagtgcgtcgtagtccggattggagtctgcaactcgactccatgaagtcggaatcgctagtaatcgtggatcagaatgccacggtgaatacgttcccgggccttgtacacaccgcccgtcacaccatgggagtgggctgcaaaagaagtgggtagtttaacctttcgaggaggacgctcaccactttgtggttcatgactggggtg

SEQ ID NO: 3549 - DNA, 1475 bp, Vibrio shilonii
  source 1..1475: mol_type = unassigned DNA
attgaacgctggcggcaggcctaacacatgcaagtcgagcggaaacgagttaactgacccttcgggtgacgttaacggcgtcgagcggcggacgggtgagtaatgcctgggaaattgccctgatgtgggggataaccattggaaacgatggctaataccgcataatgccttcggcccaaagagggggaccttcgggcctctcgcgtcaggatatgcccaggtgggattagctagttggtgaggtaatggctcaccaaggcgacgatccctagctggtctgagaggatgatcagccacactggaactgagacacggtccagactcctacgggaggcagcagtggggaatattgcacaatgggcgcaagcctgatgcagccatgccgcgtgtgtgaagaaggccttcgggttgtaaagcactttcagcagtgaggaaggcgggtacgttaatagcgtgctcgtttgacgttagctgcagaagaagcaccggctaactccgtgccagcagccgcggtaatacggagggtgcgagcgttaatcggaattactgggcgtaaagcgcatgcaggtggttcgttaagtcagatgtgaaagcccggggctcaacctcggaactgcatttgaaactggcggactagagtactgtagaggggggtagaatttcaggtgtagcggtgaaatgcgtagagatctgaaggaataccggtggcgaaggcggccccctggacagatactgacactcagatgcgaaagcgtggggagcaaacaggattagataccctggtagtccacgccgtaaacgatgtctacttggaggttgtggccttgagccgtggctttcggagctaacgcgttaagtagaccgcctggggagtacggtcgcaagattaaaactcaaatgaattgacgggggcccgcacaagcggtggagcatgtggtttaattcgatgcaacgcgaagaaccttacctactcttgacatccagagaagccagcggagacgcaggtgtgccttcgggaactctgagacaggtgctgcatggctgtcgtcagctcgtgttgtgaaatgttgggttaagtcccgcaacgagcgcaacccttatccttgtttgccagcgagtaatgtcgggaactccagggagactgccggtgataaaccggaggaaggtggggacgacgtcaagtcatcatggcccttacgagtagggctacacacgtgctacaatggcgcatacagagggcagccaacttgcgaaagtgagcgaatcccaaaaagtgcgtcgtagtccggattggagtctgcaactcgactccatgaagtcggaatcgctagtaatcgtagatcagaatgctacggtgaatacgttcccgggccttgtacacaccgcccgtcacaccatgggagtgggctgcaaaagaagtgggtagtttaaccttcgggaggacgctcaccactttgtggttcatgactggggtg

SEQ ID NO: 3550 - DNA, 1467 bp, Vibrio sinaloensis
  source 1..1467: mol_type = unassigned DNA
attgaacgctggcggcaggcctaacacatgcaagtcgagcggaaacgagttatctgaaccttcggggaacgataacggcgtcgagcggcggacgggtgagtaatgcctgggaaattgccctgatgtgggggataaccattggaaacgatggctaataccgcataatagcttcggctcaaagagggggaccttcgggcctctcgcgtcaggatatgcccaggtgggattagctagttggtgaggtaagggctcaccaaggcgacgatccctagctggtctgagaggatgatcagccacactggaactgagacacggtccagactcctacgggaggcagcagtggggaatattgcacaatgggcgcaagcctgatgcagccatgccgcgtgtatgaagaaggccttcgggttgtaaagtactttcagcagtgaggaaggtgggtrcgttaatagcgtgmtcatttgacgttagctgcagaagaagcaccggctaactccgtgccagcagccgcggtaatacggagggtgcgagcgttaatcggaattactgggcgtaaagcgcatgcaggtggtttgttaagtcagatgtgaaagcccggggctcaacctcggaattgcatttgaaactggcagactagagtactgtagaggggggtagaatttcaggtgtagcggtgaaatgcgtagagatctgaaggaataccggtggcgaaggcggccccctggacagatactgacactcagatgcgaaagcgtggggagcaaacaggattagataccctggtagtccacgccgtaaacgatgtctacttggaggttgtggccttgagccgtggctttcggagctaacgcgttaagtagaccgcctggggagtacggtcgcaagattaaaactcaaatgaattgacgggggcccgcacaagcggtggagcatgtggtttaattcgatgcaacgcgaagaaccttacctactcttgacatccagagaagccagcagagatgcaggtgtgccttcgggagctctgagacaggtgctgcatggctgtcgtcagctcgtgttgtgaaatgttgggttaagtcccgcaacgagcgcaacccttatccttgtttgccagcacttcgggtgggaactccagggagactgccggtgataaaccggaggaaggtggggacgacgtcaagtcatcatggcccttacgagtagggctacacacgtgctacaatggcgcatacagagggcggccaacttgcgaaagtgagcgaatcccaaaaagtgcgtcgtagtccggattggagtctgcaactcgactccatgaagtcggaatcgctagtaatcgtggatcagaatgccacggtgaatacgttcccgggccttgtacacaccgcccgtcacaccatgggagtgggctgcaaaagaagtgggtagtttaaccttcgggggacgctcaccactttgtggttcatgact

SEQ ID NO: 3551 - DNA, 1458 bp, unidentified
  source 1..1458: mol_type = unassigned DNA; note = Vibrio spartinae
cccgggggggggggactaacacatgcagtcgagcggtaacaggaaagagcttgctcttttgctgacgagcggcggacgggtgagtaaagcctgggaaattgccctgatgtgggggataaccattggaaacgatggctaataccgcatgacgtctacggaccaaagagggggaccttcgggcctctcgcgtcaggatatgcccaggtgggattagctagttggtggggtaagggctcaccaaggcgacgatctctagctggtctgagaggatgatcagccacactggaactgagacacggtccagactcctacgggaggcagcagtggggaatattgcacaatgggcgcaagcctgatgcagccatgccgcgtgtatgaagaaggccttcgggttgtaaagtactttcagcagtgaggaagggggtagttttaatagagctgccttttgacgttagctgcagaagaagcaccggctaactccgtgccagcagccgcggtaatacggagggtgcgagcgttaatcggaattactgggcgtaaagcgcatgcaggtggtcttttaagtcagatgtgaaagcccggggcttaaccccggagttgcatttgaaactgggaggctagagtactgtagaggggggtagaatttcaggtgtagcggtgaaatgcgtagagatctgaaggaataccggtggcgaaggcggccccctggacagatactgacactcagatgcgaaagcgtggggagcaaacaggattagataccctggtagtccacgccgtaaacgatgtctacttggaggttgttcccttgaggagtggctttcggagctaacgcgttaagtagaccgcctggggagtacggtcgcaagattaaaactcaaatgaattgacgggggcccgcacaagcggtggagcatgtggtttaattcgatgcaacgcgaagaaccttacctactcttgacatccagagaagccggaagagattctggtgtgccttcgggagctctgagacaggtgctgcatggctgtcgtcagctcgtgttgtgaaatgttgggttaagtcccgcaacgagcgcaacccttatccttgattgccagcacttcgggtgggaacttcagggagactgccggtgataaaccggaggaaggtggggacgacgtcaagtcatcatggcccttacgagtagggctacacacgtgctacaatggcgtatacagagggcagccaacttgcgaaagtgagcgaatcccaaaaagtacgtcgtagtccggattggagtctgcaactcgactccatgaagtcggaatcgctagtaatcgtgaatcagaatgtcacggtgaatacgttcccgggccttgtacacaccgcccgtcacaccatgggagtgggctgcaaaagaagcaggtagtttaaccttcgggaggacgcttgccactttgtggttcatgactgggggg

SEQ ID NO: 3552 - DNA, 1410 bp, Vibrio splendidus
  source 1..1410: mol_type = unassigned DNA
  misc_difference 69..70: note = n is a, c, g, or t
  misc_difference 443: note = n is a, c, g, or t
  misc_difference 455..456: note = n is a, c, g, or t
  misc_difference 575: note = n is a, c, g, or t
  misc_difference 913: note = n is a, c, g, or t
  misc_difference 1344: note = n is a, c, g, or t
  misc_difference 1361: note = n is a, c, g, or t
attgaacgctggcggcaggcctaacacatgcaagtcgagcggaaacgacactaacaatccttcgggtgnnttaatgggcgtcgagcggcggacgggtgagtaatgcctaggaaattgccttgatgtgggggataaccattggaaacgatggctaataccgcataatgcctacgggccaaagagggggatcttcgggcctctcgcgtcaagatatgcctaggtgggattagctagttggtgaggtaatggctcaccaaggcgacgatccctagctggtctgagaggatgatcagccacactggaactgagacacggtccagactcctacgggaggcagcagtggggaatattgcacaatgggcgaaagcctgatgcagccatgccgcgtgtatgaagaaggccttcgggttgtaaagtactttcagttgtgaggaagggggtancgttaatagcgnnatctcttgacgttagcaacagaagaagcaccggctaactccgtgccagcagccgcggtaatacggagggtgcgagcgttaatcggaattactgggcgtaaagcgcatgcaggtggttcnttaagtcagatgtgaaagcccggggctcaacctcggaactgcatttgaaactggtgaactagagtgctgtagaggggggtagaatttcaggtgtagcggtgaaatgcgtagagatctgaaggaataccagtggcgaaggcggccccctggacagacactgacactcagatgcgaaagcgtggggagcaaacaggattagataccctggtagtccacgccgtaaacgatgtctacttggaggttgtggccttgagccgtggctttcggagctaacgcgttaagtagaccgcctggggagtacggtcgcaagattaaaactcaaatgaattgacgggggnccgcacaagcggtggagcatgtggtttaattcgatgcaacgcgaagaaccttacctactcttgacatccagagaagccagcggagacgcaggtgtgccttcgggaactctgagacaggtgctgcatggctgtcgtcagctcgtgttgtgaaatgttgggttaagtcccgcaacgagcgcaacccttatccttgtttgccagcgagtaatgtcgggaactccagggagactgccggtgataaaccggaggaaggtggggacgacgtcaagtcatcatggcccttacgagtagggctacacacgtgctacaatggcgcatacagagggcagcaagctagcgatagtgagcgaatcccaaaaagtgcgtcgtagtccggattggagtctgcaactcgactccatgaagtcggaatcgctagtaatcgtaaatcngaatgtcacggtgaatncgttcccgggccttgtacacaccgctcgtcacaccatgggagtgggctg

SEQ ID NO: 3553 - DNA, 1468 bp, Vibrio superstes
  source 1..1468: mol_type = unassigned DNA
tggcggcaggcctaacacatgcaagtcgagcggaaacgatgattctgaaccttcggggaacgaattaggcgtcgagcggcggacgggtgagtaatgcctgggaaattgccctgatgtgggggataaccattggaaacgatggctaataccgcataacgtctacggaccaaagagggggaccttcgggcctctcgcttcaggatatgcccaggtgggattagctagttggtgaggtaatggctcaccaaggcgacgatccctagctggtctgagaggatgatcagccacactggaactgagacacggtccagactcctacgggaggcagcagtggggaatattgcacaatgggcgcaagcctgatgcagccatgccgcgtgtatgaagaaggccttcgggttgtaaagtactttcagtcgtgaggaaggcgttgaagttaatagcttcagcgtttgacgttagcgacagaagaagcaccggctaactccgtgccagcagccgcggtaatacggagggtgcgagcgttaatcggaattactgggcgtaaagcgcatgcaggtggtttgttaagtcagatgtgaaagcccggggctcaacctcggaaccgcatttgaaactggcaggctagagtactgtagaggggggtagaatttcaggtgtagcggtgaaatgcgtagagatctgaaggaataccagtggcgaaggcggccccctggacagatactgacactcagatgcgaaagcgtggggagcaaacaggattagataccctggtagtccacgccgtaaacgatgtctacttggaggttgtggccttgagccgtggctttcggagctaacgcgttaagtagaccgcctggggagtacggtcgcaagattaaaactcaaatgaattgacgggggcccgcacaagcggtggagcatgtggtttaattcgatgcaacgcgaagaaccttacctactcttgacatccagagaattcgctagagatagcttagtgccttcgggaactctgagacaggtgctgcatggctgtcgtcagctcgtgttgtgaaatgttgggttaagtcccgcaacgagcgcaacccttatccttgtttgccagcacgtaatggtgggaactccagggagactgccggtgataaaccggaggaaggtggggacgacgtcaagtcatcatggcccttacgagtagggctacacacgtgctacaatggcgcatacagagggcggccaaccagcgatggtgagcgaatcccaaaaagtgcgtcgtagtccggattggagtctgcaactcgactccatgaagtcggaatcgctagtaatcgtgaatcagaatgtcacggtgaatacgttcccgggccttgtacacaccgcccgtcacaccatgggagtgggctgcaaaagaagtgggtagtttaacctttcggggaggacgctcgccactttgtggttcatgactggggtg

SEQ ID NO: 3554 - DNA, 1467 bp, Vibrio tapetis
  source 1..1467: mol_type = unassigned DNA
attgaacgctggcggcaggcctaacacatgcaagtcgagcggaaacgagaagtagcttgctacttcggcgtcgagcggcggacgggtgagtaatgcctaggaaattgccctgatgtgggggataaccattggaaacgatggctaataccgcataatgccttcgggccaaagagggggaccttcgggcctctcgcgtcaggatatgcctaggtgggattagctagttggtgaggtaatggctcaccaaggcgacgatccctagctggtctgagaggatgatcagccacactggaactgagacacggtccagactcctacgggaggcagcagtggggaatattgcacaatgggcgcaagcctgatgcagccatgccgcgtgtatgaagaaggccttcgggttgtaaagtactttcagcagtgaggaaggggtgtacgttaatagcgtgcatccttgacgttagctgcagaagaagcaccggctaactccgtgccagcagccgcggtaatacggagggtgcgagcgttaatcggaattactgggcgtaaagcgcatgcaggtggttcgttaagtcagatgtgaaagcccggggctcaacctcggaactgcatttgaaactggcgggctagagtactgtagaggggggtagaatttcaggtgtagcggtgaaatgcgtagagatctgaaggaataccagtggcgaaggcggccccctggacagatactgacactcagatgcgaaagcgtggggagcaaacaggattagataccctggtagtccacgccgtaaacgatgtctacttggaggttgtggccttgagccgtggctttcggagctaacgcgttaagtagaccgcctggggagtacggtcgcaagattaaaactcaaatgaattgacgggggcccgcacaagcggtggagcatgtggtttaattcgatgcaacgcgaagaaccttacctactcttgacatccagagaagccagcggagacgcaggtgtgccttcgggaactctgagacaggtgctgcatggctgtcgtcagctcgtgttgtgaaatgttgggttaagtcccgcaacgagcgcaacccttatccttgtttgccagcgagtaatgtcgggaactccagggagactgccggtgataaaccggaggaaggtggggacgacgtcaagtcatcatggcccttacgagtagggctacacacgtgctacaatggcgcatacagagggcagccaaccagcgatggtgagcgaatcccaaaaagtgcgtcgtagtccggattggagtctgcaactcgactccatgaagtcggaatcgctagtaatcgtgaatcagaatgtcacggtgaatacgttcccgggccttgtacacaccgcccgtcacaccatgggagtgggctgcaaaagaagtaggtagtttaacctttcggggaggacgcttaccactttgtggttcatgactggggtg

SEQ ID NO: 3555 - DNA, 1477 bp, Vibrio tasmaniensis
  source 1..1477: mol_type = unassigned DNA
attgaacgctggcggcaggcctaacacatgcaagtcgagcggaaacgacactaacaatccttcgggtgcgttaatgggcgtcgagcggcggacgggtgagtaatgcctaggaaattgccttgatgtgggggataaccattggaaacgatggctaataccgcataatgcctacgggccaaagagggggaccttcgggcctctcgcgtcaagatatgcctaggtgggattagctagttggtgaggtaatggctcaccaaggcgacgatccctagctggtctgagaggatgatcagccacactggaactgagacacggtccagactcctacgggaggcagcagtggggaatattgcacaatgggcgcaagcctgatgcagccatgccgcgtgtatgaagaaggccttcgggttgtaaagtactttcagttgtgaggaagggtgtgtagttaatagctgcrcatcttgacgttagcaacagaagaagcaccggctaactccgtgccagcagccgcggtaatacggagggtgcgagcgttaatcggaattactgggcgtaaagcgcatgcaggtggttcattaagtcagatgtgaaagcccggggctcaacctcggaactgcatttgaaactggtgaactagagtgctgtagaggggggtagaatttcaggtgtagcggtgaaatgcgtagagatctgaaggaataccagtggcgaaggcggccccctggacagacactgacactcagatgcgaaagcgtggggagcaaacaggattagataccctggtagtccacgccgtaaacgatgtctacttggaggttgtggccttgagccgtggctttcggagctaacgcgttaagtagaccgcctggggagtacggtcgcaagattaaaactcaaatgaattgacgggggcccgcacaagcggtggagcatgtggtttaattcgatgcaacgcgaagaaccttacctactcttgacatccagagaagccagcggagacgcaggtgtgccttcgggarctctgagacaggtgctgcatggctgtcgtcagctcgtgttgtgaaatgttgggttaagtcccgcaacgagcgcaacccttatccttgtttgccagcgagtaatgtcgggaactccagggagactgccggtgataaaccggaggaaggtggggacgacgtcaagtcatcatggcccttacgagtagggctacacacgtgctacaatggcgcatacagagggcagcaagctagcgatagtgagcgaatcccaaaaagtgcgtcgtagtccggattggagtctgcaactcgactccatgaagtcggaatcgctagtaatcgtgaatcagaatgtcacggtgaatacgttcccgggccttgtacacaccgcccgtcacaccatgggagtgggctgcaaaagaagtgggtagtttaacctttcggggaggacgctcaccactttgtggttcatgactggggtg

SEQ ID NO: 3556 - DNA, 1449 bp, unidentified
  source 1..1449: mol_type = unassigned DNA; note = Vibrio thalassae
catgcaagtcgagcggaaacgagttaactgacccttcgggtgacgttaacggcgtcgagcggcggacgggtgagtaatgcctgggaaattgccctgatgtgggggataaccattggaaacgatggctaataccgcataacgccttcgggccaaagagggggaccttcgggcctctcgcgtcaggatatgcccaggtgggattagctagttggtgaggtaatggctcaccaaggcgacgatccctagctggtctgagaggatgatcagccacactggaactgagacacggtccagactcctacgggaggcagcagtggggaatattgcacaatgggcgcaagcctgatgcagccatgccgcgtgtgtgaagaaggccttcgggttgtaaagcactttcagtcgtgaggaaggcgggtacgttaatagcgtatttgtttgacgttagcgacagaagaagcaccggctaactccgtgccagcagccgcggtaatacggagggtgcgagcgttaatcggaattactgggcgtaaagcgcatgcaggtggttcgttaagtcagatgtgaaagcccggggctcaacctcggaacagcatttgaaactggcggactagagtactgtagaggggggtagaatttcaggtgtagcggtgaaatgcgtagagatctgaaggaataccggtggcgaaggcggccccctggacagatactgacactcagatgcgaaagcgtggggagcaaacaggattagataccctggtagtccacgccgtaaacgatgtctacttggaggttgtggccttgagccgtggctttcggagctaacgcgttaagtagaccgcctggggagtacggtcgcaagattaaaactcaaatgaattgacgggggcccgcacaagcggtggagcatgtggtttaattcgatgcaacgcgaagaaccttacctactcttgacatccagagaagccagcggagacgcaggtgtgccttcgggagctctgagacaggtgctgcatggctgtcgtcagctcgtgttgtgaaatgttgggttaagtcccgcaacgagcgcaacccttatccttgtttgccagcgagtaatgtcgggaactccagggagactgccggtgataaaccggaggaaggtggggacgacgtcaagtcatcatggcccttacgagtagggctacacacgtgctacaatggcgcatacagagggcagccaacttgcgaaagtgagcgaatcccaaaaagtgcgtcgtagtccggattggagtctgcaactcgactccatgaagtcggaatcgctagtaatcgtggatcagaatgccacggtgaatacgttcccgggccttgtacacaccgcccgtcacaccatgggagtgggctgcaaaagaagtgggtagtttaaccttcgggaggacgctcaccactttgtggttcatgactggagtg

SEQ ID NO: 3557 - DNA, 1455 bp, unidentified
  source 1..1455: mol_type = unassigned DNA; note = Vibrio toranzoniae
ctaacacatgcaagtcgagcggtaacgacactaacaatccttcgggtgcgttaatgggcgtcgagcggcggacgggtgagtaatgcctaggaaattgccttgatgtgggggataaccattggaaacgatggctaataccgcatgatgcctacgggccaaagagggggaccttcgggcctctcgcgtcaagatatgcctaggtgggattagctagttggtgaggtaatggctcaccaaggcgacgatccctagctggtctgagaggatgatcagccacactggaactgagacacggtccagactcctacgggaggcagcagtggggaatattgcacaatgggcgcaagcctgatgcagccatgccgcgtgtatgaagaaggccttcgggttgtaaagtactttcagttgtgaggaagggggtaacgttaatagcgctatctcttgacgttagcaacagaagaagcaccggctaactccgtgccagcagccgcggtaatacggagggtgcgagcgttaatcggaattactgggcgtaaagcgcatgcaggtggttcattaagtcagatgtgaaagcccggggctcaacctcggaactgcatttgaaactggtgaactagagtactgtagaggggggtagaatttcaggtgtagcggtgaaatgcgtagagatctgaaggaataccagtggcgaaggcggccccctggacagatactgacactcagatgcgaaagcgtggggagcaaacaggattagataccctggtagtccacgccgtaaacgatgtctacttggaggttgtggccttgagccgtggctttcggagctaacgcgttaagtagaccgcctggggagtacggtcgcaagattaaaactcaaatgaattgacgggggcccgcacaagcggtggagcatgtggtttaattcgatgcaacgcgaagaaccttacctactcttgacatccagagaatccagcggagacgcaggagtgccttcgggagctctgagacaggtgctgcatggctgtcgtcagctcgtgttgtgaaatgttgggttaagtcccgcaacgagcgcaacccttatccttgtttgccagcgagtcatgtcgggaactccagggagactgccggtgataaaccggaggaaggtggggacgacgtcaagtcatcatggcccttacgagtagggctacacacgtgctacaatggcgcatacagagggcagcgagccagcgatggtaagcgaatcccaaaaagtgcgtcgtagtccggattggagtctgcaactcgactccatgaagtcggaatcgctagtaatcgtgaatcagaatgtcacggtgaatacgttcccgggccttgtacacaccgcccgtcacaccatgggagtgggctgcaaaagaagtaggtagtctaaccttcgggaggacgcttaccactttgtggttcatgactggggtg

SEQ ID NO: 3558 - DNA, 1475 bp, Vibrio tubiashii
  source 1..1475: mol_type = unassigned DNA
attgaacgctggcggcaggcctaacacatgcaagtcgagcggaaacgagttaactgaaccttcggggaacgttaacggcgtcgagcggcggacgggtgagtaatgcctgggaaattgccctgatgtgggggataaccattggaaacgatggctaataccgcataatagcttcggctcaaagagggggaccttcgggcctctcgcgtcaggatatgcccaggtgggattagctagttggtgaggtaagggctcaccaaggcgacgatccctagctggtctgagaggatgatcagccacactggaactgagacacggtccagactcctacgggaggcagcagtggggaatattgcacaatgggcgcaagcctgatgcagccatgccgcgtgtatgaagaaggccttcgggttgtaaagtactttcagcagtgaggaaggtggtagtgttaatagcactatcatttgacgttagctgcagaagaagcaccggctaactccgtgccagcagccgcggtaatacggagggtgcgagcgttaatcggaattactgggcgtaaagcgcatgcaggtggtttgttaagtcagatgtgaaagcccggggctcaacctcggaattgcatttgaaactggcaggctagagtactgtagaggggggtagaatttcaggtgtagcggtgaaatgcgtagagatctgaaggaataccggtggcgaaggcggccccctggacagatactgacactcagatgcgaaagcgtggggagcaaacaggattagataccctggtagtccacgccgtaaacgatgtctacttggaggttgtggccttgagccgtggctttcggagctaacgcgttaagtagaccgcctggggagtacggtcgcaagattaaaactcaaatgaattgacgggggcccgcacaagcggtggagcatgtggtttaattcgatgcaacgcgaagaaccttacctactcttgacatccagagaactttccagagatggattggtgccttcgggaactctgagacaggtgctgcatggctgtcgtcagctcgtgttgtgaaatgttgggttaagtcccgcaacgagcgcaacccttatccttgtttgccagcgagtaatgtcgggaactccagggagactgccggtgataaaccggaggaaggtggggacgacgtcaagtcatcatggcccttacgagtagggctacacacgtgctacaatggcgcatacagagggcggccaacttgcgaaagtgagcgaatcccaaaaagtgcgtcgtagtccggatcggagtctgcaactcgactccgtgaagtcggaatcgctagtaatcgtggatcagaatgccacggtgaatacgttcccgggccttgtacacaccgcccgtcacaccatgggagtgggctgcaaaagaagtgggtagtttaaccttcggggggacgctcaccactttgtggttcatgactggggtg

SEQ ID NO: 3559 - DNA, 1296 bp, Vibrio variabilis
  source 1..1296: mol_type = unassigned DNA
aagagggggaccttcgggcctctcgcgtcaggatatgcccaggtgggattagctagttggtgaggtaatggctcaccaaggcgacgatccctagctggtctgagaggatgatcagccacactggaactgagacacggtccagactcctacgggaggcagcagtggggaatattgcacaatgggcgcaagcctgatgcagccatgccgcgtgtgtgaagaaggccttcgggttgtaaagcactttcagcagtgaggaaggtggtgtcgttaatagcggcatyatttgacgttagctgcagaagaagcaccggctaactccgtgccagcagccgcggtaatacggagggtgcgagcgttaatcggaattactgggcgtaaagcgcatgcaggtggttagttaagtcagatgtgaaagcccggggctcaacctcggaactgcatttgaaactggctgactagagtactgtagaggggggtagaatttcaggtgtagcggtgaaatgcgtagagatctgaaggaataccggtggcgaaggcggccccctggacagatactgacactcagatgcgaaagcgtggggagcaaacaggattagataccctggtagtccacgccgtaaacgatgtctacttggaggttgtggccttgagccgtggctttcggagctaacgcgttaagtagaccgcctggggagtacggtcgcaagattaaaactcaaatgaattgacgggggcccgcacaagcggtggagcatgtggtttaattcgatgcaacgcgaagaaccttacctactcttgacatcctcagaaswkacyrgagayrstytkgtgccttcgggaactswgagacaggtgctgcatggctgtcgtcagctcgtgttgtgaaatgttgggttaagtcccgcaacgagcgcaacccttatccttgtttgccagcacttcgggtgggaactccagggagactgccggtgataaaccggaggaaggtggggacgacgtcaagtcatcatggcccttacgagtagggctacacacgtgctacaatggcgcatacagagggcrgccaacttgcgaaagtgagcgaatcccaaaaagtgcgtcgtagtccggattggagtctgcaactcgactccatgaagtcggaatcgctagtaatcgtggatcagaatgccacggtgaatacgttcccgggccttgtacacaccgcccgtcacaccatgggagtgggctgcaaaagaagtgggtagtttaaccttcgggaggacgctcaccactttgtggttcatgactggggtg

SEQ ID NO: 3560 - DNA, 1465 bp, Vibrio vulnificus
  source 1..1465: mol_type = unassigned DNA
attgaacgctggcggcaggcctaacacatgcaagtcgagcggcagcacagagaaacttgtttctcgggtggcgagcggcggacgggtgagtaatgcctgggaaattgccctgatgtgggggataaccattggaaacgatggctaataccgcatgatagcttcggctcaaagagggggaccttcgggcctctcgcgtcaggatatgcccaggtgggattagctagttggtgaggtaagggctcaccaaggcgacgatccctagctggtctgagaggatgatcagccacactggaactgagacacggtccagactcctacgggaggcagcagtggggaatattgcacaatgggcgcaagcctgatgcagccatgccgcgtgtgtgaagaaggccttcgggttgtaaagcactttcagtcgtgaggaaggtggtagtgttaatagcactatcatttgacgttagcgacagaagaagcaccggctaactccgtgccagcagccgcggtaatacggagggtgcgagcgttaatcggaattactgggcgtaaagcgcatgcaggtggtttgttaagtcagatgtgaaagcccggggctcaacctcggaactgcatttgaaactggcagactagagtactgtagaggggggtagaatttcaggtgtagcggtgaaatgcgtagagatctgaaggaataccggtggcgaaggcggccccctggacagatactgacactcagatgcgaaagcgtggggagcaaacaggattagataccctggtagtccacgctgtaaacgatgtctacttggaggttgtggccttgagccgtggctttcggagctaacgcgttaagtagaccgcctggggagtacggtcgcaagattaaaactcaaatgaattgacgggggcccgcacaagcggtggagcatgtggtttaattcgatgcaacgcgaagaaccttacctactcttgacatccagagaatctagcggagacgctggagtgccttcgggaactctgagacaggtgctgcatggctgtcgtcagctcgtgttgtgaaatgttgggttaagtcccgcaacgagcgcaacccttatccttgtttgccagcgagtaatgtcgggaactccagggagactgccggtgataaaccggaggaaggtggggacgacgtcaagtcatcatggcccttacgagtagggctacacacgtgctacaatggcgcatacagagggcggccaacttgcgaaagtgagcgaatcccaaaaagtgcgtcgtagtccggattggagtctgcaactcgactccatgaagtcggaatcgctagtaatcgtggatcagaatgccacggtgaatacgttcccgggccttgtacacaccgcccgtcacaccatgggagtgggctgcaaaagaagtgggtagtttaaccttcgggaggacgctcaccactttgtggttcatgactggggtg

SEQ ID NO: 3561 - DNA, 1475 bp, unidentified
  source 1..1475: mol_type = unassigned DNA; note = Vibrio xiamenensis
attgaacgctggcggcaggcctaacacatgcaagtcgagcggcagcgacataaacaaaccttcgggggcgcttatgggcggcgagcggcggacgggtgagtaatgcctgggaaattgccctgatgtgggggataaccattggaaacgatggctaataccgcatgatagcttcggctcaaagagggggaccttttggcctctcgcgtcaggatatgcccaggtgggattagctagttggtgaggtaagggctcaccaaggcgacgatccctagctggtctgagaggatgatcagccacactggaactgagacacggtccagactcctacgggaggcagcagtggggaatattgcacaatgggcgcaagcctgatgcagccatgccgcgtgtgtgaagaaggccttcgggttgtaaagcactttcagcagtgaggaaggtagtgtatttaatagatacattatttgacgttagctgcagaagaagcaccggctaactccgtgccagcagccgcggtaatacggagggtgcgagcgttaatcggaattactgggcgtaaagcgcatgcaggtggttggttaagtcagatgtgaaagcccagggctcaaccttggaatcgcatttgaaactggctgactagagtactgtagaggggggtagaatttcaggtgtagcggtgaaatgcgtagagatctgaaggaataccggtggcgaaggcggccccctggacagatactgacactcagatgcgaaagcgtggggagcaaacaggattagataccctggtagtccacgccgtaaacgatgtctacttggaggttgtggccttgagccgtggctttcggagctaacgcgttaagtagaccgcctggggagtacggtcgcaagattaaaactcaaatgaattgacgggggcccgcacaagcggtggagcatgtggtttaattcgatgcaacgcgaagaaccttacctactcttgacatccagagaactttccagagatggattggtgccttcgggaactctgagacaggtgctgcatggctgtcgtcagctcgtgttgtgaaatgttgggttaagtcccgcaacgagcgcaacccttatccttgtttgccagcgagtaatgtcgggaactccagggagactgccggtgataaaccggaggaaggtggggacgacgtcaagtcatcatggcccttacgagtagggctacacacgtgctacaatggcgcatacagagggcagccaacttgcgagagtgagcgaatcccaaaaagtgcgtcgtagtccggattggagtctgcaactcgactccatgaagtcggaatcgctagtaatcgtggatcagaatgccacggtgaatacgttcccgggccttgtacacaccgcccgtcacaccatgggagtgggctgcaaaagaagtgggtagtttaaccttcggggggacgctcaccactttgtggttcatgactggggtg

SEQ ID NO: 3562 - DNA, 1488 bp, Virgibacillus necropolis
  source 1..1488: mol_type = unassigned DNA
gacgaacgctggcggcgtgcctaatacatgcaagtcgagcgcgggaagcaagcaatcacccttcggggtgtgagcttgtggaacgagcggcggacgggtgagtaacacgtgggcaacctacctgtaagattgggataaccccgggaaaccggagctaataccgaataatactttttatcacatggtagaaagttgaaaggcggcttttgctgtcacttacagatgggcccgcgtcgcattagctagttggtggggtaatggcctaccaaggcgacgatgcgtagccgacctgagagggtgatcggccacactgggactgagacacggcccagactcctacgggaggcagcagtagggaatcttccgcaatggacgaaagtctgacggagcaacgccgcgtgagtgatgaaggttttcggatcgtaaaactctgttgttagggaagaacaagtatcgttcgaatagggcggtaccatgacggtacctaaccagaaagccccggctaactacgtgccagcagccgcggtaatacgtagggggcaagcgttgtccggaattattgggcgtaaagcgctcgcaggcggtcttttaagtctgatgtgaaagcccacggcttaaccgtggagggtcattggaaactggaggacttgagtacagaagaggagagtggaattccacgtgtagcggtgaaatgcgtagagatgtggaggaacaccagtggcgaaggcgactctctggtctgtaactgacgctgaggagcgaaagcgtggggagcgaacaggattagataccctggtagtccacgccgtaaacgatgagtgctaggtgttagggggtttccgccccttagtgctgaagttaacgcattaagcactccgcctggggagtacggccgcaaggctgaaactcaaaagaattgacgggggcccgcacaagcggtggagcatgtggtttaattcgaagcaacgcgaagaaccttaccaggtcttgacatcctctgatagcgatagagatatcgtgttcccttcggggacagagtgacaggtggtgcatggttgtcgtcagctcgtgtcgtgagatgttgggttaagtcccgcaacgagcgcaacccttgatcttagttgccagcattcagttgggcactctaaggtgactgccggtgacaaaccggaggaaggtggggatgacgtcaaatcatcatgccccttatgacctgggctacacacgtgctacaatggatggaacaaagggacgcgaagccgcgaggtgtagcaaatcccataaaaccattctcagttcggattgtaggctgcaactcgcctacatgaagccggaatcgctagtaatcgcggatcagcatgccgcggtgaatacgttcccgggccttgtacacaccgcccgtcacaccacgagagttggcaacacccgaagtcggtgaggtaacctttatggagccagccgccgaaggtggggccaatgattggggtg

SEQ ID NO: 3563 - DNA, 1453 bp, unidentified
  source 1..1453: mol_type = unassigned DNA; note = Virgibacillus phasianinus
gacgaacgctggcggcgtgcctaatacatgcaagtcgagcgcgggaagcaagcaatcgcccttcggggcgtgagcttgtggaacgagcggcggacgggtgagtaacacgtgggcaacctgcctgtaagattgggataaccccgggaaaccggagctaataccgaataatactttttatcacatggtagaaagttgaaaggcggcttttgctgtcacttacagatgggcccgcggcgcattagctagttggtggggtaatggcctaccaaggcgacgatgcgtagccgacctgagagggtgatcggccacactgggactgagacacggcccagactcctacgggaggcagcagtagggaatcttccgcaatggacgaaagtctgacggagcaacgccgcgtgagtgatgaaggttttcggatcgtaaaactctgttgttagggaagaacacgtatcgttcgaataggacggtgctttgacggtacctaaccagaaagccccggctaactacgtgccagcagccgcggtaatacgtagggggcaagcgttgtccggaattattgggcgtaaagcgctcgcaggcggtcttttaagtctgatgtgaaagcccacggcttaaccgtggagggtcattggaaactggaggacttgagtacagaagaggagagtggaattccacgtgtagcggtgaaatgcgtagagatgtggaggaacaccagtggcgaaggcgactctctggtctgtaactgacgctgaggagcgaaagcgtggggagcgaacaggattagataccctggtagtccacgccgtaaacgatgagtgctaggtgttagggggtttccgccccttagtgctgaagttaacgcattaagcactccgcctggggagtacggccgcaaggctgaaactcaaaagaattgacgggggcccgcacaagcggtggagcatgtggtttaattcgaagcaacgcgaagaaccttaccaggtcttgacatcctctgccagcgatagagatatcgtgttcccttcggggacagagtgacaggtggtgcatggttgtcgtcagctcgtgtcgtgagatgttgggttaagtcccgcaacgagcgcaacccttgatcttagttgccagcatttagttgggcactctaaggtgactgccggtgacaaaccggaggaaggtggggatgacgtcaaatcatcatgccccttatgacctgggctacacacgtgctacaatggatggaacaaagggaagcgaagccgcgaggtgtagcaaatcccataaaaccattctcagttcggattgcaggctgcaactcgcctgcatgaagccggaatcgctagtaatcgcggatcagcatgccgcggtgaatacgttcccgggccttgtacacaccgcccgtcacaccacgagagttggcaacacccgaagtcggtgaggtaacctttatgga

SEQ ID NO: 3564 - DNA, 1485 bp, Virgibacillus soli
  source 1..1485: mol_type = unassigned DNA
gacgaacgctggcggcgtgcctaatacatgcaagtcgagcgcgggaagcaagctgatcccttcggggtgacgcttgtggaacgagcggcggacgggtgagtaacacgtgggcaacctacctgtaagactgggataactccgggaaaccggggctaataccggatgatactttttaccacatggtgagaagatgaaagatggcttcggctatcacttacagatgggcccgcggcgcattagctagttggtgggataacggcctaccaaggcaacgatgcgtagccgacctgagagggtgatcggccacactgggactgagacacggcccagactcctacgggaggcagcagtagggaatcttccgcaatggacgaaagtctgacggagcaacgccgcgtgagtgatgaaggttttcggatcgtaaaactctgttgttagggaagaacaagtaccgtttaaataaggcggtaccttgacggtacctaaccagaaagccccggctaactacgtgccagcagccgcggtaatacgtagggggcaagcgttgtccggaattattgggcgtaaagcgcgcgcaggcggccttttaagtctgatgtgaaagtctacggcttaaccgtagaaggccattggaaactggagggcttgagtgcagaagaggagagtggaattccatgtgtagcggtgaaatgcgtagagatatggaggaacaccagtggcgaaggcgactctctggtctgcaactgacgctgaggcgcgaaagcgtgggtagcgaacaggattagataccctggtagtccacgccgtaaacgatgagtgctaggtgttagggggtttccgccccttagtgctgaagttaacgcattaagcactccgcctggggagtacggccgcaaggctgaaactcaaaagaattgacgggggcccgcacaagcggtggagcatgtggtttaattcgaagcaacgcgaagaaccttaccaggtcttgacatcctctgacaactctagagatagagctttcccttcggggacagagtgacaggtggtgcatggttgtcgtcagctcgtgtcgtgagatgttgggttaagtcccgcaacgagcgcaacccttgatcttagttgccagcattaagttgggcactctaaggtgactgccggtgacaaaccggaggaaggtggggatgacgtcaaatcatcatgccccttatgacctgggctacacacgtgctacaatggatggtacagagggcagcgaagccgcgaggtgaagcaaatcccacaaaaccattctcagttcggattgcaggctgcaactcgcctgcatgaagccggaatcgctagtaatcgtggatcagcatgccacggtgaatacgttcccgggccttgtacacaccgcccgtcacaccacgagagttgacaacacccgaagtcggtgaggtaaccgtaaggagccagccgccgaaggtggggccaatgattggggtg

SEQ ID NO: 3565 - DNA, 1443 bp, Vitreoscilla filiformis
  source 1..1443: mol_type = unassigned DNA
gctggcggcatgccttacacatgcaagtcgacggtagagggggcaaccccttgagagtggcgaacgggtgagtaatgcatcggaacgtgcccagttgtgggggataacacttcgaaagaagtgctaataccgcatacgacctgagggtgaaagcgggggactcgcaagagcctcgcgcaattggagcggccgatgtcagattaggtagttggtggggtaaaggcctaccaagccgacgatctgtagctggtctgagaggacgaccagccacactgggactgagacacggcccagactcctacgggaggcagcagtggggaattttggacaatggacgcaagtctgatccagccatgccgcgtgcaggaagaaggccttcgggttgtaaactgcttttgtcagggaagaaatcccttgggttaatacctcggggggatgacggtacctgaagaataagcaccggctaactacgtgccagcagccgcggtaatacgtagggtgcaagcgttaatcggaattactgggcgtaaagcgtgcgcaggcggttttgtaagacagaggtgaaatccccgggctcaacctgggaactgcctttgtgactgcaaagcttgagtgcggcagagggggatggaattccgcgtgtagcagtgaaatgcgtagatatgcggaggaacaccgatggcgaaggcaatcccctgggcctgcactgacgctcatgcacgaaagcgtggggagcaaacaggattagataccctggtagtccacgccctaaacgatgtcaactggttgttgggagggtttcttctcagtaacgaagctaacgcgtgaagttgaccgcctggggagtacggccgcaaggttgaaactcaaaggaattgacggggacccgcacaagcggtggatgatgtggtttaattcgatgcaacgcgaaaaaccttacctacccttgacatggcaggaatcttgcagagatgtgagagtgctcgaaagagaacctgcacacaggtgctgcatggccgtcgtcagctcgtgtcgtgagatgttgggttaagtcccgcaacgagcgcaacccttgtcattagttgctacgaaagggcactctaatgagactgccggtgacaaaccggaggaaggtggggatgacgtcaggtcctcatggcccttatgggtagggctacacacgtcatacaatggccgggacagagggctgccaaagcgcgagctggagccaatcccagaaacccggtcgtagtccggatcgcagtctgcaactcgactgcgtgaagtcggaatcgctagtaatcgcggatcagcatgtcgcggtgaatacgttcccgggtcttgtacacaccgcccgtcacaccatgggagcgggttctgccagaagtagttagcctaaccgcaaggagggcgattaccacggcaggtttcgtgactggggtg

SEQ ID NO: 3566 - DNA, 1456 bp, Vogesella indigofera
  source 1..1456: mol_type = unassigned DNA
  misc_difference 55: note = n is a, c, g, or t
  misc_difference 133: note = n is a, c, g, or t
  misc_difference 825..826: note = n is a, c, g, or t
ttgaacgctggcggcatgctttacacatgcaagtcgaacggtaacagggagcttntccgctgacgagtggcgaacgggtgagtaatgcgtcggaacgtgccgagtagtgggggataacgcatcgaaaggtgtnctaataccgcatacgaactgaggttgaaagtgggggaccttcgggcctcacgctattcgagcggccgacgtctgattagctagttggtgaggtaaaggctcaccaaggcgacgatcagtagcgggtctgagaggatgatccgccacactgggactgagacacggcccagactcctacgggaggcagcagtggggaattttggacaatgggcgcaagcctgatccagccatgccgcgtgtctgaagaaggccttcgggttgtaaaggacttttgtccgggagcaaatgcctggtgttaatagcactgggagctgagagtaccggaagaataagcaccggctaactacgtgccagcagccgcggtaatacgtagggtgcaagcgttaatcggaattactgggcgtaaagcgtgcgcaggcggttttgtaagccagatgtgaaagccccgggctcaacctgggaactgcgtttggaactacaagactagagtgtgtcagaggggggtggaattccgcgtgtagcagtgaaatgcgtagagatgcggaggaacaccgatggcgaaggcagccccctgggataacactgacgctcatgcacgaaagcgtggggagcaaacaggattagataccctggtagtccacgccctaaacgatgtcaattagctgttgggggttagaatccttggtagcgtanntaacgcgtgaaattgaccgcctggggagtacggccgcaaggttaaaactcaaaggaattgacgggggcccgcacaagcggtggatgatgtggattaattcgatgcaacgcgaaaaaccttacctgctcttgacatgtacggaacttgccagagatggcttggtgcccgaaagggagccgtaacacaggtgctgcatggctgtcgtcagctcgtgtcgtgagatgttgggttaagtcccgcaacgagcgcaacccttgtcattagttgccatcattcagttgggcactctaatgagactgccggtgacaaaccggaggaaggtggggatgacgtcaagtcctcatggcccttatgagcagggcttcacacgtcatacaatggtcggtacagagggttgccaagccgcgaggtggagctaatctcttaaagccgatcgtagtccggattggagtctgcaactcgactccatgaagtcggaatcgctagtaatcgcaggtcagcatactgcggtgaatacgttcccgggccttgtacacaccgcccgtcacaccatgggagtggaatccgccagaagtgggtagggtaaccttagggagcccgcttaccacggtaggtttcatgactggggtg

SEQ ID NO: 3567 - DNA, 1434 bp, Volucribacter psittacicida
  source 1..1434: mol_type = unassigned DNA
aagtcgaacggtaacgggaaagaaacttgtttcttttgctgacgagtggcggacgggtgagtaaggcttgggaatttggcttatggagggggataaccacgggaaactgtggctaataccgcgtaatatcgagagattaaagtagtgggactttttgccactagccataagataagcccaagtgagattagctagttggtggggtaaaggcctaccaaggcgacgatctctagctggtctgagaggatgaccagccacactgggactgagacacggcccagactcctacgggaggcagcagtggggaatattgcgcaatggagggaactctgacgcagccatgccgcgtgaatgaagaaggccttcgggttgtaaagttctttcggtggtgaggaaggttgttgctttaatagagtaacaaattgacgttagccacagaagaagcaccggctaactccgtgccagcagccgcggtaatacggagggtgcgagcgttaatcggaataactgggcgtaaagggcacgcaggcggtcacttaagtgaggtgtgaaatccctgggcttaacctaggaattgcatttcatactgggtgactagagtcctctagggaggggtagaattccacgtgtagcggtgaaatgcgtagagatgtggaggaataccgaaggcgaaggcagccccttggggagagactgacgctcatgtgcgaaagcgtggggagcaaacaggattagataccctggtagtccacgctgtaaacgctgtcgatttggggattgggcttaaatgcttggtgctcgtagttaacgtgataaatcgaccgcctggggagtacggccgcaaggttaaaactcaaatgaattgacgggggcccgcacaagcggtggagcatgtggtttaattcgatgcaacgcgaagaaccttacctactcttgacatcctaggaagcctttagagatagaggcgtgccgtaaggagcttagagacaggtgctgcatggctgtcgtcagctcgtgttgtgaaatgttgggttaagtcccgcaacgagcgcaacccttatcctttgttgccagcatttgaggtgggaactcaaaggagactgccagtgataaactggaggaaggtggggatgacgtcaagtcatcatggcccttacgagtagggctacacacgtgctacaatggtgcatacagagggcagcgagagtgcgagcttgagcgaatctcagaaagtgcatctaagtccggattggagtctgcaactcgactccatgaagtcggaatcgctagtaatcgcaaatcagaatgttgcggtgaatacgttcccgggccttgtacacaccgcccgtcacaccatgggagcgggttgtaccagaagtggatagcttaaccgcaagaggggcgttcaccacggtatgattcgtgactggggtg

SEQ ID NO: 3568 - DNA, 1477 bp, Vulcanibacillus modesticaldus
  source 1..1477: mol_type = unassigned DNA
gacgaacgctggcggcgtgcctaatacatgcaagtcgagcgaagtttatgggagcttgctcctaataaacttagcggcggacgggtgagtaacacgtgggcaacctgcctgtaagactgggataaccccgggaaaccggagctaataccagataagctgttagtacgcatgtaataacagggaaagatggcgcaagctatcacttacagatgggcccgcggcgcattagctagttggtagggtaacggcctaccaaggcgacgatgcgtagccgacctgagagggtgatcggccacactgggactgagacacggcccagactcctacgggaggcagcagtagggaatcttccgcaatggacgaaagtctgacggagcaacgccgcgtgagtgatgaaggtcttcggattgtaaaactctgtcattagggaagaacagttatagtttgaataaggctataacgtgacggtacctaaagaggaagccccggctaactacgtgccagcagccgcggtaatacgtagggggcaagcgttgtccggaattattgggcgtaaagcgcgcgcaggcggctctttaagtctgatgtgaaagcccacggctcaaccgtggagggtcattggaaactggggagcttgagtgcaggagaggaaagtggaattccatgtgtagcggtgaaatgcgtagatatatggaggaacaccagtggcgaaggcggctttctggcctgtaactgacgctgaggcgcgaaagcgtggggagcaaacaggattagataccctggtagtccacgccgtaaacgatgagtgctaggtgttaggggtttcgacgcccttagtgccgcagttaacacattaagcactccgcctggggagtacggccgcaaggttgaaactcaaaggaattgacgggggcccgcacaagcagtggagcatgtggtttaattcgaagcaacgcgaagaaccttaccagggcttgacatcccgttgaccggtgtagagatacatctttttcttcggaaacaacggtgacaggtggtgcatggttgtcgtcagctcgtgtcgtgagatgttgggttaagtcccgcaacgagcgcaacccttgatcttagttgccagcattaagttgggcactctaaggtgactgccggtgacaaaccggaggaaggtggggatgacgtcaaatcatcatgccccttatgtcctgggctacacacgtgctacaatggctggtacaaagggtagcgaagccgcgaggccaagccaatcccaaaaagccagtctcagttcggattgtaggctgcaactcgcctacatgaagccggaattgctagtaatcgcggatcagcatgccgcggtgaatacgttcccgggccttgtacacaccgcccgtcacaccacgagagtttgcaacacccaaagtcggtgaggtaaccaatatggagccagccgcctaaggtggggcagatgattggggtg

SEQ ID NO: 3569 - DNA, 1476 bp, unidentified
  source 1..1476: mol_type = unassigned DNA; note = Vulgatibacter incomptus
aacgaacgctggcggcgtgcttaacacatgcaagtcgtgcgcgattgggtttcggcccagttgagcggcgaacgggtgcgtaacacgtggataatctgccttcaggcttggaataaccttccgaaaggagggctaatgccgaatgagctcacggggacttcggtccctgcgggaaaaggtggcctctatttataagctatcacctgaagatgagtccgcggcccatcagctagttggcggggtaatggcccaccaaggctacgacgggtagctggtctgagaggacgatcagccacactgggactgagacacggcccagactcctacgggaggcagcagtggggaatcttgcgcaatgggcgaaagcctgacgcagcaacgccgcgtgagtgatgaaggtctttggatcgtaaagctctttcggctgggaagaaacgcctcgtggctaatatccacggggtttgacggtaccagcagaagaagcaccggctaactctgtgccagcagccgcggtaatacagagggtgcaagcgttgttcggaattattgggcgtaaagcgcgcgcaggcgggattgcaagtcggatgtgaaagccctcggctcaaccggggaagtgcgttcgaaactgcagttcttgagtgtcggagagggtggcggaattcccggtgtagaggtgaaattcgtagatatcgggaggaacaccagaggcgaaggcggccacctggacgaacactgacgctgaggcgcgaaagcgtggggagcaaacaggattagataccctggtagtccacgccataaacgatgagagctagctgttgcgggtgttgacccctgcagtggcgaagccaacgcattaagctctccgcctgggaagtacggccgcaaggctaaaactcaaaggaattgacgggggcccgcacaagcggtggagcatgtggtttaattcgacgcaacgcgcagaaccttacctggtcttgacatccacggaacccgccagagatggtggggtgcccgcaagggaaccgtgagacaggtgctgcatggctgtcgtcagctcgtgtcgtgagatgttgggttaagtcccgcaacgagcgcaacccctgcctttagttgccatcattcagttgggcactctagagggactgccggtgtcaaaccggaggaaggtggggatgacgtcaagtcctcatggcctttatgaccagggctacacacgtgctacaatggccggtacaaagggttgccaaaccgcgaggtggagccaatctcaaaaaaccggtctcagttcggattggagtctgcaactcgactccatgaagtcggaatcgctagtaatcgcggatcagaacgccgcggtgaatacgttcccgggccttgtacacaccgcccgtcacaccatgggagtcgattgctccagaaatcggtgagccaaccgcaaggaggcagccgctcaaggagtggtcggtaactggggtg

SEQ ID NO: 3570 - DNA, 1475 bp, Waddlia chondrophila
  source 1..1475: mol_type = unassigned DNA
attgaatgctgacggcgtggatgaggcatgcaagtcgaacgaagtgtgctcttgagtgcacttagtggcggaagggttagtaatacatgggtaatctacctttaactctgggataacggttggaaacgaccgctaataccggatatggtgctagagaggatctttttagcattaaagtgggggattgggcgaccgaccttacggttaaagaggggcccatgggatatcagctagttggtgaggtaaaggctcaccaaggctaagacgtctaggcgagttgagagattgaccgccaacactgggactgagacactgcccagactcctacgggaggctgcagtcgagaatctttcgcaatgggcgaaagcctgacgaagcgacgccgtgtgaatgaagaaggcccttgggtcgtaaagttctttcgcatgggaacaagagaaggatgctaatatcatctggatttgagcgtaccttgtaaagaagcaccggctaactccgtgccagcagctgcggtaatacggagggtgcgagcattaatcggatttattgggcgtaaagggggcgtaggctggaatataagtcagccgtgaaatcccggggctcaaccccggaactgcgtttgaaactatatttctagaggcaaggcggagaaaacggaattccacatgtagcggtgaaatgcgtagatatgtggaagaacaccagtggcgaaggcggttttctagctttgacctgacgctgatgcccgaaagctaggggagcgaacaggattagataccctggtagtcctagccgtaaacgatgcatacttggtgtagccggactcaaccctggctgtgccgtagctaacgcgttaagtatgccgcctggggagtacgcccgcaagggtaaaactcaaaagaattgacggggacccgcacaagcagtggagcatgtggtttaattcgatgcaacgcgaagaaccttacctgggcttgacatatatatgacggctctagagatagagtattccttcgggacatatatacaggtgctgcatggctgtcgtcagctcgtgccgtgaggtgttgggttaagtcccgcaacgagcgcaacccttatcgttagttgccagcatttaggatgggaactctaacgagactgcctgggttaaccaggaggaaggtgaggatgacgtcaagtccgcatggcccttatgtccagggctacacacgtgctacaatggcaggtacagaaggcagcgaaaccgcgaggtcaagcaaatcctacaaagcctgtcccagttcggattggagtctgcaactcggctccatgaagttggaattgctagtaatggcgtgtcagcaataacgccgtgaatacgttcccgggtcttgtacacaccgcccgtcacatcatgggagttggtttcacccgaagtcgctgacttaaccgcaagggaagaggtgccgaaggtgaggctgatgactgggatg

SEQ ID NO: 3571 - DNA, 1470 bp, unidentified
  source 1..1470: mol_type = unassigned DNA; note = Wenzhouxiangella marina
attgaacgctggcggcatgcttaacacatgcaagtcgaacggtaacaggaactagcttgctagtttgctgacgagtggcggacgggtgagtaatacgtaggaatctgccttgcagcgggggatagcccgaggaaactcggattaataccgcatacgctctacggaggaaagtgggcctcttcttgaaagctcacactgcaagatgagcctacgtccgattagcttgttggtggggtaaaggcctaccaaggcgacgatcggtagctggtctgagaggatgatcagccacactgggactgagacacggcccagactcctacgggaggcagcagtggggaatattggacaatgggcgcaagcctgatccagcaatgccgcgtgtgtgaagaaggcctgcgggttgtaaagcacttttattaggaaagaaacggcctaggttaataccctatggcaattgacggtacctaatgaataagcaccggctaactccgtgccagcagccgcggtaatacggagggtgcaagcgttaatcggaattactgggcgtaaagcgtgcgtaggcggctacgtaagtcggatgtgaaagccccgggcttaacctgggaattgcattcgatactgtgtggctagagtttggtagaggtaagtggaattccaggtgtagcggtgaaatgcgtagatatctggaggaacaccagtggcgaaggcggcttactggaccaaaactgacgctgaggtacgaaagcgtgggtagcaaacaggattagataccctggtagtccacgccctaaacgatgtcaactagttgttgggagccttaatagctcttagtgacgaagctaacgcgttaagttgaccgcctggggagtacggccgcaaggttgaaactcaaaggaattgacgggggcccgcacaagcggtggagcatgtggtttaattcgatgcaacgcgaagaaccttaccagcccttgacatcctcggaacttactagagatagtttggtgccttcgggaaccgagtgacaggtgctgcatggctgtcgtcagctcgtgtcgtgagatgttgggttaagtcccgcaacgagcgcaacccttatccttagttgccagcacttcgggtgggaactctaaggagactgccggtgataaaccggaggaaggtggggatgacgtcaagtcatcatggcccttacgggctgggctacacacgtgctacaatggtcggtacagagggaagcaaactcgcgagagccagcaaatcccagaaagccgatcttagtccggatcgcagtctgcaactcgactgcgtgaagtcggaatcgctagtaatcgcggatcagcattgccgcggtgaatacgttcccgggccttgtacacaccgcccgtcacaccatgggagttggctgcaccagaagcaggtagtctaaccttcgggaggacgcttgccacggtgtggtcaatgactggggtg

SEQ ID NO: 3572 - DNA, 1470 bp, unidentified
  source 1..1470: mol_type = unassigned DNA; note = Wenzhouxiangella sediminis
attgaacgctggcggcatgcctaacacatgcaagtcgaacggtaacaggagctagcttgctagcttgctgacgagtggcggacgggtgagtaacacgtaggaatctgcctagcagcgggggatagcccggggaaactcggattaataccgcatacgctctacggaggaaagtgggcctcttcttgaaagctcacactgctagatgagcctacgtccgattagctagttggtggggtaaaggcctaccaaggcgacgatcggtagctggtctgagaggatgatcagccacaccgggactgagacacggcccggactcctacgggaggcagcagtggggaatattggacaatgggcgaaagcctgatccagcaatgccgcgtgtgtgaagaaggcctgcgggttgtaaagcacttttattagagaagaaatggcctgggctaataacccatggcagctgacggtatctaatgaataagcaccggctaactccgtgccagcagccgcggtaatacggagggtgcaagcgttaatcggaattactgggcgtaaagcgtgcgtaggcggctacgtaagtcggatgtgaaagccccgggcttaacctgggaattgcattcgatactgcgtggctagagtttggtagaggtaagtggaattccaggtgtagcggtgaaatgcgtagatatctggaggaacaccagtggcgaaggcggcttactggaccaaaactgacgctgaggtacgaaagcgtgggtagcaaacaggattagataccctggtagtccacgccctaaacgatgtcaactagttgttgggagccttaatagctcttggtgacgaagctaacgcgttaagttgaccgcctggggagtacggccgcaaggttgaaactcaaaggaattgacgggggcccgcacaagcggtggagcatgtggtttaattcgatgcaacgcgaagaaccttaccagcccttgacatcctcggaatttggcagagatgccttagtgccttcgggaaccgagtgacaggtgctgcatggctgtcgtcagctcgtgtcgtgagatgttgggttaagtcccgcaacgagcgcaacccttgtccttagttgccagcgattcggtcgggaactctaaggagactgccggtgataaaccggaggaaggtggggatgacgtcaagtcatcatggcccttacgggctgggctacacacgtgctacaatggacggtacagagggccgcgaactcgcgagagtaagcaaatcccacaaagccgttcttagtccggatcgtagtctgcaactcgactgcgtgaagtcggaatcgctagtaatcgtagatcagcattgctacggtgaatacgttcccgggccttgtacacaccgcccgtcacaccatgggagttggctgcaccagaagcaggtagtctaaccttcgggaggacgcttgccacggtgtggtcaatgactggggtg

SEQ ID NO: 3573 - DNA, 1338 bp, unidentified
  source 1..1338: mol_type = unassigned DNA; note = Westiellopsis prolifica
gatgaacgctggcggtatgcttaacacatgcaagtcgaacggtctcttcggagatagtggcggacgggtgagtaacgcgtgagaatctggctcgaggtctgggacaaccactggaaacggtggctaataccggatgtgcctatgggtgaaagggaaactgcctggagatgagctcgcgtctgattagctagttgggggtgtaagagaccaccaaggcgacgatcagtagctggtctgagaggatgatcagccacactggaactgagacacggtccagactcctacgggaggcagcagtggggaattttccgcaatgggcgaaagcctgacggagcaataccgcgtgagggaggaaggctcttgggttgtaaacctcttttctcaaggaagaaagatgacggtacttgaggaatcagcatcggctaactccgtgccagcagccgcggtaatacggaggatgcaagcgttatccggaatgattgggcgtaaagcgtccgtaggtggctgtgtgtgtctattgttaaagagtttggctcaaccaaataagggcggtagaaactacacagctagagtgcgttcggggcagagggaattcctggtgtagcggtgaaatgcgtagagatcaggaagaacaccggtggcgaaagcgctctgctaggccgcaactgacactgagggacgaaagctaggggagcgaatgggattagataccccagtagtcctagccgtaaacgatggatactaggcgttgagagtatcgaccctctcagtgccgtagctaacgcgttaagtatcccgcctggggagtacgcacgcaagtgtgaaactcaaaggaattgacgggggcccgcacaagcggtggagtatgtggtttaattcgatgcaacgcgaagaaccttaccagggcttgacatgtctggaatcttggggaaactcaagagtgccttcgggagccagaacacaggtggtgcatggctgtcgtcagctcgtgtcgtgagatgttgggttaagtcccgcaacgagcgcaaccctcgtacttagttgccagcatttaggatgggcactctaaggagactgccggtgacaaaccggaggaaggtggggatgacgtcaagtcagcatgccccttacgtcctgggctacacacgtactacaatgctacggacaaagggcagcgagactgcgaagttaagcaaatctcagaaaccgtagctcagttcagatcgcaggctgcaactcgcctgcgtgaaggaggaatcgctagtaattgcaggtcagcatactgcagtgaattcgttcccgggccttgtacacaccgcccgtcacaccatggaagct

SEQ ID NO: 3574 - DNA, 1462 bp, unidentified
  source 1..1462: mol_type = unassigned DNA; note = Woeseia oceani
attgaacgctggcggcatgcctaacacatgcaagtcgaacggaaacgatggaagcttgcttccaggcgtcgagtggcggacgggtgagtaatgcttaggaatctgcccattagtgggggacaactcggggaaactcgagctaataccgcatacgccctacgggggaaagcgggggatcttcggacctcgcgctaatggatgagcctaagtcggattagcttgttggtggggtaaaagcctaccaaggcgacgatccgtagctggtctgagaggacgatcagccacactgggactgagacacggcccagactcctacgggaggcagcagtggggaatattggacaatgggggaaaccctgatccagcaatgccgcgtgtgtgaagaaggcctgcgggttgtaaagcactttcagtagagaagaaaagcctacggttaataaccgtgagtcttgacgttacctacagaagaagcaccggctaactccgtgccagcagccgcggtaatacggagggtgcaagcgttaatcggaattactgggcgtaaagcgcgcgtaggtggttctgtaagtcggatgtgaaagcccagggcttaaccttggaattgcattcgatactgcatgactagagtatggtagagggaagtggaatttccggtgtagcggtgaaatgcgtagatatcggaaggaacaccagtggcgaaggcgacttcctgggccaatactgacactgaggtgcgaaagcgtggggagcaaacaggattagataccctggtagtccacgccgtaaacgatgagaactagatgttgggagggttgcctctcggtgtcgaagctaacgcgttaagttctccgcctggggagtacgccggcaacggtaaaactcaaaggaattgacggggacccgcacaagcggtggagcatgtggtttaattcgatgcaacgcgaagaaccttacctgcccttgacatactcggaactttccagagatggattggtgccttcgggaaccgagatacaggtgctgcatggctgtcgtcagctcgtgtcgtgagatgttgggttaagtcccgcaacgagcgcaacccttgcccctagttgccagcacgtaatggtgggaactctagggggactgccggtgacaaaccggaggaaggtggggacgacgtcaagtcatcatggcccttatgggcagggctacacacgtgctacaatggcgtatacagagggccgcaaacctgcgaaggctagctaatcccttaaagtgcgtcgtagtccggatcggagtctgcaactcgactccgtgaagtcggaatcgctagtaatcgcgaatcagaatgtcgcggtgaatacgttcccgggtcttgtacacaccgcccgtcacaccatggaagttggttgcaccagaagtaggtagcttaaccctcgggagggcgcttaccacggtgtggctaatgactggggtg

SEQ ID NO: 3575 - DNA, 1412 bp, Wohlfahrtiimonas chitiniclastica
  source 1..1412: mol_type = unassigned DNA
cctgcagtcgacggaacgatggagaagtttcttcttcaggcgtcgagtggcggacgggtgagtaatgcataggaatctgccctatagtttgggataactactcgaaagagtagctaataccggatgtggactacggtttaaagcaggggaccttcgggccttgcgctataggatgagcctatgtgggattagctagttggtgaggtaaaggctcaccaaggcgacgatctctagctggtctgagaggatgatcagccacactgggactgagacacggcccagactcctacgggaggcagcagtggggaatattggacaatgggcggaagcctgatccagcaataccgcgtgtgtgaagaaggccttcgggttgtaaagcacttttgtcagggagaatggcagttgaggttaatacccttagctgttgatgttacctgaagaataagcaccggctaactccgtgccagcagccgcggtaatacggggggtgcaagcgttaatcggaattactgggcgtaaagggcgcgtaggcggttacttaagttagatgtgaaagccccgggcttaacctgcgaattgcatttaatactgggtaactacagtgtggtagagagtagcggaatttctggtgtagcggtgaaatgcgtagatatcagaaggaacaccaatggcgaaggcagctgcttgggccaacactgacgctgaggcgcgaaagcgtggggagcaaacaggattagataccctggtagtccacgctgtaaacgatgacaacttattgatgggagggttacctttcgttgatgtagctaacgtgttaagttgtccgcctggggagtacggtcgcaaggctgaaactcaaaggaattgacggggacccgcacaagcggtggagcatgtggtttaattcgatgcaacgcgaagaaccttacctggtcttgacatctacagaactttccagagatggattggtgccttcgggaactgtaagacaggtgctgcatggctgtcgtcagctcgtgtcgtgagatgttgggttaagtcccgcaacgagcgcaacccttgtccttatttgccagcacgtaatggtgggaactttaaggagactgccgatgataaatcggaggaaggtggggatgacgtcaagtcatcatggcccttatgaccagggctacacacgtgctacaatggtcggtacaaagggaagccaagccgcgaggtggagcaaatccaataaaaccgatcgtagtccggattggagtctgcaactcgactccatgaagtcggaatcgctagtaatcgtagaacagaatgctacggtgaatacgttcccggggcttgtacacaccgcccgtcacaccatgggagttgattgctccagaagtaggtagctttaaaaatggcgctaccacgag

SEQ ID NO: 3576 - DNA, 1422 bp, Wolinella succinogenes
  source 1..1422: mol_type = unassigned DNA
agtgaacgctggcggcgtgcctaatacatgcaagtcgaacggtaacagggtgtagcttgctatactgctgacgagtggcgcacgggtgagtaatgcataggttatgtgccccatagtctggaatagccactggaaacggtgattaataccggatattcccgagaggggaaagtttttcgctatgggatcagcctatgtcctatcagcttgttggtgaggtaatggctcaccaaggctatgacgggtatccggcctgagagggtgatcggacacactggaactgagacacggtccagactcctacgggaggcagcagtagggaatattgctcaatgggcgaaagcctgaagcagcaacgccgcgtggaggatgaaggtcttcggattgtaaactccttttctaagagaagattatgacggtatcttaggaataagcaccggctaactccgtgccagcagccgcggtaatacggagggtgcaagcgttactcggaatcactgggcgtaaagagcacgtaggcggccttgcaagtcagatgtgaaatccaacggcttaaccgttgaactgcatttgaaactgcaaggctagagtatgggagaggtaggtggaattctcggtgtaggggtaaaatccgtagagatcgagaggaatactcattgcgaaggcgacctgctggaacattactgacgctgaggtgcgaaagcgtggggagcaaacaggattagataccctggtagtccacgccctaaacgatgaatgctagttgttgccctgcttgtcagggcagtaatgcagttaacacattaagcattccgcctggggagtacggtcgcaagattaaaactcaaaggaatagacggggacccgcacaagcggtggagcatgtggtttaattcgaagatacgcgaagaaccttacctgggcttgacattgatagaatcctatagagatatgggagtgccagtttactggagcttgaaaacaggtgctgcacggctgtcgtcagctcgtgtcgtgagatgttgggttaagtcccgcaacgagcgcaaccctcgtcactagttgctaacggttcggccgagcactctagtgagactgccttcgcaaggaggaggaaggtgaggacgacgtcaagtcatcatggcccttacgcccagggctacacacgtgctacaatggtgtgtacaaagagaagcaataccgcgaggtggagcaaatctttaaaacacatctcagttcggattgtagtctgcaactcgactacatgaagctggaatcgctagtaatcgtagatcagcaatgctacggtgaatacgttcccgggtcttgtactcaccgcccgtcacaccatgggagttgtattcgccttaagccgggacgctaaactggctaccgtccacggcggatgcagcgactggggtg

SEQ ID NO: 3577 - DNA, 1407 bp, Xanthobacter autotrophicus
  source 1..1407: mol_type = unassigned DNA
agcgaacgctggcggcaggcctaacacatgcaagtcgagcgcccagcaatgggagcggcagacgggtgagtaacacgtggggatctacccaatggtacggaataacccagggaaacttggactaataccgtatgtgcccttcgggggaaagatttatcgccattggatgaacccgcgtcggattagctagttggtgaggtaaaggctcaccaaggcgacgatccgtagctggtctgagaggatgatcagccacactgggactgagacacggcccagactcctacgggaggcagcagtggggaatattggacaatgggcgcaagcctgatccagccatgccgcgtgtgtgatgaaggccttagggttgtaaagcactttcgccggtgaagataatgacggtaaccggagaagaagccccggctaacttcgtgccagcagccgcggtaatacgaagggggcaagcgttgctcggaatcactgggcgtaaagcgcacgtaggcgggttgttaagtcagaggtgaaatcctggagctcaactccagaactgcctttgatactggcgaccttgagttcgagagaggttggtggaactgcgagtgtagaggtgaaattcgtagatattcgcaagaacaccagtggcgaaggcggccaactggctcgatactgacgctgaggtgcgaaagcgtggggagcaaacaggattagataccctggtagtccacgccgtaaacgatggatgctagccgttaggcagcttgctgcttagtggcgcagctaacgcattaagcatcccgcctggggagtacggtcgcaagattaaaactcaaaggaattgacgggggcccgcacaagcggtggagcatgtggtttaattcgaagcaacgcgcagaaccttaccagcctttgacatggcaggacgatttccagagatggatctcttccagcaatggacctgcacacaggtgctgcatggctgtcgtcagctcgtgtcgtgagatgttgggttaagtcccgcaacgagcgcaaccctcgcctctagttgccagcattcagttgggcactctagagggactgccggtgataagccgcgaggaaggtggggatgacgtcaagtcctcatggcccttacgggctgggctacacacgtgctacaatggcggtgacagtgggatgcaaaggggcgacccctagcaaatctccaaaagccgtctcagttcggattgcactctgcaactcgagtgcatgaagttggaatcgctagtaatcgtggatcagcatgccacggtgaatacgttcccgggccttgtacacaccgcccgtcacaccatgggagttggctttacccgaaggcgctgcgctaacccgcaagggaggcaggcgaccacggtagggtcagcgactggggtg

SEQ ID NO: 3578 - DNA, 1400 bp, Xanthobacter tagetidis
  source 1..1400: mol_type = unassigned DNA
gctggcggcaggcctaacacatgcaagtcgagcgcccagcaatgggagcggcagacgggtgagtaacgcgtggggatctgccctttggtacggaataacccagggaaacttggactaataccgtatgtgcccttcgggggaaagatttatcgccaaaggatgaacccgcgtctgattagctagttggtggggtaatggcccaccaaggcgacgatcagtagctggtctgagaggatgatcagccacactgggactgagacacggcccagactcctacgggaggcagcagtggggaatattggacaatgggcgaaagcctgatccagccatgccgcgtgagtgatgaaggccttagggttgtaaagctctttcgccggtgaagataatgacggtaaccggagaagaagccccggctaacttcgtgccagcagccgcggtaatacgaagggggctagcgttgctcggaatcactgggcgtaaagcgcacgtaggcggatcgttaagtcaggggtgaaatcctggagctcaactccagaactgcccttgatactggcgatctcgagttcgagagaggttggtggaactccgagtgtagaggtgaaattcgtagatattcggaagaacaccagtggcgaaggcggccaactggctcgatactgacgctgaggtgcgaaagcgtggggagcaaacaggattagataccctggtagtccacgccgtaaacgatggatgctagccgttggggggtttacctttcagtggcgcagctaacgccttaagcatcccgcctggggagtacggtcgcaagattaaaactcaaaggaattgacgggggcccgcacaagcggtggagcatgtggtttaattcgaagcaacgcgcagaaccttaccagcctttgacatggcaggacgacttccggagacggatttcttccagcaatggacctgcacacaggtgctgcatggctgtcgtcagctcgtgtcgtgagatgttgggttaagtcccgcaacgagcgcaaccctcgcctctagttgccagcattaagttgggcactctagagggactgccggtgataagccgagaggaaggtggggatgacgtcaagtcctcatggcccttacgggctgggctacacacgtgctacaatggtggtgacagtgggatgcaaaagggcgacctctagcaaatctccaaaagccatctcagttcggattgcactctgcaactcgagtgcatgaagttggaatcgctagtaatcgtggatcagcatgccacggtgaatacgttcccgggccttgtacacaccgcccgtcacaccatgggagttggctttacccgaaggcgctgcgctaacccgcaagggaggcaggcgaccacggtagggtcagcgactggggtg

SEQ ID NO: 3579 - DNA, 1467 bp, Xanthomonas albilineans
  source 1..1467: mol_type = unassigned DNA
agtgaacgctggcggcaggcctaacacatgcaagtcgaacggcagcacagtggtagcaataccatgggtggcgagtggcggacgggtgaggaatacatcggaatctaccttttcgtgggggataacgtagggaaacttacgctaataccgcatacgaccttagggtgaaagcggaggaccttcgggcttcgcgcggatagatgagccgatgtcggattagctagttggtggggtaaaggcccaccaaggcgacgatccgtagctggtctgagaggatgatcagccacactggaactgagacacggtccagactcctacgggaggcagcagtggggaatattggacaatgggcgcaagcctgatccagccatgccgcgtgggtgaagaaggccttcgggttgtaaagcccttttgttggggaagaaaagcagtcggttaatacccgattgttctgacggtacccaaagaataagcaccggctaacttcgtgccagcagccgcggtaatacgaagggtgcaagcgttactcggaattactgggcgtaaagcgtgcgtaggtggttgtttaagtccgttgtgaaagccctgggctcaacctgggaattgcagyggatactgggcaactagagtgtggyagaggatggcggaattcccggtgtagcagtgaaatgcgtagagatcgggaggaacatctgtggcgaaggcggccatctggaccaacactgacactgaggcacgaaagcgtggggagcaaacaggattagataccctggtagtccacgccctaaacgatgcgaactggatgttgggtgcaacttggcacgcagtatcgaagctaacgcgttaagttcgccgcctggggagtacggtcgcaagactgaaactcaaaggaattgacgggggcccgcacaagcggtggagtatgtggtttaattcgatgcaacgcgaagaaccttacctggtcttgacatccacggaactttccagagatggattggtgccttcgggaaccgtgagacaggtgctgcatggctgtcgtcagctcgtgtcgtgagatgttgggttaagtcccgcaacgagcgcaacccttgtccttagttgccagcacgtaatggtgggaactctaaggagaccgccggtgacaaaccggaggaaggtggggatgacgtcaagtcatcatggcccttacgaccagggctacacacgtactacaatggtaaggacagagggctgcaaactcgcgagagtgagccaatcccagaaaccttatctcagtccggattggagtctgcaactcgactccatgaagtcggaatcgctagtaatcgcagatcagcattgctgcggtgaatacgttcccgggccttgtacacaccgcccgtcacaccatgggagtttgttgcaccagaagcaggtagcttaaccttcgggagggcgcttgccacggtgtggccgatgactggggtg

SEQ ID NO: 3580 - DNA, 1469 bp, Xanthomonas alfalfae
  source 1..1469: mol_type = unassigned DNA
agtgaacgctggcggcaggcctaacacatgcaagtcgaacggcagcacagtaagagcttgctcttatgggtggcgagtggcggacgggtgaggaatacatcggaatctactctttcgtgggggataacgtagggaaacttacgctaataccgcatacgacctacgggtgaaagcggaggaccttcgggcttcgcgcggttgaatgagccgatgtcggattagctagttggcggggtaaaggcccaccaaggcgacgatccgtagctggtctgagaggatgatcagccacactggaactgagacacggtccagactcctacgggaggcagcagtggggaatattggacaatgggcgcaagcctgatccagccatgccgcgtgggtgaagaaggccttcgggttgtaaagcccttttgttgggaaagaaaagcagtcggttaatacccgattgttctgacggtacccaaagaataagcaccggctaacttcgtgccagcagccgcggtaatacgaagggtgcaagcgttactcggaattactgggcgtaaagcgtgcgtaggtggtggtttaagtctgttgtgaaagccctgggctcaacctgggaattgcagtggatactggatcactagagtgtggtagagggtagcggaattcccggtgtagcagtgaaatgcgtagagatcgggaggaacatccgtggcgaaggcggctacctggaccaacactgacactgaggcacgaaagcgtggggagcaaacaggattagataccctggtagtccacgccctaaacgatgcgaactggatgttgggtgcaatttggcacgcagtatcgaagctaacgcgttaagttcgccgcctggggagtacggtcgcaagactgaaactcaaaggaattgacgggggcccgcacaagcggtggagtatgtggtttaattcgatgcaacgcgaagaaccttacctggtcttgacatccacggaactttccagagatggattggtgccttcgggaaccgtgagacaggtgctgcatggctgtcgtcagctcgtgtcgtgagatgttgggttaagtcccgcaacgagcgcaacccttgtccttagttgccagcacgtaatggtgggaactctaaggagaccgccggtgacaaaccggaggaaggtggggatgacgtcaagtcatcatggcccttacgaccagggctacacacgtactacaatggtagggacagagggctgcaaacccgcgagggcaagccaatcccagaaaccctatctcagtccggattggagtctgcaactcgactccatgaagtcggaatcgctagtaatcgcagatcagcattgctgcggtgaatacgttcccgggccttgtacacaccgcccgtcacaccatgggagtttgttgcaccagaagcaggtagcttaaccttcgggagggcgcttgccacggtgtggccgatgactggggtg

SEQ ID NO: 3581 - DNA, 1469 bp, Xanthomonas arboricola
  source 1..1469: mol_type = unassigned DNA
agtgaacgctggcggcaggcctaacacatgcaagtcgaacggcagcacagtaagagcttgctcttatgggtggcgagtggcggacgggtgaggaatacatcggaatctactctttcgtgggggataacgtagggaaacttacgctaataccgcatacgacctacgggtgaaagcggaggaccttcgggcttcgcgcgattgaatgagccgatgtcggattagctagttggcggggtaaaggcccaccaaggcgacgatccgtagctggtctgagaggatgatcagccacactggaactgagacacggtccagactcctacgggaggcagcagtggggaatattggacaatgggcgcaagcctgatccagccatgccgcgtgggtgaagaaggccttcgggttgtaaagcccttttgttgggaaagaaaagcagtcggttaatacccgattgttctgacggtacccaaagaataagcaccggctaacttcgtgccagcagccgcggtaatacgaagggtgcaagcgttactcggaattactgggcgtaaagcgtgcgtaggtggtggtttaagtctgttgtgaaagccctgggctcaacctgggaattgcagtggatactgggtcactagagtgtggtagagggtagcggaattcccggtgtagcagtgaaatgcgtagagatcgggaggaacatccgtggcgaaggcggctacctggaccaacactgacactgaggcacgaaagcgtggggagcaaacaggattagataccctggtagtccacgccctaaacgatgcgaactggatgttgggtgcaatttggcacgcagtatcgaagctaacgcgttaagttcgccgcctggggagtacggtcgcaagactgaaactcaaaggaattgacgggggcccgcacaagcggtggagtatgtggtttaattcgatgcaacgcgaagaaccttacctggtcttgacatccacggaactttccagagatggattggtgccttcgggaaccgtgagacaggtgctgcatggctgtcgtcagctcgtgtcgtgagatgttgggttaagtcccgcaacgagcgcaacccttgtccttagttgccagcacgtcatggtgggaactctaaggagaccgccggtgacaaaccggaggaaggtggggatgacgtcaagtcatcatggcccttacgaccagggctacacacgtactacaatggtagggacagagggctgcaaacccgcgagggcaagccaatcccagaaaccctatctcagtccggattggagtctgcaactcgactccatgaagtcggaatcgctagtaatcgcagatcagcattgctgcggtgaatacgttcccgggccttgtacacaccgcccgtcacaccatgggagtttgttgcaccagaagcaggtagcttaaccttcgggagggcgcttgccacggtgtggccgatgactggggtg

SEQ ID NO: 3582 - DNA, 1469 bp, Xanthomonas axonopodis
  source 1..1469: mol_type = unassigned DNA
agtgaacgctggcggcaggcctaacacatgcaagtcgaacggcagcacagtaagagcttgctcttatgggtggcgagtggcggacgggtgaggaatacatcggaatctactctttcgtgggggataacgtagggaaacttacgctaataccgcatacgacctacgggtgaaagcggaggaccttcgggcttcgcgcggttgaatgagccgatgtcggattagctagttggcggggtaaaggcccaccaaggcgacgatccgtagctggtctgagaggatgatcagccacactggaactgagacacggtccagactcctacgggaggcagcagtggggaatattggacaatgggcgcaagcctgatccagccatgccgcgtgggtgaagaaggccttcgggttgtaaagcccttttgttgggaaagaaaagcagtcggttaatacccgattgttctgacggtacccaaagaataagcaccggctaacttcgtgccagcagccgcggtaatacgaagggtgcaagcgttactcggaattactgggcgtaaagcgtgcgtaggtggtggtttaagtctgttgtgaaagccctgggctcaacctgggaattgcagtggatactggatcactagagtgtggtagagggtagcggaattcccggtgtagcagtgaaatgcgtagagatcgggaggaacatccgtggcgaaggcggctacctggaccaacactgacactgaggcacgaaagcgtggggagcaaacaggattagataccctggtagtccacgccctaaacgatgcgaactggatgttgggtgcaatttggcacacagtatcgaagctaacgcgttaagttcgccgcctggggagtacggtcgcaagactgaaactcaaaggaattgacgggggcccgcacaagcggtggagtatgtggtttaattcgatgcaacgcgaagaaccttacctggtcttgacatccacggaactttccagagatggattggtgccttcgggaaccgtgagacaggtgctgcatggctgtcgtcagctcgtgtcgtgagatgttgggttaagtcccgcaacgagcgcaacccttgtccttagttgccagcacgtcatggtgggaactctaaggagaccgccggtgacaaaccggaggaaggtggggatgacgtcaagtcatcatggcccttacgaccagggctacacacgtactacaatggtaaggacagagggctgcaaactcgcgagagtgagccaatcccagaaaccttatctcagtccggattggagtctgcaactcgactccatgaagtcggaatcgctagtaatcgcagatcagcattgctgcggtgaatacgttcccgggccttgtacacaccgcccgtcacaccatgggagtttgttgcaccagaagcaggtagcttaaccttcgggagggcgcttgccacggtgtggccgatgactggggtg

SEQ ID NO: 3583 - DNA, 1469 bp, Xanthomonas bromi
  source 1..1469: mol_type = unassigned DNA
agtgaacgctggcggcaggcctaacacatgcaagtcgmrcggcagcacagtaagarcttkctcttatgggtggcgagtggcggacgggtgaggaatacatcggaatctactctttcgtgggggataacgtagggaaacttacgctaataccgcatacgacctacgggtgaaagcggaggaccttcgggcttcgcgcgattgaatgagccgatgtcggattagctagttggcggggtaaaggcccaccaaggcgacgatccgtagctggtctgagaggatgatcagccacactggaactgagacacggtccagactcctacgggaggcagcagtggggaatattggacaatgggcgcaagcctgatccagccatgccgcgtgggtgaagaaggccttcgggttgtaaagcccttttgttgggaaagaaaagcagtcggttaatacccgattgttctgacggtacccaaagaataagcaccggctaacttcgtgccagcagccgcggtaatacgaagggtgcaagcgttactcggaattactgggcgtaaagcgtgcgtaggtggtggtttaagtctgttgtgaaagccctgggctcaacctgggaattgcagtggatactgggtcactagagtgtggtagagggtagcggaattcccggtgtagcagtgaaatgcgtagagatcgggaggaacatccgtggcgaaggcggctacctggaccaacactgacactgaggcacgaaagcgtggggagcaaacaggattagataccctggtagtccacgccctaaacgatgcgaactggatgttgggtgcaatttggcacgcagtatcgaagctaacgcgttaagttcgccgcctggggagtacggtcgcaagactgaaactcaaaggaattgacgggggcccgcacaagcggtggagtatgtggtttaattcgatgcaacgcgaagaaccttacctggtcttgacatccacggaactttccagagatggattggtgycttcgggaaccgtgagacaggtgctgcatggctgtcgtcagctcgtgtcgtgagatgttgggttaagtcccgcaacgagcgcaacccttgtccttagttgccagcacgtaatggtgggaactctaaggagaccgccggtgacaaaccggaggaaggtggggatgacgtcaagtcatcatggcccttacgaccagggctacacacgtactacaatggtagggacagagggctgcaaacccgcgagggcaagccaatcccagaaaccctatctcagtccggattggagtctgcaactcgactccatgaagtcggaatcgctagtaatcgcagatcagcattgctgcggtgaatacgttcccgggccttgtacacaccgcccgtcacaccatgggagtttgttgcaccagaagcaggtagcttaaccttcgggagggcgcttgccacggtgtggccgatgactggggtg

SEQ ID NO: 3584 - DNA, 1469 bp, Xanthomonas campestris
  source 1..1469: mol_type = unassigned DNA
agtgaacgctggcggcaggcctaacacatgcaagtcgaacggcagcacagtaagagcttgctcttatgggtggcgagtggcggacgggtgaggaatacatcggaatctactctttcgtgggggataacgtagggaaacttacgctaataccgcatacgacctacgggtgaaagcggaggaccttcgggcttcgcgcgattgaatgagccgatgtcggattagctagttggcggggtaaaggcccaccaaggcgacgatccgtagctggtctgagaggatgatcagccacactggaactgagacacggtccagactcctacgggaggcagcagtggggaatattggacaatgggcgcaagcctgatccagccatgccgcgtgggtgaagaaggccttcgggttgtaaagcccttttgttgggaaagaaaagcagtcggttaatacccgattgttctgacggtacccaaagaataagcaccggctaacttcgtgccagcagccgcggtaatacgaagggtgcaagcgttactcggaattactgggcgtaaagcgtgcgtaggtggtggtttaagtctgttgtgaaagccctgggctcaacctgggaattgcagtggatactgggtcactagagtgtggtagagggtagcggaattcccggtgtagcagtgaaatgcgtagagatcgggaggaacatccgtggcgaaggcggctacctggaccaacactgacactgaggcacgaaagcgtggggagcaaacaggattagataccctggtagtccacgccctaaacgatgcgaactggatgttgggtgcaatttggcacgcagtatcgaagctaacgcgttaagttcgccgcctggggagtacggtcgcaagactgaaactcaaaggaattgacgggggcccgcacaagcggtggagtatgtggtttaattcgatgcaacgcgaagaaccttacctggtcttgacatccacggaactttccagagatggattggtgccttcgggaaccgtgagacaggtgctgcatggctgtcgtcagctcgtgtcgtgagatgttgggttaagtcccgcaacgagcgcaacccttgtccttagttgccagcacgtaatggtgggaactctaaggagaccgccggtgacaaaccggaggaaggtggggatgacgtcaagtcatcatggcccttacgaccagggctacacacgtactacaatggtagggacagagggctgcaaacccgcgagggtaagccaatcccagaaaccctatctcagtccggattggagtctgcaactcgactccatgaagtcggaatcgctagtaatcgcagatcagcattgctgcggtgaatacgttcccgggccttgtacacaccgcccgtcacaccatgggagtttgttgcaccagaagcaggtagcttaaccttcgggagggcgcttgccacggtgtggccgatgactggggtg

SEQ ID NO: 3585 - DNA, 1469 bp, Xanthomonas citri
  source 1..1469: mol_type = unassigned DNA
agtgaacgctggcggcaggcctaacacatgcaagtcgaacggcagcacagtaagagtttgctcttatgggtggcgagtggcggacgggtgaggaatacatcggaatctactctttcgtgggggataacgtagggaaacttacgctaataccgcatacgacctacgggtgaaagcggaggaccttcgggcttcgcgcggttgaatgagccgatgtcggattagctagttggcggggtaaaggcccaccaaggcgacgatccgtagctggtctgagaggatgatcagccacactggaactgagacacggtccagactcctacgggaggcagcagtggggaatattggacaatgggcgcaagcctgatccagccatgccgcgtgggtgaagaaggccttcgggttgtaaagcccttttgttgggaaagaaaagcagtcggttaatacccgattgttctgacggtacccaaagaataagcaccggctaacttcgtgccagcagccgcggtaatacgaagggtgcaagcgttactcggaattactgggcgtaaagcgtgcgtaggtggtggtttaagtctgttgtgaaagccctgggctcaacctgggaattgcagtggatactgggtcactagagtgtggtagagggtagcggaattcccggtgtagcagtgaaatgcgtagagatcgggaggaacatccgtggcgaaggcggctacctggaccaacactgacactgaggcacgaaagcgtggggagcaaacaggattagataccctggtagtccacgccctaaacgatgcgaactggatgttgggtgcaatttggcacgcagtatcgaagctaacgcgttaagttcgccgcctggggagtacggtcgcaagactgaaactcaaaggaattgacgggggcccgcacaagcggtggagtatgtggtttaattcgatgcaacgcgaagaaccttacctggtcttgacatccacggaactttccagagatggattggtgccttcgggaaccgtgagacaggtgctgcatggctgtcgtcagctcgtgtcgtgagatgttgggttaagtcccgcaacgagcgcaacccttgtccttagttgccagcacgtaatggtgggaactctaaggagaccgccggtgacaaaccggaggaaggtggggatgacgtcaagtcatcatggcccttacgaccagggctacacacgtactacaatggtagggacagagggctgcaaacccgcgagggcaagccaatcccagaaaccctatctcagtccggattggagtctgcaactcgactccatgaagtcggaatcgctagtaatcgcagatcagcattgctgcggtgaatacgttcccgggccttgtacacaccgcccgtcacaccatgggagtttgttgcaccagaagcaggtagcttaaccttcgggagggcgcttgccacggtgtggccgatgactggggtg

SEQ ID NO: 3586 - DNA, 1469 bp, Xanthomonas codiaei
  source 1..1469: mol_type = unassigned DNA
  misc_difference 38..39: note = n is a, c, g, or t
  misc_difference 73: note = n is a, c, g, or t
agtgaacgctggcggcaggcctaacacatgcaagtcgnncggcagcacagtaagagcttgctcttatgggtgncgagtggcggacgggtgaggaatacatcggaatctactctttcgtgggggataacgtagggaaacttacgctaataccgcatacgacctacgggtgaaagcggaggaccttcgggcttcgcgcggttgaatgagccgatgtcggattagctagttggcggggtaaaggcccaccaaggcgacgatccgtagctggtctgagaggatgatcagccacactggaactgagacacggtccagactcctacgggaggcagcagtggggaatattggacaatgggcgcaagcctgatccagccatgccgcgtgggtgaagaaggccttcgggttgtaaagcccttttgttgggaaagaaaagcaatcggttaatacccggttgttctgacggtacccaaagaataagcaccggctaacttcgtgccagcagccgcggtaatacgaagggtgcaagcgttactcggaattactgggcgtaaagcgtgcgtaggtggtgatttaagtctgttgtgaaagccctgggctcaacctgggaattgcagtggatactgggtcactagagtgtggtagagggtagcggaattcccggtgtagcagtgaaatgcgtagagatcgggaggaacatccgtggcgaaggcggctacctggaccaacactgacactgaggcacgaaagcgtggggagcaaacaggattagataccctggtagtccacgccctaaacgatgcgaactggatgttgggtgcaatttggcacgcagtatcgaagctaacgcgttaagttcgccgcctggggagtacggtcgcaagactgaaactcaaaggaattgacgggggcccgcacaagcggtggagtatgtggtttaattcgatgcaacgcgaagaaccttacctggtcttgacatccacggaactttccagagatggattggtgccttcgggaaccgtgagacaggtgctgcatggctgtcgtcagctcgtgtcgtgagatgttgggttaagtcccgcaacgagcgcaacccttgtccttagttgccagcacgtaatggtgggaactctaaggagaccgccggtgacaaaccggaggaaggtggggatgacgtcaagtcatcatggcccttacgaccagggctacacacgtactacaatggtagggacagagggctgcaaacccgcgagggcaagccaatcccagaaaccctatctcagtccggattggagtctgcaactcgactccatgaagtcggaatcgctagtaatcgcagatcagcattgctgcggtgaatacgttcccgggccttgtacacaccgcccgtcacaccatgggagtttgttgcaccagaagcaggtagcttaaccttcgggagggcgcttgccacggtgtggccgatgactggggtg

SEQ ID NO: 3587 - DNA, 1469 bp, Xanthomonas cucurbitae
  source 1..1469: mol_type = unassigned DNA
agtgaacgctggcggcaggcctaacacatgcaagtcgaacggcagcacagtaagagcttgctcttatgggtggcgagtggcggacgggtgaggaatacatcggaatctactctttcgtgggggataacgtagggaaacttacgctaataccgcatacgacctacgggtgaaagcggaggaccttcgggcttcgcgcgattgaatgagccgatgtcggattagctagttggcggggtaaaggcccaccaaggcgacgatccgtagctggtctgagaggatgatcarccacactggaactgagacacggtccagactcctacgggaggcagcagtggggaatattggacaatgggcgcaagcctgatccagccatgccgcgtgggtgaagaaggccttcgggttgtaaagcccttttgttgggaaagaaaagcagtcggttaatacccgattgttctgacggtacccaaagaataagcaccggctaacttcgtgccagcagccgcggtaatacgaagggtgcaagcgttactcggaattactgggcgtaaagcgtgcgtaggtggtggtttaagtctgttgtgaaagccctgggctcaacctgggaattgcagtggatactggrtcactagagtgtggtagagggtagyggaattcccggtgtagcagtgaaatgcgtwgagatcgggaggaacatccgtggcgaaggcggctacctggaccaacactgacactgaggcacgaaagcgtggggagcaaacaggattagataccctggtagtccacgccctaaacgatgcgaactggatgttgggtgcaatttggcacgcagtatcgaagctaacgcgttaagttcgccgcctggggagtacggtcgcaagactgaaactcaaaggaattgacgggggcccgcacaagcggtggagtatgtggtttaattcgatgcaacgcgaagaaccttacctggtcttgacatccacggaactttccagagatggattggtgccttcgggaaccgtgagacaggtgctgcatggctgtcgtcagctcgtgtcgtgagatgttgggttaagtcccgcaacgagcgcaacccttgtccttagttgccagcacgtaatggtgggaactctaaggagaccgccggtgacaaaccggaggaaggtggggatgacgtcaagtcatcatggcccttacgaccagggctacacacgtactacaatggtagggacagagggctgcaaacccgcgagggtaagccaatcccagaaaccctatctcagtccggattggagtctgcaactcgactccatgaagtcggaatcgctagtaatcgcagatcagcattgctgcggtgaatacgttcccgggccttgtacacaccgcccgtcacaccatgggagtttgttgcaccagaagcaggtagcttaaccttcgggagggcgcttgccacggtgtggccgatgactggggtg

SEQ ID NO: 3588 - DNA, 1469 bp, Xanthomonas cynarae; identical to SEQ ID NO: 3584
  source 1..1469: mol_type = unassigned DNA

SEQ ID NO: 3589 - DNA, 1452 bp, Xanthomonas dyei
  source 1..1452: mol_type = unassigned DNA
ggcctaacacatgcaagtcgaacggcagcacagtaagagcttgctcttatgggtggcgagtggcggacgggtgaggaatacatcggaatctactctttcgtgggggataacgtagggaaacttacgctaataccgcatacgacctacgggtgaaagcggaggaccttcgggcttcgcgcgattgaatgagccgatgtcggattagctagttggcggggtaaaggcccaccaaggcgacgatccgtagctggtctgagaggatgatcagccacactggaactgagacacggtccagactcctacgggaggcagcagtggggaatattggacaatgggcgcaagcctgatccagccatgccgcgtgggtgaagaaggccttcgggttgtaaagcccttttgttgggaaagaaaagcagtcggttaatacccgattgttctgacggtacccaaagaataagcaccggctaacttcgtgccagcagccgcggtaatacgaagggtgcaagcgttactcggaattactgggcgtaaagcgtgcgtaggtggtggtttaagtctgttgtgaaagccctgggctcaacctgggaattgcagtggatactgggtcactagagtgtggtagagggtagcggaattcccggtgtagcagtgaaatgcgtagagatcgggaggaacatccgtggcgaaggcggctacctggaccaacactgacactgaggcacgaaagcgtggggagcaaacaggattagataccctggtagtccacgccctaaacgatgcgaactggatgttgggtgcaatttggcacgcagtatcgaagctaacgcgttaagttcgccgcctggggagtacggtcgcaagactgaaactcaaaggaattgacgggggcccgcacaagcggtggagtatgtggtttaattcgatgcaacgcgaagaaccttacctggtcttgacatccacggaactttccagagatggattggtgccttcgggaaccgtgagacaggtgctgcatggctgtcgtcagctcgtgtcgtgagatgttgggttaagtcccgcaacgagcgcaacccttgtccttagttgccagcacgtaatggtgggaactctaaggagaccgccggtgacaaaccggaggaaggtggggatgacgtcaagtcatcatggcccttacgaccagggctacacacgtactacaatggtagggacagagggctgcaaacccgcgagggcaagccaatcccagaaaccctatctcagtccggattggagtctgcaactcgactccatgaagtcggaatcgctagtaatcgcagatcagcattgctgcggtgaatacgttcccgggccttgtacacaccgcccgtcacaccatgggagtttgttgcaccagaagcaggtagcttaaccttcgggagggcgcttgccacggtgtggccgatgactggggtg

SEQ ID NO: 3590 - DNA, 1469 bp, Xanthomonas euvesicatoria; identical to SEQ ID NO: 3580
  source 1..1469: mol_type = unassigned DNA

SEQ ID NO: 3591 - DNA, 1469 bp, unidentified
  source 1..1469: mol_type = unassigned DNA; note = Xanthomonas floridensis
agtgaacgctggcggcaggcctaacacatgcaagtcgaacggcagcacagtaagagcttgctcttatgggtggcgagtggcggacgggtgaggaatacatcggaatctactctttcgtgggggataacgtagggaaacttacgctaataccgcatacgacctacgggtgaaagcggaggaccttcgggcttcgcgcggttgaatgagccgatgtcggattagctagttggcggggtaaaggcccaccaaggcgacgatccgtagctggtctgagaggatgatcagccacactggaactgagacacggtccagactcctacgggaggcagcagtggggaatattggacaatgggcgcaagcctgatccagccatgccgcgtgggtgaagaaggccttcgggttgtaaagcccttttgttgggaaagaaaagcagtcggttaatacccgattgttctgacggtacccaaagaataagcaccggctaacttcgtgccagcagccgcggtaatacgaagggtgcaagcgttactcggaattactgggcgtaaagcgtgcgtaggtggtggtttaagtctgttgtgaaagccctgggctcaacctgggaattgcagtggatactgggtcactagagtgtggtagagggtagcggaattcccggtgtagcagtgaaatgcgtagagatcgggaggaacatccgtggcgaaggcggctacctggaccaacactgacactgaggcacgaaagcgtggggagcaaacaggattagataccctggtagtccacgccctaaacgatgcgaactggatgttgggtgcaatttggcacgcagtatcgaagctaacgcgttaagttcgccgcctggggagtacggtcgcaagactgaaactcaaaggaattgacgggggcccgcacaagcggtggagtatgtggtttaattcgatgcaacgcgaagaaccttacctggtcttgacatccacggaactttccagagatggattggtgccttcgggaaccgtgagacaggtgctgcatggctgtcgtcagctcgtgtcgtgagatgttgggttaagtcccgcaacgagcgcaacccttgtccttagttgccagcacgtaatggtgggaactctaaggagaccgccggtgacaaaccggaggaaggtggggatgacgtcaagtcatcatggcccttacgaccagggctacacacgtactacaatggtagggacagagggctgcaaacccgcgagggcaagccaatcccagaaaccctatctcagtccggattggagtctgcaactcgactccatgaagtcggaatcgctagtaatcgcagatcagcattgctgcggtgaatacgttcccgggccttgtacacaccgcccgtcacaccatgggagtttgttgcaccagaagcaggtagcttaaccttcgggagggcgcttgccacggtgtggccgatgactggggtg

SEQ ID NO: 3592 - DNA, 1469 bp, Xanthomonas fragariae
  source 1..1469: mol_type = unassigned DNA
  misc_difference 571: note = n is a, c, g, or t
agtgaacgctggcggcaggcctaacacatgcaagtcgaacggcagcacggtaagagcttgctcttatgggtggcgagtggcggacgggtgaggaatacatcggaatctactctttcgtgggggataacgtagggaaacttacgctaataccgcatacgacccacgggtgaaagcggaggaccttcgggcttcgcgcgattgaatgagccgatgtcggattagctagttggcggggtaaaggcccaccaaggcgacgatccgtagctggtctgagaggatgatcagccacactggaactgagacacggtccagactcctacgggaggcagcagtggggaatattggacaatgggcgcaagcctgatccagccatgccgcgtgggtgaagaaggccttcgggttgtaaagcccttttgttgggaaagaaaagcagtcggttaatacccgattgttctgacggtacccaaagaataagcaccggctaacttcgtgccagcagccgcggtaatacgaagggtgcaagcgttactcggaattactgggcgtaaagcgtgcgtaggtggtggtttangtctgttgtgaaagccctgggctcaacctgggaattgcagyggatactggatcactagagtgtggtagagggtagcggaattcccggtgtagcagttaaatccgtrgagatcgggaggaacatccgtggcgaaggcggctacctggaccaacactgacactgaggcacgaaagcgtggggagcaaacaggattagataccctggtagtccacgccctaaacgatgcgaactggatgttgggtgcaatttggcacgcagtatcgaagctaacgcgttaagttcgccgcctggggagtacggtcgcaagactgaaactcaaaggaattgacgggggcccgcacaagcggtggagtatgtggtttaattcgatgcaacgcgaagaaccttacctggtcttgacatccacggaactttccagagatggattggtgccttcgggaaccgtgagacaggtgctgcatggctgtcgtcagctcgtgtcgtgagatgttgggttaagtcccgcaacgagcgcaacccttgtccttagttgccagcacgtaatggtgggaactctaaggagaccgccggtgacaaaccggaggaaggtggggatgacgtcaagtcatcatggcccttacgaccagggctacacacgtactacaatggtagggacagagggctgcaaacccgcgagggcaagccaatcccagaaaccctatctcagtccggattggagtctgcaactcgactccatgaagtcggaatcgctagtaatcgcagatcagcattgctgcggtgaatacgttcccgggccttgtacacaccgcccgtcacaccatgggagtttgttgcaccagaagcaggtagcttaaccttcgggagggcgcttgccacggtgtggccgatgactggggtg

SEQ ID NO: 3593 - DNA, 1469 bp, Xanthomonas fuscans
  source 1..1469: mol_type = unassigned DNA
agtgaacgctggcggcaggcctaacacatgcaagtcgaacggcagcacagtaagagcttgctcttataggtggcgagtggcggacgggtgaggaatacatcggaatctactctttcgtgggggataacgtagggaaacttacgctaataccgcatacgacctacgggtgaaagcggaggaccttcgggcttcgcgcggttgaatgagccgatgtcggattagctagttggcggggtaaaggcccaccaaggcgacgatccgtagctggtctgagaggatgatcagccacactggaactgagacacggtccagactcctacgggaggcagcagtggggaatattggacaatgggcgcaagcctgatccagccatgccgcgtgggtgaagaaggccttcgggttgtaaagcccttttgttgggaaagaaaagcagtcggttaatacccgattgttctgacggtacccaaagaataagcaccggctaacttcgtgccagcagccgcggtaatacgaagggtgcaagcgttactcggaattactgggcgtaaagcgtgcgtaggtggtggtttaagtctgttgtgaaagccctgggctcaacctgggaattgcagtggatactggatcactagagtgtggtagagggtagcggaattcccggtgtagcagtgaaatgcgtagagatcgggaggaacatccgtggcgaaggcggctacctggaccaacactgacactgaggcacgaaagcgtggggagcaaacaggattagataccctggtagtccacgccctaaacgatgcgaactggatgttgggtgcaatttggcacgcagtatcgaagctaacgcgttaagttcgccgcctggggagtacggtcgcaagactgaaactcaaaggaattgacgggggcccgcacaagcggtggagtatgtggtttaattcgatgcaacgcgaagaaccttacctggtcttgacatccacggaactttccagagatggattggtgccttcgggaaccgtgagacaggtgctgcatggctgtcgtcagctcgtgtcgtgagatgttgggttaagtcccgcaacgagcgcaacccttgtccttagttgccagcacgtaatggtgggaactctaaggagaccgccggtgacaaaccggaggaaggtggggatgacgtcaagtcatcatggcccttacgaccagggctacacacgtactacaatggtagggacagagggctgcaaacccgcgagggcaagccaatcccagaaaccctatctcagtccggattggagtctgcaactcgactccatgaagtcggaatcgctagtaatcgcagatcagcattgctgcggtgaatacgttcccgggccttgtacacaccgcccgtcacaccatgggagtttgttgcaccagaagcaggtagcttaaccttcgggagggcgcttgccacggtgtggccgatgactggggtg

SEQ ID NO: 3594 - DNA, 1469 bp, Xanthomonas gardneri; identical to SEQ ID NO: 3584
  source 1..1469: mol_type = unassigned DNA

SEQ ID NO: 3595 - DNA, 1469 bp, Xanthomonas hortorum; identical to SEQ ID NO: 3581
  source 1..1469: mol_type = unassigned DNA

SEQ ID NO: 3596 - DNA, 1467 bp, unidentified
  source 1..1467: mol_type = unassigned DNA; note = Xanthomonas hyacinthi
  misc_difference 283: note = n is a, c, g, or t
agtgaacgctggcggcaggcctaacacatgcaagtcgaacggcagcacagtggtagcaatgccatgggtggcgagtggcggacgggtgaggaatacatcggaatctaccttttcgtgggggataacgtagggaaacttacgctaataccgcatacgaccttagggtgaaagcggaggaccttcgggcttcgcgcggatagatgagccgatgtcggattagctagttggcggggtaaaggcccaccaaggcgacgatccgtagctggtctgagaggatgatcanccacactggaactgagacacggtccagactcctacgggaggcagcagtggggaatattggacaatgggcgcaagcctgatccagccatgccgcgtgggtgaagaaggccttcgggttgtaaagcccttttgttgggaaagaaaagcagtcggttaatacccgattgttctgacggtacccaaagaataagcaccggctaacttcgtgccagcagccgcggtaatacgaagggtgcaagcgttactcggaattactgggcgtaaagcgtgcgtaggtggttgtttaagtccgttgtgaaagccctgggctcaacctgggaattgcagtggatactgggcaactagagtgtggtagaggatggcggaattcccggtgtagcagtgaaatgcgtagagatcgggaggaacatctgtggcgaaggcggccatctggaccaacactgacactgaggcacgaaagcgtggggagcaaacaggattagataccctggtagtccacgccctaaacgatgcgaactggatgttgggtgcaacttggcacgcagtatcgaagctaacgcgttaagttcgccgcctggggagtacggtcgcaagactgaaactcaaaggaattgacgggggcccgcacaagcggtggagtatgtggtttaattcgatgcaacgcgaagaaccttacctggtcttgacatccacggaactttccagagatggataggtgccttcgggaaccgtgagacaggtgctgcatggctgtcgtcagctcgtgtcgtgagatgttgggttaagtcccgcaacgagcgcaacccttgtccttagttgccagcacgtcatggtgggaactctaaggagaccgccggtgacaaaccggaggaaggtggggatgacgtcaagtcatcatggcccttacgaccagggctacacacgtactacaatggtgaggacagagggctgcaaactcgcgagagtgagccaatcccagaaacctcatctcagtccggattggagtctgcaactcgactccatgaagtcggaatcgctagtaatcgcagatcagcattgctgcggtgaatacgttcccgggccttgtacacaccgcccgtcacaccatgggagtttgttgcaccagaagcaggtagcttaaccttcgggagggcgcttgccacggtgtggccgatgactggggtg

SEQ ID NO: 3597 - DNA, 1467 bp, Xanthomonas melonis
  source 1..1467: mol_type = unassigned DNA
agtgaacgctggcggcaggcctaacacatgcaagtcgaacggcagcacagtggtagcaataccatgggtggcgagtggcggacgggtgaggaatacatcggaatctaccttttcgtgggggataacgtagggaaacttacgctaataccgcatacgaccttagggtgaaagcggaggaccttcgggcttcgcgcggatagatgagccgatgtcggattagctagttggcggggtaaaggcccaccaaggcgacgatccgtagctggtctgagaggatgatcagccacactggaactgagacacggtccagactcctacgggaggcagcagtggggaatattggacaatgggcgcaagcctgatccagccatgccgcgtgggtgaagaaggccttcgggttgtaaagcccttttgttgggaaagaaaagcagtcggttaatacccgattgttctgacggtacccaaagaataagcaccggctaacttcgtgccagcagccgcggtaatacgaagggtgcaagcgttactcggaattactgggcgtaaagcgtgcgtaggtggttgtttaagtccgttgtgaaagccctgggctcaacctgggaattgcagtggatactgggcaactagagtgtggtagaggatggcggaattcccggtgtagcagtgaaatgcgtagagatcgggaggaacatctgtggcgaaggcggccatctggaccaacactgacactgaggcacgaaagcgtggggagcaaacaggattagataccctggtagtccacgccctaaacgatgcgaactggatgttgggtgcaacttggcacgcagtatcgaagctaacgcgttaagttcgccgcctggggagtacggtcgcaagactgaaactcaaaggaattgacgggggcccgcacaagcggtggagtatgtggtttaattcgatgcaacgcgaagaaccttacctggtcttgacatccacggaactttccagagatggattggtgccttcgggaaccgtgagacaggtgctgcatggctgtcgtcagctcgtgtcgtgagatgttgggttaagtcccgcaacgagcgcaacccttgtccttagttgccagcacgtcatggtgggaactttaaggagaccgccggtgacaaaccggaggaaggtggggatgacgtcaagtcatcatggcccttacgaccagggctacacacgtactacaatggtgaggacagagggctgcaaactcgcgagagtgagccaatcccagaaacctcatctcagtccggattggagtctgcaactcgactccatgaagtcggaatcgctagtaatcgcagatcagcattgctgcggtgaatacgttcccgggccttgtacacaccgcccgtcacaccatgggagtttgttgcaccagaagcaggtagcttaaccttcgggagggcgcttgccacggtgtggccgatgactggggtg

SEQ ID NO: 3598 - DNA, 1469 bp, unidentified
  source 1..1469: mol_type = unassigned DNA; note = Xanthomonas nasturtii
agtgaacgctggcggcaggcctaacacatgcaagtcgaacggcagcacagtaagagcttgctcttatgggtggcgagtggcggacgggtgaggaatacatcggaatctactctttcgtgggggataacgtagggaaacttacgctaataccgcatacgacctacgggtgaaagcggaggaccttcgggcttcgcgcgattgaatgagccgatgtcggattagctagttggcggggtaaaggcccaccaaggcgacgatccgtagctggtctgagaggatgatcagccacactggaactgagacacggtccagactcctacgggaggcagcagtggggaatattggacaatgggcgcaagcctgatccagccatgccgcgtgggtgaagaaggccttcgggttgtaaagcccttttgttgggaaagaaaagcagtcggttaatacccgattgttctgacggtacccaaagaataagcaccggctaacttcgtgccagcagccgcggtaatacgaagggtgcaagcgttactcggaattactgggcgtaaagcgtgcgtaggtggtggtttaagtctgttgtgaaagccctgggctcaacctgggaattgcagtggatactgggtcactagagtgtggtagagggtagcggaattcccggtgtagcagtgaaatgcgtagagatcgggaggaacatccgtggcgaaggcggctacctggaccaacactgacactgaggcacgaaagcgtggggagcaaacaggattagataccctggtagtccacgccctaaacgatgcgaactggatgttgggtgcaatttggcacgcagtatcgaagctaacgcgttaagttcgccgcctggggagtacggtcgcaagactgaaactcaaaggaattgacgggggcccgcacaagcggtggagtatgtggtttaattcgatgcaacgcgaagaaccttacctggtcttgacatccacggaactttccagagatggattggtgccttcgggaaccgtgagacaggtgctgcatggctgtcgtcagctcgtgtcgtgagatgttgggttaagtcccgcaacgagcgcaacccttgtccttagttgccagcacgtaatggtgggaactctaaggagaccgccggtgacaaaccggaggaaggtggggatgacgtcaagtcatcatggcccttacgaccagggctacacacgtactacaatggtagggacagagggctgcaaacccgcgagggcaagccaatcccagaaaccctatctcagtccggattggagtctgcaactcgactccatgaagtcggaatcgctagtaatcgcagatcagcattgctgcggtgaatacgttcccgggccttgtacacaccgcccgtcacaccatgggagtttgttgcaccagaagcaggtagcttaaccttcgggagggcgcttgccacggtgtggccgatgactggggtg

SEQ ID NO: 3599 - DNA, 1469 bp, Xanthomonas oryzae
  source 1..1469: mol_type = unassigned DNA
agtgaacgctggcggcaggcctaacacatgcaagtcgaacggcagcacagtaagagcttgctcttatgggtggcgagtggcggacgggtgaggaatacatcggaatctactctttcgtgggggataacgtagggaaacttacgctaataccgcatacgacctacgggtgaaagcggaggaccttcgggcttcgcgcgattgaatgagccgatgtcggattagctagttggcggggtaaaggcccaccaaggcgacgatccgtagctggtctgagaggatgatcagccacactggaactgagacacggtccagactcctacgggaggcagcagtggggaatattggacaatgggcgcaagcctgatccagccatgccgcgtgggtgaagaaggccttcgggttgtaaagcccttttgttgggaaagaaaagcagtcggttaatacccgattgttctgacggtacccaaagaataagcaccggctaacttcgtgccagcagccgcggtaatacgaagggtgcaagcgttactcggaattactgggcgtaaagcgtgcgtaggtggtggtttaagtctgttgtgaaagccctgggctcaacctgggaattgcagtggatactgggtcactagagtgtggtagagggtagcggaattcccggtgtagcagtgaaatgcgtagagatcgggaggaacatcagtggcgaaggcggctacctggaccaacactgacactgaggcacgaaagcgtggggagcaaacaggattagataccctggtagtccacgccctaaacgatgcgaactggatgttgggtgcaatttggcacgcagtatcgaagctaacgcgttaagttcgccgcctggggagtacggtcgcaagactgaaactcaaaggaattgacgggggcccgcacaagcggtggagtatgtggtttaattcgatgcaacgcgaagaaccttacctggtcttgacatccacggaactttccagagatggattggtgccttcgggaaccgtgagacaggtgctgcatggctgtcgtcagctcgtgtcgtgagatgttgggttaagtcccgcaacgagcgcaacccttgtccttagttgccagcacgtaatggtgggaactctaaggagaccgccggtgacaaaccggaggaaggtggggatgacgtcaagtcatcatggcccttacgaccagggctacacacgtactacaatggtagggacagagggctgcaaacccgcgagggcaagccaatcccagaaaccctatctcagtccggattggagtctgcaactcgactccatgaagtcggaatcgctagtaatcgcagatcagcattgctgcggtgaatacgttcccgggccttgtacacaccgcccgtcacaccatgggagtttgttgcaccagaagcaggtagcttaaccttcgggagggcgcttgccacggtgtggccgatgactggggtg

SEQ ID NO: 3600 - DNA, 1469 bp, Xanthomonas perforans
  source 1..1469: mol_type = unassigned DNA
agtgaacgctggcggcaggcctaacacatgcaagtcgaacggcagcacagtaagagcttgctcttatgggtggcgagtggcggacgggtgaggaatacatcggaatctactctttcgtgggggataacgtagggaaacttacgctaataccgcatacgacctacgggtgaaagcggaggaccttcgggcttcgcgcggttgaatgagccgatgtcggattagctagttggcggggtaaaggcccaccaaggcgacgatccgtagctggtctgagaggatgatcagccacactggaactgagacacggtccagactcctacgggaggcagcagtggggaatattggacaatgggcgcaagcctgatccagccatgccgcgtgggtgaagaaggccttcgggttgtaaagcccttttgttgggaaagaaaagcagtcggttaatacccgattgttctgacggtacccaaagaataagcaccggctaacttcgtgccagcagccgcggtaatacgaagggtgcaagcgttactcggaattactgggcgtaaagcgtgcgtaggtggtggtttaagtctgttgtgaaagccctgggctcaacctgggaattgcagtggatactggatcactagagtgtggtagagggtagcggaattcccggtgtagcagtgaaatgcgtagagatcgggaggaacatccgtggcgaaggcggctacctggaccaacactgacactgaggcacgaaagcgtggggagcaaacaggattagataccctggtagtccacgccctaaacgatgcgaactggatgttgggtgcaatttggcacgcagtatcgaagctaacgcgttaagttcgccgcctggggagtacggtcgcaagactgaaactcaaaggaattgacgggggcccgcacaagcggtggagtatgtggtttaattcgatgcaacgcgaagaaccttacctggtcttgacatccacggaactttccagagatggattggtgccttcgggaaccgtgagacaggtgctgcatggctgtcgtcagctcgtgtcgtgagatgttgggttaagtcccgcaacgagcgcaacccttgtccttagttgccagcacgtaatggtgggaactctaaggagaccgccggtgacaaaccggaggaaggtggggatgacgtcaagtcatcatggcccttacgaccagggctacacacgtactacaatggtagggacagagggctgcaaacccgcgagggcaagccaatcccagaaaccctatctcagtccggattggagtctgcaactcgactccatgaagtcggaatcgctagtaatcgcagatcagcattgctgcggtgaatacgttccggggccttgtacacaccgcccgtcacaccatgggagtttgttgcaccagaagcaggtagcttaaccttcgggagggcgcttgccacggtgtggccgatgactggggtg

SEQ ID NO: 3601 - DNA, 1450 bp, Xanthomonas phaseoli
  source 1..1450: mol_type = unassigned DNA
gcctaacmcatgcaagttcgacggcagcacagtaagagcttgctcttatgggtggcgagtggcggacgggtgaggaatacatcggaatctactctttcgtgggggataacgtagggaaacttacgctaataccgcatacgacctacgggtgaaagcggaggaccttcgggcttcgcgcggttgaatgagccgatgtcggattagctagttggcggggtaaaggcccaccaaggcgacgatccgtagctggtctgagaggatgatcagccacactggaactgagacacggtccagactcctacgggaggcagcagtggggaatattggacaatgggcgcaagcctgatccagccatgccgcgtgggtgaagaaggccttcgggttgtaaagcccttttgttgggaaagaaaagcagtcggttaatacccgattgttctgacggtacccaaagaataagcaccggctaacttcgtgccagcagccgcggtaatacgaagggtgcaagcgttactcggaattactgggcgtaaagcgtgcgtaggtggtggtttaagtctgttgtgaaagccctgggctcaacctgggaattgcagtggatactgggtcactagagtgtggtagagggtagcggaattcccggtgtagcagtgaaatgcgtagagatcgggaggaacatccgtggcgaaggggctacctggaccaacactgacactgaggcacgaaagcgtggggagcaaacaggattagataccctggtagtccacgccctaaacgatgcgaactggatgttgggtgcaatttggcacgcagtatcgaagctaacgcgttaagttcgccgcctggggagtacggtcgcaagactgaaactcaaaggaattgacgggggcccgcacaagcggtggagtatgtggtttaattcgatgcaacgcgaagaaccttacctggtcttgacatccacggaactttccagagatggattggtgccttcgggaaccgtgagacaggtgctgcatggctgtcgtcagctcgtgtcgtgagatgttgggttaagtcccgcaacgagcgcaacccttgtccttagttgccagcacgtaatggtgggaactctaaggagaccgccggtgacaaaccggaggaaggtggggatgacgtcaagtcatcatggcccttacgaccagggctacacacgtactacaatggtagggacagagggctgcaaacccgcgagggcaagccaatcccagaaaccctatctcagtccggattggagtctgcaactcgactccatgaagtcggaatcgctagtaatcgcagatcagcattgctgcggtgaatacgttcccgggccttgtacacaccgcccgtcacaccatgggagtttgttgcaccagaagcaggtagcttaaccttcgggagggcgcttgccacggtgtggccgatgactggggtg

SEQ ID NO: 3602 - DNA, 1469 bp, Xanthomonas pisi; identical to SEQ ID NO: 3598
  source 1..1469: mol_type = unassigned DNA

SEQ ID NO: 3603 - DNA, 1469 bp, Xanthomonas populi
  source 1..1469: mol_type = unassigned DNA
agtgaacgctggcggcaggcctaacacatgcaagtcgaacggcagcacagtaagagcttgctcttataggtggcgagtggcggacgggtgaggaatacatcggaatctactctttcgtgggggataacgtagggaaacttacgctaataccgcatacgacctacgggtgaaagcggaggaccttcgggcttcgcgtgattgaatgagccgatgtcggattagctagttggcggggtaaaggcccaccaaggcgacgatccgtagctggtctgagaggatgatcagccacactggaactgagacacggtccagactcctacgggaggcagcagtggggaatattggacaatgggcgcaagcctgatccagccatgccgcgtgggtgaagaaggccttcgggttgtaaagcccttttgttgggaaagaaaagcagtcggttaatacccgattgttctgacggtacccaaagaataagcaccggctaacttcgtgccagcagccgcggtaatacgaagggtgcaagcgttactcggaattactgggcgtaaagcgtgcgtaggtggtggtttaagtctgttgtgaaagccctgggctcaacctgggaattrcagtggatactgggtcactagagtgtggtagagggtagcggaattcccggtgtagcagtgaaatgcgtagagatcgggaggaacatccgtggcgaaggcggctacctggaccaacactgacactgaggcacgaaagcgtggggagcaaacaggattagataccctggtagtccacgccctaaacgatgcgaactggatgttgggtgcaatttggcacgcagtatcgaagctaacgcgttaagttcgccgcctggggagtacggtcgcaagactgaaactcaaaggaattgacgggggcccgcacaagcggtggagtatgtggtttaattcgatgcaacgcgaagaaccttacctggtcttgacatccacggaactttccagagatggattggtgccttcgggaaccgtgagacaggtgctgcatggctgtcgtcagctcgtgtcgtgagatgttgggttaagtcccgcaacgagcgcaacccttgtccttagttgccagcacgtaatggtgggaactctaaggagaccgccggtgacaaaccggaggaaggtggggatgacgtcaagtcatcatggcccttacgaccagggctacacacgtactacaatggtagggacagagggctgcaaacccgcgagggtaagccaatcccagaaaccctatctcagtccggattggagtctgcaactcgactccatgaagtcggaatcgctagtaatcgcagatcagcattgctgcggtgaatacgttcccgggccttgtacacaccgcccgtcacaccatgggagtttgttgcaccagaagcaggtagcttaaccttcgggagggcgcttgccacggtgtggccgatgactggggtg

SEQ ID NO: 3604 - DNA, 1467 bp, Xanthomonas sacchari
  source 1..1467: mol_type = unassigned DNA
  misc_difference 563: note = n is a, c, g, or t
agtgaacgctggcggcaggcctaacacatgcaagtcgamcggcagcacaggagagcttgctctctgggtggcgagtggcggacgggtgaggaatacatcggaatctaccttttcgtgggggataacgtagggaaacttacgctaataccgcatacgaccttagggtgaaagcggaggaccttcgggcttcgcgcggatagatgagccgatgtcggattagctagttggcggggtaaaggcccaccaaggcgacgatccgtagctggtctgagaggatgatcagccacactggaactgagacacggtccagactcctacgggaggcagcagtggggaatattggacaatgggcgcaagcctgatccagccatgccgcgtgggtgaagaaggccttcgggttgtaaagcccttttgttgggaaagaaaagcagtcggttaatacccgattgttctgacggtacccaaagaataagcaccggctaacttcgtgccagcagccgcggtaatacgaagggtgcaagcgttactcggaattactgggcgtaaagcgtgcgtaggtggtngtttaagtccgttgtgaaagccctgggctcaacctgggaattgcagtggatactgggtcactagagtgtggtagagggtagcggaattcccggtgtagcagtgaaatgcgtagagatcgggaggaacatctgtggcgaaggcggccatctggaccaacactgacactgaggcacgaaagcgtggggagcaaacaggattagataccctggtagtccacgccctaaacgatgcgaactggatgttgggtgcaacttggcacgcagtatcgaagctaacgcgttaagttcgccgcctggggagtacggtcgcaagactgaaactcaaaggaattgacgggggcccgcacaagcggtggagtatgtggtttaattcgatgcaacgcgaagaaccttacctggtcttgacatccacggaactttccagagatggattggtgccttcgggaaccgtgagacaggtgctgcatggctgtcgtcagctcgtgtcgtgagatgttgggttaagtcccgcaacgagcgcaacccttgtccttagttgccagcacgtaatggtgggaactttaaggagaccgccggtgacaaaccggaggaaggtggggatgacgtcaagtcatcatggcccttacgaccagggctacacacgtactacaatggtagggacagagggctgcaagccggcgacggtgagccaatcccagaaaccctatctcagtccggattggagtctgcaactcgactccatgaagtcggaatcgctagtaatcgcagatcagcattgctgcggtgaatacgttcccgggccttgtacacaccgcccgtcacaccatgggagtttgttgcaccagaagcaggtagcttaaccttcgggagggcgcttgccacggtgtggccgatgactggggtg

SEQ ID NO: 3605 - DNA, 1469 bp, Xanthomonas theicola
  source 1..1469: mol_type = unassigned DNA
agtgaacgctggcggcaggcctaacacatgcaagtcgaacggcagcacagtaagagcttgctcttatgggtggcgagtggcggacgggtgaggaatacatcggaatctactctttcgtgggggataacgtagggaaacttacgctaataccgcatacgacctacgggtgaaagcggaggaccttcgggcttcgcgcgattgaatgagccgatgtcggattagctagttggcggggtaaaggcccaccaaggcgacgatccgtagctggtctgagaggatgatcagccacactggaactgagacacggtccagactcctacgggaggcagcagtggggaatattggacaatgggcgcaagcctgatccagccatgccgcgtgggtgaagaaggccttcgggttgtaaagcccttttgttgggaaagaaaagcagtcggttaatacccgattgttctgacggtacccaaagaataagcaccggctaacttcgtgccagcagccgcggtaatacgaagggtgcaagcgttactcggaattactgggcgtaaagcgtgcgtaggtggtggtttaagtctgttgtgaaagccctgggctcaacctgggaattgcagtggatactgggtcactagagtgtggtagagggtagcggaattcccggtgtagcagtgaaatgcgtagagatcgggaggaacatccgtggcgaaggcggctacctggaccaacactgacactgaggcacgaaagcgtggggagcaaacaggattagataccctggtagtccacgccctaaacgatgcgaactggatgttgggtgcaatttggcacgcagtatcgaagctaacgcgttaagttcgccgcctggggagtacggtcgcaagactgaaactcaaaggaattgacgggggcccgcacaagcggtggagtatgtggtttaattcgatgcwacgcgaagaaccttacctggtcttgacatccacggaactttccagagatggattggtgccttcgggaaccgtgagacaggtgctgcatggctgtcgtcagctcgtgtcgtgagatgttgggttaagtcccgcaacgagcgcaacccttgtccttagttgccagcacgtaatggtgggractctaaggagaccgccggtgacaaaccggaggaaggtggggatgacgtcaattcatcatggcccttacgaccagggctacacacgtactacaatggtagggacagagggctgcaaacccgcgagggtaagccaatcccagaaaccctatctcagtccggattggagtctgcaactcgactccatgaagtcggaatcgctagtaatcgcagatcagcattgctgcggtgaatacgttcccgggccttgtacacaccgcccgtcacaccatgggagtttgttgcaccagaagcaggtagcttaaccttcgggagggcgcttgccacggtgtggccgatgactggggtg

SEQ ID NO: 3606 - DNA, 1467 bp, Xanthomonas translucens
  source 1..1467: mol_type = unassigned DNA
agtgaacgctggcggcaggcctaacacatgcaagtcgaacggcagcacagtggtagcaataccatgggtggcgagtggcggacgggtgaggaatacatcggaatctaccttttcgtgggggataacgtagggaaacttacgctaataccgcatacgaccttagggtgaaagcggaggaccttcgggcttcgcgcggatagatgagccgatgtcggattagctagttggcggggtaaaggcccaccaaggcgacgatccgtagctggtctgagaggatgatcagccacactggaactgagacacggtccagactcctacgggaggcagcagtggggaatattggacaatgggcgcaagcctgatccagccatgccgcgtgggtgaagaaggccttcgggttgtaaagcccttttgttgggaaagaaaagcagtcggttaatacccgattgttctgacggtacccaaagaataagcaccggctaacttcgtgccagcagccgcggtaatacgaagggtgcaagcgttactcggaattactgggcgtaaagcgtgcgtaggtggttgtttaagtccgttgtgaaagccctgggctcaacctgggaattgcagtggatactgggcaactagagtgtggtagaggatggcggaattcccggtgtagcagtgaaatgcgtagagatcgggaggaacatctgtggcgaaggcggccatctggaccaacactgacactgaggcacgaaagcgtggggagcaaacaggattagataccctggtagtccacgccctaaacgatgcgaactggatgttgggtgcaacttggcacgcagtatcgaagctaacgcgttaagttcgccgcctggggagtacggtcgcaagactgaaactcaaaggaattgacgggggcccgcacaagcggtggagtatgtggtttaattcgatgcaacgcgaagaaccttacctggtcttgacatccacggaactttccagagatggattggtgccttcgggaaccgtgagacaggtgctgcatggctgtcgtcagctcgtgtcgtgagatgttgggttaagtcccgcaacgagcgcaacccttgtccttagttgccagcacgtcatggtgggaactctaaggagaccgccggtgacaaaccggaggaaggtggggatgacgtcaagtcatcatggcccttacgaccagggctacacacgtactacaatggtgaggacagagggctgcaagctcgcgagagtaagccaatcccagaaacctcatctcagtccggattggagtctgcaactcgactccatgaagtcggaatcgctagtaatcgcagatcagcattgctgcggtgaatacgttcccgggccttgtacacaccgcccgtcacaccatgggagtttgttgcaccagaagcaggtagcttaaccttcgggagggcgcttgccacggtgtggccgatgactggggtg

SEQ ID NO: 3607 - DNA, 1469 bp, Xanthomonas vasicola; identical to SEQ ID NO: 3581
  source 1..1469: mol_type = unassigned DNA

SEQ ID NO: 3608 - DNA, 1469 bp, Xanthomonas vesicatoria; identical to SEQ ID NO: 3598
  source 1..1469: mol_type = unassigned DNA

SEQ ID NO: 3609 - DNA, 1465 bp, Xenorhabdus beddingii
  source 1..1465: mol_type = unassigned DNA
attgaacgctggcggcaggcctaacacatgcaagtcgggcggtaacaggaaagtgcttgcacttttgctgacgagcggcggacgggtgagtaatgtctggggatctgcccgagagcgggggataaccactggaaacggtggctaataccgcataatgtcttcggaccaaagtgggggaccttcgggcctcacgctatcggatgaacccagatgggattagctagtaggtagggtaatggcctacctaggcgacgatccctagctggtctgagaggatgaccagccacactgggactgagacacggcccagactcctacgggaggcagcagtggggaatattgcacaatgggcgcaagcctgatgcagccatgccgcgtgtatgaagaaggccttcgggttgtaaagtactttcagcggggaggaaggcgtggacctgaatacggttcacgattgacgttacccgcagaagaagcaccggctaactccgtgccagcagccgcggtaatacggagggtgcaagcgttaatcggaattactgggcgtaaagcgcacgcaggcggtcaattaagttagatgtgaaatccccgggcttaacccgggaacggcacctaagactggttggctagagtctcgtagaggggggtagaattccacgtgtagcggtgaaatgcgtagagatgtggaggaataccggtggcgaaggcggccccctggacgaagactgacgctcaggtgcgaaagcgtggggagcaaacaggattagataccctggtagtccacgctgtaaacgatgtcgatttggaggttgtgcccttgaggcgtggcttccggagctaacgcgttaaatcgaccgcctggggagtacggccgcaaggttaaaactcaaatgaattgacgggggcccgcacaagcggtggagcatgtggtttaattcgatgcaacgcgaagaaccttacctactcttgacatccacggaattttgcagagatgcgaaagtgccttcgggaaccgtgagacaggtgctgcatggctgtcgtcagctcgtgttgtgaaatgttgggttaagtcccgcaacgagcgcaacccttatcctttgttgccagcacgtaatggtgggaactcaagggagactgccggtgataaaccggaggaaggtggggatgacgtcaagtcatcatggcccttacgagtagggctacacacgtgctacaatggcagatacaaagagaagcgacctcgcgagggcaagcggaactcataaagtctgtcgtagtccggattggagtctgcaactcgactccatgaagtcggaatcgctagtaatcgcagatcagaatgctgcggtgaatacgttcccgggccttgtacacaccgcccgtcacaccatgggagtgggttgcaaaagaagtcggtagcttaaccttcgggagggcgctgaccactttgtgattcatgactggggtg

SEQ ID NO: 3610 - DNA, 1465 bp, Xenorhabdus bovienii
  source 1..1465: mol_type = unassigned DNA
  misc_difference 107: note = n is a, c, g, or t
  misc_difference 1430: note = n is a, c, g, or t
attgaacgctggcggcaggcctaacacatgcaagtcgagcggcagcggggggaagcttgcttccccgccggcgagcggcggacgggtgagtaatgtctggggatctncccgatggagggggataaccactggaaacggtggctaataccgcataacctctgtggagtaaagtgggggaccttcgggcctcacgccatcggatgaacccagatgggattagctagtaggtggggtaatggctcacctaggcgacgatccctagctggtctgagaggatgaccagccacactgggactgagacacggcccagactcctacgggaggcagcagtggggaatattgcacaatgggcgcaagcctgatgcagccatgccgcgtgtatgaagaaggccttcgggttgtaaagtactttcagcggggaggaaggcaacagcgtaaatagcgctgttgattgacgttacccgcagaagaagcaccggctaactccgtgccagcagccgcggtaatacggagggtgcaagcgttaatcggaattactgggcgtaaagcgcacgcaggcggtcaattaagttagatgtgaaatccccgggctcaacctgggaacggcatctaaaactggttgactagagtctcgtagaggggggtagaattccacgtgtagcggtgaaatgcgtagagatgtggaggaataccggtggcgaaggcggccccctggacgaagactgacgctcaggtgcgaaagcgtggggagcaaacaggattagataccctggtagtccacgctgtaaacgatgtcgatttggaggttgtgcccttgaggcgtggcttccggagctaacgcgttaaatcgaccgcctggggagtacggccgcaaggttaaaactcaaatgaattgacgggggcccgcacaagcggtggagcatgtggtttaattcgatgcaacgcgaagaaccttacctactcttgacatcctcagaatttgctggagacagcgaagtgccttcgggaactgagagacaggtgctgcatggctgtcgtcagctcgtgttgtgaaatgttgggttaagtcccgcaacgagcgcaacccttatcctttgttgccagcacgtgatggtgggaactcaagggagactgccggtgataaaccggaggaaggtggggatgacgtcaagtcatcatggcccttacgagtagggctacacacgtgctacaatggcagatacaaagagaagcgacctcgcgagagcaagcggaactcataaagtctgtcgtagtccggattggagtctgcaactcgactccatgaagtcggaatcgctagtaatcgtagatcagaatgctacggtgaatacgttcccgggccttgtacacaccgcccgtcacaccatgggagtgggttgcaaaagaagtaggtagcttaaccttcgggngggcgcttaccactttgtgattcatgactggggtg

SEQ ID NO: 3611 - DNA, 1465 bp, Xenorhabdus budapestensis
  source 1..1465: mol_type = unassigned DNA
attgaacgctggcggcaggcctaacacatgcaagtcgggcggcagcgggaggaagcgtgcttccttgccggcgagcggcggacgggtgagtaatgtctggggatctgcccgatggagggggataaccactggaaacggtggctaataccgcataacctcctgggagcaaagtgggggaccttcgggcctcacgccatcggatgaacccagatgggattagctagtaggtggggtaagggctcacctaggcgacgatccctagctggtctgagaggatgaccagccacactgggactgagacacggcccagactcctacgggaggcagcagtggggaatattgcacaatgggcggcagcctgatgcagccatgccgcgtgtatgaagaaggccttcgggttgtaaagtactttcagcggggaggaaggcataaaacttaataggttttatgattgacgttacccgcagaagaagcaccggctaactccgtgccagcagccgcggtaatacggagggtgcaagcgttaatcggaattactgggcgtaaagcgcacgcaggcggtcaattaagttagatgtgaaatccccgggcttaacccgggaacggcatctaagactggttgactagagtctcgtagaggggggtagaattccacgtgtagcggtgaaatgcgtagagatgtggaggaataccggtggcgaaggcggccccctggacgaagactgacgctcaggtgcgaaagcgtggggagcaaacaggattagataccctggtagtccacgccgtaaacgatgtcgatttggaggttgtggccttgagctgtggcttccggagctaacgcgttaaatcgaccgcctggggagtacggtcgcaagattaaaactcaaatgaattgacgggggcccgcacaagcggtggagcatgtggtttaattcgatgcaacgcgaagaaccttacctactcttgacatccagcgaagcctttggagacagaggcgtgccttcgggaacgctgagacaggtgctgcatggctgtcgtcagctcgtgttgtgaaatgttgggttaagtcccgcaacgagcgcaacccttatcctttgttgccagcacgtcatggtgggaactcaagggagactgccggtgataaaccggaggaaggtggggatgacgtcaagtcatcatggcccttacgagtagggctacacacgtgctacaatggcagatacaaagagaagcgacctcgcgagagcaagcggaactcataaagtctgtcgtagtccggattggagtctgcaactcgactccatgaagtcggaatcgctagtaatcgcagatcagcatgctgcggtgaatacgttcccgggccttgtacacaccgcccgtcacaccatgggagtgggtggcaaaagaagtcggtagcttaacctgctggagggcgctgaccactttgtgatccatgactggggtg

SEQ ID NO: 3612 - DNA, 1465 bp, Xenorhabdus cabanillasii
  source 1..1465: mol_type = unassigned DNA
tgaacgctggcggcaggcctaacacatgcaagtcgggcggtaacaggaaagggcttttgcacttttgctgacgagcggcggacgggtgagtaatgtctggggatctgcccggtagagggggataaccactggaaacggtggctaataccgcataacctctttggagcaaagtgggggaccttcgggcctcacgctatcggatgaacccagatgggattagctagtaggtggggtaagggctcacctaggcgacgatccctagctggtctgagaggatgaccagccacactgggactgagacacggcccagactcctacgggaggcagcagtggggaatattgcacaatgggcgcaagcctgatgcagccatgccgcgtgtatgaagaaggccttcgggttgtaaagtactttcagcggggaggaaggcgtgagtctgaacagggctcacgattgacgttacccgcagaagaagcaccggctaactccgtgccagcagccgcggtaatacggagggtgcaagcgttaatcggaattactgggcgtaaagcgcacgcaggcggccaattaagttagatgtgaaatccccgggcttaacccgggaacggcatctaagactggttggctggagtctcgtagaggggggtagaattccacgtgtagcggtgaaatgcgtagagatgtggaggaataccggtggcgaaggcggccccctggacgaagactgacgctcaggtgcgaaagcgtggggagcaaacaggattagataccctggtagtccacgccgtaaacgatgtcgatttggaggttgtgcccttgaggtgtggcttccggagctaacgcgttaaatcgaccgcctggggagtacggtcgcaagattaaaactcaaatgaattgacgggggcccgcacaagcggtggagcatgtggtttaattcgatgcaacgcgaagaaccttacctactcttgacatccacggaatttggcagagatgctgaagtgccttcgggaaccgtgagacaggtgctgcatggctgtcgtcagctcgtgttgtgaaatgttgggttaagtcccgcaacgagcgcaacccttatcctttgttgccagcacgtgatggtgggaactcaagggagactgccggtgataaaccggaggaaggtggggatgacgtcaagtcatcatggcccagcggggtagggctacacacgtgctacaatggcggatacaaagagaagcgacctcgcgagagcaagcggaactcataaagtctgtcgtagtccggattggagtctgcaactcgactccatgaagtcggaatcgctagtaatcgtagatcagcatgctacggtgaatacgttcccgggccttggacacaccgcccgtcacaccatgggagtgggtggcaaaagaagtcggtagcttaacctgcgggagggcgctgaccactttgtacttcatgaatggggtg

SEQ ID NO: 3613 - DNA, 1465 bp, Xenorhabdus doucetiae
  source 1..1465: mol_type = unassigned DNA
attgaacgctggcggcaggcctaacacatgcaagtcggacggtaacaggaaacagcttgctgttttgctgacgagtggcggacgggtgagtaatgtctggggatctgcccgatggagggggataaccactggaaacggtggctaataccgcataatctctgtggagcaaggtgggggaccttcgggcctcacgccatcggatgaacccagatgggattagctagtaggcggggtaatggcccacctaggcgacgatccctagctggtctgagaggatgaccagccacactgggactgagacacggcccagactcctacgggaggcagcagtggggaatattgcacaatgggcgcaagcctgatgcagccatgccgcgtgtatgaagaaggccttcgggttgtaaagtactttcagcggggaggaaggcgtaggctttaatacagcttacgattgacgttacccgcagaagaagcaccggctaactccgtgccagcagccgcggtaatacggagggtgcaagcgttaatcggaattactgggcgtaaagcgcacgcaggcggtcaattaagttggatgtgaaatccccgggcttaacctgggaacggcatccaagactggttggctagagtctcgtagaggggggtagaattccacgtgtagcggtgaaatgcgtagagatgtggaggaataccggtggcgaaggcggccccctggacgaagactgacgctcaggtgcgaaagcgtggggagcaaacaggattagataccctggtagtccacgctgtaaacgatgtcgatttggaggttgtgcccttgaggcgtggcttccggagctaacgcgttaaatcgaccgcctggggagtacggtcgcaagattaaaactcaaatgaattgacgggggcccgcacaagcggtggagcatgtggtttaattcgatgcaacgcgaagaaccttacctactcttgacatccagcgaagcctttagagatagaggcgtgccttcgggaacgctgagacaggtgctgcatggctgtcgtcagctcgtgttgtgaaatgttgggttaagtcccgcaacgagcgcaacccttatcctttgttgccagcacgtcatggtgggaactcaagggagactgccggtgataaaccggaggaaggtggggatgacgtcaagtcatcatggcccttacgagtagggctacacacgtgctacaatggcggatacaaagagaagcgaccccgcgagggcaagcggaactcataaagtctgtcgtagtccggattggagtctgcaactcgactccatgaagtcggaatcgctagtaatcgcagatcagaatgctgcggtgaatacgttcccgggccttgtacacaccgcccgtcacaccatgggagtgggtggcaaaagaagtcggtagcttaaccttcgggagggcgctgaccactttgtgattcatgactggggtg

SEQ ID NO: 3614 - DNA, 1464 bp, unidentified
  source 1..1464: mol_type = unassigned DNA; note = Xenorhabdus eapokensis
attgaacgctggcggcaggcctaacacatgcaagtcgagcggcagcgggggaaagcgtgctttcctgccggcgagcggcggacgggtgagtaatgtctggggatctgcccgatggcgggggataaccactggaaacggtggctaataccgcataatctctgtggagcaaagtgggggaccttcgggcctcacgccatcggatgaacccagatgggattagctagtaggtggggtaaaggctcacctaggcgacgatccctagctggtctgagaggatgaccagccacactgggactgagacacggcccagactcctacgggaggcagcagtggggaatattgcacaatgggcgcaagcctgatgcagccatgccgcgtgtatgaagaaggccttcgggttgtaaagtactttcagcggggaggaaggcgtggagttgaatagacttcacgattgacgttacccgcagaagaagcaccggctaactccgtgccagcagccgcggtaatacggagggtgcaagcgttaatcggaattactgggcgtaaagcgcacgcaggcggtcaattaagttagatgtgaaatccccgggcttaacctgggaatggcatctaagactggttggctagagtctcgtagaggggggtagaattccacgtgtagcggtgaaatgcgtagagatgtggaggaataccggtggcgaaggcggccccctggacgaagactgacgctcaggtgcgaaagcgtggggagcaaacaggattagataccctggtagtccacgctgtaaacgatgtcgatttggaggttgtggccttgagctgtggcttccggagctaacgcgttaaatcgaccgcctggggagtacggtcgcaagattaaaactcaaatgaattgacgggggcccgcacaagcggtggagcatgtggtttaattcgatgcaacgcgaagaaccttacctactcttgacatccacggaattctgcagagatgcggaagtgccttcgggacccgtgagacaggtgctgcatggctgtcgtcagctcgtgttgtgaaatgttgggttaagtcccgcaacgagcgcaacccttatcctttgttgccagcacttcgggtgggaactcaagggagactgccggtgataaaccggaggaaggtggggatgacgtcaagtcatcatggcccttacgagtagggctacacacgtgctacaatggcagatacaaagagaagcgacctcgcgagagcaagcggacctcataaagtctgtcgtagtccggattggagtctgcaactcgactccatgaagtcggaatcgctagtaatcgtagatcagaatgctacggtgaatacgttcccgggccttgtacacaccgcccgtcacaccatgggagtgggttgcaaaagaagtcggtagcttaacctttaggagggcgctgaccactttgtgattcatgactggggtg

SEQ ID NO: 3615 - DNA, 1465 bp, Xenorhabdus ehlersii
  source 1..1465: mol_type = unassigned DNA
attgaacgctggcggcaggcctaacacatgcaagtcgagcggcagcgggggaaagcgtgctttcctgccggcgagcggcggacgggtgagtaatgtctggggatctgcctgatggagggggataaccactggaaacggtggctaataccgcataacctctgaggagcaaagtgggggaccttcgggcctcacgccatcggatgaacccagatgggattagctagtaggtggggtaaaggctcacctaggcgacgatccctagctggtctgagaggatgaccagccacactgggactgagacacggcccagactcctacgggaggcagcagtggggaatattgcacaatgggcgcaagcctgatgcagccatgccgcgtgtatgaagaaggccttcgggttgtaaagtactttcagcggggaggaaggcatagagccgaatacgctttatgattgacgttacccgcagaagaagcaccggctaactccgtgccagcagccgcggtaatacggagggtgcaagcgttaatcggaattactgggcgtaaagcgcacgcaggcggtcaattaagttagatgtgaaatccccgggcttaacctgggaatggcatctaagactggttgactagagtctcgtagaggggggtagaattccacgtgtagcggtgaaatgcgtagagatgtggaggaataccggtggcgaaggcggccccctggacgaagactgacgctcaggtgcgaaagcgtggggagcaaacaggattagataccctggtagtccacgctgtaaacgatgtcgatttggaggttgtggccttgagctgtggcttccggagctaacgcgttaaatcgaccgcctggggagtacggtcgcaagattaaaactcaaatgaattgacgggggcccgcacaagcggtggagcatgtggtttaattcgatgcaacgcgaagaaccttacctactcttgacatccagcgaagcctttagagatagaggcgtgccttcgggaacgctgagacaggtgctgcatggctgtcgtcagctcgtgttgtgaaatgttgggttaagtcccgcaacgagcgcaacccttatcctttgttgccagcacgttatggtgggaactcaagggagactgccggtgataaaccggaggaaggtggggatgacgtcaagtcatcatggcccttacgagtagggctacacacgtgctacaatggcggatacaaagagaagcgacctcgcgagagcaagcggacctcataaagtctgtcgtagtccggattggagtctgcaactcgactccatgaagtcggaatcgctagtaatcgcagatcagaatgctgcggtgaatacgttcccgggccttgtacacaccgcccgtcacaccatgggagtgggttgcaaaagaagtcggtagcttaacctgtaggagggcgctgaccactttgtgattcatgactggggtg

SEQ ID NO: 3616 - DNA, 1460 bp, Xenorhabdus hominickii
  source 1..1460: mol_type = unassigned DNA
gaacgctggcggcaggcctaacacatgcaagtcgagcggcaacggcaggaagcttgcttcctggccggcgagcggcggacgggtgagtaatgtctggggatctgcccgatggagggggataaccactggaaacggtggctaataccgcatgacctctgaggagcaaagtgggggaccttcgggcctcacgccatcggatgaacccagatgggattagctagtaggtgaggtaacggctcacctaggcgacgatccctagctggtctgagaggatgaccagccacactgggactgagacacggcccagactcctacgggaggcagcagtggggaatattgcacaatgggcgcaagcctgatgcagccatgccgcgtgtatgaagaaggccttcgggttgtaaagtactttcagcggggaggaaggcgtgaagtttaatagactttacgattgacgttacccgcagaagaagcaccggctaactccgtgccagcagccgcggtaatacggagggtgcaagcgttaatcggaattactgggcgtaaagcgcacgcaggcggtcaattaagttagatgtgaaatccccgggcttaacctgggaactgcatctaaaactgattggctagagtctcgtagaggggggtagaattccacgtgtagcggtgaaatgcgtagagatgtggaggaataccggtggcgaaggcggccccctggacgaagactgacgctcaggtgcgaaagcgtggggagcaaacaggattagataccctggtagtccacgctgtaaacgatgtcgatttggaggttgtgcccttgaggcgtggcttccggagctaacgcgttaaatcgaccgcctggggagtacggccgcaaggttaaaactcaaatgaattgacgggggcccgcacaagcggtggagcatgtggtttaattcgatgcaacgcgaagaaccttacctactcttgacatccagcgaatcctttagatagaggagtgccttcgggaacgctgagacaggtgctgcatggctgtcgtcagctcgtgttgtgaaatgttgggttaagtcccgcaacgagcgcaacccttatcctttgttgccagcacgtaatggtgggaactcaagggagactgccggtgataaaccggaggaaggtggggatgacgtcaagtcatcatggcccttacgagtagggctacacacgtgctacaatggcagatacaaagagaagcgacctcgcgagagcaagcggaactcataaagtctgtcgtagtccggattggagtctgcaactcgactccatgaagtcggaatcgctagtaatcgtagatcagaatgctacggtgaatacgttcccgggccttgtacacaccgcccgtcacaccatgggagtgggttgcaaaagaagtaggtagcttaaccttcgggagggcgcttaccactttgtgattcatgactggggtg

SEQ ID NO: 3617 - DNA, 1465 bp, Xenorhabdus innexi
  source 1..1465: mol_type = unassigned DNA
attgaacgctggcggcaggcctaacacatgcaagtcgagcggcagcggggggaagcttgcttccctgccggcgagcggcggacgggtgagtaatgtctggggatctgcccggtagagggggataaccactggaaacggtggctaataccgcataacctcttaggagcaaagtgggggaccttcgggcctcacgctatcggatgaacccagatgggattagctagtaggtggggtaatggctcacctaggcgacgatccctagctggtctgagaggatgaccagccacactgggactgagacacggcccagactcctacgggaggcagcagtggggaatattgcacaatgggcgcaagcctgatgcagccatgccgcgtgtatgaagaaggccttcgggttgtaaagtactttcagcggggaggaaggcgtagaaccgaatacgttttacgattgacgttacccgcagaagaagcaccggctaactccgtgccagcagccgcggtaatacggagggtgcaagcgttaatcggaattactgggcgtaaagcgcacgcaggcggccaattaagttagatgtgaaagccccgggcttaacctgggaacggcatctaagactggttggctagagtctcgtagaggggggtagaattccacgtgtagcggtgaaatgcgtagagatgtggaggaataccggtggcgaaggcggccccctggacgaagactgacgctcaggtgcgaaagcgtggggagcaaacaggattagataccctggtagtccacgccgtaaacgatgtcaacttggaggttgtggccttgagccgtggcttccggagctaacgcgttaagttgaccgcctggggagtacggtcgcaagattaaaactcaaatgaattgacgggggcccgcacaagcggtggagcatgtggtttaattcgatgcaacgcgaagaaccttacctactcttgacatccagcgaaacctttagagatagaggtgtgccttcgggaacgctgagacaggtgctgcatggctgtcgtcagctcgtgttgtgaaatgttgggttaagtcccgcaacgagcgcaacccttatcctttgttgccagcacgttatggtgggaactcaggggagactgccggtgataaaccggaggaaggtggggatgacgtcaagtcatcatggcccttacgagtagggctacacacgtgctacaatggcagatacaaagagaagcgacctcgcgagagcaagcggaactcataaagtctgtcgtagtccggattggagtctgcaactcgactccatgaagtcggaatcgctagtaatcgtagatcagaatgctacggtgaatacgttcccgggccttgtacacaccgcccgtcacaccatgggagtgggttgcaaaagaagtaggtagcttaaccttcgggagggcgcttaccactttgtgattcatgactggggtg

SEQ ID NO: 3618 - DNA, 1452 bp, unidentified
  source 1..1452: mol_type = unassigned DNA; note = Xenorhabdus ishibashii
ggcaggcctaacacatgcaagtcgagcggcagcgggggaaagcttgctttcctgccggcgagcggcggacgggtgagtaatgtctggggatctgcccgatggagggggataaccactggaaacggtggctaataccgcataacctctttggagcaaagtgggggaccttcgggcctcacgccatcggatgaacccagatgggattagctagtaggtggggtaaaggctcacctaggcgacgatccctagctggtctgagaggatgaccagccacactgggactgagacacggcccagactcctacgggaggcagcagtggggaatattgcacaatgggcgcaagcctgatgcagccatgccgcgtgtatgaagaaggccttcgggttgtaaagtactttcagcggggaggaaggcgcaaggttgaatacactttgcgattgacgttacccgcagaagaagcaccggctaactccgtgccagcagccgcggtaatacggagggtgcaagcgttaatcggaattactgggcgtaaagcgcacgcaggcggtcaattaagttagatgtgaaatccccgggcttaacctgggaatggcatctaagactggttggctagagtctcgtagaggggggtagaattccacgtgtagcggtgaaatgcgtagagatgtggaggaacaccggtggcgaaggcggccccctggacgaagactgacgctcaggtgcgaaagcgtggggagcaaacaggattagataccctggtagtccacgctgtaaacgatgtcgatttggaggttgtggccttgagctgtggcttccggagctaacgcgttaaatcgaccgcctggggagtacggtcgcaagattaaaactcaaatgaattgacgggggcccgcacaagcggtggagcatgtggtttaattcgatgcaacgcgaagaaccttacctactcttgacatccacggaattctgcagagatgcggaagtgccttcgggaaccgtgagacaggtgctgcatggctgtcgtcagctcgtgttgtgaaatgttgggttaagtcccgcaacgagcgcaacccttatcctttgttgccagcacgttatggtgggaactcaagggagactgccggtgataaaccggaggaaggtggggatgacgtcaagtcatcatggcccttacgagtagggctacacacgtgctacaatggcggatacaaagagaagcgacctcgcgagagcaagcggacctcataaagtctgtcgtagtccggattggagtctgcaactcgactccatgaagtcggaatcgctagtaatcgtagaccagaatgctacggtgaatacgttcccgggccttgtacacaccgcccgtcacaccatgggagtgggttgcaaaagaagtcggtagcttaaccttttggagggcgctgaccactttgtgattcatgactggggtg

SEQ ID NO: 3619 - DNA, 1465 bp, Xenorhabdus japonica
  source 1..1465: mol_type = unassigned DNA
attgaacgctggcggcaggcctaacacatgcaagtcgggcggcagcggggggaagcgtgcttccctgccggcgagcggcggacgggtgagtaatgtctggggatctgcccgatggagggggataaccactggaaacggtggctaataccgcataacctctgcggagcaaggtgggggaccttcgggcctcacgccatcggatgaacccagatgggattagctagtaggcggggtaatggcccacctaggcgacgatccctagctggtctgagaggatgaccagccacactgggactgagacacggcccagactcctacgggaggcagcagtggggaatattgcacaatgggcgcaagcctgatgcagccatgccgcgtgtatgaagaaggccttcgggttgtaaagtactttcagcggggaggaaggcgtgggtccgaatacggctcacgattgacgttacccgcagaagaagcaccggctaactccgtgccagcagccgcggtaatacggagggtgcaagcgttaatcggaattactgggcgtaaagcgcacgcaggcggccaattaagttggatgtgaaatccccgggcttaacccgggaacggcatccaagactggttggctggagtctcgtagaggggggtagaattccacgtgtagcggtgaaatgcgtagagatgtggaggaataccggtggcgaaggcggccccctggacgaagactgacgctcaggtgcgaaagcgtggggagcaaacaggattagataccctggtagtccacgctgtaaacgatgtcgatttggaggttgtgccctagaggcgtggcttccggagctaacgcgttaaatcgaccgcctggggagtacggccgcaaggttaaaactcaaatgaattgacgggggcccgcacaagcggtggagcatgtggtttaattcgatgcaacgcgaagaaccttacctactcttgacatccagcgaagcctttggagacagaggcgtgccttcgggaacgctgagacaggtgctgcatggctgtcgtcagctcgtgttgtgaaatgttgggttaagtcccgcaacgagcgcaacccttatcctttgttgccagcacgtgatggtgggaactcaagggagactgccggtgataaaccggaggaaggtggggatgacgtcaagtcatcatggcccttacgagtagggctacacacgtgctacaatggcagatacaaagagaagcgacctcgcgagagcaagcggaactcataaagtctgtcgtagtccggattggagtctgcaactcggctccatgaagtcggaatcgctagtaatcgcagatcagaatgctgcggtgaatacgttcccgggccttgtacacaccgcccgtcacaccatgggagtgggttgcaaaagaagtaggtagcttaaccttcgggggggcgcttaccactttgtgattcatgactggggtg

SEQ ID NO: 3620 - DNA, 1424 bp, unidentified
  source 1..1424: mol_type = unassigned DNA; note = Xenorhabdus khoisanae
catgcaagtcgagcggcagcgggaagaagcgtgcttctttgccggcgagcggcggacgggtgagtaatgtctggggatctgcccgatggagggggataaccactggaaacggtggctaataccgcatgacctcttgggagcaaagtgggggaccttcgggcctcacgccatcggatgaacccagatgggattagctagtaggcggggtaacggcccacctaggcgacgatccctagctggtctgagaggatgaccagccacactgggactgagacacggcccagactcctacgggaggcagcagtggggaatattgcacaatgggcgcaagcctgatgcagccatgccgcgtgtatgaagaaggccttcgggttgtaaagtactttcagtggggaggaaggcgtgaagttgaatagacttgacgattgacgttacccacagaagaagcaccggctaactccgtgccagcagccgcggtaatacggagggtgcaagcgttaatcggaattactgggcgtaaagcgcacgcaggcggtcaattaagttagatgtgaaatccccgggcttaacctgggaacggcatctaagactggttggctagagtctcgtagaggggggtagaattccacgtgtagcggtgaaatgcgtagagatgtggaggaataccggtggcgaaggcggccccctggacgaagactgacgctcaggtgcgaaagcgtggggagcaaacaggattagataccctggtagtccacgctgtaaacgatgtcgatttggaggttgtgcccttgaggcgtggcttccggagctaacgcgttaaatcgaccgcctggggagtacggccgcaaggttaaaactcaaatgaattgacgggggcccgcacaagcggtggagcatgtggtttaattcgatgcaacgcgaagaaccttacctactcttgacatccagcgaatcctttagagatagaggagtgccttcgggaacgctgagacaggtgctgcatggctgtcgtcagctcgtgttgtgaaatgttgggttaagtcccgcaacgagcgcaacccttatcctttgttgccagcacgtcatggtgggaactcaagggagactgccggtgataaaccggaggaaggtggggatgacgtcaagtcatcatggcccttacgagtagggctacacacgtgctacaatggcagatacaaagagaagcgacctcgcgagagccagcggaactcataaagtctgtcgtagtccggattggagtctgcaactcgactccatgaagtcggaatcgctagtaatcgcagatcagaatgctgcggtgaatacgttcccgggccttgtacacaccgcccgtcacaccatgggagtgggttgcaaaagaagtaggtagcttaaccttcgggggggcgcttaccactttgtga

SEQ ID NO: 3621 - DNA, 1465 bp, Xenorhabdus koppenhoeferi
  source 1..1465: mol_type = unassigned DNA
attgaacgctggcggcaggcctaacacatgcaagtcgggcggcagcgggaggaagcgtgcttccttgccggcgagcggcggacgggtgagtaatgtctggggatctgcccgatggagggggataaccactggaaacggtggctaataccgcatgacctctggggagcaaagtgggggaccttcgggcctcacgccatcggatgaacccagatgggattagctagtaggcggggtaacggcccccctaggcgacgatccctagctggtctgagaggatgaccagccacactgggactgagacacggcccagactcctacgggaggcagcagtggggaatattgcacaatgggcgcaagcctgatgcagccatgccgcgtgtatgaagaaggccttcgggttgtaaagtactttcagcggggaggaaggcgtaagcgttaatacggctgacgattgacgttacccgcagaagaagcaccggctaactccgtgccagcagccgcggtaatacggagggtgcaagcgttaatcggaattactgggcgtaaagcgcacgcaggcggtcaattaagttagatgtgaaatccccgggcttaacccgggaacggcatctaagactggttggctggagtctcgtagaggggggtagaattccacgtgtagcggtgaaatgcgtagagatgtggaggaataccggtggcgaaggcggccccctggacgaagactgacgctcaggtgcgaaagcgtggggagcaaacaggattagataccctggtagtccacgcggtaaacgatgtcgatttggaggttgtgcccctgaggcgtggcttccggagctaacgcgttaaatcgaccgcctggggagtacggccgcaaggttaaaactcaaatgaattgacgggggcccgcacaagcggtggagcatgtggtttaattcgatgcaacgcgaagaaccttacctactcttgacatccggcgaatcctttagagatagaggagtgccttcgggaacgctgagacaggtgctgcatggctgtcgtcagctcgtgttgtgaaatgttgggttaagtcccgcaacgagcgcaacccttatcctttgttgccagcacgtgatggtgggaactcaagggagactgccggtgataaaccggaggaaggtggggatgacgtcaagtcatcatggccctgacgagtagggctacacacgtgctacaatggcagatacaaagagaagcgacctcgcgagagcaagcggaactcataaagtctgtcgtagtccggattggagtctgcaactcgactccatgaagtcggaatcgctagtaatcgtagatcagcatgctacggtgaatacgttcccgggccttgtacacaccgcccgtcacaccatgggagtgggttgcaaaagaagccggccgcttaaccttcgggagggcgctgaccactttgtgattcatgactggggtg

SEQ ID NO: 3622 - DNA, 1456 bp, Xenorhabdus kozodoii
  source 1..1456: mol_type = unassigned DNA
cgctggcggcaggcctaacacatgcaagtcgagcggcagcggggggaagcttgcttccccgccggcgagcggcggacgggtgagtaatgtctggggatctgcccgatggagggggataaccactggaaacggtggctaataccgcatgacctctgaggagcaaagtgggggaccttcgggcctcacgccatcggatgaacccagatgggattagctagtaggtggggtaaggccacctaggcgacgatccctagctggtctgagaggatgaccagccacactgggactgagacacggcccagactcctacgggaggcagcagtggggaatattgcacaatgggcgcaagcctgatgcagccatgccgcgtgtatgaagaaggccttcgggttgtaaagtactttcagtggggaggaaggcgccggaacgaatactttcggcgattgacgttacccacagaagaagcaccggctaactccgtgccagcagccgcggtaatacggagggtgcaagcgttaatcggaattactgggcgtaaagcgcacgcaggcggtccattaagttagatgtgaaatccccgggcttaacctgggaatggcatctaagactggtggactagagtctcgtagaggggggtagaattccacgtgtagcggtgaaatgcgtagagatgtggaggaataccggtggcgaaggcggccccctggacgaagactgacgctcaggtgcgaaagcgtggggagcaaacaggattagataccctggtagtccacgctgtaaacgatgtcgatttggaggttgtggcctgagccgtggcttccggagctaacgcgttaaatcgaccgcctggggagtacggccgcaaggttaaaactcaaatgaattgacgggggcccgcacaagcggtggagcatgtggtttaattcgatgcaacgcgaagaaccttacctactcttgacatccagcgaatccttcagagatgagggagtgccttcgggaacgctgagacaggtgctgcatggctgtcgtcagctcgtgttgtgaaatgttgggttaagtcccgcaacgagcgcaacccttatcctttgttgccagcacgtaatggtgggaactcaagggagactgccggtgataaaccggaggaaggtggggatgacgtcaagtcatcatggcccttacgagtagggctacacacgtgctacaatggcagatacaaagagaagcgacctcgcgagagtcagcggaactcataaagtctgtcgtagtccggattggagtctgcaactcgactccatgaagtcggaatcgctagtaatcgcggatcagaatgccgcggtgaatacgttcccgggccttgtacacaccgcccgtcacaccatgggagtgggttgcaaaagaagtcggtagcttaaccttcgggggggcgctgaccactttgtgattcatgactggggtg

SEQ ID NO: 3623 - DNA, 1464 bp, Xenorhabdus mauleonii
  source 1..1464: mol_type = unassigned DNA
attgaacgctggcggcaggcctaacacatgcaagtcgagcggcagcgggaagaagcttgcttctttgccggcgagcggcggacgggtgagtaatgtctggggatctgcccgatggagggggataaccactggaaacggtggctaataccgcataacctctgaggagcaaagtgggggaccttcgggcctcacgccatcggatgaacccagatgggattagctagtaggcggggtaatggcccacctaggcgacgatccctagctggtctgagaggatgaccagccacactgggactgagacacggcccagactcctacgggaggcagcagtggggaatattgcacaatgggcgcaagcctgatgcagccatgccgcgtgtatgaagaaggccttcgggttgtaaagtactttcagcggggaggaaggcgtaggtcttaatacggcttacgattgacgttacccgcagaagaagcaccggctaactccgtgccagcagccgcggtaatacggagggtgcaagcgttaatcggaattactgggcgtaaagcgcacgcaggcggtcaattaagttagatgtgaaatccccgggcttaacctgggaactgcatctaagactggttggctagagtctcgtagaggggggtagaattccacgtgtagcggtgaaatgcgtagagatgtggaggaataccggtggcgaaggcggccccctggacgaagactgacgctcaggtgcgaaagcgtggggagcaaacaggattagataccctggtagtccacgctgtaaacgatgtcgatttggaggttgtgcccttgaggcgtggcttccggagctaacgcgttaaatcgaccgcctggggagtacggtcgcaagattaaaactcaaatgaattgacgggggcccgcacaagcggtggagcatgtggtttaattcgatgcaacgcgaagaaccttacctactcttgacatccacggaatttggcagagatgccgaagtgccttcgggaaccgtgagacaggtgctgcatggctgtcgtcagctcgtgttgtgaaatgttgggttaagtcccgcaacgagcgcaacccttatcctttgttgccagcacttcgggtgggaactcaagggagactgccggtgataaaccggaggaaggtggggatgacgtcaagtcatcatggcccttacgagtagggctacacacgtgctacaatggcagatacaaagagaagcgacctcgcgagagcaagcggaactcataaagtctgtcgtagtccggattggagtctgcaactcgactccatgaagtcggaatcgctagtaatcgtagatcagaatgctacggtgaatacgttcccgggccttgtacacaccgcccgtcacaccatgggagtgggttgcaaaagaagtaggtagcttaaccttcgggagggcgcttaccactttgtgattcatgactggggtg

SEQ ID NO: 3624 - DNA, 1465 bp, Xenorhabdus miraniensis
  source 1..1465: mol_type = unassigned DNA
  misc_difference 442..443: note = n is a, c, g, or t
attgaacgctggcggcaggcctaacacatgcaagtcgagcggcagcgggaagaagcttgcttctttgccggcgagcggcggacgggtgagtaatgtctggggatctgcccgatggagggggataaccactggaaacggtggctaataccgcataacctcttaggagcaaagtgggggaccttcgggcctcacgccatcggatgaacccagatgggattagctagtaggcggggtaagggcccacctaggcgacgatccctagctggtctgagaggatgaccagccacactgggactgagacacggcccagactcctacgggaggcagcagtggggaatattgcacaatgggcgcaagcctgatgcagccatgccgcgtgtatgaagaaggccttcgggttgtaaagtactttcagcggggaggaaggcrtgaagctgaatanncttcaygattgacgttacccgcagaagaagcaccggctaactccgtgccagcagccgcggtaatacggagggtgcaagcgttaatcggaattactgggcgtaaagcgcacgcaggcggtcaattaagttagatgtgaaatccccgggcttaacctgggaacggcatctaagactggttggctagagtctcgtagaggggggtagaattccacgtgtagcggtgaaatgcgtagagatgtggaggaataccggtggcgaaggcggccccctggacgaagactgacgctcaggtgcgaaagcgtggggagcaaacaggattagataccctggtagtccacgctgtaaacgatgtcgatttggaggttgtgcccttgaggygtggcttccggagctaacgcgttaaatcgaccgcctggggagtacggtcgcaagattaaaactcaaatgaattgacgggggcccgcacaagcggtggagcatgtggtttaattcgatgcaacgcgaagaaccttacctactcttgacatccacggaatttggcagagatgctgaagtgccttcgggacccgtgagacaggtgctgcatggctgtcgtcagctcgtgttgtgaaatgttgggttaagtcccgcaacgagcgcaacccttatcctttgttgccagcacgtgatggtgggaactcaagggagactgccggtgataaaccggaggaaggtggggatgacgtcaagtcatcatggcccttacgagtagggctacacacgtgctacaatggcagatacaaagagaagcgacctcgcgagagcaagcggaactcataaagtctgtcgtagtccggattggagtctgcaactcgactccatgaagtcggaatcgctagtaatcgcagatcagaatgctgcggtgaatacgttcccgggccttgtacacaccgcccgtcacaccatgggagtgggttgcaaaagaagtcggtagcttaacctgcgggagggcgctgaccactttgtgattcatgactggggtg

SEQ ID NO: 3625 - DNA, 1465 bp, Xenorhabdus nematophila
  source 1..1465: mol_type = unassigned DNA
attgaacgctggcggcaggcctaacacatgcaagtcggacggtaacaggaaacagcttgctgttttgctgacgagtggcggacgggtgagtaatgtctggggatctgcccgatggagggggataaccactggaaacggtggctaataccgcatgacctcttgggagtaaagtgggggaccttcgggcctcacgccatcggatgaacccagatgggattagctggtaggcggggtaatggcccacctaggcgacgatccctagctggtctgagaggatgaccagccacactgggactgagacacggcccagactcctacgggaggcagcagtggggaatattgcacaatgggcgcaagcctgatgcagccatgccgcgtgtatgaagaaggccttcgggttgtaaagtactttcagcggggaggaaggcgtaagtctgaacagggcttacgattgacgttacccgcagaagaagcaccggctaactccgtgccagcagccgcggtaatacggagggtgcaagcgttaatcggaattactgggcgtaaagcgcacgcaggcggtcaattaagttggatgtgaaatccccgggcttaacccgggaacggcatccaagactggttggctagagtctcgtagaggggggtagaattccacgtgtagcggtgaaatgcgtagagatgtggaggaataccggtggcgaaggcggccccctggacgaagactgacgctcaggtgcgaaagcgtggggagcaaacaggattagataccctggtagtccacgctgtaaacgatgtcgatttggaggctgtgcccttgaggcgtggcttccggagctaacgcgttaaatcgaccgcctggggagtacggccgcaaggttaaaactcaaatgaattgacgggggcccgcacaagcggtggagcatgtggtttaattcgatgcaacgcgaagaaccttacctactcttgacatccacgggatcaggcagagatgccggagtgccttcgggaaccgtgagacaggtgctgcatggctgtcgtcagctcgtgttgtgaaatgttgggttaagtcccgcaacgagcgcaacccttatcctttgttgccagcacgtgatggtgggaactcaagggagactgccggtgataaaccggaggaaggtggggatgacgtcaagtcatcatggcccttacgagtagggctacacacgtgctacaatggcagatacaaagagaagcgacctcgcgagagcaagcggaactcataaagtctgtcgtagtccggattggagtctgcaactcgactccatgaagtcggaatcgctagtaatcgtagatcagaatgctacggtgaatacgttcccgggccttgtacacaccgcccgtcacaccatgggagtgggttgcaaaagaagtaggtagcttaaccttcgggggggcgcttaccactttgtgattcatgactggggtg

SEQ ID NO: 3626 - DNA, 1466 bp, Xenorhabdus poinarii
  source 1..1466: mol_type = unassigned DNA
  misc_difference 432: note = n is a, c, g, or t
  misc_difference 434: note = n is a, c, g, or t
  misc_difference 933: note = n is a, c, g, or t
  misc_difference 1111: note = n is a, c, g, or t
  misc_difference 1431: note = n is a, c, g, or t
attgaacgctggcggcaggcctaacacatgcaagtcgagcggcagcgggaggaaagcgtgctttcttgccggcgagcggcggacgggtgagtaatgtctggggatctgcccgatggcgggggataaccactggaaacggtggctaataccgcataatctctgtggagcaaagtgggggaccttcgggcctcacgccatcggatgaacccagatgggattagctagtaggtggggtaaaggctcacctaggcgacgatccctagctggtctgagaggatgaccagccacactgggactgagacacggcccagactcctacgggaggcagcagtggggaatattgcacaatgggcgcaagcctgatgcagccatgccgcgtgtatgaagaaggccttcgggttgtaaagtactttcagcggggaggaaggcgtnancctgaataaggttggcgtttgacgttacccgcagaagaagcaccggctaactccgtgccagcagccgcggtaatacggagggtgcaagcgttaatcggaattactgggcgtaaagcgcacgcaggcggtcaattaagttagatgtgaaatccccgggcttaacctgggaacggcatctaagactggttggctagagtctcgtagaggggggtagaattccacgtgtagcggtgaaatgcgtagagatgtggaggaataccggtggcgaaggcggccccctggacgaagactgacgctcaggtgcgaaagcgtggggagcaaacaggattagataccctggtagtccacgctgtaaacgatgtcgatttggaggttgtggcctagagctgtggcttccggagctaacgcgttaaatcgaccgcctggggagtacggccgcaaggttaaaactcaaatgaattgacgggggcccgcacaagcggtggagcatgtggtttanttcgatgcaacgcgaagaaccttacctactcttgacatccacggaattttgcagagatgcgaaagtgccttcgggaaccgtgagacaggtgctgcatggctgtcgtcagctcgtgttgtgaaatgttgggttaagtcccgcaacgagcgcaacccttatcctttgttgccagcacgtnatggtgggaactcaagggagactgccggtgataaaccggaggaaggtggggatgacgtcaagtcatcatggcccttacgagtagggctacacacgtgctacaatggcagatacaaagagaagcgacctcgcgagagcaagcggacctcataaagtctgtcgtagtccggattggagtctgcaactcgactccatgaagtcggaatcgctagtaatcgtagatcagaatgctacggtgaatacgttcccgggccttgtacacaccgcccgtcacaccatgggagtgggttgcaaaagaagtaggtagcttaaccttcgggngggcgcttaccactttgtgattcatgactggggtg

SEQ ID NO: 3627 - DNA, 1464 bp, Xenorhabdus stockiae
  source 1..1464: mol_type = unassigned DNA
attgacgctggcggcaggcctaacacatgcaagtcgagcggtaacaggaagcagcttgctgctttgctgacgagcggcggacgggtgagtaatgtctggggatctgcccgatggagggggataaccactggaaacggtggctaataccgcatgacctctgaggagcaaagtgggggaccttcgggcctcacgccatcggatgaacccagatgggattagctagtaggtggggtaacggctcacctaggcgacgatccctagctggtctgagaggatgaccagccacactgggactgagacacggcccagactcctacgggaggcagcagtggggaatattgcacaatgggcgcaagcctgatgcagccatgccgcgtgtatgaagaaggccttcgggttgtaaagtactttcagcggggaggaaggcgtgaaaccgaatacgtttcacgattgacgttacccgcagaagaagcaccggctaactccgtgccagcagccgcggtaatacggagggtgcaagcgttaatcggaattactgggcgtaaagcgcacgcaggcggtcaattaagttagatgtgaaatccccgggcttaacctgggaactgcatctaagactggttgactagagtctcgtagaggggggtagaattccacgtgtagcggtgaaatgcgtagagatgtggaggaataccggtggcgaaggcggccccctggacgaagactgacgctcaggtgcgaaagcgtggggagcaaacaggattagataccctggtagtccacgccgtaaacgatgtcgacttggaggttgtggccttgagccgtggcttccggagctaacgcgttaagtcgaccgcctggggagtacggtcgcaagattaaaactcaaatgaattgacgggggcccgcacaagcggtggagcatgtggtttaattcgatgcaacgcgaagaaccttacctactcttgacatccagcgaacctttcagagatgaaggggtgccttcgggaacgctgagacaggtgctgcatggctgtcgtcagctcgtgttgtgaaatgttgggttaagtcccgcaacgagcgcaacccttatcctttgttgccagcacatcatggtgggaactcaagggagactgccggtgataaaccggaggaaggtggggatgacgtcaagtcatcatggcccttacgagtagggctacacacgtgctacaatggcagatacaaagagaagcgacctcgcgagagcaagcggaactcataaagtctgtcgtagtccggattggagtctgcaactcgactccatgaagtcggaatcgctagtaatcgtagatcagaatgctacggtgaatacgttcccgggccttgtacacaccgcccgtcacaccatgggagtgggttgcaaaagaagtaggtagcttaaccttcgggagggcgcttaccactttgtgattcatgactggggtg

SEQ ID NO: 3628 - DNA, 1465 bp, Xenorhabdus szentirmaii
  source 1..1465: mol_type = unassigned DNA
attgaacgctggcggcaggcctaacacatgcaagtcgagcggcagcgggaagaagcgtgcttctttgccggcgagcggcggacgggtgagtaatgtctggggatctgcccgatggagggggataaccactggaaacggtggctaataccgcatgacctcttgggagcaaagtgggggaccttcgggcctcacgccatcggatgaacccagatgggattagctagtaggcggggtaacggcccacctaggcgacgatccctagctggtctgagaggatgaccagccacactgggactgagacacggcccagactcctacgggaggcagcagtggggaatattgcacaatgggcgcaagcctgatgcagccatgccgcgtgtatgaagaaggccttcgggttgtaaagtactttcagcggggaggaaggcgtgagtctgaatacggcttacgattgacgttacccgcagaagaagcaccggctaactccgtgccagcagccgcggtaatacggagggtgcaagcgttaatcggaattactgggcgtaaagcgcacgcaggcggtcaattaagttagatgtgaaatccccgggcttaacccgggaacggcatctaagactggttggctagagtctcgtagaggggggtagaattccacgtgtagcggtgaaatgcgtagagatgtggaggaataccggtggcgaaggcggccccctggacgaagactgacgctcaggtgcgaaagcgtggggagcaaacaggattagataccctggtagtccacgctgtaaacgatgtcgatttggaggttgtgcccctgaggcgtggcttccggagctaacgcgttaaatcgaccgcctggggagtacggtcgcaagattaaaactcaaatgaattgacgggggcccgcacaagcggtggagcatgtggtttaattcgatgcaacgcgaagaaccttacctactcttgacatccacggaatttggcagagatgctgaagtgccttcgggaaccgtgagacaggtgctgcatggctgtcgtcagctcgtgttgtgaaatgttgggttaagtcccgcaacgagcgcaacccttatcctttgttgccagcacgtgatggtgggaactcaagggagactgccggtgataaaccggaggaaggtggggatgacgtcaagtcatcatggcccttacgagtagggctacacacgtgctacaatggcagatacaaagagaagcgacctcgcgagagcaagcggaactcataaagtctgtcgtagtccggattggagtctgcaactcgactccatgaagtcggaatcgctagtaatcgtagatcagaatgctacggtgaatacgttcccgggccttgtacacaccgcccgtcacaccatgggagtgggttgcaaaagaagtaggtagcttaaccttcgggagggcgcttaccactttgtgattcatgactggggtg

SEQ ID NO: 3629 - DNA, 1465 bp, unidentified
  source 1..1465: mol_type = unassigned DNA; note = Xenorhabdus thuongxuanensis
attgaacgctggcggcaggcctaacacatgcaagtcgggcggcagcgggggaaagcgtgctttcctgccggcgagcggcggacgggtgagtaatgtctggggatctgcccgatggagggggataaccactggaaacggtggctaataccgcatgacctcttttgagcaaagtgggggaccttcgggcctcacgccatcggatgaacccagatgggattagctagtaggtggggtaaaggctcacctaggcgacgatccctagctggtctgagaggatgaccagccacactgggactgagacacggcccagactcctacgggaggcagcagtggggaatattgcacaatgggcgcaagcctgatgcagccatgccgcgtgtatgaagaaggccttcgggttgtaaagtactttcagcggggaggaaggcgtggagttgaataggcttcacgattgacgttacccgcagaagaagcaccggctaactccgtgccagcagccgcggtaatacggagggtgcaagcgttaatcggaattactgggcgtaaagcgcacgcaggcggtcaattaagttagatgtgaaatccccgggcttaacctgggaatggcatctaagactggttggctagagtctcgtagaggggggtagaattccacgtgtagcggtgaaatgcgtagagatgtggaggaataccggtggcgaaggcggccccctggacgaagactgacgctcaggtgcgaaagcgtggggagcaaacaggattagataccctggtagtccacgctgtaaacgatgtcgatttggaggttgtggccttgagccgtggcttccggagctaacgcgttaaatcgaccgcctggggagtacggtcgcaagattaaaactcaaatgaattgacgggggcccgcacaagcggtggagcatgtggtttaattcgatgcaacgcgaagaaccttacctactcttgacatccagcgaagcctttagagatagaggcgtgccttcgggagcgctgagacaggtgctgcatggctgtcgtcagctcgtgttgtgaaatgttgggttaagtcccgcaacgagcgcaacccttatcctttgttgccagcacgttatggtgggaactcaagggagactgccggtgataaaccggaggaaggtggggatgacgtcaagtcatcatggcccttacgagtagggctacacacgtgctacaatggcggatacaaagagaagcgacctcgcgagagcaagcggacctcataaagtctgtcgtagtccggattggagtctgcaactcgactccatgaagtcggaatcgctagtaatcgcagatcagcatgctgcggtgaatacgttcccgggccttgtacacaccgcccgtcacaccatgggagtgggttgcaaaagaagtcggtagcttaaccttcgggagggcgctgaccactttgtgattcatgactggggtg

SEQ ID NO: 3630 - DNA, 1465 bp, Xenorhabdus vietnamensis
  source 1..1465: mol_type = unassigned DNA
attgaacgctggcggcaggcctaacacatgcaagtcgggcggcagcggggggaagcttgcttccctgccggcgagcggcggacgggtgagtaatgtctggggatctgcccgatggagggggataaccactggaaacggtggctaataccgcataacctctgaggagcaaggtgggggaccttcgggcctcacgccatcggatgaacccagatgggattagctagtaggcggggtaatggcccacctaggcgacgatccctagctggtctgagaggatgaccagccacactgggactgagacacggcccagactcctacgggaggcagcagtggggaatattgcacaatgggcgcaagcctgatgcagccatgccgcgtgtatgaagaaggccttcgggttgtaaagtactttcagcggggaggaaggcaggcgtccgaatacggcgcctgattgacgttacccgcagaagaagcaccggctaactccgtgccagcagccgcggtaatacggagggtgcaagcgttaatcggaattactgggcgtaaagcgcacgcaggcggtcaattaagttggatgtgaaatccccgggcttaacctgggaactgcatccaagactggttggctagagtctcgtagaggggggtagaattccacgtgtagcggtgaaatgcgtagagatgtggaggaataccggtggcgaaggcggccccctggacgaagactgacgctcaggtgcgaaagcgtggggagcaaacaggattagataccctggtagtccacgctgtaaacgatgtcgatttggaggttgtgcccttgaggcgtggcttccggagctaacgcgttaaatcgaccgcctggggagtacggccgcaaggttaaaactcaaatgaattgacgggggcccgcacaagcggtggagcatgtggtttaattcgatgcaacgcgaagaaccttacctactcttgacatccagcgaagcctttagagatagaggcgtgccttcgggaacgctgagacaggtgctgcatggctgtcgtcagctcgtgttgtgaaatgttgggttaagtcccgcaacgagcgcaacccttatcctttgttgccagcacgtgatggtgggaactcaagggagactgccggtgataaaccggaggaaggtggggatgacgtcaagtcatcatggcccttacgagtagggctacacacgtgctacaatggcagatacaaagagaagcgacctcgcgagagcaagcggaactcataaagtctgtcgtagtccggattggagtctgcaactcgactccatgaagtcggaatcgctagtaatcgcagatcagaatgctgcggtgaatacgttcccgggccttgtacacaccgcccgtcacaccatgggagtgggttgcaaaagaagtaggtagcttaaccttcgggagggcgcttaccactttgtgattcatgactggggtg

SEQ ID NO: 3631 - DNA, 1467 bp, Xylella fastidiosa
  source 1..1467: mol_type = unassigned DNA
agtgaacgctggcggcaggcctaacacatgcaagtcggacggcagcacattggtagtaataccatgggtggcgagtggcggacgggtgaggaatacatcggaatctaccttatcgtgggggacaacgtagggaaacttacgctaataccgcatacgacctacgggtgaaagcaggggaccttagggccttgtgcgattggatgagccgatgtccgattagctagttggtgaggtaaaggctcaccaaggcgacgatcggtagctggtctgagaggatgatcagccacactggaactgagacacggtccagactcctacgggaggcagcagtggggaatattggacaatgggcgcaagcctgatccagctatgccgcgtgggtgaagaatgccttcgggttgtaaagcccttttgttggggaagaaaggcaattggttaatacctagttgttatgacggtacccaaagaataagcaccggctaacttcgtgccagcagccgcggtaatacgaagggtgcaagcgttactcggaattactgggcgtaaagggtgcgtaggtggttatttaagtctgttgtgaaagccctgggcttaacctgggaatggcagtggatactggatagctagagtgtggtagagggtagcggaattcctggtgtagcagtgaaatgcgtagagatcaggaggaacatccgtggcgaaggcggctacctgggccaacactgacactgaggcacgaaagcgtggggagcaaacaggattagataccctggtagtccacgccctaaacgatgcgaactggatgttgagtgcaaattggcactcagtatcgaagctaacgcgttaagttcgccgcctggggagtacggtcgcaagactgaaactcaaaggaattgacgggggcccgcacaagcggtggagtatgtggtttaattcgatgcaacgcgaagaaccttacctggtcttgacatctgcggaactttccagagatggattggtgccttcgggagccgtgagacaggtgctgcatggctgtcgtcagctcgtgtcgtgagatgttgggttaagtcccgcaacgagcgcaacccttgtccttagttgccagcacgtaatggtgggaactttaaggagactgccggtgacaaatcggaggaaggtggggatgacgtcaagtcatcatggcccttacgaccagggctacacacgtactacaatggtagggacagagggctgcaatctcgcgagggtgagctaatcccagaaaccctatctcagtccggattggagtctgcaactcgactccatgaagtcggaatcgctagtaatcgcagatcagcattgctgcggtgaatacgttcccgggccttgtacacaccgcccgtcacaccatgggagtttgttgcaccagaagcaggtagcttaaccgcgaggagggcgcttgccacggtgtggccgatgactggggtg

SEQ ID NO: 3632 - DNA, 1467 bp, unidentified
  source 1..1467: mol_type = unassigned DNA; note = Xylella taiwanensis
agtgaacgctggcggcaggcctaacacatgcaagtcgaacggcagcacagtggtagcgatatcatgggtggcgagtggcggacgggtgaggaatacatcggaatctaccttgtcgtgggggataacgtagggaaacttacgctaataccgcatacgacctacgggtgaaagcaggggacctttgggccttgtgcgattggatgagccgatgtccgattagctagttggtggggtaaaggcccaccaaggcgacgatcggtagctggtctgagaggatgatcagccacactggaactgagacacggtccagactcctacgggaggcagcagtggggaatattggacaatgggcgcaagcctgatccagctatgccgcgtgggtgaagaatgccttcgggttgtaaagcccttttgttggggaagaaaagcaattggttaatacccggttgttctgacggtacccaaagaataagcaccggctaacttcgtgccagcagccgcggtaatacgaagggtgcaagcgttactcggaattactgggcgtaaagggtgcgtaggtggttgtttaagtccgttgtgaaagccctgggcttaacctgggaatggcagtggatactggatagctagagtgtggtagagggtagcggaattcctggtgtagcagtgaaatgcgtagagatcaggaggaacatccgtggcgaaggcggctacctgggccaacactgacactgaggcacgaaagcgtggggagcaaacaggattagataccctggtagtccacgccctaaacgatgcgaactggatgttgagtgcaaattggcactcagtatcgaagctaacgcgttaagttcgccgcctggggagtacggtcgcaagactgaaactcaaaggaattgacgggggcccgcacaagcggtggagtatgtggtttaattcgatgcaacgcgaagaaccttacctggtcttgacatccacgggactttccagagatggattggtgccttcgggagccgtgagacaggtgctgcatggctgtcgtcagctcgtgtcgtgagatgttgggttaagtcccgcaacgagcgcaacccttgtccttagttgccagcacgttatggtgggaactttaaggagactgccggtgacaaatcggaggaaggtggggatgacgtcaagtcatcatggcccatacgaccagggctacacacgtactacaatggtagggacagagggctgcaatctcgcgagggtgagccaatcccagaaaccctatctcagtccggattggagtctgcaactcgactccatgaagtcggaatcgctagtaatcgcagatcagcattgctgcggtgaatacgttcccgggccttgtacacaccgcccgtcacaccatgggagtttgttgcaccagaagcaggtagcttaaccgcgaggagggcgcttgccacggtgtggccgatgactggggtg

SEQ ID NO: 3633 - DNA, 1455 bp, Xylophilus ampelinus
  source 1..1455: mol_type = unassigned DNA
attgaacgctggcggcatgccttacacatgcaagtcgaacggtaacaggtcttcggatgctgacgagtggcgaacgggtgagtaatacatcggaacgtgcccgatcgtgggggataacgcagcgaaagctgtgctaataccgcatacgatctacggatgaaagcgggggatcgcaagacctcgcgcggacggagcggccgatggcagattaggtagttggtgaggtaaaggctcaccaagccgtcgatctgtagctggtctgagaggacgaccagccacactgggactgagacacggcccagactcctacgggaggcagcagtggggaattttggacaatgggcgcaagcctgatccagccatgccgcgtgcaggatgaaggccttcgggttgtaaactgcttttgtacggaacgaaaaggctttttttaataaaaagagctcatgacggtaccgtaagaataagcaccggctaactacgtgccagcagccgcggtaatacgtagggtgcgagcgttaatcggaattactgggcgtaaagcgtgcgcaggcggtgatgtaagacagatgtgaaatccctgggctcaacctgggaactgcatttgtgactgcatcgctggagtgcggcagagggggatggaattccgcgtgtagcagtgaaatgcgtagatatgcggaggaacaccgatggcgaaggcaatcccctgggcctgcactgacgctcatgcacgaaagcgtggggagcaaacaggattagataccctggtagtccacgccctaaacgatgtcaactggttgttgggtcttcactgactcagtaacgaagctaacgcgtgaagttgaccgcctggggagtacggccgcaaggttgaaactcaaaggaattgacggggacccgcacaagcggtggatgatgtggtttaattcgatgcaacgcgaaaaaccttacccacctttgacatgtacggaatttgccagagatggcttagtgctcgaaagagagccgtaacacaggtgctgcatggctgtcgtcagctcgtgtcgtgagatgttgggttaagtcccgcaacgagcgcaacccttgtcattagttgctacatttagttgggcactctaatgagactgccggtgacaaaccggaggaaggtggggatgacgtcaagtcctcatggcccttataggtggggctacacacgtcatacaatggctggtacagagggttgccaacccgcgagggggagctaatcccataaaaccagtcgtagtccggatcgcagtctgcaactcgactgcgtgaagtcggaatcgctagtaatcgcggatcagaatgtcgcggtgaatacgttcccgggtcttgtacacaccgcccgtcacaccatgggagcgggttctgccagaagtagttagcctaaccgcaaggagggcgattaccacggcagggttcgtgactggggtg

SEQ ID NO: 3634 - DNA, 1384 bp, Yangia pacifica
  source 1..1384: mol_type = unassigned DNA
aacgaacgctggcggcaggcctaacacatgcaagtcgagcgagaccttcgggtctagcggcggacgggtgagtaacgcgtgggaacgtgcccttctctacggaatagtcccgggaaactgggtttaataccgtatacgcccttcgggggaaagatttatcggagaaggatcggcccgcgttagattaggtagttggtggggtaatggcctaccaagcctacgatctatagctggtttgagaggatgatcagccacactgggactgagacacggcccagactcctacgggaggcagcagtggggaatcttagacaatgggggcaaccctgatctagccatgccgcgtgagtgatgaaggccttagggtcgtaaagctctttcgctggggaagataatgactgtacccagtaaagaaaccccggctaactccgtgccagcagccgcggtaatacggagggggttagcgttgttcggaattactgggcgtaaagcgcgcgtaggcggatcagaaagttgggggtgaaatcccggggctcaacctcggaactgcctccaaaactcctggtcttgagttcgagagaggtgagtggaactccgagtgtagaggtgaaattcgtagatattcggaagaacaccagtggcgaaggcggctcactggctcgatactgacgctgaggtgcgaaagtgtggggagcaaacaggattagataccctggtagtccacaccgtaaacgatgaatgccagtcgtcggcaagcatgcttgtcggtgacacacctaacggattaagcattccgcctggggagtacggtcgcaagattaaaactcaaaggaattgacgggggcccgcacaagcggtggagcatgtggtttaattcgaagcaacgcgcagaaccttaccaacccttgacatcctcggaccgccagagagatctggttttcacttcggtgaccgagtgacaggtgctgcatggctgtcgtcagctcgtgtcgtgagatgttcggttaagtccggcaacgagcgcaacccacatcttcagttgccagcagttcggctgggcactctggagaaactgcccgtgataagcgggaggaaggtgtggatgacgtcaagtcctcatggcccttacgggttgggctacacacgtgctacaatggcagtgacaatgggttaatcccaaaaaactgtctcagttcggattggggtctgcaactcgaccccatgaagtcggaatcgctagtaatcgcgtaacagcatgacgcggtgaatacgttcccgggccttgtacacaccgcccgtcacaccatgggagttggttctacccgacgacgctgcgctaaccttcgggaggcaggcggccacggtaggatcagcgactggggtg

SEQ ID NO: 3635 - DNA, 1461 bp, Yersinia aldovae
  source 1..1461: mol_type = unassigned DNA
attgaacgctggcggcaggcctaacacatgcaagtcgagcggcagcgggaagtagtttactactttgccggcgagcggcggacgggtgagtaatgtctgggaaactgcctgatggagggggataactactggaaacggtagctaataccgcatgacctcgcaagagcaaagtgggggaccttcgggcctcacgccatcggatgtgcccagatgggattagctagtaggtggggtaatggctcacctaggcgacgatccctagctggtctgagaggatgaccagccacactggaactgagacacggtccagactcctacgggaggcagcagtggggaatattgcacaatgggcgcaagcctgatgcagccatgccgcgtgtgtgaagaaggccttcgggttgtaaagcactttcagcgaggaggaaggcagtcgtgttaatagcacggttgattgacgttactcgcagaagaagcaccggctaactccgtgccagcagccgcggtaatacggagggtgcaagcgttaatcggaattactgggcgtaaagcgcacgcaggcggtttgttaagtcagatgtgaaatccccgcgcttaacgtgggaactgcatttgaaactggcaagctagagtcttgtagaggggggtagaattccaggtgtagcggtgaaatgcgtagagatctggaggaataccggtggcgaaggcggccccctggacaaagactgacgctcaggtgcgaaagcgtggggagcaaacaggattagataccctggtagtccacgctgtaaacgatgtcgacttggaggttgtgcccttgaggcgtggcttccggagctaacgcgttaagtcgaccgcctggggagtacggccgcaaggttaaaactcaaatgaattgacgggggcccgcacaagcggtggagcatgtggtttaattcgatgcaacgcgaagaaccttacctactcttgacatccacagaacgtagcagagatgcttcggtgccttcgggaactgtgagacaggtgctgcatggctgtcgtcagctcgtgttgtgaaatgttgggttaagtcccgcaacgagcgcaacccttatcctttgttgccagcacgtaatggtgggaactcaagggagactgccggtgacaaaccggaggaaggtggggatgacgtcaagtcatcatggcccttacgagtagggctacacacgtgctacaatggcagatacaaagtgaagcgaactcgcgagagccagcggaccacataaagtctgtcgtagtccggattggagtctgcaactcgactccatgaagtcggaatcgctagtaatcgtagatcagaatgctacggtgaatacgttcccgggccttgtacacaccgcccgtcacaccatgggagtgggttgcaaaagaagtaggtagcttaaccttcgggagggcgcttaccactttgtgattcatgactgg

SEQ ID NO: 3636 - DNA, 1465 bp, Yersinia entomophaga
  source 1..1465: mol_type = unassigned DNA
attgaacgctggcggcaggcctaacacatgcaagtcgagcggcagcgggaagtagcttgctactttgccggcgagcggcggacgggtgagtaatgtctgggaaactgcctgatggagggggataactactggaaacggtagctaataccgcataacctcgcaagagcaaagtgggggaccttagggcctcacgccatcggatgtgcccagatgggattagctagtaggtggggtaatggctcacctaggcgacgatccctagctggtctgagaggatgaccagccacactggaactgagacacggtccagactcctacgggaggcagcagtggggaatattgcacaatgggcgcaagcctgatgcagccatgccgcgtgtgtgaagaaggccttcgggttgtaaagcactttcagcgaggaggaaggcatttcacctaatacgtgaagtgattgacgttactcgcagaagaagcaccggctaactccgtgccagcagccgcggtaatacggagggtgcaagcgttaatcggaattactgggcgtaaagcgcacgcaggcggtttgttaagtcagatgtgaaatccccgagcttaacttgggaactgcatttgaaactggcaagctagagtcttgtagaggggggtagaattccaggtgtagcggtgaaatgcgtagagatctggaggaataccggtggcgaaggcggccccctggacaaagacygacgctcaggtgcgaaagcgtggggagcaaacaggattagataccctggtagtccacgctgtaaacgatgtcgacttggaggttgtgcccttgaggcgtggcttccggagctaacgcgttaagtcgaccgcctggggagtacggccgcaaggttaaaactcaaatgaattgacgggggcccgcacaagcggtggagcatgtggtttaattcgatgcaacgcgaagaaccttacctactcttgacatccacagaacgtagcagagatgcttcggtgccttcgggaactgtgagacaggtgctgcatggctgtcgtcagctcgtgttgtgaaatgttgggttaagtcccgcaacgagcgcaacccttatcctttgttgccagcacgtcatggtgggaactcaagggagactgccggtgataaaccggaggaaggtggggatgacgtcaagtcatcatggcccttacgagtagggctacacacgtgctacaatggcagatacaaagtgaagcgaactcgcgagagcaagcggaccacataaagtctgtcgtagtccggattggagtctgcaactcgactccatgaagtcggaatcgctagtaatcgtagatcagaatgctacggtgaatacgttcccgggccttgtacacaccgcccgtcacaccatgggagtgggttgcaaaagaagtaggtagcttaaccttcgggagggcgcttaccactttgtgattcatgactggggtg

SEQ ID NO: 3637 - DNA, 1465 bp, Yersinia frederiksenii
  source 1..1465: mol_type = unassigned DNA
attgaacgctggcggcaggcctaacacatgcaagtcgagcggcagcgggaagtagtttactactttgccggcgagcggcggacgggtgagtaatgtctgggaaactgcctgatggagggggataactactggaaacggtagctaataccgcatgacctcgcaagagcaaagtgggggaccttcgggcctcacgccatcggatgtgcccagatgggattagctagtaggtggggtaatggctcacctaggcgacgatccctagctggtctgagaggatgaccagccacactggaactgagacacggtccagactcctacgggaggcagcagtggggaatattgcacaatgggcgcaagcctgatgcagccatgccgcgtgtgtgaagaaggccttcgggttgtaaagcactttcagcgaggaggaaggggttgagtttaatacgctcaatcattgacgttactcgcagaagaagcaccggctaactccgtgccagcagccgcggtaatacggagggtgcaagcgttaatcggaattactgggcgtaaagcgcacgcaggcggtttgttaagtcagatgtgaaatccccgcgcttaacgtgggaactgcatttgaaactggcaagctagagtcttgtagaggggggtagaattccaggtgtagcggtgaaatgcgtagagatctggaggaataccggtggcgaaggcggccccctggacaaagactgacgctcaggtgcgaaagcgtggggagcaaacaggattagataccctggtagtccacgctgtaaacgatgtcgacttggaggttgtgcccttgaggcgtggcttccggagctaacgcgttaagtcgaccgcctggggagtacggccgcaaggttaaaactcaaatgaattgacgggggcccgcacaagcggtggagcatgtggtttaattcgatgcaacgcgaagaaccttacctactcttgacatccacagaacttagcagagatgcttcggtgccttcgggaactgtgagacaggtgctgcatggctgtcgtcagctcgtgttgtgaaatgttgggttaagtcccgcaacgagcgcaacccttatcctttgttgccagcacgtaatggtgggaactcaaaggagactgccggtgacaaaccggaggaaggtggggatgacgtcaagtcatcatggcccttacgagtagggctacacacgtgctacaatggcagatacaaagtgaagcgaactcgcgagagcaagcggaccacataaagtctgtcgtagtccggattggagtctgcaactcgactccatgaagtcggaatcgctagtaatcgtagatcagaatgctacggtgaatacgttcccgggccttgtacacaccgcccgtcacaccatgggagtgggttgcaaaagaagtaggtagcttaaccttcgggagggcgcttaccactttgtgattcatgactggggtg

SEQ ID NO: 3638 - DNA, 1465 bp, Yersinia massiliensis
  source 1..1465: mol_type = unassigned DNA
attgaacgctggcggcaggcctaacacatgcaagtcgagcggcagcggaaagtagcttgctactttgccggcgagcggcggacgggtgagtaatgtctggggatctgcctgatggagggggataactactggaaacggtagctaataccgcatgacctcgaaagagcaaagtgggggaccttcgggcctcacgccatcggatgaacccagatgggattagctagtaggtggggtaatggctcacctaggcgacgatccctagctggtctgagaggatgaccagccacactggaactgagacacggtccagactcctacgggaggcagcagtggggaatattgcacaatgggcgcaagcctgatgcagccatgccgcgtgtgtgaagaaggccttcgggttgtaaagcactttcagcgaggaggaaggcattgtggttaataaccgcagtgattgacgttactcgcagaagaagcaccggctaactccgtgccagcagccgcggtaatacggagggtgcaagcgttaatcggaattactgggcgtaaagcgcacgcaggcggtttgttaagtcagatgtgaaatccccgcgcttaacgtgggaactgcatttgaaactggcaagctagagtcttgtagaggggggtagaattccaggtgtagcggtgaaatgcgtagagatctggaggaataccggtggcgaaggcggccccctggacaaagactgacgctcaggtgcgaaagcgtggggagcaaacaggattagataccctggtagtccacgctgtaaacgatgtcgacttggaggttgtgcccttgaggcgtggcttccggagctaacgcgttaagtcgaccgcctggggagtacggccgcaaggttaaaactcaaatgaattgacgggggcccgcacaagcggtggagcatgtggtttaattcgatgcaacgcgaagaaccttacctactcttgacatccacggaatttagcagagatgctttagtgccttcgggaaccgtgagacaggtgctgcatggctgtcgtcagctcgtgttgtgaaatgttgggttaagtcccgcaacgagcgcaacccttatcctttgttgccagcacgtaatggtgggaactcaagggagactgccggtgacaaaccggaggaaggtggggatgacgtcaagtcatcatggcccttacgagtagggctacacacgtgctacaatggcagatacaaagtgaagcgaactcgcgagagcaagcggaccacataaagtctgtcgtagtccggattggagtctgcaactcgactccatgaagtcggaatcgctagtaatcgtagatcagaatgctacggtgaatacgttcccgggccttgtacacaccgcccgtcacaccatgggagtgggttgcaaaagaagtaggtagcttaaccttcgggagggcgcttaccactttgtgattcatgactggggtg

SEQ ID NO: 3639 - DNA, 1465 bp, Yersinia nurmii
  source 1..1465: mol_type = unassigned DNA
attgaacgctggcggcaggcctaacacatgcaagtcgagcggcagcggaaagtagcttgctactttgccggcgagcggcggacgggtgagtaatgtctgggaaactgcctgatggagggggataactactggaaacggtagctaataccgcataacctcgcaagagcaaagtgggggaccttagggcctcacgccatcggatgtgcccagatgggattagctagtaggtggggtaatggctcacctaggcgacgatccctagctggtctgagaggatgaccagccacactggaactgagacacggtccagactcctacgggaggcagcagtggggaatattgcacaatgggcgcaagcctgatgcagccatgccgcgtgtgtgaagaaggccttcgggttgtaaagcactttcagcgaggaggaaggcatttcacttaatacgtgaagtgattgacgttactcgcagaagaagcaccggctaactccgtgccagcagccgcggtaatacggagggtgcaagcgttaatcggaattactgggcgtaaagcgcacgcaggcggtttgttaagtcagatgtgaaatccccgagcttaacttgggaactgcatttgaaactggcaagctagagtcttgtagaggggggtagaattccaggtgtagcggtgaaatgcgtagagatctggaggaataccggtggcgaaggcggccccctggacaaagactgacgctcaggtgcgaaagcgtggggagcaaacaggattagataccctggtagtccacgctgtaaacgatgtcgacttggaggttgtgcccttgaggcgtggcttccggagctaacgcgttaagtcgaccgcctggggagtacggccgcaaggttaaaactcaaatgaattgacgggggcccgcacaagcggtggagcatgtggtttaattcgatgcaacgcgaagaaccttacctactcttgacatccacagaacttagcagagatgcttcggtgccttcgggaactgtgagacaggtgctgcatggctgtcgtcagctcgtgttgtgaaatgttgggttaagtcccgcaacgagcgcaacccttatcctttgttgccagcacgtcatggtgggaactcaagggagactgccggtgataaaccggaggaaggtggggatgacgtcaagtcatcatggcccttacgagtagggctacacacgtgctacaatggcagatacaaagtgaagcgaactcgcgagagcaagcggaccacataaagtctgtcgtagtccggattggagtctgcaactcgactccatgaagtcggaatcgctagtaatcgtagatcagaatgctacggtgaatacgttcccgggccttgtacacaccgcccgtcacaccatgggagtgggttgcaaaagaagtaggtagcttaaccttcgggagggcgcttaccactttgtgattcatgactggggtg

SEQ ID NO: 3640 - DNA, 1465 bp, Yersinia pekkanenii
  source 1..1465: mol_type = unassigned DNA
attgaacgctggcggcaggcctaacacatgcaagtcgagcggcagcgggaagtagtttactactttgccggcgagcggcggacgggtgagtaatgtctgggaaactgcctgatggagggggataactactggaaacggtagctaataccgcatgacctcgcaagagcaaagtgggggaccttcgggcctcacgccatcggatgtgcccagatgggattagctagtaggtggggtaatggctcacctaggcgacgatccctagctggtctgagaggatgaccagccacactggaactgagacacggtccagactcctacgggaggcagcagtggggaatattgcacaatgggcgcaagcctgatgcagccatgccgcgtgtgtgaagaaggccttcgggttgtaaagcactttcagcgaggaggaaggcaatcgtgttaatagcacggttgattgacgttactcgcagaagaagcaccggctaactccgtgccagcagccgcggtaatacggagggtgcaagcgttaatcggaattactgggcgtaaagcgcacgcaggcggtttgttaagtcagatgtgaaatccccgcgcttaacgtgggaactgcatttgaaactggcaagctagagtcttgtagaggggggtagaattccaggtgtagcggtgaaatgcgtagagatctggaggaataccggtggcgaaggcggccccctggacaaagactgacgctcaggtgcgaaagcgtggggagcaaacaggattagataccctggtagtccacgctgtaaacgatgtcgacttggaggttgtgcccttgaggcgtggcttccggagctaacgcgttaagtcgaccgcctggggagtacggccgcaaggttaaaactcaaatgaattgacgggggcccgcacaagcggtggagcatgtggtttaattcgatgcaacgcgaagaaccttacctactcttgacatccacagaacttagcagagatgcttcggtgccttcgggaactgtgagacaggtgctgcatggctgtcgtcagctcgtgttgtgaaatgttgggttaagtcccgcaacgagcgcaacccttatcctttgttgccagcacgtaatggtgggaactcaagggagactgccggtgacaaaccggaggaaggtggggatgacgtcaagtcatcatggcccttacgagtagggctacacacgtgctacaatggcagatacaaagtgaagcgaactcgcgagagccagcggaccacataaagtctgtcgtagtccggattggagtctgcaactcgactccatgaagtcggaatcgctagtaatcgtagatcagaatgctacggtgaatacgttcccgggccttgtacacaccgcccgtcacaccatgggagtgggttgcaaaagaagtaggtagcttaaccttcgggagggcgcttaccactttgtgattcatgactggggtg

SEQ ID NO: 3641 - DNA, 1461 bp, Yersinia pestis
  source 1..1461: mol_type = unassigned DNA
attgaacgctggcggcaggcctaacacatgcaagtcgagcggcagcgggaagtagtttactactttgccggcgagcggcggacgggtgagtaatgtctggggatctgcctgatggagggggataactactggaaacggtagctaataccgcatgacctcgcaagagcaaagtgggggaccttagggcctcacgccatcggatgaacccagatgggattagctagtaggtggggtaatggctcacctaggcgacgatccctagctggtctgagaggatgaccagccacactggaactgagacacggtccagactcctacgggaggcagcagtggggaatattgcacaatgggcgcaagcctgatgcagccatgccgcgtgtgtgaagaaggccttcgggttgtaaagcactttcagcgaggaggaaggggttgagtttaatacgctcaatcattgacgttactcgcagaagaagcaccggctaactccgtgccagcagccgcggtaatacggagggtgcaagcgttaatcggaattactgggcgtaaagcgcacgcaggcggtttgttaagtcagatgtgaaatccccgcgcttaacgtgggaactgcatttgaaactggcaagctagagtcttgtagaggggggtagaattccaggtgtagcggtgaaatgcgtagagatctggaggaataccggtggcgaaggcggccccctggacaaagactgacgctcaggtgcgaaagcgtggggagcaaacaggattagataccctggtagtccacgctgtaaacgatgtcgacttggaggttgtgcccttgaggcgtggcttccggagctaacgcgttaagtcgaccgcctggggagtacggccgcaaggttaaaactcaaatgaattgacgggggcccgcacaagcggtggagcatgtggtttaattcgatgcaacgcgaagaaccttacctactcttgacatccacagaatttggcagagatgctaaagtgccttcgggaactgtgagacaggtgctgcatggctgtcgtcagctcgtgttgtgaaatgttgggttaagtcccgcaacgagcgcaacccttatcctttgttgccagcacgtaatggtgggaactcaagggagactgccggtgacaaaccggaggaaggtggggatgacgtcaagtcatcatggcccttacgagtagggctacacacgtgctacaatggcagatacaaagtgaagcgaactcgcgagagccagcggaccacataaagtctgtcgtagtccggattggagtctgcaactcgactccatgaagtcggaatcgctagtaatcgtagatcagaatgctacggtgaatacgttcccgggccttgtacacaccgcccgtcacaccatgggagtgggttgcaaaagaagtaggtagcttaaccttcgggagggcgcttaccactttgtgattcatgactgg

SEQ ID NO: 3642 - DNA, 1465 bp, Yersinia pseudotuberculosis
  source 1..1465: mol_type = unassigned DNA
attgaacgctggcggcaggcctaacacatgcaagtcgagcggcagcgggaagtagtttactactttgccggcgagcggcggacgggtgagtaatgtctggggatctgcctgatggagggggataactactggaaacggtggctaataccgcatgacctcgcaagagcaaagtgggggaccttagggcctcacgccatcggatgaacccagatgggattagctagtaggtggggtaatggctcacctaggcgacgatccctagctggtctgagaggatgaccagccacactggaactgagacacggtccagactcctacgggaggcagcagtggggaatattgcacaatgggcgcaagcctgatgcagccatgccgcgtgtgtgaagaaggccttcgggttgtaaagcactttcagcgaggaggaaggggttgagtttaatacgctcaatcattgacgttactcgcagaagaagcaccggctaactccgtgccagcagccgcggtaatacggagggtgcaagcgttaatcggaattactgggcgtaaagcgcacgcaggcggtttgttaagtcagatgtgaaatccccgcgcttaacgtgggaactgcatttgaaactggcaagctagagtcttgtagaggggggtagaattccaggtgtagcggtgaaatgcgtagagatctggaggaataccggtggcgaaggcggccccctggacaaagactgacgctcaggtgcgaaagcgtggggagcaaacaggattagataccctggtagtccacgctgtaaacgatgtcgacttggaggttgtgcccttgaggcgtggcttccggagctaacgcgttaagtcgaccgcctggggagtacggccgcaaggttaaaactcaaatgaattgacgggggcccgcacaagcggtggagcatgtggtttaattcgatgcaacgcgaagaaccttacctactcttgacatccacagaatttggcagagatgctaaagtgccttcgggaactgtgagacaggtgctgcatggctgtcgtcagctcgtgttgtgaaatgttgggttaagtcccgcaacgagcgcaacccttatcctttgttgccagcacgtaatggtgggaactcaagggagactgccggtgacaaaccggaggaaggtggggatgacgtcaagtcatcatggcccttacgagtagggctacacacgtgctacaatggcagatacaaagtgaagcgaactcgcgagagccagcggaccacataaagtctgtcgtagtccggattggagtctgcaactcgactccatgaagtcggaatcgctagtaatcgtagatcagaatgctacggtgaatacgttcccgggccttgtacacaccgcccgtcacaccatgggagtgggttgcaaaagaagtaggtagcttaaccttcgggagggcgcttaccactttgtgattcatgactggggtg

SEQ ID NO: 3643 - DNA, 1465 bp, Yersinia rohdei
  source 1..1465: mol_type = unassigned DNA
attgaacgctggcggcaggcctaacacatgcaagtcgagcggcagcgggaagtagtttactactttgccggcgagcggcggacgggtgagtaatgtctgggaaactgcctgatggagggggataactactggaaacggtagctaataccgcatgacctcgcaagagcaaagtgggggaccttcgggcctcacgccatcggatgtgcccagatgggattagctagtaggtggggtaatggctcacctaggcgacgatccctagctggtctgagaggatgaccagccacactggaactgagacacggtccagactcctacgggaggcagcagtggggaatattgcacaatgggcgcaagcctgatgcagccatgccgcgtgtgtgaagaaggccttcgggttgtaaagcactttcagcgaggaggaaggccaatagcttaatacgctgttggattgacgttactcgcagaagaagcaccggctaactccgtgccagcagccgcggtaatacggagggtgcaagcgttaatcggaattactgggcgtaaagcgcacgcaggcggtttgttaagtcagatgtgaaatccccgcgcttaacgtgggaactgcatttgaaactggcaagctagagtcttgtagaggggggtagaattccaggtgtagcggtgaaatgcgtagagatctggaggaataccggtggcgaaggcggccccctggacaaagactgacgctcaggtgcgaaagcgtggggagcaaacaggattagataccctggtagtccacgctgtaaacgatgtcgacttggaggttgtgcccttgaggcgtggcttccggagctaacgcgttaagtcgaccgcctggggagtacggccgcaaggttaaaactcaaatgaattgacgggggcccgcacaagcggtggagcatgtggtttaattcgatgcaacgcgaagaaccttacctactcttgacatccacagaacttagcagagatgcttcggtgccttcgggaactgtgagacaggtgctgcatggctgtcgtcagctcgtgttgtgaaatgttgggttaagtcccgcaacgagcgcaacccttatcctttgttgccagcacgtaatggtgggaactcaagggagactgccggtgacaaaccggaggaaggtggggatgacgtcaagtcatcatggcccttacgagtagggctacacacgtgctacaatggcagatacaaagtgaagcgaactcgcgagagcaagcggaccacataaagtctgtcgtagtccggattggagtctgcaactcgactccatgaagtcggaatcgctagtaatcgtagatcagaatgctacggtgaatacgttcccgggccttgtacacaccgcccgtcacaccatgggagtgggttgcaaaagaagtaggtagcttaaccttcgggagggcgcttaccactttgtgattcatgactggggtg

SEQ ID NO: 3644 - DNA, 1465 bp, Yersinia ruckeri
  source 1..1465: mol_type = unassigned DNA
attgaacgctggcggcaggcctaacacatgcaagtcgagcggcagcggaaagtagcttgctactttgccggcgagcggcggacgggtgagtaatgtctggggatctgcctgatggagggggataactactggaaacggtagctaataccgcataacctcgcaagagcaaagtgggggaccttcgggcctcacgccatcggatgaacccagatgggattagctagtaggtggggtaatggctcacctaggcgacgatccctagctggtctgagaggatgaccagccacactggaactgagacacggtccagactcctacgggaggcagcagtggggaatattgcacaatgggcgcaagcctgatgcagccatgccgcgtgtgtgaagaaggccttcgggttgtaaagcactttcagcgaggaggaagggttaagtgttaatagcactgaacattgacgttactcgcagaagaagcaccggctaactccgtgccagcagccgcggtaatacggagggtgcaagcgttaatcggaattactgggcgtaaagcgcacgcaggcggtttgttaagtcagatgtgaaatccccgagcttaacttgggaactgcatttgaaactggcaagctagagtcttgtagaggggggtagaattccaggtgtagcggtgaaatgcgtagagatctggaggaataccggtggcgaaggcggccccctggacaaagactgacgctcaggtgcgaaagcgtggggagcaaacaggattagataccctggtagtccacgctgtaaacgatgtcgacttggaggttgtgcccttgaggcgtggcttccggagctaacgcgttaagtcgaccgcctggggagtacggccgcaaggttaaaactcaaatgaattgacgggggcccgcacaagcggtggagcatgtggtttaattcgatgcaacgcgaagaaccttacctactcttgacatccacagaacttggcagagatgccttggtgccttcgggaactgtgagacaggtgctgcatggctgtcgtcagctcgtgttgtgaaatgttgggttaagtcccgcaacgagcgcaacccttatcctttgttgccagcacgtaatggtgggaactcaagggagactgccggtgacaaaccggaggaaggtggggatgacgtcaagtcatcatggcccttacgagtagggctacacacgtgctacaatggcagatacaaagtgaagcgaactcgcgagagcaagcggaccacataaagtctgtcgtagtccggattggagtctgcaactcgactccatgaagtcggaatcgctagtaatcgtagatcagaatgctacggtgaatacgttcccgggccttgtacacaccgcccgtcacaccatgggagtgggttgcaaaagaagtaggtagcttaaccttcgggagggcgcttaccactttgtgattcatgactggggtg

SEQ ID NO: 3645 - DNA, 1465 bp, Yersinia similis
  source 1..1465: mol_type = unassigned DNA
attgaacgctggcggcaggcctaacacatgcaagtcgagcggcagcgggaagtagtttactactttgccggcgagcggcggacgggtgagtaatgtctggggatctgcctgatggagggggataactactggaaacggtagctaataccgcatgacctcgcaagagcaaagtgggggaccttagggcctcacgccatcggatgaacccagatgggattagctagtaggtggggtaatggctcacctaggcgacgatccctagctggtctgagaggatgaccagccacactggaactgagacacggtccagactcctacgggaggcagcagtggggaatattgcacaatgggcgcaagcctgatgcagccatgccgcgtgtgtgaagaaggccttcgggttgtaaagcactttcagcgaggaggaaggggttgagtttaatacgcttaatcattgacgttactcgcagaagaagcaccggctaactccgtgccagcagccgcggtaatacggagggtgcaagcgttaatcggaattactgggcgtaaagcgcacgcaggcggtttgttaagtcagatgtgaaatccccgcgcttaacgtgggaactgcatttgaaactggcaagctagagtcttgtagaggggggtagaattccaggtgtagcggtgaaatgcgtagagatctggaggaataccggtggcgaaggcggccccctggacaaagactgacgctcaggtgcgaaagcgtggggagcaaacaggattagataccctggtagtccacgctgtaaacgatgtcgacttggaggttgtgcccttgaggcgtggcttccggagctaacgcgttaagtcgaccgcctggggagtacggccgcaaggttaaaactcaaatgaattgacgggggcccgcacaagcggtggagcatgtggtttaattcgatgcaacgcgaagaaccttacctactcttgacatccacaggatttggcagagatgccttagtgccttcgggaactgtgagacaggtgctgcatggctgtcgtcagctcgtgttgtgaaatgttgggttaagtcccgcaacgagcgcaacccttatcctttgttgccagcacgtaatggtgggaactcaagggagactgccggtgacaaaccggaggaaggtggggatgacgtcaagtcatcatggcccttacgagtagggctacacacgtgctacaatggcagatacaaagtgaagcgaactcgcgagagccagcggaccacataaagtctgtcgtagtccggattggagtctgcaactcgactccatgaagtcggaatcgctagtaatcgtagatcagaatgctacggtgaatacgttcccgggccttgtacacaccgcccgtcacaccatgggagtgggttgcaaaagaagtaggtagcttaaccttcgggagggcgcttaccactttgtgattcatgactggggtg

SEQ ID NO: 3646 - DNA, 1465 bp, unidentified
  source 1..1465: mol_type = unassigned DNA; note = Yersinia wautersii
attgaacgctggcggcaggcctaacacatgcaagtcgagcggcagcgggaagtagtttactactttgccggcgagcggcggacgggtgagtaatgtctggggatctgcctgatggagggggataactactggaaacggtggctaataccgcatgacctcgcaagagcaaagtgggggaccttcgggcctcacgccatcggatgaacccagatgggattagctagtaggtggggtaatggctcacctaggcgacgatccctagctggtctgagaggatgaccagccacactggaactgagacacggtccagactcctacgggaggcagcagtggggaatattgcacaatgggcgcaagcctgatgcagccatgccgcgtgtgtgaagaaggccttcgggttgtaaagcactttcagcgaggaggaaggggttgagtttaatacgctcaatcattgacgttactcgcagaagaagcaccggctaactccgtgccagcagccgcggtaatacggagggtgcaagcgttaatcggaattactgggcgtaaagcgcacgcaggcggtttgttaagtcagatgtgaaatccccgcgcttaacgtgggaactgcatttgaaactggcaagctagagtcttgtagaggggggtagaattccaggtgtagcggtgaaatgcgtagagatctggaggaataccggtggcgaaggcggccccctggacaaagactgacgctcaggtgcgaaagcgtggggagcaaacaggattagataccctggtagtccacgctgtaaacgatgtcgacttggaggttgtgcccttgaggcgtggcttccggagctaacgcgttaagtcgaccgcctggggagtacggccgcaaggttaaaactcaaatgaattgacgggggcccgcacaagcggtggagcatgtggtttaattcgatgcaacgcgaagaaccttacctactcttgacatccacaggatttggcagagatgctraagtgccttcgggaactgtgagacaggtgctgcatggctgtcgtcagctcgtgttgtgaaatgttgggttaagtcccgcaacgagcgcaacccttatcctttgttgccagcacgtaatggtgggaactcaagggagactgccggtgacaaaccggaggaaggtggggatgacgtcaagtcatcatggcccttacgagtagggctacacacgtgctacaatggcagatacaaagtgaagcgaactcgcgagagccagcggaccacataaagtctgtcgtagtccggattggagtctgcaactcgactccatgaagtcggaatcgctagtaatcgtagatcagaatgctacggtgaatacgttcccgggccttgtacacaccgcccgtcacaccatgggagtgggttgcaaaagaagtaggtagcttaaccttcgggagggcgcttaccactttgtgattcatgactggggtg

SEQ ID NO: 3647 - DNA, 1462 bp, Yokenella regensburgei
  source 1..1462: mol_type = unassigned DNA
attgaacgctggcggcaggcctaacacatgcaagtcgaacggtagcacagagagcttgctctcgggtgacgagtggcggacgggtgagtaatgtctgggaaactgcctgatggagggggataactactggaaacggtagctaataccgcataacgtcgcaagaccaaagagggggaccttcgggcctcttgccatcagatgtgcccagatgggattagctagtaggtggggtaacggctcacctaggcgacgatccctagctggtctgagaggatgaccagccacactggaactgagacacggtccagactcctacgggaggcagcagtggggaatattgcacaatgggcgcaagcctgatgcagccatgccgcgtgtatgaagaaggccttcgggttgtaaagtactttcagcgaggaggaaggcgatacggttaataaccgtgtcgattgacgttactcgcagaagaagcaccggctaactccgtgccagcagccgcggtaatacggagggtgcaagcgttaatcggaattactgggcgtaaagcgcacgcaggcggtctgtcaagtcggatgtgaaatccccgggctcaacctgggaactgcattcgaaactggcaggcttgagtcttgtagaggggggtagaattccaggtgtagcggtgaaatgcgtagagatctggaggaataccggtggcgaaggcggccccctggacaaagactgacgctcaggtgcgaaagcgtggggagcaaacaggattagataccctggtagtccacgccgtaaacgatgtcgacttggaggttgtgcccttgaggcgtggcttccggagctaacgcgttaagtcgaccgcctggggagtacggccgcaaggttaaaactcaaatgaattgacgggggcccgcacaagcggtggagcatgtggtttaattcgatgcaacgcgaagaaccttacctactcttgacatccacggaacttagcagagatgctttggtgccttcgggaaccgtgagacaggtgctgcatggctgtcgtcagctcgtgttgtgaaatgttgggttaagtcccgcaacgagcgcaacccttatcctttgttgccagcggttcggccgggaactcaaaggagactgccagtgataaactggaggaaggtggggatgacgtcaagtcatcatggcccttacgagtagggctacacacgtgctacaatggcatatacaaagagaagcgacctcgcgagagcaagcggacctcataaagtatgtcgtagtccggattggagtctgcaactcgactccatgaagtcggaatcgctagtaatcgtggatcagaatgccacggtgaatacgttcccgggccttgtacacaccgcccgtcacaccatgggagtgggttgcaaaagaagtaggtagcttaaccttcgggagggcgcttaccactttgtgattcatgactggggtg

SEQ ID NO: 3648 - DNA, 1447 bp, unidentified
  source 1..1447: mol_type = unassigned DNA; note = Yoonia maritima
  misc_difference 736: note = n is a, c, g, or t
ggctcagaacgaacgctggcggcaggcctaacacatgcaagtcgagcgcactcttcggagtgagcggcggacgggttagtaacgcgtgggaatatacccttcactacggaatagcctcgggaaactgagagtaataccgtatacgcccttcgggggaaagatttatcggtgaaggattagcccgcgtaagattagatagttggtggggtaatggcctaccaagtctacgatctttagctggtttgagaggatgatcagcaacactgggactgagacacggcccagactcctacgggaggcagcagtggggaatcttagacaatgggcgcaagcctgatctagccatgccgcgtgagtgacgaaggccttagggtcgtaaagctctttcgccagagatgataatgacagtatctggtaaagaaaccccggctaactccgtgccagcagccgcggtaatacggagggggttagcgttgttcggaattactgggcgtaaagcgtacgtaggcggattggaaagttagaggtgaaatcccagggctcaaccctggaactgcctttaaaactatcagtctagagttcgagagaggtgagtggaattccaagtgtagaggtgaaattcgtagatatttggaggaacaccagtggcgaaggcggctcactggctcgatactgacgctgaggtacgaaagtgtggggagcaaacaggattagataccctggtagtccacaccgnaaacgatgaatgccagacgtcagggggcttgccctttggtgtcacacctaacggattaagcattccgcctggggagtacggtcgcaagattaaaactcaaaggaattgacgggggcccgcacaagcggtggagcatgtggtttaattcgaagcaacgcgcagaaccttaccaacccttgacatccttggaccgccagagagatctggttttctcgtaagagaccaagtgacaggtgctgcatggctgtcgtcagctcgtgtcgtgagatgttcggttaagtccggcaacgagcgcaacccacatccttagttgccagcagttcggctgggcactctagggaaactgcccgtgataagcgggaggaaggtgtggatgacgtcaagtcctcatggcccttacgggttgggctacacacgtgctacaatggcatctacagtgagttaatctccaaaagatgtctcagttcggattggggtctgcaactcgaccccatgaagtcggaatcgctagtaatcgcgtaacagcatgacgcggtgaatacgttcccgggccttgtacacaccgcccgtcacaccatgggagttggttctacccgacgacgctgcgctaacccttcggggaggcaggcggccacggtaggatcagcgactggggtgaagtcgtaacaaggtagcccgtaggggaacctgcggctggatcacccttcctta

SEQ ID NO: 3649 - DNA, 1384 bp, unidentified
  source 1..1384: mol_type = unassigned DNA; note = Yoonia sediminilitoris
aacgaacgctggcggcaggcctaacacatgcaagtcgagcgcactcttcggagtgagcggcggacgggttagtaacgcgtgggaacatacccttttctacggaatagcctcgggaaactgagagtaataccgtatacgcccttcgggggaaagatttatcggagaaggattggcccgcgttagattagatagttggtggggtaacggcctaccaagtctacgatctatagctggtttgagaggatgatcagcaacactgggactgagacacggcccagactcctacgggaggcagcagtggggaatcttagacaatgggcgcaagcctgatctagccatgccgcgtgagtgacgaaggccttagggtcgtaaagctctttcgccagagatgataatgacagtatctggtaaagaaaccccggctaactccgtgccagcagccgcggtaatacggagggggttagcgttgttcggaattactgggcgtaaagcgtacgtaggcggattggaaagtagggggtgaaatcccggggctcaaccccggaactgcctcctaaactatcagtctagagttcgagagaggtgagtggaattccaagtgtagaggtgaaattcgtagatatttggaggaacaccagtggcgaaggcggctcactggctcgatactgacgctgaggtacgaaagtgtggggagcaaacaggattagataccctggtagtccacaccgtaaacgatgaatgccagacgtcagggggcttgccctttggtgtcacacctaacggattaagcattccgcctggggagtacggtcgcaagattaaaactcaaaggaattgacgggggcccgcacaagcggtggagcatgtggtttaattcgaagcaacgcgcagaaccttaccaacccttgacatccttggaccgccagagagatctggttttctcgtaagagaccaagtgacaggtgctgcatggctgtcgtcagctcgtgtcgtgagatgttcggttaagtccggcaacgagcgcaacccacatctttagttgccagcagttcggctgggcactctagagaaactgcccgtgataagcgggaggaaggtgtggatgacgtcaagtcctcatggcccttacgggttgggctacacacgtgctacaatggcatctacagtgagttaatctccaaaagatgtctcagttcggattggggtctgcaactcgaccccatgaagtcggaatcgctagtaatcgcgtaacagcatgacgcggtgaatacgttcccgggccttgtacacaccgcccgtcacaccatgggagttggttctacccgacgacgctgcgctaaccttcggggggcaggcggccacggtaggatcagcgactggggtg

SEQ ID NO: 3650 - DNA, 1306 bp, unidentified
  source 1..1306: mol_type = unassigned DNA; note = Yoonia vestfoldensis
tgcaagtcgagcgagaccttcgggtctagcggcggacgggttagtaacgcgtgggaatatgcccttcactacggaatagcctcgggaaactgggagtaataccgtatacgccctttgggggaaagatttatcggtgaaggattagcccgcgtctgattagatagttggtggggtaatggcctaccaagtctacgatcagtagctggtttgagaggatgatcagcaacactgggactgagacacggcccagactcctacgggaggcagcagtggggaatcttagacaatgggcgcaagcctgatctagccatgccgcgtgagtgacgaaggccttagggtcgtaaagctctttcgccagagatgataatgacagtatctggtaaagaaaccccggctaactccgtgccagcagccgcggtaatacggagggggttagcgttgttcggaattactgggcgtaaagcgcacgtaggcggattggaaagtatggggtgaaatcccagggctcaaccctggaactgccttgtaaactcccagtctagagttcgagagaggtgagtggaattccaagtgtagaggtgaaattcgtagatatttggaggaacaccagtggcgaaggcggctcactggctcgatactgacgctgaggtgcgaaagtgtggggagcaaacaggattagataccctggtagtccacaccgtaaacgatgaatgccagacgtcggggggcttgcccttcggtgtcacacctaacggattaagcattccgcctggggagtacggtcgcaagattaaaactcaaaggaattgacgggggcccgcacaagcggtggagcatgtggtttaattcgaagcaacgcgcagaaccttaccaacccttgacatcctctgaccgcctgggagaccaggttttctcgtaagagacagagtgacaggtgctgcatggctgtcgtcagctcgtgtcgtgagatgttcggttaagtccggcaacgagcgcaacccacatctttagttgccatcattcagttgggcactctagagaaactgcccgtgataagcgggaggaaggtgtggatgacgtcaagtcctcatggcccttacgggttgggctacacacgtgctacaatggcatctacaatgggttaatctccaaaagatgtctcagttcggattggggtctgcaactcgaccccatgaagtcggaatcgctagtaatcgcgtaacagcatgacgcggtgaatacgttcccgggccttgtacacaccgcccgtcacaccatgggagttgggtttacccgaaggccgtgc

SEQ ID NO: 3651 - DNA, 1411 bp, Zavarzinella formosa
  source 1..1411: mol_type = unassigned DNA
aacgaacgttggcggcatggattaggcatgcaagtcgaacgaatgccagtagcaatactggcggaagtggcgaaaggggcagtaatgcatgggtacctacccggtggttgaggatagccgtcctaacggacgggtaatactcgatgacatcgcaagatcaaagctccggcgccgtcggaggggcccatgtcggattagctagttgggggggtaacggcccaccaaggcaaagatctgtagcgggtgtgagagcacgacccgcgccactggcactgagacactggccagacacctacgggtggctgcagtcgaggatcttcgtcaatgggcgaaagcctgaacgagcgatgccgcgtgtgcgatgaaggccttcgggttgtaaagcacaaaagagatgagaaagggcaactttgatcgaatctcagtaagctcgggctaagttcgtgccagcagccgcggtaagacgaaccgagcgaacgttgttcggaatcactgggcttaaagggcgcgtaggcgggcggctaagtctgtggtgaaatcctccagctcaactggagaactgccatggatactggtcgtctcgaggaaggtaggggtatgcggaactatcggtggagcggtgaaatgcgttgatatcgataggaactccggtggcgaaggcggcatactggaccttttctgacgctgaggcgcgaaagccaggggagcaaacgggattagataccccggtagtcctggccctaaacgatgggtactagctagtagggttcacatggctttactggcgaagcaaaagtgctaagtaccccgcctggggagtatggtcgcaaggctgaaactcaaaggaattgacgggggctcacacaagcggtggagcatgtggcttaattcgaggctacgcgaagaaccttatcctagacttgacatgtgcgatagcgttgagcggtacgtctccgaaaggaaggccgattcccagcaatgggaggactcaacacaggtgctgcatggctgtcgtcagctcgtgtcgtgagatgtcgggttaagtcccataacgagcgaaacccttacctccagttactacgggtcatgccgaggactctggagggactgccggtgtcaaaccggaggaaggcggggatgacgtcaagtcctcatggcctttacgtctagggctgcacacgtgctacaatggtgtgaacaaatggaagccaaggcgcgagccggagcaaatcccaaaaagcacaccccagttcagatcgaaggctgcaactcgccttcgtgaagttggaatcgctagtaatcgcgggtcagcaacaccgcggtgaatgtgttcctgagccttgtacacaccgcccgtcaagccacgaaagaggggagtgcccgaagtcgcctagcgccgaaggcaaaacct

SEQ ID NO: 3652 - DNA, 1453 bp, unidentified
  source 1..1453: mol_type = unassigned DNA; note = Zhizhongheella caldifontis
attgaacgctggcggcatgctttacacatgcaagtcgaacggcagcacgggggcaaccctggtggcgagtggcgaacgggtgagtaatgcatcggaacgtgcccagtagtgggggatagcccggcgaaagccggattaataccgcatacgacctgagggtgaaagcgggggaccgcaaggcctcgcgctattggagcggccgatgtcagattagctagttggtggggtaaaggcctaccaaggcgacgatctgtagctggtctgagaggacgaccagccacactgggactgagacacggcccagactcctacgggaggcagcagtggggaattttggacaatgggcgcaagcctgatccagccatgccgcgtgcgggaagaaggccttcgggttgtaaaccgcttttgtcagggaagaaaaactctgggctaatacctcggagtgatgacggtacctgaagaataagcaccggctaactacgtgccagcagccgcggtaatacgtagggtgcaagcgttaatcggaattactgggcgtaaagcgtgcgcaggcggttgtgcaagacagatgtgaaatccccgggcttaacctgggaactgcatttgtgactgcacggctggagtgcggcagagggggatggaattccgcgtgtagcagtgaaatgcgtagatatgcggaggaacaccgatggcgaaggcaatcccctgggcctgcactgacgctcatgcacgaaagcgtggggagcaaacaggattagataccctggtagtccacgccctaaacgatgtcaactggttgttggggattcatttcctcagtaacgaagctaacgcgtgaagttgaccgcctggggagtacggccgcaaggttgaaactcaaaggaattgacggggacccgcacaagcggtggatgatgtggtttaattcgatgcaacgcgaaaaaccttacctacccttgacatgccaggaacttgccagagatggcttggtgctcgaaagagagcctggacacaggtgctgcatggccgtcgtcagctcgtgtcgtgagatgttgggttaagtcccgcaacgagcgcaacccttgccattagttgctacgaaagggcactctaatgggactgccggtgacaaaccggaggaaggtggggctgacgtcaggtcctcatggcccttatgggtagggctacacacgtcatacaatggccggtacagagggctgccaacccgcgagggggagccaatcccagaaaaccggtcgtagtccggatcgcagtctgcaactcgactgcgtgaagtcggaatcgctagtaatcgcggatcagcatgtcgcggtgaatacgttcccgggtcttgtacacaccgcccgtcacaccatgggagcgggttctgccagaagtgggtagcctagccgcaaggagggcgcttaccacggcagggttcgtgactggggtg

SEQ ID NO: 3653 - DNA, 1403 bp, unidentified
  source 1..1403: mol_type = unassigned DNA; note = Zhongshania aliphaticivorans
gtaaaggatagcttgctatccaaagcagcggcggacgggtgagtaacgcgtgggaatctacctagtagagggggacaactcggggaaactcgagctaataccgcatacgccctacgggggaaaggaggggatcttcggaccttccgctattagatgagcccgcgttagattagctagttggtagggtaaaggcctaccaaggcgacgatctatagctgatctgagaggatgatcagccacactgggactgagacacggcccagactcctacgggaggcagcagtggggaatattgcgcaatggacgaaagtctgacgcagccatgccgcgtgtgtgaagaaggccttagggttgtaaagcactttcaatggggaggaaaggttgcaggctaataccttgtaactgtgacgttacccatacaagaagcaccggctaactccgtgccagcagccgcggtaatacggagggtgcaagcgttaatcggaattactgggcgtaaagcgcgcgtaggcggatttgtcagtcagatgtgaaagccctgggctcaacctaggaattgcatttgatactgcaggtctagagtatggtagaggtgagtggaattccaggtgtagcggtgaaatgcgtagatatctggaggaacatcagtggcgaaggcgactcactggatcaatactgacgctgaggtgcgaaagcgtggggagcaaacaggattagataccctggtagtccacgccgtaaacgatgtctactagccgttggggaacttgattccttagtggcgcagctaacgcactaagtagaccgcctggggagtacggccgcaaggttaaaactcaaatgaattgacgggggcccgcacaagcggtggagcatgtggtttaattcgatgcaacgcgaagaaccttaccaggtcttgacatcccgagaagtcgctagagatagcttcgtgccttcgggaactcggtgacaggtgctgcatggctgtcgtcagctcgtgtcgtgagatgttgggttaagtcccgtaacgagcgcaacccttgtcctttgttgccagcacgtaatggtgggaactcaaaggagactgccggtgacaaaccggaggaaggtggggacgacgtcaagtcatcatggcccttacgacctgggctacacacgcgctacaatgggcagtacagagggtcgcgaagccgcgaggtggagccaatcccttaaaactgttcgtagtccggattggagtctgcaactcgactccatgaagtcggaatcgctagtaatcgcgaatcagaatgtcgcggtgaatacgttcccgggccttgtacacaccgcccgtcacaccatgggagtggattgcaccagaagtggttagcctaaccgtaaggggggcgatcaccacggtgtgg

SEQ ID NO: 3654 - DNA, 1464 bp, Zobellella denitrificans
  source 1..1464: mol_type = unassigned DNA
attgaacgctggcggcaggcctaacacatgcaagtcgagcggtaacagagggtagcttgctactttgctgacgagcggcggacgggtgagtaaggcttgggtatctgcccagtcgagggggataaccgttggaaacgacggctaataccgcatacgccctacgggggaaagcaggggaccttcgggccttgcgcgattggatgagcccaagtgagattagctagttggtagggtaatggcctaccaaggcgacgatctctagctggtctgagaggatgaccagccacactgggactgagacacggcccagactcctacgggaggcagcagtggggaatattgcacaatgggggaaaccctgatgcagccatgccgcgtgtgtgaagaaggccttcgggttgtaaagcactttcagtggggaggaaaggcgtaccgcgaataccggtgcgctgtgacgttacccacagaagaagcaccggctaactccgtgccagcagccgcggtaatacggagggtgcaagcgttaatcggaatgactgggcgtaaagcgcacgcaggcggtctgctaagccagatgtgaaagccccgggctcaacctgggaactgcatttggaactggcaggctagagtcttggagaggggggtagaatttccggtgtagcggtgaaatgcgtagagatcggaaggaataccagtggcgaaggcggccccctggccaaagactgacgctcaggtgcgaaagcgtggggagcaaacaggattagataccctggtagtccacgctgtaaacgatgtcaacttggagtctgtgccatttgagcgcgggttccggagctaacgcgttaagttgaccgcctggggagtacggccgcaaggttaaaactcaaatgaattgacgggggcccgcacaagcggtggagcatgtggtttaattcgatgcaacgcgaagaaccttacctacccttgacatagtaagaacttggcagagatgccttggtgccttcgggaacttacatacaggtgctgcatggctgtcgtcagctcgtgtcgtgagatgttgggttaagtcccgcaacgagcgcaacccttgtcctttgttgccagcgattcggtcgggaactcaaaggagactgccggtgataaaccggaggaaggtggggacgacgtcaagtcatcatggcccttacgggtagggctacacacgtgctacaatggcgcgtacagagggcggcgaaccagcgatggtaagcgaatcccaaaaagcgcgtcgtagtccggatcggagtctgcaactcgactccgtgaagtcggaatcgctagtaatcgcaaatcagaatgttgcggtgaatacgttcccgggccttgtacacaccgcccgtcacaccatgggagtgggttgctccagaagtagatagcttaaccttcgggagggcgtttaccacggagtgattcatgactggggtg

SEQ ID NO: 3655 - DNA, 1464 bp, Zobellella taiwanensis
  source 1..1464: mol_type = unassigned DNA
attgaacgctggcggcaggcctaacacatgcaagtcgagcggcagcggagagtagcttgctactttgccggcgagcggcggacgggtgagtaatgcttggggatctgcccattcgagggggataaccgttggaaacgacggctaataccgcatacgccctacgggggaaagcaggggaccttttggccttgcgcgaatggatgaacccaagtgagattagctggttggtgaggtaacggctcaccaaggcgacgatctctaactggtctgagaggatgaccagtcacactgggactgagacacggcccagactcctacgggaggcagcagtggggaatattgcacaatgggggaaaccctgatgcagccatgccgcgtgtgtgaagaaggccttcgggttgtaaagcactttcagtggggaggaaaggtgtgtggcgaatacccgcgcactgtgacgttacccacagaagaagcaccggctaactccgtgccagcagccgcggtaatacggagggtgcaagcgttaatcggaatgactgggcgtaaagcgcacgcaggcggtctgttaagccagatgtgaaagccccgggctcaacctgggaactgcatttggaactggcaggctagagtcttggagaggggggtagaatttccggtgtagcggtgaaatgcgtagagatcggaaggaataccagtggcgaaggcggccccctggccaaagactgacgctcaggtgcgaaagcgtggggagcaaacaggattagataccctggtagtccacgctgtaaacgatgtcaacttggagtctgtgccatttgagcgcgggttccggagctaacgcgttaagttgaccgcctggggagtacggccgcaaggttaaaactcaaatgaattgacgggggcccgcacaagcggtggagcatgtggtttaattcgatgcaacgcgaagaaccttacctacccttgacatagcaagaagttttcagagatgaattcgtgccttcgggaacttgcatacaggtgctgcatggctgtcgtcagctcgtgtcgtgagatgttgggttaagtcccgcaacgagcgcaacccttgtcctttgttgccagcgattcggtcgggaactcaaaggagactgccggtgataaaccggaggaaggtggggacgacgtcaagtcatcatggcccttacgggtagggctacacacgtgctacaatggcgcgtacagagggcggcgaacctgcgaaggtaagcgaatcccaaaaagcgcgtcgtagtccggattggagtctgcaactcgactccatgaagtcggaatcgctagtaatcgtggatcagaatgccacggtgaatacgttcccgggccttgtacacaccgcccgtcacaccatgggagtgggttgctccagaagtagatagcttaaccttcgggagggcgtttaccacggagtgattcatgactggggtg

SEQ ID NO: 3656 - DNA, 1460 bp, Zoogloea ramigera
  source 1..1460: mol_type = unassigned DNA
  misc_difference 1195: note = n is a, c, g, or t
attgaacgctggcggcatgctttacacatgcaagtcgaacggtaacagggagcttgctccgctgacgagtggcgaacgggtgagtaatgcatcggaacgtgccgtgtaatgggggataacgtagcgaaagttacgctaataccgcatacgccctgagggggaaagtgggggaccgcaaggcctcacgttatacgagcggccgatgtcggattagctagttggtggggtaaaggcctaccaaggcgacgatccgtagcgggtctgagaggatgacccgccacactgggactcagacacgccccagactcctacgggaggcagcagtggggaattttggacaatgggggcaaccctgatccagccatgccgcgtgagtgaagaaggccttcgggttgtaaagctctttcaggtggaaagaaatcgcatcttttaatacagggtgtggatgacggtaccatcagaagaagcaccggctaactacgtgccagcagccgcggtaatacgtagggtgcgagcgttaatcggaattactgggcgtaaagcgtgcgcaggcggttatgtaagacagatgtgaaatccccgggctcaacctgggaactgcgtttgtgactgcataactagagtacggcagagggaggtggaattccgcgtgtagcagtgaaatgcgtagagatgcggaggaacaccgatggcgaaggcagcctcctgggccagtactgacgctcatgcacgaaagcgtggggagcaaacaggattagataccctggtagtccacgccctaaacgatgtcaactagttgttcggtgaggagactcattgagtaacgcagctaacgcgtgaagttgaccgcctggggagtacggccgcaaggttaaaactcaaaggaattgacggggacccgcacaagcggtggatgatgtggattaattcgatgcaacgcgaaaaaccttacctacccttgacatgccaggaacttgccagagatggcttggtgcccgaaagggaacctggacacaggtgctgcatggctgtcgtcagctcgtgtcgtgagatgttgggttaagtcccgcaacgagcgcaacccttgtcattagttgccagcattaagttgggcactctaatgagactgccggtgacaaaccggaggaaggtggggatgacgtcaagtcctcatggcccttatgggtagggcttnacacgtcatacaatggtcggtacagagggttgccaagccgcgaggtggagccaatcccagaaagccgatcgtagtccggattggagtctgcaactcgactccatgaagtcggaatcgctagtaatcgcagatcagcatgctgcggtgaatacgttcccgggtcttgtacacaccgcccgtcacaccatgggagtggggtttaccagaagtaggtagcttaaccttcgggagggcgcttaccacggtgagcttcatgactggggtg

SEQ ID NO: 3657 - DNA, 1462 bp, Zooshikella ganghwensis
  source 1..1462: mol_type = unassigned DNA
attgaacgctggcggcaggcctaacacatgcaagtcgggcggtaacaggagagcttgctcttgctgacgagcggcggacgggtgagtaatgcataggaatctgcccatgggtgggggatagcccggagaaatccggattaataccgcatatgccctgaggggtaaagcaggggatcttaggaccttgcgccgatggatgagcctatgtcggattagctagttggtagggtaaaggcctaccaaggcgacgatccgtagctggtctgagaggatgatcagccacactgggactgagacacggcccagactcctacgggaggcagcagtggggaatattggacaatgggggcaaccctgatccagccatgccgcgtgtgtgaagaaggctttcgggttgtaaagcactttcagcagggaggaaaggttgcgggttaatacctcgtagctgtgacgttacctgcagaagaagcaccggctaactccgtgccagcagccgcggtaatacggagggtgcaagcgttaatcggaattactgggcgtaaagcgtgcgtaggcggtttactaagctggatgtgaaatccccgggcttaacctgggaactgcattcataactggtaggctagagtatggcagaggcgagtggaatttcctgtgtagcggtgaaatgcgtagatataggaaggaacaccagtggcgaaggcgactcgctgggtcaatactgacgctgaggtacgaaagcgtgggtagcaaacaggattagataccctggtagtccacgccgtaaacgatgagaactagccgttgggatccatgtaggtcttggtggcgcagctaacgcactaagttctccgcctggggagtacggccgcaaggttaaaactcaaatgaattgacgggggcccgcacaagcggtggagcatgtggtttaattcgaagcaacgcgaagaaccttacctggccttgacatcctgcgaacactttagagatagagtggtgccttcgggagcgcagagacaggtgctgcatggctgtcgtcagctcgtgtcgtgagatgttgggttaagtcccgtaacgagcgcaacccttgtccttagttaccagcatgtaatggtggggactctaaggagactgccggtgacaaaccggaggaaggtggggacgacgtcaagtcatcatggcccttacggccagggctacacacgtgctacaatggggcgaacagagggttgccaagctgcgaagtggagctaatctcttaaaacgtctcgtagtccggattggagtctgcaactcgactccatgaagtcggaatcgctagtaatcgcgaatcagaatgtcgcggtgaatacgttcccgggccttgtacacaccgcccgtcacaccatgggagtgggttgcaccagaagtagctagtctaaccttcgggaggacggttaccacggtgtgattcatgactggggtg

SEQ ID NO: 3658 - DNA, 1458 bp, Zymobacter palmae
  source 1..1458: mol_type = unassigned DNA
aacgctggcggcaggcctaacacatgcaagtcgagcggcagcacgggaagcttgcttcctggtggcgagcggcggacgggtgagtaatgcatgggaatctgcccgatagtgggggataacgtgtggaaacgcacgctaataccgcatacgtcctacgggagaaaggaggggatcttcggacctttcgctatcggatgagcccatgttggattagctagttggtgaggtaatggctcaccaaggcaacgatccatagctggtctgagaggatgatcagccacactgggactgagacacggcccagactcctacgggaggcagcagtggggaatattggacaatgggcgaaagcctgatccagccatgccgcgtgtgtgaagaaggccttagggttgtaaagcactttcagtggggaagaaagcctgagacctaatacgtttcaggaaggacatcacccacagaagaagcaccggctaactccgtgccagcagccgcggtaatacggagggtgcgagcgttaatcggaattactgggcgtaaagggcgcgtaggcggtctgttaagccagatgtgaaagccccgggcttaacctgggaacagcatttggaactggcagacttgagtgcaggagaggaaggtagaattccaggtgtagcggtgaaatgcgtagagatctggaggaataccagtggcgaaggcggccttctggactgacactgacgctgaggcgcgaaagcgtgggtagcaaacaggattagataccctggtagtccacgccgtaaacgatgtcaactagccgttggatcccttgaggatttagtggcgcagctaacgcactaagttgaccgcctggggagtacggtcgcaagactaaaactcaaatgaattgacgggggcccgcacaagcggtggagcatgtggtttaattcgatgcaacgcgaagaaccttacctactcttgacatccagagaactttccagagatggatgggtgccttcgggaactctgagacaggtgctgcatggctgtcgtcagctcgtgttgtgaaatgttgggttaagtcccgtaacgagcgcaacccctatccttatttgccagcgattcggtcgggaactctaaggagactgccggtgacaaaccggaggaaggtggggacgacgtcaagtcatcatggcccttacgagtagggctacacacgtgctacaatggcgagtacagagggttgcgaagcggcgacgtgaagctaatcccagaaagctcgcctcagtccggatcggagtctgcaactcgactccgtgaagtcggaatcgctagtaatcgcgaatcagaatgtcgcggtgaatacgttcccgggccttgtacacaccgcccgtcacaccatgggagtggattgcaccagaagtggctagtttaaccttcgggaaaacggttaccacggtgtggttcatgactggggtg

SEQ ID NO: 3659 - DNA, 1411 bp, Zymomonas mobilis
  source 1..1411: mol_type = unassigned DNA
aacgaacgctggcggcatgcttaacacatgcaagtcgaacgaaggcttcggccttagtggcgcacgggtgcgtaacgcgtgggaatttgccttcaggtacggaataactaggggaaactcgagctaataccgtatgatatcgagagatcaaagatttatcgcctgaagataagcccgcgttggattagctagttggtagggtaaaggcctaccaaggcgacgatccatagctggtctgagaggatgatcagccacactgggactgagacacggcccagactcctacgggaggcagcagtggggaatattggacaatgggggaaaccctgatccagcaatgccgcgtgagtgaagaaggccttagggttgtaaagctcttttacccgggatgataatgacagtaccgggagaataagctccggctaactccgtgccagcagccgcggtaatacggagggagctagcgttgttcggaattactgggcgtaaagcgtacgtaggcggtttgataagtcaggggtgaaagcccagagctcaactctggaactgcctttgagactgtcagactagaacatagaagaggtaagtggaattccgagtgtagaggtgaaattcgtagatattcggaagaacaccagtggcgaaggcgacttactggtctatagttgacgctgaggtacgaaagcgtgggtagcaaacaggattagataccctggtagtccacgccgtaaacgatgataactagctgtccgggtacatggtatctgggtggcggagctaacgcattaagttatccgcctggggagtacggtcgcaagattaaaactcaaagaaattgacgggggcctgcacaagcggtggagcatgtggtttaattcgaagcaacgcgcagaaccttaccagcgtttgacatcctaatcgcgggagatggagacatttcccttcagtccggctggattagagacaggtgctgcatggctgtcgtcagctcgtgtcgtgagatgttgggttaagtcccgcaacgagcgcaaccctcacctctagttgccatcattaagttgggcactttagaggaactgccggtgataagccggaggaaggtggggatgacgtcaagtcctcatggcccttacgcgctgggctacacacgtgctacaatggcggtgacagagggccgcaagcctgcaaaggttagctaatctcaaaaagccgtctcagttcggattgttctctgcaactcgagagcatgaaggcggaatcgctagtaatcgcggatcagcatgccgcggtgaatacgttcccaggccttgtacacaccgcccgtcacaccatgggagttggattcacccgaaggcgctgcgctaacccgtaagggaggcaggcgaccacggtgggtttagcgactggggtg

SEQ ID NO: 3660 - protein, 212 aa, unidentified
  source 1..212: note = Abyssibacter profundi
  REGION 1..212: note = tr|A0A363UPK5|A0A363UPK5_9GAMM GTP cyclohydrolase 1; OS = Abyssibacter profundi OX=2182787 GN=folE PE=3 SV=1
MDTSVTTAKAAVDTSSDAVTRPTREEAEAAVRTLIAWTGDNPNREGLLDTPGRVVRAYEEFYAGYKEDPREILSRTFEEVDGYDDMVMLRDIRLESHCEHHMVPIIGRVHIAYLPVSRVVGISKLARVIEIYARRLQTQETMTAQIANVLEEVLKPAGVAVLVDAAHQCMTTRGIRKPGVFTITSRFTGRFKEDMRLHDRFMQMIRPTPNDM

SEQ ID NO: 3661 - protein, 294 aa, unidentified
  source 1..294: note = Abyssicoccus albus
  REGION 1..294: note = tr|A0A3N5BBR0|A0A3N5BBR0_9STAP GTP cyclohydrolase FolE2 OS=Abyssicoccus albus OX=1817405 GN=folE2 PE=3 SV=1
MTEEKYDLTTRVGRFKHFGSVDPIEGTKPTQKEDMKDLQQTKKDFLFAIDHVGINQVKYPVIIDHMQSVGNFSLSTSLTRDEKGINMSRLIESLELHYHNGIELSFESLSSLTESIRTKMKQNSAQVEVKSTWFYDKASPVTQLTGRAHAQIGYTINKDENNEDRKFYMQSDVTTLCPCSKEISEYSAHNQRGTVTVSLDLYDHKDIPKNHKEIVLEIMEANASSQLYPILKRTDEKKVTERAYENPRFVEDILRLIAYDLVELDWVKGFTLICENKESIHQHDAYSQLTYNKE

SEQ ID NO: 3662 - protein, 211 aa, unidentified
  source 1..211: note = Acaryochloris marina
  REGION 1..211: note = tr|B0CDI3|B0CDI3_ACAM1 GTP cyclohydrolase 1; OS = Acaryochloris marina (strain MBIC 11017) OX=329726; GN = folE PE=3 SV=1
MTVPSIPSFVPETLTTEAQPIVSEAEMEAAVRTLLLGMGEDPDREGLRDTPKRVVKSLKFLSSGYQQSLDELLNGAVFSEDLDEMVLVRDIDLFSSCEHHILPIIGKAHVAYIPNGKVIGLSKIARICEMYARRLQVQERLTAQIADALQGLLKPQGVAVVVEASHMCMVMRGVQKPGSWTSTSAMRGVFSSDARTRQEFFNLVAHAPAIR

SEQ ID NO: 3663 - protein, 210 aa, unidentified
  source 1..210: note = Acaryochloris marina
  REGION 1..210: note = tr|A8ZL68|A8ZL68_ACAM1 GTP cyclohydrolase 1; OS = Acaryochloris marina (strain MBIC 11017) OX=329726; GN = folE PE=3 SV=1
MTVPSIPTFVPALTTEAQPIVSEAEMQAAVRTLLLGLGEDPDREGLRDTPKRMVKALKFLTSGYQQSLDELLNGAIFPEDLDEMVLVRDIDLFSSCEHHIWPIIGKVHVAYIPNGKVIGLSKIARICEMYARRLQVQERLTAQIADALQGLLNPQGVAVVVEASHMCMVMRGVQKPGSWTSTSAMRGVFSSDSRTRQEFFNLISHSPASR

SEQ ID NO: 3664 - protein, 211 aa, unidentified
  source 1..211: note = Acaryochloris sp.
  REGION 1..211: note = tr|A0A2W1JBR2|A0A2W1JBR2_9CYAN GTP cyclohydrolase 1; OS = Acaryochloris sp. RCC1774 OX=1764569 GN=folE_1 PE=3 SV=1
MTLSSMPSFVPDTIATEAKPIVSEAQMQDAVRTLLLGMGEDPDREGLRDTPKRVVKSLKFLSSGYQMSLDELLNGAVFSENLDEMVLVRDIDLFSSCEHHILPILGKAHVAYIPNGKVIGLSKIARICEMYARRLQVQERLTAQIADALQGLLKPQGVAVVVEATHMCMVMRGVQKPGSWTSTSAMRGAFAGDARTRQEFFNLVAHSAAIR

SEQ ID NO: 3665 - protein, 231 aa, unidentified
  source 1..231: note = Acaryochloris sp.
  REGION 1..231: note = tr|A0A2W1JQW6|A0A2W1JQW6_9CYAN GTP cyclohydrolase 1; OS = Acaryochloris sp. RCC1774 OX=1764569 GN=folE_3 PE=3 SV=1
MTTASSEFSNSPTQSENGNSSSVTPRPDRSLSQKVKENGHTDVSDEEMRQAVDTILRGVGEDPEREGLLKTPKRVSKAMQFLTSGYNQSLEQLVNGAIFDEGHDEMVLVRDIDAFSLCEHHMLPFIGKAHVAYIPNQKVIGLSKLARVVEMYSRRLQVQERLTRQIAEAVQMVLEPQGVAVVMEASHMCMVMRGVQKPGSWTVTSSMLGVFKDDQKTREEFLNLIRHRQNF

SEQ ID NO: 3666 - protein, 266 aa, unidentified
  source 1..266: note = Accumulibacter phosphatis
  REGION 1..266: note = tr|C7RMC8|C7RMC8_ACCPU GTP cyclohydrolase FolE2; OS = Accumulibacter phosphatis (strain UW-1) OX=522306; GN = folE2 PE=3 SV=1
MNAPDRFFLADVQASADQRQLAIHKVGVKGLRYPLALLDAEGKVQHTVAQVAMSVGLPPEVKGTHMSRFVEILEQQRAPLNVNRLLRMFEDMLLRLDASSGEIELAFPYFISKAAPVSTVESLLDYDVRMIVAKRAGQAAELTLEVVAPVTSLCPCSKEISEYGAHNQRSHITIIARLRSGMTPDELVRLAEEEASCEVFGLLKRPDEKWVTERAYDNPKFVEDLVRDIALRLMSEPRIAQWTVKSENFESIHNHSAYAEISGDNA

SEQ ID NO: 3667 - protein, 272 aa, unidentified
  source 1..272: note = Accumulibacter phosphatis
  REGION 1..272: note = tr|C7RNG2|C7RNG2_ACCPU GTP cyclohydrolase FolE2; OS = Accumulibacter phosphatis (strain UW-1) OX=522306; GN = folE2 PE=3 SV=1
MNAPETPRSPAVMADVQGSADTRRLAINKVGIKAIRHPVKVLDKSGGVQHTIAMFNMYVSLPHNFKGTHMSRFVEILNSHEREISVENFPAMLREMVDRLEAETGHIEMSFPYFINKAAPVSGVQSLMDYDVTLIGEIAHGRIESTIKVAIPVTSLCPCSKEISERGAHNQRSQVTVTVLINDHLWIEELVQFVEGEASCELYGLLKRPDEKYVTERAYDNPKFVEDMVRDVAARLNAERRIDAYVVESENFESIHNHSAYALIENDKRLAA

SEQ ID NO: 3668 - protein, 185 aa, unidentified
  source 1..185: note = Acetatifactor muris
  REGION 1..185: note = tr|A0A2K4ZFV6|A0A2K4ZFV6_9FIRM GTP cyclohydrolase 1; OS = Acetatifactor muris OX=879566 GN=folE PE=3 SV=1
MIDQEKIRKAVALLLEGIGEDPGREGLAETPDRVARMYGEIFSGMDADAAEPLAKVFAVGDSEMVLEKDIVFYSMCEHHMMPFYGKAHIAYIPDGKVLGLSKLARTVEIYARRLQLQERMTGQIADAVMEHLSPRGVMVVLEAEHMCMTMRGVKKPGSRTVSMAVRGAFEGDSGLQERFFRMLQM

SEQ ID NO: 3669 - protein, 184 aa, Acetitomaculum ruminis
  REGION 1..184: note = tr|A0A1I0XSQ1|A0A1I0XSQ1_9FIRM GTP cyclohydrolase 1; OS = Acetitomaculum ruminis DSM 5522 OX=1120918 GN=folE PE=3; SV = 1
MVNEEKIKQGVKLILEGIGEDINREGLRETPDRIARMYGEIMGGMEMDPAKPLSKVFEAENNEMVVEKDITFYSMCEHHMLPFFGKAHIAYIPNGKVVGLSKLARTVDIYAKRLQLQEQMTAQIADALEKYLQPKGVMVMVEGEHLCMTMRGIKKPGSQTVSTVCRGEFVNNTDLKNQFFMMVK

SEQ ID NO: 3670 - protein, 185 aa, Acetivibrio ethanolgignens
  REGION 1..185: note = tr|A0A0V8QDK1|A0A0V8QDK1_9FIRM GTP cyclohydrolase 1; OS = Acetivibrio ethanolgignens OX=290052 GN=folE PE=3 SV=1
MIDEKKIEEAVRLFLEGIGENPEREGLKETPGRISAMCHELFEGIRQDASEHLSKTFTAENNEMVLEKDITFYSVCEHHFLPFYGKVHIAYVPDGKVVGLSKLARTVEVYARRAQLQEQMTAQIAEDIMKNLMPKGVMVYTEAEHMCMTMRGIKKPGSRTVSFVAKGAFETDRELRDSFFQLIRD

SEQ ID NO: 3671 - protein, 197 aa, Acetoanaerobium noterae
  REGION 1..197: note = tr|A0A1T4ZXB8|A0A1T4ZXB8_9FIRM GTP cyclohydrolase 1; OS = Acetoanaerobium noterae OX=745369 GN=folE PE=3 SV=1
MSNEIKAVEKMDKDKIKKAVRDILEAIGEDPDREGLVDTPKRIANMFEEIFAGLHQDPREHLQIFFQEENHEEMVIVKDISFYSVCEHHLVPFFGKAHVAYIPRGGKLTGLSKLARVVETAARRPQLQERIAKTIADSIVEVLDPYGVVVILEAEHMCMTMRGIKKPGSKTITSAVRGIFEKDVAARAEAMSLINIK

SEQ ID NO: 3672 - protein, 197 aa, unidentified
  source 1..197: note = Acetoanaerobium sticklandii
  REGION 1..197: note = tr|E3PSM7|E3PSM7_ACESD GTP cyclohydrolase 1; OS = Acetoanaerobium sticklandii (strain ATCC 12662 / DSM 519 / JCM 1433 / NCIMB 10654) OX=499177 GN=mtrA PE=3 SV=1
MSNEIKAVEKMDKDKIKRAVRDILEAIGEDPDREGLVDTPKRIANMFEEIFAGLHQDPREHLQIFFQEENHEEMVIVKDISFYSVCEHHLVPFFGKAHVAYIPKGGKLTGLSKLARVVETAARRPQLQERIAKTVADSIVEVLDPYGVVVILEAEHMCMTMRGIKKPGSKTITSAVRGIFEKDVAARAEAMSLINIK

SEQ ID NO: 3673 - protein, 182 aa, Acetobacter aceti
  REGION 1..182: note = tr|A0A0D6MVU3|A0A0D6MVU3_ACEAC GTP cyclohydrolase 1; OS = Acetobacter aceti NBRC 14818 OX=887700 GN=folE PE=3 SV=1
MLRWAGEDPAREGLLDTPSRVVRSYEEFFEGYAVNPEELLQRTFSEVDDYDEIVLLRDIRLESHCEHHMVPIIGRAHVAYLPRKRVVGISKLARVVEAYSRRFQIQERLTSQIANTIDSVLEPYGTAVIIEAGHQCMTTRGVHRPGVSMVTSRMLGVFRDNSDTRRELLSMLNRPGMNDFSA

SEQ ID NO: 3674 - protein, 203 aa, Acetobacter aceti
  REGION 1..203: note = tr|A0A1U9KGK1|A0A1U9KGK1_ACEAC GTP cyclohydrolase 1; OS = Acetobacter aceti OX=435 GN=folE PE=3 SV=1
MTNPPTPVRPSREEAEEAVRVMLRWAGEDPSREGLLDTPSRVARSYEEFFEGYAVNPEELLQRTFSEVDDYDEIVLLRDIRLESHCEHHMVPIIGRAHIAYLPRKRVVGISKLARVVEAYSRRFQIQERLTAQIANTIDSVLEPYGTAVIIEAGHQCMTTRGVHRPGVSMVTSRMLGVFRDNSDTRRELMAMLNRPGMSEFSA

SEQ ID NO: 3675 - protein, 201 aa, unidentified
  source 1..201: note = Acetobacter ascendens
  REGION 1..201: note = tr|A0A1D8QZR7|A0A1D8QZR7_9PROT GTP cyclohydrolase 1; OS = Acetobacter ascendens OX=481146 GN=folE PE=3 SV=1
MPPSDTSKRPTQAEAEQAVRTLLRWAGDNPDREGLHDTPARVARAYTDFFCGYEIDPAALLRRTFSEVEGYDEIVLLRDIRFESHCEHHLAPIIGRAHVAYLPRQRVVGISKLARVVDAYAKRLQIQERLTAQIANTINDELEPHGVAVIIESSHECMTTRGVHKPGVSMVTSTMLGVFRENSDTRRELMAMLNRPAACEF

SEQ ID NO: 3676 - protein, 203 aa, unidentified
  source 1..203: note = Acetobacter ascendens
  REGION 1..203: note = tr|A0A1Y0UZ11|A0A1Y0UZ11_9PROT GTP cyclohydrolase 1; OS = Acetobacter ascendens OX=481146 GN=gch1 PE=3 SV=1
MSVPPSDTSKRPTQAEAEQAVRTLLRWAGDNPDREGLHDTPARVARAYTDFFCGYEIDPAALLRRTFSEVEGYDEIVLLRDIRFESHCEHHLAPIIGRAHVAYLPRQRVVGISKLARVVDAYAKRLQIQERLTAQIANTINDELEPHGVAVIIESSHECMTTRGVHKPGVSMVTSTMLGVFRENSDTRRELMAMLNRPAACEF

SEQ ID NO: 3677 - protein, 202 aa, Acetobacter cerevisiae
  REGION 1..202: note = tr|A0A149QAZ3|A0A149QAZ3_9PROT GTP cyclohydrolase 1; OS = Acetobacter cerevisiae OX=178900 GN=folE PE=3 SV=1
MSDPLPKTDRPTREEAEDAIRTMLRWAGENPDREGLHDTPARVTRAYEEFFEGYAIDPKTLLERTFSEVEGYDEIVLLRDIRFESHCEHHLAPIIGRAHVAYLPRQRVVGISKLARVVDAYARRMQIQERLTAQIANTINDVLQPHGTAVIIESSHECMTTRGVHRPGVSMVTSQMLGVFRTNSDTRRELLAMLNRPGASEY

SEQ ID NO: 3678 - protein, 202 aa, Acetobacter cerevisiae
  REGION 1..202: note = tr|A0A149UWG0|A0A149UWG0_9PROT GTP cyclohydrolase 1; OS = Acetobacter cerevisiae OX=178900 GN=folE PE=3 SV=1
MSDPLPKTDRPTREEAEDAIRTMLRWAGENPDREGLHDTPARVARAYEEFFEGYEIDPKTLLERTFSEVEGYDEIVLLRDIRFESHCEHHLAPIIGRAHVAYLPRQRVVGISKLARVVDAYARRMQIQERLTAQIANTINDVLQPHGTAVIIESSHECMTTRGVHRPGVSMVTSQMLGVFRTNSDTRRELLAMLNRPGASEY

SEQ ID NO: 3679 - protein, 203 aa, Acetobacter cibinongensis
  REGION 1..203: note = tr|A0A0D6N7P6|A0A0D6N7P6_9PROT GTP cyclohydrolase 1; OS = Acetobacter cibinongensis 4H-1 OX=1231339 GN=folE PE=3; SV = 1
MNTLTETPRKIRPRPTRAQAEEAVRTLLAWAGDDPDREGLVGTPDRVVRAYEEFFEGYQDDPVALLERTFAETGNYNEMVVLRDIRLESHCEHHVIPLIGKAHVAYLPDRRVVGISKLARLVDVFAHRLQIQEKLTAQIADTIQSVLQPRGVAVVIDAAHQCMTTRGVHKPGVSMVTSRLLGEFETSEPLRRQFFAMAGIGGV

SEQ ID NO: 3680 - protein, 204 aa, Acetobacter cibinongensis
  REGION 1..204: note = tr|A0A0D6N3H3|A0A0D6N3H3_9PROT GTP cyclohydrolase 1; OS = Acetobacter cibinongensis 4H-1 OX=1231339 GN=folE PE=3; SV = 1
MSKDPLPDNTDRPSRQDAERAVRTLLRWAGDSPDREGLLDTPARVVRAYEEFFEGYNTDPHTLLERTFSEVEGYDEIVLLRDIRFESHCEHHLAPIIGRAHVAYLPNKRVVGISKLARVVDAYARRLQIQERLTAQIANTINDVLEPKGVAVLIESAHECMTTRGVHRPGVSMVTSTMLGVFRDNSDTRQELLALLNRPSACGV

SEQ ID NO: 3681 - protein, 202 aa, Acetobacter fabarum
  REGION 1..202: note = tr|A0A269XY37|A0A269XY37_9PROT GTP cyclohydrolase 1; OS = Acetobacter fabarum OX=483199 GN=folE PE=3 SV=1
MSVPEHNTDRPTQQEAEQAVRTLLRWAGDDPTREGLLDTPARVARAYTDFFSGYAIDPANLLRRTFSEVDGYDEIVLLRDIRFESHCEHHLAPIVGRAHVAYLPRQRVVGISKLARVVDAYARRLQIQERMTAQIANTINDVLEPQGVAVIIESAHECMTTRGVHKPGVSMVTSTMLGVFRDNSDTRRELMAILNRPAVNGY

SEQ ID NO: 3682 - protein, 202 aa, Acetobacter ghanensis
  REGION 1..202: note = tr|A0A0U5F8X6|A0A0U5F8X6_9PROT GTP cyclohydrolase 1; OS = Acetobacter ghanensis OX=431306 GN=folE PE=3 SV=1
MSVPEPNTDRPTQQEAEQAVRTLLRWAGDDPTREGLLDTPARVARAYTDFFSGYAIDPANLLRRTFSEVDGYDEIVLLRDIRFESHCEHHLAPIIGRAHVAYLPRQRVVGISKLARVVDAYARRLQIQERMTAQIANTINDELEPHGVAVIIESAHECMTTRGVHKPGVSMVTSTMLGVFRNNSDTRRELMAMLNRPAVSDY

SEQ ID NO: 3683 - protein, 204 aa, Acetobacter indonesiensis
  REGION 1..204: note = tr|A0A252AYU3|A0A252AYU3_9PROT GTP cyclohydrolase 1; OS = Acetobacter indonesiensis OX=104101 GN=folE PE=3 SV=1
MSSDSLPDNDHRPSREEAEKAVRTLLRWAGDNPDREGLHDTPSRVVRAYEEFFEGYETDPRTLLERTFSEVEGYDEIVLLRDIRFESHCEHHLAPIIGRAHVAYLPRNRVVGISKLARVVDAYARRLQIQERLTAQIANTINDVLEPQGVAVIIESSHECMTTRGVHRPGVSMVTSSMLGVFRTNSDTRRELMAMLNRPGASEY

SEQ ID NO: 3684 - protein, 204 aa, Acetobacter indonesiensis; identical to SEQ ID NO: 3683
  REGION 1..204: note = tr|A0A0D6N9F9|A0A0D6N9F9_9PROT GTP cyclohydrolase 1; OS = Acetobacter indonesiensis 5H-1 OX=1231340 GN=folE PE=3; SV = 1

SEQ ID NO: 3685 - protein, 141 aa, Acetobacter malorum
  REGION 1..141: note = tr|A0A149V0M7|A0A149V0M7_9PROT GTP cyclohydrolase 1 (Fragment) OS=Acetobacter malorum OX=178901 GN=AD953_15895; PE = 3 SV=1
LERTFSEVEGYDEIVLLRDIRFESHCEHHLAPIIGRAHVAYLPRQRVVGISKLARVVDAYARRMQIQERLTAQIANTINDVLQPHGTAVIIESSHECMTTRGVHRPGVSMVTSQMLGVFRTNSDTRRELLAMLNRPGASEY

SEQ ID NO: 3686 - protein, 210 aa, Acetobacter malorum
  REGION 1..210: note = tr|A0A177G6Z2|A0A177G6Z2_9PROT GTP cyclohydrolase 1; OS = Acetobacter malorum OX=178901 GN=folE PE=3 SV=1
MDTTVETRPPAHAPTRVLRPRPTRAQAEEAVRTLLAWTGDDPDREGLRGTPDRVVRAYEEFFEGYEEDPVALLERTFEETENYNELVVLRDIRLESHCEHHIIPLIGKAHVAYLPDRRVVGISKLARLVDVFAHRLQIQEKLTAQIADTIHSVLKPRGVAVVVDAAHQCMTTRGVHKPGVSMVTSRMIGEFESSETLRRQFFAMAGMGGA

SEQ ID NO: 3687 - protein, 207 aa, Acetobacter nitrogenifigens
  REGION 1..207: note = tr|A0A511XAY9|A0A511XAY9_9PROT GTP cyclohydrolase 1; OS = Acetobacter nitrogenifigens DSM 23921 = LMG 23498; OX = 1120919 GN=folE PE=3 SV=1
MADTSSPAPNTRRPTREEAEQAVRVLLSWAGEDPEREGLLDTPSRVARAYEEFFQGYAVNPEELLQRTFSEVEDYDEIVLLRDIRFESHCEHHMAPIIGRAHVAYLPRRRVVGISKLARLVDAYARRFQIQERLTAQIANTIDSVLQPHGTAVIIEAGHQCMTTRGVHRPGVSMVTSRMLGVFRENSDTRKELMAMLNRPTIGELSA

SEQ ID NO: 3688 - protein, 210 aa, Acetobacter oeni
  REGION 1..210: note = tr|A0A511XGN9|A0A511XGN9_9PROT GTP cyclohydrolase 1; OS = Acetobacter oeni OX=304077 GN=folE PE=3 SV=1
MSNSSGPMDSLAPVSRPSREEAEEAVRVLLRWGGEDPAREGLLDTPSRVTRAYEEFFEGYSVNPEELLARTFSEVEDYDEIVLLRDIRFESHCEHHMAPIIGRAHVAYLPRRRVVGISKLARVVDAYARRFQIQERLTAQIANTIDSILEPYGTAVILEAGHQCMTTRGVHRPGVSMVTSRMLGVFRENSDTRRELMAMLNRPTIGELSA

SEQ ID NO: 3689 - protein, 202 aa, unidentified
  source 1..202: note = Acetobacter okinawensis
  REGION 1..202: note = tr|A0A252BT59|A0A252BT59_9PROT GTP cyclohydrolase 1; OS = Acetobacter okinawensis OX=1076594 GN=folE PE=3 SV=1
MSVPEHNTDRPTQKEAEQAVRTLLRWAGDDPTREGLLDTPARVARAYTDFFSGYEIDPANLLRRTFSEVDGYDEIVLLRDIRFESHCEHHLAPIIGRAHVAYLPRQRVVGISKLARVVDAYARRLQIQERMTAQIANTINDELEPHGVAVILESAHECMTTRGVHKPGVSMVTSTMLGVFRDNSDTRRELMAMLSRPAVSDY

SEQ ID NO: 3690 - protein, 203 aa, Acetobacter orientalis
  REGION 1..203: note = tr|A0A252BZJ2|A0A252BZJ2_9PROT GTP cyclohydrolase 1; OS = Acetobacter orientalis OX=146474 GN=folE PE=3 SV=1
MNTLTETSRKVRARPTRAQAEEAVRTLLAWTGDDPDREGLVGTPDRVVRAYEEFFEGYQDDPVALLERTFEETGNYNEMVVLRDIRLESHCEHHIIPLIGKAHVAYLPDRRVVGISKLARLVDVFAHRLQIQEKLTAQIADTIQSVLQPRGVAVVIDAAHQCMTTRGVHKPGVSMVTSRLLGEFETSESLRRQFFAMAGIGGV

SEQ ID NO: 3691 - protein, 204 aa, Acetobacter orientalis
  REGION 1..204: note = tr|A0A252A5H3|A0A252A5H3_9PROT GTP cyclohydrolase 1; OS = Acetobacter orientalis OX=146474 GN=folE PE=3 SV=1
MSSDSQPENTPRPSRTEAEQAVRTLLRWAGDNPAREGLHDTPSRVVRAYEEFFEGYNTNPHTLLERTFSEVEGYDEIVLLRDIRFESHCEHHLAPIIGRAHVAYLPKKRVVGISKLARVVDAYARRLQIQERLTAQIANTINDVLEPQGVAVIIESAHECMTTRGVHRPGVSMVTSTMLGVFRENTNTRQELLAMLNRPSACGV

SEQ ID NO: 3692 - protein, 202 aa, Acetobacter orleanensis
  REGION 1..202: note = tr|A0A4Y3TN74|A0A4Y3TN74_9PROT GTP cyclohydrolase 1; OS = Acetobacter orleanensis OX=104099 GN=folE PE=3 SV=1
MSDPLPKTDRPTREEAEAAVRTMLRWAGEDPDREGLHDTPARVTRAYEEFFQGYEIDPKTLLERTFSEVEGYDEIVLLRDIRFESHCEHHLAPIIGRAHVAYLPRQRVVGISKLARVVDAYARRMQIQERLTAQIANTINDVLQPHGTAVIIESSHECMTTRGVHRPGVSMVTSQMLGTFRTNSDTRRELMAMLNRPAASEY

SEQ ID NO: 3693 - protein, 203 aa, Acetobacter pasteurianus
  REGION 1..203: note = tr|A0A1A0CGA7|A0A1A0CGA7_ACEPA GTP cyclohydrolase 1; OS = Acetobacter pasteurianus OX=438 GN=gch1 PE=3 SV=1
MSVPPSDTSQRPTQAEAEQAVRTLLRWAGDNPDREGLHDTPARVARAYTEFFCGYEIDPAALLRRTFSEVEGYDEIVLLRDIRFESHCEHHLAPIIGRAHVAYLPRQRVVGISKLARVVDAYAKRLQIQERLTAQIANTINDELEPHGVAVIIESSHECMTTRGVHKPGVSMVTSTMLGVFRENSDTRRELMAMLNRPAACEF

SEQ ID NO: 3694 - protein, 203 aa, Acetobacter pasteurianus
  REGION 1..203: note = tr|S6D444|S6D444_ACEPA GTP cyclohydrolase 1; OS = Acetobacter pasteurianus 386B OX=1266844 GN=folE PE=3; SV = 1
MSVPPSDTSKRPTQAEAEQAVRTLLRWAGDNPDREGLHDTPARVARAYTEFFCGYEIDPAALLRRTFSEVEGYDEIVLLRDIRFESHCEHHLAPIIGRAHVAYLPRQRVVGISKLARVVDAYAKRLQIQERLTAQIANTINDELEPHGVAVIIESSHECMTTRGVHKPGVSMVTSTMLGVFRENSDTRRELMAMLNRPAACEF

SEQ ID NO: 3695 - protein, 206 aa, unidentified
  source 1..206: note = Acetobacter peroxydans
  REGION 1..206: note = tr|A0A4Y3TST3|A0A4Y3TST3_9PROT GTP cyclohydrolase 1; OS = Acetobacter peroxydans OX=104098 GN=folE PE=3 SV=1
MSAPPPNTDSQTGRPTQTEAEQAVRTLLRWAGDDPTREGLLDTPARVARAYTDFFSGYEIDPASLLRRTFSEVEGYDEIVLLRDIRFESHCEHHLAPIIGRAHVAYLPRQRVVGISKLARVVDAYARRLQIQERMTAQIANTINDVLEPHGVAVIIESAHECMTTRGVHKPGVSMVTSSMLGVFRDNSDTRRELMAMLNRPGTQDF

SEQ ID NO: 3696 - protein, 203 aa, unidentified
  source 1..203: note = Acetobacter persici
  REGION 1..203: note = tr|A0A1U9LBQ2|A0A1U9LBQ2_9PROT GTP cyclohydrolase 1; OS = Acetobacter persici OX=1076596 GN=folE PE=3 SV=1
MDTLIETPRKMRARPTRAQAEEAVRTLLAWTGDDPDREGLVGTPDRVVRAYEEFFEGYQDDPVALLARTFEEAGNYNEMVVLRDIRLESHCEHHIIPLIGKAHVAYLPDRRVVGISKLARLVDVFAHRLQIQEKLTAQIADTIQSVLQPRGVAVVIDAAHQCMTTRGVHKPGVSMVTSRLLGEFETSEPLRRQFFAMAGIGGV

SEQ ID NO: 3697 - protein, 202 aa, unidentified
  source 1..202: note = Acetobacter persici
  REGION 1..202: note = tr|A0A1U9LGM1|A0A1U9LGM1_9PROT GTP cyclohydrolase 1; OS = Acetobacter persici OX=1076596 GN=folE PE=3 SV=1
MSDPLPKTNRPTREEAEDAIRTMLRWAGEDPEREGLHDTPARVARAYEEFFQGYEIDPKTLLERTFSEVEGYDEIVLLRDIRFESHCEHHLAPIIGRAHVAYLPRQRVVGISKLARVVDAYARRMQIQERLTAQIANTINDVLQPHGTAVIIESSHECMTTRGVHRPGVSMVTSQMLGVFRTSSDTRRELMAMLNRPAASEY

SEQ ID NO: 3698 - protein, 203 aa, Acetobacter pomorum
  REGION 1..203: note = tr|F1YU21|F1YU21_9PROT GTP cyclohydrolase 1; OS = Acetobacter pomorum DM001 OX=945681 GN=folE PE=3 SV=1
MSVPPSDTSKRPTQAEAEQAVRTLLRWAGDNPDREGLHDTPARVARAYTEFFCGYEIDPAALLRRTFSEVEGYDEIVLLRDIRFESHCEHHLAPIIGRAHVAYLPRQRVVGISKLARVVDAYAKRLQIQERLTAQIANTINDELEPHGVAVIIESAHECMTTRGVHKPGVSMVTSTMLGVFRENSDTRRELMAMLNRPAVCEY

SEQ ID NO: 3699 - protein, 203 aa, Acetobacter pomorum
  REGION 1..203: note = tr|A0A2G4RDN3|A0A2G4RDN3_9PROT GTP cyclohydrolase 1; OS = Acetobacter pomorum OX=65959 GN=folE PE=3 SV=1
MDTLIETPRKIRVRPTRAQAEEAVRTLLAWTGDDPDREGLVGTPGRVVRAYEEFFEGYQDDPVALLERTFEETGNYNEMVVLRDIRLESHCEHHIIPLIGKAHVAYLPDRRVVGISKLARLVDVFAHRLQIQEKLTAQVADTIQSVLQPRGVAVVIDAAHQCMTTRGVRKPGVSMVTSRLLGEFKTSEPLRRQFFAMVGIGGV

SEQ ID NO: 3700 - protein, 210 aa, Acetobacter senegalensis
  REGION 1..210: note = tr|A0A149U0A0|A0A149U0A0_9PROT GTP cyclohydrolase 1; OS = Acetobacter senegalensis OX=446692 GN=folE PE=3 SV=1
MDTTIETRPPAHAPTRVLRPRPTRAQAEEAVRTLLAWTGDDPDREGLRGTPDRVVRAYEEFFEGYEEDPVALLERTFEETENYNELVVLRDIRLESHCEHHIIPLIGKAHVAYLPDRRVVGISKLARLVDVFAHRLQIQEKLTAQIADTIHSVLKPRGVAVVVDAAHQCMTTRGVHKPGVSMVTSRMIGEFESSETLRRQFFAMAGMGGA

SEQ ID NO: 3701 - protein, 204 aa, Acetobacter senegalensis
  REGION 1..204: note = tr|A0A149U2R4|A0A149U2R4_9PROT GTP cyclohydrolase 1; OS = Acetobacter senegalensis OX=446692 GN=folE PE=3 SV=1
MSSDSLPENDNRPSRTEAEQAVRTLLRWAGDDPTREGLHDTPSRVVRAYEEFFEGYETDPRSLLERTFSEVEGYDEIVLLRDIRFESHCEHHLAPIIGRAHVAYLPRSRVVGISKLARVVDAFARRLQIQERLTAQIANTINDVLEPHGVAVIIESSHECMTTRGVHRPGVSMVTSSMLGVFRTNSDTRRELMAMLNRPSACEY

SEQ ID NO: 3702 - protein, 207 aa, Acetobacter sp.
  REGION 1..207: note = tr|A0A252BYW5|A0A252BYW5_9PROT GTP cyclohydrolase 1; OS = Acetobacter sp. DsW_063 OX=1514894 GN=folE PE=3 SV=1
MADTSSPAPNTRRPTREEAEQAVRVLLSWAGEDPEREGLLDTPSRVARAYEEFFQGYAVNPEDLLQRTFSEVEDYDEIVLLRDIRFESHCEHHMAPIIGRAHVAYLPRRRVVGISKLARLVDAYARRFQIQERLTAQIANTIDSVLQPHGTAVIIEAGHQCMTTRGVHRPGVSMVTSRMLGVFRENSDTRKELMAMLNRPTIGELSA

SEQ ID NO: 3703 - protein, 203 aa, Acetobacter sp.
  REGION 1..203: note = tr|A0A5C1YQW3|A0A5C1YQW3_9PROT GTP cyclohydrolase 1; OS = Acetobacter sp. KACC 21233 OX=2592655 GN=folE PE=3 SV=1
MDTLIETPRKMRARPTRAQAEEAVRTLLAWTGDDPDREGLVGTPDRVVRAYEEFFEGYQDDPVALLERTFAETGNYNEMVVLRDIRLESHCEHHIIPLIGKAHVAYLPDRRVVGISKLARLVDVFAHRLQIQEKLTAQIADTIQSVLQPRGVAVVIDAAHQCMTTRGVHKPGVSMVTSRLLGEFETSEPLRRQFFAMAGIGGV

SEQ ID NO: 3704 - protein, 202 aa, Acetobacter syzygii
  REGION 1..202: note = tr|A0A270BQ79|A0A270BQ79_9PROT GTP cyclohydrolase 1; OS = Acetobacter syzygii OX=146476 GN=folE PE=3 SV=1
MSVPEPNTDRPTQKEAEQAVRTLLRWAGDDPTREGLLDTPARVARAYTDFFSGYEIDPANLLRRTFSEVDGYDEIVLLRDIRFESHCEHHLAPIIGRAHVAYLPRQRVVGISKLARVVDAYARRLQIQERMTAQIANTINDELEPHGVAVIIESAHECMTTRGVHKPGVSMVTSTMLGVFRDNSDTRRELMAMLNRPAVSDY

SEQ ID NO: 3705 - protein, 209 aa, Acetobacter tropicalis
  REGION 1..209: note = tr|F7VHL2|F7VHL2_9PROT GTP cyclohydrolase 1; OS = Acetobacter tropicalis NBRC 101654 OX=749388 GN=folE; PE = 3 SV=1
MLELGMSSDSLPENDNRPSRTEAEQAVRTLLRWAGDDPTREGLHDTPSRVVRAYEEFFEGYETDPRSLLERTFSEVEGYDEIVLLRDIRFESHCEHHLAPIIGRAHVAYLPRSRVVGISKLARVVDAFARRLQIQERLTAQIANTINDVLEPHGVAVIIESSHECMTTRGVHRPGVSMVTSSMLGVFRTNSDTRRELMAMLNRPSACEY

SEQ ID NO: 3706 - protein, 204 aa, Acetobacter tropicalis; identical to SEQ ID NO: 3701
  REGION 1..204: note = tr|A0A149TSH4|A0A149TSH4_9PROT GTP cyclohydrolase 1; OS = Acetobacter tropicalis OX=104102 GN=folE PE=3 SV=1

SEQ ID NO: 3707 - protein, 202 aa, unidentified
  source 1..202: note = Acetobacteraceae bacterium
  REGION 1..202: note = tr|A0A4P7WDP8|A0A4P7WDP8_9PROT GTP cyclohydrolase 1; OS = Acetobacteraceae bacterium OX=1909293 GN=folE PE=3 SV=1
MTENLNNALTLPDNAQKQMEKAVKEMLLALGENPNREGLQETPKRVAKAWLEFFSGLYENPGDHLKTRFSSENCKTPVIVRDIPFISFCEHHLLPVTGKVHLAYLPNGREVTGLSKLARMVNGYARRPQLQERLTRQICEALMTDLEAKAALVLIEAEHACMSLRGIRAQNSQTLTFEVAGEWEENLTKRQEIFSLLKQQPF

SEQ ID NO: 3708 - protein, 212 aa, unidentified
  source 1..212: note = Acetobacteraceae bacterium
  REGION 1..212: note = tr|A0A327M7H8|A0A327M7H8_9PROT GTP cyclohydrolase 1; OS = Acetobacteraceae bacterium DB1506 OX=2230885 GN=folE; PE = 3 SV=1
MHVPRPAGIAPAETSPEGRPSRAEAEAAVRTLLRWAGDDPGREGLADTPARVARAYGEFFAGYDLDPVEVLARSFEETEGYDEMVVLRDIRVESHCEHHLVPIIGRAHIAYLPAGRVVGISKLARVLEIYAKRLQIQEKLTAQVANCIDEVLRPRGVAVVIEASHQCMATRGVHQPGTTMVTSRMLGAFREDAATRREFLALVTARRAEAVG

SEQ ID NO: 3709 - protein, 186 aa, Acetobacterium bakii
  REGION 1..186: note = tr|A0A0L6U3K7|A0A0L6U3K7_9FIRM GTP cyclohydrolase 1; OS = Acetobacterium bakii OX=52689 GN=folE PE=3 SV=1
MIDQKKIREAVVMILEAIGEDPTREGLIETPDRVARMYEEIYCGIGQTAETHLSKTFAVKSDDIVIERDIPFYSVCEHHLMPFYGKVHIAYIPNGRVAGLSKLVRTVDVYTKKLQIQEALTTEIGEAIMEYLHARGVMVMIEAEHLCINMRGVKRCGTKTITAMQAGIFKNNKELKDEVHKLMSIR

SEQ ID NO: 3710 - protein, 156 aa, Acetobacterium sp.
  REGION 1..156: note = tr|A0A351HY98|A0A351HY98_9FIRM GTP cyclohydrolase 1 (Fragment) OS=Acetobacterium sp. OX=1872094 GN=folE PE=3; SV = 1
PARVARMYAEIFSGLGHTAEVHLAKTFAVKSDDIVIERDIPFYSMCEHHLLPFYGKVHIAYIPNGRVAGLSKLVRTVDVYAKKPQLQEVLTTEIGEAVMEYLQARGVMVIVEAEHLCMNMRGVKRPGTRTVTAMQAGIFEHNKELKDEVHKLLSIK

SEQ ID NO: 3711 - protein, 186 aa, Acetobacterium sp.
  REGION 1..186: note = tr|A0A231NUK2|A0A231NUK2_9FIRM GTP cyclohydrolase 1; OS = Acetobacterium sp. MES1 OX=1899015 GN=folE PE=3 SV=1
MIDQKKIQEAVTMILEAIGEDPTREGLVETPARVARMYAEIFSGLGHTAEVHLAKTFAVKSDDIVIERDIPFYSMCEHHLLPFYGKVHIAYIPNGRVAGLSKLVRTVDVYAKKPQLQEVLTTEIGEAVMEYLQARGVMVIVEAEHLCMNMRGVKRPGTRTVTAMQAGIFEHNKELKDEVHKLLSIK

SEQ ID NO: 3712 - protein, 186 aa, Acetobacterium wieringae; identical to SEQ ID NO: 3711
  REGION 1..186: note = tr|A0A1F2PDP8|A0A1F2PDP8_9FIRM GTP cyclohydrolase 1; OS = Acetobacterium wieringae OX=52694 GN=folE PE=3 SV=1

SEQ ID NO: 3713 - protein, 186 aa, Acetobacterium woodii
  REGION 1..186: note = tr|H6LD40|H6LD40_ACEWD GTP cyclohydrolase 1; OS = Acetobacterium woodii (strain ATCC 29683 / DSM 1030 / JCM 2381 / KCTC 1655 / WB1) OX=931626 GN=folE PE=3 SV=1
MIDQEKIQKAVTMILEAIGEDPTREGLVETPARVGRMYAEIFSGLGHTAEVHLAKTFAVKSDDIVIERDIPFYSMCEHHLLPFYGKVHIAYIPNGRVAGLSKLVRTVDLYSKRPQLQEVLTTDIGEAIMEYLHARGVMVIIEAEHLCMNMRGVKRPGTRTVTAMQAGIFVHNKELKDEVHKLLSIK

SEQ ID NO: 3714 - protein, 208 aa, unidentified
  source 1..208: note = Acetobacteroides hydrogenigenes
  REGION 1..208: note = tr|A0A4R2EYK4|A0A4R2EYK4_9BACT GTP cyclohydrolase 1; OS = Acetobacteroides hydrogenigenes OX=979970 GN=folE PE=3; SV = 1
MNDFDNGTIRGYEKEEKYNSEVTLKLMEHYKAILSLLGEDVEREGLLKTPERVAKAMQFLTHGYHLDPKEILNSAKFKEDYQQMVLVKDIELYSMCEHHMIPFYGKAHVAYIPNGYITGLSKIARIVEAYARRLQVQERLTVQIRDCIQETLKPLGVAVVIEASHMCMQMRGVQKQNSVTTTSAFTGAFLSNNKTREEFIHLIGLKLH

SEQ ID NO: 3715 - protein, 186 aa, Acetohalobium arabaticum
  REGION 1..186: note = tr|D9QR91|D9QR91_ACEAZ GTP cyclohydrolase 1; OS = Acetohalobium arabaticum (strain ATCC 49924 / DSM 5501 / Z-7288) OX=574087 GN=folE PE=3 SV=1
MVDKEQIREAVGMILDAIGEDPDREGLLETPDRVARMYEEVFSGLHKDPADDLQIFFNQAHEELVLVKDISFYSMCEHHLLPFYGKAHVGYIPENGKVTGLSKLARVVDSFAKRPQLQERLTSQVADLIMKNVEARGVIVVVEAEHMCMTMRGIKKPGSLTTTSAVRGILQNDQAAREEALKLIKD

SEQ ID NO: 3716 - protein, 261 aa, Acetonema longum
  REGION 1..261: note = tr|F7NPS4|F7NPS4_9FIRM GTP cyclohydrolase FolE2; OS = Acetonema longum DSM 6540 OX=1009370 GN=folE2 PE=3 SV=1
MKDVQNTSDQRGIAIQKVGVNDVHLPLMIKTKYGSYQSVLAKIRLTVDLPQEYKGTHMSRFIEVLSEWRQKPISNKEMEQILIDILHRLQAQKAHIDIQFKYFIEKTAPVSGLPSMLDYDCIFSGDMVTGGRLNFVMGVSVPFTSLCPCSKEISCYGAHNQRGVMRVQVRHRPGSYLWIEDLVTLMEEQGSCPVYPLLKREDEKYVTEKAYENPKFVEDVLRDLVLVLRRTQGISWFKIECENFESIHNHSAYAYHMEQLD

SEQ ID NO: 3717 - protein, 180 aa, unidentified
  source 1..180: note = Acetothermus autotrophicum
  REGION 1..180: note = tr|H5SUA8|H5SUA8_ACEAU GTP cyclohydrolase 1; OS = Acetothermus autotrophicum OX=1446466 GN=folE PE=3 SV=1
MAELVRRVLVHIGEDPDREGLRETPRRFVEMLESLTAGYRQDPKELIAGAIFPVKHDQMIVVKDILFYSLCEHHILPFFGRAHVGYIPDGRVIGMSKIPQIVEHFSKKLQLQETLTDEIADFLMDALVPKGVGVVIEGFHLCMAMRELQKDAWLVTSAVKGIFRRDPRTRTEFMQLIGRR

SEQ ID NO: 3718 - protein, 271 aa, Achromatium sp.
  REGION 1..271: note = tr|A0A0M1JIL6|A0A0M1JIL6_9GAMM GTP cyclohydrolase FolE2 OS=Achromatium sp. WMS3 OX=1604836 GN=folE2 PE=3 SV=1
MSPTHSTLEGNPIADVQSTKDNRHIAIDKVGIKDIKHPIIVKDRSAGSQHTIANFNMYVNLPHNFKGTHMSRFVEILNRHEQAISVESFKDMLGEMAERLEAESGHIEMRFPYFVTKHAPISKVRSLMDYEVTLIGEIHRTVPIMHIKVNVPVTSLCPCSKEIANFGAHNQRSHVTVQVRTDEFVWIEELIDLVESQASCQLYGLLKRKDEKYVTEYAYNHPKFVEDMVRDVALCLNRDSRFNAYSVESENFESIHNHSAYAMISWDKFKS

SEQ ID NO: 3719 - protein, 271 aa, Achromatium sp.
  REGION 1..271: note = tr|A0A0M1JA62|A0A0M1JA62_9GAMM GTP cyclohydrolase FolE2 OS=Achromatium sp. WMS1 OX=1604834 GN=folE2 PE=3 SV=1
MTEETYITDVQNITDNRHIAIDKVGIKDVRYPIVVKDRSNGTQHTIASFNMYVNLPHNFKGTHMSRFVEILNSHEKAISVESFKEMLGKMVKRLEAESGHIEMRFPYFVAKQAPISKVRSLMDYEVTLIGEIHDTVPTMYIRVTVPVTSLCPCSKEIADYGAHNQRSHVTVQVRTDDFVWIEEIIDLIENEASCQLYGLLKRRDEKHVTEYAYNHPKFVEDMVRDVAIRLNQDLRFSAYSVESENFESIHNHSAYAMIEWDKFKTLTPETH

SEQ ID NO: 3720 - protein, 265 aa, unidentified
  source 1..265: note = Achromobacter agilis
  REGION 1..265: note = tr|A0A446CK37|A0A446CK37_9BURK GTP cyclohydrolase FolE2 OS=Achromobacter agilis OX=1353888 GN=folE2 PE=3 SV=1
MNSPIDPAIVMPDVQSSADTRHIPIQRVGIRGVRHPMLVESGDGSPQGTVANWTLTVALPPEEKGTHMSRFVALLEKYRSTPMTPALFRAMAADMLPLLHAERGDITASFPYFINKSAPISGVQSLLDYEVQWIARAQGEAVEFELIVQVPVTSLCPCSKAISEYGAHNQRSHVTVSAILNGDIGMDSVIRLIEEEGSCELWGLLKRPDEKYVTERAYDNPKFVEDLVRDVAARLNAHPGIARYRVEAENFESIHNHSAYAVVEG

SEQ ID NO: 3721 - protein, 181 aa, unidentified
  source 1..181: note = Achromobacter agilis
  REGION 1..181: note = tr|A0A446CTL7|A0A446CTL7_9BURK GTP cyclohydrolase 1; OS = Achromobacter agilis OX=1353888 GN=folE PE=3 SV=1
MSLEKHYTAILEQLGEDPSREGLADTPARAAKAMRHLCRGYAQNLEEIVNGALFTSDTREIVLVKNIELYSLCEHHMLPFIGKAHVAYLPNGKVLGLSKVARIVEMYARRLQIQENLSRQVAEAVQSVTGAAGVAVVIEAQHMCMMMRGVEKQNSSMVTSVMLGEFHDNPSTRSEFLSLIR

SEQ ID NO: 3722 - protein, 265 aa, unidentified
  source 1..265: note = Achromobacter aloeverae
  REGION 1..265: note = tr|A0A4Q1HDB7|A0A4Q1HDB7_9BURK GTP cyclohydrolase FolE2 OS=Achromobacter aloeverae OX=1750518 GN=folE2 PE=3; SV = 1
MNSPIDPAIVMPDVQSSADTRHIPIQRVGIRGVRHPMLVQAGDGSAMATVANWTLTVALPAEEKGTHMSRFVALLEKYRSTPMTPTLFRAMAREMLPLLHAETGDITAAFPYFINKSAPVSGVQSLMDYEVQWIARASGDDVEFELVVQVPVTSLCPCSKAISEYGAHNQRSHVTVTAILGDDVGMEDVIRAVEEEGSCELWGLLKRPDEKYVTERAYDNPKFVEDLVRDVAARMAARQGIKRYRVEAENFESIHNHSAYAVVEG

SEQ ID NO: 3723 - protein, 181 aa, unidentified
  source 1..181: note = Achromobacter aloeverae
  REGION 1..181: note = tr|A0A4Q1HPM8|A0A4Q1HPM8_9BURK GTP cyclohydrolase 1; OS = Achromobacter aloeverae OX=1750518 GN=folE PE=3 SV=1
MSLESNYHAILQSLGEDPDREGLRDTPKRAAKAMHYLCQGYRQSLEEIVNGALFSSDTSEIVLVKNIELYSLCEHHMLPFIGKAHVAYLPKGKVLGLSKVARIVDMYARRLQIQENLSRQIAEAVQQVTGASGVAVVIEAQHMCMMMRGVEKQNSSMVTSVMLGEFHDNPATRAEFLNLIR

SEQ ID NO: 3724 - protein, 265 aa, unidentified
  source 1..265: note = Achromobacter arsenitoxydans
  REGION 1..265: note = tr|H0F930|H0F930_9BURK GTP cyclohydrolase FolE2; OS = Achromobacter arsenitoxydans SY8 OX=477184 GN=folE2; PE = 3 SV=1
MNSPIDPAIVMPDVQSSADTRHIPIQRVGIRGVRHPMLIESGDGSPQGTVANWTLTVALPPEEKGTHMSRFVALLEKYRSTPMTPTLFRAMAADMLPLLHAERGDITAAFPYFINKSAPISGVQSLLDYEVQWIARAQADSVEFELVVQVPVTSLCPCSKAISEYGAHNQRSHVTVSAILSDDIGMDGVIRLIEEEGSCELWGLLKRPDEKYVTERAYDNPKFVEDLVRDVAARLNAHPGIARYRVEAENFESIHNHSAYAVVEG

SEQ ID NO: 3725 - protein, 181 aa, unidentified
  source 1..181: note = Achromobacter arsenitoxydans
  REGION 1..181: note = tr|H0F6H0|H0F6H0_9BURK GTP cyclohydrolase 1; OS = Achromobacter arsenitoxydans SY8 OX=477184 GN=folE PE=3; SV = 1
MSLEKHYTAILEALGEDPSREGLADTPARAAKAMRHLCRGYDQNLDEIVNGALFTSDTREIVLVKNIELYSLCEHHMLPFIGKAHVAYLPAGKVLGLSKVARIVEMYARRLQIQENLSRQVAEAVQSVTGAAGVAVVIEAQHMCMMMRGVEKQNSSMVTSVMLGEFHDNPSTRAEFLSLIR

SEQ ID NO: 3726 - protein, 265 aa, Achromobacter denitrificans
  REGION 1..265: note = tr|A0A3R9FIQ8|A0A3R9FIQ8_ACHDE GTP cyclohydrolase FolE2 OS=Achromobacter denitrificans OX=32002 GN=folE2; PE = 3 SV=1
MNSPIDPAIVMPDVQSSADTRHIPIQRVGIRGVRHPMLVESGDGSPQGTVANWTLTVALPPEEKGTHMSRFVALLEKYRSTPMTPALFRAMASDMLPLLHAERGDITASFPYFINKSAPISGVQSLLDYEVQWIARAQGEAVEFELIVQVPVTSLCPCSKAISEYGAHNQRSHVTVSAILNGDIGMDSVIRLIEEEGSCELWGLLKRPDEKYVTERAYDNPKFVEDLVRDVAARLNAHPGIARYRVEAENFESIHNHSAYAVVEG

SEQ ID NO: 3727 - protein, 181 aa, Achromobacter denitrificans
  REGION 1..181: note = tr|A0A427WQG1|A0A427WQG1_ACHDE GTP cyclohydrolase 1; OS = Achromobacter denitrificans OX=32002 GN=folE PE=3 SV=1
MSLEKHYTAILEQLGEDPSREGLADTPARAAKAMRHLCRGYGQNLDEIVNGALFTSDTREIVLVKNIELYSLCEHHMLPFIGKAHVAYLPNGKVLGLSKVARIVEMYARRLQIQENLSRQVAEAVQSVTDAAGVAVVIEAQHMCMMMRGVEKQNSSMVTSVMLGEFHDNPSTRAEFLSLIR

SEQ ID NO: 3728 - protein, 265 aa, Achromobacter insolitus
  REGION 1..265: note = tr|A0A163ASL6|A0A163ASL6_9BURK GTP cyclohydrolase FolE2 OS=Achromobacter insolitus OX=217204 GN=folE2 PE=3; SV = 1
MNSPIDPAIVMPDVQSSADTRHIPIQRVGIRGVRHPMLIESGDGSPQGTVANWTLTVALPPEEKGTHMSRFVALLEKYRSIPMTPTLFRAMAADMLPLLHAERGDITAAFPYFINKSAPISGVQSLLDYEVQWIARAHGDEVEFELIVQVPVTSLCPCSKAISEYGAHNQRSHVTVSAILNADIGMDGVIRLIEEEGSCELWGLLKRPDEKYVTERAYDNPKFVEDLVRDVAARLNAHPGIARYRVEAENFESIHNHSAYAVVEG

SEQ ID NO: 3729 - protein, 181 aa, Achromobacter insolitus
  REGION 1..181: note = tr|A0A162SA77|A0A162SA77_9BURK GTP cyclohydrolase 1; OS = Achromobacter insolitus OX=217204 GN=folE PE=3 SV=1
MSLEKHYTAILEQLGEDPSREGLADTPARAAKAMRHLCRGYGQNLDEIVNGALFTSDTREIVLVKNIELYSLCEHHMLPFIGKAHVAYLPNGKVLGLSKVARIVEMYARRLQIQENLSRQVAEAVQSVTGAAGVAVVIEAQHMCMMMRGVEKQNSSMVTSVMLGEFHDNPSTRAEFLSLIR

SEQ ID NO: 3730 - protein, 181 aa, unidentified
  source 1..181: note = Achromobacter insuavis
  REGION 1..181: note = tr|F7T8M0|F7T8M0_9BURK GTP cyclohydrolase 1; OS = Achromobacter insuavis AXX-A OX=1003200 GN=folE PE=3; SV = 1
MSLENHYTAILEALGEDPSREGLADTPARAAKAMRHLCRGYTQDLDEIVNGALFTSDTREIVLVKNIELYSLCEHHMLPFIGKAHVAYLPNGKVLGLSKVARIVEMYARRLQIQENLSRQVAEAVQSVTGAAGVAVVIEAQHMCMMMRGVEKQNSSMVTSVMLGEFHDNPSTRAEFLSLIR

SEQ ID NO: 3731 - protein, 265 aa, unidentified
  source 1..265: note = Achromobacter insuavis
  REGION 1..265: note = tr|F7T450|F7T450_9BURK GTP cyclohydrolase FolE2; OS = Achromobacter insuavis AXX-A OX=1003200 GN=folE2 PE=3; SV = 1
MNSPIDPAIVMPDVQSSADTRHIPIQRVGIRGVRHPMLIENADGSPQGTVANWTLTVALPPEEKGTHMSRFVALLEKYRSTPMTPTLFRAMAADMLPLLHAERGDITAAFPYFINKSAPISGVQSLLDYEVQWIARAQGDQVEFELVVQVPVTSLCPCSKAISEYGAHNQRSHVTVSAILESDISMDGVIRLIEDEGSCELWGLLKRPDEKYVTERAYDNPKFVEDLVRDVAARLNAHPGIARYRVEAENFESIHNHSAYAVVEG

SEQ ID NO: 3732 - protein, 265 aa, Achromobacter marplatensis
  REGION 1..265: note = tr|A0A366G9N3|A0A366G9N3_9BURK GTP cyclohydrolase FolE2 OS=Achromobacter marplatensis OX=470868 GN=folE2; PE = 3 SV=1
MNSPIDPAIVMPDVQSSADTRHIPIQRVGIRGVRHPMLIESGDGSAQGTVANWTLTVALPPEEKGTHMSRFVALLEKYRSTPMTPTLFRAMAADMLPLLHAERGDITAAFPYFINKSAPISGVQSLLDYEVQWIARAEGDGVEFELVVQVPVTSLCPCSKAISEYGAHNQRSHVTVSAILSDDISMDGVIRLIEEEGSCELWGLLKRPDEKYVTERAYDNPKFVEDLVRDVAARLNAHPGIARYRVEAENFESIHNHSAYAVVEG

SEQ ID NO: 3733 - protein, 181 aa, Achromobacter marplatensis
  REGION 1..181: note = tr|J4YSB2|J4YSB2_9BURK GTP cyclohydrolase 1; OS = Achromobacter marplatensis OX=470868 GN=folE PE=3 SV=1
MSLEKNYTAILEALGEDPSREGLADTPARAAKAMRHLCRGYSQNLDEIVNGALFTSDTREIVLVKNIELYSLCEHHMLPFIGKAHVAYLPAGRVLGLSKVARIVEMYARRLQIQENLSRQIAEAVQTVTGAAGVGVVIEAQHMCMMMRGVEKQNSSMVTSVMLGEFHDNPSTRAEFLSLIR

SEQ ID NO: 3734 - protein, 181 aa, Achromobacter piechaudii
  REGION 1..181: note = tr|A0A0L6I9R5|A0A0L6I9R5_9BURK GTP cyclohydrolase 1; OS = Achromobacter piechaudii OX=72556 GN=folE PE=3 SV=1
MSLEKNYTAILEALGEDPSREGLADTPARAAKAMRHLCRGYAQNLDEIVNGALFTSDTREIVLVKNIELYSLCEHHMLPFIGKAHVAYLPAGKVLGLSKVARIVEMYARRLQIQENLSRQVAEAVQKVTGAAGVAVVIEAQHMCMMMRGVEKQNSSMVTSVMLGEFHDNPSTRAEFLSLIR

SEQ ID NO: 3735 - protein, 265 aa, Achromobacter piechaudii
  REGION 1..265: note = tr|A0A0L6IEU6|A0A0L6IEU6_9BURK GTP cyclohydrolase FolE2 OS=Achromobacter piechaudii OX=72556 GN=folE2 PE=3; SV = 1
MNSPIDPAIVMPDVQSSADTRHIPIQRVGIRGVRHPMLIESGDGSPQGTVANWTLTVALPPEEKGTHMSRFVALLEKYRSTPMTPALFRAMAADMLPLLHAERGDITAAFPYFINKSAPISGVQSLLDYEVQWIARAQGDGVEFELVVQVPVTSLCPCSKAISEYGAHNQRSHVTVSAILNGDVSMDGVIRLIEEEGSCELWGLLKRPDEKYVTERAYDNPKFVEDLVRDVAARLTAHPGIARYRVEAENFESIHNHSAYAVVEG

SEQ ID NO: 3736 - protein, 186 aa, unidentified
  source 1..186: note = Achromobacter pulmonis
  REGION 1..186: note = tr|A0A2N8KR07|A0A2N8KR07_9BURK GTP cyclohydrolase 1; OS = Achromobacter pulmonis OX=1389932 GN=folE PE=3 SV=1
MQESPMSLEQRYTAILEQLGEDPSREGLADTPARAAKAMRHLCRGYGQNLEEIVNGALFTSDTREIVLVKNIELYSLCEHHMLPFIGKAHVAYLPNGKVLGLSKVARIVEMYARRLQIQENLSRQVAEAVQSVTGAAGVAVVIEAQHMCMMMRGVEKQNSSMVTSVMLGEFHDNPSTRAEFLSLIR

SEQ ID NO: 3737 - protein, 265 aa, unidentified
  source 1..265: note = Achromobacter pulmonis
  REGION 1..265: note = tr|A0A2N8KE34|A0A2N8KE34_9BURK GTP cyclohydrolase FolE2 OS=Achromobacter pulmonis OX=1389932 GN=folE2 PE=3; SV = 1
MNSPIDPAIVMPDVQSSADTRHIPIQRVGIRGVRHPMLIQGGDGAPQGTVANWTLTVALPAEEKGTHMSRFVALLEKYRSTPMTPALFRAMAADMLPLLHAERGDITAAFPYFINKSAPISGVQSLLDYEVQWIARAQGAEVEFELVVQVPVTSLCPCSKAISEYGAHNQRSHVTVSAILDGDLSMDSVIRLIEEEGSCELWGLLKRPDEKFVTERAYDNPKFVEDLVRDVAARLNAHPGIARYRVEAENFESIHNHSAYAVVEG

SEQ ID NO: 3738 - protein, 265 aa, Achromobacter ruhlandii
  REGION 1..265: note = tr|A0A1D8I660|A0A1D8I660_9BURK GTP cyclohydrolase FolE2 OS=Achromobacter ruhlandii OX=72557 GN=folE2 PE=3; SV = 1
MNSPIDPAIVMPDVQSSTDTRHIPIQRVGIRGVRHPMLIENADGSPQGTVANWTLTVALPPEEKGTHMSRFVALLEKYRSTPMTPTLFRAMAADMLPLLHAERGDITAAFPYFINKSAPISGVQSLLDYEVQWIARAQGDQVEFELVVQVPVTSLCPCSKAISEYGAHNQRSHVTVSAILESDISMDGVIRLIEDEGSCELWGLLKRPDEKYVTERAYDNPKFVEDLVRDVAARLNAHPGIARYRVEAENFESIHNHSAYAVVEG

SEQ ID NO: 3739 - protein, 195 aa, Achromobacter ruhlandii
  REGION 1..195: note = tr|A0A1D8IBZ7|A0A1D8IBZ7_9BURK GTP cyclohydrolase 1; OS = Achromobacter ruhlandii OX=72557 GN=folE2 PE=3 SV=1
MFIAIAGAQPPGVPMSLENHYTAILEALGEVPSREGLVDTPARAAKAMRHLCRGYNQNLEEIVNGALFTSDTREIVLVKNIELYSLCEHHMLPFIGKAHVAYLPNGKVLGLSKVARIVEMYARRLQIQENLSRQVAEAVQSVTGAAGVAVVIEAQHMCMMMRGVEKQNSSMVTSVMLGEFHDNPSTRAEFLSLIR

SEQ ID NO: 3740 - protein, 265 aa, Achromobacter sp.
  REGION 1..265: note = tr|A0A226Y4Q5|A0A226Y4Q5_9BURK GTP cyclohydrolase FolE2 OS=Achromobacter sp. KAs 3-5 OX=1915388 GN=folE2; PE = 3 SV=1
MNSPIDPAIVMPDVQSATDTRHIPIQRVGIRGVRHPMLVQSGDGSAQGTVANWTLTVALPPEEKGTHMSRFVALLEKYRSTPMTPALFRTMAADMLPLLHAERGDITASFPYFINKSAPISGVQSLLDYEVQWIARAQADRVEFELVVQVPVTSLCPCSKAISEYGAHNQRSHVTVSVILNEDISMDGVIRLIEDEGSCELWGLLKRPDEKFVTERAYDNPKFVEDLVRDVAARLNAHPGIARYRVEAENFESIHNHSAYAVVEG

SEQ ID NO: 3741 - protein, 265 aa, Achromobacter sp.; identical to SEQ ID NO: 3738
  REGION 1..265: note = tr|A0A0M9JD18|A0A0M9JD18_9BURK GTP cyclohydrolase FolE2 OS=Achromobacter sp. OX=134375 GN=folE2 PE=3 SV=1

SEQ ID NO: 3742 - protein, 265 aa, Achromobacter spanius
  REGION 1..265: note = tr|A0A2S5GUU2|A0A2S5GUU2_9BURK GTP cyclohydrolase FolE2 OS=Achromobacter spanius OX=217203 GN=folE2 PE=3 SV=1
MNSPIDPALVMPDVQSSADTRHIPIQRVGIRGVRHPMLVEGGDGAPQGTVANWTLTVALPPEEKGTHMSRFVALLEKYRSTPMTPARFRAMAADMLPLLHAESGDITAAFPYFINKSAPISGVQSLLDYEVQWIARAKGNAVEFELVVQVPVTSLCPCSKAISEYGAHNQRSHVTVSAILSDDISMDGVIRLIEEEGSCELWGLLKRPDEKYVTERAYDNPKFVEDLVRDVAARLTAHPGIARYRVEAENFESIHNHSAYAVVEG

SEQ ID NO: 3743 - protein, 265 aa, Achromobacter spanius
  REGION 1..265: note = tr|A0A0L0RCG7|A0A0L0RCG7_9BURK GTP cyclohydrolase FolE2 OS=Achromobacter spanius OX=217203 GN=folE2 PE=3 SV=1
MNSPIDPAIVMPDVQSSADTRHIPIQRVGIRGVRHPMLIESGDGSPQGTVANWTLTVALPPEEKGTHMSRFVALLEKYRSTPMTPALFRAMAADMLPLLHAERGDITAAFPYFINKSAPISGVQSLLDYEVQWIARAQGDSVEFELVVQVPVTSLCPCSKAISEYGAHNQRSHVTVSAILNGDISMDGVIRLIEEEGSCELWGLLKRPDEKYVTERAYDNPKFVEDLVRDVAARLTAHPGIARYRVEAENFESIHNHSAYAVVEG

SEQ ID NO: 3744 - protein, 265 aa, Achromobacter xylosoxidans
  REGION 1..265: note = tr|E3HWX8|E3HWX8_ACHXA GTP cyclohydrolase FolE2; OS = Achromobacter xylosoxidans (strain A8) OX=762376; GN = folE2 PE=3 SV=1
MNSPIDPAIVMPDVQSSADTRHIPIQRVGIRGVRHPMLIESGDGSPQGTVANWTLTVALPPEEKGTHMSRFVALLEKYRSTPMTPTLFRAMAADMLPLLHAERGDITAAFPYFINKSAPISGVQSLLDYEVQWIARAQGDEVEFELIVQVPVTSLCPCSKAISEYGAHNQRSHVTVSAILNADIGMDGVIRLIEEEGSCELWGLLKRPDEKYVTERAYDNPKFVEDLVRDVAARLNAHPGIARYRVEAENFESIHNHSAYAVVEG

SEQ ID NO: 3745 - protein, 181 aa, Achromobacter xylosoxidans
  REGION 1..181: note = tr|E3HUV0|E3HUV0_ACHXA GTP cyclohydrolase 1; OS = Achromobacter xylosoxidans (strain A8) OX=762376; GN = folE PE=3 SV=1
MSLEKHYTAILEQLGEDPSREGLADTPARAAKAMRHLCRGYDQNLDEIVNGALFTSDTREIVLVKNIELYSLCEHHMLPFIGKAHVAYLPNGKVLGLSKVARIVEMYARRLQIQENLSRQVAEAVQSVTDAAGVAVVIEAQHMCMMMRGVEKQNSSMVTSVMLGEFHDNPSTRAEFLSLIR

SEQ ID NO: 3746 - protein, 192 aa, Acidaminobacter hydrogenoformans
  REGION 1..192: note = tr|A0A1G5RWJ5|A0A1G5RWJ5_9FIRM GTP cyclohydrolase 1; OS = Acidaminobacter hydrogenoformans DSM 2784 OX=1120920; GN = folE PE=3 SV=1
MDNKRIEAAVREMLAAIGEDPDREGLKGTPDRIARMYEEIFGGLNEDPGKHLEVIFQEDEHEELVLVRDISFYSMCEHHLVPFFGKAHVAYIPRGGRLTGLSKLARVVETIAKRPQLQERITSLVADTIMEKLNPYGVIVVVEAEHMCMTMRGVKKPGSKTVTSAVRGIFKVDAKSRAEAMSLIGMGVGSRG

SEQ ID NO: 3747 - protein, 272 aa, unidentified
  source 1..272: note = Acidaminococcaceae bacterium
  REGION 1..272: note = tr|A0A359EU16|A0A359EU16_9FIRM GTP cyclohydrolase FolE2 OS=Acidaminococcaceae bacterium OX=2049052 GN=folE2; PE = 3 SV=1
MLNESLEQKKRILKDVQSEQDSRNIPLKHVGISDLRWPLVLRDRQKGEQHTVAVVSVAVDLPKDLRGTHMSRFVQCLQKLDVVNLSALEEVLDDLKESLLADRAFLKLEFPYFIQKEAPVSGLSSVMDLNCVYTVEKGERFMQKVEVQVPIQTLCPCSKEISSYGAHNQRATASLEVKAREFVWIEELADIADVGASAPVYGLLKRPDEKFVTEEAYDNPRFVEDAVREIALRLEEDSRIIWYRVTVKSYESIHNHNAFACVEKGWNECCTK

SEQ ID NO: 3748 - protein, 258 aa, unidentified
  source 1..258: note = Acidaminococcaceae bacterium
  REGION 1..258: note = tr|A0A3D2QCB7|A0A3D2QCB7_9FIRM GTP cyclohydrolase FolE2 OS=Acidaminococcaceae bacterium OX=2049052 GN=folE2; PE = 3 SV=1
MLKDVQSEQDTRNIPLKRVGIKDLRWPLTLRDRQNGKQHTVARVSLAVNLPRDLRGTHMSRFVQCLKKLDVVNLSALEEVLDDLKQSLEADSAYMRLTFPYFIEKKAPVSGLTSLMDLQCTFTMEKGEKFRQRVKVEVPVQTLCPCSKEISDYGAHNQRATASLEIEMAEFIWIEELAEMADAGASSPVYGLLKRPDEKFVTEHAYENPRFVEDAVREIALRLEKDRRVTWYRVTVESMESIHNHNAFATVEKGWMNE

SEQ ID NO: 3749 - protein, 255 aa, Acidaminococcus fermentans
  REGION 1..255: note = tr|A0A1I5HSS2|A0A1I5HSS2_ACIFE GTP cyclohydrolase FolE2 OS=Acidaminococcus fermentans OX=905 GN=folE2 PE=3; SV = 1
MLKDVQAQQDLRHIALKHVGIRNLRWPIVLADREKGTQHTVAEVALAVDLPQEQRGTHMSRFVECLKQVGPIRPHELEEVLDHLRQKLEARKALLEFSCPYFITKKAPVSGIESYLDVDCHFRAEKGETFSLEVGVDVPIHTLCPCSKEISKYGAHNQRAWAKIRIRSTQPVWIEELVEMAEKGASTPLYSLLKRPDEKCVTEMAYENPRFVEDAVREIALQLNGDPRIDWYTVTVESEESIHNHNAFATVEKEV

SEQ ID NO: 3750 - protein, 255 aa, Acidaminococcus fermentans
  REGION 1..255: note = tr|D2RKI5|D2RKI5_ACIFV GTP cyclohydrolase FolE2; OS = Acidaminococcus fermentans (strain ATCC 25085 / DSM 20731 / VR4) OX=591001 GN=folE2 PE=3 SV=1
MLKDVQAQQDLRHIALKHVGIRNLRWPIVLADREKGTQHTVAEVALAVDLPQEQRGTHMSRFVECLKQVGAIRPHELEEVLDHLRQKLEARKALLEFSCPYFITKKAPVSGIESYLDVDCHFRAEKGETFSLEVGVDVPIHTLCPCSKEISKYGAHNQRAWAKIRIRSTQPVWIEELVEMAEKGASTPLYSLLKRPDEKCVTEMAYENPRFVEDAVREIALQLNGDPRIDWYTVTVESEESIHNHNAFATVEKEV

SEQ ID NO: 3751 - protein, 255 aa, Acidaminococcus intestini
  REGION 1..255: note = tr|C0WER0|C0WER0_9FIRM GTP cyclohydrolase FolE2; OS = Acidaminococcus intestini OX=187327 GN=folE2 PE=3 SV=1
MLKDVQGQVDQRHIALKQVGIRDIRWPITLKDPHKGVQHSVAVISLGVNLPHEQRGTHMSRFVECLKEMGPIHPHDLEIVLDGLKEKLGAKKAMLDMRFPYFIEKKAPVSGKTGYLDISCHYHAEKGETFHLDVGVNVPIHTLCPCSKEISKYGAHNQRARAKITIRSTKPVWIEELVEMAEASASSPIFSLLKRPDEKFVTEEAYENPRFVEDAAREIALRLNQDERIDWYRVTVESEESIHNHNAFACVEKED

SEQ ID NO: 3752 - protein, 255 aa, Acidaminococcus intestini; identical to SEQ ID NO: 3751
  REGION 1..255: note = tr|G4Q2M2|G4Q2M2_ACIIR GTP cyclohydrolase FolE2; OS = Acidaminococcus intestini (strain RyC-MR95) OX=568816; GN = folE2 PE=3 SV=1

SEQ ID NO: 3753 - protein, 183 aa, Acidaminococcus sp.
  REGION 1..183: note = tr|R7K724|R7K724_9FIRM GTP cyclohydrolase 1; OS = Acidaminococcus sp. CAG:917 OX=1262688 GN=folE PE=3 SV=1
MDKEKIEKAVKMILEAVGEDPEREGLKETPERVARMYEEILSGYNDDAAKHLSKVFSSPSGELVLERDISFASTCEHHLMPFFGKVSVAYIPGGKVVGLSKLARVVEVYAKRLQLQERMTDQICEAIYETLGAKAVMVVCEAEHTCMTARGVKKTGTKVTSYATRGSISDDLKYRILAMVTAK

SEQ ID NO: 3754 - protein, 256 aa, Acidaminococcus sp.
  REGION 1..256: note = tr|A0A415EMA6|A0A415EMA6_9FIRM GTP cyclohydrolase FolE2 OS=Acidaminococcus sp. AM05-11 OX=2291997 GN=folE2; PE = 3 SV=1
MLKDVQAQQDVRHIPLKHVGIKDLKWPLVLKDPKRGEQHSVAVVQLSVDLPKEQRGTHMSRFVECLKELGGVRPSDLEKFLDNLKEKLGARSAMVKLDFPYFVTKKAPVSGIESYLDVECHFRAEKGEKFVLDLGVDVPVHTLCPCSKEISKYGAHNQRAWARMTVRSQKPIWIEELVEMAEKGASSPLFSLLKRPDEKFVTEEAYENPRFVEDAVRDIALQLNADSRIDWYSVTVESQESIHNHNAFATVEKGEE

SEQ ID NO: 3755 - protein, 188 aa, unidentified
  source 1..188: note = Acidibacillus ferrooxidans
  REGION 1..188: note = tr|A0A1V4EUF5|A0A1V4EUF5_9BACL GTP cyclohydrolase 1; OS = Acidibacillus ferrooxidans OX=1765683 GN=folE PE=3 SV=1
MAHVDQEKIQAAVRMILEAVGENPDREGLLETPARVGRLYAEVFAGLHQDPREQLQTIFNEDHNELVLVKDITFYSMCEHHLVPFFGKAHVAYIPQGAKITGLSKLARLVESAARRPQLQERLTATVADSLVDQLDPLGVAVMVEAEHMCMAMRGVNKPGTKTLTTAVRGAFLEDSHRRAEVFQMMRQ

SEQ ID NO: 3756 - protein, 188 aa, unidentified
  source 1..188: note = Acidibacillus ferrooxidans
  REGION 1..188: note = tr|A0A117SYF9|A0A117SYF9_9BACL GTP cyclohydrolase 1; OS = Acidibacillus ferrooxidans OX=1765683 GN=folE PE=3 SV=1
MAHVDQEKIQTAVRMILEAVGEDPDREGLLETPARVGRLYAEVFAGLHQDPRDQLQTIFNEDHNELVLVKDITFYSMCEHHLVPFFGKAHVAYIPQGAKITGLSKLARLVESAARRPQLQERLTATVADSLVDQLEPLGVVVMVEAEHMCMAMRGVNKPGTKTLTTAVRGIFLEDAKQRAEVFQMMKY

SEQ ID NO: 3757 - protein, 94 aa, unidentified
  source 1..94: note = Acidibacillus sulfuroxidans
  REGION 1..94: note = tr|A0A2U3CNS0|A0A2U3CNS0_9BACL GTP cyclohydrolase 1 (Fragment) OS=Acidibacillus sulfuroxidans OX=1765684; GN = BM613_14470 PE=3 SV=1
MNEFTKMTNRAEISHSIEKILKLIEGGDDLREGLVETPERVAKAYATWFGGYDVDIASLFKTFEDGGECCNEMVIVRDIPVYSHCEHHMAPIIG

SEQ ID NO: 3758 - protein, 189 aa, unidentified
  source 1..189: note = Acidibacillus sulfuroxidans
  REGION 1..189: note = tr|A0A2U3DCN6|A0A2U3DCN6_9BACL GTP cyclohydrolase 1; OS = Acidibacillus sulfuroxidans OX=1765684 GN=folE PE=3 SV=1
MSGFDQQKIETAVKMILEAIGEDPNREGLLETPARVARMYSEVFSGLHQDPREQLMTIFNEDHNEVVLVKDITFYSMCEHHLVPFFGHAHVAYIPQGARITGLSKLARLVETAARRPQLQERLTATIADALVDRLDPAGVAVMVEAEHLCMAMRGVNKPGTKTLTTAVRGILFTDPLKRKEVFDFMQQR

SEQ ID NO: 3759 - protein, 271 aa, Acidiferrobacter sp.
  REGION 1..271: note = tr|A0A2E8QPH3|A0A2E8QPH3_9GAMM GTP cyclohydrolase FolE2 OS=Acidiferrobacter sp. OX=1872107 GN=folE2 PE=3 SV=1
MLDTNDAHSSGAEIPDVQGSPDSRNITIDKVGVKDLRHPVRIQDRNGLDQHTVANFNMYVELPHNFKGTHMSRFVEILSRHEREISVDSFRSILQETRDHLDAGTSHIEMAFPFFLEKAAPVTGVKSLMDYQVTFIGEASDDLSSTEVRVVVPVTSLCPCSKKISDYGAHNQRSHVTVSVRSKSLIWIEEIIDIVEQEASCELYGLLKRPDEKFVTERAYENPKFVEDMVRDVASRLNDDERIERYVVEAENFESIHNHSAYAQITFNRDA

SEQ ID NO: 3760 - protein, 272 aa, Acidiferrobacter sp.
  REGION 1..272: note = tr|A0A2Z3QZ56|A0A2Z3QZ56_9GAMM GTP cyclohydrolase FolE2 OS=Acidiferrobacter sp. SPIII_3 OX=1281578 GN=folE2; PE = 3 SV=1
MIAAPPGARTDDCIADVQSSVDSRQIAIDKVGIKDIRHPVRVKDRSQGEQHTIALFNMYVELPHNFKGTHMSRFVEILNRYETEISVESFQDMLVEMARRLEADAGHIEMTFPYFVTKTAPVSGVRSLMDYEVSFRGEIRNGHGVTTIGVVVPVTSLCPCSKEISERGAHNQRSHVTLSVRTNQFVWVEDLIDLVEKKASCELYGLLKRPDEKFVTERAYDNPRFVEDMVREVASALNADPRVDAYTVESENFESIHNHSAYALIKKDKTAI

SEQ ID NO: 3761 - protein, 271 aa, Acidiferrobacter thiooxydans
  REGION 1..271: note = tr|A0A1C2FXD8|A0A1C2FXD8_9GAMM GTP cyclohydrolase FolE2 OS=Acidiferrobacter thiooxydans OX=163359 GN=folE2; PE = 3 SV=1
MIAAPSGARADCIADVQSSVDSRQIAIDKVGIKDIRHPVRVKDRSQGEQHTIALFNMYVELPHNFKGTHMSRFVEILNRYETEISVESFQDMLVEMARRLEADAGHIEMTFPYFVTKTAPVSGVRSLMDYEVSFRGAIRDGHSVTTISVVVPVTSLCPCSKEISERGAHNQRSHVTLAVRTNQFVWVEDLIDLVEKKASCELYGLLKRPDEKFVTERAYDNPRFVEDMVREVASALNADPRVDAYTVESENFESIHNHSAYALIKKDKTAT

SEQ ID NO: 3762 - protein, 271 aa, unidentified
  source 1..271: note = Acidiferrobacteraceae bacterium
  REGION 1..271: note = tr|A0A2E8CI39|A0A2E8CI39_9GAMM GTP cyclohydrolase FolE2 OS=Acidiferrobacteraceae bacterium OX=2024893; GN = folE2 PE=3 SV=1
MAKAQTASTQSEQIADVQGTSDSRNITIDKVGVKDVRHPVRIQDRSGGDQHTVATFNMFVELPHNFKGTHMSRFVEILNNHEREISVRSFRAMLQETRDHLDAGTGHIEMTFPFFLEKTAPVTEVKSLMDYQVTLVGEIVGNTVSTEVRVLVPVTSLCPCSKQISDYGAHNQRSHVTVSVKASAFIWIEEIIDIVEKQASCELYGLLKRPDEKHVTERAYDNPKFVEDLVRDVAGQLNQDERIEGYVVEAENFESIHNHSAYAQITYNRSH

SEQ ID NO: 3763 - protein, 272 aa, unidentified
  source 1..272: note = Acidiferrobacteraceae bacterium
  REGION 1..272: note = tr|A0A2E7TBZ6|A0A2E7TBZ6_9GAMM GTP cyclohydrolase FolE2 OS=Acidiferrobacteraceae bacterium OX=2024893; GN = folE2 PE=3 SV=1
MNHPEPPKITPRQIADVQSAPDTRNLTIDKVGVKDLRHPIRVKDRSGYEQHTVAIFNMYVELPHNFKGTHMSRFVEILSQHERETSVQSFRAMLKEVTTHLDAEKCRIEMTFPFFLQKKAPVSGVESLMDYEVTLAGELVDNHVLSEIQVTTPVTSLCPCSKEISDYGAHNQRSHVKTNIHTSAFIWIEEIIEVVEKQASCELYGILKRPDEKHVTERAYDNPKFVEDLVRDIAMQFNGDERIQAYTVSAENFESIHNHSAYAEISRNKLES

SEQ ID NO: 3764 - protein, 271 aa, unidentified
  source 1..271: note = Acidihalobacter ferrooxidans
  REGION 1..271: note = tr|A0A1P8UJE0|A0A1P8UJE0_9GAMM GTP cyclohydrolase FolE2 OS=Acidihalobacter ferrooxidans OX=1765967 GN=folE2; PE = 3 SV=1
MNQNRSAADFAADIPDVQSSPDERHVAINRVGIKSLRHPLRILSRDGSVQATVASADMYVNLPADRKGTHMSRFVALLNEIAHPLDIPAFETLLIDMNQRLGAEEGHIELRFPFFVRKTAPVSGVESLMDYDASLIGELRNGEVRISLHVVVPVTSLCPCSRDISEYGAHNQRSHITLRARINQPMWFEDLIDTAEEAGSCELFGLLKRPDEKFVTERAYENPKFVEDAVRDLAVRLNTESRIDAYVIECENFESIHNHSAYACIERDKTR

SEQ ID NO: 3765 - protein, 185 aa, unidentified
  source 1..185: note = Acidihalobacter ferrooxidans
  REGION 1..185: note = tr|A0A1P8UHG5|A0A1P8UHG5_9GAMM GTP cyclohydrolase 1; OS = Acidihalobacter ferrooxidans OX=1765967 GN=folE PE=3; SV = 1
MELEQLETHYREIIRSTGEPLERDGLLDTPQRAAKAFQFLTRGYQQTLDEVVNGALFESDMDEMVLVRDIELYSMCEHHMLPFIGKAHVAYLPNGKVLGLSKIARIVDMYARRLQIQEGLTRQIADAVQTVTDAHGVGVVVQARHLCMMMRGVEKQNSSMTTSVMLGHFRSNTDTRAEFLRLIRP

SEQ ID NO: 3766 - protein, 271 aa, unidentified
  source 1..271: note = Acidihalobacter prosperus
  REGION 1..271: note = tr|A0A1A6C5S9|A0A1A6C5S9_9GAMM GTP cyclohydrolase FolE2 OS=Acidihalobacter prosperus OX=160660 GN=folE2 PE=3; SV = 1
MSQPPARDARPMPDVQGAPDDRRLRIDQVGIRGLRHPVLIDHGASEPPQATVASVDMLVDLPAERKGTHMSRFVALLNEYTGALDTAAFEALLHEMSRRLDADSGRIEMRFPYFVRKSAPISGVASLMDYDVSLIGELEAGKTTVTLRVVVPVTSLCPCSRDISEYGAHNQRSHITLTARLAGSLSIRTLITIAEEEASCELFGLLKRPDEKFVTERAYDNPKFVEDAVRDVAARLDAEPAIAAYTAECENFESIHNHSAYARISRDKTTR

SEQ ID NO: 3767 - protein, 272 aa, unidentified
  source 1..272: note = Acidihalobacter prosperus
  REGION 1..272: note = tr|A0A1D8K9B1|A0A1D8K9B1_9GAMM GTP cyclohydrolase FolE2 OS=Acidihalobacter prosperus OX=160660 GN=folE2 PE=3; SV = 1
MNHMSPPKARDNREMPDVQSAADDRRIRIDQVGIKGLRHPVRIALDDGEAPQATVATVDMLVDLPADRKGTHMSRFVALLNESEDALDIASFERLLKAMSERLDARSGRIELSFPYFVRKSAPVSGVPSLLDYDVAIIGDIDHERVALTLRIVVPVTSLCPCSRDISAYGAHNQRSHITLTVRLAGPVSVRRLIQIAEEEASCELFGLLKRPDEKFVTERAYDNPKFVEDAVRDVAARLDAEPGIAAYIAECENFESIHNHSAYARIERDKS

SEQ ID NO: 3768 - protein, 128 aa, unidentified
  source 1..128: note = Acidimicrobiaceae bacterium
  REGION 1..128: note = tr|A0A3C1CJY5|A0A3C1CJY5_9ACTN GTP cyclohydrolase 1 (Fragment) OS=Acidimicrobiaceae bacterium OX=2024894; GN = DCQ30_10825 PE=3 SV=1
GYDELVVATAIPFTSLCEHHLLPFSGVAHVGYLPADLLVGLSKLARVVTHFSRRLQVQERLTTDVADWLCERLNPKGVGVVLDAEHSCMTLRGARATGARTVTSALRGTVREDERTRAEFLSLAGVRR

SEQ ID NO: 3769 - protein, 271 aa, unidentified
  source 1..271: note = Acidimicrobiaceae bacterium
  REGION 1..271: note = tr|A0A354B5V6|A0A354B5V6_9ACTN GTP cyclohydrolase FolE2 OS=Acidimicrobiaceae bacterium OX=2024894 GN=folE2; PE = 3 SV=1
MTITSLPDTASMTIEDVQGRADTRRIPINRVGIKDIRHPVRVSDRSGGQQHTIATASMYVNLPEDVKGTHMSRFVQLLNEHDRPIDATNFGAMVTAMVDRLDAEDGYIEMNFPYFVTKFAPVSGVPSTLDYEVTFVGKKVAGRIDTWVKVLVGATSLCPCSKAISEYGAHNQRSHITMNVKVDGGMWLEDLIEIAEQEASCELWGVLKREDEKYVTERAYENPKFVEDLVRDVAARLTADPRVRAYSVESENFESIHNHSAYARIDVDKDA

SEQ ID NO: 3770 - protein, 197 aa, unidentified
  source 1..197: note = Acidimicrobiales bacterium
  REGION 1..197: note = tr|A0A2W6CUQ6|A0A2W6CUQ6_9ACTN GTP cyclohydrolase 1; OS = Acidimicrobiales bacterium OX=2201156 GN=folE PE=3 SV=1
MDISRVAHSSLDLPRAAAAVRELLAALGEDPDRDGLRDTPARAAASYAQLLAGVTVDPKAQLSSFPEPHADSVVVLKDIAFASLCEHSLLPFTGVIGVGYAPGGSRQIASWGGVIRMINGYAHRPQVQERLTSQIADAVIARLDPAGVLVVVSATHQCVSAVGERQANSRAITTAARGCYAEDSGARAGLLSLLRSS

SEQ ID NO: 3771 - protein, 213 aa, unidentified
  source 1..213: note = Acidimicrobiales bacterium
  REGION 1..213: note = tr|A0A2W6D009|A0A2W6D009_9ACTN GTP cyclohydrolase 1; OS = Acidimicrobiales bacterium OX=2201156 GN=folE PE=3 SV=1
MCTSIAGPTRRARQCPSKALGVDRLRVQAAVHELLAAMGEDPHREGLLETPRRVAAMYAEVLAGLEDDPARHLTVTFAAEHDEMVMVKDMAFASLCEHHMVPFIGRAHVAYIPNQDGRITGLSKLARVVDGFAQRLQVQERLTTQVADTLEKVLEPRGVLVVVEAEHLCMSMRGVRKPGAITVTSAVRGLFRADLATRAEAMQFIHGGQGAGR

SEQ ID NO: 3772 - protein, 205 aa, unidentified
  source 1..205: note = Acidimicrobiia bacterium
  REGION 1..205: note = tr|A0A3S0BUU0|A0A3S0BUU0_9ACTN GTP cyclohydrolase 1; OS = Acidimicrobiia bacterium OX=2080302 GN=folE PE=3 SV=1
MNALDPEPETPLASAIDRDRIARAVREILEAIGEDPDREGLRDTPSRVARMYAETCSGLHEDATQHLKVTFDADHDEMVMVRDIPLYSMCEHHLVPFYGFAHVGYIPNTDGRVTGLSKLARLVDGFARRPQVQERLTTQVAEAIEATLQPRGVLVVVEAEHLCMAMRGVRKPGASTVTSAVRGVFRDDVSARMEAMQFVESGRRR

SEQ ID NO: 3773 - protein, 190 aa, Acidimicrobium ferrooxidans
  REGION 1..190: note = tr|C7M1S0|C7M1S0_ACIFD GTP cyclohydrolase 1; OS = Acidimicrobium ferrooxidans (strain DSM 10331 / JCM 15462 / NBRC 103882 / ICP) OX=525909 GN=Afer_1912 PE=3 SV=1
MSAPTNDDARAAVDTLLAWAEATLGATLADDVRTRTPERVVEALAELLGGYRAEPDDPVRFAPEQRAPVVLDEIRFASLCEHHLLPFTGTVSVEYLPGAGVLGLSAVVREIERHARRLQLQERLTQEIADAIAKAARARLVRVTVRAEHACIAIRGVRREGVIVTTQALAGREVGSPNALAELERGRPPR

SEQ ID NO: 3774 - protein, 212 aa, Acidiphilium cryptum
  REGION 1..212: note = tr|A5G1W9|A5G1W9_ACICJ GTP cyclohydrolase 1; OS = Acidiphilium cryptum (strain JF-5) OX=349163 GN=folE; PE = 3 SV=1
MDIRTPPDQLDTTLEDGRPSREDAEAAIRTLIRWAGDDADREGVRDTPARVARAYEDFFRGYGEDPEAILSRTFEETEGYDEMVLLRDIRVESHCEHHMVPIIGVAHVAYLPNRRVVGISKLARVVDAYARRLQIQEKLTAQIANTINEVLQPRGVAVVIEAGHECMSTRGVHKPGVSMVTSRMLGAFRDDPSTRREFLAMIQGRRCTGFET

SEQ ID NO: 3775 - protein, 212 aa, Acidiphilium multivorum; identical to SEQ ID NO: 3774
  REGION 1..212: note = tr|F0J4Y6|F0J4Y6_ACIMA GTP cyclohydrolase 1; OS = Acidiphilium multivorum (strain DSM 11245 / JCM 8867 / NBRC 100883 / AIU301) OX=926570 GN=folE PE=3 SV=1

SEQ ID NO: 3776 - protein, 212 aa, Acidiphilium rubrum
  REGION 1..212: note = tr|A0A1N6QIZ0|A0A1N6QIZ0_ACIRU GTP cyclohydrolase 1; OS = Acidiphilium rubrum OX=526 GN=folE PE=3 SV=1
MDIHTPLDHLDNAGHPDRPSRAEAEAAIRTLIQWAGDDPAREGLLDTPARVARSYEDFFRGYAEDPEAILTRTFEEIEGYDEMVILRDIRLESHCEHHMVPIIGVAHVAYLPNRRVVGISKLARVVDAYAKRLQIQEKLTAQIANTINEVLQPRGVAVVIEAGHECMSTRGVHKTGVAMVTSRMLGAFRDDPSTRREFLSMIQGRRCTGFES

SEQ ID NO: 3777 - protein, 212 aa, Acidiphilium sp.; identical to SEQ ID NO: 3776
  REGION 1..212: note = tr|A0A257UV46|A0A257UV46_9PROT GTP cyclohydrolase 1; OS = Acidiphilium sp. 37-64-53 OX=1970299 GN=folE PE=3 SV=1

SEQ ID NO: 3778 - protein, 212 aa, Acidiphilium sp.
  REGION 1..212: note = tr|A0A257S030|A0A257S030_9PROT GTP cyclohydrolase 1; OS = Acidiphilium sp. 21-66-27 OX=1970294 GN=folE PE=3 SV=1
MDIRTPPHQLDRTDHDDRPSREEAEAAIRTLIRWAGDDATREGVIDTPARVARAYEDFFRGYREDPEAILSRTFEETEGYDEMVLLRDIRVESHCEHHMVPIIGVAHVAYLPNRRVVGISKLARVVDAYARRLQIQEKLTAQIANTINEVLQPRGVAVVIEAGHECMSTRGVHKPGVSMVTSRMLGAFRDDASTRREFLAMIQGRRCTGFET

SEQ ID NO: 3779 - protein, 214 aa, unidentified
  source 1..214: note = Acidipila dinghuensis
  REGION 1..214: note = tr|A0A4Q1SEM1|A0A4Q1SEM1_9BACT GTP cyclohydrolase 1; OS = Acidipila dinghuensis OX=1560006 GN=folE PE=3 SV=1
MPTIKTAAKGAAKDLREEIAGQTGLEGISTQDIYRELLRRFDEDPTRDGLIRTPERVEKAMSFLTHGYHQDPTAILRGALFDVDYDEMVIVKDIEMFSLCEHHMLPFFGRVHVAYIPNGKVIGLSKIPRLVEVFARRLQVQERMTRQIAEAIDEAIKPQGVGVVIEARHLCMMMRGVEKQNSSTVTSAMLGVFQKQNTRNEFLSLVRERGQHSF
